United States Patent Application Publication US 2021/0272652 A1 - sequence listing, part 4

SEQ ID NO: 53440 - DNA, 120 bp, Homo sapiens
  misc_feature: 1591 for SV(W|O) and mtDNA
tttaccgagaaagctcacaagaactgctaactcatgcccccatgtctaacaacatggctttctcaacttttaaaggataacagctatccattggtcttaggccccaaaaattttggtgca

SEQ ID NO: 53441 - DNA, 120 bp, Homo sapiens
  misc_feature: 1591 for SV(W|O) and mtDNA
ttgctagggtggcgcttccaattaggtgcatgagtaggtggcctgcagtaatgttagcggttaggcgtacggccagggctattggttgaatgagtaggctgatggtttcgataataacta

SEQ ID NO: 53442 - DNA, 120 bp, Homo sapiens
  misc_feature: 1591 for SV(W|O) and mtDNA
ctgactatcctagaaatcgctgtcgccttaatccaagcctacgttttcacacttctagtaagcctctacctgcacgacaacacataatgacccaccaatcacatgcctatcatatagtaa

SEQ ID NO: 53443 - DNA, 120 bp, Homo sapiens
  misc_feature: 1591 for SV(W|O) and mtDNA
tgttgaggttgcggtctgttagtagtatagtgatgccagcagctaggactgggagagataggagaagtaggactgctgtgattaggacggatcagacgaagaggggcgtttggtattggg

SEQ ID NO: 53444 - DNA, 120 bp, Homo sapiens
  misc_feature: 1591 for SV(W|O) and mtDNA
tggtctgagctatgatatcaattggcttcctagggtttatcgtgtgagcacaccatatatttacagtaggaatagacgtagacacacgagcatatttcacctccgctaccataatcatcg

SEQ ID NO: 53445 - DNA, 120 bp, Homo sapiens
  misc_feature: 1591 for SV(W|O) and mtDNA
tgaaatgatctgctgcagtgctctgagccctaggattcatctttcttttcaccgtaggtggcctgactggcattgtattagcaaactcatcactagacatcgtactacacgacacgtact

SEQ ID NO: 53446 - DNA, 120 bp, Homo sapiens
  misc_feature: 1591 for SV(W|O) and mtDNA
ataatcacttgttccttaaatagggacctgtatgaatggctccacgagggttcagctgtctcttacttttaaccagtgaaattgacctgcccgtgaagaggcgggcataacacagcaaga

SEQ ID NO: 53447 - DNA, 120 bp, Homo sapiens
  misc_feature: 1591 for SV(W|O) and mtDNA
tatacttgaggagggtgacgggcggtgtgtacgcgcttcagggccctgttcaactaagcactctactctcagtttactgctaaatccaccttcgacccttaagtttcataagggctatcg

SEQ ID NO: 53448 - DNA, 120 bp, Homo sapiens
  misc_feature: 1591 for SV(W|O) and mtDNA
ccgttccagtgagttcaccctctaaatcaccacgatcaaaagggacaagcatcaagcacgcagcaatgcagctcaaaacgcttagcctagccacacccccacgggaaacagcagtgatta

SEQ ID NO: 53449 - DNA, 120 bp, Homo sapiens
  misc_feature: 1591 for SV(W|O) and mtDNA
gtagtacgatgtctagtgatgagtttgctaatacaatgccagtcaggccacctacggtgaaaagaaagatgaatcctagggctcagagcactgcagcagatcatttcatattgcttccgt

SEQ ID NO: 53450 - DNA, 120 bp, Homo sapiens
  misc_feature: 1591 for SV(W|O) and mtDNA
ggggtgtggctaggctaagcgttttgagctgcattgctgcgtgcttgatgcttgtcccttttgatcgtggtgatttagagggtgaactcactggaacggggatgcttgcatgtgtaatct

SEQ ID NO: 53451 - DNA, 120 bp, Homo sapiens
  misc_feature: 1591 for SV(W|O) and mtDNA
ggaatactagtatatcgctcacacctcatatcctccctactatgcctagaaggaataatactatcgctgttcattatagctactctcataaccctcaacacccactccctcttagccaat

SEQ ID NO: 53452 - DNA, 120 bp, Homo sapiens
  misc_feature: 1591 for SV(W|O) and mtDNA
aaaaaatgttgagccgtagatgccgtcggaaatggtgaagggagactcgaagtactctgaggcttgtaggagggtaaaatagagacccagtaaaattgtaataagcagtgcttgaattat

SEQ ID NO: 53453 - DNA, 120 bp, Homo sapiens
  misc_feature: 1591 for SV(W|O) and mtDNA
acccaaataaagtataggcgatagaaattgaaacctggcgcaatagatatagtaccgcaagggaaagatgaaaaattataaccaagcataatatagcaaggactaacccctataccttct

SEQ ID NO: 53454 - DNA, 120 bp, Homo sapiens
  misc_feature: 1591 for SV(W|O) and mtDNA
aaggatataattcctacgccctctcagccgatgaacagttggaataggttgttagcggtaactaagattagtatggtaattaggaagatgagtagatatttgaagaactgattaatgttt

SEQ ID NO: 53455 - DNA, 120 bp, Homo sapiens
  misc_feature: 1590 for SV(W|O) and mtDNA
tttggaaagtcatgtcagtggtagtaatataattgttgggacgattagttttagcattggagtaggtttaggttatgtacgtagtctaggccatatgtgttggagattgagactagtagg

SEQ ID NO: 53456 - DNA, 120 bp, Homo sapiens
  misc_feature: 1590 for SV(W|O) and mtDNA
ccttatgaaacttaagggtcgaaggtggatttagcagtaaactgagagtagagtgcttagttgaacagggccctgaagcgcgtacacaccgcccgtcaccctcctcaagtatacttcaaa

SEQ ID NO: 53457 - DNA, 120 bp, Homo sapiens
  misc_feature: 1590 for SV(W|O) and mtDNA
atacttcacaacaatcctaatcctaataccaactatctccctaattgaaaacaaaatactcaaatgggcctgtccttgtagtataaactaatacaccagtcttgtaaaccggagatgaaa

SEQ ID NO: 53458 - DNA, 120 bp, Homo sapiens
  misc_feature: 1590 for SV(W|O) and mtDNA
gattggtccaattgggtatgaggagttcagttatatgtttgggattttttaggtagtgggtgttgagcttgaacgctttcttaattggtggctgcttttaggcctactatgggtgttaaa

SEQ ID NO: 53459 - DNA, 120 bp, Homo sapiens
  misc_feature: 1590 for SV(W|O) and mtDNA
gtgggggtgtggctaggctaagcgttttgagctgcattgctgcgtgcttgatgcttgtcccttttgatcgtggtgatttagagggtgaactcactggaacggggatgcttgcatgtgtaa

SEQ ID NO: 53460 - DNA, 120 bp, Homo sapiens
  misc_feature: 1590 for SV(W|O) and mtDNA
atttaactatttatattatcctaactactaccgcattcctactactcaacttaaactccagcaccacgaccctactactatctcgcacctgaaacaagctaacatgactaacacccttaa

SEQ ID NO: 53461 - DNA, 120 bp, Homo sapiens
  misc_feature: 1590 for SV(W|O) and mtDNA
ctatctgcttcatccgccaactaatatttcactttacatccaaacatcactttggcttcgaagccgccgcctgatactggcattttgtagatgtggtttgactatttctgtatgtctcca

SEQ ID NO: 53462 - DNA, 120 bp, Homo sapiens
  misc_feature: 1590 for SV(W|O) and mtDNA
tatcacagtgagaattctatgatggaccatgtaacgaacaatgctacagggatgaatattatggagaagtagtctagtttgaagcttagggagagctgggttgtttgggttgtggctcag

SEQ ID NO: 53463 - DNA, 120 bp, Homo sapiens
  misc_feature: 1590 for SV(W|O) and mtDNA
gaaatgatctgctgcagtgctctgagccctaggattcatctttcttttcaccgtaggtggcctgactggcattgtattagcaaactcatcactagacatcgtactacacgacacgtacta

SEQ ID NO: 53464 - DNA, 120 bp, Homo sapiens
  misc_feature: 1590 for SV(W|O) and mtDNA
tacttgaggagggtgacgggcggtgtgtacgcgcttcagggccctgttcaactaagcactctactctcagtttactgctaaatccaccttcgacccttaagtttcataagggctatcgta

SEQ ID NO: 53465 - DNA, 120 bp, Homo sapiens
  misc_feature: 1590 for SV(W|O) and mtDNA
actcatttacaccaaccacccaactatctataaacctagccatggccatccccttatgagcgggcgcagtgattataggctttcgctctaagattaaaaatgccctagcccacttcttac

SEQ ID NO: 53466 - DNA, 120 bp, Homo sapiens
  misc_feature: 1590 for SV(W|O) and mtDNA
gattatggtagcggaggtgaaatatgctcgtgtgtctacgtctattcctactgtaaatatatggtgtgctcacacgataaaccctaggaagccaattgatatcatagctcagaccatacc

SEQ ID NO: 53467 - DNA, 120 bp, Homo sapiens
  misc_feature: 1590 for SV(W|O) and mtDNA
gaggagggtgacgggcggtgtgtacgcgcttcagggccctgttcaactaagcactctactctcagtttactgctaaatccaccttcgacccttaagtttcataagggctatcgtagtttt

SEQ ID NO: 53468 - DNA, 120 bp, Homo sapiens
  misc_feature: 1590 for SV(W|O) and mtDNA
cgaaaccatcagcctactcattcaaccaatagccctggccgtacgcctaaccgctaacattactgcaggccacctactcatgcacctaattggaagcgccaccctagcaatatcaaccat

SEQ ID NO: 53469 - DNA, 120 bp, Homo sapiens
  misc_feature: 1590 for SV(W|O) and mtDNA
aagcagccaccaattaagaaagcgttcaagctcaacacccactacctaaaaaatcccaaacatataactgaactcctcatacccaattggaccaatctatcaccctatagaagaactaat

SEQ ID NO: 53470 - DNA, 120 bp, Homo sapiens
  misc_feature: 1590 for SV(W|O) and mtDNA
aagccaattgatatcatagctcagaccatacctatgtatccaaatggttctttttttccggagtagtaagttacaatatgggagattattccgaagcctggtaggataagaatataaact

SEQ ID NO: 53471 - DNA, 120 bp, Homo sapiens
  misc_feature: 1590 for SV(W|O) and mtDNA
agttgagccaataatgacgtgaagtccgtggaagcctgtggctacaaaaaatgttgagccgtagatgccgtcggaaatggtgaagggagactcgaagtactctgaggcttgtaggagggt

SEQ ID NO: 53472 - DNA, 120 bp, Homo sapiens
  misc_feature: 1590 for SV(W|O) and mtDNA
aagaggaacagctctttggacactaggaaaaaaccttgtagagagagtaaaaaatttaacacccatagtaggcctaaaagcagccaccaattaagaaagcgttcaagctcaacacccact

SEQ ID NO: 53473 - DNA, 120 bp, Homo sapiens
  misc_feature: 1589 for SV(W|O) and mtDNA
acctgaatcggaggacaaccagtaagctacccttttaccatcattggacaagtagcatccgtactatacttcacaacaatcctaatcctaataccaactatctccctaattgaaaacaaa

SEQ ID NO: 53474 - DNA, 120 bp, Homo sapiens
  misc_feature: 1589 for SV(W|O) and mtDNA
tgactatcctagaaatcgctgtcgccttaatccaagcctacgttttcacacttctagtaagcctctacctgcacgacaacacataatgacccaccaatcacatgcctatcatatagtaaa

SEQ ID NO: 53475 - DNA, 120 bp, Homo sapiens
  misc_feature: 1589 for SV(W|O) and mtDNA
tgagccaataatgacgtgaagtccgtggaagcctgtggctacaaaaaatgttgagccgtagatgccgtcggaaatggtgaagggagactcgaagtactctgaggcttgtaggagggtaaa

SEQ ID NO: 53476 - DNA, 120 bp, Homo sapiens
  misc_feature: 1589 for SV(W|O) and mtDNA
ttaccgagaaagctcacaagaactgctaactcatgcccccatgtctaacaacatggctttctcaacttttaaaggataacagctatccattggtcttaggccccaaaaattttggtgcaa

SEQ ID NO: 53477 - DNA, 120 bp, Homo sapiens
  misc_feature: 1589 for SV(W|O) and mtDNA
agttgacacaaaatagactacgaaagtggctttaacatatctgaacacacaatagctaagacccaaactgggattagataccccactatgcttagccctaaacctcaacagttaaatcaa

SEQ ID NO: 53478 - DNA, 120 bp, Homo sapiens
  misc_feature: 1589 for SV(W|O) and mtDNA
ttcaagtcaactaggactcataatagttacaatcggcatcaaccaaccacacctagcattcctgcacatctgcacccacgccttcttcaaagccatactatttatgtgctccgggtccat

SEQ ID NO: 53479 - DNA, 120 bp, Homo sapiens
  misc_feature: 1589 for SV(W|O) and mtDNA
tcactatctgcttcatccgccaactaatatttcactttacatccaaacatcactttggcttcgaagccgccgcctgatactggcattttgtagatgtggtttgactatttctgtatgtct

SEQ ID NO: 53480 - DNA, 120 bp, Homo sapiens
  misc_feature: 1589 for SV(W|O) and mtDNA
tattcctagaagtgagatggtaaatgctagtataatatttatgtaaatgaggggcatttggtaaatatgattatcataatttaatgagtcgaaatcattcgttttgtttaaactatatac

SEQ ID NO: 53481 - DNA, 120 bp, Homo sapiens
  misc_feature: 1589 for SV(W|O) and mtDNA
tatatcacagtgagaattctatgatggaccatgtaacgaacaatgctacagggatgaatattatggagaagtagtctagtttgaagcttagggagagctgggttgtttgggttgtggctc

SEQ ID NO: 53482 - DNA, 120 bp, Homo sapiens
  misc_feature: 1589 for SV(W|O) and mtDNA
tagtgaaatggattttggcgtaggtttggtctagggtgtagcctgagaataggggaaatcagtgaatgaagcctcctatgatggcaaatacagctcctattgataggacatagtggaagt

SEQ ID NO: 53483 - DNA, 120 bp, Homo sapiens
  misc_feature: 1589 for SV(W|O) and mtDNA
agcataatatttcgcccactaagccaatcactttattgactcctagccgcagacctcctcattctaacctgaatcggaggacaaccagtaagctacccttttaccatcattggacaagta

SEQ ID NO: 53484 - DNA, 120 bp, Homo sapiens
  misc_feature: 1589 for SV(W|O) and mtDNA
actacaaggacaggcccatttgagtattttgttttcaattagggagatagttggtattaggattaggattgttgtgaagtatagtacggatgctacttgtccaatgatggtaaaagggta

SEQ ID NO: 53485 - DNA, 120 bp, Homo sapiens
  misc_feature: 1589 for SV(W|O) and mtDNA
gttgagccaataatgacgtgaagtccgtggaagcctgtggctacaaaaaatgttgagccgtagatgccgtcggaaatggtgaagggagactcgaagtactctgaggcttgtaggagggta

SEQ ID NO: 53486 - DNA, 120 bp, Homo sapiens
  misc_feature: 1589 for SV(W|O) and mtDNA
tacaaaaaatgttgagccgtagatgccgtcggaaatggtgaagggagactcgaagtactctgaggcttgtaggagggtaaaatagagacccagtaaaattgtaataagcagtgcttgaat

SEQ ID NO: 53487 - DNA, 120 bp, Homo sapiens
  misc_feature: 1589 for SV(W|O) and mtDNA
taattattacattttgactaccacaactcaacggctacatagaaaaatccaccccttacgagtgcggcttcgaccctatatcccccgcccgcgtccctttctccataaaattcttcttag

SEQ ID NO: 53488 - DNA, 120 bp, Homo sapiens
  misc_feature: 1589 for SV(W|O) and mtDNA
gttcttctatagggtgatagattggtccaattgggtatgaggagttcagttatatgtttgggattttttaggtagtgggtgttgagcttgaacgctttcttaattggtggctgcttttag

SEQ ID NO: 53489 - DNA, 120 bp, Homo sapiens
  misc_feature: 1589 for SV(W|O) and mtDNA
ggacttttcgctttgaagcgaaggcttctcaaatcatgaaaattattaatattactgctgttagagaaatgaatgagcctacagatgataggatgtttcatgtggtgtatgcatcggggt

SEQ ID NO: 53490 - DNA, 120 bp, Homo sapiens
  misc_feature: 1589 for SV(W|O) and mtDNA
gcgaagcagcggtgggcctagccctactagtctcaatctccaacacatatggcctagactacgtacataacctaaacctactccaatgctaaaactaatcgtcccaacaattatattact

SEQ ID NO: 53491 - DNA, 120 bp, Homo sapiens
  misc_feature: 1589 for SV(W|O) and mtDNA
aataatgacgtgaagtccgtggaagcctgtggctacaaaaaatgttgagccgtagatgccgtcggaaatggtgaagggagactcgaagtactctgaggcttgtaggagggtaaaatagag

SEQ ID NO: 53492 - DNA, 120 bp, Homo sapiens
  misc_feature: 1589 for SV(W|O) and mtDNA
ctactgactatcctagaaatcgctgtcgccttaatccaagcctacgttttcacacttctagtaagcctctacctgcacgacaacacataatgacccaccaatcacatgcctatcatatag

SEQ ID NO: 53493 - DNA, 120 bp, Homo sapiens
  misc_feature: 1589 for SV(W|O) and mtDNA
acttttcgctttgaagcgaaggcttctcaaatcatgaaaattattaatattactgctgttagagaaatgaatgagcctacagatgataggatgtttcatgtggtgtatgcatcggggtag

SEQ ID NO: 53494 - DNA, 120 bp, Homo sapiens
  misc_feature: 1589 for SV(W|O) and mtDNA
cctgcgttcaggcgttctggctggttgcctcatcgggtgatgatagccaaggtggggataagtgtggtttcgaagaagatataaaatatgattagttctgtggctgtgaatgttataatt

SEQ ID NO: 53495 - DNA, 120 bp, Homo sapiens
  misc_feature: 1589 for SV(W|O) and mtDNA
atttacagtccaatgcttcactcagccattttacctcacccccactgatgttcgccgaccgttgactattctctacaaaccacaaagacattggaacactatacctattattcggcgcat

SEQ ID NO: 53496 - DNA, 120 bp, Homo sapiens
  misc_feature: 1589 for SV(W|O) and mtDNA
atatatcacagtgagaattctatgatggaccatgtaacgaacaatgctacagggatgaatattatggagaagtagtctagtttgaagcttagggagagctgggttgtttgggttgtggct

SEQ ID NO: 53497 - DNA, 120 bp, Homo sapiens
  misc_feature: 1589 for SV(W|O) and mtDNA
actactcaacttaaactccagcaccacgaccctactactatctcgcacctgaaacaagctaacatgactaacacccttaattccatccaccctcctctccctaggaggcctgcccccgct

SEQ ID NO: 53498 - DNA, 120 bp, Homo sapiens
  misc_feature: 1588 for SV(W|O) and mtDNA
tgctagtataatatttatgtaaatgaggggcatttggtaaatatgattatcataatttaatgagtcgaaatcattcgttttgtttaaactatataccaattcggttcagtctaatccttt

SEQ ID NO: 53499 - DNA, 120 bp, Homo sapiens
  misc_feature: 1588 for SV(W|O) and mtDNA
ataatgacgtgaagtccgtggaagcctgtggctacaaaaaatgttgagccgtagatgccgtcggaaatggtgaagggagactcgaagtactctgaggcttgtaggagggtaaaatagaga

SEQ ID NO: 53500 - DNA, 120 bp, Homo sapiens
  misc_feature: 1588 for SV(W|O) and mtDNA
tatatatcacagtgagaattctatgatggaccatgtaacgaacaatgctacagggatgaatattatggagaagtagtctagtttgaagcttagggagagctgggttgtttgggttgtggc

SEQ ID NO: 53501 - DNA, 120 bp, Homo sapiens
  misc_feature: 1588 for SV(W|O) and mtDNA
gttcttcgaatgtgtggtagggtggggggcatccatatagtcactccaggtttatggagggttcttctactattaggacttttcgctttgaagcgaaggcttctcaaatcatgaaaatta

SEQ ID NO: 53502 - DNA, 120 bp, Homo sapiens
  misc_feature: 1588 for SV(W|O) and mtDNA
ggtaccacccaagtattgactcacccatcaacaaccgctatgtatttcgtacattactgccagccaccatgaatattgtacggtaccataaatacttgaccacctgtagtacataaaaac

SEQ ID NO: 53503 - DNA, 120 bp, Homo sapiens
  misc_feature: 1588 for SV(W|O) and mtDNA
gttgaggttgcggtctgttagtagtatagtgatgccagcagctaggactgggagagataggagaagtaggactgctgtgattaggacggatcagacgaagaggggcgtttggtattgggt

SEQ ID NO: 53504 - DNA, 120 bp, Homo sapiens
  misc_feature: 1588 for SV(W|O) and mtDNA
gttccagtgagttcaccctctaaatcaccacgatcaaaagggacaagcatcaagcacgcagcaatgcagctcaaaacgcttagcctagccacacccccacgggaaacagcagtgattaac

SEQ ID NO: 53505 - DNA, 120 bp, Homo sapiens
  misc_feature: 1588 for SV(W|O) and mtDNA
actcatcgcactaatttacactcacaacaccctaggctcactaaacattctactactcactctcactgcccaagaactatcaaactcctgagccaacaacttaatatgactagcttacac

SEQ ID NO: 53506 - DNA, 120 bp, Homo sapiens
  misc_feature: 1588 for SV(W|O) and mtDNA
gtcatgtcagtggtagtaatataattgttgggacgattagttttagcattggagtaggtttaggttatgtacgtagtctaggccatatgtgttggagattgagactagtagggctaggcc

SEQ ID NO: 53507 - DNA, 120 bp, Homo sapiens
  misc_feature: 1588 for SV(W|O) and mtDNA
aaatgatctgctgcagtgctctgagccctaggattcatctttcttttcaccgtaggtggcctgactggcattgtattagcaaactcatcactagacatcgtactacacgacacgtactac

SEQ ID NO: 53508 - DNA, 120 bp, Homo sapiens
  misc_feature: 1588 for SV(W|O) and mtDNA
aggagggtgacgggcggtgtgtacgcgcttcagggccctgttcaactaagcactctactctcagtttactgctaaatccaccttcgacccttaagtttcataagggctatcgtagttttc

SEQ ID NO: 53509 - DNA, 120 bp, Homo sapiens
  misc_feature: 1588 for SV(W|O) and mtDNA
atagtgaaatggattttggcgtaggtttggtctagggtgtagcctgagaataggggaaatcagtgaatgaagcctcctatgatggcaaatacagctcctattgataggacatagtggaag

SEQ ID NO: 53510 - DNA, 120 bp, Homo sapiens
  misc_feature: 1588 for SV(W|O) and mtDNA
aagtcaactaggactcataatagttacaatcggcatcaaccaaccacacctagcattcctgcacatctgcacccacgccttcttcaaagccatactatttatgtgctccgggtccatcat

SEQ ID NO: 53511 - DNA, 120 bp, Homo sapiens
  misc_feature: 1588 for SV(W|O) and mtDNA
agatatttgaagaactgattaatgtttgggtctgagtttatatatcacagtgagaattctatgatggaccatgtaacgaacaatgctacagggatgaatattatggagaagtagtctagt

SEQ ID NO: 53512 - DNA, 120 bp, Homo sapiens
  misc_feature: 1587 for SV(W|O) and mtDNA
tttacccaaataaagtataggcgatagaaattgaaacctggcgcaatagatatagtaccgcaagggaaagatgaaaaattataaccaagcataatatagcaaggactaacccctatacct

SEQ ID NO: 53513 - DNA, 120 bp, Homo sapiens
  misc_feature: 1587 for SV(W|O) and mtDNA
aacctgaatcggaggacaaccagtaagctacccttttaccatcattggacaagtagcatccgtactatacttcacaacaatcctaatcctaataccaactatctccctaattgaaaacaa

SEQ ID NO: 53514 - DNA, 120 bp, Homo sapiens
  misc_feature: 1587 for SV(W|O) and mtDNA
ttctgagtagagaaatgatccgtaatataggcctcgcccgatgtgtaggaagaggcagataaagaatattgaggcgccattggcgtgaaggtagcggatgattcagccataatttacgtc

SEQ ID NO: 53515 - DNA, 120 bp, Homo sapiens
  misc_feature: 1587 for SV(W|O) and mtDNA
ttctactattaggacttttcgctttgaagcgaaggcttctcaaatcatgaaaattattaatattactgctgttagagaaatgaatgagcctacagatgataggatgtttcatgtggtgta

SEQ ID NO: 53516 - DNA, 120 bp, Homo sapiens
  misc_feature: 1587 for SV(W|O) and mtDNA
aaagcagccaccaattaagaaagcgttcaagctcaacacccactacctaaaaaatcccaaacatataactgaactcctcatacccaattggaccaatctatcaccctatagaagaactaa

SEQ ID NO: 53517 - DNA, 120 bp, Homo sapiens
  misc_feature: 1587 for SV(W|O) and mtDNA
ctgctaactcatgcccccatgtctaacaacatggctttctcaacttttaaaggataacagctatccattggtcttaggccccaaaaattttggtgcaactccaaataaaagtaataacca

SEQ ID NO: 53518 - DNA, 120 bp, Homo sapiens
  misc_feature: 1587 for SV(W|O) and mtDNA
tgagttgtggtagtcaaaatgtaataattattagtagtaaggctaggagggtgttgattattaaaattaaggcgaagtttattactcttttttgaatgttgtcaaaactagttaattgga

SEQ ID NO: 53519 - DNA, 120 bp, Homo sapiens
  misc_feature: 1587 for SV(W|O) and mtDNA
tcattctaacctgaatcggaggacaaccagtaagctacccttttaccatcattggacaagtagcatccgtactatacttcacaacaatcctaatcctaataccaactatctccctaattg

SEQ ID NO: 53520 - DNA, 120 bp, Homo sapiens
  misc_feature: 1587 for SV(W|O) and mtDNA
attggctcaactttcctcactatctgcttcatccgccaactaatatttcactttacatccaaacatcactttggcttcgaagccgccgcctgatactggcattttgtagatgtggtttga

SEQ ID NO: 53521 - DNA, 120 bp, Homo sapiens
  misc_feature: 1587 for SV(W|O) and mtDNA
atttctaggcctactcaggtaaaaaatcagtgcgagcttagcgctgtgatgagtgtgcctgcaaagatggtagagtagatgacgggttgggccaggggattaattagtacgggaagggta

SEQ ID NO: 53522 - DNA, 120 bp, Homo sapiens
  misc_feature: 1587 for SV(W|O) and mtDNA
taatgacgtgaagtccgtggaagcctgtggctacaaaaaatgttgagccgtagatgccgtcggaaatggtgaagggagactcgaagtactctgaggcttgtaggagggtaaaatagagac

SEQ ID NO: 53523 - DNA, 120 bp, Homo sapiens
  misc_feature: 1587 for SV(W|O) and mtDNA
gtgttgaggttgcggtctgttagtagtatagtgatgccagcagctaggactgggagagataggagaagtaggactgctgtgattaggacggatcagacgaagaggggcgtttggtattgg

SEQ ID NO: 53524 - DNA, 120 bp, Homo sapiens
  misc_feature: 1587 for SV(W|O) and mtDNA
catttacaccaaccacccaactatctataaacctagccatggccatccccttatgagcgggcgcagtgattataggctttcgctctaagattaaaaatgccctagcccacttcttaccac

SEQ ID NO: 53525 - DNA, 120 bp, Homo sapiens
  misc_feature: 1587 for SV(W|O) and mtDNA
gtgagcacaccatatatttacagtaggaatagacgtagacacacgagcatatttcacctccgctaccataatcatcgctatccccaccggcgtcaaagtatttagctgactcgccacact

SEQ ID NO: 53526 - DNA, 120 bp, Homo sapiens
  misc_feature: 1587 for SV(W|O) and mtDNA
ggaaagtcatgtcagtggtagtaatataattgttgggacgattagttttagcattggagtaggtttaggttatgtacgtagtctaggccatatgtgttggagattgagactagtagggct

SEQ ID NO: 53527 - DNA, 120 bp, Homo sapiens
  misc_feature: 1587 for SV(W|O) and mtDNA
gatactagtataagagatcaggttcgtcctttagtgttgtgtatggttatcatttgttttgaggttagtttgattagtcattgttgggtggtgattagtcggttgttgatgagatatttg

SEQ ID NO: 53528 - DNA, 120 bp, Homo sapiens
  misc_feature: 1587 for SV(W|O) and mtDNA
ccgagaaagctcacaagaactgctaactcatgcccccatgtctaacaacatggctttctcaacttttaaaggataacagctatccattggtcttaggccccaaaaattttggtgcaactc

SEQ ID NO: 53529 - DNA, 120 bp, Homo sapiens
  misc_feature: 1587 for SV(W|O) and mtDNA
acattttttgtagccacaggcttccacggacttcacgtcattattggctcaactttcctcactatctgcttcatccgccaactaatatttcactttacatccaaacatcactttggcttc

SEQ ID NO: 53530 - DNA, 120 bp, Homo sapiens
  misc_feature: 1587 for SV(W|O) and mtDNA
cctgtatgaatggctccacgagggttcagctgtctcttacttttaaccagtgaaattgacctgcccgtgaagaggcgggcataacacagcaagacgagaagaccctatggagctttaatt

SEQ ID NO: 53531 - DNA, 120 bp, Homo sapiens
  misc_feature: 1587 for SV(W|O) and mtDNA
cagccacagaactaatcatattttatatcttcttcgaaaccacacttatccccaccttggctatcatcacccgatgaggcaaccagccagaacgcctgaacgcaggcacatacttcctat

SEQ ID NO: 53532 - DNA, 120 bp, Homo sapiens
  misc_feature: 1587 for SV(W|O) and mtDNA
agtgtaagttgggtgctttgtgttaagctacactctggttcgtccaagtgcactttccagtacacttaccatgttacgacttgtctcctctatataaatgcgtaggggttttagttaaat

SEQ ID NO: 53533 - DNA, 120 bp, Homo sapiens
  misc_feature: 1587 for SV(W|O) and mtDNA
atctccctaattgaaaacaaaatactcaaatgggcctgtccttgtagtataaactaatacaccagtcttgtaaaccggagatgaaaacctttttccaaggacaaatcagagaaaaagtct

SEQ ID NO: 53534 - DNA, 120 bp, Homo sapiens
  misc_feature: 1587 for SV(W|O) and mtDNA
agtatacttgaggagggtgacgggcggtgtgtacgcgcttcagggccctgttcaactaagcactctactctcagtttactgctaaatccaccttcgacccttaagtttcataagggctat

SEQ ID NO: 53535 - DNA, 120 bp, Homo sapiens
  misc_feature: 1587 for SV(W|O) and mtDNA
aaatcaccacgatcaaaagggacaagcatcaagcacgcagcaatgcagctcaaaacgcttagcctagccacacccccacgggaaacagcagtgattaacctttagcaataaacgaaagtt

SEQ ID NO: 53536 - DNA, 120 bp, Homo sapiens
  misc_feature: 1586 for SV(W|O) and mtDNA
ttatcctttaaaagttgagaaagccatgttgttagacatgggggcatgagttagcagttcttgtgagctttctcggtaaataaggggtcgtaagcctctgttgtcagattcacaatctga

SEQ ID NO: 53537 - DNA, 120 bp, Homo sapiens
  misc_feature: 1586 for SV(W|O) and mtDNA
taacctgaatcggaggacaaccagtaagctacccttttaccatcattggacaagtagcatccgtactatacttcacaacaatcctaatcctaataccaactatctccctaattgaaaaca

SEQ ID NO: 53538 - DNA, 120 bp, Homo sapiens
  misc_feature: 1586 for SV(W|O) and mtDNA
atagaatcttagttcaactttaaatttgcccacagaaccctctaaatccccttgtaaatttaactgttagtccaaagaggaacagctctttggacactaggaaaaaaccttgtagagaga

SEQ ID NO: 53539 - DNA, 120 bp, Homo sapiens
  misc_feature: 1586 for SV(W|O) and mtDNA
tattgctagggtggcgcttccaattaggtgcatgagtaggtggcctgcagtaatgttagcggttaggcgtacggccagggctattggttgaatgagtaggctgatggtttcgataataac

SEQ ID NO: 53540 - DNA, 120 bp, Homo sapiens
  misc_feature: 1586 for SV(W|O) and mtDNA
tatgatatcaattggcttcctagggtttatcgtgtgagcacaccatatatttacagtaggaatagacgtagacacacgagcatatttcacctccgctaccataatcatcgctatccccac

SEQ ID NO: 53541 - DNA, 120 bp, Homo sapiens
  misc_feature: 1586 for SV(W|O) and mtDNA
tatgaaatgatctgctgcagtgctctgagccctaggattcatctttcttttcaccgtaggtggcctgactggcattgtattagcaaactcatcactagacatcgtactacacgacacgta

SEQ ID NO: 53542 - DNA, 120 bp, Homo sapiens
  misc_feature: 1586 for SV(W|O) and mtDNA
tagtctttgccgcctgcgaagcagcggtgggcctagccctactagtctcaatctccaacacatatggcctagactacgtacataacctaaacctactccaatgctaaaactaatcgtccc

SEQ ID NO: 53543 - DNA, 120 bp, Homo sapiens
  misc_feature: 1586 for SV(W|O) and mtDNA
tagagaatagtcaacggtcggcgaacatcagtgggggtgaggtaaaatggctgagtgaagcattggactgtaaatctaaagacaggggttaggcctctttttaccagctccgaggtgatt

SEQ ID NO: 53544 - DNA, 120 bp, Homo sapiens
  misc_feature: 1586 for SV(W|O) and mtDNA
ctttgaagcgaaggcttctcaaatcatgaaaattattaatattactgctgttagagaaatgaatgagcctacagatgataggatgtttcatgtggtgtatgcatcggggtagtccgagta

SEQ ID NO: 53545 - DNA, 120 bp, Homo sapiens
  misc_feature: 1586 for SV(W|O) and mtDNA
tacattttgactaccacaactcaacggctacatagaaaaatccaccccttacgagtgcggcttcgaccctatatcccccgcccgcgtccctttctccataaaattcttcttagtagctat

SEQ ID NO: 53546 - DNA, 120 bp, Homo sapiens
  misc_feature: 1586 for SV(W|O) and mtDNA
cgtgggggtgtggctaggctaagcgttttgagctgcattgctgcgtgcttgatgcttgtcccttttgatcgtggtgatttagagggtgaactcactggaacggggatgcttgcatgtgta

SEQ ID NO: 53547 - DNA, 120 bp, Homo sapiens
  misc_feature: 1586 for SV(W|O) and mtDNA
taatcgtcccaacaattatattactaccactgacatgactttccaaaaaacacataatttgaatcaacacaaccacccacagcctaattattagcatcatccctctactattttttaacc

SEQ ID NO: 53548 - DNA, 120 bp, Homo sapiens
  misc_feature: 1586 for SV(W|O) and mtDNA
atcaccacgatcaaaagggacaagcatcaagcacgcagcaatgcagctcaaaacgcttagcctagccacacccccacgggaaacagcagtgattaacctttagcaataaacgaaagttta

SEQ ID NO: 53549 - DNA, 120 bp, Homo sapiens
  misc_feature: 1586 for SV(W|O) and mtDNA
agagacccagtaaaattgtaataagcagtgcttgaattatttggtttcggttgttttctattagactatggtgagctcaggtgattgatactcctgatgcgagtaatacggatgtgttta

SEQ ID NO: 53550 - DNA, 120 bp, Homo sapiens
  misc_feature: 1586 for SV(W|O) and mtDNA
gttgagttgtggtagtcaaaatgtaataattattagtagtaaggctaggagggtgttgattattaaaattaaggcgaagtttattactcttttttgaatgttgtcaaaactagttaattg

SEQ ID NO: 53551 - DNA, 120 bp, Homo sapiens
  misc_feature: 1586 for SV(W|O) and mtDNA
gtcatccctcttattaatcatcatcctagccctaagtctggcctatgagtgactacaaaaaggattagactgaaccgaattggtatatagtttaaacaaaacgaatgatttcgactcatt

SEQ ID NO: 53552 - DNA, 120 bp, Homo sapiens
  misc_feature: 1586 for SV(W|O) and mtDNA
aaccacacttatccccaccttggctatcatcacccgatgaggcaaccagccagaacgcctgaacgcaggcacatacttcctattctacaccctagtaggctcccttcccctactcatcgc

SEQ ID NO: 53553 - DNA, 120 bp, Homo sapiens
  misc_feature: 1586 for SV(W|O) and mtDNA
agcatgtttatttctaggcctactcaggtaaaaaatcagtgcgagcttagcgctgtgatgagtgtgcctgcaaagatggtagagtagatgacgggttgggccaggggattaattagtacg

SEQ ID NO: 53554 - DNA, 120 bp, Homo sapiens
  misc_feature: 1586 for SV(W|O) and mtDNA
atggtagcggaggtgaaatatgctcgtgtgtctacgtctattcctactgtaaatatatggtgtgctcacacgataaaccctaggaagccaattgatatcatagctcagaccatacctatg

SEQ ID NO: 53555 - DNA, 120 bp, Homo sapiens
  misc_feature: 1586 for SV(W|O) and mtDNA
attggtccaattgggtatgaggagttcagttatatgtttgggattttttaggtagtgggtgttgagcttgaacgctttcttaattggtggctgcttttaggcctactatgggtgttaaat

SEQ ID NO: 53556 - DNA, 120 bp, Homo sapiens
  misc_feature: 1585 for SV(W|O) and mtDNA
ttctaacctgaatcggaggacaaccagtaagctacccttttaccatcattggacaagtagcatccgtactatacttcacaacaatcctaatcctaataccaactatctccctaattgaaa

SEQ ID NO: 53557 - DNA, 120 bp, Homo sapiens
  misc_feature: 1585 for SV(W|O) and mtDNA
ttggctcaactttcctcactatctgcttcatccgccaactaatatttcactttacatccaaacatcactttggcttcgaagccgccgcctgatactggcattttgtagatgtggtttgac

SEQ ID NO: 53558 - DNA, 120 bp, Homo sapiens
  misc_feature: 1585 for SV(W|O) and mtDNA
ttgagttgtggtagtcaaaatgtaataattattagtagtaaggctaggagggtgttgattattaaaattaaggcgaagtttattactcttttttgaatgttgtcaaaactagttaattgg

SEQ ID NO: 53559 - DNA, 120 bp, Homo sapiens
  misc_feature: 1585 for SV(W|O) and mtDNA
ttctgtgggcaaatttaaagttgaactaagattctatcttggacaaccagctatcaccaggctcggtaggtttgtcgcctctacctataaatcttcccactattttgctacatagacggg

SEQ ID NO: 53560 - DNA, 120 bp, Homo sapiens
  misc_feature: 1585 for SV(W|O) and mtDNA
attctaacctgaatcggaggacaaccagtaagctacccttttaccatcattggacaagtagcatccgtactatacttcacaacaatcctaatcctaataccaactatctccctaattgaa

SEQ ID NO: 53561 - DNA, 120 bp, Homo sapiens
  misc_feature: 1585 for SV(W|O) and mtDNA
ttatcatcttcacaattctaattctactgactatcctagaaatcgctgtcgccttaatccaagcctacgttttcacacttctagtaagcctctacctgcacgacaacacataatgaccca

SEQ ID NO: 53562 - DNA, 120 bp, Homo sapiens
  misc_feature: 1585 for SV(W|O) and mtDNA
tgtgagcacaccatatatttacagtaggaatagacgtagacacacgagcatatttcacctccgctaccataatcatcgctatccccaccggcgtcaaagtatttagctgactcgccacac

SEQ ID NO: 53563 - DNA, 120 bp, Homo sapiens
  misc_feature: 1585 for SV(W|O) and mtDNA
tcgaaaccatcagcctactcattcaaccaatagccctggccgtacgcctaaccgctaacattactgcaggccacctactcatgcacctaattggaagcgccaccctagcaatatcaacca

SEQ ID NO: 53564 - DNA, 120 bp, Homo sapiens
  misc_feature: 1585 for SV(W|O) and mtDNA
tgaggttgcggtctgttagtagtatagtgatgccagcagctaggactgggagagataggagaagtaggactgctgtgattaggacggatcagacgaagaggggcgtttggtattgggtta

SEQ ID NO: 53565 - DNA, 120 bp, Homo sapiens
  misc_feature: 1585 for SV(W|O) and mtDNA
tctttgtggtttgtagagaatagtcaacggtcggcgaacatcagtgggggtgaggtaaaatggctgagtgaagcattggactgtaaatctaaagacaggggttaggcctctttttaccag

SEQ ID NO: 53566 - DNA, 120 bp, Homo sapiens
  misc_feature: 1585 for SV(W|O) and mtDNA
caataatgacgtgaagtccgtggaagcctgtggctacaaaaaatgttgagccgtagatgccgtcggaaatggtgaagggagactcgaagtactctgaggcttgtaggagggtaaaataga

SEQ ID NO: 53567 - DNA, 120 bp, Homo sapiens
  misc_feature: 1585 for SV(W|O) and mtDNA
gttgtaaaaaactccagttgacacaaaatagactacgaaagtggctttaacatatctgaacacacaatagctaagacccaaactgggattagataccccactatgcttagccctaaacct

SEQ ID NO: 53568 - DNA, 120 bp, Homo sapiens
  misc_feature: 1585 for SV(W|O) and mtDNA
gttattatctcgaactgacactgagccacaacccaaacaacccagctctccctaagcttcaaactagactacttctccataatattcatccctgtagcattgttcgttacatggtccatc

SEQ ID NO: 53569 - DNA, 120 bp, Homo sapiens
  misc_feature: 1585 for SV(W|O) and mtDNA
atgaaatgatctgctgcagtgctctgagccctaggattcatctttcttttcaccgtaggtggcctgactggcattgtattagcaaactcatcactagacatcgtactacacgacacgtac

SEQ ID NO: 53570 - DNA, 120 bp, Homo sapiens
  misc_feature: 1585 for SV(W|O) and mtDNA
gcattcctactactcaacttaaactccagcaccacgaccctactactatctcgcacctgaaacaagctaacatgactaacacccttaattccatccaccctcctctccctaggaggcctg

SEQ ID NO: 53571 - DNA, 120 bp, Homo sapiens
  misc_feature: 1585 for SV(W|O) and mtDNA
gcatgtttatttctaggcctactcaggtaaaaaatcagtgcgagcttagcgctgtgatgagtgtgcctgcaaagatggtagagtagatgacgggttgggccaggggattaattagtacgg

SEQ ID NO: 53572 - DNA, 120 bp, Homo sapiens
  misc_feature: 1585 for SV(W|O) and mtDNA
cttatgaaacttaagggtcgaaggtggatttagcagtaaactgagagtagagtgcttagttgaacagggccctgaagcgcgtacacaccgcccgtcaccctcctcaagtatacttcaaag

SEQ ID NO: 53573 - DNA, 120 bp, Homo sapiens
  misc_feature: 1585 for SV(W|O) and mtDNA
cttgaggagggtgacgggcggtgtgtacgcgcttcagggccctgttcaactaagcactctactctcagtttactgctaaatccaccttcgacccttaagtttcataagggctatcgtagt

SEQ ID NO: 53574 - DNA, 120 bp, Homo sapiens
  misc_feature: 1585 for SV(W|O) and mtDNA
cttaggtagctcgtctggtttcgggggtcttagctttggctctccttgcaaagttatttctagttaattcattatgcagaaggtataggggttagtccttgctatattatgcttggttat

SEQ ID NO: 53575 - DNA, 120 bp, Homo sapiens
  misc_feature: 1585 for SV(W|O) and mtDNA
cccgtgggggtgtggctaggctaagcgttttgagctgcattgctgcgtgcttgatgcttgtcccttttgatcgtggtgatttagagggtgaactcactggaacggggatgcttgcatgtg

SEQ ID NO: 53576 - DNA, 120 bp, Homo sapiens
  misc_feature: 1585 for SV(W|O) and mtDNA
acgtcattattggctcaactttcctcactatctgcttcatccgccaactaatatttcactttacatccaaacatcactttggcttcgaagccgccgcctgatactggcattttgtagatg

SEQ ID NO: 53577 - DNA, 120 bp, Homo sapiens
  misc_feature: 1585 for SV(W|O) and mtDNA
agccaattgatatcatagctcagaccatacctatgtatccaaatggttctttttttccggagtagtaagttacaatatgggagattattccgaagcctggtaggataagaatataaactt

SEQ ID NO: 53578 - DNA, 120 bp, Homo sapiens
  misc_feature: 1584 for SV(W|O) and mtDNA
tctaacctgaatcggaggacaaccagtaagctacccttttaccatcattggacaagtagcatccgtactatacttcacaacaatcctaatcctaataccaactatctccctaattgaaaa

SEQ ID NO: 53579 - DNA, 120 bp, Homo sapiens
  misc_feature: 1584 for SV(W|O) and mtDNA
tacgaccccttatttaccgagaaagctcacaagaactgctaactcatgcccccatgtctaacaacatggctttctcaacttttaaaggataacagctatccattggtcttaggccccaaa

SEQ ID NO: 53580 - DNA, 120 bp, Homo sapiens
  misc_feature: 1584 for SV(W|O) and mtDNA
atgcaagcatccccgttccagtgagttcaccctctaaatcaccacgatcaaaagggacaagcatcaagcacgcagcaatgcagctcaaaacgcttagcctagccacacccccacgggaaa

SEQ ID NO: 53581 - DNA, 120 bp, Homo sapiens
  misc_feature: 1584 for SV(W|O) and mtDNA
tttatcgtgtgagcacaccatatatttacagtaggaatagacgtagacacacgagcatatttcacctccgctaccataatcatcgctatccccaccggcgtcaaagtatttagctgactc

SEQ ID NO: 53582 - DNA, 120 bp, Homo sapiens
  misc_feature: 1584 for SV(W|O) and mtDNA
ttgagccaataatgacgtgaagtccgtggaagcctgtggctacaaaaaatgttgagccgtagatgccgtcggaaatggtgaagggagactcgaagtactctgaggcttgtaggagggtaa

SEQ ID NO: 53583 - DNA, 120 bp, Homo sapiens
  misc_feature: 1584 for SV(W|O) and mtDNA
tgtagccgttgagttgtggtagtcaaaatgtaataattattagtagtaaggctaggagggtgttgattattaaaattaaggcgaagtttattactcttttttgaatgttgtcaaaactag

SEQ ID NO: 53584 - DNA, 120 bp, Homo sapiens
  misc_feature: 1584 for SV(W|O) and mtDNA
aatcgtcccaacaattatattactaccactgacatgactttccaaaaaacacataatttgaatcaacacaaccacccacagcctaattattagcatcatccctctactattttttaacca

SEQ ID NO: 53585 - DNA, 120 bp, Homo sapiens
  misc_feature: 1584 for SV(W|O) and mtDNA
tgaagtatacttgaggagggtgacgggcggtgtgtacgcgcttcagggccctgttcaactaagcactctactctcagtttactgctaaatccaccttcgacccttaagtttcataagggc

SEQ ID NO: 53586 - DNA, 120 bp, Homo sapiens
  misc_feature: 1584 for SV(W|O) and mtDNA
tctgagtagagaaatgatccgtaatataggcctcgcccgatgtgtaggaagaggcagataaagaatattgaggcgccattggcgtgaaggtagcggatgattcagccataatttacgtct

SEQ ID NO: 53587 - DNA, 120 bp, Homo sapiens
  misc_feature: 1584 for SV(W|O) and mtDNA
ggcacagctctaagcctccttattcgagccgagctgggccagccaggcaaccttctaggtaacgaccacatctacaacgttatcgtcacagcccatgcatttgtaataatcttcttcata

SEQ ID NO: 53588 - DNA, 120 bp, Homo sapiens
  misc_feature: 1584 for SV(W|O) and mtDNA
agacgagctacctaagaacagctaaaagagcacacccgtctatgtagcaaaatagtgggaagatttataggtagaggcgacaaacctaccgagcctggtgatagctggttgtccaagata

SEQ ID NO: 53589 - DNA, 120 bp, Homo sapiens
  misc_feature: 1584 for SV(W|O) and mtDNA
aacagttaaatttacaaggggatttagagggttctgtgggcaaatttaaagttgaactaagattctatcttggacaaccagctatcaccaggctcggtaggtttgtcgcctctacctata

SEQ ID NO: 53590 - DNA, 120 bp, Homo sapiens
  misc_feature: 1584 for SV(W|O) and mtDNA
gaaaaaccatttcataactttgtcaaagttaaattataggctaaatcctatatatcttaatggcacatgcagcgcaagtaggtctacaagacgctacttcccctatcatagaagagctta

SEQ ID NO: 53591 - DNA, 120 bp, Homo sapiens
  misc_feature: 1584 for SV(W|O) and mtDNA
cttaatttaactatttatattatcctaactactaccgcattcctactactcaacttaaactccagcaccacgaccctactactatctcgcacctgaaacaagctaacatgactaacaccc

SEQ ID NO: 53592 - DNA, 120 bp, Homo sapiens
  misc_feature: 1584 for SV(W|O) and mtDNA
gaggttgcggtctgttagtagtatagtgatgccagcagctaggactgggagagataggagaagtaggactgctgtgattaggacggatcagacgaagaggggcgtttggtattgggttat

SEQ ID NO: 53593 - DNA, 120 bp, Homo sapiens
  misc_feature: 1584 for SV(W|O) and mtDNA
gaagtatacttgaggagggtgacgggcggtgtgtacgcgcttcagggccctgttcaactaagcactctactctcagtttactgctaaatccaccttcgacccttaagtttcataagggct

SEQ ID NO: 53594 - DNA, 120 bp, Homo sapiens
  misc_feature: 1584 for SV(W|O) and mtDNA
agcgaaggcttctcaaatcatgaaaattattaatattactgctgttagagaaatgaatgagcctacagatgataggatgtttcatgtggtgtatgcatcggggtagtccgagtaacgtcg

SEQ ID NO: 53595 - DNA, 120 bp, Homo sapiens
  misc_feature: 1584 for SV(W|O) and mtDNA
cccaaataaagtataggcgatagaaattgaaacctggcgcaatagatatagtaccgcaagggaaagatgaaaaattataaccaagcataatatagcaaggactaacccctataccttctg

SEQ ID NO: 53596 - DNA, 120 bp, Homo sapiens
  misc_feature: 1583 for SV(W|O) and mtDNA
cttgttcattgttaaggttgtggatgatggacccggagcacataaatagtatggctttgaagaaggcgtgggtgcagatgtgcaggaatgctaggtgtggttggttgatgccgattgtaa

SEQ ID NO: 53597 - DNA, 120 bp, Homo sapiens
  misc_feature: 1583 for SV(W|O) and mtDNA
aaggaacaagtgattatgctacctttgcacggttagggtaccgcggccgttaaacatgtgtcactgggcaggcggtgcctctaatactggtgatgctagaggtgatgtttttggtaaaca

SEQ ID NO: 53598 - DNA, 120 bp, Homo sapiens
  misc_feature: 1583 for SV(W|O) and mtDNA
tggatgtaaagtgaaatattagttggcggatgaagcagatagtgaggaaagttgagccaataatgacgtgaagtccgtggaagcctgtggctacaaaaaatgttgagccgtagatgccgt

SEQ ID NO: 53599 - DNA, 120 bp, Homo sapiens
  misc_feature: 1583 for SV(W|O) and mtDNA
caagtcaactaggactcataatagttacaatcggcatcaaccaaccacacctagcattcctgcacatctgcacccacgccttcttcaaagccatactatttatgtgctccgggtccatca

SEQ ID NO: 53600 - DNA, 120 bp, Homo sapiens
  misc_feature: 1583 for SV(W|O) and mtDNA
tgaatgaagcctcctatgatggcaaatacagctcctattgataggacatagtggaagtgggctacaacgtagtacgtgtcgtgtagtacgatgtctagtgatgagtttgctaatacaatg

SEQ ID NO: 53601 - DNA, 120 bp, Homo sapiens
  misc_feature: 1583 for SV(W|O) and mtDNA
tctcgaactgacactgagccacaacccaaacaacccagctctccctaagcttcaaactagactacttctccataatattcatccctgtagcattgttcgttacatggtccatcatagaat

SEQ ID NO: 53602 - DNA, 120 bp, Homo sapiens
  misc_feature: 1583 for SV(W|O) and mtDNA
gaaagtcatgtcagtggtagtaatataattgttgggacgattagttttagcattggagtaggtttaggttatgtacgtagtctaggccatatgtgttggagattgagactagtagggcta

SEQ ID NO: 53603 - DNA, 120 bp, Homo sapiens
  misc_feature: 1583 for SV(W|O) and mtDNA
tacaactcaggtgagttttagctttattggggagggggtgatctaaaacactctttacgccggcttctattgacttgggttaatcgtgtgaccgcggtggctggcacgaaattgaccaac

SEQ ID NO: 53604 - DNA, 120 bp, Homo sapiens
  misc_feature: 1583 for SV(W|O) and mtDNA
acgcatttatatagaggagacaagtcgtaacatggtaagtgtactggaaagtgcacttggacgaaccagagtgtagcttaacacaaagcacccaacttacacttaggagatttcaactta

SEQ ID NO: 53605 - DNA, 120 bp, Homo sapiens
  misc_feature: 1583 for SV(W|O) and mtDNA
gatggcggtatataggctgagcaagaggtggtgaggttgatcggggtttatcgattacagaacaggctcctctagagggatatgaagcaccgccaggtcctttgagttttaagctgtggc

SEQ ID NO: 53606 - DNA, 120 bp, Homo sapiens
  misc_feature: 1583 for SV(W|O) and mtDNA
ccaaataaagtataggcgatagaaattgaaacctggcgcaatagatatagtaccgcaagggaaagatgaaaaattataaccaagcataatatagcaaggactaacccctataccttctgc

SEQ ID NO: 53607 - DNA, 120 bp, Homo sapiens
  misc_feature: 1583 for SV(W|O) and mtDNA
acccaagtattgactcacccatcaacaaccgctatgtatttcgtacattactgccagccaccatgaatattgtacggtaccataaatacttgaccacctgtagtacataaaaacccaatc

SEQ ID NO: 53608 - DNA, 120 bp, Homo sapiens
  misc_feature: 1583 for SV(W|O) and mtDNA
ctgtatgaatggctccacgagggttcagctgtctcttacttttaaccagtgaaattgacctgcccgtgaagaggcgggcataacacagcaagacgagaagaccctatggagctttaattt

SEQ ID NO: 53609 - DNA, 120 bp, Homo sapiens
  misc_feature: 1583 for SV(W|O) and mtDNA
ctagtataatatttatgtaaatgaggggcatttggtaaatatgattatcataatttaatgagtcgaaatcattcgttttgtttaaactatataccaattcggttcagtctaatccttttt

SEQ ID NO: 53610 - DNA, 120 bp, Homo sapiens
  misc_feature: 1583 for SV(W|O) and mtDNA
cggtagaactgctattattcatcctatgtgggtaattgaggagtatgctaagattttgcgtagctgggtttggtttaatccacctcaactgcctgctatgatggataagattgagagagt

SEQ ID NO: 53611 - DNA, 120 bp, Homo sapiens
  misc_feature: 1583 for SV(W|O) and mtDNA
ccacagaactaatcatattttatatcttcttcgaaaccacacttatccccaccttggctatcatcacccgatgaggcaaccagccagaacgcctgaacgcaggcacatacttcctattct

SEQ ID NO: 53612 - DNA, 120 bp, Homo sapiens
  misc_feature: 1583 for SV(W|O) and mtDNA
cagtgctctgagccctaggattcatctttcttttcaccgtaggtggcctgactggcattgtattagcaaactcatcactagacatcgtactacacgacacgtactacgttgtagcccact

SEQ ID NO: 53613 - DNA, 120 bp, Homo sapiens
  misc_feature: 1583 for SV(W|O) and mtDNA
attgctagggtggcgcttccaattaggtgcatgagtaggtggcctgcagtaatgttagcggttaggcgtacggccagggctattggttgaatgagtaggctgatggtttcgataataact

SEQ ID NO: 53614 - DNA, 120 bp, Homo sapiens
  misc_feature: 1583 for SV(W|O) and mtDNA
agttatttctagttaattcattatgcagaaggtataggggttagtccttgctatattatgcttggttataatttttcatctttcccttgcggtactatatctattgcgccaggtttcaat

SEQ ID NO: 53615 - DNA, 120 bp, Homo sapiens
  misc_feature: 1583 for SV(W|O) and mtDNA
atatttgaagaactgattaatgtttgggtctgagtttatatatcacagtgagaattctatgatggaccatgtaacgaacaatgctacagggatgaatattatggagaagtagtctagttt

SEQ ID NO: 53616 - DNA, 120 bp, Homo sapiens
  misc_feature: 1583 for SV(W|O) and mtDNA
accgagaaagctcacaagaactgctaactcatgcccccatgtctaacaacatggctttctcaacttttaaaggataacagctatccattggtcttaggccccaaaaattttggtgcaact

SEQ ID NO: 53617 - DNA, 120 bp, Homo sapiens
  misc_feature: 1583 for SV(W|O) and mtDNA
agctgttcttaggtagctcgtctggtttcgggggtcttagctttggctctccttgcaaagttatttctagttaattcattatgcagaaggtataggggttagtccttgctatattatgct

SEQ ID NO: 53618 - DNA, 120 bp, Homo sapiens
  misc_feature: 1583 for SV(W|O) and mtDNA
acacatccgtattactcgcatcaggagtatcaatcacctgagctcaccatagtctaatagaaaacaaccgaaaccaaataattcaagcactgcttattacaattttactgggtctctatt

SEQ ID NO: 53619 - DNA, 120 bp, Homo sapiens
  misc_feature: 1582 for SV(W|O) and mtDNA
tacttcacaacaatcctaatcctaataccaactatctccctaattgaaaacaaaatactcaaatgggcctgtccttgtagtataaactaatacaccagtcttgtaaaccggagatgaaaa

SEQ ID NO: 53620 - DNA, 120 bp, Homo sapiens
  misc_feature: 1582 for SV(W|O) and mtDNA
tttctgagtagagaaatgatccgtaatataggcctcgcccgatgtgtaggaagaggcagataaagaatattgaggcgccattggcgtgaaggtagcggatgattcagccataatttacgt

SEQ ID NO: 53621 - DNA, 120 bp, Homo sapiens
  misc_feature: 1582 for SV(W|O) and mtDNA
ccgaataataggtatagtgttccaatgtctttgtggtttgtagagaatagtcaacggtcggcgaacatcagtgggggtgaggtaaaatggctgagtgaagcattggactgtaaatctaaa

SEQ ID NO: 53622 - DNA, 120 bp, Homo sapiens
  misc_feature: 1582 for SV(W|O) and mtDNA
tgtgatatataaactcagacccaaacattaatcagttcttcaaatatctactcatcttcctaattaccatactaatcttagttaccgctaacaacctattccaactgttcatcggctgag

SEQ ID NO: 53623 - DNA, 120 bp, Homo sapiens
  misc_feature: 1582 for SV(W|O) and mtDNA
acaaagcataatatttcgcccactaagccaatcactttattgactcctagccgcagacctcctcattctaacctgaatcggaggacaaccagtaagctacccttttaccatcattggaca

SEQ ID NO: 53624 - DNA, 120 bp, Homo sapiens
  misc_feature: 1582 for SV(W|O) and mtDNA
gagttcaccctctaaatcaccacgatcaaaagggacaagcatcaagcacgcagcaatgcagctcaaaacgcttagcctagccacacccccacgggaaacagcagtgattaacctttagca

SEQ ID NO: 53625 - DNA, 120 bp, Homo sapiens
  misc_feature: 1582 for SV(W|O) and mtDNA
tgagttcaccctctaaatcaccacgatcaaaagggacaagcatcaagcacgcagcaatgcagctcaaaacgcttagcctagccacacccccacgggaaacagcagtgattaacctttagc

SEQ ID NO: 53626 - DNA, 120 bp, Homo sapiens
  misc_feature: 1582 for SV(W|O) and mtDNA
atgtcatccctcttattaatcatcatcctagccctaagtctggcctatgagtgactacaaaaaggattagactgaaccgaattggtatatagtttaaacaaaacgaatgatttcgactca

SEQ ID NO: 53627 - DNA, 120 bp, Homo sapiens
  misc_feature: 1582 for SV(W|O) and mtDNA
tctactattaggacttttcgctttgaagcgaaggcttctcaaatcatgaaaattattaatattactgctgttagagaaatgaatgagcctacagatgataggatgtttcatgtggtgtat

SEQ ID NO: 53628 - DNA, 120 bp, Homo sapiens
  misc_feature: 1582 for SV(W|O) and mtDNA
tcgctttgaagcgaaggcttctcaaatcatgaaaattattaatattactgctgttagagaaatgaatgagcctacagatgataggatgtttcatgtggtgtatgcatcggggtagtccga

SEQ ID NO: 53629 - DNA, 120 bp, Homo sapiens
  misc_feature: 1582 for SV(W|O) and mtDNA
acgggaaacagcagtgattaacctttagcaataaacgaaagtttaactaagctatactaaccccagggttggtcaatttcgtgccagccaccgcggtcacacgattaacccaagtcaata

SEQ ID NO: 53630 - DNA, 120 bp, Homo sapiens
  misc_feature: 1582 for SV(W|O) and mtDNA
taggaagccaattgatatcatagctcagaccatacctatgtatccaaatggttctttttttccggagtagtaagttacaatatgggagattattccgaagcctggtaggataagaatata

SEQ ID NO: 53631 - DNA, 120 bp, Homo sapiens
  misc_feature: 1582 for SV(W|O) and mtDNA
atgtagccgttgagttgtggtagtcaaaatgtaataattattagtagtaaggctaggagggtgttgattattaaaattaaggcgaagtttattactcttttttgaatgttgtcaaaacta

SEQ ID NO: 53632 - DNA, 120 bp, Homo sapiens
  misc_feature: 1582 for SV(W|O) and mtDNA
ctactcaacttaaactccagcaccacgaccctactactatctcgcacctgaaacaagctaacatgactaacacccttaattccatccaccctcctctccctaggaggcctgcccccgcta

SEQ ID NO: 53633 - DNA, 120 bp, Homo sapiens
  misc_feature: 1582 for SV(W|O) and mtDNA
tagaatcttagttcaactttaaatttgcccacagaaccctctaaatccccttgtaaatttaactgttagtccaaagaggaacagctctttggacactaggaaaaaaccttgtagagagag

SEQ ID NO: 53634 - DNA, 120 bp, Homo sapiens
  misc_feature: 1582 for SV(W|O) and mtDNA
taccgagaaagctcacaagaactgctaactcatgcccccatgtctaacaacatggctttctcaacttttaaaggataacagctatccattggtcttaggccccaaaaattttggtgcaac

SEQ ID NO: 53635 - DNA, 120 bp, Homo sapiens
  misc_feature: 1582 for SV(W|O) and mtDNA
taaatcaccacgatcaaaagggacaagcatcaagcacgcagcaatgcagctcaaaacgcttagcctagccacacccccacgggaaacagcagtgattaacctttagcaataaacgaaagt

SEQ ID NO: 53636 - DNA, 120 bp, Homo sapiens
  misc_feature: 1582 for SV(W|O) and mtDNA
catactagtctttgccgcctgcgaagcagcggtgggcctagccctactagtctcaatctccaacacatatggcctagactacgtacataacctaaacctactccaatgctaaaactaatc

SEQ ID NO: 53637 - DNA, 120 bp, Homo sapiens
  misc_feature: 1582 for SV(W|O) and mtDNA
gataaaccctaggaagccaattgatatcatagctcagaccatacctatgtatccaaatggttctttttttccggagtagtaagttacaatatgggagattattccgaagcctggtaggat

SEQ ID NO: 53638 - DNA, 120 bp, Homo sapiens
  misc_feature: 1582 for SV(W|O) and mtDNA
cgaataataggtatagtgttccaatgtctttgtggtttgtagagaatagtcaacggtcggcgaacatcagtgggggtgaggtaaaatggctgagtgaagcattggactgtaaatctaaag

SEQ ID NO: 53639 - DNA, 120 bp, Homo sapiens
  misc_feature: 1582 for SV(W|O) and mtDNA
cttctactattaggacttttcgctttgaagcgaaggcttctcaaatcatgaaaattattaatattactgctgttagagaaatgaatgagcctacagatgataggatgtttcatgtggtgt

SEQ ID NO: 53640 - DNA, 120 bp, Homo sapiens
  misc_feature: 1582 for SV(W|O) and mtDNA
agttgtggtagtcaaaatgtaataattattagtagtaaggctaggagggtgttgattattaaaattaaggcgaagtttattactcttttttgaatgttgtcaaaactagttaattggaag

SEQ ID NO: 53641 - DNA, 120 bp, Homo sapiens
  misc_feature: 1582 for SV(W|O) and mtDNA
cgggttttcctcttgtaaatatagtttaaccaaaacatcagattgtgaatctgacaacagaggcttacgaccccttatttaccgagaaagctcacaagaactgctaactcatgcccccat

SEQ ID NO: 53642 - DNA, 120 bp, Homo sapiens
  misc_feature: 1582 for SV(W|O) and mtDNA
cccgttccagtgagttcaccctctaaatcaccacgatcaaaagggacaagcatcaagcacgcagcaatgcagctcaaaacgcttagcctagccacacccccacgggaaacagcagtgatt

SEQ ID NO: 53643 - DNA, 120 bp, Homo sapiens
  misc_feature: 1582 for SV(W|O) and mtDNA
ccccgttccagtgagttcaccctctaaatcaccacgatcaaaagggacaagcatcaagcacgcagcaatgcagctcaaaacgcttagcctagccacacccccacgggaaacagcagtgat

SEQ ID NO: 53644 - DNA, 120 bp, Homo sapiens
  misc_feature: 1582 for SV(W|O) and mtDNA
agatggcggtatataggctgagcaagaggtggtgaggttgatcggggtttatcgattacagaacaggctcctctagagggatatgaagcaccgccaggtcctttgagttttaagctgtgg

SEQ ID NO: 53645 - DNA, 120 bp, Homo sapiens
  misc_feature: 1582 for SV(W|O) and mtDNA
acaaaaaatgttgagccgtagatgccgtcggaaatggtgaagggagactcgaagtactctgaggcttgtaggagggtaaaatagagacccagtaaaattgtaataagcagtgcttgaatt

SEQ ID NO: 53646 - DNA, 120 bp, Homo sapiens
  misc_feature: 1581 for SV(W|O) and mtDNA
agcatgtactgctcggaggttgggttctgctccgaggtcgccccaaccgaaatttttaatgcaggtttggtagtttaggacctgtgggtttgttaggtactgtttgcattaataaattaa

SEQ ID NO: 53647 - DNA, 120 bp, Homo sapiens
  misc_feature: 1581 for SV(W|O) and mtDNA
tgttttttggaaagtcatgtcagtggtagtaatataattgttgggacgattagttttagcattggagtaggtttaggttatgtacgtagtctaggccatatgtgttggagattgagacta

SEQ ID NO: 53648 - DNA, 120 bp, Homo sapiens
  misc_feature: 1581 for SV(W|O) and mtDNA
actattaggacttttcgctttgaagcgaaggcttctcaaatcatgaaaattattaatattactgctgttagagaaatgaatgagcctacagatgataggatgtttcatgtggtgtatgca

SEQ ID NO: 53649 - DNA, 120 bp, Homo sapiens
  misc_feature: 1581 for SV(W|O) and mtDNA
gttttttggaaagtcatgtcagtggtagtaatataattgttgggacgattagttttagcattggagtaggtttaggttatgtacgtagtctaggccatatgtgttggagattgagactag

SEQ ID NO: 53650 - DNA, 120 bp, Homo sapiens
  misc_feature: 1581 for SV(W|O) and mtDNA
ggactaacagttaaatttacaaggggatttagagggttctgtgggcaaatttaaagttgaactaagattctatcttggacaaccagctatcaccaggctcggtaggtttgtcgcctctac

SEQ ID NO: 53651 - DNA, 120 bp, Homo sapiens
  misc_feature: 1581 for SV(W|O) and mtDNA
agtatatcgctcacacctcatatcctccctactatgcctagaaggaataatactatcgctgttcattatagctactctcataaccctcaacacccactccctcttagccaatattgtgcc

SEQ ID NO: 53652 - DNA, 120 bp, Homo sapiens
  misc_feature: 1581 for SV(W|O) and mtDNA
aataactttgcaaggagagccaaagctaagacccccgaaaccagacgagctacctaagaacagctaaaagagcacacccgtctatgtagcaaaatagtgggaagatttataggtagaggc

SEQ ID NO: 53653 - DNA, 120 bp, Homo sapiens
  misc_feature: 1581 for SV(W|O) and mtDNA
gccgttaaacatgtgtcactgggcaggcggtgcctctaatactggtgatgctagaggtgatgtttttggtaaacaggcggggtaagatttgccgagttccttttactttttttaaccttt

SEQ ID NO: 53654 - DNA, 120 bp, Homo sapiens
  misc_feature: 1581 for SV(W|O) and mtDNA
cgctaccataatcatcgctatccccaccggcgtcaaagtatttagctgactcgccacactccacggaagcaatatgaaatgatctgctgcagtgctctgagccctaggattcatctttct

SEQ ID NO: 53655 - DNA, 120 bp, Homo sapiens
  misc_feature: 1581 for SV(W|O) and mtDNA
cactaatttacactcacaacaccctaggctcactaaacattctactactcactctcactgcccaagaactatcaaactcctgagccaacaacttaatatgactagcttacacaatagctt

SEQ ID NO: 53656 - DNA, 120 bp, Homo sapiens
  misc_feature: 1580 for SV(W|O) and mtDNA
gactatcctagaaatcgctgtcgccttaatccaagcctacgttttcacacttctagtaagcctctacctgcacgacaacacataatgacccaccaatcacatgcctatcatatagtaaaa

SEQ ID NO: 53657 - DNA, 120 bp, Homo sapiens
  misc_feature: 1580 for SV(W|O) and mtDNA
tttcctcactatctgcttcatccgccaactaatatttcactttacatccaaacatcactttggcttcgaagccgccgcctgatactggcattttgtagatgtggtttgactatttctgta

SEQ ID NO: 53658 - DNA, 120 bp, Homo sapiens
  misc_feature: 1580 for SV(W|O) and mtDNA
cttactactaataattattacattttgactaccacaactcaacggctacatagaaaaatccaccccttacgagtgcggcttcgaccctatatcccccgcccgcgtccctttctccataaa

SEQ ID NO: 53659 - DNA, 120 bp, Homo sapiens
  misc_feature: 1580 for SV(W|O) and mtDNA
caaagcataatatttcgcccactaagccaatcactttattgactcctagccgcagacctcctcattctaacctgaatcggaggacaaccagtaagctacccttttaccatcattggacaa

SEQ ID NO: 53660 - DNA, 120 bp, Homo sapiens
  misc_feature: 1580 for SV(W|O) and mtDNA
ttcttaggtagctcgtctggtttcgggggtcttagctttggctctccttgcaaagttatttctagttaattcattatgcagaaggtataggggttagtccttgctatattatgcttggtt

SEQ ID NO: 53661 - DNA, 120 bp, Homo sapiens
  misc_feature: 1580 for SV(W|O) and mtDNA
ttcctcactatctgcttcatccgccaactaatatttcactttacatccaaacatcactttggcttcgaagccgccgcctgatactggcattttgtagatgtggtttgactatttctgtat

SEQ ID NO: 53662 - DNA, 120 bp, Homo sapiens
  misc_feature: 1580 for SV(W|O) and mtDNA
tggtagcggaggtgaaatatgctcgtgtgtctacgtctattcctactgtaaatatatggtgtgctcacacgataaaccctaggaagccaattgatatcatagctcagaccatacctatgt

SEQ ID NO: 53663 - DNA, 120 bp, Homo sapiens
  misc_feature: 1580 for SV(W|O) and mtDNA
accacccaagtattgactcacccatcaacaaccgctatgtatttcgtacattactgccagccaccatgaatattgtacggtaccataaatacttgaccacctgtagtacataaaaaccca

SEQ ID NO: 53664 - DNA, 120 bp, Homo sapiens
  misc_feature: 1580 for SV(W|O) and mtDNA
tgcgccgaataataggtatagtgttccaatgtctttgtggtttgtagagaatagtcaacggtcggcgaacatcagtgggggtgaggtaaaatggctgagtgaagcattggactgtaaatc

SEQ ID NO: 53665 - DNA, 120 bp, Homo sapiens
  misc_feature: 1580 for SV(W|O) and mtDNA
atatcacagtgagaattctatgatggaccatgtaacgaacaatgctacagggatgaatattatggagaagtagtctagtttgaagcttagggagagctgggttgtttgggttgtggctca

SEQ ID NO: 53666 - DNA, 120 bp, Homo sapiens
  misc_feature: 1580 for SV(W|O) and mtDNA
caattggcttcctagggtttatcgtgtgagcacaccatatatttacagtaggaatagacgtagacacacgagcatatttcacctccgctaccataatcatcgctatccccaccggcgtca

SEQ ID NO: 53667 - DNA, 120 bp, Homo sapiens
  misc_feature: 1580 for SV(W|O) and mtDNA
gggaaacagcagtgattaacctttagcaataaacgaaagtttaactaagctatactaaccccagggttggtcaatttcgtgccagccaccgcggtcacacgattaacccaagtcaataga

SEQ ID NO: 53668 - DNA, 120 bp, Homo sapiens
  misc_feature: 1580 for SV(W|O) and mtDNA
cgaatgtgtggtagggtggggggcatccatatagtcactccaggtttatggagggttcttctactattaggacttttcgctttgaagcgaaggcttctcaaatcatgaaaattattaata

SEQ ID NO: 53669 - DNA, 120 bp, Homo sapiens
  misc_feature: 1580 for SV(W|O) and mtDNA
tatgaatggctccacgagggttcagctgtctcttacttttaaccagtgaaattgacctgcccgtgaagaggcgggcataacacagcaagacgagaagaccctatggagctttaatttatt

SEQ ID NO: 53670 - DNA, 120 bp, Homo sapiens
  misc_feature: 1580 for SV(W|O) and mtDNA
gttggttatacccttcccgtactaattaatcccctggcccaacccgtcatctactctaccatctttgcaggcacactcatcacagcgctaagctcgcactgattttttacctgagtaggc

SEQ ID NO: 53671 - DNA, 120 bp, Homo sapiens
  misc_feature: 1580 for SV(W|O) and mtDNA
aaagaggaacagctctttggacactaggaaaaaaccttgtagagagagtaaaaaatttaacacccatagtaggcctaaaagcagccaccaattaagaaagcgttcaagctcaacacccac

SEQ ID NO: 53672 - DNA, 120 bp, Homo sapiens
  misc_feature: 1580 for SV(W|O) and mtDNA
gtatgtgcctgcgttcaggcgttctggctggttgcctcatcgggtgatgatagccaaggtggggataagtgtggtttcgaagaagatataaaatatgattagttctgtggctgtgaatgt

SEQ ID NO: 53673 - DNA, 120 bp, Homo sapiens
  misc_feature: 1580 for SV(W|O) and mtDNA
gtatacttgaggagggtgacgggcggtgtgtacgcgcttcagggccctgttcaactaagcactctactctcagtttactgctaaatccaccttcgacccttaagtttcataagggctatc

SEQ ID NO: 53674 - DNA, 120 bp, Homo sapiens
  misc_feature: 1580 for SV(W|O) and mtDNA
atgatatcaattggcttcctagggtttatcgtgtgagcacaccatatatttacagtaggaatagacgtagacacacgagcatatttcacctccgctaccataatcatcgctatccccacc

SEQ ID NO: 53675 - DNA, 120 bp, Homo sapiens
  misc_feature: 1580 for SV(W|O) and mtDNA
gcgttcaggcgttctggctggttgcctcatcgggtgatgatagccaaggtggggataagtgtggtttcgaagaagatataaaatatgattagttctgtggctgtgaatgttataattaag

SEQ ID NO: 53676 - DNA, 120 bp, Homo sapiens
  misc_feature: 1580 for SV(W|O) and mtDNA
aaggttaatggttgatattgctagggtggcgcttccaattaggtgcatgagtaggtggcctgcagtaatgttagcggttaggcgtacggccagggctattggttgaatgagtaggctgat

SEQ ID NO: 53677 - DNA, 120 bp, Homo sapiens
  misc_feature: 1580 for SV(W|O) and mtDNA
agaatcttagttcaactttaaatttgcccacagaaccctctaaatccccttgtaaatttaactgttagtccaaagaggaacagctctttggacactaggaaaaaaccttgtagagagagt

SEQ ID NO: 53678 - DNA, 120 bp, Homo sapiens
  misc_feature: 1580 for SV(W|O) and mtDNA
agaaaaaccatttcataactttgtcaaagttaaattataggctaaatcctatatatcttaatggcacatgcagcgcaagtaggtctacaagacgctacttcccctatcatagaagagctt

SEQ ID NO: 53679 - DNA, 120 bp, Homo sapiens
  misc_feature: 1579 for SV(W|O) and mtDNA
ggaagccaattgatatcatagctcagaccatacctatgtatccaaatggttctttttttccggagtagtaagttacaatatgggagattattccgaagcctggtaggataagaatataaa

SEQ ID NO: 53680 - DNA, 120 bp, Homo sapiens
  misc_feature: 1579 for SV(W|O) and mtDNA
ttggtagtattggttatggttcattgtccggagagtatattgttgaagaggatagctattagaaggattatggatgcggttgcttgcgtgaggaaatacttgatggcagcttctgtggaa

SEQ ID NO: 53681 - DNA, 120 bp, Homo sapiens
  misc_feature: 1579 for SV(W|O) and mtDNA
catgcaagcatccccgttccagtgagttcaccctctaaatcaccacgatcaaaagggacaagcatcaagcacgcagcaatgcagctcaaaacgcttagcctagccacacccccacgggaa

SEQ ID NO: 53682 - DNA, 120 bp, Homo sapiens
  misc_feature: 1579 for SV(W|O) and mtDNA
tggctatcatcacccgatgaggcaaccagccagaacgcctgaacgcaggcacatacttcctattctacaccctagtaggctcccttcccctactcatcgcactaatttacactcacaaca

SEQ ID NO: 53683 - DNA, 120 bp, Homo sapiens
  misc_feature: 1579 for SV(W|O) and mtDNA
ctcattcaaccaatagccctggccgtacgcctaaccgctaacattactgcaggccacctactcatgcacctaattggaagcgccaccctagcaatatcaaccattaaccttccctctaca

SEQ ID NO: 53684 - DNA, 120 bp, Homo sapiens
  misc_feature: 1579 for SV(W|O) and mtDNA
tcggaggctttggcaactgactagttcccctaataatcggtgcccccgatatggcgtttccccgcataaacaacataagcttctgactcttacctccctctctcctactcctgctcgcat

SEQ ID NO: 53685 - DNA, 120 bp, Homo sapiens
  misc_feature: 1579 for SV(W|O) and mtDNA
gttcaggcgttctggctggttgcctcatcgggtgatgatagccaaggtggggataagtgtggtttcgaagaagatataaaatatgattagttctgtggctgtgaatgttataattaagga

SEQ ID NO: 53686 - DNA, 120 bp, Homo sapiens
  misc_feature: 1579 for SV(W|O) and mtDNA
agaggaacagctctttggacactaggaaaaaaccttgtagagagagtaaaaaatttaacacccatagtaggcctaaaagcagccaccaattaagaaagcgttcaagctcaacacccacta

SEQ ID NO: 53687 - DNA, 120 bp, Homo sapiens
  misc_feature: 1579 for SV(W|O) and mtDNA
tagtataatatttatgtaaatgaggggcatttggtaaatatgattatcataatttaatgagtcgaaatcattcgttttgtttaaactatataccaattcggttcagtctaatcctttttg

SEQ ID NO: 53688 - DNA, 120 bp, Homo sapiens
  misc_feature: 1579 for SV(W|O) and mtDNA
tagggaagtcagggttagggtggttatagtagtgtgcatggttattacttttatttggagttgcaccaaaatttttggggcctaagaccaatggatagctgttatcctttaaaagttgag

SEQ ID NO: 53689 - DNA, 120 bp, Homo sapiens
  misc_feature: 1579 for SV(W|O) and mtDNA
tacaaggggatttagagggttctgtgggcaaatttaaagttgaactaagattctatcttggacaaccagctatcaccaggctcggtaggtttgtcgcctctacctataaatcttcccact

SEQ ID NO: 53690 - DNA, 120 bp, Homo sapiens
  misc_feature: 1579 for SV(W|O) and mtDNA
ctaacctgaatcggaggacaaccagtaagctacccttttaccatcattggacaagtagcatccgtactatacttcacaacaatcctaatcctaataccaactatctccctaattgaaaac

SEQ ID NO: 53691 - DNA, 120 bp, Homo sapiens
  misc_feature: 1579 for SV(W|O) and mtDNA
gtggcgcttccaattaggtgcatgagtaggtggcctgcagtaatgttagcggttaggcgtacggccagggctattggttgaatgagtaggctgatggtttcgataataactagtatgggg

SEQ ID NO: 53692 - DNA, 120 bp, Homo sapiens
  misc_feature: 1579 for SV(W|O) and mtDNA
ggatgtaaagtgaaatattagttggcggatgaagcagatagtgaggaaagttgagccaataatgacgtgaagtccgtggaagcctgtggctacaaaaaatgttgagccgtagatgccgtc

SEQ ID NO: 53693 - DNA, 120 bp, Homo sapiens
  misc_feature: 1579 for SV(W|O) and mtDNA
gccacagaactaatcatattttatatcttcttcgaaaccacacttatccccaccttggctatcatcacccgatgaggcaaccagccagaacgcctgaacgcaggcacatacttcctattc

SEQ ID NO: 53694 - DNA, 120 bp, Homo sapiens
  misc_feature: 1579 for SV(W|O) and mtDNA
gaaaccacacttatccccaccttggctatcatcacccgatgaggcaaccagccagaacgcctgaacgcaggcacatacttcctattctacaccctagtaggctcccttcccctactcatc

SEQ ID NO: 53695 - DNA, 120 bp, Homo sapiens
  misc_feature: 1579 for SV(W|O) and mtDNA
gatatttgaagaactgattaatgtttgggtctgagtttatatatcacagtgagaattctatgatggaccatgtaacgaacaatgctacagggatgaatattatggagaagtagtctagtt

SEQ ID NO: 53696 - DNA, 120 bp, Homo sapiens
  misc_feature: 1579 for SV(W|O) and mtDNA
accataatcatcgctatccccaccggcgtcaaagtatttagctgactcgccacactccacggaagcaatatgaaatgatctgctgcagtgctctgagccctaggattcatctttcttttc

SEQ ID NO: 53697 - DNA, 120 bp, Homo sapiens
  misc_feature: 1579 for SV(W|O) and mtDNA
cgggaaacagcagtgattaacctttagcaataaacgaaagtttaactaagctatactaaccccagggttggtcaatttcgtgccagccaccgcggtcacacgattaacccaagtcaatag

SEQ ID NO: 53698 - DNA, 120 bp, Homo sapiens
  misc_feature: 1579 for SV(W|O) and mtDNA
acttgaggagggtgacgggcggtgtgtacgcgcttcagggccctgttcaactaagcactctactctcagtttactgctaaatccaccttcgacccttaagtttcataagggctatcgtag

SEQ ID NO: 53699 - DNA, 120 bp, Homo sapiens
  misc_feature: 1579 for SV(W|O) and mtDNA
agcagccaccaattaagaaagcgttcaagctcaacacccactacctaaaaaatcccaaacatataactgaactcctcatacccaattggaccaatctatcaccctatagaagaactaatg

SEQ ID NO: 53700 - DNA, 120 bp, Homo sapiens
  misc_feature: 1579 for SV(W|O) and mtDNA
cacagccacagaactaatcatattttatatcttcttcgaaaccacacttatccccaccttggctatcatcacccgatgaggcaaccagccagaacgcctgaacgcaggcacatacttcct

SEQ ID NO: 53701 - DNA, 120 bp, Homo sapiens
  misc_feature: 1579 for SV(W|O) and mtDNA
aatcatggcaagccaacgccacttatccagtgaaccactatcacgaaaaaaactctacctctctatactaatctccctacaaatctccttaattataacattcacagccacagaactaat

SEQ ID NO: 53702 - DNA, 120 bp, Homo sapiens
  misc_feature: 1578 for SV(W|O) and mtDNA
ttatgaaacttaagggtcgaaggtggatttagcagtaaactgagagtagagtgcttagttgaacagggccctgaagcgcgtacacaccgcccgtcaccctcctcaagtatacttcaaagg

SEQ ID NO: 53703 - DNA, 120 bp, Homo sapiens
  misc_feature: 1578 for SV(W|O) and mtDNA
tcaccacgatcaaaagggacaagcatcaagcacgcagcaatgcagctcaaaacgcttagcctagccacacccccacgggaaacagcagtgattaacctttagcaataaacgaaagtttaa

SEQ ID NO: 53704 - DNA, 120 bp, Homo sapiens
  misc_feature: 1578 for SV(W|O) and mtDNA
cggaagcaatatgaaatgatctgctgcagtgctctgagccctaggattcatctttcttttcaccgtaggtggcctgactggcattgtattagcaaactcatcactagacatcgtactaca

SEQ ID NO: 53705 - DNA, 120 bp, Homo sapiens
  misc_feature: 1578 for SV(W|O) and mtDNA
tggggtatctaatcccagtttgggtcttagctattgtgtgttcagatatgttaaagccactttcgtagtctattttgtgtcaactggagttttttacaactcaggtgagttttagcttta

SEQ ID NO: 53706 - DNA, 120 bp, Homo sapiens
  misc_feature: 1578 for SV(W|O) and mtDNA
ccataatcatcgctatccccaccggcgtcaaagtatttagctgactcgccacactccacggaagcaatatgaaatgatctgctgcagtgctctgagccctaggattcatctttcttttca

SEQ ID NO: 53707 - DNA, 120 bp, Homo sapiens
  misc_feature: 1578 for SV(W|O) and mtDNA
tctttacgccggcttctattgacttgggttaatcgtgtgaccgcggtggctggcacgaaattgaccaaccctggggttagtatagcttagttaaactttcgtttattgctaaaggttaat

SEQ ID NO: 53708 - DNA, 120 bp, Homo sapiens
  misc_feature: 1578 for SV(W|O) and mtDNA
tcacagccacagaactaatcatattttatatcttcttcgaaaccacacttatccccaccttggctatcatcacccgatgaggcaaccagccagaacgcctgaacgcaggcacatacttcc

SEQ ID NO: 53709 - DNA, 120 bp, Homo sapiens
  misc_feature: 1578 for SV(W|O) and mtDNA
gccaataatgacgtgaagtccgtggaagcctgtggctacaaaaaatgttgagccgtagatgccgtcggaaatggtgaagggagactcgaagtactctgaggcttgtaggagggtaaaata

SEQ ID NO: 53710 - DNA, 120 bp, Homo sapiens
  misc_feature: 1578 for SV(W|O) and mtDNA
tatgtcatccctcttattaatcatcatcctagccctaagtctggcctatgagtgactacaaaaaggattagactgaaccgaattggtatatagtttaaacaaaacgaatgatttcgactc

SEQ ID NO: 53711 - DNA, 120 bp, Homo sapiens
  misc_feature: 1578 for SV(W|O) and mtDNA
tagttcttctatagggtgatagattggtccaattgggtatgaggagttcagttatatgtttgggattttttaggtagtgggtgttgagcttgaacgctttcttaattggtggctgctttt

SEQ ID NO: 53712 - DNA, 120 bp, Homo sapiens
  misc_feature: 1578 for SV(W|O) and mtDNA
gtagccacaggcttccacggacttcacgtcattattggctcaactttcctcactatctgcttcatccgccaactaatatttcactttacatccaaacatcactttggcttcgaagccgcc

SEQ ID NO: 53713 - DNA, 120 bp, Homo sapiens
  misc_feature: 1578 for SV(W|O) and mtDNA
ggttttcctcttgtaaatatagtttaaccaaaacatcagattgtgaatctgacaacagaggcttacgaccccttatttaccgagaaagctcacaagaactgctaactcatgcccccatgt

SEQ ID NO: 53714 - DNA, 120 bp, Homo sapiens
  misc_feature: 1578 for SV(W|O) and mtDNA
ggctgctgtgttggcatctgctcgggcgtatcatcaactgatgagcaagaaggatataattcctacgccctctcagccgatgaacagttggaataggttgttagcggtaactaagattag

SEQ ID NO: 53715 - DNA, 120 bp, Homo sapiens
  misc_feature: 1578 for SV(W|O) and mtDNA
gcacagctctaagcctccttattcgagccgagctgggccagccaggcaaccttctaggtaacgaccacatctacaacgttatcgtcacagcccatgcatttgtaataatcttcttcatag

SEQ ID NO: 53716 - DNA, 120 bp, Homo sapiens
  misc_feature: 1578 for SV(W|O) and mtDNA
gcaaatttaaagttgaactaagattctatcttggacaaccagctatcaccaggctcggtaggtttgtcgcctctacctataaatcttcccactattttgctacatagacgggtgtgctct

SEQ ID NO: 53717 - DNA, 120 bp, Homo sapiens
  misc_feature: 1578 for SV(W|O) and mtDNA
aggaacaagtgattatgctacctttgcacggttagggtaccgcggccgttaaacatgtgtcactgggcaggcggtgcctctaatactggtgatgctagaggtgatgtttttggtaaacag

SEQ ID NO: 53718 - DNA, 120 bp, Homo sapiens
  misc_feature: 1578 for SV(W|O) and mtDNA
agtgaaatggattttggcgtaggtttggtctagggtgtagcctgagaataggggaaatcagtgaatgaagcctcctatgatggcaaatacagctcctattgataggacatagtggaagtg

SEQ ID NO: 53719 - DNA, 120 bp, Homo sapiens
  misc_feature: 1578 for SV(W|O) and mtDNA
acattttgactaccacaactcaacggctacatagaaaaatccaccccttacgagtgcggcttcgaccctatatcccccgcccgcgtccctttctccataaaattcttcttagtagctatt

SEQ ID NO: 53720 - DNA, 120 bp, Homo sapiens
  misc_feature: 1578 for SV(W|O) and mtDNA
aataattcaagcactgcttattacaattttactgggtctctattttaccctcctacaagcctcagagtacttcgagtctcccttcaccatttccgacggcatctacggctcaacattttt

SEQ ID NO: 53721 - DNA, 120 bp, Homo sapiens
  misc_feature: 1577 for SV(W|O) and mtDNA
ttggaaagtcatgtcagtggtagtaatataattgttgggacgattagttttagcattggagtaggtttaggttatgtacgtagtctaggccatatgtgttggagattgagactagtaggg

SEQ ID NO: 53722 - DNA, 120 bp, Homo sapiens
  misc_feature: 1577 for SV(W|O) and mtDNA
ttgaagaactgattaatgtttgggtctgagtttatatatcacagtgagaattctatgatggaccatgtaacgaacaatgctacagggatgaatattatggagaagtagtctagtttgaag

SEQ ID NO: 53723 - DNA, 120 bp, Homo sapiens
  misc_feature: 1577 for SV(W|O) and mtDNA
ttaactatttatattatcctaactactaccgcattcctactactcaacttaaactccagcaccacgaccctactactatctcgcacctgaaacaagctaacatgactaacacccttaatt

SEQ ID NO: 53724 - DNA, 120 bp, Homo sapiens
  misc_feature: 1577 for SV(W|O) and mtDNA
tgttcattgttaaggttgtggatgatggacccggagcacataaatagtatggctttgaagaaggcgtgggtgcagatgtgcaggaatgctaggtgtggttggttgatgccgattgtaact

SEQ ID NO: 53725 - DNA, 120 bp, Homo sapiens
  misc_feature: 1577 for SV(W|O) and mtDNA
tgcaagcatccccgttccagtgagttcaccctctaaatcaccacgatcaaaagggacaagcatcaagcacgcagcaatgcagctcaaaacgcttagcctagccacacccccacgggaaac

SEQ ID NO: 53726 - DNA, 120 bp, Homo sapiens
  misc_feature: 1577 for SV(W|O) and mtDNA
tcaattggcttcctagggtttatcgtgtgagcacaccatatatttacagtaggaatagacgtagacacacgagcatatttcacctccgctaccataatcatcgctatccccaccggcgtc

SEQ ID NO: 53727 - DNA, 120 bp, Homo sapiens
  misc_feature: 1577 for SV(W|O) and mtDNA
tagttttctggggtagaaaatgtagcccatttcttgccacctcatgggctacaccttgacctaacgtctttacgtgggtacttgcgcttactttgtagccttcatcagggtttgctgaag

SEQ ID NO: 53728 - DNA, 120 bp, Homo sapiens
  misc_feature: 1577 for SV(W|O) and mtDNA
gaatcttagttcaactttaaatttgcccacagaaccctctaaatccccttgtaaatttaactgttagtccaaagaggaacagctctttggacactaggaaaaaaccttgtagagagagta

SEQ ID NO: 53729 - DNA, 120 bp, Homo sapiens
  misc_feature: 1577 for SV(W|O) and mtDNA
taccgggttttcctcttgtaaatatagtttaaccaaaacatcagattgtgaatctgacaacagaggcttacgaccccttatttaccgagaaagctcacaagaactgctaactcatgcccc

SEQ ID NO: 53730 - DNA, 120 bp, Homo sapiens
  misc_feature: 1577 for SV(W|O) and mtDNA
taccataatcatcgctatccccaccggcgtcaaagtatttagctgactcgccacactccacggaagcaatatgaaatgatctgctgcagtgctctgagccctaggattcatctttctttt

SEQ ID NO: 53731 - DNA, 120 bp, Homo sapiens
  misc_feature: 1577 for SV(W|O) and mtDNA
gtgtggctaggctaagcgttttgagctgcattgctgcgtgcttgatgcttgtcccttttgatcgtggtgatttagagggtgaactcactggaacggggatgcttgcatgtgtaatcttac

SEQ ID NO: 53732 - DNA, 120 bp, Homo sapiens
  misc_feature: 1577 for SV(W|O) and mtDNA
gggggtgaggtaaaatggctgagtgaagcattggactgtaaatctaaagacaggggttaggcctctttttaccagctccgaggtgattttcatattgaattgcaaattcgaagaagcagc

SEQ ID NO: 53733 - DNA, 120 bp, Homo sapiens
  misc_feature: 1577 for SV(W|O) and mtDNA
accgggttttcctcttgtaaatatagtttaaccaaaacatcagattgtgaatctgacaacagaggcttacgaccccttatttaccgagaaagctcacaagaactgctaactcatgccccc

SEQ ID NO: 53734 - DNA, 120 bp, Homo sapiens
  misc_feature: 1577 for SV(W|O) and mtDNA
acagtccaatgcttcactcagccattttacctcacccccactgatgttcgccgaccgttgactattctctacaaaccacaaagacattggaacactatacctattattcggcgcatgagc

SEQ ID NO: 53735 - DNA, 120 bp, Homo sapiens
  misc_feature: 1577 for SV(W|O) and mtDNA
acaacaaagcataatatttcgcccactaagccaatcactttattgactcctagccgcagacctcctcattctaacctgaatcggaggacaaccagtaagctacccttttaccatcattgg

SEQ ID NO: 53736 - DNA, 120 bp, Homo sapiens
  misc_feature: 1577 for SV(W|O) and mtDNA
cagtccaatgcttcactcagccattttacctcacccccactgatgttcgccgaccgttgactattctctacaaaccacaaagacattggaacactatacctattattcggcgcatgagct

SEQ ID NO: 53737 - DNA, 120 bp, Homo sapiens
  misc_feature: 1577 for SV(W|O) and mtDNA
acttatccccaccttggctatcatcacccgatgaggcaaccagccagaacgcctgaacgcaggcacatacttcctattctacaccctagtaggctcccttcccctactcatcgcactaat

SEQ ID NO: 53738 - DNA, 120 bp, Homo sapiens
  misc_feature: 1577 for SV(W|O) and mtDNA
acatccgtattactcgcatcaggagtatcaatcacctgagctcaccatagtctaatagaaaacaaccgaaaccaaataattcaagcactgcttattacaattttactgggtctctatttt

SEQ ID NO: 53739 - DNA, 120 bp, Homo sapiens
  misc_feature: 1576 for SV(W|O) and mtDNA
agctctttggacactaggaaaaaaccttgtagagagagtaaaaaatttaacacccatagtaggcctaaaagcagccaccaattaagaaagcgttcaagctcaacacccactacctaaaaa

SEQ ID NO: 53740 - DNA, 120 bp, Homo sapiens
  misc_feature: 1576 for SV(W|O) and mtDNA
tttttactctctctacaaggttttttcctagtgtccaaagagctgttcctctttggactaacagttaaatttacaaggggatttagagggttctgtgggcaaatttaaagttgaactaag

SEQ ID NO: 53741 - DNA, 120 bp, Homo sapiens
  misc_feature: 1576 for SV(W|O) and mtDNA
tactaataatcttatagaaatttaggttaaatacagaccaagagccttcaaagccctcagtaagttgcaatacttaatttctgtaacagctaaggactgcaaaaccccactctgcatcaa

SEQ ID NO: 53742 - DNA, 120 bp, Homo sapiens
  misc_feature: 1576 for SV(W|O) and mtDNA
aggaagccaattgatatcatagctcagaccatacctatgtatccaaatggttctttttttccggagtagtaagttacaatatgggagattattccgaagcctggtaggataagaatataa

SEQ ID NO: 53743 - DNA, 120 bp, Homo sapiens
  misc_feature: 1576 for SV(W|O) and mtDNA
gaaggttaatggttgatattgctagggtggcgcttccaattaggtgcatgagtaggtggcctgcagtaatgttagcggttaggcgtacggccagggctattggttgaatgagtaggctga

SEQ ID NO: 53744 - DNA, 120 bp, Homo sapiens
  misc_feature: 1576 for SV(W|O) and mtDNA
aaaatgattatgagggcgtgatcatgaaaggtgataagctcttctatgataggggaagtagcgtcttgtagacctacttgcgctgcatgtgccattaagatatataggatttagcctata

SEQ ID NO: 53745 - DNA, 120 bp, Homo sapiens
  misc_feature: 1576 for SV(W|O) and mtDNA
tatacctattattcggcgcatgagctggagtcctaggcacagctctaagcctccttattcgagccgagctgggccagccaggcaaccttctaggtaacgaccacatctacaacgttatcg

SEQ ID NO: 53746 - DNA, 120 bp, Homo sapiens
  misc_feature: 1576 for SV(W|O) and mtDNA
atttgatctagaaattgccctccttttacccctaccatgagccctacaaacaactaacctgccactaatagttatgtcatccctcttattaatcatcatcctagccctaagtctggccta

SEQ ID NO: 53747 - DNA, 120 bp, Homo sapiens
  misc_feature: 1576 for SV(W|O) and mtDNA
tactagtctttgccgcctgcgaagcagcggtgggcctagccctactagtctcaatctccaacacatatggcctagactacgtacataacctaaacctactccaatgctaaaactaatcgt

SEQ ID NO: 53748 - DNA, 120 bp, Homo sapiens
  misc_feature: 1576 for SV(W|O) and mtDNA
gtctgagctatgatatcaattggcttcctagggtttatcgtgtgagcacaccatatatttacagtaggaatagacgtagacacacgagcatatttcacctccgctaccataatcatcgct

SEQ ID NO: 53749 - DNA, 120 bp, Homo sapiens
  misc_feature: 1576 for SV(W|O) and mtDNA
gaagatggcggtatataggctgagcaagaggtggtgaggttgatcggggtttatcgattacagaacaggctcctctagagggatatgaagcaccgccaggtcctttgagttttaagctgt

SEQ ID NO: 53750 - DNA, 120 bp, Homo sapiens
  misc_feature: 1576 for SV(W|O) and mtDNA
ctacaaggacaggcccatttgagtattttgttttcaattagggagatagttggtattaggattaggattgttgtgaagtatagtacggatgctacttgtccaatgatggtaaaagggtag

SEQ ID NO: 53751 - DNA, 120 bp, Homo sapiens
  misc_feature: 1576 for SV(W|O) and mtDNA
cctgaagtttatattcttatcctaccaggcttcggaataatctcccatattgtaacttactactccggaaaaaaagaaccatttggatacataggtatggtctgagctatgatatcaatt

SEQ ID NO: 53752 - DNA, 120 bp, Homo sapiens
  misc_feature: 1576 for SV(W|O) and mtDNA
cacatccgtattactcgcatcaggagtatcaatcacctgagctcaccatagtctaatagaaaacaaccgaaaccaaataattcaagcactgcttattacaattttactgggtctctattt

SEQ ID NO: 53753 - DNA, 120 bp, Homo sapiens
  misc_feature: 1576 for SV(W|O) and mtDNA
aagatggcggtatataggctgagcaagaggtggtgaggttgatcggggtttatcgattacagaacaggctcctctagagggatatgaagcaccgccaggtcctttgagttttaagctgtg

SEQ ID NO: 53754 - DNA, 120 bp, Homo sapiens
  misc_feature: 1575 for SV(W|O) and mtDNA
agctcagaccatacctatgtatccaaatggttctttttttccggagtagtaagttacaatatgggagattattccgaagcctggtaggataagaatataaacttcagggtgaccgaaaaa

SEQ ID NO: 53755 - DNA, 120 bp, Homo sapiens
  misc_feature: 1575 for SV(W|O) and mtDNA
ttttgacaacattcaaaaaagagtaataaacttcgccttaattttaataatcaacaccctcctagccttactactaataattattacattttgactaccacaactcaacggctacataga

SEQ ID NO: 53756 - DNA, 120 bp, Homo sapiens
  misc_feature: 1575 for SV(W|O) and mtDNA
ttttattagggggttagttttgcgtattggggtcattggtgttcttgtagttgaaatacaacgatggtttttcatatcattggtcgtggttgtagtccgtgcgagaataatgatgtatgc

SEQ ID NO: 53757 - DNA, 120 bp, Homo sapiens
  misc_feature: 1575 for SV(W|O) and mtDNA
tttgcattaataaattaaagctccatagggtcttctcgtcttgctgtgttatgcccgcctcttcacgggcaggtcaatttcactggttaaaagtaagagacagctgaaccctcgtggagc

SEQ ID NO: 53758 - DNA, 120 bp, Homo sapiens
  misc_feature: 1575 for SV(W|O) and mtDNA
ttgttcattgttaaggttgtggatgatggacccggagcacataaatagtatggctttgaagaaggcgtgggtgcagatgtgcaggaatgctaggtgtggttggttgatgccgattgtaac

SEQ ID NO: 53759 - DNA, 120 bp, Homo sapiens
  misc_feature: 1575 for SV(W|O) and mtDNA
ttcgctttgaagcgaaggcttctcaaatcatgaaaattattaatattactgctgttagagaaatgaatgagcctacagatgataggatgtttcatgtggtgtatgcatcggggtagtccg

SEQ ID NO: 53760 - DNA, 120 bp, Homo sapiens
  misc_feature: 1575 for SV(W|O) and mtDNA
ttattagggggttagttttgcgtattggggtcattggtgttcttgtagttgaaatacaacgatggtttttcatatcattggtcgtggttgtagtccgtgcgagaataatgatgtatgctt

SEQ ID NO: 53761 - DNA, 120 bp, Homo sapiens
  misc_feature: 1575 for SV(W|O) and mtDNA
tggtgttgaggttgcggtctgttagtagtatagtgatgccagcagctaggactgggagagataggagaagtaggactgctgtgattaggacggatcagacgaagaggggcgtttggtatt

SEQ ID NO: 53762 - DNA, 120 bp, Homo sapiens
  misc_feature: 1575 for SV(W|O) and mtDNA
tactgactatcctagaaatcgctgtcgccttaatccaagcctacgttttcacacttctagtaagcctctacctgcacgacaacacataatgacccaccaatcacatgcctatcatatagt

SEQ ID NO: 53763 - DNA, 120 bp, Homo sapiens
  misc_feature: 1575 for SV(W|O) and mtDNA
tacgccggcttctattgacttgggttaatcgtgtgaccgcggtggctggcacgaaattgaccaaccctggggttagtatagcttagttaaactttcgtttattgctaaaggttaatcact

SEQ ID NO: 53764 - DNA, 120 bp, Homo sapiens
  misc_feature: 1575 for SV(W|O) and mtDNA
gttgtggtagtcaaaatgtaataattattagtagtaaggctaggagggtgttgattattaaaattaaggcgaagtttattactcttttttgaatgttgtcaaaactagttaattggaagt

SEQ ID NO: 53765 - DNA, 120 bp, Homo sapiens
  misc_feature: 1575 for SV(W|O) and mtDNA
gttctgtgggcaaatttaaagttgaactaagattctatcttggacaaccagctatcaccaggctcggtaggtttgtcgcctctacctataaatcttcccactattttgctacatagacgg

SEQ ID NO: 53766 - DNA, 120 bp, Homo sapiens
  misc_feature: 1575 for SV(W|O) and mtDNA
acagaactaatcatattttatatcttcttcgaaaccacacttatccccaccttggctatcatcacccgatgaggcaaccagccagaacgcctgaacgcaggcacatacttcctattctac

SEQ ID NO: 53767 - DNA, 120 bp, Homo sapiens
  misc_feature: 1575 for SV(W|O) and mtDNA
ggttcttcgaatgtgtggtagggtggggggcatccatatagtcactccaggtttatggagggttcttctactattaggacttttcgctttgaagcgaaggcttctcaaatcatgaaaatt

SEQ ID NO: 53768 - DNA, 120 bp, Homo sapiens
  misc_feature: 1575 for SV(W|O) and mtDNA
gggttttcctcttgtaaatatagtttaaccaaaacatcagattgtgaatctgacaacagaggcttacgaccccttatttaccgagaaagctcacaagaactgctaactcatgcccccatg

SEQ ID NO: 53769 - DNA, 120 bp, Homo sapiens
  misc_feature: 1575 for SV(W|O) and mtDNA
ctagtctttgccgcctgcgaagcagcggtgggcctagccctactagtctcaatctccaacacatatggcctagactacgtacataacctaaacctactccaatgctaaaactaatcgtcc

SEQ ID NO: 53770 - DNA, 120 bp, Homo sapiens
  misc_feature: 1575 for SV(W|O) and mtDNA
ggaattagggaagtcagggttagggtggttatagtagtgtgcatggttattacttttatttggagttgcaccaaaatttttggggcctaagaccaatggatagctgttatcctttaaaag

SEQ ID NO: 53771 - DNA, 120 bp, Homo sapiens
  misc_feature: 1575 for SV(W|O) and mtDNA
gcactaatttacactcacaacaccctaggctcactaaacattctactactcactctcactgcccaagaactatcaaactcctgagccaacaacttaatatgactagcttacacaatagct

SEQ ID NO: 53772 - DNA, 120 bp, Homo sapiens
  misc_feature: 1575 for SV(W|O) and mtDNA
ctgaagtttatattcttatcctaccaggcttcggaataatctcccatattgtaacttactactccggaaaaaaagaaccatttggatacataggtatggtctgagctatgatatcaattg

SEQ ID NO: 53773 - DNA, 120 bp, Homo sapiens
  misc_feature: 1575 for SV(W|O) and mtDNA
ccgtgggggtgtggctaggctaagcgttttgagctgcattgctgcgtgcttgatgcttgtcccttttgatcgtggtgatttagagggtgaactcactggaacggggatgcttgcatgtgt

SEQ ID NO: 53774 - DNA, 120 bp, Homo sapiens
  misc_feature: 1575 for SV(W|O) and mtDNA
agtataatatttatgtaaatgaggggcatttggtaaatatgattatcataatttaatgagtcgaaatcattcgttttgtttaaactatataccaattcggttcagtctaatcctttttgt

SEQ ID NO: 53775 - DNA, 120 bp, Homo sapiens
  misc_feature: 1575 for SV(W|O) and mtDNA
agggatgaatattatggagaagtagtctagtttgaagcttagggagagctgggttgtttgggttgtggctcagtgtcagttcgagataataacttcttggtctaggcacatgaatattgt

SEQ ID NO: 53776 - DNA, 120 bp, Homo sapiens
  misc_feature: 1574 for SV(W|O) and mtDNA
attggcttcctagggtttatcgtgtgagcacaccatatatttacagtaggaatagacgtagacacacgagcatatttcacctccgctaccataatcatcgctatccccaccggcgtcaaa

SEQ ID NO: 53777 - DNA, 120 bp, Homo sapiens
  misc_feature: 1574 for SV(W|O) and mtDNA
tttacgccggcttctattgacttgggttaatcgtgtgaccgcggtggctggcacgaaattgaccaaccctggggttagtatagcttagttaaactttcgtttattgctaaaggttaatca

SEQ ID NO: 53778 - DNA, 120 bp, Homo sapiens
  misc_feature: 1574 for SV(W|O) and mtDNA
gcataatcacttgttccttaaatagggacctgtatgaatggctccacgagggttcagctgtctcttacttttaaccagtgaaattgacctgcccgtgaagaggcgggcataacacagcaa

SEQ ID NO: 53779 - DNA, 120 bp, Homo sapiens
  misc_feature: 1574 for SV(W|O) and mtDNA
gccgaataataggtatagtgttccaatgtctttgtggtttgtagagaatagtcaacggtcggcgaacatcagtgggggtgaggtaaaatggctgagtgaagcattggactgtaaatctaa

SEQ ID NO: 53780 - DNA, 120 bp, Homo sapiens
  misc_feature: 1574 for SV(W|O) and mtDNA
tggaaagtcatgtcagtggtagtaatataattgttgggacgattagttttagcattggagtaggtttaggttatgtacgtagtctaggccatatgtgttggagattgagactagtagggc

SEQ ID NO: 53781 - DNA, 120 bp, Homo sapiens
  misc_feature: 1574 for SV(W|O) and mtDNA
ctgattaatgtttgggtctgagtttatatatcacagtgagaattctatgatggaccatgtaacgaacaatgctacagggatgaatattatggagaagtagtctagtttgaagcttaggga

SEQ ID NO: 53782 - DNA, 120 bp, Homo sapiens
  misc_feature: 1574 for SV(W|O) and mtDNA
ctgtgatatataaactcagacccaaacattaatcagttcttcaaatatctactcatcttcctaattaccatactaatcttagttaccgctaacaacctattccaactgttcatcggctga

SEQ ID NO: 53783 - DNA, 120 bp, Homo sapiens
  misc_feature: 1574 for SV(W|O) and mtDNA
cctaggaagccaattgatatcatagctcagaccatacctatgtatccaaatggttctttttttccggagtagtaagttacaatatgggagattattccgaagcctggtaggataagaata

SEQ ID NO: 53784 - DNA, 120 bp, Homo sapiens
  misc_feature: 1574 for SV(W|O) and mtDNA
acaaggggatttagagggttctgtgggcaaatttaaagttgaactaagattctatcttggacaaccagctatcaccaggctcggtaggtttgtcgcctctacctataaatcttcccacta

SEQ ID NO: 53785 - DNA, 120 bp, Homo sapiens
  misc_feature: 1574 for SV(W|O) and mtDNA
caaaaaatgttgagccgtagatgccgtcggaaatggtgaagggagactcgaagtactctgaggcttgtaggagggtaaaatagagacccagtaaaattgtaataagcagtgcttgaatta

SEQ ID NO: 53786 - DNA, 120 bp, Homo sapiens
  misc_feature: 1574 for SV(W|O) and mtDNA
gtttgcattaataaattaaagctccatagggtcttctcgtcttgctgtgttatgcccgcctcttcacgggcaggtcaatttcactggttaaaagtaagagacagctgaaccctcgtggag

SEQ ID NO: 53787 - DNA, 120 bp, Homo sapiens
  misc_feature: 1574 for SV(W|O) and mtDNA
gtatatcgctcacacctcatatcctccctactatgcctagaaggaataatactatcgctgttcattatagctactctcataaccctcaacacccactccctcttagccaatattgtgcct

SEQ ID NO: 53788 - DNA, 120 bp, Homo sapiens
  misc_feature: 1574 for SV(W|O) and mtDNA
ctttacgccggcttctattgacttgggttaatcgtgtgaccgcggtggctggcacgaaattgaccaaccctggggttagtatagcttagttaaactttcgtttattgctaaaggttaatc

SEQ ID NO: 53789 - DNA, 120 bp, Homo sapiens
  misc_feature: 1574 for SV(W|O) and mtDNA
attaatgtttgggtctgagtttatatatcacagtgagaattctatgatggaccatgtaacgaacaatgctacagggatgaatattatggagaagtagtctagtttgaagcttagggagag

SEQ ID NO: 53790 - DNA, 120 bp, Homo sapiens
  misc_feature: 1574 for SV(W|O) and mtDNA
attttattagggggttagttttgcgtattggggtcattggtgttcttgtagttgaaatacaacgatggtttttcatatcattggtcgtggttgtagtccgtgcgagaataatgatgtatg

SEQ ID NO: 53791 - DNA, 120 bp, Homo sapiens
  misc_feature: 1574 for SV(W|O) and mtDNA
acctgtatgaatggctccacgagggttcagctgtctcttacttttaaccagtgaaattgacctgcccgtgaagaggcgggcataacacagcaagacgagaagaccctatggagctttaat

SEQ ID NO: 53792 - DNA, 120 bp, Homo sapiens
  misc_feature: 1574 for SV(W|O) and mtDNA
atatgaaatgatctgctgcagtgctctgagccctaggattcatctttcttttcaccgtaggtggcctgactggcattgtattagcaaactcatcactagacatcgtactacacgacacgt

SEQ ID NO: 53793 - DNA, 120 bp, Homo sapiens
  misc_feature: 1574 for SV(W|O) and mtDNA
agccacagaactaatcatattttatatcttcttcgaaaccacacttatccccaccttggctatcatcacccgatgaggcaaccagccagaacgcctgaacgcaggcacatacttcctatt

SEQ ID NO: 53794 - DNA, 120 bp, Homo sapiens
  misc_feature: 1574 for SV(W|O) and mtDNA
actaatttacactcacaacaccctaggctcactaaacattctactactcactctcactgcccaagaactatcaaactcctgagccaacaacttaatatgactagcttacacaatagcttt

SEQ ID NO: 53795 - DNA, 120 bp, Homo sapiens
  misc_feature: 1573 for SV(W|O) and mtDNA
ttttttgtagccacaggcttccacggacttcacgtcattattggctcaactttcctcactatctgcttcatccgccaactaatatttcactttacatccaaacatcactttggcttcgaa

SEQ ID NO: 53796 - DNA, 120 bp, Homo sapiens
  misc_feature: 1573 for SV(W|O) and mtDNA
tttctggggtagaaaatgtagcccatttcttgccacctcatgggctacaccttgacctaacgtctttacgtgggtacttgcgcttactttgtagccttcatcagggtttgctgaagatgg

SEQ ID NO: 53797 - DNA, 120 bp, Homo sapiens
  misc_feature: 1573 for SV(W|O) and mtDNA
tttatatatcacagtgagaattctatgatggaccatgtaacgaacaatgctacagggatgaatattatggagaagtagtctagtttgaagcttagggagagctgggttgtttgggttgtg

SEQ ID NO: 53798 - DNA, 120 bp, Homo sapiens
  misc_feature: 1573 for SV(W|O) and mtDNA
tttactctctctacaaggttttttcctagtgtccaaagagctgttcctctttggactaacagttaaatttacaaggggatttagagggttctgtgggcaaatttaaagttgaactaagat

SEQ ID NO: 53799 - DNA, 120 bp, Homo sapiens
  misc_feature: 1573 for SV(W|O) and mtDNA
ttccttttactttttttaacctttccttatgagcatgcctgtgttgggttgacagtgagggtaataatgacttgttggttgattgtagatattgggctgttaattgtcagttcagtgttt

SEQ ID NO: 53800 - DNA, 120 bp, Homo sapiens
  misc_feature: 1573 for SV(W|O) and mtDNA
tgtcatccctcttattaatcatcatcctagccctaagtctggcctatgagtgactacaaaaaggattagactgaaccgaattggtatatagtttaaacaaaacgaatgatttcgactcat

SEQ ID NO: 53801 - DNA, 120 bp, Homo sapiens
  misc_feature: 1573 for SV(W|O) and mtDNA
tactcatcgcactaatttacactcacaacaccctaggctcactaaacattctactactcactctcactgcccaagaactatcaaactcctgagccaacaacttaatatgactagcttaca

SEQ ID NO: 53802 - DNA, 120 bp, Homo sapiens
  misc_feature: 1573 for SV(W|O) and mtDNA
tggttatacccttcccgtactaattaatcccctggcccaacccgtcatctactctaccatctttgcaggcacactcatcacagcgctaagctcgcactgattttttacctgagtaggcct

SEQ ID NO: 53803 - DNA, 120 bp, Homo sapiens
  misc_feature: 1573 for SV(W|O) and mtDNA
atactaataatcttatagaaatttaggttaaatacagaccaagagccttcaaagccctcagtaagttgcaatacttaatttctgtaacagctaaggactgcaaaaccccactctgcatca

SEQ ID NO: 53804 - DNA, 120 bp, Homo sapiens
  misc_feature: 1573 for SV(W|O) and mtDNA
tcgcactaatttacactcacaacaccctaggctcactaaacattctactactcactctcactgcccaagaactatcaaactcctgagccaacaacttaatatgactagcttacacaatag

SEQ ID NO: 53805 - DNA, 120 bp, Homo sapiens
  misc_feature: 1573 for SV(W|O) and mtDNA
tatcgctcacacctcatatcctccctactatgcctagaaggaataatactatcgctgttcattatagctactctcataaccctcaacacccactccctcttagccaatattgtgcctatt

SEQ ID NO: 53806 - DNA, 120 bp, Homo sapiens
  misc_feature: 1573 for SV(W|O) and mtDNA
ataaaccctaggaagccaattgatatcatagctcagaccatacctatgtatccaaatggttctttttttccggagtagtaagttacaatatgggagattattccgaagcctggtaggata

SEQ ID NO: 53807 - DNA, 120 bp, Homo sapiens
  misc_feature: 1573 for SV(W|O) and mtDNA
taagcatagtggggtatctaatcccagtttgggtcttagctattgtgtgttcagatatgttaaagccactttcgtagtctattttgtgtcaactggagttttttacaactcaggtgagtt

SEQ ID NO: 53808 - DNA, 120 bp, Homo sapiens
  misc_feature: 1573 for SV(W|O) and mtDNA
gaatcggaggacaaccagtaagctacccttttaccatcattggacaagtagcatccgtactatacttcacaacaatcctaatcctaataccaactatctccctaattgaaaacaaaatac

SEQ ID NO: 53809 - DNA, 120 bp, Homo sapiens
  misc_feature: 1573 for SV(W|O) and mtDNA
ggggtatctaatcccagtttgggtcttagctattgtgtgttcagatatgttaaagccactttcgtagtctattttgtgtcaactggagttttttacaactcaggtgagttttagctttat

SEQ ID NO: 53810 - DNA, 120 bp, Homo sapiens
  misc_feature: 1573 for SV(W|O) and mtDNA
gcagtgattaacctttagcaataaacgaaagtttaactaagctatactaaccccagggttggtcaatttcgtgccagccaccgcggtcacacgattaacccaagtcaatagaagccggcg

SEQ ID NO: 53811 - DNA, 120 bp, Homo sapiens
  misc_feature: 1573 for SV(W|O) and mtDNA
ctctttggacactaggaaaaaaccttgtagagagagtaaaaaatttaacacccatagtaggcctaaaagcagccaccaattaagaaagcgttcaagctcaacacccactacctaaaaaat

SEQ ID NO: 53812 - DNA, 120 bp, Homo sapiens
  misc_feature: 1573 for SV(W|O) and mtDNA
ctactattaggacttttcgctttgaagcgaaggcttctcaaatcatgaaaattattaatattactgctgttagagaaatgaatgagcctacagatgataggatgtttcatgtggtgtatg

SEQ ID NO: 53813 - DNA, 120 bp, Homo sapiens
  misc_feature: 1573 for SV(W|O) and mtDNA
ctaccataatcatcgctatccccaccggcgtcaaagtatttagctgactcgccacactccacggaagcaatatgaaatgatctgctgcagtgctctgagccctaggattcatctttcttt

SEQ ID NO: 53814 - DNA, 120 bp, Homo sapiens
  misc_feature: 1573 for SV(W|O) and mtDNA
cattttttgtagccacaggcttccacggacttcacgtcattattggctcaactttcctcactatctgcttcatccgccaactaatatttcactttacatccaaacatcactttggcttcg

SEQ ID NO: 53815 - DNA, 120 bp, Homo sapiens
  misc_feature: 1573 for SV(W|O) and mtDNA
catccccgttccagtgagttcaccctctaaatcaccacgatcaaaagggacaagcatcaagcacgcagcaatgcagctcaaaacgcttagcctagccacacccccacgggaaacagcagt

SEQ ID NO: 53816 - DNA, 120 bp, Homo sapiens
  misc_feature: 1573 for SV(W|O) and mtDNA
aatcaccacgatcaaaagggacaagcatcaagcacgcagcaatgcagctcaaaacgcttagcctagccacacccccacgggaaacagcagtgattaacctttagcaataaacgaaagttt

SEQ ID NO: 53817 - DNA, 120 bp, Homo sapiens
  misc_feature: 1572 for SV(W|O) and mtDNA
tttgacaacattcaaaaaagagtaataaacttcgccttaattttaataatcaacaccctcctagccttactactaataattattacattttgactaccacaactcaacggctacatagaa

SEQ ID NO: 53818 - DNA, 120 bp, Homo sapiens
  misc_feature: 1572 for SV(W|O) and mtDNA
ggctccacgagggttcagctgtctcttacttttaaccagtgaaattgacctgcccgtgaagaggcgggcataacacagcaagacgagaagaccctatggagctttaatttattaatgcaa

SEQ ID NO: 53819 - DNA, 120 bp, Homo sapiens
  misc_feature: 1572 for SV(W|O) and mtDNA
tgtttgcattaataaattaaagctccatagggtcttctcgtcttgctgtgttatgcccgcctcttcacgggcaggtcaatttcactggttaaaagtaagagacagctgaaccctcgtgga

SEQ ID NO: 53820 - DNA, 120 bp, Homo sapiens
  misc_feature: 1572 for SV(W|O) and mtDNA
tgttggatcaggacatcccgatggtgcagccgctattaaaggttcgtttgttcaacgattaaagtcctacgtgatctgagttcagaccggagtaatccaggtcggtttctatctacttca

SEQ ID NO: 53821 - DNA, 120 bp, Homo sapiens
  misc_feature: 1572 for SV(W|O) and mtDNA
tgtggctaggctaagcgttttgagctgcattgctgcgtgcttgatgcttgtcccttttgatcgtggtgatttagagggtgaactcactggaacggggatgcttgcatgtgtaatcttact

SEQ ID NO: 53822 - DNA, 120 bp, Homo sapiens
  misc_feature: 1572 for SV(W|O) and mtDNA
gtctttgtggtttgtagagaatagtcaacggtcggcgaacatcagtgggggtgaggtaaaatggctgagtgaagcattggactgtaaatctaaagacaggggttaggcctctttttacca

SEQ ID NO: 53823 - DNA, 120 bp, Homo sapiens
  misc_feature: 1572 for SV(W|O) and mtDNA
tgggcaaatttaaagttgaactaagattctatcttggacaaccagctatcaccaggctcggtaggtttgtcgcctctacctataaatcttcccactattttgctacatagacgggtgtgc

SEQ ID NO: 53824 - DNA, 120 bp, Homo sapiens
  misc_feature: 1572 for SV(W|O) and mtDNA
agcataatcacttgttccttaaatagggacctgtatgaatggctccacgagggttcagctgtctcttacttttaaccagtgaaattgacctgcccgtgaagaggcgggcataacacagca

SEQ ID NO: 53825 - DNA, 120 bp, Homo sapiens
  misc_feature: 1572 for SV(W|O) and mtDNA
tcatggcaagccaacgccacttatccagtgaaccactatcacgaaaaaaactctacctctctatactaatctccctacaaatctccttaattataacattcacagccacagaactaatca

SEQ ID NO: 53826 - DNA, 120 bp, Homo sapiens
  misc_feature: 1572 for SV(W|O) and mtDNA
tgatatataaactcagacccaaacattaatcagttcttcaaatatctactcatcttcctaattaccatactaatcttagttaccgctaacaacctattccaactgttcatcggctgagag

SEQ ID NO: 53827 - DNA, 120 bp, Homo sapiens
  misc_feature: 1572 for SV(W|O) and mtDNA
tgagcacaccatatatttacagtaggaatagacgtagacacacgagcatatttcacctccgctaccataatcatcgctatccccaccggcgtcaaagtatttagctgactcgccacactc

SEQ ID NO: 53828 - DNA, 120 bp, Homo sapiens
  misc_feature: 1572 for SV(W|O) and mtDNA
attaaggatactagtataagagatcaggttcgtcctttagtgttgtgtatggttatcatttgttttgaggttagtttgattagtcattgttgggtggtgattagtcggttgttgatgaga

SEQ ID NO: 53829 - DNA, 120 bp, Homo sapiens
  misc_feature: 1572 for SV(W|O) and mtDNA
cgataaaccctaggaagccaattgatatcatagctcagaccatacctatgtatccaaatggttctttttttccggagtagtaagttacaatatgggagattattccgaagcctggtagga

SEQ ID NO: 53830 - DNA, 120 bp, Homo sapiens
  misc_feature: 1572 for SV(W|O) and mtDNA
tccccgttccagtgagttcaccctctaaatcaccacgatcaaaagggacaagcatcaagcacgcagcaatgcagctcaaaacgcttagcctagccacacccccacgggaaacagcagtga

SEQ ID NO: 53831 - DNA, 120 bp, Homo sapiens
  misc_feature: 1572 for SV(W|O) and mtDNA
tatgtagccgttgagttgtggtagtcaaaatgtaataattattagtagtaaggctaggagggtgttgattattaaaattaaggcgaagtttattactcttttttgaatgttgtcaaaact

SEQ ID NO: 53832 - DNA, 120 bp, Homo sapiens
  misc_feature: 1572 for SV(W|O) and mtDNA
catccgtattactcgcatcaggagtatcaatcacctgagctcaccatagtctaatagaaaacaaccgaaaccaaataattcaagcactgcttattacaattttactgggtctctatttta

SEQ ID NO: 53833 - DNA, 120 bp, Homo sapiens
  misc_feature: 1572 for SV(W|O) and mtDNA
atggattttggcgtaggtttggtctagggtgtagcctgagaataggggaaatcagtgaatgaagcctcctatgatggcaaatacagctcctattgataggacatagtggaagtgggctac

SEQ ID NO: 53834 - DNA, 120 bp, Homo sapiens
  misc_feature: 1572 for SV(W|O) and mtDNA
attcctagaagtgagatggtaaatgctagtataatatttatgtaaatgaggggcatttggtaaatatgattatcataatttaatgagtcgaaatcattcgttttgtttaaactatatacc

SEQ ID NO: 53835 - DNA, 120 bp, Homo sapiens
  misc_feature: 1572 for SV(W|O) and mtDNA
atttacccaaataaagtataggcgatagaaattgaaacctggcgcaatagatatagtaccgcaagggaaagatgaaaaattataaccaagcataatatagcaaggactaacccctatacc

SEQ ID NO: 53836 - DNA, 120 bp, Homo sapiens
  misc_feature: 1572 for SV(W|O) and mtDNA
cccaagtattgactcacccatcaacaaccgctatgtatttcgtacattactgccagccaccatgaatattgtacggtaccataaatacttgaccacctgtagtacataaaaacccaatcc

SEQ ID NO: 53837 - DNA, 120 bp, Homo sapiens
  misc_feature: 1572 for SV(W|O) and mtDNA
gctagtataatatttatgtaaatgaggggcatttggtaaatatgattatcataatttaatgagtcgaaatcattcgttttgtttaaactatataccaattcggttcagtctaatcctttt

SEQ ID NO: 53838 - DNA, 120 bp, Homo sapiens
  misc_feature: 1572 for SV(W|O) and mtDNA
atatcaattggcttcctagggtttatcgtgtgagcacaccatatatttacagtaggaatagacgtagacacacgagcatatttcacctccgctaccataatcatcgctatccccaccggc

SEQ ID NO: 53839 - DNA, 120 bp, Homo sapiens
  misc_feature: 1572 for SV(W|O) and mtDNA
gaatgaagcctcctatgatggcaaatacagctcctattgataggacatagtggaagtgggctacaacgtagtacgtgtcgtgtagtacgatgtctagtgatgagtttgctaatacaatgc

SEQ ID NO: 53840 - DNA, 120 bp, Homo sapiens
  misc_feature: 1572 for SV(W|O) and mtDNA
caacattcaaaaaagagtaataaacttcgccttaattttaataatcaacaccctcctagccttactactaataattattacattttgactaccacaactcaacggctacatagaaaaatc

SEQ ID NO: 53841 - DNA, 120 bp, Homo sapiens
  misc_feature: 1572 for SV(W|O) and mtDNA
actagtctttgccgcctgcgaagcagcggtgggcctagccctactagtctcaatctccaacacatatggcctagactacgtacataacctaaacctactccaatgctaaaactaatcgtc

SEQ ID NO: 53842 - DNA, 120 bp, Homo sapiens
  misc_feature: 1572 for SV(W|O) and mtDNA
ccgttaaacatgtgtcactgggcaggcggtgcctctaatactggtgatgctagaggtgatgtttttggtaaacaggcggggtaagatttgccgagttccttttactttttttaacctttc

SEQ ID NO: 53843 - DNA, 120 bp, Homo sapiens
  misc_feature: 1572 for SV(W|O) and mtDNA
cttatccccaccttggctatcatcacccgatgaggcaaccagccagaacgcctgaacgcaggcacatacttcctattctacaccctagtaggctcccttcccctactcatcgcactaatt

SEQ ID NO: 53844 - DNA, 120 bp, Homo sapiens
  misc_feature: 1572 for SV(W|O) and mtDNA
catttatatagaggagacaagtcgtaacatggtaagtgtactggaaagtgcacttggacgaaccagagtgtagcttaacacaaagcacccaacttacacttaggagatttcaacttaact

SEQ ID NO: 53845 - DNA, 120 bp, Homo sapiens
  misc_feature: 1572 for SV(W|O) and mtDNA
atccccgttccagtgagttcaccctctaaatcaccacgatcaaaagggacaagcatcaagcacgcagcaatgcagctcaaaacgcttagcctagccacacccccacgggaaacagcagtg

SEQ ID NO: 53846 - DNA, 120 bp, Homo sapiens
  misc_feature: 1572 for SV(W|O) and mtDNA
aagcataatatttcgcccactaagccaatcactttattgactcctagccgcagacctcctcattctaacctgaatcggaggacaaccagtaagctacccttttaccatcattggacaagt

SEQ ID NO: 53847 - DNA, 120 bp, Homo sapiens
  misc_feature: 1571 for SV(W|O) and mtDNA
cagttaaatttacaaggggatttagagggttctgtgggcaaatttaaagttgaactaagattctatcttggacaaccagctatcaccaggctcggtaggtttgtcgcctctacctataaa

SEQ ID NO: 53848 - DNA, 120 bp, Homo sapiens
  misc_feature: 1571 for SV(W|O) and mtDNA
ttacaactcaggtgagttttagctttattggggagggggtgatctaaaacactctttacgccggcttctattgacttgggttaatcgtgtgaccgcggtggctggcacgaaattgaccaa

SEQ ID NO: 53849 - DNA, 120 bp, Homo sapiens
  misc_feature: 1571 for SV(W|O) and mtDNA
ttgccatactagtctttgccgcctgcgaagcagcggtgggcctagccctactagtctcaatctccaacacatatggcctagactacgtacataacctaaacctactccaatgctaaaact

SEQ ID NO: 53850 - DNA, 120 bp, Homo sapiens
  misc_feature: 1571 for SV(W|O) and mtDNA
attttttgtagccacaggcttccacggacttcacgtcattattggctcaactttcctcactatctgcttcatccgccaactaatatttcactttacatccaaacatcactttggcttcga

SEQ ID NO: 53851 - DNA, 120 bp, Homo sapiens
  misc_feature: 1571 for SV(W|O) and mtDNA
cattctaacctgaatcggaggacaaccagtaagctacccttttaccatcattggacaagtagcatccgtactatacttcacaacaatcctaatcctaataccaactatctccctaattga

SEQ ID NO: 53852 - DNA, 120 bp, Homo sapiens
  misc_feature: 1571 for SV(W|O) and mtDNA
tatcaattggcttcctagggtttatcgtgtgagcacaccatatatttacagtaggaatagacgtagacacacgagcatatttcacctccgctaccataatcatcgctatccccaccggcg

SEQ ID NO: 53853 - DNA, 120 bp, Homo sapiens
  misc_feature: 1571 for SV(W|O) and mtDNA
ggttatacccttcccgtactaattaatcccctggcccaacccgtcatctactctaccatctttgcaggcacactcatcacagcgctaagctcgcactgattttttacctgagtaggccta

SEQ ID NO: 53854 - DNA, 120 bp, Homo sapiens
  misc_feature: 1571 for SV(W|O) and mtDNA
aatggattttggcgtaggtttggtctagggtgtagcctgagaataggggaaatcagtgaatgaagcctcctatgatggcaaatacagctcctattgataggacatagtggaagtgggcta

SEQ ID NO: 53855 - DNA, 120 bp, Homo sapiens
  misc_feature: 1571 for SV(W|O) and mtDNA
actgactatcctagaaatcgctgtcgccttaatccaagcctacgttttcacacttctagtaagcctctacctgcacgacaacacataatgacccaccaatcacatgcctatcatatagta

SEQ ID NO: 53856 - DNA, 120 bp, Homo sapiens
  misc_feature: 1571 for SV(W|O) and mtDNA
ggtagcggaggtgaaatatgctcgtgtgtctacgtctattcctactgtaaatatatggtgtgctcacacgataaaccctaggaagccaattgatatcatagctcagaccatacctatgta

SEQ ID NO: 53857 - DNA, 120 bp, Homo sapiens
  misc_feature: 1571 for SV(W|O) and mtDNA
gaagcagcggtgggcctagccctactagtctcaatctccaacacatatggcctagactacgtacataacctaaacctactccaatgctaaaactaatcgtcccaacaattatattactac

SEQ ID NO: 53858 - DNA, 120 bp, Homo sapiens
  misc_feature: 1571 for SV(W|O) and mtDNA
gtaccacccaagtattgactcacccatcaacaaccgctatgtatttcgtacattactgccagccaccatgaatattgtacggtaccataaatacttgaccacctgtagtacataaaaacc

SEQ ID NO: 53859 - DNA, 120 bp, Homo sapiens
  misc_feature: 1571 for SV(W|O) and mtDNA
ggggtcgaagaaggtggtgttgaggttgcggtctgttagtagtatagtgatgccagcagctaggactgggagagataggagaagtaggactgctgtgattaggacggatcagacgaagag

SEQ ID NO: 53860 - DNA, 120 bp, Homo sapiens
  misc_feature: 1571 for SV(W|O) and mtDNA
gctaccataatcatcgctatccccaccggcgtcaaagtatttagctgactcgccacactccacggaagcaatatgaaatgatctgctgcagtgctctgagccctaggattcatctttctt

SEQ ID NO: 53861 - DNA, 120 bp, Homo sapiens
  misc_feature: 1571 for SV(W|O) and mtDNA
gctacagggatgaatattatggagaagtagtctagtttgaagcttagggagagctgggttgtttgggttgtggctcagtgtcagttcgagataataacttcttggtctaggcacatgaat

SEQ ID NO: 53862 - DNA, 120 bp, Homo sapiens
  misc_feature: 1571 for SV(W|O) and mtDNA
ccaataatgacgtgaagtccgtggaagcctgtggctacaaaaaatgttgagccgtagatgccgtcggaaatggtgaagggagactcgaagtactctgaggcttgtaggagggtaaaatag

SEQ ID NO: 53863 - DNA, 120 bp, Homo sapiens
  misc_feature: 1571 for SV(W|O) and mtDNA
aatgatctgctgcagtgctctgagccctaggattcatctttcttttcaccgtaggtggcctgactggcattgtattagcaaactcatcactagacatcgtactacacgacacgtactacg

SEQ ID NO: 53864 - DNA, 120 bp, Homo sapiens
  misc_feature: 1571 for SV(W|O) and mtDNA
agaattctatgatggaccatgtaacgaacaatgctacagggatgaatattatggagaagtagtctagtttgaagcttagggagagctgggttgtttgggttgtggctcagtgtcagttcg

SEQ ID NO: 53865 - DNA, 120 bp, Homo sapiens
  misc_feature: 1571 for SV(W|O) and mtDNA
aggatataattcctacgccctctcagccgatgaacagttggaataggttgttagcggtaactaagattagtatggtaattaggaagatgagtagatatttgaagaactgattaatgtttg

SEQ ID NO: 53866 - DNA, 120 bp, Homo sapiens
  misc_feature: 1571 for SV(W|O) and mtDNA
aataattattacattttgactaccacaactcaacggctacatagaaaaatccaccccttacgagtgcggcttcgaccctatatcccccgcccgcgtccctttctccataaaattcttctt

SEQ ID NO: 53867 - DNA, 120 bp, Homo sapiens
  misc_feature: 1570 for SV(W|O) and mtDNA
ttttgttgatttaactgttgaggtttagggctaagcatagtggggtatctaatcccagtttgggtcttagctattgtgtgttcagatatgttaaagccactttcgtagtctattttgtgt

SEQ ID NO: 53868 - DNA, 120 bp, Homo sapiens
  misc_feature: 1570 for SV(W|O) and mtDNA
ttcaggcgttctggctggttgcctcatcgggtgatgatagccaaggtggggataagtgtggtttcgaagaagatataaaatatgattagttctgtggctgtgaatgttataattaaggag

SEQ ID NO: 53869 - DNA, 120 bp, Homo sapiens
  misc_feature: 1570 for SV(W|O) and mtDNA
cgcatttatatagaggagacaagtcgtaacatggtaagtgtactggaaagtgcacttggacgaaccagagtgtagcttaacacaaagcacccaacttacacttaggagatttcaacttaa

SEQ ID NO: 53870 - DNA, 120 bp, Homo sapiens
  misc_feature: 1570 for SV(W|O) and mtDNA
ccaataacttgaccaacggaacaagttaccctagggataacagcgcaatcctattctagagtccatatcaacaatagggtttacgacctcgatgttggatcaggacatcccgatggtgca

SEQ ID NO: 53871 - DNA, 120 bp, Homo sapiens
  misc_feature: 1570 for SV(W|O) and mtDNA
tctagaaattgccctccttttacccctaccatgagccctacaaacaactaacctgccactaatagttatgtcatccctcttattaatcatcatcctagccctaagtctggcctatgagtg

SEQ ID NO: 53872 - DNA, 120 bp, Homo sapiens
  misc_feature: 1570 for SV(W|O) and mtDNA
ccatttacccaaataaagtataggcgatagaaattgaaacctggcgcaatagatatagtaccgcaagggaaagatgaaaaattataaccaagcataatatagcaaggactaacccctata

SEQ ID NO: 53873 - DNA, 120 bp, Homo sapiens
  misc_feature: 1570 for SV(W|O) and mtDNA
taatcacttgttccttaaatagggacctgtatgaatggctccacgagggttcagctgtctcttacttttaaccagtgaaattgacctgcccgtgaagaggcgggcataacacagcaagac

SEQ ID NO: 53874 - DNA, 120 bp, Homo sapiens
  misc_feature: 1570 for SV(W|O) and mtDNA
atattatcctaactactaccgcattcctactactcaacttaaactccagcaccacgaccctactactatctcgcacctgaaacaagctaacatgactaacacccttaattccatccaccc

SEQ ID NO: 53875 - DNA, 120 bp, Homo sapiens
  misc_feature: 1570 for SV(W|O) and mtDNA
cttatcatcttcacaattctaattctactgactatcctagaaatcgctgtcgccttaatccaagcctacgttttcacacttctagtaagcctctacctgcacgacaacacataatgaccc

SEQ ID NO: 53876 - DNA, 120 bp, Homo sapiens
  misc_feature: 1570 for SV(W|O) and mtDNA
gggacctgtatgaatggctccacgagggttcagctgtctcttacttttaaccagtgaaattgacctgcccgtgaagaggcgggcataacacagcaagacgagaagaccctatggagcttt

SEQ ID NO: 53877 - DNA, 120 bp, Homo sapiens
  misc_feature: 1570 for SV(W|O) and mtDNA
gagcacaccatatatttacagtaggaatagacgtagacacacgagcatatttcacctccgctaccataatcatcgctatccccaccggcgtcaaagtatttagctgactcgccacactcc

SEQ ID NO: 53878 - DNA, 120 bp, Homo sapiens
  misc_feature: 1570 for SV(W|O) and mtDNA
gaagttattatctcgaactgacactgagccacaacccaaacaacccagctctccctaagcttcaaactagactacttctccataatattcatccctgtagcattgttcgttacatggtcc

SEQ ID NO: 53879 - DNA, 120 bp, Homo sapiens
  misc_feature: 1570 for SV(W|O) and mtDNA
atcatggcaagccaacgccacttatccagtgaaccactatcacgaaaaaaactctacctctctatactaatctccctacaaatctccttaattataacattcacagccacagaactaatc

SEQ ID NO: 53880 - DNA, 120 bp, Homo sapiens
  misc_feature: 1570 for SV(W|O) and mtDNA
ctatacctattattcggcgcatgagctggagtcctaggcacagctctaagcctccttattcgagccgagctgggccagccaggcaaccttctaggtaacgaccacatctacaacgttatc

SEQ ID NO: 53881 - DNA, 120 bp, Homo sapiens
  misc_feature: 1570 for SV(W|O) and mtDNA
aaatagtaccgttaacttccaattaactagttttgacaacattcaaaaaagagtaataaacttcgccttaattttaataatcaacaccctcctagccttactactaataattattacatt

SEQ ID NO: 53882 - DNA, 120 bp, Homo sapiens
  misc_feature: 1569 for SV(W|O) and mtDNA
tttgaagaactgattaatgtttgggtctgagtttatatatcacagtgagaattctatgatggaccatgtaacgaacaatgctacagggatgaatattatggagaagtagtctagtttgaa

SEQ ID NO: 53883 - DNA, 120 bp, Homo sapiens
  misc_feature: 1569 for SV(W|O) and mtDNA
aatccatttcactatcatattcatcggcgtaaatctaactttcttcccacaacactttctcggcctatccggaatgccccgacgttactcggactaccccgatgcatacaccacatgaaa

SEQ ID NO: 53884 - DNA, 120 bp, Homo sapiens
  misc_feature: 1569 for SV(W|O) and mtDNA
aattggcttcctagggtttatcgtgtgagcacaccatatatttacagtaggaatagacgtagacacacgagcatatttcacctccgctaccataatcatcgctatccccaccggcgtcaa

SEQ ID NO: 53885 - DNA, 120 bp, Homo sapiens
  misc_feature: 1569 for SV(W|O) and mtDNA
ttcgaatgtgtggtagggtggggggcatccatatagtcactccaggtttatggagggttcttctactattaggacttttcgctttgaagcgaaggcttctcaaatcatgaaaattattaa

SEQ ID NO: 53886 - DNA, 120 bp, Homo sapiens
  misc_feature: 1569 for SV(W|O) and mtDNA
cacttatccccaccttggctatcatcacccgatgaggcaaccagccagaacgcctgaacgcaggcacatacttcctattctacaccctagtaggctcccttcccctactcatcgcactaa

SEQ ID NO: 53887 - DNA, 120 bp, Homo sapiens
  misc_feature: 1569 for SV(W|O) and mtDNA
ttaggtagctcgtctggtttcgggggtcttagctttggctctccttgcaaagttatttctagttaattcattatgcagaaggtataggggttagtccttgctatattatgcttggttata

SEQ ID NO: 53888 - DNA, 120 bp, Homo sapiens
  misc_feature: 1569 for SV(W|O) and mtDNA
tgtggtagtcaaaatgtaataattattagtagtaaggctaggagggtgttgattattaaaattaaggcgaagtttattactcttttttgaatgttgtcaaaactagttaattggaagtta

SEQ ID NO: 53889 - DNA, 120 bp, Homo sapiens
  misc_feature: 1569 for SV(W|O) and mtDNA
tgcagtgctctgagccctaggattcatctttcttttcaccgtaggtggcctgactggcattgtattagcaaactcatcactagacatcgtactacacgacacgtactacgttgtagccca

SEQ ID NO: 53890 - DNA, 120 bp, Homo sapiens
  misc_feature: 1569 for SV(W|O) and mtDNA
tgctaactcatgcccccatgtctaacaacatggctttctcaacttttaaaggataacagctatccattggtcttaggccccaaaaattttggtgcaactccaaataaaagtaataaccat

SEQ ID NO: 53891 - DNA, 120 bp, Homo sapiens
  misc_feature: 1569 for SV(W|O) and mtDNA
tcttaatttaactatttatattatcctaactactaccgcattcctactactcaacttaaactccagcaccacgaccctactactatctcgcacctgaaacaagctaacatgactaacacc

SEQ ID NO: 53892 - DNA, 120 bp, Homo sapiens
  misc_feature: 1569 for SV(W|O) and mtDNA
tatctccctaattgaaaacaaaatactcaaatgggcctgtccttgtagtataaactaatacaccagtcttgtaaaccggagatgaaaacctttttccaaggacaaatcagagaaaaagtc

SEQ ID NO: 53893 - DNA, 120 bp, Homo sapiens
  misc_feature: 1569 for SV(W|O) and mtDNA
cgccgaataataggtatagtgttccaatgtctttgtggtttgtagagaatagtcaacggtcggcgaacatcagtgggggtgaggtaaaatggctgagtgaagcattggactgtaaatcta

SEQ ID NO: 53894 - DNA, 120 bp, Homo sapiens
  misc_feature: 1569 for SV(W|O) and mtDNA
taatcatcgctatccccaccggcgtcaaagtatttagctgactcgccacactccacggaagcaatatgaaatgatctgctgcagtgctctgagccctaggattcatctttcttttcaccg

SEQ ID NO: 53895 - DNA, 120 bp, Homo sapiens
  misc_feature: 1569 for SV(W|O) and mtDNA
gttatacccttcccgtactaattaatcccctggcccaacccgtcatctactctaccatctttgcaggcacactcatcacagcgctaagctcgcactgattttttacctgagtaggcctag

SEQ ID NO: 53896 - DNA, 120 bp, Homo sapiens
  misc_feature: 1569 for SV(W|O) and mtDNA
gttaattaattttattagggggttagttttgcgtattggggtcattggtgttcttgtagttgaaatacaacgatggtttttcatatcattggtcgtggttgtagtccgtgcgagaataat

SEQ ID NO: 53897 - DNA, 120 bp, Homo sapiens
  misc_feature: 1569 for SV(W|O) and mtDNA
gcagtgctctgagccctaggattcatctttcttttcaccgtaggtggcctgactggcattgtattagcaaactcatcactagacatcgtactacacgacacgtactacgttgtagcccac

SEQ ID NO: 53898 - DNA, 120 bp, Homo sapiens
  misc_feature: 1569 for SV(W|O) and mtDNA
gtaaaatggctgagtgaagcattggactgtaaatctaaagacaggggttaggcctctttttaccagctccgaggtgattttcatattgaattgcaaattcgaagaagcagcttcaaacct

SEQ ID NO: 53899 - DNA, 120 bp, Homo sapiens
  misc_feature: 1569 for SV(W|O) and mtDNA
ggtctgagctatgatatcaattggcttcctagggtttatcgtgtgagcacaccatatatttacagtaggaatagacgtagacacacgagcatatttcacctccgctaccataatcatcgc

SEQ ID NO: 53900 - DNA, 120 bp, Homo sapiens
  misc_feature: 1569 for SV(W|O) and mtDNA
gggtcgaagaaggtggtgttgaggttgcggtctgttagtagtatagtgatgccagcagctaggactgggagagataggagaagtaggactgctgtgattaggacggatcagacgaagagg

SEQ ID NO: 53901 - DNA, 120 bp, Homo sapiens
  misc_feature: 1569 for SV(W|O) and mtDNA
aatgaagcctcctatgatggcaaatacagctcctattgataggacatagtggaagtgggctacaacgtagtacgtgtcgtgtagtacgatgtctagtgatgagtttgctaatacaatgcc

SEQ ID NO: 53902 - DNA, 120 bp, Homo sapiens
  misc_feature: 1569 for SV(W|O) and mtDNA
actggcattgtattagcaaactcatcactagacatcgtactacacgacacgtactacgttgtagcccacttccactatgtcctatcaataggagctgtatttgccatcataggaggcttc

SEQ ID NO: 53903 - DNA, 120 bp, Homo sapiens
  misc_feature: 1569 for SV(W|O) and mtDNA
ctgtgggcaaatttaaagttgaactaagattctatcttggacaaccagctatcaccaggctcggtaggtttgtcgcctctacctataaatcttcccactattttgctacatagacgggtg

SEQ ID NO: 53904 - DNA, 120 bp, Homo sapiens
  misc_feature: 1569 for SV(W|O) and mtDNA
ctaagcatagtggggtatctaatcccagtttgggtcttagctattgtgtgttcagatatgttaaagccactttcgtagtctattttgtgtcaactggagttttttacaactcaggtgagt

SEQ ID NO: 53905 - DNA, 120 bp, Homo sapiens
  misc_feature: 1569 for SV(W|O) and mtDNA
cgctttcttaattggtggctgcttttaggcctactatgggtgttaaattttttactctctctacaaggttttttcctagtgtccaaagagctgttcctctttggactaacagttaaattt

SEQ ID NO: 53906 - DNA, 120 bp, Homo sapiens
  misc_feature: 1569 for SV(W|O) and mtDNA
cctcactatctgcttcatccgccaactaatatttcactttacatccaaacatcactttggcttcgaagccgccgcctgatactggcattttgtagatgtggtttgactatttctgtatgt

SEQ ID NO: 53907 - DNA, 120 bp, Homo sapiens
  misc_feature: 1569 for SV(W|O) and mtDNA
caaggggatttagagggttctgtgggcaaatttaaagttgaactaagattctatcttggacaaccagctatcaccaggctcggtaggtttgtcgcctctacctataaatcttcccactat

SEQ ID NO: 53908 - DNA, 120 bp, Homo sapiens
  misc_feature: 1569 for SV(W|O) and mtDNA
caaagtatttagctgactcgccacactccacggaagcaatatgaaatgatctgctgcagtgctctgagccctaggattcatctttcttttcaccgtaggtggcctgactggcattgtatt

SEQ ID NO: 53909 - DNA, 120 bp, Homo sapiens
  misc_feature: 1569 for SV(W|O) and mtDNA
attgatccaataacttgaccaacggaacaagttaccctagggataacagcgcaatcctattctagagtccatatcaacaatagggtttacgacctcgatgttggatcaggacatcccgat

SEQ ID NO: 53910 - DNA, 120 bp, Homo sapiens
  misc_feature: 1569 for SV(W|O) and mtDNA
atcaattggcttcctagggtttatcgtgtgagcacaccatatatttacagtaggaatagacgtagacacacgagcatatttcacctccgctaccataatcatcgctatccccaccggcgt

SEQ ID NO: 53911 - DNA, 120 bp, Homo sapiens
  misc_feature: 1569 for SV(W|O) and mtDNA
agtattttgttttcaattagggagatagttggtattaggattaggattgttgtgaagtatagtacggatgctacttgtccaatgatggtaaaagggtagcttactggttgtcctccgatt

SEQ ID NO: 53912 - DNA, 120 bp, Homo sapiens
  misc_feature: 1569 for SV(W|O) and mtDNA
aatagtaccgttaacttccaattaactagttttgacaacattcaaaaaagagtaataaacttcgccttaattttaataatcaacaccctcctagccttactactaataattattacattt

SEQ ID NO: 53913 - DNA, 120 bp, Homo sapiens
  misc_feature: 1568 for SV(W|O) and mtDNA
tttttacaactcaggtgagttttagctttattggggagggggtgatctaaaacactctttacgccggcttctattgacttgggttaatcgtgtgaccgcggtggctggcacgaaattgac

SEQ ID NO: 53914 - DNA, 120 bp, Homo sapiens
  misc_feature: 1568 for SV(W|O) and mtDNA
gataacagcgcaatcctattctagagtccatatcaacaatagggtttacgacctcgatgttggatcaggacatcccgatggtgcagccgctattaaaggttcgtttgttcaacgattaaa

SEQ ID NO: 53915 - DNA, 120 bp, Homo sapiens
  misc_feature: 1568 for SV(W|O) and mtDNA
ttatcgtgtgagcacaccatatatttacagtaggaatagacgtagacacacgagcatatttcacctccgctaccataatcatcgctatccccaccggcgtcaaagtatttagctgactcg

SEQ ID NO: 53916 - DNA, 120 bp, Homo sapiens
  misc_feature: 1568 for SV(W|O) and mtDNA
acagttaaatttacaaggggatttagagggttctgtgggcaaatttaaagttgaactaagattctatcttggacaaccagctatcaccaggctcggtaggtttgtcgcctctacctataa

SEQ ID NO: 53917 - DNA, 120 bp, Homo sapiens
  misc_feature: 1568 for SV(W|O) and mtDNA
tgaaatggattttggcgtaggtttggtctagggtgtagcctgagaataggggaaatcagtgaatgaagcctcctatgatggcaaatacagctcctattgataggacatagtggaagtggg

SEQ ID NO: 53918 - DNA, 120 bp, Homo sapiens
  misc_feature: 1568 for SV(W|O) and mtDNA
agggttctgtgggcaaatttaaagttgaactaagattctatcttggacaaccagctatcaccaggctcggtaggtttgtcgcctctacctataaatcttcccactattttgctacataga

SEQ ID NO: 53919 - DNA, 120 bp, Homo sapiens
  misc_feature: 1568 for SV(W|O) and mtDNA
tcgaactgacactgagccacaacccaaacaacccagctctccctaagcttcaaactagactacttctccataatattcatccctgtagcattgttcgttacatggtccatcatagaattc

SEQ ID NO: 53920 - DNA, 120 bp, Homo sapiens
  misc_feature: 1568 for SV(W|O) and mtDNA
tcctcactatctgcttcatccgccaactaatatttcactttacatccaaacatcactttggcttcgaagccgccgcctgatactggcattttgtagatgtggtttgactatttctgtatg

SEQ ID NO: 53921 - DNA, 120 bp, Homo sapiens
  misc_feature: 1568 for SV(W|O) and mtDNA
tatttgaagaactgattaatgtttgggtctgagtttatatatcacagtgagaattctatgatggaccatgtaacgaacaatgctacagggatgaatattatggagaagtagtctagtttg

SEQ ID NO: 53922 - DNA, 120 bp, Homo sapiens
  misc_feature: 1568 for SV(W|O) and mtDNA
tatcgtgtgagcacaccatatatttacagtaggaatagacgtagacacacgagcatatttcacctccgctaccataatcatcgctatccccaccggcgtcaaagtatttagctgactcgc

SEQ ID NO: 53923 - DNA, 120 bp, Homo sapiens
  misc_feature: 1568 for SV(W|O) and mtDNA
acaatcatggcaagccaacgccacttatccagtgaaccactatcacgaaaaaaactctacctctctatactaatctccctacaaatctccttaattataacattcacagccacagaacta

SEQ ID NO: 53924 - DNA, 120 bp, Homo sapiens
  misc_feature: 1568 for SV(W|O) and mtDNA
taattttattagggggttagttttgcgtattggggtcattggtgttcttgtagttgaaatacaacgatggtttttcatatcattggtcgtggttgtagtccgtgcgagaataatgatgta

SEQ ID NO: 53925 - DNA, 120 bp, Homo sapiens
  misc_feature: 1568 for SV(W|O) and mtDNA
cattttgactaccacaactcaacggctacatagaaaaatccaccccttacgagtgcggcttcgaccctatatcccccgcccgcgtccctttctccataaaattcttcttagtagctatta

SEQ ID NO: 53926 - DNA, 120 bp, Homo sapiens
  misc_feature: 1568 for SV(W|O) and mtDNA
ataattattacattttgactaccacaactcaacggctacatagaaaaatccaccccttacgagtgcggcttcgaccctatatcccccgcccgcgtccctttctccataaaattcttctta

SEQ ID NO: 53927 - DNA, 120 bp, Homo sapiens
  misc_feature: 1568 for SV(W|O) and mtDNA
gctgctgtgttggcatctgctcgggcgtatcatcaactgatgagcaagaaggatataattcctacgccctctcagccgatgaacagttggaataggttgttagcggtaactaagattagt

SEQ ID NO: 53928 - DNA, 120 bp, Homo sapiens
  misc_feature: 1568 for SV(W|O) and mtDNA
gagggtgacgggcggtgtgtacgcgcttcagggccctgttcaactaagcactctactctcagtttactgctaaatccaccttcgacccttaagtttcataagggctatcgtagttttctg

SEQ ID NO: 53929 - DNA, 120 bp, Homo sapiens
  misc_feature: 1568 for SV(W|O) and mtDNA
cactatctgcttcatccgccaactaatatttcactttacatccaaacatcactttggcttcgaagccgccgcctgatactggcattttgtagatgtggtttgactatttctgtatgtctc

SEQ ID NO: 53930 - DNA, 120 bp, Homo sapiens
  misc_feature: 1568 for SV(W|O) and mtDNA
aaagcataatatttcgcccactaagccaatcactttattgactcctagccgcagacctcctcattctaacctgaatcggaggacaaccagtaagctacccttttaccatcattggacaag

SEQ ID NO: 53931 - DNA, 120 bp, Homo sapiens
  misc_feature: 1568 for SV(W|O) and mtDNA
aatatgaaatgatctgctgcagtgctctgagccctaggattcatctttcttttcaccgtaggtggcctgactggcattgtattagcaaactcatcactagacatcgtactacacgacacg

SEQ ID NO: 53932 - DNA, 120 bp, Homo sapiens
  misc_feature: 1568 for SV(W|O) and mtDNA
aagaaggatataattcctacgccctctcagccgatgaacagttggaataggttgttagcggtaactaagattagtatggtaattaggaagatgagtagatatttgaagaactgattaatg

SEQ ID NO: 53933 - DNA, 120 bp, Homo sapiens
  misc_feature: 1568 for SV(W|O) and mtDNA
actgtgatatataaactcagacccaaacattaatcagttcttcaaatatctactcatcttcctaattaccatactaatcttagttaccgctaacaacctattccaactgttcatcggctg

SEQ ID NO: 53934 - DNA, 120 bp, Homo sapiens
  misc_feature: 1568 for SV(W|O) and mtDNA
acagggatgaatattatggagaagtagtctagtttgaagcttagggagagctgggttgtttgggttgtggctcagtgtcagttcgagataataacttcttggtctaggcacatgaatatt

SEQ ID NO: 53935 - DNA, 120 bp, Homo sapiens
  misc_feature: 1568 for SV(W|O) and mtDNA
aacagaggcttacgaccccttatttaccgagaaagctcacaagaactgctaactcatgcccccatgtctaacaacatggctttctcaacttttaaaggataacagctatccattggtctt

SEQ ID NO: 53936 - DNA, 120 bp, Homo sapiens
  misc_feature: 1567 for SV(W|O) and mtDNA
gctctttggacactaggaaaaaaccttgtagagagagtaaaaaatttaacacccatagtaggcctaaaagcagccaccaattaagaaagcgttcaagctcaacacccactacctaaaaaa

SEQ ID NO: 53937 - DNA, 120 bp, Homo sapiens
  misc_feature: 1567 for SV(W|O) and mtDNA
tttgatctagaaattgccctccttttacccctaccatgagccctacaaacaactaacctgccactaatagttatgtcatccctcttattaatcatcatcctagccctaagtctggcctat

SEQ ID NO: 53938 - DNA, 120 bp, Homo sapiens
  misc_feature: 1567 for SV(W|O) and mtDNA
tttgagtattttgttttcaattagggagatagttggtattaggattaggattgttgtgaagtatagtacggatgctacttgtccaatgatggtaaaagggtagcttactggttgtcctcc

SEQ ID NO: 53939 - DNA, 120 bp, Homo sapiens
  misc_feature: 1567 for SV(W|O) and mtDNA
ttggttatacccttcccgtactaattaatcccctggcccaacccgtcatctactctaccatctttgcaggcacactcatcacagcgctaagctcgcactgattttttacctgagtaggcc

SEQ ID NO: 53940 - DNA, 120 bp, Homo sapiens
  misc_feature: 1567 for SV(W|O) and mtDNA
ttatgtcatccctcttattaatcatcatcctagccctaagtctggcctatgagtgactacaaaaaggattagactgaaccgaattggtatatagtttaaacaaaacgaatgatttcgact

SEQ ID NO: 53941 - DNA, 120 bp, Homo sapiens
  misc_feature: 1567 for SV(W|O) and mtDNA
ttacgccggcttctattgacttgggttaatcgtgtgaccgcggtggctggcacgaaattgaccaaccctggggttagtatagcttagttaaactttcgtttattgctaaaggttaatcac

SEQ ID NO: 53942 - DNA, 120 bp, Homo sapiens
  misc_feature: 1567 for SV(W|O) and mtDNA
ttaatcgttgaacaaacgaacctttaatagcggctgcaccatcgggatgtcctgatccaacatcgaggtcgtaaaccctattgttgatatggactctagaataggattgcgctgttatcc

SEQ ID NO: 53943 - DNA, 120 bp, Homo sapiens
  misc_feature: 1567 for SV(W|O) and mtDNA
gcaagcatccccgttccagtgagttcaccctctaaatcaccacgatcaaaagggacaagcatcaagcacgcagcaatgcagctcaaaacgcttagcctagccacacccccacgggaaaca

SEQ ID NO: 53944 - DNA, 120 bp, Homo sapiens
  misc_feature: 1567 for SV(W|O) and mtDNA
tggattttggcgtaggtttggtctagggtgtagcctgagaataggggaaatcagtgaatgaagcctcctatgatggcaaatacagctcctattgataggacatagtggaagtgggctaca

SEQ ID NO: 53945 - DNA, 120 bp, Homo sapiens
  misc_feature: 1567 for SV(W|O) and mtDNA
tggtagtcaaaatgtaataattattagtagtaaggctaggagggtgttgattattaaaattaaggcgaagtttattactcttttttgaatgttgtcaaaactagttaattggaagttaac

SEQ ID NO: 53946 - DNA, 120 bp, Homo sapiens
  misc_feature: 1567 for SV(W|O) and mtDNA
tgattaatgtttgggtctgagtttatatatcacagtgagaattctatgatggaccatgtaacgaacaatgctacagggatgaatattatggagaagtagtctagtttgaagcttagggag

SEQ ID NO: 53947 - DNA, 120 bp, Homo sapiens
  misc_feature: 1567 for SV(W|O) and mtDNA
tatgaaacttaagggtcgaaggtggatttagcagtaaactgagagtagagtgcttagttgaacagggccctgaagcgcgtacacaccgcccgtcaccctcctcaagtatacttcaaagga

SEQ ID NO: 53948 - DNA, 120 bp, Homo sapiens
  misc_feature: 1567 for SV(W|O) and mtDNA
tatttgatctagaaattgccctccttttacccctaccatgagccctacaaacaactaacctgccactaatagttatgtcatccctcttattaatcatcatcctagccctaagtctggcct

SEQ ID NO: 53949 - DNA, 120 bp, Homo sapiens
  misc_feature: 1567 for SV(W|O) and mtDNA
gtggctaggctaagcgttttgagctgcattgctgcgtgcttgatgcttgtcccttttgatcgtggtgatttagagggtgaactcactggaacggggatgcttgcatgtgtaatcttacta

SEQ ID NO: 53950 - DNA, 120 bp, Homo sapiens
  misc_feature: 1567 for SV(W|O) and mtDNA
tagcggaggtgaaatatgctcgtgtgtctacgtctattcctactgtaaatatatggtgtgctcacacgataaaccctaggaagccaattgatatcatagctcagaccatacctatgtatc

SEQ ID NO: 53951 - DNA, 120 bp, Homo sapiens
  misc_feature: 1567 for SV(W|O) and mtDNA
taaatttacaaggggatttagagggttctgtgggcaaatttaaagttgaactaagattctatcttggacaaccagctatcaccaggctcggtaggtttgtcgcctctacctataaatctt

SEQ ID NO: 53952 - DNA, 120 bp, Homo sapiens
  misc_feature: 1567 for SV(W|O) and mtDNA
atccatttcactatcatattcatcggcgtaaatctaactttcttcccacaacactttctcggcctatccggaatgccccgacgttactcggactaccccgatgcatacaccacatgaaac

SEQ ID NO: 53953 - DNA, 120 bp, Homo sapiens
  misc_feature: 1567 for SV(W|O) and mtDNA
gtgtaagttgggtgctttgtgttaagctacactctggttcgtccaagtgcactttccagtacacttaccatgttacgacttgtctcctctatataaatgcgtaggggttttagttaaatg

SEQ ID NO: 53954 - DNA, 120 bp, Homo sapiens
  misc_feature: 1567 for SV(W|O) and mtDNA
accttggctatcatcacccgatgaggcaaccagccagaacgcctgaacgcaggcacatacttcctattctacaccctagtaggctcccttcccctactcatcgcactaatttacactcac

SEQ ID NO: 53955 - DNA, 120 bp, Homo sapiens
  misc_feature: 1567 for SV(W|O) and mtDNA
gtagccgttgagttgtggtagtcaaaatgtaataattattagtagtaaggctaggagggtgttgattattaaaattaaggcgaagtttattactcttttttgaatgttgtcaaaactagt

SEQ ID NO: 53956 - DNA, 120 bp, Homo sapiens
  misc_feature: 1567 for SV(W|O) and mtDNA
gtaaatgctagtataatatttatgtaaatgaggggcatttggtaaatatgattatcataatttaatgagtcgaaatcattcgttttgtttaaactatataccaattcggttcagtctaat

SEQ ID NO: 53957 - DNA, 120 bp, Homo sapiens
  misc_feature: 1567 for SV(W|O) and mtDNA
ggctgcaccatcgggatgtcctgatccaacatcgaggtcgtaaaccctattgttgatatggactctagaataggattgcgctgttatccctagggtaacttgttccgttggtcaagttat

SEQ ID NO: 53958 - DNA, 120 bp, Homo sapiens
  misc_feature: 1567 for SV(W|O) and mtDNA
ctcggactcctgcctcactcatttacaccaaccacccaactatctataaacctagccatggccatccccttatgagcgggcgcagtgattataggctttcgctctaagattaaaaatgcc

SEQ ID NO: 53959 - DNA, 120 bp, Homo sapiens
  misc_feature: 1567 for SV(W|O) and mtDNA
actatctgcttcatccgccaactaatatttcactttacatccaaacatcactttggcttcgaagccgccgcctgatactggcattttgtagatgtggtttgactatttctgtatgtctcc

SEQ ID NO: 53960 - DNA, 120 bp, Homo sapiens
  misc_feature: 1567 for SV(W|O) and mtDNA
gcgccgaataataggtatagtgttccaatgtctttgtggtttgtagagaatagtcaacggtcggcgaacatcagtgggggtgaggtaaaatggctgagtgaagcattggactgtaaatct

SEQ ID NO: 53961 - DNA, 120 bp, Homo sapiens
  misc_feature: 1567 for SV(W|O) and mtDNA
gagggtaataatgacttgttggttgattgtagatattgggctgttaattgtcagttcagtgttttaatctgacgcaggcttatgcggaggagaatgttttcatgttacttatactaacat

SEQ ID NO: 53962 - DNA, 120 bp, Homo sapiens
  misc_feature: 1567 for SV(W|O) and mtDNA
gaattagggaagtcagggttagggtggttatagtagtgtgcatggttattacttttatttggagttgcaccaaaatttttggggcctaagaccaatggatagctgttatcctttaaaagt

SEQ ID NO: 53963 - DNA, 120 bp, Homo sapiens
  misc_feature: 1567 for SV(W|O) and mtDNA
ccaaataattcaagcactgcttattacaattttactgggtctctattttaccctcctacaagcctcagagtacttcgagtctcccttcaccatttccgacggcatctacggctcaacatt

SEQ ID NO: 53964 - DNA, 120 bp, Homo sapiens
  misc_feature: 1567 for SV(W|O) and mtDNA
aacaacaaagcataatatttcgcccactaagccaatcactttattgactcctagccgcagacctcctcattctaacctgaatcggaggacaaccagtaagctacccttttaccatcattg

SEQ ID NO: 53965 - DNA, 120 bp, Homo sapiens
  misc_feature: 1567 for SV(W|O) and mtDNA
agccacagcttaaaactcaaaggacctggcggtgcttcatatccctctagaggagcctgttctgtaatcgataaaccccgatcaacctcaccacctcttgctcagcctatataccgccat

SEQ ID NO: 53966 - DNA, 120 bp, Homo sapiens
  misc_feature: 1567 for SV(W|O) and mtDNA
atgatctgctgcagtgctctgagccctaggattcatctttcttttcaccgtaggtggcctgactggcattgtattagcaaactcatcactagacatcgtactacacgacacgtactacgt

SEQ ID NO: 53967 - DNA, 120 bp, Homo sapiens
  misc_feature: 1567 for SV(W|O) and mtDNA
atctagaaattgccctccttttacccctaccatgagccctacaaacaactaacctgccactaatagttatgtcatccctcttattaatcatcatcctagccctaagtctggcctatgagt

SEQ ID NO: 53968 - DNA, 120 bp, Homo sapiens
  misc_feature: 1567 for SV(W|O) and mtDNA
aaggatactagtataagagatcaggttcgtcctttagtgttgtgtatggttatcatttgttttgaggttagtttgattagtcattgttgggtggtgattagtcggttgttgatgagatat

SEQ ID NO: 53969 - DNA, 120 bp, Homo sapiens
  misc_feature: 1567 for SV(W|O) and mtDNA
aaatggattttggcgtaggtttggtctagggtgtagcctgagaataggggaaatcagtgaatgaagcctcctatgatggcaaatacagctcctattgataggacatagtggaagtgggct

SEQ ID NO: 53970 - DNA, 120 bp, Homo sapiens
  misc_feature: 1567 for SV(W|O) and mtDNA
acgctttcttaattggtggctgcttttaggcctactatgggtgttaaattttttactctctctacaaggttttttcctagtgtccaaagagctgttcctctttggactaacagttaaatt

SEQ ID NO: 53971 - DNA, 120 bp, Homo sapiens
  misc_feature: 1567 for SV(W|O) and mtDNA
aatatatggtgtgctcacacgataaaccctaggaagccaattgatatcatagctcagaccatacctatgtatccaaatggttctttttttccggagtagtaagttacaatatgggagatt

SEQ ID NO: 53972 - DNA, 120 bp, Homo sapiens
  misc_feature: 1567 for SV(W|O) and mtDNA
aagaactgattaatgtttgggtctgagtttatatatcacagtgagaattctatgatggaccatgtaacgaacaatgctacagggatgaatattatggagaagtagtctagtttgaagctt

SEQ ID NO: 53973 - DNA, 120 bp, Homo sapiens
  misc_feature: 1566 for SV(W|O) and mtDNA
atagctcagaccatacctatgtatccaaatggttctttttttccggagtagtaagttacaatatgggagattattccgaagcctggtaggataagaatataaacttcagggtgaccgaaa

SEQ ID NO: 53974 - DNA, 120 bp, Homo sapiens
  misc_feature: 1566 for SV(W|O) and mtDNA
ttcctagaagtgagatggtaaatgctagtataatatttatgtaaatgaggggcatttggtaaatatgattatcataatttaatgagtcgaaatcattcgttttgtttaaactatatacca

SEQ ID NO: 53975 - DNA, 120 bp, Homo sapiens
  misc_feature: 1566 for SV(W|O) and mtDNA
ttattctcgcacggactacaaccacgaccaatgatatgaaaaaccatcgttgtatttcaactacaagaacaccaatgaccccaatacgcaaaactaaccccctaataaaattaattaacc

SEQ ID NO: 53976 - DNA, 120 bp, Homo sapiens
  misc_feature: 1566 for SV(W|O) and mtDNA
tgaatggctgctgtgttggcatctgctcgggcgtatcatcaactgatgagcaagaaggatataattcctacgccctctcagccgatgaacagttggaataggttgttagcggtaactaag

SEQ ID NO: 53977 - DNA, 120 bp, Homo sapiens
  misc_feature: 1566 for SV(W|O) and mtDNA
tcttaggtagctcgtctggtttcgggggtcttagctttggctctccttgcaaagttatttctagttaattcattatgcagaaggtataggggttagtccttgctatattatgcttggtta

SEQ ID NO: 53978 - DNA, 120 bp, Homo sapiens
  misc_feature: 1566 for SV(W|O) and mtDNA
tctgtgggcaaatttaaagttgaactaagattctatcttggacaaccagctatcaccaggctcggtaggtttgtcgcctctacctataaatcttcccactattttgctacatagacgggt

SEQ ID NO: 53979 - DNA, 120 bp, Homo sapiens
  misc_feature: 1566 for SV(W|O) and mtDNA
tcacttgttccttaaatagggacctgtatgaatggctccacgagggttcagctgtctcttacttttaaccagtgaaattgacctgcccgtgaagaggcgggcataacacagcaagacgag

SEQ ID NO: 53980 - DNA, 120 bp, Homo sapiens
  misc_feature: 1566 for SV(W|O) and mtDNA
ctagaaattgccctccttttacccctaccatgagccctacaaacaactaacctgccactaatagttatgtcatccctcttattaatcatcatcctagccctaagtctggcctatgagtga

SEQ ID NO: 53981 - DNA, 120 bp, Homo sapiens
  misc_feature: 1566 for SV(W|O) and mtDNA
atttgaagaactgattaatgtttgggtctgagtttatatatcacagtgagaattctatgatggaccatgtaacgaacaatgctacagggatgaatattatggagaagtagtctagtttga

SEQ ID NO: 53982 - DNA, 120 bp, Homo sapiens
  misc_feature: 1566 for SV(W|O) and mtDNA
tagcggctgcaccatcgggatgtcctgatccaacatcgaggtcgtaaaccctattgttgatatggactctagaataggattgcgctgttatccctagggtaacttgttccgttggtcaag

SEQ ID NO: 53983 - DNA, 120 bp, Homo sapiens
  misc_feature: 1566 for SV(W|O) and mtDNA
tacaccaaccacccaactatctataaacctagccatggccatccccttatgagcgggcgcagtgattataggctttcgctctaagattaaaaatgccctagcccacttcttaccacaagg

SEQ ID NO: 53984 - DNA, 120 bp, Homo sapiens
  misc_feature: 1566 for SV(W|O) and mtDNA
gaggaacagctctttggacactaggaaaaaaccttgtagagagagtaaaaaatttaacacccatagtaggcctaaaagcagccaccaattaagaaagcgttcaagctcaacacccactac

SEQ ID NO: 53985 - DNA, 120 bp, Homo sapiens
  misc_feature: 1566 for SV(W|O) and mtDNA
cgaaggcttctcaaatcatgaaaattattaatattactgctgttagagaaatgaatgagcctacagatgataggatgtttcatgtggtgtatgcatcggggtagtccgagtaacgtcggg

SEQ ID NO: 53986 - DNA, 120 bp, Homo sapiens
  misc_feature: 1566 for SV(W|O) and mtDNA
aacactctttacgccggcttctattgacttgggttaatcgtgtgaccgcggtggctggcacgaaattgaccaaccctggggttagtatagcttagttaaactttcgtttattgctaaagg

SEQ ID NO: 53987 - DNA, 120 bp, Homo sapiens
  misc_feature: 1566 for SV(W|O) and mtDNA
ccaaaatccatttcactatcatattcatcggcgtaaatctaactttcttcccacaacactttctcggcctatccggaatgccccgacgttactcggactaccccgatgcatacaccacat

SEQ ID NO: 53988 - DNA, 120 bp, Homo sapiens
  misc_feature: 1566 for SV(W|O) and mtDNA
attaattttattagggggttagttttgcgtattggggtcattggtgttcttgtagttgaaatacaacgatggtttttcatatcattggtcgtggttgtagtccgtgcgagaataatgatg

SEQ ID NO: 53989 - DNA, 120 bp, Homo sapiens
  misc_feature: 1566 for SV(W|O) and mtDNA
aattttattagggggttagttttgcgtattggggtcattggtgttcttgtagttgaaatacaacgatggtttttcatatcattggtcgtggttgtagtccgtgcgagaataatgatgtat

SEQ ID NO: 53990 - DNA, 120 bp, Homo sapiens
  misc_feature: 1566 for SV(W|O) and mtDNA
aggatactagtataagagatcaggttcgtcctttagtgttgtgtatggttatcatttgttttgaggttagtttgattagtcattgttgggtggtgattagtcggttgttgatgagatatt

SEQ ID NO: 53991 - DNA, 120 bp, Homo sapiens
  misc_feature: 1566 for SV(W|O) and mtDNA
aatcatcgctatccccaccggcgtcaaagtatttagctgactcgccacactccacggaagcaatatgaaatgatctgctgcagtgctctgagccctaggattcatctttcttttcaccgt

SEQ ID NO: 53992 - DNA, 120 bp, Homo sapiens
  misc_feature: 1566 for SV(W|O) and mtDNA
aaataattcaagcactgcttattacaattttactgggtctctattttaccctcctacaagcctcagagtacttcgagtctcccttcaccatttccgacggcatctacggctcaacatttt

SEQ ID NO: 53993 - DNA, 120 bp, Homo sapiens
  misc_feature: 1565 for SV(W|O) and mtDNA
ggattttggcgtaggtttggtctagggtgtagcctgagaataggggaaatcagtgaatgaagcctcctatgatggcaaatacagctcctattgataggacatagtggaagtgggctacaa

SEQ ID NO: 53994 - DNA, 120 bp, Homo sapiens
  misc_feature: 1565 for SV(W|O) and mtDNA
ttgggattttttaggtagtgggtgttgagcttgaacgctttcttaattggtggctgcttttaggcctactatgggtgttaaattttttactctctctacaaggttttttcctagtgtcca

SEQ ID NO: 53995 - DNA, 120 bp, Homo sapiens
  misc_feature: 1565 for SV(W|O) and mtDNA
ttgaacaaacgaacctttaatagcggctgcaccatcgggatgtcctgatccaacatcgaggtcgtaaaccctattgttgatatggactctagaataggattgcgctgttatccctagggt

SEQ ID NO: 53996 - DNA, 120 bp, Homo sapiens
  misc_feature: 1565 for SV(W|O) and mtDNA
ttactttaggatggggtgtgataggtggcacggagaattttggattctcagggatgggttcgattctcatagtcctagaaataagggggtttaagctcctattatttactctatcaaagt

SEQ ID NO: 53997 - DNA, 120 bp, Homo sapiens
  misc_feature: 1565 for SV(W|O) and mtDNA
ttaaggatactagtataagagatcaggttcgtcctttagtgttgtgtatggttatcatttgttttgaggttagtttgattagtcattgttgggtggtgattagtcggttgttgatgagat

SEQ ID NO: 53998 - DNA, 120 bp, Homo sapiens
  misc_feature: 1565 for SV(W|O) and mtDNA
tgtatgaatggctccacgagggttcagctgtctcttacttttaaccagtgaaattgacctgcccgtgaagaggcgggcataacacagcaagacgagaagaccctatggagctttaattta

SEQ ID NO: 53999 - DNA, 120 bp, Homo sapiens
  misc_feature: 1565 for SV(W|O) and mtDNA
tgggtgttgagcttgaacgctttcttaattggtggctgcttttaggcctactatgggtgttaaattttttactctctctacaaggttttttcctagtgtccaaagagctgttcctctttg

SEQ ID NO: 54000 - DNA, 120 bp, Homo sapiens
  misc_feature: 1565 for SV(W|O) and mtDNA
accacacttatccccaccttggctatcatcacccgatgaggcaaccagccagaacgcctgaacgcaggcacatacttcctattctacaccctagtaggctcccttcccctactcatcgca

SEQ ID NO: 54001 - DNA, 120 bp, Homo sapiens
  misc_feature: 1565 for SV(W|O) and mtDNA
tgatatcaattggcttcctagggtttatcgtgtgagcacaccatatatttacagtaggaatagacgtagacacacgagcatatttcacctccgctaccataatcatcgctatccccaccg

SEQ ID NO: 54002 - DNA, 120 bp, Homo sapiens
  misc_feature: 1565 for SV(W|O) and mtDNA
gattaatgtttgggtctgagtttatatatcacagtgagaattctatgatggaccatgtaacgaacaatgctacagggatgaatattatggagaagtagtctagtttgaagcttagggaga

SEQ ID NO: 54003 - DNA, 120 bp, Homo sapiens
  misc_feature: 1565 for SV(W|O) and mtDNA
gtgatatataaactcagacccaaacattaatcagttcttcaaatatctactcatcttcctaattaccatactaatcttagttaccgctaacaacctattccaactgttcatcggctgaga

SEQ ID NO: 54004 - DNA, 120 bp, Homo sapiens
  misc_feature: 1565 for SV(W|O) and mtDNA
tcgaatgtgtggtagggtggggggcatccatatagtcactccaggtttatggagggttcttctactattaggacttttcgctttgaagcgaaggcttctcaaatcatgaaaattattaat

SEQ ID NO: 54005 - DNA, 120 bp, Homo sapiens
  misc_feature: 1565 for SV(W|O) and mtDNA
tcatcactagacatcgtactacacgacacgtactacgttgtagcccacttccactatgtcctatcaataggagctgtatttgccatcataggaggcttcattcactgatttcccctattc

SEQ ID NO: 54006 - DNA, 120 bp, Homo sapiens
  misc_feature: 1565 for SV(W|O) and mtDNA
aactagttttgacaacattcaaaaaagagtaataaacttcgccttaattttaataatcaacaccctcctagccttactactaataattattacattttgactaccacaactcaacggcta

SEQ ID NO: 54007 - DNA, 120 bp, Homo sapiens
  misc_feature: 1565 for SV(W|O) and mtDNA
taatcgttgaacaaacgaacctttaatagcggctgcaccatcgggatgtcctgatccaacatcgaggtcgtaaaccctattgttgatatggactctagaataggattgcgctgttatccc

SEQ ID NO: 54008 - DNA, 120 bp, Homo sapiens
  misc_feature: 1565 for SV(W|O) and mtDNA
taaaatggctgagtgaagcattggactgtaaatctaaagacaggggttaggcctctttttaccagctccgaggtgattttcatattgaattgcaaattcgaagaagcagcttcaaacctg

SEQ ID NO: 54009 - DNA, 120 bp, Homo sapiens
  misc_feature: 1565 for SV(W|O) and mtDNA
gtttatcgtgtgagcacaccatatatttacagtaggaatagacgtagacacacgagcatatttcacctccgctaccataatcatcgctatccccaccggcgtcaaagtatttagctgact

SEQ ID NO: 54010 - DNA, 120 bp, Homo sapiens
  misc_feature: 1565 for SV(W|O) and mtDNA
gttcttaggtagctcgtctggtttcgggggtcttagctttggctctccttgcaaagttatttctagttaattcattatgcagaaggtataggggttagtccttgctatattatgcttggt

SEQ ID NO: 54011 - DNA, 120 bp, Homo sapiens
  misc_feature: 1565 for SV(W|O) and mtDNA
ccacacttatccccaccttggctatcatcacccgatgaggcaaccagccagaacgcctgaacgcaggcacatacttcctattctacaccctagtaggctcccttcccctactcatcgcac

SEQ ID NO: 54012 - DNA, 120 bp, Homo sapiens
  misc_feature: 1565 for SV(W|O) and mtDNA
gtgaaatggattttggcgtaggtttggtctagggtgtagcctgagaataggggaaatcagtgaatgaagcctcctatgatggcaaatacagctcctattgataggacatagtggaagtgg

SEQ ID NO: 54013 - DNA, 120 bp, Homo sapiens
  misc_feature: 1565 for SV(W|O) and mtDNA
aacattcaaaaaagagtaataaacttcgccttaattttaataatcaacaccctcctagccttactactaataattattacattttgactaccacaactcaacggctacatagaaaaatcc

SEQ ID NO: 54014 - DNA, 120 bp, Homo sapiens
  misc_feature: 1565 for SV(W|O) and mtDNA
acttcaagtcaactaggactcataatagttacaatcggcatcaaccaaccacacctagcattcctgcacatctgcacccacgccttcttcaaagccatactatttatgtgctccgggtcc

SEQ ID NO: 54015 - DNA, 120 bp, Homo sapiens
  misc_feature: 1565 for SV(W|O) and mtDNA
gcggggtcgaagaaggtggtgttgaggttgcggtctgttagtagtatagtgatgccagcagctaggactgggagagataggagaagtaggactgctgtgattaggacggatcagacgaag

SEQ ID NO: 54016 - DNA, 120 bp, Homo sapiens
  misc_feature: 1565 for SV(W|O) and mtDNA
cggaggctttggcaactgactagttcccctaataatcggtgcccccgatatggcgtttccccgcataaacaacataagcttctgactcttacctccctctctcctactcctgctcgcatc

SEQ ID NO: 54017 - DNA, 120 bp, Homo sapiens
  misc_feature: 1565 for SV(W|O) and mtDNA
aatggctgagtgaagcattggactgtaaatctaaagacaggggttaggcctctttttaccagctccgaggtgattttcatattgaattgcaaattcgaagaagcagcttcaaacctgccg

SEQ ID NO: 54018 - DNA, 120 bp, Homo sapiens
  misc_feature: 1565 for SV(W|O) and mtDNA
atactagtctttgccgcctgcgaagcagcggtgggcctagccctactagtctcaatctccaacacatatggcctagactacgtacataacctaaacctactccaatgctaaaactaatcg

SEQ ID NO: 54019 - DNA, 120 bp, Homo sapiens
  misc_feature: 1565 for SV(W|O) and mtDNA
atgtaaagtgaaatattagttggcggatgaagcagatagtgaggaaagttgagccaataatgacgtgaagtccgtggaagcctgtggctacaaaaaatgttgagccgtagatgccgtcgg

SEQ ID NO: 54020 - DNA, 120 bp, Homo sapiens
  misc_feature: 1565 for SV(W|O) and mtDNA
acgccggcttctattgacttgggttaatcgtgtgaccgcggtggctggcacgaaattgaccaaccctggggttagtatagcttagttaaactttcgtttattgctaaaggttaatcactg

SEQ ID NO: 54021 - DNA, 120 bp, Homo sapiens
  misc_feature: 1565 for SV(W|O) and mtDNA
cacaatcatggcaagccaacgccacttatccagtgaaccactatcacgaaaaaaactctacctctctatactaatctccctacaaatctccttaattataacattcacagccacagaact

SEQ ID NO: 54022 - DNA, 120 bp, Homo sapiens
  misc_feature: 1565 for SV(W|O) and mtDNA
agaaattgccctccttttacccctaccatgagccctacaaacaactaacctgccactaatagttatgtcatccctcttattaatcatcatcctagccctaagtctggcctatgagtgact

SEQ ID NO: 54023 - DNA, 120 bp, Homo sapiens
  misc_feature: 1565 for SV(W|O) and mtDNA
aatagttatgtcatccctcttattaatcatcatcctagccctaagtctggcctatgagtgactacaaaaaggattagactgaaccgaattggtatatagtttaaacaaaacgaatgattt

SEQ ID NO: 54024 - DNA, 120 bp, Homo sapiens
  misc_feature: 1564 for SV(W|O) and mtDNA
tagctcagaccatacctatgtatccaaatggttctttttttccggagtagtaagttacaatatgggagattattccgaagcctggtaggataagaatataaacttcagggtgaccgaaaa

SEQ ID NO: 54025 - DNA, 120 bp, Homo sapiens
  misc_feature: 1564 for SV(W|O) and mtDNA
ttatacccttcccgtactaattaatcccctggcccaacccgtcatctactctaccatctttgcaggcacactcatcacagcgctaagctcgcactgattttttacctgagtaggcctaga

SEQ ID NO: 54026 - DNA, 120 bp, Homo sapiens
  misc_feature: 1564 for SV(W|O) and mtDNA
tgttatcctttaaaagttgagaaagccatgttgttagacatgggggcatgagttagcagttcttgtgagctttctcggtaaataaggggtcgtaagcctctgttgtcagattcacaatct

SEQ ID NO: 54027 - DNA, 120 bp, Homo sapiens
  misc_feature: 1564 for SV(W|O) and mtDNA
tggctccacgagggttcagctgtctcttacttttaaccagtgaaattgacctgcccgtgaagaggcgggcataacacagcaagacgagaagaccctatggagctttaatttattaatgca

SEQ ID NO: 54028 - DNA, 120 bp, Homo sapiens
  misc_feature: 1564 for SV(W|O) and mtDNA
cttcaagtcaactaggactcataatagttacaatcggcatcaaccaaccacacctagcattcctgcacatctgcacccacgccttcttcaaagccatactatttatgtgctccgggtcca

SEQ ID NO: 54029 - DNA, 120 bp, Homo sapiens
  misc_feature: 1564 for SV(W|O) and mtDNA
agcattggagtaggtttaggttatgtacgtagtctaggccatatgtgttggagattgagactagtagggctaggcccaccgctgcttcgcaggcggcaaagactagtatggcaataggca

SEQ ID NO: 54030 - DNA, 120 bp, Homo sapiens
  misc_feature: 1564 for SV(W|O) and mtDNA
tcactagacatcgtactacacgacacgtactacgttgtagcccacttccactatgtcctatcaataggagctgtatttgccatcataggaggcttcattcactgatttcccctattctca

SEQ ID NO: 54031 - DNA, 120 bp, Homo sapiens
  misc_feature: 1564 for SV(W|O) and mtDNA
tgaagaactgattaatgtttgggtctgagtttatatatcacagtgagaattctatgatggaccatgtaacgaacaatgctacagggatgaatattatggagaagtagtctagtttgaagc

SEQ ID NO: 54032 - DNA, 120 bp, Homo sapiens
  misc_feature: 1564 for SV(W|O) and mtDNA
agggaagtcagggttagggtggttatagtagtgtgcatggttattacttttatttggagttgcaccaaaatttttggggcctaagaccaatggatagctgttatcctttaaaagttgaga

SEQ ID NO: 54033 - DNA, 120 bp, Homo sapiens
  misc_feature: 1564 for SV(W|O) and mtDNA
tcggactcctgcctcactcatttacaccaaccacccaactatctataaacctagccatggccatccccttatgagcgggcgcagtgattataggctttcgctctaagattaaaaatgccc

SEQ ID NO: 54034 - DNA, 120 bp, Homo sapiens
  misc_feature: 1564 for SV(W|O) and mtDNA
aaaatccatttcactatcatattcatcggcgtaaatctaactttcttcccacaacactttctcggcctatccggaatgccccgacgttactcggactaccccgatgcatacaccacatga

SEQ ID NO: 54035 - DNA, 120 bp, Homo sapiens
  misc_feature: 1564 for SV(W|O) and mtDNA
taaggatactagtataagagatcaggttcgtcctttagtgttgtgtatggttatcatttgttttgaggttagtttgattagtcattgttgggtggtgattagtcggttgttgatgagata

SEQ ID NO: 54036 - DNA, 120 bp, Homo sapiens
  misc_feature: 1564 for SV(W|O) and mtDNA
tatattatcctaactactaccgcattcctactactcaacttaaactccagcaccacgaccctactactatctcgcacctgaaacaagctaacatgactaacacccttaattccatccacc

SEQ ID NO: 54037 - DNA, 120 bp, Homo sapiens
  misc_feature: 1564 for SV(W|O) and mtDNA
acagccacagaactaatcatattttatatcttcttcgaaaccacacttatccccaccttggctatcatcacccgatgaggcaaccagccagaacgcctgaacgcaggcacatacttccta

SEQ ID NO: 54038 - DNA, 120 bp, Homo sapiens
  misc_feature: 1564 for SV(W|O) and mtDNA
tactattaggacttttcgctttgaagcgaaggcttctcaaatcatgaaaattattaatattactgctgttagagaaatgaatgagcctacagatgataggatgtttcatgtggtgtatgc

SEQ ID NO: 54039 - DNA, 120 bp, Homo sapiens
  misc_feature: 1564 for SV(W|O) and mtDNA
aaagtatttagctgactcgccacactccacggaagcaatatgaaatgatctgctgcagtgctctgagccctaggattcatctttcttttcaccgtaggtggcctgactggcattgtatta

SEQ ID NO: 54040 - DNA, 120 bp, Homo sapiens
  misc_feature: 1564 for SV(W|O) and mtDNA
gctttcttaattggtggctgcttttaggcctactatgggtgttaaattttttactctctctacaaggttttttcctagtgtccaaagagctgttcctctttggactaacagttaaattta

SEQ ID NO: 54041 - DNA, 120 bp, Homo sapiens
  misc_feature: 1564 for SV(W|O) and mtDNA
gtatgaatggctccacgagggttcagctgtctcttacttttaaccagtgaaattgacctgcccgtgaagaggcgggcataacacagcaagacgagaagaccctatggagctttaatttat

SEQ ID NO: 54042 - DNA, 120 bp, Homo sapiens
  misc_feature: 1564 for SV(W|O) and mtDNA
ggtagaactgctattattcatcctatgtgggtaattgaggagtatgctaagattttgcgtagctgggtttggtttaatccacctcaactgcctgctatgatggataagattgagagagtg

SEQ ID NO: 54043 - DNA, 120 bp, Homo sapiens
  misc_feature: 1564 for SV(W|O) and mtDNA
agcggaggtgaaatatgctcgtgtgtctacgtctattcctactgtaaatatatggtgtgctcacacgataaaccctaggaagccaattgatatcatagctcagaccatacctatgtatcc

SEQ ID NO: 54044 - DNA, 120 bp, Homo sapiens
  misc_feature: 1564 for SV(W|O) and mtDNA
ctagacatcgtactacacgacacgtactacgttgtagcccacttccactatgtcctatcaataggagctgtatttgccatcataggaggcttcattcactgatttcccctattctcaggc

SEQ ID NO: 54045 - DNA, 120 bp, Homo sapiens
  misc_feature: 1564 for SV(W|O) and mtDNA
agaagttattatctcgaactgacactgagccacaacccaaacaacccagctctccctaagcttcaaactagactacttctccataatattcatccctgtagcattgttcgttacatggtc

SEQ ID NO: 54046 - DNA, 120 bp, Homo sapiens
  misc_feature: 1564 for SV(W|O) and mtDNA
ctatctccctaattgaaaacaaaatactcaaatgggcctgtccttgtagtataaactaatacaccagtcttgtaaaccggagatgaaaacctttttccaaggacaaatcagagaaaaagt

SEQ ID NO: 54047 - DNA, 120 bp, Homo sapiens
  misc_feature: 1564 for SV(W|O) and mtDNA
cgttgagttgtggtagtcaaaatgtaataattattagtagtaaggctaggagggtgttgattattaaaattaaggcgaagtttattactcttttttgaatgttgtcaaaactagttaatt

SEQ ID NO: 54048 - DNA, 120 bp, Homo sapiens
  misc_feature: 1564 for SV(W|O) and mtDNA
aaaccacacttatccccaccttggctatcatcacccgatgaggcaaccagccagaacgcctgaacgcaggcacatacttcctattctacaccctagtaggctcccttcccctactcatcg

SEQ ID NO: 54049 - DNA, 120 bp, Homo sapiens
  misc_feature: 1564 for SV(W|O) and mtDNA
ccctaggaagccaattgatatcatagctcagaccatacctatgtatccaaatggttctttttttccggagtagtaagttacaatatgggagattattccgaagcctggtaggataagaat

SEQ ID NO: 54050 - DNA, 120 bp, Homo sapiens
  misc_feature: 1564 for SV(W|O) and mtDNA
atccaataacttgaccaacggaacaagttaccctagggataacagcgcaatcctattctagagtccatatcaacaatagggtttacgacctcgatgttggatcaggacatcccgatggtg

SEQ ID NO: 54051 - DNA, 120 bp, Homo sapiens
  misc_feature: 1564 for SV(W|O) and mtDNA
cacacttatccccaccttggctatcatcacccgatgaggcaaccagccagaacgcctgaacgcaggcacatacttcctattctacaccctagtaggctcccttcccctactcatcgcact

SEQ ID NO: 54052 - DNA, 120 bp, Homo sapiens
  misc_feature: 1563 for SV(W|O) and mtDNA
ttactactaataattattacattttgactaccacaactcaacggctacatagaaaaatccaccccttacgagtgcggcttcgaccctatatcccccgcccgcgtccctttctccataaaa

SEQ ID NO: 54053 - DNA, 120 bp, Homo sapiens
  misc_feature: 1563 for SV(W|O) and mtDNA
ttttactctctctacaaggttttttcctagtgtccaaagagctgttcctctttggactaacagttaaatttacaaggggatttagagggttctgtgggcaaatttaaagttgaactaaga

SEQ ID NO: 54054 - DNA, 120 bp, Homo sapiens
  misc_feature: 1563 for SV(W|O) and mtDNA
ttgtggtagtcaaaatgtaataattattagtagtaaggctaggagggtgttgattattaaaattaaggcgaagtttattactcttttttgaatgttgtcaaaactagttaattggaagtt

SEQ ID NO: 54055 - DNA, 120 bp, Homo sapiens
  misc_feature: 1563 for SV(W|O) and mtDNA
tgtgggcaaatttaaagttgaactaagattctatcttggacaaccagctatcaccaggctcggtaggtttgtcgcctctacctataaatcttcccactattttgctacatagacgggtgt

SEQ ID NO: 54056 - DNA, 120 bp, Homo sapiens
  misc_feature: 1563 for SV(W|O) and mtDNA
tgagatggtaaatgctagtataatatttatgtaaatgaggggcatttggtaaatatgattatcataatttaatgagtcgaaatcattcgttttgtttaaactatataccaattcggttca

SEQ ID NO: 54057 - DNA, 120 bp, Homo sapiens
  misc_feature: 1563 for SV(W|O) and mtDNA
gaatggctgctgtgttggcatctgctcgggcgtatcatcaactgatgagcaagaaggatataattcctacgccctctcagccgatgaacagttggaataggttgttagcggtaactaaga

SEQ ID NO: 54058 - DNA, 120 bp, Homo sapiens
  misc_feature: 1563 for SV(W|O) and mtDNA
gtagaactgctattattcatcctatgtgggtaattgaggagtatgctaagattttgcgtagctgggtttggtttaatccacctcaactgcctgctatgatggataagattgagagagtga

SEQ ID NO: 54059 - DNA, 120 bp, Homo sapiens
  misc_feature: 1563 for SV(W|O) and mtDNA
tagcataatcacttgttccttaaatagggacctgtatgaatggctccacgagggttcagctgtctcttacttttaaccagtgaaattgacctgcccgtgaagaggcgggcataacacagc

SEQ ID NO: 54060 - DNA, 120 bp, Homo sapiens
  misc_feature: 1563 for SV(W|O) and mtDNA
tagaaaaaccatttcataactttgtcaaagttaaattataggctaaatcctatatatcttaatggcacatgcagcgcaagtaggtctacaagacgctacttcccctatcatagaagagct

SEQ ID NO: 54061 - DNA, 120 bp, Homo sapiens
  misc_feature: 1563 for SV(W|O) and mtDNA
taaggaacaagtgattatgctacctttgcacggttagggtaccgcggccgttaaacatgtgtcactgggcaggcggtgcctctaatactggtgatgctagaggtgatgtttttggtaaac

SEQ ID NO: 54062 - DNA, 120 bp, Homo sapiens
  misc_feature: 1563 for SV(W|O) and mtDNA
ggacctgtatgaatggctccacgagggttcagctgtctcttacttttaaccagtgaaattgacctgcccgtgaagaggcgggcataacacagcaagacgagaagaccctatggagcttta

SEQ ID NO: 54063 - DNA, 120 bp, Homo sapiens
  misc_feature: 1563 for SV(W|O) and mtDNA
gttaaatttacaaggggatttagagggttctgtgggcaaatttaaagttgaactaagattctatcttggacaaccagctatcaccaggctcggtaggtttgtcgcctctacctataaatc

SEQ ID NO: 54064 - DNA, 120 bp, Homo sapiens
  misc_feature: 1563 for SV(W|O) and mtDNA
cataatcatcgctatccccaccggcgtcaaagtatttagctgactcgccacactccacggaagcaatatgaaatgatctgctgcagtgctctgagccctaggattcatctttcttttcac

SEQ ID NO: 54065 - DNA, 120 bp, Homo sapiens
  misc_feature: 1563 for SV(W|O) and mtDNA
catttacccaaataaagtataggcgatagaaattgaaacctggcgcaatagatatagtaccgcaagggaaagatgaaaaattataaccaagcataatatagcaaggactaacccctatac

SEQ ID NO: 54066 - DNA, 120 bp, Homo sapiens
  misc_feature: 1563 for SV(W|O) and mtDNA
gtagcggaggtgaaatatgctcgtgtgtctacgtctattcctactgtaaatatatggtgtgctcacacgataaaccctaggaagccaattgatatcatagctcagaccatacctatgtat

SEQ ID NO: 54067 - DNA, 120 bp, Homo sapiens
  misc_feature: 1563 for SV(W|O) and mtDNA
ggtaaaatggctgagtgaagcattggactgtaaatctaaagacaggggttaggcctctttttaccagctccgaggtgattttcatattgaattgcaaattcgaagaagcagcttcaaacc

SEQ ID NO: 54068 - DNA, 120 bp, Homo sapiens
  misc_feature: 1563 for SV(W|O) and mtDNA
acaactcaggtgagttttagctttattggggagggggtgatctaaaacactctttacgccggcttctattgacttgggttaatcgtgtgaccgcggtggctggcacgaaattgaccaacc

SEQ ID NO: 54069 - DNA, 120 bp, Homo sapiens
  misc_feature: 1563 for SV(W|O) and mtDNA
ggggtgaggtaaaatggctgagtgaagcattggactgtaaatctaaagacaggggttaggcctctttttaccagctccgaggtgattttcatattgaattgcaaattcgaagaagcagct

SEQ ID NO: 54070 - DNA, 120 bp, Homo sapiens
  misc_feature: 1563 for SV(W|O) and mtDNA
cgttaaacatgtgtcactgggcaggcggtgcctctaatactggtgatgctagaggtgatgtttttggtaaacaggcggggtaagatttgccgagttccttttactttttttaacctttcc

SEQ ID NO: 54071 - DNA, 120 bp, Homo sapiens
  misc_feature: 1563 for SV(W|O) and mtDNA
gcgaaggcttctcaaatcatgaaaattattaatattactgctgttagagaaatgaatgagcctacagatgataggatgtttcatgtggtgtatgcatcggggtagtccgagtaacgtcgg

SEQ ID NO: 54072 - DNA, 120 bp, Homo sapiens
  misc_feature: 1563 for SV(W|O) and mtDNA
gatatataaactcagacccaaacattaatcagttcttcaaatatctactcatcttcctaattaccatactaatcttagttaccgctaacaacctattccaactgttcatcggctgagagg

SEQ ID NO: 54073 - DNA, 120 bp, Homo sapiens
  misc_feature: 1563 for SV(W|O) and mtDNA
ctatcttggacaaccagctatcaccaggctcggtaggtttgtcgcctctacctataaatcttcccactattttgctacatagacgggtgtgctcttttagctgttcttaggtagctcgtc

SEQ ID NO: 54074 - DNA, 120 bp, Homo sapiens
  misc_feature: 1563 for SV(W|O) and mtDNA
ctaggaagccaattgatatcatagctcagaccatacctatgtatccaaatggttctttttttccggagtagtaagttacaatatgggagattattccgaagcctggtaggataagaatat

SEQ ID NO: 54075 - DNA, 120 bp, Homo sapiens
  misc_feature: 1563 for SV(W|O) and mtDNA
atggtaaatgctagtataatatttatgtaaatgaggggcatttggtaaatatgattatcataatttaatgagtcgaaatcattcgttttgtttaaactatataccaattcggttcagtct

SEQ ID NO: 54076 - DNA, 120 bp, Homo sapiens
  misc_feature: 1563 for SV(W|O) and mtDNA
aattaattttattagggggttagttttgcgtattggggtcattggtgttcttgtagttgaaatacaacgatggtttttcatatcattggtcgtggttgtagtccgtgcgagaataatgat

SEQ ID NO: 54077 - DNA, 120 bp, Homo sapiens
  misc_feature: 1562 for SV(W|O) and mtDNA
ttgacaacattcaaaaaagagtaataaacttcgccttaattttaataatcaacaccctcctagccttactactaataattattacattttgactaccacaactcaacggctacatagaaa

SEQ ID NO: 54078 - DNA, 120 bp, Homo sapiens
  misc_feature: 1562 for SV(W|O) and mtDNA
tttattagggggttagttttgcgtattggggtcattggtgttcttgtagttgaaatacaacgatggtttttcatatcattggtcgtggttgtagtccgtgcgagaataatgatgtatgct

SEQ ID NO: 54079 - DNA, 120 bp, Homo sapiens
  misc_feature: 1562 for SV(W|O) and mtDNA
ttggcttcctagggtttatcgtgtgagcacaccatatatttacagtaggaatagacgtagacacacgagcatatttcacctccgctaccataatcatcgctatccccaccggcgtcaaag

SEQ ID NO: 54080 - DNA, 120 bp, Homo sapiens
  misc_feature: 1562 for SV(W|O) and mtDNA
ttaattaattttattagggggttagttttgcgtattggggtcattggtgttcttgtagttgaaatacaacgatggtttttcatatcattggtcgtggttgtagtccgtgcgagaataatg

SEQ ID NO: 54081 - DNA, 120 bp, Homo sapiens
  misc_feature: 1562 for SV(W|O) and mtDNA
gtggtagtcaaaatgtaataattattagtagtaaggctaggagggtgttgattattaaaattaaggcgaagtttattactcttttttgaatgttgtcaaaactagttaattggaagttaa

SEQ ID NO: 54082 - DNA, 120 bp, Homo sapiens
  misc_feature: 1562 for SV(W|O) and mtDNA
tgtggtagggtggggggcatccatatagtcactccaggtttatggagggttcttctactattaggacttttcgctttgaagcgaaggcttctcaaatcatgaaaattattaatattactg

SEQ ID NO: 54083 - DNA, 120 bp, Homo sapiens
  misc_feature: 1562 for SV(W|O) and mtDNA
tggcttcctagggtttatcgtgtgagcacaccatatatttacagtaggaatagacgtagacacacgagcatatttcacctccgctaccataatcatcgctatccccaccggcgtcaaagt

SEQ ID NO: 54084 - DNA, 120 bp, Homo sapiens
  misc_feature: 1562 for SV(W|O) and mtDNA
tgagctatgatatcaattggcttcctagggtttatcgtgtgagcacaccatatatttacagtaggaatagacgtagacacacgagcatatttcacctccgctaccataatcatcgctatc

SEQ ID NO: 54085 - DNA, 120 bp, Homo sapiens
  misc_feature: 1562 for SV(W|O) and mtDNA
tgaagatggcggtatataggctgagcaagaggtggtgaggttgatcggggtttatcgattacagaacaggctcctctagagggatatgaagcaccgccaggtcctttgagttttaagctg

SEQ ID NO: 54086 - DNA, 120 bp, Homo sapiens
  misc_feature: 1562 for SV(W|O) and mtDNA
tcttgttcattgttaaggttgtggatgatggacccggagcacataaatagtatggctttgaagaaggcgtgggtgcagatgtgcaggaatgctaggtgtggttggttgatgccgattgta

SEQ ID NO: 54087 - DNA, 120 bp, Homo sapiens
  misc_feature: 1562 for SV(W|O) and mtDNA
tcattcaaccaatagccctggccgtacgcctaaccgctaacattactgcaggccacctactcatgcacctaattggaagcgccaccctagcaatatcaaccattaaccttccctctacac

SEQ ID NO: 54088 - DNA, 120 bp, Homo sapiens
  misc_feature: 1562 for SV(W|O) and mtDNA
ctacagggatgaatattatggagaagtagtctagtttgaagcttagggagagctgggttgtttgggttgtggctcagtgtcagttcgagataataacttcttggtctaggcacatgaata

SEQ ID NO: 54089 - DNA, 120 bp, Homo sapiens
  misc_feature: 1562 for SV(W|O) and mtDNA
tagtggggtatctaatcccagtttgggtcttagctattgtgtgttcagatatgttaaagccactttcgtagtctattttgtgtcaactggagttttttacaactcaggtgagttttagct

SEQ ID NO: 54090 - DNA, 120 bp, Homo sapiens
  misc_feature: 1562 for SV(W|O) and mtDNA
tagaactgctattattcatcctatgtgggtaattgaggagtatgctaagattttgcgtagctgggtttggtttaatccacctcaactgcctgctatgatggataagattgagagagtgag

SEQ ID NO: 54091 - DNA, 120 bp, Homo sapiens
  misc_feature: 1562 for SV(W|O) and mtDNA
tactttaggatggggtgtgataggtggcacggagaattttggattctcagggatgggttcgattctcatagtcctagaaataagggggtttaagctcctattatttactctatcaaagta

SEQ ID NO: 54092 - DNA, 120 bp, Homo sapiens
  misc_feature: 1562 for SV(W|O) and mtDNA
taactatttatattatcctaactactaccgcattcctactactcaacttaaactccagcaccacgaccctactactatctcgcacctgaaacaagctaacatgactaacacccttaattc

SEQ ID NO: 54093 - DNA, 120 bp, Homo sapiens
  misc_feature: 1562 for SV(W|O) and mtDNA
aggtaaaatggctgagtgaagcattggactgtaaatctaaagacaggggttaggcctctttttaccagctccgaggtgattttcatattgaattgcaaattcgaagaagcagcttcaaac

SEQ ID NO: 54094 - DNA, 120 bp, Homo sapiens
  misc_feature: 1562 for SV(W|O) and mtDNA
aacaaagcataatatttcgcccactaagccaatcactttattgactcctagccgcagacctcctcattctaacctgaatcggaggacaaccagtaagctacccttttaccatcattggac

SEQ ID NO: 54095 - DNA, 120 bp, Homo sapiens
  misc_feature: 1562 for SV(W|O) and mtDNA
ggtttatcgtgtgagcacaccatatatttacagtaggaatagacgtagacacacgagcatatttcacctccgctaccataatcatcgctatccccaccggcgtcaaagtatttagctgac

SEQ ID NO: 54096 - DNA, 120 bp, Homo sapiens
  misc_feature: 1562 for SV(W|O) and mtDNA
atttttcggtcaccctgaagtttatattcttatcctaccaggcttcggaataatctcccatattgtaacttactactccggaaaaaaagaaccatttggatacataggtatggtctgagc

SEQ ID NO: 54097 - DNA, 120 bp, Homo sapiens
  misc_feature: 1562 for SV(W|O) and mtDNA
atagtggggtatctaatcccagtttgggtcttagctattgtgtgttcagatatgttaaagccactttcgtagtctattttgtgtcaactggagttttttacaactcaggtgagttttagc

SEQ ID NO: 54098 - DNA, 120 bp, Homo sapiens
  misc_feature: 1562 for SV(W|O) and mtDNA
atcactagacatcgtactacacgacacgtactacgttgtagcccacttccactatgtcctatcaataggagctgtatttgccatcataggaggcttcattcactgatttcccctattctc

SEQ ID NO: 54099 - DNA, 120 bp, Homo sapiens
  misc_feature: 1562 for SV(W|O) and mtDNA
gaaggatataattcctacgccctctcagccgatgaacagttggaataggttgttagcggtaactaagattagtatggtaattaggaagatgagtagatatttgaagaactgattaatgtt

SEQ ID NO: 54100 - DNA, 120 bp, Homo sapiens
  misc_feature: 1562 for SV(W|O) and mtDNA
agggtgacgggcggtgtgtacgcgcttcagggccctgttcaactaagcactctactctcagtttactgctaaatccaccttcgacccttaagtttcataagggctatcgtagttttctgg

SEQ ID NO: 54101 - DNA, 120 bp, Homo sapiens
  misc_feature: 1562 for SV(W|O) and mtDNA
cattcaaccaatagccctggccgtacgcctaaccgctaacattactgcaggccacctactcatgcacctaattggaagcgccaccctagcaatatcaaccattaaccttccctctacact

SEQ ID NO: 54102 - DNA, 120 bp, Homo sapiens
  misc_feature: 1562 for SV(W|O) and mtDNA
catcactagacatcgtactacacgacacgtactacgttgtagcccacttccactatgtcctatcaataggagctgtatttgccatcataggaggcttcattcactgatttcccctattct

SEQ ID NO: 54103 - DNA, 120 bp, Homo sapiens
  misc_feature: 1562 for SV(W|O) and mtDNA
aatggctgctgtgttggcatctgctcgggcgtatcatcaactgatgagcaagaaggatataattcctacgccctctcagccgatgaacagttggaataggttgttagcggtaactaagat

SEQ ID NO: 54104 - DNA, 120 bp, Homo sapiens
  misc_feature: 1562 for SV(W|O) and mtDNA
atataattcctacgccctctcagccgatgaacagttggaataggttgttagcggtaactaagattagtatggtaattaggaagatgagtagatatttgaagaactgattaatgtttgggt

SEQ ID NO: 54105 - DNA, 120 bp, Homo sapiens
  misc_feature: 1562 for SV(W|O) and mtDNA
accatttacccaaataaagtataggcgatagaaattgaaacctggcgcaatagatatagtaccgcaagggaaagatgaaaaattataaccaagcataatatagcaaggactaacccctat

SEQ ID NO: 54106 - DNA, 120 bp, Homo sapiens
  misc_feature: 1561 for SV(W|O) and mtDNA
cttagccaatattgtgcctattgccatactagtctttgccgcctgcgaagcagcggtgggcctagccctactagtctcaatctccaacacatatggcctagactacgtacataacctaaa

SEQ ID NO: 54107 - DNA, 120 bp, Homo sapiens
  misc_feature: 1561 for SV(W|O) and mtDNA
agctgttatcctttaaaagttgagaaagccatgttgttagacatgggggcatgagttagcagttcttgtgagctttctcggtaaataaggggtcgtaagcctctgttgtcagattcacaa

SEQ ID NO: 54108 - DNA, 120 bp, Homo sapiens
  misc_feature: 1561 for SV(W|O) and mtDNA
accctaggaagccaattgatatcatagctcagaccatacctatgtatccaaatggttctttttttccggagtagtaagttacaatatgggagattattccgaagcctggtaggataagaa

SEQ ID NO: 54109 - DNA, 120 bp, Homo sapiens
  misc_feature: 1561 for SV(W|O) and mtDNA
aaatccatttcactatcatattcatcggcgtaaatctaactttcttcccacaacactttctcggcctatccggaatgccccgacgttactcggactaccccgatgcatacaccacatgaa

SEQ ID NO: 54110 - DNA, 120 bp, Homo sapiens
  misc_feature: 1561 for SV(W|O) and mtDNA
ccttactactaataattattacattttgactaccacaactcaacggctacatagaaaaatccaccccttacgagtgcggcttcgaccctatatcccccgcccgcgtccctttctccataa

SEQ ID NO: 54111 - DNA, 120 bp, Homo sapiens
  misc_feature: 1561 for SV(W|O) and mtDNA
tggctaggctaagcgttttgagctgcattgctgcgtgcttgatgcttgtcccttttgatcgtggtgatttagagggtgaactcactggaacggggatgcttgcatgtgtaatcttactaa

SEQ ID NO: 54112 - DNA, 120 bp, Homo sapiens
  misc_feature: 1561 for SV(W|O) and mtDNA
ctctttacgccggcttctattgacttgggttaatcgtgtgaccgcggtggctggcacgaaattgaccaaccctggggttagtatagcttagttaaactttcgtttattgctaaaggttaa

SEQ ID NO: 54113 - DNA, 120 bp, Homo sapiens
  misc_feature: 1561 for SV(W|O) and mtDNA
ttaaatttacaaggggatttagagggttctgtgggcaaatttaaagttgaactaagattctatcttggacaaccagctatcaccaggctcggtaggtttgtcgcctctacctataaatct

SEQ ID NO: 54114 - DNA, 120 bp, Homo sapiens
  misc_feature: 1561 for SV(W|O) and mtDNA
cagaactaatcatattttatatcttcttcgaaaccacacttatccccaccttggctatcatcacccgatgaggcaaccagccagaacgcctgaacgcaggcacatacttcctattctaca

SEQ ID NO: 54115 - DNA, 120 bp, Homo sapiens
  misc_feature: 1561 for SV(W|O) and mtDNA
tggctgctgtgttggcatctgctcgggcgtatcatcaactgatgagcaagaaggatataattcctacgccctctcagccgatgaacagttggaataggttgttagcggtaactaagatta

SEQ ID NO: 54116 - DNA, 120 bp, Homo sapiens
  misc_feature: 1561 for SV(W|O) and mtDNA
agcacaccatatatttacagtaggaatagacgtagacacacgagcatatttcacctccgctaccataatcatcgctatccccaccggcgtcaaagtatttagctgactcgccacactcca

SEQ ID NO: 54117 - DNA, 120 bp, Homo sapiens
  misc_feature: 1561 for SV(W|O) and mtDNA
tgccatactagtctttgccgcctgcgaagcagcggtgggcctagccctactagtctcaatctccaacacatatggcctagactacgtacataacctaaacctactccaatgctaaaacta

SEQ ID NO: 54118 - DNA, 120 bp, Homo sapiens
  misc_feature: 1561 for SV(W|O) and mtDNA
caccttggctatcatcacccgatgaggcaaccagccagaacgcctgaacgcaggcacatacttcctattctacaccctagtaggctcccttcccctactcatcgcactaatttacactca

SEQ ID NO: 54119 - DNA, 120 bp, Homo sapiens
  misc_feature: 1561 for SV(W|O) and mtDNA
tgaagcctcctatgatggcaaatacagctcctattgataggacatagtggaagtgggctacaacgtagtacgtgtcgtgtagtacgatgtctagtgatgagtttgctaatacaatgccag

SEQ ID NO: 54120 - DNA, 120 bp, Homo sapiens
  misc_feature: 1561 for SV(W|O) and mtDNA
atgtgttttttggaaagtcatgtcagtggtagtaatataattgttgggacgattagttttagcattggagtaggtttaggttatgtacgtagtctaggccatatgtgttggagattgaga

SEQ ID NO: 54121 - DNA, 120 bp, Homo sapiens
  misc_feature: 1561 for SV(W|O) and mtDNA
tcgggatgtcctgatccaacatcgaggtcgtaaaccctattgttgatatggactctagaataggattgcgctgttatccctagggtaacttgttccgttggtcaagttattggatcaatt

SEQ ID NO: 54122 - DNA, 120 bp, Homo sapiens
  misc_feature: 1561 for SV(W|O) and mtDNA
gtttcaggtttctgagtagagaaatgatccgtaatataggcctcgcccgatgtgtaggaagaggcagataaagaatattgaggcgccattggcgtgaaggtagcggatgattcagccata

SEQ ID NO: 54123 - DNA, 120 bp, Homo sapiens
  misc_feature: 1561 for SV(W|O) and mtDNA
attttttactctctctacaaggttttttcctagtgtccaaagagctgttcctctttggactaacagttaaatttacaaggggatttagagggttctgtgggcaaatttaaagttgaacta

SEQ ID NO: 54124 - DNA, 120 bp, Homo sapiens
  misc_feature: 1561 for SV(W|O) and mtDNA
attgcttgaatggctgctgtgttggcatctgctcgggcgtatcatcaactgatgagcaagaaggatataattcctacgccctctcagccgatgaacagttggaataggttgttagcggta

SEQ ID NO: 54125 - DNA, 120 bp, Homo sapiens
  misc_feature: 1561 for SV(W|O) and mtDNA
atgaatggctccacgagggttcagctgtctcttacttttaaccagtgaaattgacctgcccgtgaagaggcgggcataacacagcaagacgagaagaccctatggagctttaatttatta

SEQ ID NO: 54126 - DNA, 120 bp, Homo sapiens
  misc_feature: 1561 for SV(W|O) and mtDNA
actatcctagaaatcgctgtcgccttaatccaagcctacgttttcacacttctagtaagcctctacctgcacgacaacacataatgacccaccaatcacatgcctatcatatagtaaaac

SEQ ID NO: 54127 - DNA, 120 bp, Homo sapiens
  misc_feature: 1561 for SV(W|O) and mtDNA
cgcctgtaatattgaacgtaggtgcgataaataatgggatgaggcaggaatcaaagacagatactgcgacatagggtgctccggctccagcgtctcgcaatgctatcgcgtgcatacccc

SEQ ID NO: 54128 - DNA, 120 bp, Homo sapiens
  misc_feature: 1561 for SV(W|O) and mtDNA
gctaactcatgcccccatgtctaacaacatggctttctcaacttttaaaggataacagctatccattggtcttaggccccaaaaattttggtgcaactccaaataaaagtaataaccatg

SEQ ID NO: 54129 - DNA, 120 bp, Homo sapiens
  misc_feature: 1561 for SV(W|O) and mtDNA
gatataattcctacgccctctcagccgatgaacagttggaataggttgttagcggtaactaagattagtatggtaattaggaagatgagtagatatttgaagaactgattaatgtttggg

SEQ ID NO: 54130 - DNA, 120 bp, Homo sapiens
  misc_feature: 1561 for SV(W|O) and mtDNA
cttgcaaagttatttctagttaattcattatgcagaaggtataggggttagtccttgctatattatgcttggttataatttttcatctttcccttgcggtactatatctattgcgccagg

SEQ ID NO: 54131 - DNA, 120 bp, Homo sapiens
  misc_feature: 1561 for SV(W|O) and mtDNA
ctggcgcaatagatatagtaccgcaagggaaagatgaaaaattataaccaagcataatatagcaaggactaacccctataccttctgcataatgaattaactagaaataactttgcaagg

SEQ ID NO: 54132 - DNA, 120 bp, Homo sapiens
  misc_feature: 1561 for SV(W|O) and mtDNA
cgttcaggcgttctggctggttgcctcatcgggtgatgatagccaaggtggggataagtgtggtttcgaagaagatataaaatatgattagttctgtggctgtgaatgttataattaagg

SEQ ID NO: 54133 - DNA, 120 bp, Homo sapiens
  misc_feature: 1561 for SV(W|O) and mtDNA
catggcaagccaacgccacttatccagtgaaccactatcacgaaaaaaactctacctctctatactaatctccctacaaatctccttaattataacattcacagccacagaactaatcat

SEQ ID NO: 54134 - DNA, 120 bp, Homo sapiens
  misc_feature: 1561 for SV(W|O) and mtDNA
actgtttgcattaataaattaaagctccatagggtcttctcgtcttgctgtgttatgcccgcctcttcacgggcaggtcaatttcactggttaaaagtaagagacagctgaaccctcgtg

SEQ ID NO: 54135 - DNA, 120 bp, Homo sapiens
  misc_feature: 1561 for SV(W|O) and mtDNA
acaacattcaaaaaagagtaataaacttcgccttaattttaataatcaacaccctcctagccttactactaataattattacattttgactaccacaactcaacggctacatagaaaaat

SEQ ID NO: 54136 - DNA, 120 bp, Homo sapiens
  misc_feature: 1560 for SV(W|O) and mtDNA
tttttgtagccacaggcttccacggacttcacgtcattattggctcaactttcctcactatctgcttcatccgccaactaatatttcactttacatccaaacatcactttggcttcgaag

SEQ ID NO: 54137 - DNA, 120 bp, Homo sapiens
  misc_feature: 1560 for SV(W|O) and mtDNA
ttttctggggtagaaaatgtagcccatttcttgccacctcatgggctacaccttgacctaacgtctttacgtgggtacttgcgcttactttgtagccttcatcagggtttgctgaagatg

SEQ ID NO: 54138 - DNA, 120 bp, Homo sapiens
  misc_feature: 1560 for SV(W|O) and mtDNA
tttggatacataggtatggtctgagctatgatatcaattggcttcctagggtttatcgtgtgagcacaccatatatttacagtaggaatagacgtagacacacgagcatatttcacctcc

SEQ ID NO: 54139 - DNA, 120 bp, Homo sapiens
  misc_feature: 1560 for SV(W|O) and mtDNA
tttcaggtttctgagtagagaaatgatccgtaatataggcctcgcccgatgtgtaggaagaggcagataaagaatattgaggcgccattggcgtgaaggtagcggatgattcagccataa

SEQ ID NO: 54140 - DNA, 120 bp, Homo sapiens
  misc_feature: 1560 for SV(W|O) and mtDNA
tttacaaggggatttagagggttctgtgggcaaatttaaagttgaactaagattctatcttggacaaccagctatcaccaggctcggtaggtttgtcgcctctacctataaatcttccca

SEQ ID NO: 54141 - DNA, 120 bp, Homo sapiens
  misc_feature: 1560 for SV(W|O) and mtDNA
ttaccgggttttcctcttgtaaatatagtttaaccaaaacatcagattgtgaatctgacaacagaggcttacgaccccttatttaccgagaaagctcacaagaactgctaactcatgccc

SEQ ID NO: 54142 - DNA, 120 bp, Homo sapiens
  misc_feature: 1560 for SV(W|O) and mtDNA
ttacaccaaccacccaactatctataaacctagccatggccatccccttatgagcgggcgcagtgattataggctttcgctctaagattaaaaatgccctagcccacttcttaccacaag

SEQ ID NO: 54143 - DNA, 120 bp, Homo sapiens
  misc_feature: 1560 for SV(W|O) and mtDNA
ttaatgtttgggtctgagtttatatatcacagtgagaattctatgatggaccatgtaacgaacaatgctacagggatgaatattatggagaagtagtctagtttgaagcttagggagagc

SEQ ID NO: 54144 - DNA, 120 bp, Homo sapiens
  misc_feature: 1560 for SV(W|O) and mtDNA
ttaactagttttgacaacattcaaaaaagagtaataaacttcgccttaattttaataatcaacaccctcctagccttactactaataattattacattttgactaccacaactcaacggc

SEQ ID NO: 54145 - DNA, 120 bp, Homo sapiens
  misc_feature: 1560 for SV(W|O) and mtDNA
ctatgatatcaattggcttcctagggtttatcgtgtgagcacaccatatatttacagtaggaatagacgtagacacacgagcatatttcacctccgctaccataatcatcgctatcccca

SEQ ID NO: 54146 - DNA, 120 bp, Homo sapiens
  misc_feature: 1560 for SV(W|O) and mtDNA
cggggtcgaagaaggtggtgttgaggttgcggtctgttagtagtatagtgatgccagcagctaggactgggagagataggagaagtaggactgctgtgattaggacggatcagacgaaga

SEQ ID NO: 54147 - DNA, 120 bp, Homo sapiens
  misc_feature: 1560 for SV(W|O) and mtDNA
tccaataacttgaccaacggaacaagttaccctagggataacagcgcaatcctattctagagtccatatcaacaatagggtttacgacctcgatgttggatcaggacatcccgatggtgc

SEQ ID NO: 54148 - DNA, 120 bp, Homo sapiens
  misc_feature: 1560 for SV(W|O) and mtDNA
taattaattttattagggggttagttttgcgtattggggtcattggtgttcttgtagttgaaatacaacgatggtttttcatatcattggtcgtggttgtagtccgtgcgagaataatga

SEQ ID NO: 54149 - DNA, 120 bp, Homo sapiens
  misc_feature: 1560 for SV(W|O) and mtDNA
atgagcaagaaggatataattcctacgccctctcagccgatgaacagttggaataggttgttagcggtaactaagattagtatggtaattaggaagatgagtagatatttgaagaactga

SEQ ID NO: 54150 - DNA, 120 bp, Homo sapiens
  misc_feature: 1560 for SV(W|O) and mtDNA
ctatgtagccgttgagttgtggtagtcaaaatgtaataattattagtagtaaggctaggagggtgttgattattaaaattaaggcgaagtttattactcttttttgaatgttgtcaaaac

SEQ ID NO: 54151 - DNA, 120 bp, Homo sapiens
  misc_feature: 1560 for SV(W|O) and mtDNA
gtgggcaaatttaaagttgaactaagattctatcttggacaaccagctatcaccaggctcggtaggtttgtcgcctctacctataaatcttcccactattttgctacatagacgggtgtg

SEQ ID NO: 54152 - DNA, 120 bp, Homo sapiens
  misc_feature: 1560 for SV(W|O) and mtDNA
ggtttacgacctcgatgttggatcaggacatcccgatggtgcagccgctattaaaggttcgtttgttcaacgattaaagtcctacgtgatctgagttcagaccggagtaatccaggtcgg

SEQ ID NO: 54153 - DNA, 120 bp, Homo sapiens
  misc_feature: 1560 for SV(W|O) and mtDNA
gcctgtaatattgaacgtaggtgcgataaataatgggatgaggcaggaatcaaagacagatactgcgacatagggtgctccggctccagcgtctcgcaatgctatcgcgtgcataccccc

SEQ ID NO: 54154 - DNA, 120 bp, Homo sapiens
  misc_feature: 1560 for SV(W|O) and mtDNA
ggatataattcctacgccctctcagccgatgaacagttggaataggttgttagcggtaactaagattagtatggtaattaggaagatgagtagatatttgaagaactgattaatgtttgg

SEQ ID NO: 54155 - DNA, 120 bp, Homo sapiens
  misc_feature: 1560 for SV(W|O) and mtDNA
aatttacaaggggatttagagggttctgtgggcaaatttaaagttgaactaagattctatcttggacaaccagctatcaccaggctcggtaggtttgtcgcctctacctataaatcttcc

SEQ ID NO: 54156 - DNA, 120 bp, Homo sapiens
  misc_feature: 1560 for SV(W|O) and mtDNA
gctgttatcctttaaaagttgagaaagccatgttgttagacatgggggcatgagttagcagttcttgtgagctttctcggtaaataaggggtcgtaagcctctgttgtcagattcacaat

SEQ ID NO: 54157 - DNA, 120 bp, Homo sapiens
  misc_feature: 1560 for SV(W|O) and mtDNA
gatatcaattggcttcctagggtttatcgtgtgagcacaccatatatttacagtaggaatagacgtagacacacgagcatatttcacctccgctaccataatcatcgctatccccaccgg

SEQ ID NO: 54158 - DNA, 120 bp, Homo sapiens
  misc_feature: 1560 for SV(W|O) and mtDNA
atttggatacataggtatggtctgagctatgatatcaattggcttcctagggtttatcgtgtgagcacaccatatatttacagtaggaatagacgtagacacacgagcatatttcacctc

SEQ ID NO: 54159 - DNA, 120 bp, Homo sapiens
  misc_feature: 1560 for SV(W|O) and mtDNA
ctcactatctgcttcatccgccaactaatatttcactttacatccaaacatcactttggcttcgaagccgccgcctgatactggcattttgtagatgtggtttgactatttctgtatgtc

SEQ ID NO: 54160 - DNA, 120 bp, Homo sapiens
  misc_feature: 1560 for SV(W|O) and mtDNA
actaataattattacattttgactaccacaactcaacggctacatagaaaaatccaccccttacgagtgcggcttcgaccctatatcccccgcccgcgtccctttctccataaaattctt

SEQ ID NO: 54161 - DNA, 120 bp, Homo sapiens
  misc_feature: 1560 for SV(W|O) and mtDNA
aaacaacaaagcataatatttcgcccactaagccaatcactttattgactcctagccgcagacctcctcattctaacctgaatcggaggacaaccagtaagctacccttttaccatcatt

SEQ ID NO: 54162 - DNA, 120 bp, Homo sapiens
  misc_feature: 1559 for SV(W|O) and mtDNA
cagctctttggacactaggaaaaaaccttgtagagagagtaaaaaatttaacacccatagtaggcctaaaagcagccaccaattaagaaagcgttcaagctcaacacccactacctaaaa

SEQ ID NO: 54163 - DNA, 120 bp, Homo sapiens
  misc_feature: 1559 for SV(W|O) and mtDNA
ttttacaactcaggtgagttttagctttattggggagggggtgatctaaaacactctttacgccggcttctattgacttgggttaatcgtgtgaccgcggtggctggcacgaaattgacc

SEQ ID NO: 54164 - DNA, 120 bp, Homo sapiens
  misc_feature: 1559 for SV(W|O) and mtDNA
caatcatggcaagccaacgccacttatccagtgaaccactatcacgaaaaaaactctacctctctatactaatctccctacaaatctccttaattataacattcacagccacagaactaa

SEQ ID NO: 54165 - DNA, 120 bp, Homo sapiens
  misc_feature: 1559 for SV(W|O) and mtDNA
tcttagccaatattgtgcctattgccatactagtctttgccgcctgcgaagcagcggtgggcctagccctactagtctcaatctccaacacatatggcctagactacgtacataacctaa

SEQ ID NO: 54166 - DNA, 120 bp, Homo sapiens
  misc_feature: 1559 for SV(W|O) and mtDNA
tggcgcttccaattaggtgcatgagtaggtggcctgcagtaatgttagcggttaggcgtacggccagggctattggttgaatgagtaggctgatggtttcgataataactagtatgggga

SEQ ID NO: 54167 - DNA, 120 bp, Homo sapiens
  misc_feature: 1559 for SV(W|O) and mtDNA
tgcttgaatggctgctgtgttggcatctgctcgggcgtatcatcaactgatgagcaagaaggatataattcctacgccctctcagccgatgaacagttggaataggttgttagcggtaac

SEQ ID NO: 54168 - DNA, 120 bp, Homo sapiens
  misc_feature: 1559 for SV(W|O) and mtDNA
tcttctactattaggacttttcgctttgaagcgaaggcttctcaaatcatgaaaattattaatattactgctgttagagaaatgaatgagcctacagatgataggatgtttcatgtggtg

SEQ ID NO: 54169 - DNA, 120 bp, Homo sapiens
  misc_feature: 1559 for SV(W|O) and mtDNA
atcacttgttccttaaatagggacctgtatgaatggctccacgagggttcagctgtctcttacttttaaccagtgaaattgacctgcccgtgaagaggcgggcataacacagcaagacga

SEQ ID NO: 54170 - DNA, 120 bp, Homo sapiens
  misc_feature: 1559 for SV(W|O) and mtDNA
tatgtgttttttggaaagtcatgtcagtggtagtaatataattgttgggacgattagttttagcattggagtaggtttaggttatgtacgtagtctaggccatatgtgttggagattgag

SEQ ID NO: 54171 - DNA, 120 bp, Homo sapiens
  misc_feature: 1559 for SV(W|O) and mtDNA
catgcccccatgtctaacaacatggctttctcaacttttaaaggataacagctatccattggtcttaggccccaaaaattttggtgcaactccaaataaaagtaataaccatgcacacta

SEQ ID NO: 54172 - DNA, 120 bp, Homo sapiens
  misc_feature: 1559 for SV(W|O) and mtDNA
tagcattggagtaggtttaggttatgtacgtagtctaggccatatgtgttggagattgagactagtagggctaggcccaccgctgcttcgcaggcggcaaagactagtatggcaataggc

SEQ ID NO: 54173 - DNA, 120 bp, Homo sapiens
  misc_feature: 1559 for SV(W|O) and mtDNA
gggctaggcccaccgctgcttcgcaggcggcaaagactagtatggcaataggcacaatattggctaagagggagtgggtgttgagggttatgagagtagctataatgaacagcgatagta

SEQ ID NO: 54174 - DNA, 120 bp, Homo sapiens
  misc_feature: 1559 for SV(W|O) and mtDNA
gtttatatatcacagtgagaattctatgatggaccatgtaacgaacaatgctacagggatgaatattatggagaagtagtctagtttgaagcttagggagagctgggttgtttgggttgt

SEQ ID NO: 54175 - DNA, 120 bp, Homo sapiens
  misc_feature: 1559 for SV(W|O) and mtDNA
ctatcctagaaatcgctgtcgccttaatccaagcctacgttttcacacttctagtaagcctctacctgcacgacaacacataatgacccaccaatcacatgcctatcatatagtaaaacc

SEQ ID NO: 54176 - DNA, 120 bp, Homo sapiens
  misc_feature: 1559 for SV(W|O) and mtDNA
gggtgacgggcggtgtgtacgcgcttcagggccctgttcaactaagcactctactctcagtttactgctaaatccaccttcgacccttaagtttcataagggctatcgtagttttctggg

SEQ ID NO: 54177 - DNA, 120 bp, Homo sapiens
  misc_feature: 1559 for SV(W|O) and mtDNA
gcggctgcaccatcgggatgtcctgatccaacatcgaggtcgtaaaccctattgttgatatggactctagaataggattgcgctgttatccctagggtaacttgttccgttggtcaagtt

SEQ ID NO: 54178 - DNA, 120 bp, Homo sapiens
  misc_feature: 1559 for SV(W|O) and mtDNA
gatgttggatcaggacatcccgatggtgcagccgctattaaaggttcgtttgttcaacgattaaagtcctacgtgatctgagttcagaccggagtaatccaggtcggtttctatctactt

SEQ ID NO: 54179 - DNA, 120 bp, Homo sapiens
  misc_feature: 1559 for SV(W|O) and mtDNA
ctgagctatgatatcaattggcttcctagggtttatcgtgtgagcacaccatatatttacagtaggaatagacgtagacacacgagcatatttcacctccgctaccataatcatcgctat

SEQ ID NO: 54180 - DNA, 120 bp, Homo sapiens
  misc_feature: 1559 for SV(W|O) and mtDNA
actagacatcgtactacacgacacgtactacgttgtagcccacttccactatgtcctatcaataggagctgtatttgccatcataggaggcttcattcactgatttcccctattctcagg

SEQ ID NO: 54181 - DNA, 120 bp, Homo sapiens
  misc_feature: 1559 for SV(W|O) and mtDNA
ccctgaagtttatattcttatcctaccaggcttcggaataatctcccatattgtaacttactactccggaaaaaaagaaccatttggatacataggtatggtctgagctatgatatcaat

SEQ ID NO: 54182 - DNA, 120 bp, Homo sapiens
  misc_feature: 1559 for SV(W|O) and mtDNA
ccatactagtctttgccgcctgcgaagcagcggtgggcctagccctactagtctcaatctccaacacatatggcctagactacgtacataacctaaacctactccaatgctaaaactaat

SEQ ID NO: 54183 - DNA, 120 bp, Homo sapiens
  misc_feature: 1559 for SV(W|O) and mtDNA
aggcccaccgctgcttcgcaggcggcaaagactagtatggcaataggcacaatattggctaagagggagtgggtgttgagggttatgagagtagctataatgaacagcgatagtattatt

SEQ ID NO: 54184 - DNA, 120 bp, Homo sapiens
  misc_feature: 1558 for SV(W|O) and mtDNA
ttttttacaactcaggtgagttttagctttattggggagggggtgatctaaaacactctttacgccggcttctattgacttgggttaatcgtgtgaccgcggtggctggcacgaaattga

SEQ ID NO: 54185 - DNA, 120 bp, Homo sapiens
  misc_feature: 1558 for SV(W|O) and mtDNA
ccttactttaggatggggtgtgataggtggcacggagaattttggattctcagggatgggttcgattctcatagtcctagaaataagggggtttaagctcctattatttactctatcaaa

SEQ ID NO: 54186 - DNA, 120 bp, Homo sapiens
  misc_feature: 1558 for SV(W|O) and mtDNA
agatcaggttcgtcctttagtgttgtgtatggttatcatttgttttgaggttagtttgattagtcattgttgggtggtgattagtcggttgttgatgagatatttggaggtggggatcaa

SEQ ID NO: 54187 - DNA, 120 bp, Homo sapiens
  misc_feature: 1558 for SV(W|O) and mtDNA
ttgagtattttgttttcaattagggagatagttggtattaggattaggattgttgtgaagtatagtacggatgctacttgtccaatgatggtaaaagggtagcttactggttgtcctccg

SEQ ID NO: 54188 - DNA, 120 bp, Homo sapiens
  misc_feature: 1558 for SV(W|O) and mtDNA
ttaggtgcatgagtaggtggcctgcagtaatgttagcggttaggcgtacggccagggctattggttgaatgagtaggctgatggtttcgataataactagtatggggataaggggtgtag

SEQ ID NO: 54189 - DNA, 120 bp, Homo sapiens
  misc_feature: 1558 for SV(W|O) and mtDNA
ttactctctctacaaggttttttcctagtgtccaaagagctgttcctctttggactaacagttaaatttacaaggggatttagagggttctgtgggcaaatttaaagttgaactaagatt

SEQ ID NO: 54190 - DNA, 120 bp, Homo sapiens
  misc_feature: 1558 for SV(W|O) and mtDNA
tgttcgcctgtaatattgaacgtaggtgcgataaataatgggatgaggcaggaatcaaagacagatactgcgacatagggtgctccggctccagcgtctcgcaatgctatcgcgtgcata

SEQ ID NO: 54191 - DNA, 120 bp, Homo sapiens
  misc_feature: 1558 for SV(W|O) and mtDNA
tcgaaaccacacttatccccaccttggctatcatcacccgatgaggcaaccagccagaacgcctgaacgcaggcacatacttcctattctacaccctagtaggctcccttcccctactca

SEQ ID NO: 54192 - DNA, 120 bp, Homo sapiens
  misc_feature: 1558 for SV(W|O) and mtDNA
tctatcttggacaaccagctatcaccaggctcggtaggtttgtcgcctctacctataaatcttcccactattttgctacatagacgggtgtgctcttttagctgttcttaggtagctcgt

SEQ ID NO: 54193 - DNA, 120 bp, Homo sapiens
  misc_feature: 1558 for SV(W|O) and mtDNA
acacttatccccaccttggctatcatcacccgatgaggcaaccagccagaacgcctgaacgcaggcacatacttcctattctacaccctagtaggctcccttcccctactcatcgcacta

SEQ ID NO: 54194 - DNA, 120 bp, Homo sapiens
  misc_feature: 1558 for SV(W|O) and mtDNA
taggtgcatgagtaggtggcctgcagtaatgttagcggttaggcgtacggccagggctattggttgaatgagtaggctgatggtttcgataataactagtatggggataaggggtgtagg

SEQ ID NO: 54195 - DNA, 120 bp, Homo sapiens
  misc_feature: 1558 for SV(W|O) and mtDNA
aaccatttacccaaataaagtataggcgatagaaattgaaacctggcgcaatagatatagtaccgcaagggaaagatgaaaaattataaccaagcataatatagcaaggactaaccccta

SEQ ID NO: 54196 - DNA, 120 bp, Homo sapiens
  misc_feature: 1558 for SV(W|O) and mtDNA
tacagggatgaatattatggagaagtagtctagtttgaagcttagggagagctgggttgtttgggttgtggctcagtgtcagttcgagataataacttcttggtctaggcacatgaatat

SEQ ID NO: 54197 - DNA, 120 bp, Homo sapiens
  misc_feature: 1558 for SV(W|O) and mtDNA
cggctgcaccatcgggatgtcctgatccaacatcgaggtcgtaaaccctattgttgatatggactctagaataggattgcgctgttatccctagggtaacttgttccgttggtcaagtta

SEQ ID NO: 54198 - DNA, 120 bp, Homo sapiens
  misc_feature: 1558 for SV(W|O) and mtDNA
gtttctgagtagagaaatgatccgtaatataggcctcgcccgatgtgtaggaagaggcagataaagaatattgaggcgccattggcgtgaaggtagcggatgattcagccataatttacg

SEQ ID NO: 54199 - DNA, 120 bp, Homo sapiens
  misc_feature: 1558 for SV(W|O) and mtDNA
gagatggtaaatgctagtataatatttatgtaaatgaggggcatttggtaaatatgattatcataatttaatgagtcgaaatcattcgttttgtttaaactatataccaattcggttcag

SEQ ID NO: 54200 - DNA, 120 bp, Homo sapiens
  misc_feature: 1557 for SV(W|O) and mtDNA
tttgggattttttaggtagtgggtgttgagcttgaacgctttcttaattggtggctgcttttaggcctactatgggtgttaaattttttactctctctacaaggttttttcctagtgtcc

SEQ ID NO: 54201 - DNA, 120 bp, Homo sapiens
  misc_feature: 1557 for SV(W|O) and mtDNA
tcacaatcatggcaagccaacgccacttatccagtgaaccactatcacgaaaaaaactctacctctctatactaatctccctacaaatctccttaattataacattcacagccacagaac

SEQ ID NO: 54202 - DNA, 120 bp, Homo sapiens
  misc_feature: 1557 for SV(W|O) and mtDNA
tacaaggacaggcccatttgagtattttgttttcaattagggagatagttggtattaggattaggattgttgtgaagtatagtacggatgctacttgtccaatgatggtaaaagggtagc

SEQ ID NO: 54203 - DNA, 120 bp, Homo sapiens
  misc_feature: 1557 for SV(W|O) and mtDNA
gggcaaatttaaagttgaactaagattctatcttggacaaccagctatcaccaggctcggtaggtttgtcgcctctacctataaatcttcccactattttgctacatagacgggtgtgct

SEQ ID NO: 54204 - DNA, 120 bp, Homo sapiens
  misc_feature: 1557 for SV(W|O) and mtDNA
ggaggctttggcaactgactagttcccctaataatcggtgcccccgatatggcgtttccccgcataaacaacataagcttctgactcttacctccctctctcctactcctgctcgcatct

SEQ ID NO: 54205 - DNA, 120 bp, Homo sapiens
  misc_feature: 1557 for SV(W|O) and mtDNA
gaagaactgattaatgtttgggtctgagtttatatatcacagtgagaattctatgatggaccatgtaacgaacaatgctacagggatgaatattatggagaagtagtctagtttgaagct

SEQ ID NO: 54206 - DNA, 120 bp, Homo sapiens
  misc_feature: 1557 for SV(W|O) and mtDNA
caataacttgaccaacggaacaagttaccctagggataacagcgcaatcctattctagagtccatatcaacaatagggtttacgacctcgatgttggatcaggacatcccgatggtgcag

SEQ ID NO: 54207 - DNA, 120 bp, Homo sapiens
  misc_feature: 1557 for SV(W|O) and mtDNA
caaaatccatttcactatcatattcatcggcgtaaatctaactttcttcccacaacactttctcggcctatccggaatgccccgacgttactcggactaccccgatgcatacaccacatg

SEQ ID NO: 54208 - DNA, 120 bp, Homo sapiens
  misc_feature: 1557 for SV(W|O) and mtDNA
atttatatagaggagacaagtcgtaacatggtaagtgtactggaaagtgcacttggacgaaccagagtgtagcttaacacaaagcacccaacttacacttaggagatttcaacttaactt

SEQ ID NO: 54209 - DNA, 120 bp, Homo sapiens
  misc_feature: 1557 for SV(W|O) and mtDNA
aacgctttcttaattggtggctgcttttaggcctactatgggtgttaaattttttactctctctacaaggttttttcctagtgtccaaagagctgttcctctttggactaacagttaaat

SEQ ID NO: 54210 - DNA, 120 bp, Homo sapiens
  misc_feature: 1557 for SV(W|O) and mtDNA
attgcttccgtggagtgtggcgagtcagctaaatactttgacgccggtggggatagcgatgattatggtagcggaggtgaaatatgctcgtgtgtctacgtctattcctactgtaaatat

SEQ ID NO: 54211 - DNA, 120 bp, Homo sapiens
  misc_feature: 1557 for SV(W|O) and mtDNA
atagtaccgttaacttccaattaactagttttgacaacattcaaaaaagagtaataaacttcgccttaattttaataatcaacaccctcctagccttactactaataattattacatttt

SEQ ID NO: 54212 - DNA, 120 bp, Homo sapiens
  misc_feature: 1557 for SV(W|O) and mtDNA
actatacctattattcggcgcatgagctggagtcctaggcacagctctaagcctccttattcgagccgagctgggccagccaggcaaccttctaggtaacgaccacatctacaacgttat

SEQ ID NO: 54213 - DNA, 120 bp, Homo sapiens
  misc_feature: 1556 for SV(W|O) and mtDNA
gaggtaaaatggctgagtgaagcattggactgtaaatctaaagacaggggttaggcctctttttaccagctccgaggtgattttcatattgaattgcaaattcgaagaagcagcttcaaa

SEQ ID NO: 54214 - DNA, 120 bp, Homo sapiens
  misc_feature: 1556 for SV(W|O) and mtDNA
ttggatacataggtatggtctgagctatgatatcaattggcttcctagggtttatcgtgtgagcacaccatatatttacagtaggaatagacgtagacacacgagcatatttcacctccg

SEQ ID NO: 54215 - DNA, 120 bp, Homo sapiens
  misc_feature: 1556 for SV(W|O) and mtDNA
ttgatctagaaattgccctccttttacccctaccatgagccctacaaacaactaacctgccactaatagttatgtcatccctcttattaatcatcatcctagccctaagtctggcctatg

SEQ ID NO: 54216 - DNA, 120 bp, Homo sapiens
  misc_feature: 1556 for SV(W|O) and mtDNA
ttctgatttttcggtcaccctgaagtttatattcttatcctaccaggcttcggaataatctcccatattgtaacttactactccggaaaaaaagaaccatttggatacataggtatggtc

SEQ ID NO: 54217 - DNA, 120 bp, Homo sapiens
  misc_feature: 1556 for SV(W|O) and mtDNA
ttatgtgttttttggaaagtcatgtcagtggtagtaatataattgttgggacgattagttttagcattggagtaggtttaggttatgtacgtagtctaggccatatgtgttggagattga

SEQ ID NO: 54218 - DNA, 120 bp, Homo sapiens
  misc_feature: 1556 for SV(W|O) and mtDNA
actttaggatggggtgtgataggtggcacggagaattttggattctcagggatgggttcgattctcatagtcctagaaataagggggtttaagctcctattatttactctatcaaagtaa

SEQ ID NO: 54219 - DNA, 120 bp, Homo sapiens
  misc_feature: 1556 for SV(W|O) and mtDNA
tgtagccacaggcttccacggacttcacgtcattattggctcaactttcctcactatctgcttcatccgccaactaatatttcactttacatccaaacatcactttggcttcgaagccgc

SEQ ID NO: 54220 - DNA, 120 bp, Homo sapiens
  misc_feature: 1556 for SV(W|O) and mtDNA
ccaagtattgactcacccatcaacaaccgctatgtatttcgtacattactgccagccaccatgaatattgtacggtaccataaatacttgaccacctgtagtacataaaaacccaatcca

SEQ ID NO: 54221 - DNA, 120 bp, Homo sapiens
  misc_feature: 1556 for SV(W|O) and mtDNA
tgcccccatgtctaacaacatggctttctcaacttttaaaggataacagctatccattggtcttaggccccaaaaattttggtgcaactccaaataaaagtaataaccatgcacactact

SEQ ID NO: 54222 - DNA, 120 bp, Homo sapiens
  misc_feature: 1556 for SV(W|O) and mtDNA
tgatctgctgcagtgctctgagccctaggattcatctttcttttcaccgtaggtggcctgactggcattgtattagcaaactcatcactagacatcgtactacacgacacgtactacgtt

SEQ ID NO: 54223 - DNA, 120 bp, Homo sapiens
  misc_feature: 1556 for SV(W|O) and mtDNA
aaagttatttctagttaattcattatgcagaaggtataggggttagtccttgctatattatgcttggttataatttttcatctttcccttgcggtactatatctattgcgccaggtttca

SEQ ID NO: 54224 - DNA, 120 bp, Homo sapiens
  misc_feature: 1556 for SV(W|O) and mtDNA
tccacttcaagtcaactaggactcataatagttacaatcggcatcaaccaaccacacctagcattcctgcacatctgcacccacgccttcttcaaagccatactatttatgtgctccggg

SEQ ID NO: 54225 - DNA, 120 bp, Homo sapiens
  misc_feature: 1556 for SV(W|O) and mtDNA
tatttacagtaggaatagacgtagacacacgagcatatttcacctccgctaccataatcatcgctatccccaccggcgtcaaagtatttagctgactcgccacactccacggaagcaata

SEQ ID NO: 54226 - DNA, 120 bp, Homo sapiens
  misc_feature: 1556 for SV(W|O) and mtDNA
atcaggttcgtcctttagtgttgtgtatggttatcatttgttttgaggttagtttgattagtcattgttgggtggtgattagtcggttgttgatgagatatttggaggtggggatcaata

SEQ ID NO: 54227 - DNA, 120 bp, Homo sapiens
  misc_feature: 1556 for SV(W|O) and mtDNA
aacactacgagccacagcttaaaactcaaaggacctggcggtgcttcatatccctctagaggagcctgttctgtaatcgataaaccccgatcaacctcaccacctcttgctcagcctata

SEQ ID NO: 54228 - DNA, 120 bp, Homo sapiens
  misc_feature: 1556 for SV(W|O) and mtDNA
ataaactcagacccaaacattaatcagttcttcaaatatctactcatcttcctaattaccatactaatcttagttaccgctaacaacctattccaactgttcatcggctgagagggcgta

SEQ ID NO: 54229 - DNA, 120 bp, Homo sapiens
  misc_feature: 1556 for SV(W|O) and mtDNA
gttatcctttaaaagttgagaaagccatgttgttagacatgggggcatgagttagcagttcttgtgagctttctcggtaaataaggggtcgtaagcctctgttgtcagattcacaatctg

SEQ ID NO: 54230 - DNA, 120 bp, Homo sapiens
  misc_feature: 1556 for SV(W|O) and mtDNA
atgcccccatgtctaacaacatggctttctcaacttttaaaggataacagctatccattggtcttaggccccaaaaattttggtgcaactccaaataaaagtaataaccatgcacactac

SEQ ID NO: 54231 - DNA, 120 bp, Homo sapiens
  misc_feature: 1556 for SV(W|O) and mtDNA
aaatggctgagtgaagcattggactgtaaatctaaagacaggggttaggcctctttttaccagctccgaggtgattttcatattgaattgcaaattcgaagaagcagcttcaaacctgcc

SEQ ID NO: 54232 - DNA, 120 bp, Homo sapiens
  misc_feature: 1556 for SV(W|O) and mtDNA
ggatagctgttatcctttaaaagttgagaaagccatgttgttagacatgggggcatgagttagcagttcttgtgagctttctcggtaaataaggggtcgtaagcctctgttgtcagattc

SEQ ID NO: 54233 - DNA, 120 bp, Homo sapiens
  misc_feature: 1556 for SV(W|O) and mtDNA
aataacttgaccaacggaacaagttaccctagggataacagcgcaatcctattctagagtccatatcaacaatagggtttacgacctcgatgttggatcaggacatcccgatggtgcagc

SEQ ID NO: 54234 - DNA, 120 bp, Homo sapiens
  misc_feature: 1556 for SV(W|O) and mtDNA
gaaatggattttggcgtaggtttggtctagggtgtagcctgagaataggggaaatcagtgaatgaagcctcctatgatggcaaatacagctcctattgataggacatagtggaagtgggc

SEQ ID NO: 54235 - DNA, 120 bp, Homo sapiens
  misc_feature: 1556 for SV(W|O) and mtDNA
gccaattgatatcatagctcagaccatacctatgtatccaaatggttctttttttccggagtagtaagttacaatatgggagattattccgaagcctggtaggataagaatataaacttc

SEQ ID NO: 54236 - DNA, 120 bp, Homo sapiens
  misc_feature: 1556 for SV(W|O) and mtDNA
ctgttatcctttaaaagttgagaaagccatgttgttagacatgggggcatgagttagcagttcttgtgagctttctcggtaaataaggggtcgtaagcctctgttgtcagattcacaatc

SEQ ID NO: 54237 - DNA, 120 bp, Homo sapiens
  misc_feature: 1556 for SV(W|O) and mtDNA
agggtttacgacctcgatgttggatcaggacatcccgatggtgcagccgctattaaaggttcgtttgttcaacgattaaagtcctacgtgatctgagttcagaccggagtaatccaggtc

SEQ ID NO: 54238 - DNA, 120 bp, Homo sapiens
  misc_feature: 1556 for SV(W|O) and mtDNA
cgttgaacaaacgaacctttaatagcggctgcaccatcgggatgtcctgatccaacatcgaggtcgtaaaccctattgttgatatggactctagaataggattgcgctgttatccctagg

SEQ ID NO: 54239 - DNA, 120 bp, Homo sapiens
  misc_feature: 1556 for SV(W|O) and mtDNA
cagccaccaattaagaaagcgttcaagctcaacacccactacctaaaaaatcccaaacatataactgaactcctcatacccaattggaccaatctatcaccctatagaagaactaatgtt

SEQ ID NO: 54240 - DNA, 120 bp, Homo sapiens
  misc_feature: 1556 for SV(W|O) and mtDNA
attatgtgttttttggaaagtcatgtcagtggtagtaatataattgttgggacgattagttttagcattggagtaggtttaggttatgtacgtagtctaggccatatgtgttggagattg

SEQ ID NO: 54241 - DNA, 120 bp, Homo sapiens
  misc_feature: 1556 for SV(W|O) and mtDNA
caacagaggcttacgaccccttatttaccgagaaagctcacaagaactgctaactcatgcccccatgtctaacaacatggctttctcaacttttaaaggataacagctatccattggtct

SEQ ID NO: 54242 - DNA, 120 bp, Homo sapiens
  misc_feature: 1556 for SV(W|O) and mtDNA
caaataattcaagcactgcttattacaattttactgggtctctattttaccctcctacaagcctcagagtacttcgagtctcccttcaccatttccgacggcatctacggctcaacattt

SEQ ID NO: 54243 - DNA, 120 bp, Homo sapiens
  misc_feature: 1556 for SV(W|O) and mtDNA
agatggtaaatgctagtataatatttatgtaaatgaggggcatttggtaaatatgattatcataatttaatgagtcgaaatcattcgttttgtttaaactatataccaattcggttcagt

SEQ ID NO: 54244 - DNA, 120 bp, Homo sapiens
  misc_feature: 1556 for SV(W|O) and mtDNA
aaggggatttagagggttctgtgggcaaatttaaagttgaactaagattctatcttggacaaccagctatcaccaggctcggtaggtttgtcgcctctacctataaatcttcccactatt

SEQ ID NO: 54245 - DNA, 120 bp, Homo sapiens
  misc_feature: 1555 for SV(W|O) and mtDNA
ttttttactctctctacaaggttttttcctagtgtccaaagagctgttcctctttggactaacagttaaatttacaaggggatttagagggttctgtgggcaaatttaaagttgaactaa

SEQ ID NO: 54246 - DNA, 120 bp, Homo sapiens
  misc_feature: 1555 for SV(W|O) and mtDNA
tgacaacattcaaaaaagagtaataaacttcgccttaattttaataatcaacaccctcctagccttactactaataattattacattttgactaccacaactcaacggctacatagaaaa

SEQ ID NO: 54247 - DNA, 120 bp, Homo sapiens
  misc_feature: 1555 for SV(W|O) and mtDNA
ttggatcaggacatcccgatggtgcagccgctattaaaggttcgtttgttcaacgattaaagtcctacgtgatctgagttcagaccggagtaatccaggtcggtttctatctacttcaaa

SEQ ID NO: 54248 - DNA, 120 bp, Homo sapiens
  misc_feature: 1555 for SV(W|O) and mtDNA
gttggatcaggacatcccgatggtgcagccgctattaaaggttcgtttgttcaacgattaaagtcctacgtgatctgagttcagaccggagtaatccaggtcggtttctatctacttcaa

SEQ ID NO: 54249 - DNA, 120 bp, Homo sapiens
  misc_feature: 1555 for SV(W|O) and mtDNA
gtagttttctggggtagaaaatgtagcccatttcttgccacctcatgggctacaccttgacctaacgtctttacgtgggtacttgcgcttactttgtagccttcatcagggtttgctgaa

SEQ ID NO: 54250 - DNA, 120 bp, Homo sapiens
  misc_feature: 1555 for SV(W|O) and mtDNA
ttatattatcctaactactaccgcattcctactactcaacttaaactccagcaccacgaccctactactatctcgcacctgaaacaagctaacatgactaacacccttaattccatccac

SEQ ID NO: 54251 - DNA, 120 bp, Homo sapiens
  misc_feature: 1555 for SV(W|O) and mtDNA
atgtttcaggtttctgagtagagaaatgatccgtaatataggcctcgcccgatgtgtaggaagaggcagataaagaatattgaggcgccattggcgtgaaggtagcggatgattcagcca

SEQ ID NO: 54252 - DNA, 120 bp, Homo sapiens
  misc_feature: 1555 for SV(W|O) and mtDNA
tattagaaaaaccatttcataactttgtcaaagttaaattataggctaaatcctatatatcttaatggcacatgcagcgcaagtaggtctacaagacgctacttcccctatcatagaaga

SEQ ID NO: 54253 - DNA, 120 bp, Homo sapiens
  misc_feature: 1555 for SV(W|O) and mtDNA
tcctgatccaacatcgaggtcgtaaaccctattgttgatatggactctagaataggattgcgctgttatccctagggtaacttgttccgttggtcaagttattggatcaattgagtatag

SEQ ID NO: 54254 - DNA, 120 bp, Homo sapiens
  misc_feature: 1555 for SV(W|O) and mtDNA
ccttaaatagggacctgtatgaatggctccacgagggttcagctgtctcttacttttaaccagtgaaattgacctgcccgtgaagaggcgggcataacacagcaagacgagaagacccta

SEQ ID NO: 54255 - DNA, 120 bp, Homo sapiens
  misc_feature: 1555 for SV(W|O) and mtDNA
ctgctgtgttggcatctgctcgggcgtatcatcaactgatgagcaagaaggatataattcctacgccctctcagccgatgaacagttggaataggttgttagcggtaactaagattagta

SEQ ID NO: 54256 - DNA, 120 bp, Homo sapiens
  misc_feature: 1555 for SV(W|O) and mtDNA
taataattattacattttgactaccacaactcaacggctacatagaaaaatccaccccttacgagtgcggcttcgaccctatatcccccgcccgcgtccctttctccataaaattcttct

SEQ ID NO: 54257 - DNA, 120 bp, Homo sapiens
  misc_feature: 1555 for SV(W|O) and mtDNA
taactagttttgacaacattcaaaaaagagtaataaacttcgccttaattttaataatcaacaccctcctagccttactactaataattattacattttgactaccacaactcaacggct

SEQ ID NO: 54258 - DNA, 120 bp, Homo sapiens
  misc_feature: 1555 for SV(W|O) and mtDNA
actctttacgccggcttctattgacttgggttaatcgtgtgaccgcggtggctggcacgaaattgaccaaccctggggttagtatagcttagttaaactttcgtttattgctaaaggtta

SEQ ID NO: 54259 - DNA, 120 bp, Homo sapiens
  misc_feature: 1555 for SV(W|O) and mtDNA
gttaaacatgtgtcactgggcaggcggtgcctctaatactggtgatgctagaggtgatgtttttggtaaacaggcggggtaagatttgccgagttccttttactttttttaacctttcct

SEQ ID NO: 54260 - DNA, 120 bp, Homo sapiens
  misc_feature: 1555 for SV(W|O) and mtDNA
attttgactaccacaactcaacggctacatagaaaaatccaccccttacgagtgcggcttcgaccctatatcccccgcccgcgtccctttctccataaaattcttcttagtagctattac

SEQ ID NO: 54261 - DNA, 120 bp, Homo sapiens
  misc_feature: 1555 for SV(W|O) and mtDNA
ataatcatcgctatccccaccggcgtcaaagtatttagctgactcgccacactccacggaagcaatatgaaatgatctgctgcagtgctctgagccctaggattcatctttcttttcacc

SEQ ID NO: 54262 - DNA, 120 bp, Homo sapiens
  misc_feature: 1555 for SV(W|O) and mtDNA
gggtgaggtaaaatggctgagtgaagcattggactgtaaatctaaagacaggggttaggcctctttttaccagctccgaggtgattttcatattgaattgcaaattcgaagaagcagctt

SEQ ID NO: 54263 - DNA, 120 bp, Homo sapiens
  misc_feature: 1555 for SV(W|O) and mtDNA
atttacaaggggatttagagggttctgtgggcaaatttaaagttgaactaagattctatcttggacaaccagctatcaccaggctcggtaggtttgtcgcctctacctataaatcttccc

SEQ ID NO: 54264 - DNA, 120 bp, Homo sapiens
  misc_feature: 1555 for SV(W|O) and mtDNA
gatccaataacttgaccaacggaacaagttaccctagggataacagcgcaatcctattctagagtccatatcaacaatagggtttacgacctcgatgttggatcaggacatcccgatggt

SEQ ID NO: 54265 - DNA, 120 bp, Homo sapiens
  misc_feature: 1555 for SV(W|O) and mtDNA
cacttcaagtcaactaggactcataatagttacaatcggcatcaaccaaccacacctagcattcctgcacatctgcacccacgccttcttcaaagccatactatttatgtgctccgggtc

SEQ ID NO: 54266 - DNA, 120 bp, Homo sapiens
  misc_feature: 1555 for SV(W|O) and mtDNA
aaaccctaggaagccaattgatatcatagctcagaccatacctatgtatccaaatggttctttttttccggagtagtaagttacaatatgggagattattccgaagcctggtaggataag

SEQ ID NO: 54267 - DNA, 120 bp, Homo sapiens
  misc_feature: 1555 for SV(W|O) and mtDNA
ctgatttttcggtcaccctgaagtttatattcttatcctaccaggcttcggaataatctcccatattgtaacttactactccggaaaaaaagaaccatttggatacataggtatggtctg

SEQ ID NO: 54268 - DNA, 120 bp, Homo sapiens
  misc_feature: 1555 for SV(W|O) and mtDNA
ctaggctaagcgttttgagctgcattgctgcgtgcttgatgcttgtcccttttgatcgtggtgatttagagggtgaactcactggaacggggatgcttgcatgtgtaatcttactaagag

SEQ ID NO: 54269 - DNA, 120 bp, Homo sapiens
  misc_feature: 1555 for SV(W|O) and mtDNA
ctagaagtgagatggtaaatgctagtataatatttatgtaaatgaggggcatttggtaaatatgattatcataatttaatgagtcgaaatcattcgttttgtttaaactatataccaatt

SEQ ID NO: 54270 - DNA, 120 bp, Homo sapiens
  misc_feature: 1555 for SV(W|O) and mtDNA
cgaaaccacacttatccccaccttggctatcatcacccgatgaggcaaccagccagaacgcctgaacgcaggcacatacttcctattctacaccctagtaggctcccttcccctactcat

SEQ ID NO: 54271 - DNA, 120 bp, Homo sapiens
  misc_feature: 1555 for SV(W|O) and mtDNA
ccgttgagttgtggtagtcaaaatgtaataattattagtagtaaggctaggagggtgttgattattaaaattaaggcgaagtttattactcttttttgaatgttgtcaaaactagttaat

SEQ ID NO: 54272 - DNA, 120 bp, Homo sapiens
  misc_feature: 1555 for SV(W|O) and mtDNA
aggttgcggtctgttagtagtatagtgatgccagcagctaggactgggagagataggagaagtaggactgctgtgattaggacggatcagacgaagaggggcgtttggtattgggttatg

SEQ ID NO: 54273 - DNA, 120 bp, Homo sapiens
  misc_feature: 1555 for SV(W|O) and mtDNA
cagggatgaatattatggagaagtagtctagtttgaagcttagggagagctgggttgtttgggttgtggctcagtgtcagttcgagataataacttcttggtctaggcacatgaatattg

SEQ ID NO: 54274 - DNA, 120 bp, Homo sapiens
  misc_feature: 1555 for SV(W|O) and mtDNA
caagaaggatataattcctacgccctctcagccgatgaacagttggaataggttgttagcggtaactaagattagtatggtaattaggaagatgagtagatatttgaagaactgattaat

SEQ ID NO: 54275 - DNA, 120 bp, Homo sapiens
  misc_feature: 1555 for SV(W|O) and mtDNA
aattagggaagtcagggttagggtggttatagtagtgtgcatggttattacttttatttggagttgcaccaaaatttttggggcctaagaccaatggatagctgttatcctttaaaagtt

SEQ ID NO: 54276 - DNA, 120 bp, Homo sapiens
  misc_feature: 1554 for SV(W|O) and mtDNA
tattgccatactagtctttgccgcctgcgaagcagcggtgggcctagccctactagtctcaatctccaacacatatggcctagactacgtacataacctaaacctactccaatgctaaaa

SEQ ID NO: 54277 - DNA, 120 bp, Homo sapiens
  misc_feature: 1554 for SV(W|O) and mtDNA
ttgaatggctgctgtgttggcatctgctcgggcgtatcatcaactgatgagcaagaaggatataattcctacgccctctcagccgatgaacagttggaataggttgttagcggtaactaa

SEQ ID NO: 54278 - DNA, 120 bp, Homo sapiens
  misc_feature: 1554 for SV(W|O) and mtDNA
ttcttaatttaactatttatattatcctaactactaccgcattcctactactcaacttaaactccagcaccacgaccctactactatctcgcacctgaaacaagctaacatgactaacac

SEQ ID NO: 54279 - DNA, 120 bp, Homo sapiens
  misc_feature: 1554 for SV(W|O) and mtDNA
ttctcgcacggactacaaccacgaccaatgatatgaaaaaccatcgttgtatttcaactacaagaacaccaatgaccccaatacgcaaaactaaccccctaataaaattaattaaccact

SEQ ID NO: 54280 - DNA, 120 bp, Homo sapiens
  misc_feature: 1554 for SV(W|O) and mtDNA
ttagggaagtcagggttagggtggttatagtagtgtgcatggttattacttttatttggagttgcaccaaaatttttggggcctaagaccaatggatagctgttatcctttaaaagttga

SEQ ID NO: 54281 - DNA, 120 bp, Homo sapiens
  misc_feature: 1554 for SV(W|O) and mtDNA
tgtttcaggtttctgagtagagaaatgatccgtaatataggcctcgcccgatgtgtaggaagaggcagataaagaatattgaggcgccattggcgtgaaggtagcggatgattcagccat

SEQ ID NO: 54282 - DNA, 120 bp, Homo sapiens
  misc_feature: 1554 for SV(W|O) and mtDNA
gccaaaatccatttcactatcatattcatcggcgtaaatctaactttcttcccacaacactttctcggcctatccggaatgccccgacgttactcggactaccccgatgcatacaccaca

SEQ ID NO: 54283 - DNA, 120 bp, Homo sapiens
  misc_feature: 1554 for SV(W|O) and mtDNA
tgtctttgtggtttgtagagaatagtcaacggtcggcgaacatcagtgggggtgaggtaaaatggctgagtgaagcattggactgtaaatctaaagacaggggttaggcctctttttacc

SEQ ID NO: 54284 - DNA, 120 bp, Homo sapiens
  misc_feature: 1554 for SV(W|O) and mtDNA
tggatcaggacatcccgatggtgcagccgctattaaaggttcgtttgttcaacgattaaagtcctacgtgatctgagttcagaccggagtaatccaggtcggtttctatctacttcaaat

SEQ ID NO: 54285 - DNA, 120 bp, Homo sapiens
  misc_feature: 1554 for SV(W|O) and mtDNA
tcgttgaacaaacgaacctttaatagcggctgcaccatcgggatgtcctgatccaacatcgaggtcgtaaaccctattgttgatatggactctagaataggattgcgctgttatccctag

SEQ ID NO: 54286 - DNA, 120 bp, Homo sapiens
  misc_feature: 1554 for SV(W|O) and mtDNA
tagaaattgccctccttttacccctaccatgagccctacaaacaactaacctgccactaatagttatgtcatccctcttattaatcatcatcctagccctaagtctggcctatgagtgac

SEQ ID NO: 54287 - DNA, 120 bp, Homo sapiens
  misc_feature: 1554 for SV(W|O) and mtDNA
tactaataattattacattttgactaccacaactcaacggctacatagaaaaatccaccccttacgagtgcggcttcgaccctatatcccccgcccgcgtccctttctccataaaattct

SEQ ID NO: 54288 - DNA, 120 bp, Homo sapiens
  misc_feature: 1554 for SV(W|O) and mtDNA
aggtttctgagtagagaaatgatccgtaatataggcctcgcccgatgtgtaggaagaggcagataaagaatattgaggcgccattggcgtgaaggtagcggatgattcagccataattta

SEQ ID NO: 54289 - DNA, 120 bp, Homo sapiens
  misc_feature: 1554 for SV(W|O) and mtDNA
gtgttttttggaaagtcatgtcagtggtagtaatataattgttgggacgattagttttagcattggagtaggtttaggttatgtacgtagtctaggccatatgtgttggagattgagact

SEQ ID NO: 54290 - DNA, 120 bp, Homo sapiens
  misc_feature: 1554 for SV(W|O) and mtDNA
ggctaggctaagcgttttgagctgcattgctgcgtgcttgatgcttgtcccttttgatcgtggtgatttagagggtgaactcactggaacggggatgcttgcatgtgtaatcttactaag

SEQ ID NO: 54291 - DNA, 120 bp, Homo sapiens
  misc_feature: 1554 for SV(W|O) and mtDNA
ggcaaatttaaagttgaactaagattctatcttggacaaccagctatcaccaggctcggtaggtttgtcgcctctacctataaatcttcccactattttgctacatagacgggtgtgctc

SEQ ID NO: 54292 - DNA, 120 bp, Homo sapiens
  misc_feature: 1554 for SV(W|O) and mtDNA
ggagggtgacgggcggtgtgtacgcgcttcagggccctgttcaactaagcactctactctcagtttactgctaaatccaccttcgacccttaagtttcataagggctatcgtagttttct

SEQ ID NO: 54293 - DNA, 120 bp, Homo sapiens
  misc_feature: 1554 for SV(W|O) and mtDNA
ggaacagctctttggacactaggaaaaaaccttgtagagagagtaaaaaatttaacacccatagtaggcctaaaagcagccaccaattaagaaagcgttcaagctcaacacccactacct

SEQ ID NO: 54294 - DNA, 120 bp, Homo sapiens
  misc_feature: 1554 for SV(W|O) and mtDNA
gagggttctgtgggcaaatttaaagttgaactaagattctatcttggacaaccagctatcaccaggctcggtaggtttgtcgcctctacctataaatcttcccactattttgctacatag

SEQ ID NO: 54295 - DNA, 120 bp, Homo sapiens
  misc_feature: 1554 for SV(W|O) and mtDNA
atttgagtattttgttttcaattagggagatagttggtattaggattaggattgttgtgaagtatagtacggatgctacttgtccaatgatggtaaaagggtagcttactggttgtcctc

SEQ ID NO: 54296 - DNA, 120 bp, Homo sapiens
  misc_feature: 1554 for SV(W|O) and mtDNA
gaatggctccacgagggttcagctgtctcttacttttaaccagtgaaattgacctgcccgtgaagaggcgggcataacacagcaagacgagaagaccctatggagctttaatttattaat

SEQ ID NO: 54297 - DNA, 120 bp, Homo sapiens
  misc_feature: 1554 for SV(W|O) and mtDNA
aaatttacaaggggatttagagggttctgtgggcaaatttaaagttgaactaagattctatcttggacaaccagctatcaccaggctcggtaggtttgtcgcctctacctataaatcttc

SEQ ID NO: 54298 - DNA, 120 bp, Homo sapiens
  misc_feature: 1554 for SV(W|O) and mtDNA
cgtggagtgtggcgagtcagctaaatactttgacgccggtggggatagcgatgattatggtagcggaggtgaaatatgctcgtgtgtctacgtctattcctactgtaaatatatggtgtg

SEQ ID NO: 54299 - DNA, 120 bp, Homo sapiens
  misc_feature: 1554 for SV(W|O) and mtDNA
agaactgctattattcatcctatgtgggtaattgaggagtatgctaagattttgcgtagctgggtttggtttaatccacctcaactgcctgctatgatggataagattgagagagtgagg

SEQ ID NO: 54300 - DNA, 120 bp, Homo sapiens
  misc_feature: 1554 for SV(W|O) and mtDNA
atggctgagtgaagcattggactgtaaatctaaagacaggggttaggcctctttttaccagctccgaggtgattttcatattgaattgcaaattcgaagaagcagcttcaaacctgccgg

SEQ ID NO: 54301 - DNA, 120 bp, Homo sapiens
  misc_feature: 1554 for SV(W|O) and mtDNA
actgattaatgtttgggtctgagtttatatatcacagtgagaattctatgatggaccatgtaacgaacaatgctacagggatgaatattatggagaagtagtctagtttgaagcttaggg

SEQ ID NO: 54302 - DNA, 120 bp, Homo sapiens
  misc_feature: 1554 for SV(W|O) and mtDNA
catttggatacataggtatggtctgagctatgatatcaattggcttcctagggtttatcgtgtgagcacaccatatatttacagtaggaatagacgtagacacacgagcatatttcacct

SEQ ID NO: 54303 - DNA, 120 bp, Homo sapiens
  misc_feature: 1554 for SV(W|O) and mtDNA
aatggctccacgagggttcagctgtctcttacttttaaccagtgaaattgacctgcccgtgaagaggcgggcataacacagcaagacgagaagaccctatggagctttaatttattaatg

SEQ ID NO: 54304 - DNA, 120 bp, Homo sapiens
  misc_feature: 1554 for SV(W|O) and mtDNA
caggtttctgagtagagaaatgatccgtaatataggcctcgcccgatgtgtaggaagaggcagataaagaatattgaggcgccattggcgtgaaggtagcggatgattcagccataattt

SEQ ID NO: 54305 - DNA, 120 bp, Homo sapiens
  misc_feature: 1554 for SV(W|O) and mtDNA
aatcgttgaacaaacgaacctttaatagcggctgcaccatcgggatgtcctgatccaacatcgaggtcgtaaaccctattgttgatatggactctagaataggattgcgctgttatccct

SEQ ID NO: 54306 - DNA, 120 bp, Homo sapiens
  misc_feature: 1553 for SV(W|O) and mtDNA
tttcttaattggtggctgcttttaggcctactatgggtgttaaattttttactctctctacaaggttttttcctagtgtccaaagagctgttcctctttggactaacagttaaatttaca

SEQ ID NO: 54307 - DNA, 120 bp, Homo sapiens
  misc_feature: 1553 for SV(W|O) and mtDNA
ttggtccaattgggtatgaggagttcagttatatgtttgggattttttaggtagtgggtgttgagcttgaacgctttcttaattggtggctgcttttaggcctactatgggtgttaaatt

SEQ ID NO: 54308 - DNA, 120 bp, Homo sapiens
  misc_feature: 1553 for SV(W|O) and mtDNA
ttgcttgaatggctgctgtgttggcatctgctcgggcgtatcatcaactgatgagcaagaaggatataattcctacgccctctcagccgatgaacagttggaataggttgttagcggtaa

SEQ ID NO: 54309 - DNA, 120 bp, Homo sapiens
  misc_feature: 1553 for SV(W|O) and mtDNA
ttgcttccgtggagtgtggcgagtcagctaaatactttgacgccggtggggatagcgatgattatggtagcggaggtgaaatatgctcgtgtgtctacgtctattcctactgtaaatata

SEQ ID NO: 54310 - DNA, 120 bp, Homo sapiens
  misc_feature: 1553 for SV(W|O) and mtDNA
taggtagctcgtctggtttcgggggtcttagctttggctctccttgcaaagttatttctagttaattcattatgcagaaggtataggggttagtccttgctatattatgcttggttataa

SEQ ID NO: 54311 - DNA, 120 bp, Homo sapiens
  misc_feature: 1553 for SV(W|O) and mtDNA
ttagtccttgctatattatgcttggttataatttttcatctttcccttgcggtactatatctattgcgccaggtttcaatttctatcgcctatactttatttgggtaaatggtttggcta

SEQ ID NO: 54312 - DNA, 120 bp, Homo sapiens
  misc_feature: 1553 for SV(W|O) and mtDNA
gcaagaaggatataattcctacgccctctcagccgatgaacagttggaataggttgttagcggtaactaagattagtatggtaattaggaagatgagtagatatttgaagaactgattaa

SEQ ID NO: 54313 - DNA, 120 bp, Homo sapiens
  misc_feature: 1553 for SV(W|O) and mtDNA
attcttaatttaactatttatattatcctaactactaccgcattcctactactcaacttaaactccagcaccacgaccctactactatctcgcacctgaaacaagctaacatgactaaca

SEQ ID NO: 54314 - DNA, 120 bp, Homo sapiens
  misc_feature: 1553 for SV(W|O) and mtDNA
gcaatatgaaatgatctgctgcagtgctctgagccctaggattcatctttcttttcaccgtaggtggcctgactggcattgtattagcaaactcatcactagacatcgtactacacgaca

SEQ ID NO: 54315 - DNA, 120 bp, Homo sapiens
  misc_feature: 1553 for SV(W|O) and mtDNA
tggtaaatgctagtataatatttatgtaaatgaggggcatttggtaaatatgattatcataatttaatgagtcgaaatcattcgttttgtttaaactatataccaattcggttcagtcta

SEQ ID NO: 54316 - DNA, 120 bp, Homo sapiens
  misc_feature: 1553 for SV(W|O) and mtDNA
atcggaggctttggcaactgactagttcccctaataatcggtgcccccgatatggcgtttccccgcataaacaacataagcttctgactcttacctccctctctcctactcctgctcgca

SEQ ID NO: 54317 - DNA, 120 bp, Homo sapiens
  misc_feature: 1553 for SV(W|O) and mtDNA
tgatttttcggtcaccctgaagtttatattcttatcctaccaggcttcggaataatctcccatattgtaacttactactccggaaaaaaagaaccatttggatacataggtatggtctga

SEQ ID NO: 54318 - DNA, 120 bp, Homo sapiens
  misc_feature: 1553 for SV(W|O) and mtDNA
ccaattgatatcatagctcagaccatacctatgtatccaaatggttctttttttccggagtagtaagttacaatatgggagattattccgaagcctggtaggataagaatataaacttca

SEQ ID NO: 54319 - DNA, 120 bp, Homo sapiens
  misc_feature: 1553 for SV(W|O) and mtDNA
aaaagaaccatttggatacataggtatggtctgagctatgatatcaattggcttcctagggtttatcgtgtgagcacaccatatatttacagtaggaatagacgtagacacacgagcata

SEQ ID NO: 54320 - DNA, 120 bp, Homo sapiens
  misc_feature: 1553 for SV(W|O) and mtDNA
agccaccaattaagaaagcgttcaagctcaacacccactacctaaaaaatcccaaacatataactgaactcctcatacccaattggaccaatctatcaccctatagaagaactaatgtta

SEQ ID NO: 54321 - DNA, 120 bp, Homo sapiens
  misc_feature: 1553 for SV(W|O) and mtDNA
attgccatactagtctttgccgcctgcgaagcagcggtgggcctagccctactagtctcaatctccaacacatatggcctagactacgtacataacctaaacctactccaatgctaaaac

SEQ ID NO: 54322 - DNA, 120 bp, Homo sapiens
  misc_feature: 1553 for SV(W|O) and mtDNA
gttgcggtctgttagtagtatagtgatgccagcagctaggactgggagagataggagaagtaggactgctgtgattaggacggatcagacgaagaggggcgtttggtattgggttatggc

SEQ ID NO: 54323 - DNA, 120 bp, Homo sapiens
  misc_feature: 1553 for SV(W|O) and mtDNA
gttgaacaaacgaacctttaatagcggctgcaccatcgggatgtcctgatccaacatcgaggtcgtaaaccctattgttgatatggactctagaataggattgcgctgttatccctaggg

SEQ ID NO: 54324 - DNA, 120 bp, Homo sapiens
  misc_feature: 1553 for SV(W|O) and mtDNA
ccacatgaaacatcctatcatctgtaggctcattcatttctctaacagcagtaatattaataattttcatgatttgagaagccttcgcttcaaagcgaaaagtcctaatagtagaagaac

SEQ ID NO: 54325 - DNA, 120 bp, Homo sapiens
  misc_feature: 1553 for SV(W|O) and mtDNA
actcattcaaccaatagccctggccgtacgcctaaccgctaacattactgcaggccacctactcatgcacctaattggaagcgccaccctagcaatatcaaccattaaccttccctctac

SEQ ID NO: 54326 - DNA, 120 bp, Homo sapiens
  misc_feature: 1553 for SV(W|O) and mtDNA
ggtttctgagtagagaaatgatccgtaatataggcctcgcccgatgtgtaggaagaggcagataaagaatattgaggcgccattggcgtgaaggtagcggatgattcagccataatttac

SEQ ID NO: 54327 - DNA, 120 bp, Homo sapiens
  misc_feature: 1553 for SV(W|O) and mtDNA
gggtatctaatcccagtttgggtcttagctattgtgtgttcagatatgttaaagccactttcgtagtctattttgtgtcaactggagttttttacaactcaggtgagttttagctttatt

SEQ ID NO: 54328 - DNA, 120 bp, Homo sapiens
  misc_feature: 1553 for SV(W|O) and mtDNA
gcttgaatggctgctgtgttggcatctgctcgggcgtatcatcaactgatgagcaagaaggatataattcctacgccctctcagccgatgaacagttggaataggttgttagcggtaact

SEQ ID NO: 54329 - DNA, 120 bp, Homo sapiens
  misc_feature: 1553 for SV(W|O) and mtDNA
gattgcttgaatggctgctgtgttggcatctgctcgggcgtatcatcaactgatgagcaagaaggatataattcctacgccctctcagccgatgaacagttggaataggttgttagcggt

SEQ ID NO: 54330 - DNA, 120 bp, Homo sapiens
  misc_feature: 1553 for SV(W|O) and mtDNA
gatggtaaatgctagtataatatttatgtaaatgaggggcatttggtaaatatgattatcataatttaatgagtcgaaatcattcgttttgtttaaactatataccaattcggttcagtc

SEQ ID NO: 54331 - DNA, 120 bp, Homo sapiens
  misc_feature: 1553 for SV(W|O) and mtDNA
cttactttaggatggggtgtgataggtggcacggagaattttggattctcagggatgggttcgattctcatagtcctagaaataagggggtttaagctcctattatttactctatcaaag

SEQ ID NO: 54332 - DNA, 120 bp, Homo sapiens
  misc_feature: 1553 for SV(W|O) and mtDNA
ctgtttgcattaataaattaaagctccatagggtcttctcgtcttgctgtgttatgcccgcctcttcacgggcaggtcaatttcactggttaaaagtaagagacagctgaaccctcgtgg

SEQ ID NO: 54333 - DNA, 120 bp, Homo sapiens
  misc_feature: 1553 for SV(W|O) and mtDNA
aatcacttgttccttaaatagggacctgtatgaatggctccacgagggttcagctgtctcttacttttaaccagtgaaattgacctgcccgtgaagaggcgggcataacacagcaagacg

SEQ ID NO: 54334 - DNA, 120 bp, Homo sapiens
  misc_feature: 1553 for SV(W|O) and mtDNA
atggctgctgtgttggcatctgctcgggcgtatcatcaactgatgagcaagaaggatataattcctacgccctctcagccgatgaacagttggaataggttgttagcggtaactaagatt

SEQ ID NO: 54335 - DNA, 120 bp, Homo sapiens
  misc_feature: 1553 for SV(W|O) and mtDNA
agtggggtatctaatcccagtttgggtcttagctattgtgtgttcagatatgttaaagccactttcgtagtctattttgtgtcaactggagttttttacaactcaggtgagttttagctt

SEQ ID NO: 54336 - DNA, 120 bp, Homo sapiens
  misc_feature: 1553 for SV(W|O) and mtDNA
agtgagatggtaaatgctagtataatatttatgtaaatgaggggcatttggtaaatatgattatcataatttaatgagtcgaaatcattcgttttgtttaaactatataccaattcggtt

SEQ ID NO: 54337 - DNA, 120 bp, Homo sapiens
  misc_feature: 1553 for SV(W|O) and mtDNA
aattatgtgttttttggaaagtcatgtcagtggtagtaatataattgttgggacgattagttttagcattggagtaggtttaggttatgtacgtagtctaggccatatgtgttggagatt

SEQ ID NO: 54338 - DNA, 120 bp, Homo sapiens
  misc_feature: 1552 for SV(W|O) and mtDNA
gacaacattcaaaaaagagtaataaacttcgccttaattttaataatcaacaccctcctagccttactactaataattattacattttgactaccacaactcaacggctacatagaaaaa

SEQ ID NO: 54339 - DNA, 120 bp, Homo sapiens
  misc_feature: 1552 for SV(W|O) and mtDNA
acagctctttggacactaggaaaaaaccttgtagagagagtaaaaaatttaacacccatagtaggcctaaaagcagccaccaattaagaaagcgttcaagctcaacacccactacctaaa

SEQ ID NO: 54340 - DNA, 120 bp, Homo sapiens
  misc_feature: 1552 for SV(W|O) and mtDNA
ttgttccttaaatagggacctgtatgaatggctccacgagggttcagctgtctcttacttttaaccagtgaaattgacctgcccgtgaagaggcgggcataacacagcaagacgagaaga

SEQ ID NO: 54341 - DNA, 120 bp, Homo sapiens
  misc_feature: 1552 for SV(W|O) and mtDNA
ggcggggtcgaagaaggtggtgttgaggttgcggtctgttagtagtatagtgatgccagcagctaggactgggagagataggagaagtaggactgctgtgattaggacggatcagacgaa

SEQ ID NO: 54342 - DNA, 120 bp, Homo sapiens
  misc_feature: 1552 for SV(W|O) and mtDNA
gacctgtatgaatggctccacgagggttcagctgtctcttacttttaaccagtgaaattgacctgcccgtgaagaggcgggcataacacagcaagacgagaagaccctatggagctttaa

SEQ ID NO: 54343 - DNA, 120 bp, Homo sapiens
  misc_feature: 1552 for SV(W|O) and mtDNA
tctttggacactaggaaaaaaccttgtagagagagtaaaaaatttaacacccatagtaggcctaaaagcagccaccaattaagaaagcgttcaagctcaacacccactacctaaaaaatc

SEQ ID NO: 54344 - DNA, 120 bp, Homo sapiens
  misc_feature: 1552 for SV(W|O) and mtDNA
tatccccaccttggctatcatcacccgatgaggcaaccagccagaacgcctgaacgcaggcacatacttcctattctacaccctagtaggctcccttcccctactcatcgcactaattta

SEQ ID NO: 54345 - DNA, 120 bp, Homo sapiens
  misc_feature: 1552 for SV(W|O) and mtDNA
tataggattgcttgaatggctgctgtgttggcatctgctcgggcgtatcatcaactgatgagcaagaaggatataattcctacgccctctcagccgatgaacagttggaataggttgtta

SEQ ID NO: 54346 - DNA, 120 bp, Homo sapiens
  misc_feature: 1552 for SV(W|O) and mtDNA
gaaattgccctccttttacccctaccatgagccctacaaacaactaacctgccactaatagttatgtcatccctcttattaatcatcatcctagccctaagtctggcctatgagtgacta

SEQ ID NO: 54347 - DNA, 120 bp, Homo sapiens
  misc_feature: 1552 for SV(W|O) and mtDNA
atcgttgaacaaacgaacctttaatagcggctgcaccatcgggatgtcctgatccaacatcgaggtcgtaaaccctattgttgatatggactctagaataggattgcgctgttatcccta

SEQ ID NO: 54348 - DNA, 120 bp, Homo sapiens
  misc_feature: 1552 for SV(W|O) and mtDNA
gttcgcctgtaatattgaacgtaggtgcgataaataatgggatgaggcaggaatcaaagacagatactgcgacatagggtgctccggctccagcgtctcgcaatgctatcgcgtgcatac

SEQ ID NO: 54349 - DNA, 120 bp, Homo sapiens
  misc_feature: 1552 for SV(W|O) and mtDNA
ggatactagtataagagatcaggttcgtcctttagtgttgtgtatggttatcatttgttttgaggttagtttgattagtcattgttgggtggtgattagtcggttgttgatgagatattt

SEQ ID NO: 54350 - DNA, 120 bp, Homo sapiens
  misc_feature: 1552 for SV(W|O) and mtDNA
cgcactaatttacactcacaacaccctaggctcactaaacattctactactcactctcactgcccaagaactatcaaactcctgagccaacaacttaatatgactagcttacacaatagc

SEQ ID NO: 54351 - DNA, 120 bp, Homo sapiens
  misc_feature: 1552 for SV(W|O) and mtDNA
aacagcgcaatcctattctagagtccatatcaacaatagggtttacgacctcgatgttggatcaggacatcccgatggtgcagccgctattaaaggttcgtttgttcaacgattaaagtc

SEQ ID NO: 54352 - DNA, 120 bp, Homo sapiens
  misc_feature: 1552 for SV(W|O) and mtDNA
cccaccttggctatcatcacccgatgaggcaaccagccagaacgcctgaacgcaggcacatacttcctattctacaccctagtaggctcccttcccctactcatcgcactaatttacact

SEQ ID NO: 54353 - DNA, 120 bp, Homo sapiens
  misc_feature: 1552 for SV(W|O) and mtDNA
aaaaagaaccatttggatacataggtatggtctgagctatgatatcaattggcttcctagggtttatcgtgtgagcacaccatatatttacagtaggaatagacgtagacacacgagcat

SEQ ID NO: 54354 - DNA, 120 bp, Homo sapiens
  misc_feature: 1552 for SV(W|O) and mtDNA
aaagaaccatttggatacataggtatggtctgagctatgatatcaattggcttcctagggtttatcgtgtgagcacaccatatatttacagtaggaatagacgtagacacacgagcatat

SEQ ID NO: 54355 - DNA, 120 bp, Homo sapiens
  misc_feature: 1552 for SV(W|O) and mtDNA
aagtgagatggtaaatgctagtataatatttatgtaaatgaggggcatttggtaaatatgattatcataatttaatgagtcgaaatcattcgttttgtttaaactatataccaattcggt

SEQ ID NO: 54356 - DNA, 120 bp, Homo sapiens
  misc_feature: 1551 for SV(W|O) and mtDNA
ttctggggtagaaaatgtagcccatttcttgccacctcatgggctacaccttgacctaacgtctttacgtgggtacttgcgcttactttgtagccttcatcagggtttgctgaagatggc

SEQ ID NO: 54357 - DNA, 120 bp, Homo sapiens
  misc_feature: 1551 for SV(W|O) and mtDNA
ttacaaggggatttagagggttctgtgggcaaatttaaagttgaactaagattctatcttggacaaccagctatcaccaggctcggtaggtttgtcgcctctacctataaatcttcccac

SEQ ID NO: 54358 - DNA, 120 bp, Homo sapiens
  misc_feature: 1551 for SV(W|O) and mtDNA
aattgccctccttttacccctaccatgagccctacaaacaactaacctgccactaatagttatgtcatccctcttattaatcatcatcctagccctaagtctggcctatgagtgactaca

SEQ ID NO: 54359 - DNA, 120 bp, Homo sapiens
  misc_feature: 1551 for SV(W|O) and mtDNA
cacttcttaccacaaggcacacctacaccccttatccccatactagttattatcgaaaccatcagcctactcattcaaccaatagccctggccgtacgcctaaccgctaacattactgca

SEQ ID NO: 54360 - DNA, 120 bp, Homo sapiens
  misc_feature: 1551 for SV(W|O) and mtDNA
tgagtattttgttttcaattagggagatagttggtattaggattaggattgttgtgaagtatagtacggatgctacttgtccaatgatggtaaaagggtagcttactggttgtcctccga

SEQ ID NO: 54361 - DNA, 120 bp, Homo sapiens
  misc_feature: 1551 for SV(W|O) and mtDNA
aaccctaggaagccaattgatatcatagctcagaccatacctatgtatccaaatggttctttttttccggagtagtaagttacaatatgggagattattccgaagcctggtaggataaga

SEQ ID NO: 54362 - DNA, 120 bp, Homo sapiens
  misc_feature: 1551 for SV(W|O) and mtDNA
aatggatagctgttatcctttaaaagttgagaaagccatgttgttagacatgggggcatgagttagcagttcttgtgagctttctcggtaaataaggggtcgtaagcctctgttgtcaga

SEQ ID NO: 54363 - DNA, 120 bp, Homo sapiens
  misc_feature: 1551 for SV(W|O) and mtDNA
tataaactcagacccaaacattaatcagttcttcaaatatctactcatcttcctaattaccatactaatcttagttaccgctaacaacctattccaactgttcatcggctgagagggcgt

SEQ ID NO: 54364 - DNA, 120 bp, Homo sapiens
  misc_feature: 1551 for SV(W|O) and mtDNA
agcaagaaggatataattcctacgccctctcagccgatgaacagttggaataggttgttagcggtaactaagattagtatggtaattaggaagatgagtagatatttgaagaactgatta

SEQ ID NO: 54365 - DNA, 120 bp, Homo sapiens
  misc_feature: 1551 for SV(W|O) and mtDNA
gttttgttgatttaactgttgaggtttagggctaagcatagtggggtatctaatcccagtttgggtcttagctattgtgtgttcagatatgttaaagccactttcgtagtctattttgtg

SEQ ID NO: 54366 - DNA, 120 bp, Homo sapiens
  misc_feature: 1551 for SV(W|O) and mtDNA
gtggggtatctaatcccagtttgggtcttagctattgtgtgttcagatatgttaaagccactttcgtagtctattttgtgtcaactggagttttttacaactcaggtgagttttagcttt

SEQ ID NO: 54367 - DNA, 120 bp, Homo sapiens
  misc_feature: 1551 for SV(W|O) and mtDNA
atgaaacttaagggtcgaaggtggatttagcagtaaactgagagtagagtgcttagttgaacagggccctgaagcgcgtacacaccgcccgtcaccctcctcaagtatacttcaaaggac

SEQ ID NO: 54368 - DNA, 120 bp, Homo sapiens
  misc_feature: 1551 for SV(W|O) and mtDNA
atccgtattactcgcatcaggagtatcaatcacctgagctcaccatagtctaatagaaaacaaccgaaaccaaataattcaagcactgcttattacaattttactgggtctctattttac

SEQ ID NO: 54369 - DNA, 120 bp, Homo sapiens
  misc_feature: 1551 for SV(W|O) and mtDNA
ggttctgtgggcaaatttaaagttgaactaagattctatcttggacaaccagctatcaccaggctcggtaggtttgtcgcctctacctataaatcttcccactattttgctacatagacg

SEQ ID NO: 54370 - DNA, 120 bp, Homo sapiens
  misc_feature: 1551 for SV(W|O) and mtDNA
aggaacagctctttggacactaggaaaaaaccttgtagagagagtaaaaaatttaacacccatagtaggcctaaaagcagccaccaattaagaaagcgttcaagctcaacacccactacc

SEQ ID NO: 54371 - DNA, 120 bp, Homo sapiens
  misc_feature: 1551 for SV(W|O) and mtDNA
gctatgatatcaattggcttcctagggtttatcgtgtgagcacaccatatatttacagtaggaatagacgtagacacacgagcatatttcacctccgctaccataatcatcgctatcccc

SEQ ID NO: 54372 - DNA, 120 bp, Homo sapiens
  misc_feature: 1551 for SV(W|O) and mtDNA
aagcatccccgttccagtgagttcaccctctaaatcaccacgatcaaaagggacaagcatcaagcacgcagcaatgcagctcaaaacgcttagcctagccacacccccacgggaaacagc

SEQ ID NO: 54373 - DNA, 120 bp, Homo sapiens
  misc_feature: 1551 for SV(W|O) and mtDNA
aaaaaaagaaccatttggatacataggtatggtctgagctatgatatcaattggcttcctagggtttatcgtgtgagcacaccatatatttacagtaggaatagacgtagacacacgagc

SEQ ID NO: 54374 - DNA, 120 bp, Homo sapiens
  misc_feature: 1551 for SV(W|O) and mtDNA
cttaaatagggacctgtatgaatggctccacgagggttcagctgtctcttacttttaaccagtgaaattgacctgcccgtgaagaggcgggcataacacagcaagacgagaagaccctat

SEQ ID NO: 54375 - DNA, 120 bp, Homo sapiens
  misc_feature: 1551 for SV(W|O) and mtDNA
cactagacatcgtactacacgacacgtactacgttgtagcccacttccactatgtcctatcaataggagctgtatttgccatcataggaggcttcattcactgatttcccctattctcag

SEQ ID NO: 54376 - DNA, 120 bp, Homo sapiens
  misc_feature: 1551 for SV(W|O) and mtDNA
aactgctattattcatcctatgtgggtaattgaggagtatgctaagattttgcgtagctgggtttggtttaatccacctcaactgcctgctatgatggataagattgagagagtgaggag

SEQ ID NO: 54377 - DNA, 120 bp, Homo sapiens
  misc_feature: 1551 for SV(W|O) and mtDNA
cgggatgtcctgatccaacatcgaggtcgtaaaccctattgttgatatggactctagaataggattgcgctgttatccctagggtaacttgttccgttggtcaagttattggatcaattg

SEQ ID NO: 54378 - DNA, 120 bp, Homo sapiens
  misc_feature: 1551 for SV(W|O) and mtDNA
cctagaagtgagatggtaaatgctagtataatatttatgtaaatgaggggcatttggtaaatatgattatcataatttaatgagtcgaaatcattcgttttgtttaaactatataccaat

SEQ ID NO: 54379 - DNA, 120 bp, Homo sapiens
  misc_feature: 1551 for SV(W|O) and mtDNA
atgttgtttatgcggggaaacgccatatcgggggcaccgattattaggggaactagtcagttgccaaagcctccgattatgatgggtattactatgaagaagattattacaaatgcatgg

SEQ ID NO: 54380 - DNA, 120 bp, Homo sapiens
  misc_feature: 1551 for SV(W|O) and mtDNA
atactagtataagagatcaggttcgtcctttagtgttgtgtatggttatcatttgttttgaggttagtttgattagtcattgttgggtggtgattagtcggttgttgatgagatatttgg

SEQ ID NO: 54381 - DNA, 120 bp, Homo sapiens
  misc_feature: 1551 for SV(W|O) and mtDNA
atcttgttcattgttaaggttgtggatgatggacccggagcacataaatagtatggctttgaagaaggcgtgggtgcagatgtgcaggaatgctaggtgtggttggttgatgccgattgt

SEQ ID NO: 54382 - DNA, 120 bp, Homo sapiens
  misc_feature: 1551 for SV(W|O) and mtDNA
agttttgttgatttaactgttgaggtttagggctaagcatagtggggtatctaatcccagtttgggtcttagctattgtgtgttcagatatgttaaagccactttcgtagtctattttgt

SEQ ID NO: 54383 - DNA, 120 bp, Homo sapiens
  misc_feature: 1551 for SV(W|O) and mtDNA
aggtgcatgagtaggtggcctgcagtaatgttagcggttaggcgtacggccagggctattggttgaatgagtaggctgatggtttcgataataactagtatggggataaggggtgtaggt

SEQ ID NO: 54384 - DNA, 120 bp, Homo sapiens
  misc_feature: 1551 for SV(W|O) and mtDNA
agaaggatataattcctacgccctctcagccgatgaacagttggaataggttgttagcggtaactaagattagtatggtaattaggaagatgagtagatatttgaagaactgattaatgt

SEQ ID NO: 54385 - DNA, 120 bp, Homo sapiens
  misc_feature: 1550 for SV(W|O) and mtDNA
accttactttaggatggggtgtgataggtggcacggagaattttggattctcagggatgggttcgattctcatagtcctagaaataagggggtttaagctcctattatttactctatcaa

SEQ ID NO: 54386 - DNA, 120 bp, Homo sapiens
  misc_feature: 1550 for SV(W|O) and mtDNA
ttaggatggggtgtgataggtggcacggagaattttggattctcagggatgggttcgattctcatagtcctagaaataagggggtttaagctcctattatttactctatcaaagtaactc

SEQ ID NO: 54387 - DNA, 120 bp, Homo sapiens
  misc_feature: 1550 for SV(W|O) and mtDNA
ttagaaaaaccatttcataactttgtcaaagttaaattataggctaaatcctatatatcttaatggcacatgcagcgcaagtaggtctacaagacgctacttcccctatcatagaagagc

SEQ ID NO: 54388 - DNA, 120 bp, Homo sapiens
  misc_feature: 1550 for SV(W|O) and mtDNA
aatagatatagtaccgcaagggaaagatgaaaaattataaccaagcataatatagcaaggactaacccctataccttctgcataatgaattaactagaaataactttgcaaggagagcca

SEQ ID NO: 54389 - DNA, 120 bp, Homo sapiens
  misc_feature: 1550 for SV(W|O) and mtDNA
tgccgatgtttcaggtttctgagtagagaaatgatccgtaatataggcctcgcccgatgtgtaggaagaggcagataaagaatattgaggcgccattggcgtgaaggtagcggatgattc

SEQ ID NO: 54390 - DNA, 120 bp, Homo sapiens
  misc_feature: 1550 for SV(W|O) and mtDNA
tgagcaagaaggatataattcctacgccctctcagccgatgaacagttggaataggttgttagcggtaactaagattagtatggtaattaggaagatgagtagatatttgaagaactgat

SEQ ID NO: 54391 - DNA, 120 bp, Homo sapiens
  misc_feature: 1550 for SV(W|O) and mtDNA
cttgaatggctgctgtgttggcatctgctcgggcgtatcatcaactgatgagcaagaaggatataattcctacgccctctcagccgatgaacagttggaataggttgttagcggtaacta

SEQ ID NO: 54392 - DNA, 120 bp, Homo sapiens
  misc_feature: 1550 for SV(W|O) and mtDNA
ctaccacaactcaacggctacatagaaaaatccaccccttacgagtgcggcttcgaccctatatcccccgcccgcgtccctttctccataaaattcttcttagtagctattaccttctta

SEQ ID NO: 54393 - DNA, 120 bp, Homo sapiens
  misc_feature: 1550 for SV(W|O) and mtDNA
cactatacctattattcggcgcatgagctggagtcctaggcacagctctaagcctccttattcgagccgagctgggccagccaggcaaccttctaggtaacgaccacatctacaacgtta

SEQ ID NO: 54394 - DNA, 120 bp, Homo sapiens
  misc_feature: 1550 for SV(W|O) and mtDNA
taaactcagacccaaacattaatcagttcttcaaatatctactcatcttcctaattaccatactaatcttagttaccgctaacaacctattccaactgttcatcggctgagagggcgtag

SEQ ID NO: 54395 - DNA, 120 bp, Homo sapiens
  misc_feature: 1550 for SV(W|O) and mtDNA
acttcacaacaatcctaatcctaataccaactatctccctaattgaaaacaaaatactcaaatgggcctgtccttgtagtataaactaatacaccagtcttgtaaaccggagatgaaaac

SEQ ID NO: 54396 - DNA, 120 bp, Homo sapiens
  misc_feature: 1550 for SV(W|O) and mtDNA
gattttggcgtaggtttggtctagggtgtagcctgagaataggggaaatcagtgaatgaagcctcctatgatggcaaatacagctcctattgataggacatagtggaagtgggctacaac

SEQ ID NO: 54397 - DNA, 120 bp, Homo sapiens
  misc_feature: 1550 for SV(W|O) and mtDNA
ctcaacttaaactccagcaccacgaccctactactatctcgcacctgaaacaagctaacatgactaacacccttaattccatccaccctcctctccctaggaggcctgcccccgctaacc

SEQ ID NO: 54398 - DNA, 120 bp, Homo sapiens
  misc_feature: 1550 for SV(W|O) and mtDNA
gattaaggatactagtataagagatcaggttcgtcctttagtgttgtgtatggttatcatttgttttgaggttagtttgattagtcattgttgggtggtgattagtcggttgttgatgag

SEQ ID NO: 54399 - DNA, 120 bp, Homo sapiens
  misc_feature: 1550 for SV(W|O) and mtDNA
atagttatgtcatccctcttattaatcatcatcctagccctaagtctggcctatgagtgactacaaaaaggattagactgaaccgaattggtatatagtttaaacaaaacgaatgatttc

SEQ ID NO: 54400 - DNA, 120 bp, Homo sapiens
  misc_feature: 1550 for SV(W|O) and mtDNA
cttagccaaaccatttacccaaataaagtataggcgatagaaattgaaacctggcgcaatagatatagtaccgcaagggaaagatgaaaaattataaccaagcataatatagcaaggact

SEQ ID NO: 54401 - DNA, 120 bp, Homo sapiens
  misc_feature: 1550 for SV(W|O) and mtDNA
catagtggggtatctaatcccagtttgggtcttagctattgtgtgttcagatatgttaaagccactttcgtagtctattttgtgtcaactggagttttttacaactcaggtgagttttag

SEQ ID NO: 54402 - DNA, 120 bp, Homo sapiens
  misc_feature: 1550 for SV(W|O) and mtDNA
agtccaatgcttcactcagccattttacctcacccccactgatgttcgccgaccgttgactattctctacaaaccacaaagacattggaacactatacctattattcggcgcatgagctg

SEQ ID NO: 54403 - DNA, 120 bp, Homo sapiens
  misc_feature: 1550 for SV(W|O) and mtDNA
cactctttacgccggcttctattgacttgggttaatcgtgtgaccgcggtggctggcacgaaattgaccaaccctggggttagtatagcttagttaaactttcgtttattgctaaaggtt

SEQ ID NO: 54404 - DNA, 120 bp, Homo sapiens
  misc_feature: 1550 for SV(W|O) and mtDNA
atgtttgggattttttaggtagtgggtgttgagcttgaacgctttcttaattggtggctgcttttaggcctactatgggtgttaaattttttactctctctacaaggttttttcctagtg

SEQ ID NO: 54405 - DNA, 120 bp, Homo sapiens
  misc_feature: 1550 for SV(W|O) and mtDNA
aagaagttattatctcgaactgacactgagccacaacccaaacaacccagctctccctaagcttcaaactagactacttctccataatattcatccctgtagcattgttcgttacatggt

SEQ ID NO: 54406 - DNA, 120 bp, Homo sapiens
  misc_feature: 1549 for SV(W|O) and mtDNA
tttgtagccacaggcttccacggacttcacgtcattattggctcaactttcctcactatctgcttcatccgccaactaatatttcactttacatccaaacatcactttggcttcgaagcc

SEQ ID NO: 54407 - DNA, 120 bp, Homo sapiens
  misc_feature: 1549 for SV(W|O) and mtDNA
tttaggatggggtgtgataggtggcacggagaattttggattctcagggatgggttcgattctcatagtcctagaaataagggggtttaagctcctattatttactctatcaaagtaact

SEQ ID NO: 54408 - DNA, 120 bp, Homo sapiens
  misc_feature: 1549 for SV(W|O) and mtDNA
ttgatccaataacttgaccaacggaacaagttaccctagggataacagcgcaatcctattctagagtccatatcaacaatagggtttacgacctcgatgttggatcaggacatcccgatg

SEQ ID NO: 54409 - DNA, 120 bp, Homo sapiens
  misc_feature: 1549 for SV(W|O) and mtDNA
cctattgccatactagtctttgccgcctgcgaagcagcggtgggcctagccctactagtctcaatctccaacacatatggcctagactacgtacataacctaaacctactccaatgctaa

SEQ ID NO: 54410 - DNA, 120 bp, Homo sapiens
  misc_feature: 1549 for SV(W|O) and mtDNA
ggtaaatgctagtataatatttatgtaaatgaggggcatttggtaaatatgattatcataatttaatgagtcgaaatcattcgttttgtttaaactatataccaattcggttcagtctaa

SEQ ID NO: 54411 - DNA, 120 bp, Homo sapiens
  misc_feature: 1549 for SV(W|O) and mtDNA
tagctgttatcctttaaaagttgagaaagccatgttgttagacatgggggcatgagttagcagttcttgtgagctttctcggtaaataaggggtcgtaagcctctgttgtcagattcaca

SEQ ID NO: 54412 - DNA, 120 bp, Homo sapiens
  misc_feature: 1549 for SV(W|O) and mtDNA
acatcgtactacacgacacgtactacgttgtagcccacttccactatgtcctatcaataggagctgtatttgccatcataggaggcttcattcactgatttcccctattctcaggctaca

SEQ ID NO: 54413 - DNA, 120 bp, Homo sapiens
  misc_feature: 1549 for SV(W|O) and mtDNA
gctaggctaagcgttttgagctgcattgctgcgtgcttgatgcttgtcccttttgatcgtggtgatttagagggtgaactcactggaacggggatgcttgcatgtgtaatcttactaaga

SEQ ID NO: 54414 - DNA, 120 bp, Homo sapiens
  misc_feature: 1549 for SV(W|O) and mtDNA
tactagtataagagatcaggttcgtcctttagtgttgtgtatggttatcatttgttttgaggttagtttgattagtcattgttgggtggtgattagtcggttgttgatgagatatttgga

SEQ ID NO: 54415 - DNA, 120 bp, Homo sapiens
  misc_feature: 1549 for SV(W|O) and mtDNA
tactaccagacaaccttagccaaaccatttacccaaataaagtataggcgatagaaattgaaacctggcgcaatagatatagtaccgcaagggaaagatgaaaaattataaccaagcata

SEQ ID NO: 54416 - DNA, 120 bp, Homo sapiens
  misc_feature: 1549 for SV(W|O) and mtDNA
atcatcgctatccccaccggcgtcaaagtatttagctgactcgccacactccacggaagcaatatgaaatgatctgctgcagtgctctgagccctaggattcatctttcttttcaccgta

SEQ ID NO: 54417 - DNA, 120 bp, Homo sapiens
  misc_feature: 1549 for SV(W|O) and mtDNA
taatagttatgtcatccctcttattaatcatcatcctagccctaagtctggcctatgagtgactacaaaaaggattagactgaaccgaattggtatatagtttaaacaaaacgaatgatt

SEQ ID NO: 54418 - DNA, 120 bp, Homo sapiens
  misc_feature: 1549 for SV(W|O) and mtDNA
gttagtccttgctatattatgcttggttataatttttcatctttcccttgcggtactatatctattgcgccaggtttcaatttctatcgcctatactttatttgggtaaatggtttggct

SEQ ID NO: 54419 - DNA, 120 bp, Homo sapiens
  misc_feature: 1549 for SV(W|O) and mtDNA
atagctgttatcctttaaaagttgagaaagccatgttgttagacatgggggcatgagttagcagttcttgtgagctttctcggtaaataaggggtcgtaagcctctgttgtcagattcac

SEQ ID NO: 54420 - DNA, 120 bp, Homo sapiens
  misc_feature: 1549 for SV(W|O) and mtDNA
gggtttacgacctcgatgttggatcaggacatcccgatggtgcagccgctattaaaggttcgtttgttcaacgattaaagtcctacgtgatctgagttcagaccggagtaatccaggtcg

SEQ ID NO: 54421 - DNA, 120 bp, Homo sapiens
  misc_feature: 1549 for SV(W|O) and mtDNA
gatgtttcaggtttctgagtagagaaatgatccgtaatataggcctcgcccgatgtgtaggaagaggcagataaagaatattgaggcgccattggcgtgaaggtagcggatgattcagcc

SEQ ID NO: 54422 - DNA, 120 bp, Homo sapiens
  misc_feature: 1549 for SV(W|O) and mtDNA
atttatattatcctaactactaccgcattcctactactcaacttaaactccagcaccacgaccctactactatctcgcacctgaaacaagctaacatgactaacacccttaattccatcc

SEQ ID NO: 54423 - DNA, 120 bp, Homo sapiens
  misc_feature: 1549 for SV(W|O) and mtDNA
aaaatggctgagtgaagcattggactgtaaatctaaagacaggggttaggcctctttttaccagctccgaggtgattttcatattgaattgcaaattcgaagaagcagcttcaaacctgc

SEQ ID NO: 54424 - DNA, 120 bp, Homo sapiens
  misc_feature: 1549 for SV(W|O) and mtDNA
gagcaagaaggatataattcctacgccctctcagccgatgaacagttggaataggttgttagcggtaactaagattagtatggtaattaggaagatgagtagatatttgaagaactgatt

SEQ ID NO: 54425 - DNA, 120 bp, Homo sapiens
  misc_feature: 1549 for SV(W|O) and mtDNA
ctaataattattacattttgactaccacaactcaacggctacatagaaaaatccaccccttacgagtgcggcttcgaccctatatcccccgcccgcgtccctttctccataaaattcttc

SEQ ID NO: 54426 - DNA, 120 bp, Homo sapiens
  misc_feature: 1549 for SV(W|O) and mtDNA
attagaaaaaccatttcataactttgtcaaagttaaattataggctaaatcctatatatcttaatggcacatgcagcgcaagtaggtctacaagacgctacttcccctatcatagaagag

SEQ ID NO: 54427 - DNA, 120 bp, Homo sapiens
  misc_feature: 1549 for SV(W|O) and mtDNA
caagaagttattatctcgaactgacactgagccacaacccaaacaacccagctctccctaagcttcaaactagactacttctccataatattcatccctgtagcattgttcgttacatgg

SEQ ID NO: 54428 - DNA, 120 bp, Homo sapiens
  misc_feature: 1549 for SV(W|O) and mtDNA
attagggaagtcagggttagggtggttatagtagtgtgcatggttattacttttatttggagttgcaccaaaatttttggggcctaagaccaatggatagctgttatcctttaaaagttg

SEQ ID NO: 54429 - DNA, 120 bp, Homo sapiens
  misc_feature: 1549 for SV(W|O) and mtDNA
aatgattaaggatactagtataagagatcaggttcgtcctttagtgttgtgtatggttatcatttgttttgaggttagtttgattagtcattgttgggtggtgattagtcggttgttgat

SEQ ID NO: 54430 - DNA, 120 bp, Homo sapiens
  misc_feature: 1548 for SV(W|O) and mtDNA
ttttgtagccacaggcttccacggacttcacgtcattattggctcaactttcctcactatctgcttcatccgccaactaatatttcactttacatccaaacatcactttggcttcgaagc

SEQ ID NO: 54431 - DNA, 120 bp, Homo sapiens
  misc_feature: 1548 for SV(W|O) and mtDNA
aaaacactctttacgccggcttctattgacttgggttaatcgtgtgaccgcggtggctggcacgaaattgaccaaccctggggttagtatagcttagttaaactttcgtttattgctaaa

SEQ ID NO: 54432 - DNA, 120 bp, Homo sapiens
  misc_feature: 1548 for SV(W|O) and mtDNA
aagttatttctagttaattcattatgcagaaggtataggggttagtccttgctatattatgcttggttataatttttcatctttcccttgcggtactatatctattgcgccaggtttcaa

SEQ ID NO: 54433 - DNA, 120 bp, Homo sapiens
  misc_feature: 1548 for SV(W|O) and mtDNA
catagctcagaccatacctatgtatccaaatggttctttttttccggagtagtaagttacaatatgggagattattccgaagcctggtaggataagaatataaacttcagggtgaccgaa

SEQ ID NO: 54434 - DNA, 120 bp, Homo sapiens
  misc_feature: 1548 for SV(W|O) and mtDNA
ttcgcctgtaatattgaacgtaggtgcgataaataatgggatgaggcaggaatcaaagacagatactgcgacatagggtgctccggctccagcgtctcgcaatgctatcgcgtgcatacc

SEQ ID NO: 54435 - DNA, 120 bp, Homo sapiens
  misc_feature: 1548 for SV(W|O) and mtDNA
tactcaacttaaactccagcaccacgaccctactactatctcgcacctgaaacaagctaacatgactaacacccttaattccatccaccctcctctccctaggaggcctgcccccgctaa

SEQ ID NO: 54436 - DNA, 120 bp, Homo sapiens
  misc_feature: 1548 for SV(W|O) and mtDNA
ttaattttattagggggttagttttgcgtattggggtcattggtgttcttgtagttgaaatacaacgatggtttttcatatcattggtcgtggttgtagtccgtgcgagaataatgatgt

SEQ ID NO: 54437 - DNA, 120 bp, Homo sapiens
  misc_feature: 1548 for SV(W|O) and mtDNA
tgtactgctcggaggttgggttctgctccgaggtcgccccaaccgaaatttttaatgcaggtttggtagtttaggacctgtgggtttgttaggtactgtttgcattaataaattaaagct

SEQ ID NO: 54438 - DNA, 120 bp, Homo sapiens
  misc_feature: 1548 for SV(W|O) and mtDNA
atcctagaaatcgctgtcgccttaatccaagcctacgttttcacacttctagtaagcctctacctgcacgacaacacataatgacccaccaatcacatgcctatcatatagtaaaaccca

SEQ ID NO: 54439 - DNA, 120 bp, Homo sapiens
  misc_feature: 1548 for SV(W|O) and mtDNA
acattcaaaaaagagtaataaacttcgccttaattttaataatcaacaccctcctagccttactactaataattattacattttgactaccacaactcaacggctacatagaaaaatcca

SEQ ID NO: 54440 - DNA, 120 bp, Homo sapiens
  misc_feature: 1548 for SV(W|O) and mtDNA
tgatccaataacttgaccaacggaacaagttaccctagggataacagcgcaatcctattctagagtccatatcaacaatagggtttacgacctcgatgttggatcaggacatcccgatgg

SEQ ID NO: 54441 - DNA, 120 bp, Homo sapiens
  misc_feature: 1548 for SV(W|O) and mtDNA
tgacaacagaggcttacgaccccttatttaccgagaaagctcacaagaactgctaactcatgcccccatgtctaacaacatggctttctcaacttttaaaggataacagctatccattgg

SEQ ID NO: 54442 - DNA, 120 bp, Homo sapiens
  misc_feature: 1548 for SV(W|O) and mtDNA
gatagctgttatcctttaaaagttgagaaagccatgttgttagacatgggggcatgagttagcagttcttgtgagctttctcggtaaataaggggtcgtaagcctctgttgtcagattca

SEQ ID NO: 54443 - DNA, 120 bp, Homo sapiens
  misc_feature: 1548 for SV(W|O) and mtDNA
ctccggcggggtcgaagaaggtggtgttgaggttgcggtctgttagtagtatagtgatgccagcagctaggactgggagagataggagaagtaggactgctgtgattaggacggatcaga

SEQ ID NO: 54444 - DNA, 120 bp, Homo sapiens
  misc_feature: 1548 for SV(W|O) and mtDNA
tctgagctatgatatcaattggcttcctagggtttatcgtgtgagcacaccatatatttacagtaggaatagacgtagacacacgagcatatttcacctccgctaccataatcatcgcta

SEQ ID NO: 54445 - DNA, 120 bp, Homo sapiens
  misc_feature: 1548 for SV(W|O) and mtDNA
agagggttctgtgggcaaatttaaagttgaactaagattctatcttggacaaccagctatcaccaggctcggtaggtttgtcgcctctacctataaatcttcccactattttgctacata

SEQ ID NO: 54446 - DNA, 120 bp, Homo sapiens
  misc_feature: 1548 for SV(W|O) and mtDNA
gccttactactaataattattacattttgactaccacaactcaacggctacatagaaaaatccaccccttacgagtgcggcttcgaccctatatcccccgcccgcgtccctttctccata

SEQ ID NO: 54447 - DNA, 120 bp, Homo sapiens
  misc_feature: 1548 for SV(W|O) and mtDNA
tatcctagaaatcgctgtcgccttaatccaagcctacgttttcacacttctagtaagcctctacctgcacgacaacacataatgacccaccaatcacatgcctatcatatagtaaaaccc

SEQ ID NO: 54448 - DNA, 120 bp, Homo sapiens
  misc_feature: 1548 for SV(W|O) and mtDNA
taggctaaatcctatatatcttaatggcacatgcagcgcaagtaggtctacaagacgctacttcccctatcatagaagagcttatcacctttcatgatcacgccctcataatcattttcc

SEQ ID NO: 54449 - DNA, 120 bp, Homo sapiens
  misc_feature: 1548 for SV(W|O) and mtDNA
ggctatcatcacccgatgaggcaaccagccagaacgcctgaacgcaggcacatacttcctattctacaccctagtaggctcccttcccctactcatcgcactaatttacactcacaacac

SEQ ID NO: 54450 - DNA, 120 bp, Homo sapiens
  misc_feature: 1548 for SV(W|O) and mtDNA
ggaagcaatatgaaatgatctgctgcagtgctctgagccctaggattcatctttcttttcaccgtaggtggcctgactggcattgtattagcaaactcatcactagacatcgtactacac

SEQ ID NO: 54451 - DNA, 120 bp, Homo sapiens
  misc_feature: 1548 for SV(W|O) and mtDNA
aaattgccctccttttacccctaccatgagccctacaaacaactaacctgccactaatagttatgtcatccctcttattaatcatcatcctagccctaagtctggcctatgagtgactac

SEQ ID NO: 54452 - DNA, 120 bp, Homo sapiens
  misc_feature: 1548 for SV(W|O) and mtDNA
ctagccttactactaataattattacattttgactaccacaactcaacggctacatagaaaaatccaccccttacgagtgcggcttcgaccctatatcccccgcccgcgtccctttctcc

SEQ ID NO: 54453 - DNA, 120 bp, Homo sapiens
  misc_feature: 1548 for SV(W|O) and mtDNA
aactatttatattatcctaactactaccgcattcctactactcaacttaaactccagcaccacgaccctactactatctcgcacctgaaacaagctaacatgactaacacccttaattcc

SEQ ID NO: 54454 - DNA, 120 bp, Homo sapiens
  misc_feature: 1548 for SV(W|O) and mtDNA
aatcggaggctttggcaactgactagttcccctaataatcggtgcccccgatatggcgtttccccgcataaacaacataagcttctgactcttacctccctctctcctactcctgctcgc

SEQ ID NO: 54455 - DNA, 120 bp, Homo sapiens
  misc_feature: 1548 for SV(W|O) and mtDNA
caaagttatttctagttaattcattatgcagaaggtataggggttagtccttgctatattatgcttggttataatttttcatctttcccttgcggtactatatctattgcgccaggtttc

SEQ ID NO: 54456 - DNA, 120 bp, Homo sapiens
  misc_feature: 1548 for SV(W|O) and mtDNA
ataacagcgcaatcctattctagagtccatatcaacaatagggtttacgacctcgatgttggatcaggacatcccgatggtgcagccgctattaaaggttcgtttgttcaacgattaaag

SEQ ID NO: 54457 - DNA, 120 bp, Homo sapiens
  misc_feature: 1548 for SV(W|O) and mtDNA
aactgattaatgtttgggtctgagtttatatatcacagtgagaattctatgatggaccatgtaacgaacaatgctacagggatgaatattatggagaagtagtctagtttgaagcttagg

SEQ ID NO: 54458 - DNA, 120 bp, Homo sapiens
  misc_feature: 1548 for SV(W|O) and mtDNA
ataattcctacgccctctcagccgatgaacagttggaataggttgttagcggtaactaagattagtatggtaattaggaagatgagtagatatttgaagaactgattaatgtttgggtct

SEQ ID NO: 54459 - DNA, 120 bp, Homo sapiens
  misc_feature: 1548 for SV(W|O) and mtDNA
agggacctgtatgaatggctccacgagggttcagctgtctcttacttttaaccagtgaaattgacctgcccgtgaagaggcgggcataacacagcaagacgagaagaccctatggagctt

SEQ ID NO: 54460 - DNA, 120 bp, Homo sapiens
  misc_feature: 1548 for SV(W|O) and mtDNA
agcggctgcaccatcgggatgtcctgatccaacatcgaggtcgtaaaccctattgttgatatggactctagaataggattgcgctgttatccctagggtaacttgttccgttggtcaagt

SEQ ID NO: 54461 - DNA, 120 bp, Homo sapiens
  misc_feature: 1548 for SV(W|O) and mtDNA
agaaccatttggatacataggtatggtctgagctatgatatcaattggcttcctagggtttatcgtgtgagcacaccatatatttacagtaggaatagacgtagacacacgagcatattt

SEQ ID NO: 54462 - DNA, 120 bp, Homo sapiens
  misc_feature: 1547 for SV(W|O) and mtDNA
tgggattttttaggtagtgggtgttgagcttgaacgctttcttaattggtggctgcttttaggcctactatgggtgttaaattttttactctctctacaaggttttttcctagtgtccaa

SEQ ID NO: 54463 - DNA, 120 bp, Homo sapiens
  misc_feature: 1547 for SV(W|O) and mtDNA
gccatactagtctttgccgcctgcgaagcagcggtgggcctagccctactagtctcaatctccaacacatatggcctagactacgtacataacctaaacctactccaatgctaaaactaa

SEQ ID NO: 54464 - DNA, 120 bp, Homo sapiens
  misc_feature: 1547 for SV(W|O) and mtDNA
aaaaaagaaccatttggatacataggtatggtctgagctatgatatcaattggcttcctagggtttatcgtgtgagcacaccatatatttacagtaggaatagacgtagacacacgagca

SEQ ID NO: 54465 - DNA, 120 bp, Homo sapiens
  misc_feature: 1547 for SV(W|O) and mtDNA
tgatgagcaagaaggatataattcctacgccctctcagccgatgaacagttggaataggttgttagcggtaactaagattagtatggtaattaggaagatgagtagatatttgaagaact

SEQ ID NO: 54466 - DNA, 120 bp, Homo sapiens
  misc_feature: 1547 for SV(W|O) and mtDNA
tgaactcagatcacgtaggactttaatcgttgaacaaacgaacctttaatagcggctgcaccatcgggatgtcctgatccaacatcgaggtcgtaaaccctattgttgatatggactcta

SEQ ID NO: 54467 - DNA, 120 bp, Homo sapiens
  misc_feature: 1547 for SV(W|O) and mtDNA
tctgatttttcggtcaccctgaagtttatattcttatcctaccaggcttcggaataatctcccatattgtaacttactactccggaaaaaaagaaccatttggatacataggtatggtct

SEQ ID NO: 54468 - DNA, 120 bp, Homo sapiens
  misc_feature: 1547 for SV(W|O) and mtDNA
tcaggcgttctggctggttgcctcatcgggtgatgatagccaaggtggggataagtgtggtttcgaagaagatataaaatatgattagttctgtggctgtgaatgttataattaaggaga

SEQ ID NO: 54469 - DNA, 120 bp, Homo sapiens
  misc_feature: 1547 for SV(W|O) and mtDNA
cggcggggtcgaagaaggtggtgttgaggttgcggtctgttagtagtatagtgatgccagcagctaggactgggagagataggagaagtaggactgctgtgattaggacggatcagacga

SEQ ID NO: 54470 - DNA, 120 bp, Homo sapiens
  misc_feature: 1547 for SV(W|O) and mtDNA
aaatgattaaggatactagtataagagatcaggttcgtcctttagtgttgtgtatggttatcatttgttttgaggttagtttgattagtcattgttgggtggtgattagtcggttgttga

SEQ ID NO: 54471 - DNA, 120 bp, Homo sapiens
  misc_feature: 1547 for SV(W|O) and mtDNA
cactacgagccacagcttaaaactcaaaggacctggcggtgcttcatatccctctagaggagcctgttctgtaatcgataaaccccgatcaacctcaccacctcttgctcagcctatata

SEQ ID NO: 54472 - DNA, 120 bp, Homo sapiens
  misc_feature: 1547 for SV(W|O) and mtDNA
tatactaataatcttatagaaatttaggttaaatacagaccaagagccttcaaagccctcagtaagttgcaatacttaatttctgtaacagctaaggactgcaaaaccccactctgcatc

SEQ ID NO: 54473 - DNA, 120 bp, Homo sapiens
  misc_feature: 1547 for SV(W|O) and mtDNA
ctcgatgttggatcaggacatcccgatggtgcagccgctattaaaggttcgtttgttcaacgattaaagtcctacgtgatctgagttcagaccggagtaatccaggtcggtttctatcta

SEQ ID NO: 54474 - DNA, 120 bp, Homo sapiens
  misc_feature: 1547 for SV(W|O) and mtDNA
tagacatcgtactacacgacacgtactacgttgtagcccacttccactatgtcctatcaataggagctgtatttgccatcataggaggcttcattcactgatttcccctattctcaggct

SEQ ID NO: 54475 - DNA, 120 bp, Homo sapiens
  misc_feature: 1547 for SV(W|O) and mtDNA
cgacctcgatgttggatcaggacatcccgatggtgcagccgctattaaaggttcgtttgttcaacgattaaagtcctacgtgatctgagttcagaccggagtaatccaggtcggtttcta

SEQ ID NO: 54476 - DNA, 120 bp, Homo sapiens
  misc_feature: 1547 for SV(W|O) and mtDNA
ggcttcctagggtttatcgtgtgagcacaccatatatttacagtaggaatagacgtagacacacgagcatatttcacctccgctaccataatcatcgctatccccaccggcgtcaaagta

SEQ ID NO: 54477 - DNA, 120 bp, Homo sapiens
  misc_feature: 1547 for SV(W|O) and mtDNA
tactactaataattattacattttgactaccacaactcaacggctacatagaaaaatccaccccttacgagtgcggcttcgaccctatatcccccgcccgcgtccctttctccataaaat

SEQ ID NO: 54478 - DNA, 120 bp, Homo sapiens
  misc_feature: 1547 for SV(W|O) and mtDNA
cattcaaaaaagagtaataaacttcgccttaattttaataatcaacaccctcctagccttactactaataattattacattttgactaccacaactcaacggctacatagaaaaatccac

SEQ ID NO: 54479 - DNA, 120 bp, Homo sapiens
  misc_feature: 1547 for SV(W|O) and mtDNA
agcaatatgaaatgatctgctgcagtgctctgagccctaggattcatctttcttttcaccgtaggtggcctgactggcattgtattagcaaactcatcactagacatcgtactacacgac

SEQ ID NO: 54480 - DNA, 120 bp, Homo sapiens
  misc_feature: 1547 for SV(W|O) and mtDNA
atcgtactacacgacacgtactacgttgtagcccacttccactatgtcctatcaataggagctgtatttgccatcataggaggcttcattcactgatttcccctattctcaggctacacc

SEQ ID NO: 54481 - DNA, 120 bp, Homo sapiens
  misc_feature: 1547 for SV(W|O) and mtDNA
ggtgacgggcggtgtgtacgcgcttcagggccctgttcaactaagcactctactctcagtttactgctaaatccaccttcgacccttaagtttcataagggctatcgtagttttctgggg

SEQ ID NO: 54482 - DNA, 120 bp, Homo sapiens
  misc_feature: 1547 for SV(W|O) and mtDNA
ggattgcttgaatggctgctgtgttggcatctgctcgggcgtatcatcaactgatgagcaagaaggatataattcctacgccctctcagccgatgaacagttggaataggttgttagcgg

SEQ ID NO: 54483 - DNA, 120 bp, Homo sapiens
  misc_feature: 1547 for SV(W|O) and mtDNA
ctaactcatgcccccatgtctaacaacatggctttctcaacttttaaaggataacagctatccattggtcttaggccccaaaaattttggtgcaactccaaataaaagtaataaccatgc

SEQ ID NO: 54484 - DNA, 120 bp, Homo sapiens
  misc_feature: 1547 for SV(W|O) and mtDNA
gcagccaccaattaagaaagcgttcaagctcaacacccactacctaaaaaatcccaaacatataactgaactcctcatacccaattggaccaatctatcaccctatagaagaactaatgt

SEQ ID NO: 54485 - DNA, 120 bp, Homo sapiens
  misc_feature: 1547 for SV(W|O) and mtDNA
gatctgctgcagtgctctgagccctaggattcatctttcttttcaccgtaggtggcctgactggcattgtattagcaaactcatcactagacatcgtactacacgacacgtactacgttg

SEQ ID NO: 54486 - DNA, 120 bp, Homo sapiens
  misc_feature: 1547 for SV(W|O) and mtDNA
atatataaactcagacccaaacattaatcagttcttcaaatatctactcatcttcctaattaccatactaatcttagttaccgctaacaacctattccaactgttcatcggctgagaggg

SEQ ID NO: 54487 - DNA, 120 bp, Homo sapiens
  misc_feature: 1547 for SV(W|O) and mtDNA
cacagctctaagcctccttattcgagccgagctgggccagccaggcaaccttctaggtaacgaccacatctacaacgttatcgtcacagcccatgcatttgtaataatcttcttcatagt

SEQ ID NO: 54488 - DNA, 120 bp, Homo sapiens
  misc_feature: 1547 for SV(W|O) and mtDNA
caatgctacagggatgaatattatggagaagtagtctagtttgaagcttagggagagctgggttgtttgggttgtggctcagtgtcagttcgagataataacttcttggtctaggcacat

SEQ ID NO: 54489 - DNA, 120 bp, Homo sapiens
  misc_feature: 1547 for SV(W|O) and mtDNA
aggctaaatcctatatatcttaatggcacatgcagcgcaagtaggtctacaagacgctacttcccctatcatagaagagcttatcacctttcatgatcacgccctcataatcattttcct

SEQ ID NO: 54490 - DNA, 120 bp, Homo sapiens
  misc_feature: 1547 for SV(W|O) and mtDNA
aagcatagtggggtatctaatcccagtttgggtcttagctattgtgtgttcagatatgttaaagccactttcgtagtctattttgtgtcaactggagttttttacaactcaggtgagttt

SEQ ID NO: 54491 - DNA, 120 bp, Homo sapiens
  misc_feature: 1546 for SV(W|O) and mtDNA
attggagtaggtttaggttatgtacgtagtctaggccatatgtgttggagattgagactagtagggctaggcccaccgctgcttcgcaggcggcaaagactagtatggcaataggcacaa

SEQ ID NO: 54492 - DNA, 120 bp, Homo sapiens
  misc_feature: 1546 for SV(W|O) and mtDNA
ttcttaattggtggctgcttttaggcctactatgggtgttaaattttttactctctctacaaggttttttcctagtgtccaaagagctgttcctctttggactaacagttaaatttacaa

SEQ ID NO: 54493 - DNA, 120 bp, Homo sapiens
  misc_feature: 1546 for SV(W|O) and mtDNA
atgcatttgtaataatcttcttcatagtaatacccatcataatcggaggctttggcaactgactagttcccctaataatcggtgcccccgatatggcgtttccccgcataaacaacataa

SEQ ID NO: 54494 - DNA, 120 bp, Homo sapiens
  misc_feature: 1546 for SV(W|O) and mtDNA
tggatagctgttatcctttaaaagttgagaaagccatgttgttagacatgggggcatgagttagcagttcttgtgagctttctcggtaaataaggggtcgtaagcctctgttgtcagatt

SEQ ID NO: 54495 - DNA, 120 bp, Homo sapiens
  misc_feature: 1546 for SV(W|O) and mtDNA
tgaaattgacctgcccgtgaagaggcgggcataacacagcaagacgagaagaccctatggagctttaatttattaatgcaaacagtacctaacaaacccacaggtcctaaactaccaaac

SEQ ID NO: 54496 - DNA, 120 bp, Homo sapiens
  misc_feature: 1546 for SV(W|O) and mtDNA
cacttgttccttaaatagggacctgtatgaatggctccacgagggttcagctgtctcttacttttaaccagtgaaattgacctgcccgtgaagaggcgggcataacacagcaagacgaga

SEQ ID NO: 54497 - DNA, 120 bp, Homo sapiens
  misc_feature: 1546 for SV(W|O) and mtDNA
tcgcctgtaatattgaacgtaggtgcgataaataatgggatgaggcaggaatcaaagacagatactgcgacatagggtgctccggctccagcgtctcgcaatgctatcgcgtgcataccc

SEQ ID NO: 54498 - DNA, 120 bp, Homo sapiens
  misc_feature: 1546 for SV(W|O) and mtDNA
caacaaagcataatatttcgcccactaagccaatcactttattgactcctagccgcagacctcctcattctaacctgaatcggaggacaaccagtaagctacccttttaccatcattgga

SEQ ID NO: 54499 - DNA, 120 bp, Homo sapiens
  misc_feature: 1546 for SV(W|O) and mtDNA
attaggctgtgggtggttgtgttgattcaaattatgtgttttttggaaagtcatgtcagtggtagtaatataattgttgggacgattagttttagcattggagtaggtttaggttatgta

SEQ ID NO: 54500 - DNA, 120 bp, Homo sapiens
  misc_feature: 1546 for SV(W|O) and mtDNA
gttttctggggtagaaaatgtagcccatttcttgccacctcatgggctacaccttgacctaacgtctttacgtgggtacttgcgcttactttgtagccttcatcagggtttgctgaagat

SEQ ID NO: 54501 - DNA, 120 bp, Homo sapiens
  misc_feature: 1546 for SV(W|O) and mtDNA
ctttaggatggggtgtgataggtggcacggagaattttggattctcagggatgggttcgattctcatagtcctagaaataagggggtttaagctcctattatttactctatcaaagtaac

SEQ ID NO: 54502 - DNA, 120 bp, Homo sapiens
  misc_feature: 1546 for SV(W|O) and mtDNA
ccccaccttggctatcatcacccgatgaggcaaccagccagaacgcctgaacgcaggcacatacttcctattctacaccctagtaggctcccttcccctactcatcgcactaatttacac

SEQ ID NO: 54503 - DNA, 120 bp, Homo sapiens
  misc_feature: 1546 for SV(W|O) and mtDNA
gccaccaattaagaaagcgttcaagctcaacacccactacctaaaaaatcccaaacatataactgaactcctcatacccaattggaccaatctatcaccctatagaagaactaatgttag

SEQ ID NO: 54504 - DNA, 120 bp, Homo sapiens
  misc_feature: 1546 for SV(W|O) and mtDNA
gcagttttgttgatttaactgttgaggtttagggctaagcatagtggggtatctaatcccagtttgggtcttagctattgtgtgttcagatatgttaaagccactttcgtagtctatttt

SEQ ID NO: 54505 - DNA, 120 bp, Homo sapiens
  misc_feature: 1546 for SV(W|O) and mtDNA
gatttttcggtcaccctgaagtttatattcttatcctaccaggcttcggaataatctcccatattgtaacttactactccggaaaaaaagaaccatttggatacataggtatggtctgag

SEQ ID NO: 54506 - DNA, 120 bp, Homo sapiens
  misc_feature: 1546 for SV(W|O) and mtDNA
gatctagaaattgccctccttttacccctaccatgagccctacaaacaactaacctgccactaatagttatgtcatccctcttattaatcatcatcctagccctaagtctggcctatgag

SEQ ID NO: 54507 - DNA, 120 bp, Homo sapiens
  misc_feature: 1546 for SV(W|O) and mtDNA
gagtattttgttttcaattagggagatagttggtattaggattaggattgttgtgaagtatagtacggatgctacttgtccaatgatggtaaaagggtagcttactggttgtcctccgat

SEQ ID NO: 54508 - DNA, 120 bp, Homo sapiens
  misc_feature: 1546 for SV(W|O) and mtDNA
cctagccttactactaataattattacattttgactaccacaactcaacggctacatagaaaaatccaccccttacgagtgcggcttcgaccctatatcccccgcccgcgtccctttctc

SEQ ID NO: 54509 - DNA, 120 bp, Homo sapiens
  misc_feature: 1546 for SV(W|O) and mtDNA
attttggcgtaggtttggtctagggtgtagcctgagaataggggaaatcagtgaatgaagcctcctatgatggcaaatacagctcctattgataggacatagtggaagtgggctacaacg

SEQ ID NO: 54510 - DNA, 120 bp, Homo sapiens
  misc_feature: 1546 for SV(W|O) and mtDNA
aggtagctcgtctggtttcgggggtcttagctttggctctccttgcaaagttatttctagttaattcattatgcagaaggtataggggttagtccttgctatattatgcttggttataat

SEQ ID NO: 54511 - DNA, 120 bp, Homo sapiens
  misc_feature: 1546 for SV(W|O) and mtDNA
actaccacaactcaacggctacatagaaaaatccaccccttacgagtgcggcttcgaccctatatcccccgcccgcgtccctttctccataaaattcttcttagtagctattaccttctt

SEQ ID NO: 54512 - DNA, 120 bp, Homo sapiens
  misc_feature: 1546 for SV(W|O) and mtDNA
aattaggctgtgggtggttgtgttgattcaaattatgtgttttttggaaagtcatgtcagtggtagtaatataattgttgggacgattagttttagcattggagtaggtttaggttatgt

SEQ ID NO: 54513 - DNA, 120 bp, Homo sapiens
  misc_feature: 1545 for SV(W|O) and mtDNA
ctattgccatactagtctttgccgcctgcgaagcagcggtgggcctagccctactagtctcaatctccaacacatatggcctagactacgtacataacctaaacctactccaatgctaaa

SEQ ID NO: 54514 - DNA, 120 bp, Homo sapiens
  misc_feature: 1545 for SV(W|O) and mtDNA
ttaaggaacaagtgattatgctacctttgcacggttagggtaccgcggccgttaaacatgtgtcactgggcaggcggtgcctctaatactggtgatgctagaggtgatgtttttggtaaa

SEQ ID NO: 54515 - DNA, 120 bp, Homo sapiens
  misc_feature: 1545 for SV(W|O) and mtDNA
ttgcggtctgttagtagtatagtgatgccagcagctaggactgggagagataggagaagtaggactgctgtgattaggacggatcagacgaagaggggcgtttggtattgggttatggca

SEQ ID NO: 54516 - DNA, 120 bp, Homo sapiens
  misc_feature: 1545 for SV(W|O) and mtDNA
gatagtgaaatggattttggcgtaggtttggtctagggtgtagcctgagaataggggaaatcagtgaatgaagcctcctatgatggcaaatacagctcctattgataggacatagtggaa

SEQ ID NO: 54517 - DNA, 120 bp, Homo sapiens
  misc_feature: 1545 for SV(W|O) and mtDNA
ttcaggtttctgagtagagaaatgatccgtaatataggcctcgcccgatgtgtaggaagaggcagataaagaatattgaggcgccattggcgtgaaggtagcggatgattcagccataat

SEQ ID NO: 54518 - DNA, 120 bp, Homo sapiens
  misc_feature: 1545 for SV(W|O) and mtDNA
ttatccccaccttggctatcatcacccgatgaggcaaccagccagaacgcctgaacgcaggcacatacttcctattctacaccctagtaggctcccttcccctactcatcgcactaattt

SEQ ID NO: 54519 - DNA, 120 bp, Homo sapiens
  misc_feature: 1545 for SV(W|O) and mtDNA
tgaatggctccacgagggttcagctgtctcttacttttaaccagtgaaattgacctgcccgtgaagaggcgggcataacacagcaagacgagaagaccctatggagctttaatttattaa

SEQ ID NO: 54520 - DNA, 120 bp, Homo sapiens
  misc_feature: 1545 for SV(W|O) and mtDNA
tgtttgggattttttaggtagtgggtgttgagcttgaacgctttcttaattggtggctgcttttaggcctactatgggtgttaaattttttactctctctacaaggttttttcctagtgt

SEQ ID NO: 54521 - DNA, 120 bp, Homo sapiens
  misc_feature: 1545 for SV(W|O) and mtDNA
aaggtagcataatcacttgttccttaaatagggacctgtatgaatggctccacgagggttcagctgtctcttacttttaaccagtgaaattgacctgcccgtgaagaggcgggcataaca

SEQ ID NO: 54522 - DNA, 120 bp, Homo sapiens
  misc_feature: 1545 for SV(W|O) and mtDNA
cattggagtaggtttaggttatgtacgtagtctaggccatatgtgttggagattgagactagtagggctaggcccaccgctgcttcgcaggcggcaaagactagtatggcaataggcaca

SEQ ID NO: 54523 - DNA, 120 bp, Homo sapiens
  misc_feature: 1545 for SV(W|O) and mtDNA
ctcgcacggactacaaccacgaccaatgatatgaaaaaccatcgttgtatttcaactacaagaacaccaatgaccccaatacgcaaaactaaccccctaataaaattaattaaccactca

SEQ ID NO: 54524 - DNA, 120 bp, Homo sapiens
  misc_feature: 1545 for SV(W|O) and mtDNA
tcatgcccccatgtctaacaacatggctttctcaacttttaaaggataacagctatccattggtcttaggccccaaaaattttggtgcaactccaaataaaagtaataaccatgcacact

SEQ ID NO: 54525 - DNA, 120 bp, Homo sapiens
  misc_feature: 1545 for SV(W|O) and mtDNA
tcaaagtatttagctgactcgccacactccacggaagcaatatgaaatgatctgctgcagtgctctgagccctaggattcatctttcttttcaccgtaggtggcctgactggcattgtat

SEQ ID NO: 54526 - DNA, 120 bp, Homo sapiens
  misc_feature: 1545 for SV(W|O) and mtDNA
gtcctgatccaacatcgaggtcgtaaaccctattgttgatatggactctagaataggattgcgctgttatccctagggtaacttgttccgttggtcaagttattggatcaattgagtata

SEQ ID NO: 54527 - DNA, 120 bp, Homo sapiens
  misc_feature: 1545 for SV(W|O) and mtDNA
taatagcggctgcaccatcgggatgtcctgatccaacatcgaggtcgtaaaccctattgttgatatggactctagaataggattgcgctgttatccctagggtaacttgttccgttggtc

SEQ ID NO: 54528 - DNA, 120 bp, Homo sapiens
  misc_feature: 1545 for SV(W|O) and mtDNA
ctaggcccaccgctgcttcgcaggcggcaaagactagtatggcaataggcacaatattggctaagagggagtgggtgttgagggttatgagagtagctataatgaacagcgatagtatta

SEQ ID NO: 54529 - DNA, 120 bp, Homo sapiens
  misc_feature: 1545 for SV(W|O) and mtDNA
actcaacttaaactccagcaccacgaccctactactatctcgcacctgaaacaagctaacatgactaacacccttaattccatccaccctcctctccctaggaggcctgcccccgctaac

SEQ ID NO: 54530 - DNA, 120 bp, Homo sapiens
  misc_feature: 1545 for SV(W|O) and mtDNA
gtggagtgtggcgagtcagctaaatactttgacgccggtggggatagcgatgattatggtagcggaggtgaaatatgctcgtgtgtctacgtctattcctactgtaaatatatggtgtgc

SEQ ID NO: 54531 - DNA, 120 bp, Homo sapiens
  misc_feature: 1545 for SV(W|O) and mtDNA
ggttgcggtctgttagtagtatagtgatgccagcagctaggactgggagagataggagaagtaggactgctgtgattaggacggatcagacgaagaggggcgtttggtattgggttatgg

SEQ ID NO: 54532 - DNA, 120 bp, Homo sapiens
  misc_feature: 1545 for SV(W|O) and mtDNA
acttatcatcttcacaattctaattctactgactatcctagaaatcgctgtcgccttaatccaagcctacgttttcacacttctagtaagcctctacctgcacgacaacacataatgacc

SEQ ID NO: 54533 - DNA, 120 bp, Homo sapiens
  misc_feature: 1545 for SV(W|O) and mtDNA
caactcaggtgagttttagctttattggggagggggtgatctaaaacactctttacgccggcttctattgacttgggttaatcgtgtgaccgcggtggctggcacgaaattgaccaaccc

SEQ ID NO: 54534 - DNA, 120 bp, Homo sapiens
  misc_feature: 1545 for SV(W|O) and mtDNA
gggtgttgagcttgaacgctttcttaattggtggctgcttttaggcctactatgggtgttaaattttttactctctctacaaggttttttcctagtgtccaaagagctgttcctctttgg

SEQ ID NO: 54535 - DNA, 120 bp, Homo sapiens
  misc_feature: 1545 for SV(W|O) and mtDNA
aaacactctttacgccggcttctattgacttgggttaatcgtgtgaccgcggtggctggcacgaaattgaccaaccctggggttagtatagcttagttaaactttcgtttattgctaaag

SEQ ID NO: 54536 - DNA, 120 bp, Homo sapiens
  misc_feature: 1545 for SV(W|O) and mtDNA
catgtactgctcggaggttgggttctgctccgaggtcgccccaaccgaaatttttaatgcaggtttggtagtttaggacctgtgggtttgttaggtactgtttgcattaataaattaaag

SEQ ID NO: 54537 - DNA, 120 bp, Homo sapiens
  misc_feature: 1545 for SV(W|O) and mtDNA
ctttaatagcggctgcaccatcgggatgtcctgatccaacatcgaggtcgtaaaccctattgttgatatggactctagaataggattgcgctgttatccctagggtaacttgttccgttg

SEQ ID NO: 54538 - DNA, 120 bp, Homo sapiens
  misc_feature: 1545 for SV(W|O) and mtDNA
cttgttccttaaatagggacctgtatgaatggctccacgagggttcagctgtctcttacttttaaccagtgaaattgacctgcccgtgaagaggcgggcataacacagcaagacgagaag

SEQ ID NO: 54539 - DNA, 120 bp, Homo sapiens
  misc_feature: 1545 for SV(W|O) and mtDNA
ccacttcaagtcaactaggactcataatagttacaatcggcatcaaccaaccacacctagcattcctgcacatctgcacccacgccttcttcaaagccatactatttatgtgctccgggt

SEQ ID NO: 54540 - DNA, 120 bp, Homo sapiens
  misc_feature: 1545 for SV(W|O) and mtDNA
atgattaaggatactagtataagagatcaggttcgtcctttagtgttgtgtatggttatcatttgttttgaggttagtttgattagtcattgttgggtggtgattagtcggttgttgatg

SEQ ID NO: 54541 - DNA, 120 bp, Homo sapiens
  misc_feature: 1545 for SV(W|O) and mtDNA
caaacaacaaagcataatatttcgcccactaagccaatcactttattgactcctagccgcagacctcctcattctaacctgaatcggaggacaaccagtaagctacccttttaccatcat

SEQ ID NO: 54542 - DNA, 120 bp, Homo sapiens
  misc_feature: 1545 for SV(W|O) and mtDNA
agcatagtggggtatctaatcccagtttgggtcttagctattgtgtgttcagatatgttaaagccactttcgtagtctattttgtgtcaactggagttttttacaactcaggtgagtttt

SEQ ID NO: 54543 - DNA, 120 bp, Homo sapiens
  misc_feature: 1544 for SV(W|O) and mtDNA
aactatctccctaattgaaaacaaaatactcaaatgggcctgtccttgtagtataaactaatacaccagtcttgtaaaccggagatgaaaacctttttccaaggacaaatcagagaaaaa

SEQ ID NO: 54544 - DNA, 120 bp, Homo sapiens
  misc_feature: 1544 for SV(W|O) and mtDNA
tttacaactcaggtgagttttagctttattggggagggggtgatctaaaacactctttacgccggcttctattgacttgggttaatcgtgtgaccgcggtggctggcacgaaattgacca

SEQ ID NO: 54545 - DNA, 120 bp, Homo sapiens
  misc_feature: 1544 for SV(W|O) and mtDNA
taaaccctaggaagccaattgatatcatagctcagaccatacctatgtatccaaatggttctttttttccggagtagtaagttacaatatgggagattattccgaagcctggtaggataa

SEQ ID NO: 54546 - DNA, 120 bp, Homo sapiens
  misc_feature: 1544 for SV(W|O) and mtDNA
tgtgttttttggaaagtcatgtcagtggtagtaatataattgttgggacgattagttttagcattggagtaggtttaggttatgtacgtagtctaggccatatgtgttggagattgagac

SEQ ID NO: 54547 - DNA, 120 bp, Homo sapiens
  misc_feature: 1544 for SV(W|O) and mtDNA
tggtccaattgggtatgaggagttcagttatatgtttgggattttttaggtagtgggtgttgagcttgaacgctttcttaattggtggctgcttttaggcctactatgggtgttaaattt

SEQ ID NO: 54548 - DNA, 120 bp, Homo sapiens
  misc_feature: 1544 for SV(W|O) and mtDNA
cagtgaaattgacctgcccgtgaagaggcgggcataacacagcaagacgagaagaccctatggagctttaatttattaatgcaaacagtacctaacaaacccacaggtcctaaactacca

SEQ ID NO: 54549 - DNA, 120 bp, Homo sapiens
  misc_feature: 1544 for SV(W|O) and mtDNA
ccaaacaacaaagcataatatttcgcccactaagccaatcactttattgactcctagccgcagacctcctcattctaacctgaatcggaggacaaccagtaagctacccttttaccatca

SEQ ID NO: 54550 - DNA, 120 bp, Homo sapiens
  misc_feature: 1544 for SV(W|O) and mtDNA
catgcatttgtaataatcttcttcatagtaatacccatcataatcggaggctttggcaactgactagttcccctaataatcggtgcccccgatatggcgtttccccgcataaacaacata

SEQ ID NO: 54551 - DNA, 120 bp, Homo sapiens
  misc_feature: 1544 for SV(W|O) and mtDNA
tataattcctacgccctctcagccgatgaacagttggaataggttgttagcggtaactaagattagtatggtaattaggaagatgagtagatatttgaagaactgattaatgtttgggtc

SEQ ID NO: 54552 - DNA, 120 bp, Homo sapiens
  misc_feature: 1544 for SV(W|O) and mtDNA
ccacgatcaaaagggacaagcatcaagcacgcagcaatgcagctcaaaacgcttagcctagccacacccccacgggaaacagcagtgattaacctttagcaataaacgaaagtttaacta

SEQ ID NO: 54553 - DNA, 120 bp, Homo sapiens
  misc_feature: 1544 for SV(W|O) and mtDNA
ctcttagccaatattgtgcctattgccatactagtctttgccgcctgcgaagcagcggtgggcctagccctactagtctcaatctccaacacatatggcctagactacgtacataaccta

SEQ ID NO: 54554 - DNA, 120 bp, Homo sapiens
  misc_feature: 1544 for SV(W|O) and mtDNA
taatcggaggctttggcaactgactagttcccctaataatcggtgcccccgatatggcgtttccccgcataaacaacataagcttctgactcttacctccctctctcctactcctgctcg

SEQ ID NO: 54555 - DNA, 120 bp, Homo sapiens
  misc_feature: 1544 for SV(W|O) and mtDNA
agaactgattaatgtttgggtctgagtttatatatcacagtgagaattctatgatggaccatgtaacgaacaatgctacagggatgaatattatggagaagtagtctagtttgaagctta

SEQ ID NO: 54556 - DNA, 120 bp, Homo sapiens
  misc_feature: 1544 for SV(W|O) and mtDNA
caaaccatttacccaaataaagtataggcgatagaaattgaaacctggcgcaatagatatagtaccgcaagggaaagatgaaaaattataaccaagcataatatagcaaggactaacccc

SEQ ID NO: 54557 - DNA, 120 bp, Homo sapiens
  misc_feature: 1544 for SV(W|O) and mtDNA
ggcgcttccaattaggtgcatgagtaggtggcctgcagtaatgttagcggttaggcgtacggccagggctattggttgaatgagtaggctgatggtttcgataataactagtatggggat

SEQ ID NO: 54558 - DNA, 120 bp, Homo sapiens
  misc_feature: 1544 for SV(W|O) and mtDNA
atagggacctgtatgaatggctccacgagggttcagctgtctcttacttttaaccagtgaaattgacctgcccgtgaagaggcgggcataacacagcaagacgagaagaccctatggagc

SEQ ID NO: 54559 - DNA, 120 bp, Homo sapiens
  misc_feature: 1544 for SV(W|O) and mtDNA
gatgagcaagaaggatataattcctacgccctctcagccgatgaacagttggaataggttgttagcggtaactaagattagtatggtaattaggaagatgagtagatatttgaagaactg

SEQ ID NO: 54560 - DNA, 120 bp, Homo sapiens
  misc_feature: 1544 for SV(W|O) and mtDNA
gatcaggttcgtcctttagtgttgtgtatggttatcatttgttttgaggttagtttgattagtcattgttgggtggtgattagtcggttgttgatgagatatttggaggtggggatcaat

SEQ ID NO: 54561 - DNA, 120 bp, Homo sapiens
  misc_feature: 1544 for SV(W|O) and mtDNA
ctatttatattatcctaactactaccgcattcctactactcaacttaaactccagcaccacgaccctactactatctcgcacctgaaacaagctaacatgactaacacccttaattccat

SEQ ID NO: 54562 - DNA, 120 bp, Homo sapiens
  misc_feature: 1544 for SV(W|O) and mtDNA
atggatagctgttatcctttaaaagttgagaaagccatgttgttagacatgggggcatgagttagcagttcttgtgagctttctcggtaaataaggggtcgtaagcctctgttgtcagat

SEQ ID NO: 54563 - DNA, 120 bp, Homo sapiens
  misc_feature: 1544 for SV(W|O) and mtDNA
agctcgtctggtttcgggggtcttagctttggctctccttgcaaagttatttctagttaattcattatgcagaaggtataggggttagtccttgctatattatgcttggttataattttt

SEQ ID NO: 54564 - DNA, 120 bp, Homo sapiens
  misc_feature: 1543 for SV(W|O) and mtDNA
atagcggctgcaccatcgggatgtcctgatccaacatcgaggtcgtaaaccctattgttgatatggactctagaataggattgcgctgttatccctagggtaacttgttccgttggtcaa

SEQ ID NO: 54565 - DNA, 120 bp, Homo sapiens
  misc_feature: 1543 for SV(W|O) and mtDNA
accacatgaaacatcctatcatctgtaggctcattcatttctctaacagcagtaatattaataattttcatgatttgagaagccttcgcttcaaagcgaaaagtcctaatagtagaagaa

SEQ ID NO: 54566 - DNA, 120 bp, Homo sapiens
  misc_feature: 1543 for SV(W|O) and mtDNA
actcagacccaaacattaatcagttcttcaaatatctactcatcttcctaattaccatactaatcttagttaccgctaacaacctattccaactgttcatcggctgagagggcgtaggaa

SEQ ID NO: 54567 - DNA, 120 bp, Homo sapiens
  misc_feature: 1543 for SV(W|O) and mtDNA
tccccaccttggctatcatcacccgatgaggcaaccagccagaacgcctgaacgcaggcacatacttcctattctacaccctagtaggctcccttcccctactcatcgcactaatttaca

SEQ ID NO: 54568 - DNA, 120 bp, Homo sapiens
  misc_feature: 1543 for SV(W|O) and mtDNA
tattctcgcacggactacaaccacgaccaatgatatgaaaaaccatcgttgtatttcaactacaagaacaccaatgaccccaatacgcaaaactaaccccctaataaaattaattaacca

SEQ ID NO: 54569 - DNA, 120 bp, Homo sapiens
  misc_feature: 1543 for SV(W|O) and mtDNA
tggtagtattggttatggttcattgtccggagagtatattgttgaagaggatagctattagaaggattatggatgcggttgcttgcgtgaggaaatacttgatggcagcttctgtggaac

SEQ ID NO: 54570 - DNA, 120 bp, Homo sapiens
  misc_feature: 1543 for SV(W|O) and mtDNA
tggcgcaatagatatagtaccgcaagggaaagatgaaaaattataaccaagcataatatagcaaggactaacccctataccttctgcataatgaattaactagaaataactttgcaagga

SEQ ID NO: 54571 - DNA, 120 bp, Homo sapiens
  misc_feature: 1543 for SV(W|O) and mtDNA
taactcatgcccccatgtctaacaacatggctttctcaacttttaaaggataacagctatccattggtcttaggccccaaaaattttggtgcaactccaaataaaagtaataaccatgca

SEQ ID NO: 54572 - DNA, 120 bp, Homo sapiens
  misc_feature: 1543 for SV(W|O) and mtDNA
tctgctgcagtgctctgagccctaggattcatctttcttttcaccgtaggtggcctgactggcattgtattagcaaactcatcactagacatcgtactacacgacacgtactacgttgta

SEQ ID NO: 54573 - DNA, 120 bp, Homo sapiens
  misc_feature: 1543 for SV(W|O) and mtDNA
gaactgctattattcatcctatgtgggtaattgaggagtatgctaagattttgcgtagctgggtttggtttaatccacctcaactgcctgctatgatggataagattgagagagtgagga

SEQ ID NO: 54574 - DNA, 120 bp, Homo sapiens
  misc_feature: 1543 for SV(W|O) and mtDNA
aaatagggacctgtatgaatggctccacgagggttcagctgtctcttacttttaaccagtgaaattgacctgcccgtgaagaggcgggcataacacagcaagacgagaagaccctatgga

SEQ ID NO: 54575 - DNA, 120 bp, Homo sapiens
  misc_feature: 1543 for SV(W|O) and mtDNA
aattcctacgccctctcagccgatgaacagttggaataggttgttagcggtaactaagattagtatggtaattaggaagatgagtagatatttgaagaactgattaatgtttgggtctga

SEQ ID NO: 54576 - DNA, 120 bp, Homo sapiens
  misc_feature: 1543 for SV(W|O) and mtDNA
ctctacacttatcatcttcacaattctaattctactgactatcctagaaatcgctgtcgccttaatccaagcctacgttttcacacttctagtaagcctctacctgcacgacaacacata

SEQ ID NO: 54577 - DNA, 120 bp, Homo sapiens
  misc_feature: 1543 for SV(W|O) and mtDNA
gcccccatgtctaacaacatggctttctcaacttttaaaggataacagctatccattggtcttaggccccaaaaattttggtgcaactccaaataaaagtaataaccatgcacactacta

SEQ ID NO: 54578 - DNA, 120 bp, Homo sapiens
  misc_feature: 1543 for SV(W|O) and mtDNA
taggtttggtctagggtgtagcctgagaataggggaaatcagtgaatgaagcctcctatgatggcaaatacagctcctattgataggacatagtggaagtgggctacaacgtagtacgtg

SEQ ID NO: 54579 - DNA, 120 bp, Homo sapiens
  misc_feature: 1543 for SV(W|O) and mtDNA
taacagcgcaatcctattctagagtccatatcaacaatagggtttacgacctcgatgttggatcaggacatcccgatggtgcagccgctattaaaggttcgtttgttcaacgattaaagt

SEQ ID NO: 54580 - DNA, 120 bp, Homo sapiens
  misc_feature: 1543 for SV(W|O) and mtDNA
gttgtttatgcggggaaacgccatatcgggggcaccgattattaggggaactagtcagttgccaaagcctccgattatgatgggtattactatgaagaagattattacaaatgcatgggc

SEQ ID NO: 54581 - DNA, 120 bp, Homo sapiens
  misc_feature: 1543 for SV(W|O) and mtDNA
caccacgatcaaaagggacaagcatcaagcacgcagcaatgcagctcaaaacgcttagcctagccacacccccacgggaaacagcagtgattaacctttagcaataaacgaaagtttaac

SEQ ID NO: 54582 - DNA, 120 bp, Homo sapiens
  misc_feature: 1543 for SV(W|O) and mtDNA
cgccaaaatccatttcactatcatattcatcggcgtaaatctaactttcttcccacaacactttctcggcctatccggaatgccccgacgttactcggactaccccgatgcatacaccac

SEQ ID NO: 54583 - DNA, 120 bp, Homo sapiens
  misc_feature: 1543 for SV(W|O) and mtDNA
ggctaaatcctatatatcttaatggcacatgcagcgcaagtaggtctacaagacgctacttcccctatcatagaagagcttatcacctttcatgatcacgccctcataatcattttcctt

SEQ ID NO: 54584 - DNA, 120 bp, Homo sapiens
  misc_feature: 1543 for SV(W|O) and mtDNA
gctcgtctggtttcgggggtcttagctttggctctccttgcaaagttatttctagttaattcattatgcagaaggtataggggttagtccttgctatattatgcttggttataatttttc

SEQ ID NO: 54585 - DNA, 120 bp, Homo sapiens
  misc_feature: 1543 for SV(W|O) and mtDNA
acttcttaccacaaggcacacctacaccccttatccccatactagttattatcgaaaccatcagcctactcattcaaccaatagccctggccgtacgcctaaccgctaacattactgcag

SEQ ID NO: 54586 - DNA, 120 bp, Homo sapiens
  misc_feature: 1543 for SV(W|O) and mtDNA
ctgaagatggcggtatataggctgagcaagaggtggtgaggttgatcggggtttatcgattacagaacaggctcctctagagggatatgaagcaccgccaggtcctttgagttttaagct

SEQ ID NO: 54587 - DNA, 120 bp, Homo sapiens
  misc_feature: 1543 for SV(W|O) and mtDNA
atataaactcagacccaaacattaatcagttcttcaaatatctactcatcttcctaattaccatactaatcttagttaccgctaacaacctattccaactgttcatcggctgagagggcg

SEQ ID NO: 54588 - DNA, 120 bp, Homo sapiens
  misc_feature: 1543 for SV(W|O) and mtDNA
agttttttacaactcaggtgagttttagctttattggggagggggtgatctaaaacactctttacgccggcttctattgacttgggttaatcgtgtgaccgcggtggctggcacgaaatt

SEQ ID NO: 54589 - DNA, 120 bp, Homo sapiens
  misc_feature: 1543 for SV(W|O) and mtDNA
aaaccatttacccaaataaagtataggcgatagaaattgaaacctggcgcaatagatatagtaccgcaagggaaagatgaaaaattataaccaagcataatatagcaaggactaacccct

SEQ ID NO: 54590 - DNA, 120 bp, Homo sapiens
  misc_feature: 1543 for SV(W|O) and mtDNA
acactctttacgccggcttctattgacttgggttaatcgtgtgaccgcggtggctggcacgaaattgaccaaccctggggttagtatagcttagttaaactttcgtttattgctaaaggt

SEQ ID NO: 54591 - DNA, 120 bp, Homo sapiens
  misc_feature: 1543 for SV(W|O) and mtDNA
aaaaggttttcatctccggtttacaagactggtgtattagtttatactacaaggacaggcccatttgagtattttgttttcaattagggagatagttggtattaggattaggattgttgt

SEQ ID NO: 54592 - DNA, 120 bp, Homo sapiens
  misc_feature: 1542 for SV(W|O) and mtDNA
ggtcgaaggtggatttagcagtaaactgagagtagagtgcttagttgaacagggccctgaagcgcgtacacaccgcccgtcaccctcctcaagtatacttcaaaggacatttaactaaaa

SEQ ID NO: 54593 - DNA, 120 bp, Homo sapiens
  misc_feature: 1542 for SV(W|O) and mtDNA
ttgtttatgcggggaaacgccatatcgggggcaccgattattaggggaactagtcagttgccaaagcctccgattatgatgggtattactatgaagaagattattacaaatgcatgggct

SEQ ID NO: 54594 - DNA, 120 bp, Homo sapiens
  misc_feature: 1542 for SV(W|O) and mtDNA
ttcctagggtttatcgtgtgagcacaccatatatttacagtaggaatagacgtagacacacgagcatatttcacctccgctaccataatcatcgctatccccaccggcgtcaaagtattt

SEQ ID NO: 54595 - DNA, 120 bp, Homo sapiens
  misc_feature: 1542 for SV(W|O) and mtDNA
tagtccttgctatattatgcttggttataatttttcatctttcccttgcggtactatatctattgcgccaggtttcaatttctatcgcctatactttatttgggtaaatggtttggctaa

SEQ ID NO: 54596 - DNA, 120 bp, Homo sapiens
  misc_feature: 1542 for SV(W|O) and mtDNA
gcggaggtgaaatatgctcgtgtgtctacgtctattcctactgtaaatatatggtgtgctcacacgataaaccctaggaagccaattgatatcatagctcagaccatacctatgtatcca

SEQ ID NO: 54597 - DNA, 120 bp, Homo sapiens
  misc_feature: 1542 for SV(W|O) and mtDNA
tgctgcagtgctctgagccctaggattcatctttcttttcaccgtaggtggcctgactggcattgtattagcaaactcatcactagacatcgtactacacgacacgtactacgttgtagc

SEQ ID NO: 54598 - DNA, 120 bp, Homo sapiens
  misc_feature: 1542 for SV(W|O) and mtDNA
tatataaactcagacccaaacattaatcagttcttcaaatatctactcatcttcctaattaccatactaatcttagttaccgctaacaacctattccaactgttcatcggctgagagggc

SEQ ID NO: 54599 - DNA, 120 bp, Homo sapiens
  misc_feature: 1542 for SV(W|O) and mtDNA
gaacagctctttggacactaggaaaaaaccttgtagagagagtaaaaaatttaacacccatagtaggcctaaaagcagccaccaattaagaaagcgttcaagctcaacacccactaccta

SEQ ID NO: 54600 - DNA, 120 bp, Homo sapiens
  misc_feature: 1542 for SV(W|O) and mtDNA
taggcccaccgctgcttcgcaggcggcaaagactagtatggcaataggcacaatattggctaagagggagtgggtgttgagggttatgagagtagctataatgaacagcgatagtattat

SEQ ID NO: 54601 - DNA, 120 bp, Homo sapiens
  misc_feature: 1542 for SV(W|O) and mtDNA
gtgagatggtaaatgctagtataatatttatgtaaatgaggggcatttggtaaatatgattatcataatttaatgagtcgaaatcattcgttttgtttaaactatataccaattcggttc

SEQ ID NO: 54602 - DNA, 120 bp, Homo sapiens
  misc_feature: 1542 for SV(W|O) and mtDNA
ccatttggatacataggtatggtctgagctatgatatcaattggcttcctagggtttatcgtgtgagcacaccatatatttacagtaggaatagacgtagacacacgagcatatttcacc

SEQ ID NO: 54603 - DNA, 120 bp, Homo sapiens
  misc_feature: 1542 for SV(W|O) and mtDNA
atggctccacgagggttcagctgtctcttacttttaaccagtgaaattgacctgcccgtgaagaggcgggcataacacagcaagacgagaagaccctatggagctttaatttattaatgc

SEQ ID NO: 54604 - DNA, 120 bp, Homo sapiens
  misc_feature: 1542 for SV(W|O) and mtDNA
gaatttgaagtagatagaaaccgacctggattactccggtctgaactcagatcacgtaggactttaatcgttgaacaaacgaacctttaatagcggctgcaccatcgggatgtcctgatc

SEQ ID NO: 54605 - DNA, 120 bp, Homo sapiens
  misc_feature: 1542 for SV(W|O) and mtDNA
gacaacagaggcttacgaccccttatttaccgagaaagctcacaagaactgctaactcatgcccccatgtctaacaacatggctttctcaacttttaaaggataacagctatccattggt

SEQ ID NO: 54606 - DNA, 120 bp, Homo sapiens
  misc_feature: 1542 for SV(W|O) and mtDNA
gaaccatttggatacataggtatggtctgagctatgatatcaattggcttcctagggtttatcgtgtgagcacaccatatatttacagtaggaatagacgtagacacacgagcatatttc

SEQ ID NO: 54607 - DNA, 120 bp, Homo sapiens
  misc_feature: 1542 for SV(W|O) and mtDNA
acggttgtataggattgcttgaatggctgctgtgttggcatctgctcgggcgtatcatcaactgatgagcaagaaggatataattcctacgccctctcagccgatgaacagttggaatag

SEQ ID NO: 54608 - DNA, 120 bp, Homo sapiens
  misc_feature: 1542 for SV(W|O) and mtDNA
cctagggtttatcgtgtgagcacaccatatatttacagtaggaatagacgtagacacacgagcatatttcacctccgctaccataatcatcgctatccccaccggcgtcaaagtatttag

SEQ ID NO: 54609 - DNA, 120 bp, Homo sapiens
  misc_feature: 1542 for SV(W|O) and mtDNA
aatgctacagggatgaatattatggagaagtagtctagtttgaagcttagggagagctgggttgtttgggttgtggctcagtgtcagttcgagataataacttcttggtctaggcacatg

SEQ ID NO: 54610 - DNA, 120 bp, Homo sapiens
  misc_feature: 1541 for SV(W|O) and mtDNA
tttatattatcctaactactaccgcattcctactactcaacttaaactccagcaccacgaccctactactatctcgcacctgaaacaagctaacatgactaacacccttaattccatcca

SEQ ID NO: 54611 - DNA, 120 bp, Homo sapiens
  misc_feature: 1541 for SV(W|O) and mtDNA
tttacgacctcgatgttggatcaggacatcccgatggtgcagccgctattaaaggttcgtttgttcaacgattaaagtcctacgtgatctgagttcagaccggagtaatccaggtcggtt

SEQ ID NO: 54612 - DNA, 120 bp, Homo sapiens
  misc_feature: 1541 for SV(W|O) and mtDNA
tcctagaagtgagatggtaaatgctagtataatatttatgtaaatgaggggcatttggtaaatatgattatcataatttaatgagtcgaaatcattcgttttgtttaaactatataccaa

SEQ ID NO: 54613 - DNA, 120 bp, Homo sapiens
  misc_feature: 1541 for SV(W|O) and mtDNA
gggaagtcagggttagggtggttatagtagtgtgcatggttattacttttatttggagttgcaccaaaatttttggggcctaagaccaatggatagctgttatcctttaaaagttgagaa

SEQ ID NO: 54614 - DNA, 120 bp, Homo sapiens
  misc_feature: 1541 for SV(W|O) and mtDNA
ttcaaccaatagccctggccgtacgcctaaccgctaacattactgcaggccacctactcatgcacctaattggaagcgccaccctagcaatatcaaccattaaccttccctctacactta

SEQ ID NO: 54615 - DNA, 120 bp, Homo sapiens
  misc_feature: 1541 for SV(W|O) and mtDNA
gagccacagcttaaaactcaaaggacctggcggtgcttcatatccctctagaggagcctgttctgtaatcgataaaccccgatcaacctcaccacctcttgctcagcctatataccgcca

SEQ ID NO: 54616 - DNA, 120 bp, Homo sapiens
  misc_feature: 1541 for SV(W|O) and mtDNA
tccgtggagtgtggcgagtcagctaaatactttgacgccggtggggatagcgatgattatggtagcggaggtgaaatatgctcgtgtgtctacgtctattcctactgtaaatatatggtg

SEQ ID NO: 54617 - DNA, 120 bp, Homo sapiens
  misc_feature: 1541 for SV(W|O) and mtDNA
tccggcggggtcgaagaaggtggtgttgaggttgcggtctgttagtagtatagtgatgccagcagctaggactgggagagataggagaagtaggactgctgtgattaggacggatcagac

SEQ ID NO: 54618 - DNA, 120 bp, Homo sapiens
  misc_feature: 1541 for SV(W|O) and mtDNA
tatttatattatcctaactactaccgcattcctactactcaacttaaactccagcaccacgaccctactactatctcgcacctgaaacaagctaacatgactaacacccttaattccatc

SEQ ID NO: 54619 - DNA, 120 bp, Homo sapiens
  misc_feature: 1541 for SV(W|O) and mtDNA
accgttaacttccaattaactagttttgacaacattcaaaaaagagtaataaacttcgccttaattttaataatcaacaccctcctagccttactactaataattattacattttgacta

SEQ ID NO: 54620 - DNA, 120 bp, Homo sapiens
  misc_feature: 1541 for SV(W|O) and mtDNA
tagctcgtctggtttcgggggtcttagctttggctctccttgcaaagttatttctagttaattcattatgcagaaggtataggggttagtccttgctatattatgcttggttataatttt

SEQ ID NO: 54621 - DNA, 120 bp, Homo sapiens
  misc_feature: 1541 for SV(W|O) and mtDNA
ccttagccaaaccatttacccaaataaagtataggcgatagaaattgaaacctggcgcaatagatatagtaccgcaagggaaagatgaaaaattataaccaagcataatatagcaaggac

SEQ ID NO: 54622 - DNA, 120 bp, Homo sapiens
  misc_feature: 1541 for SV(W|O) and mtDNA
gtccaattgggtatgaggagttcagttatatgtttgggattttttaggtagtgggtgttgagcttgaacgctttcttaattggtggctgcttttaggcctactatgggtgttaaattttt

SEQ ID NO: 54623 - DNA, 120 bp, Homo sapiens
  misc_feature: 1541 for SV(W|O) and mtDNA
attcaaaaaagagtaataaacttcgccttaattttaataatcaacaccctcctagccttactactaataattattacattttgactaccacaactcaacggctacatagaaaaatccacc

SEQ ID NO: 54624 - DNA, 120 bp, Homo sapiens
  misc_feature: 1541 for SV(W|O) and mtDNA
ggctaggcccaccgctgcttcgcaggcggcaaagactagtatggcaataggcacaatattggctaagagggagtgggtgttgagggttatgagagtagctataatgaacagcgatagtat

SEQ ID NO: 54625 - DNA, 120 bp, Homo sapiens
  misc_feature: 1541 for SV(W|O) and mtDNA
gaaaatgattatgagggcgtgatcatgaaaggtgataagctcttctatgataggggaagtagcgtcttgtagacctacttgcgctgcatgtgccattaagatatataggatttagcctat

SEQ ID NO: 54626 - DNA, 120 bp, Homo sapiens
  misc_feature: 1541 for SV(W|O) and mtDNA
cttacatcctcattactattctgcctagcaaactcaaactacgaacgcactcacagtcgcatcataatcctctctcaaggacttcaaactctactcccactaatagctttttgatgactt

SEQ ID NO: 54627 - DNA, 120 bp, Homo sapiens
  misc_feature: 1541 for SV(W|O) and mtDNA
ctgacaacagaggcttacgaccccttatttaccgagaaagctcacaagaactgctaactcatgcccccatgtctaacaacatggctttctcaacttttaaaggataacagctatccattg

SEQ ID NO: 54628 - DNA, 120 bp, Homo sapiens
  misc_feature: 1541 for SV(W|O) and mtDNA
cctcgatgttggatcaggacatcccgatggtgcagccgctattaaaggttcgtttgttcaacgattaaagtcctacgtgatctgagttcagaccggagtaatccaggtcggtttctatct

SEQ ID NO: 54629 - DNA, 120 bp, Homo sapiens
  misc_feature: 1541 for SV(W|O) and mtDNA
catttgagtattttgttttcaattagggagatagttggtattaggattaggattgttgtgaagtatagtacggatgctacttgtccaatgatggtaaaagggtagcttactggttgtcct

SEQ ID NO: 54630 - DNA, 120 bp, Homo sapiens
  misc_feature: 1541 for SV(W|O) and mtDNA
aagaaccatttggatacataggtatggtctgagctatgatatcaattggcttcctagggtttatcgtgtgagcacaccatatatttacagtaggaatagacgtagacacacgagcatatt

SEQ ID NO: 54631 - DNA, 120 bp, Homo sapiens
  misc_feature: 1540 for SV(W|O) and mtDNA
tggaacactatacctattattcggcgcatgagctggagtcctaggcacagctctaagcctccttattcgagccgagctgggccagccaggcaaccttctaggtaacgaccacatctacaa

SEQ ID NO: 54632 - DNA, 120 bp, Homo sapiens
  misc_feature: 1540 for SV(W|O) and mtDNA
atagatatagtaccgcaagggaaagatgaaaaattataaccaagcataatatagcaaggactaacccctataccttctgcataatgaattaactagaaataactttgcaaggagagccaa

SEQ ID NO: 54633 - DNA, 120 bp, Homo sapiens
  misc_feature: 1540 for SV(W|O) and mtDNA
cacgatcaaaagggacaagcatcaagcacgcagcaatgcagctcaaaacgcttagcctagccacacccccacgggaaacagcagtgattaacctttagcaataaacgaaagtttaactaa

SEQ ID NO: 54634 - DNA, 120 bp, Homo sapiens
  misc_feature: 1540 for SV(W|O) and mtDNA
ttagtgttgtgtatggttatcatttgttttgaggttagtttgattagtcattgttgggtggtgattagtcggttgttgatgagatatttggaggtggggatcaatagagggggaaataga

SEQ ID NO: 54635 - DNA, 120 bp, Homo sapiens
  misc_feature: 1540 for SV(W|O) and mtDNA
ttaaatagggacctgtatgaatggctccacgagggttcagctgtctcttacttttaaccagtgaaattgacctgcccgtgaagaggcgggcataacacagcaagacgagaagaccctatg

SEQ ID NO: 54636 - DNA, 120 bp, Homo sapiens
  misc_feature: 1540 for SV(W|O) and mtDNA
tgtaagttgggtgctttgtgttaagctacactctggttcgtccaagtgcactttccagtacacttaccatgttacgacttgtctcctctatataaatgcgtaggggttttagttaaatgt

SEQ ID NO: 54637 - DNA, 120 bp, Homo sapiens
  misc_feature: 1540 for SV(W|O) and mtDNA
gaccaagaagttattatctcgaactgacactgagccacaacccaaacaacccagctctccctaagcttcaaactagactacttctccataatattcatccctgtagcattgttcgttaca

SEQ ID NO: 54638 - DNA, 120 bp, Homo sapiens
  misc_feature: 1540 for SV(W|O) and mtDNA
tgcggggaaacgccatatcgggggcaccgattattaggggaactagtcagttgccaaagcctccgattatgatgggtattactatgaagaagattattacaaatgcatgggctgtgacga

SEQ ID NO: 54639 - DNA, 120 bp, Homo sapiens
  misc_feature: 1540 for SV(W|O) and mtDNA
tgattaaggatactagtataagagatcaggttcgtcctttagtgttgtgtatggttatcatttgttttgaggttagtttgattagtcattgttgggtggtgattagtcggttgttgatga

SEQ ID NO: 54640 - DNA, 120 bp, Homo sapiens
  misc_feature: 1540 for SV(W|O) and mtDNA
tctcccatattgtaacttactactccggaaaaaaagaaccatttggatacataggtatggtctgagctatgatatcaattggcttcctagggtttatcgtgtgagcacaccatatattta

SEQ ID NO: 54641 - DNA, 120 bp, Homo sapiens
  misc_feature: 1540 for SV(W|O) and mtDNA
agacatcgtactacacgacacgtactacgttgtagcccacttccactatgtcctatcaataggagctgtatttgccatcataggaggcttcattcactgatttcccctattctcaggcta

SEQ ID NO: 54642 - DNA, 120 bp, Homo sapiens
  misc_feature: 1540 for SV(W|O) and mtDNA
gtttacgacctcgatgttggatcaggacatcccgatggtgcagccgctattaaaggttcgtttgttcaacgattaaagtcctacgtgatctgagttcagaccggagtaatccaggtcggt

SEQ ID NO: 54643 - DNA, 120 bp, Homo sapiens
  misc_feature: 1540 for SV(W|O) and mtDNA
cattcttaatttaactatttatattatcctaactactaccgcattcctactactcaacttaaactccagcaccacgaccctactactatctcgcacctgaaacaagctaacatgactaac

SEQ ID NO: 54644 - DNA, 120 bp, Homo sapiens
  misc_feature: 1540 for SV(W|O) and mtDNA
ggttgtataggattgcttgaatggctgctgtgttggcatctgctcgggcgtatcatcaactgatgagcaagaaggatataattcctacgccctctcagccgatgaacagttggaataggt

SEQ ID NO: 54645 - DNA, 120 bp, Homo sapiens
  misc_feature: 1540 for SV(W|O) and mtDNA
ggtccaattgggtatgaggagttcagttatatgtttgggattttttaggtagtgggtgttgagcttgaacgctttcttaattggtggctgcttttaggcctactatgggtgttaaatttt

SEQ ID NO: 54646 - DNA, 120 bp, Homo sapiens
  misc_feature: 1540 for SV(W|O) and mtDNA
gacctcgatgttggatcaggacatcccgatggtgcagccgctattaaaggttcgtttgttcaacgattaaagtcctacgtgatctgagttcagaccggagtaatccaggtcggtttctat

SEQ ID NO: 54647 - DNA, 120 bp, Homo sapiens
  misc_feature: 1540 for SV(W|O) and mtDNA
actatctccctaattgaaaacaaaatactcaaatgggcctgtccttgtagtataaactaatacaccagtcttgtaaaccggagatgaaaacctttttccaaggacaaatcagagaaaaag

SEQ ID NO: 54648 - DNA, 120 bp, Homo sapiens
  misc_feature: 1540 for SV(W|O) and mtDNA
caagcatccccgttccagtgagttcaccctctaaatcaccacgatcaaaagggacaagcatcaagcacgcagcaatgcagctcaaaacgcttagcctagccacacccccacgggaaacag

SEQ ID NO: 54649 - DNA, 120 bp, Homo sapiens
  misc_feature: 1540 for SV(W|O) and mtDNA
ctccacttcaagtcaactaggactcataatagttacaatcggcatcaaccaaccacacctagcattcctgcacatctgcacccacgccttcttcaaagccatactatttatgtgctccgg

SEQ ID NO: 54650 - DNA, 120 bp, Homo sapiens
  misc_feature: 1540 for SV(W|O) and mtDNA
attcctacgccctctcagccgatgaacagttggaataggttgttagcggtaactaagattagtatggtaattaggaagatgagtagatatttgaagaactgattaatgtttgggtctgag

SEQ ID NO: 54651 - DNA, 120 bp, Homo sapiens
  misc_feature: 1540 for SV(W|O) and mtDNA
agggtaataatgacttgttggttgattgtagatattgggctgttaattgtcagttcagtgttttaatctgacgcaggcttatgcggaggagaatgttttcatgttacttatactaacatt

SEQ ID NO: 54652 - DNA, 120 bp, Homo sapiens
  misc_feature: 1540 for SV(W|O) and mtDNA
aggggatttagagggttctgtgggcaaatttaaagttgaactaagattctatcttggacaaccagctatcaccaggctcggtaggtttgtcgcctctacctataaatcttcccactattt

SEQ ID NO: 54653 - DNA, 120 bp, Homo sapiens
  misc_feature: 1539 for SV(W|O) and mtDNA
tttagtgttgtgtatggttatcatttgttttgaggttagtttgattagtcattgttgggtggtgattagtcggttgttgatgagatatttggaggtggggatcaatagagggggaaatag

SEQ ID NO: 54654 - DNA, 120 bp, Homo sapiens
  misc_feature: 1539 for SV(W|O) and mtDNA
ttgaacgctttcttaattggtggctgcttttaggcctactatgggtgttaaattttttactctctctacaaggttttttcctagtgtccaaagagctgttcctctttggactaacagtta

SEQ ID NO: 54655 - DNA, 120 bp, Homo sapiens
  misc_feature: 1539 for SV(W|O) and mtDNA
ccattcttaatttaactatttatattatcctaactactaccgcattcctactactcaacttaaactccagcaccacgaccctactactatctcgcacctgaaacaagctaacatgactaa

SEQ ID NO: 54656 - DNA, 120 bp, Homo sapiens
  misc_feature: 1539 for SV(W|O) and mtDNA
ttaaacatgtgtcactgggcaggcggtgcctctaatactggtgatgctagaggtgatgtttttggtaaacaggcggggtaagatttgccgagttccttttactttttttaacctttcctt

SEQ ID NO: 54657 - DNA, 120 bp, Homo sapiens
  misc_feature: 1539 for SV(W|O) and mtDNA
tgttgtttatgcggggaaacgccatatcgggggcaccgattattaggggaactagtcagttgccaaagcctccgattatgatgggtattactatgaagaagattattacaaatgcatggg

SEQ ID NO: 54658 - DNA, 120 bp, Homo sapiens
  misc_feature: 1539 for SV(W|O) and mtDNA
tgatagtgaaatggattttggcgtaggtttggtctagggtgtagcctgagaataggggaaatcagtgaatgaagcctcctatgatggcaaatacagctcctattgataggacatagtgga

SEQ ID NO: 54659 - DNA, 120 bp, Homo sapiens
  misc_feature: 1539 for SV(W|O) and mtDNA
ctgatccaacatcgaggtcgtaaaccctattgttgatatggactctagaataggattgcgctgttatccctagggtaacttgttccgttggtcaagttattggatcaattgagtatagta

SEQ ID NO: 54660 - DNA, 120 bp, Homo sapiens
  misc_feature: 1539 for SV(W|O) and mtDNA
taattcctacgccctctcagccgatgaacagttggaataggttgttagcggtaactaagattagtatggtaattaggaagatgagtagatatttgaagaactgattaatgtttgggtctg

SEQ ID NO: 54661 - DNA, 120 bp, Homo sapiens
  misc_feature: 1539 for SV(W|O) and mtDNA
gttgtataggattgcttgaatggctgctgtgttggcatctgctcgggcgtatcatcaactgatgagcaagaaggatataattcctacgccctctcagccgatgaacagttggaataggtt

SEQ ID NO: 54662 - DNA, 120 bp, Homo sapiens
  misc_feature: 1539 for SV(W|O) and mtDNA
agaactaatcatattttatatcttcttcgaaaccacacttatccccaccttggctatcatcacccgatgaggcaaccagccagaacgcctgaacgcaggcacatacttcctattctacac

SEQ ID NO: 54663 - DNA, 120 bp, Homo sapiens
  misc_feature: 1539 for SV(W|O) and mtDNA
gtagcataatcacttgttccttaaatagggacctgtatgaatggctccacgagggttcagctgtctcttacttttaaccagtgaaattgacctgcccgtgaagaggcgggcataacacag

SEQ ID NO: 54664 - DNA, 120 bp, Homo sapiens
  misc_feature: 1539 for SV(W|O) and mtDNA
ctgcagtgctctgagccctaggattcatctttcttttcaccgtaggtggcctgactggcattgtattagcaaactcatcactagacatcgtactacacgacacgtactacgttgtagccc

SEQ ID NO: 54665 - DNA, 120 bp, Homo sapiens
  misc_feature: 1539 for SV(W|O) and mtDNA
gctgcagtgctctgagccctaggattcatctttcttttcaccgtaggtggcctgactggcattgtattagcaaactcatcactagacatcgtactacacgacacgtactacgttgtagcc

SEQ ID NO: 54666 - DNA, 120 bp, Homo sapiens
  misc_feature: 1539 for SV(W|O) and mtDNA
gagctatgatatcaattggcttcctagggtttatcgtgtgagcacaccatatatttacagtaggaatagacgtagacacacgagcatatttcacctccgctaccataatcatcgctatcc

SEQ ID NO: 54667 - DNA, 120 bp, Homo sapiens
  misc_feature: 1539 for SV(W|O) and mtDNA
gcaaagttatttctagttaattcattatgcagaaggtataggggttagtccttgctatattatgcttggttataatttttcatctttcccttgcggtactatatctattgcgccaggttt

SEQ ID NO: 54668 - DNA, 120 bp, Homo sapiens
  misc_feature: 1539 for SV(W|O) and mtDNA
gagttttttacaactcaggtgagttttagctttattggggagggggtgatctaaaacactctttacgccggcttctattgacttgggttaatcgtgtgaccgcggtggctggcacgaaat

SEQ ID NO: 54669 - DNA, 120 bp, Homo sapiens
  misc_feature: 1539 for SV(W|O) and mtDNA
atgttggatcaggacatcccgatggtgcagccgctattaaaggttcgtttgttcaacgattaaagtcctacgtgatctgagttcagaccggagtaatccaggtcggtttctatctacttc

SEQ ID NO: 54670 - DNA, 120 bp, Homo sapiens
  misc_feature: 1539 for SV(W|O) and mtDNA
cggttgtataggattgcttgaatggctgctgtgttggcatctgctcgggcgtatcatcaactgatgagcaagaaggatataattcctacgccctctcagccgatgaacagttggaatagg

SEQ ID NO: 54671 - DNA, 120 bp, Homo sapiens
  misc_feature: 1539 for SV(W|O) and mtDNA
ccgtggagtgtggcgagtcagctaaatactttgacgccggtggggatagcgatgattatggtagcggaggtgaaatatgctcgtgtgtctacgtctattcctactgtaaatatatggtgt

SEQ ID NO: 54672 - DNA, 120 bp, Homo sapiens
  misc_feature: 1539 for SV(W|O) and mtDNA
caggcgttctggctggttgcctcatcgggtgatgatagccaaggtggggataagtgtggtttcgaagaagatataaaatatgattagttctgtggctgtgaatgttataattaaggagat

SEQ ID NO: 54673 - DNA, 120 bp, Homo sapiens
  misc_feature: 1539 for SV(W|O) and mtDNA
aatatcttgttcattgttaaggttgtggatgatggacccggagcacataaatagtatggctttgaagaaggcgtgggtgcagatgtgcaggaatgctaggtgtggttggttgatgccgat

SEQ ID NO: 54674 - DNA, 120 bp, Homo sapiens
  misc_feature: 1539 for SV(W|O) and mtDNA
acactacgagccacagcttaaaactcaaaggacctggcggtgcttcatatccctctagaggagcctgttctgtaatcgataaaccccgatcaacctcaccacctcttgctcagcctatat

SEQ ID NO: 54675 - DNA, 120 bp, Homo sapiens
  misc_feature: 1539 for SV(W|O) and mtDNA
actactaataattattacattttgactaccacaactcaacggctacatagaaaaatccaccccttacgagtgcggcttcgaccctatatcccccgcccgcgtccctttctccataaaatt

SEQ ID NO: 54676 - DNA, 120 bp, Homo sapiens
  misc_feature: 1538 for SV(W|O) and mtDNA
tagatatagtaccgcaagggaaagatgaaaaattataaccaagcataatatagcaaggactaacccctataccttctgcataatgaattaactagaaataactttgcaaggagagccaaa

SEQ ID NO: 54677 - DNA, 120 bp, Homo sapiens
  misc_feature: 1538 for SV(W|O) and mtDNA
acttgttccttaaatagggacctgtatgaatggctccacgagggttcagctgtctcttacttttaaccagtgaaattgacctgcccgtgaagaggcgggcataacacagcaagacgagaa

SEQ ID NO: 54678 - DNA, 120 bp, Homo sapiens
  misc_feature: 1538 for SV(W|O) and mtDNA
tggtagggtggggggcatccatatagtcactccaggtttatggagggttcttctactattaggacttttcgctttgaagcgaaggcttctcaaatcatgaaaattattaatattactgct

SEQ ID NO: 54679 - DNA, 120 bp, Homo sapiens
  misc_feature: 1538 for SV(W|O) and mtDNA
cttaccacaaggcacacctacaccccttatccccatactagttattatcgaaaccatcagcctactcattcaaccaatagccctggccgtacgcctaaccgctaacattactgcaggcca

SEQ ID NO: 54680 - DNA, 120 bp, Homo sapiens
  misc_feature: 1538 for SV(W|O) and mtDNA
tgcaaagttatttctagttaattcattatgcagaaggtataggggttagtccttgctatattatgcttggttataatttttcatctttcccttgcggtactatatctattgcgccaggtt

SEQ ID NO: 54681 - DNA, 120 bp, Homo sapiens
  misc_feature: 1538 for SV(W|O) and mtDNA
tgacgggcggtgtgtacgcgcttcagggccctgttcaactaagcactctactctcagtttactgctaaatccaccttcgacccttaagtttcataagggctatcgtagttttctggggta

SEQ ID NO: 54682 - DNA, 120 bp, Homo sapiens
  misc_feature: 1538 for SV(W|O) and mtDNA
agttttctggggtagaaaatgtagcccatttcttgccacctcatgggctacaccttgacctaacgtctttacgtgggtacttgcgcttactttgtagccttcatcagggtttgctgaaga

SEQ ID NO: 54683 - DNA, 120 bp, Homo sapiens
  misc_feature: 1538 for SV(W|O) and mtDNA
tctccacttcaagtcaactaggactcataatagttacaatcggcatcaaccaaccacacctagcattcctgcacatctgcacccacgccttcttcaaagccatactatttatgtgctccg

SEQ ID NO: 54684 - DNA, 120 bp, Homo sapiens
  misc_feature: 1538 for SV(W|O) and mtDNA
ataaccattcttaatttaactatttatattatcctaactactaccgcattcctactactcaacttaaactccagcaccacgaccctactactatctcgcacctgaaacaagctaacatga

SEQ ID NO: 54685 - DNA, 120 bp, Homo sapiens
  misc_feature: 1538 for SV(W|O) and mtDNA
tatcttgttcattgttaaggttgtggatgatggacccggagcacataaatagtatggctttgaagaaggcgtgggtgcagatgtgcaggaatgctaggtgtggttggttgatgccgattg

SEQ ID NO: 54686 - DNA, 120 bp, Homo sapiens
  misc_feature: 1538 for SV(W|O) and mtDNA
taggatggggtgtgataggtggcacggagaattttggattctcagggatgggttcgattctcatagtcctagaaataagggggtttaagctcctattatttactctatcaaagtaactct

SEQ ID NO: 54687 - DNA, 120 bp, Homo sapiens
  misc_feature: 1538 for SV(W|O) and mtDNA
tagaccaagaagttattatctcgaactgacactgagccacaacccaaacaacccagctctccctaagcttcaaactagactacttctccataatattcatccctgtagcattgttcgtta

SEQ ID NO: 54688 - DNA, 120 bp, Homo sapiens
  misc_feature: 1538 for SV(W|O) and mtDNA
atgtcctgatccaacatcgaggtcgtaaaccctattgttgatatggactctagaataggattgcgctgttatccctagggtaacttgttccgttggtcaagttattggatcaattgagta

SEQ ID NO: 54689 - DNA, 120 bp, Homo sapiens
  misc_feature: 1538 for SV(W|O) and mtDNA
atatatccaaacaacaaagcataatatttcgcccactaagccaatcactttattgactcctagccgcagacctcctcattctaacctgaatcggaggacaaccagtaagctaccctttta

SEQ ID NO: 54690 - DNA, 120 bp, Homo sapiens
  misc_feature: 1538 for SV(W|O) and mtDNA
catcgtactacacgacacgtactacgttgtagcccacttccactatgtcctatcaataggagctgtatttgccatcataggaggcttcattcactgatttcccctattctcaggctacac

SEQ ID NO: 54691 - DNA, 120 bp, Homo sapiens
  misc_feature: 1538 for SV(W|O) and mtDNA
ggttagtccttgctatattatgcttggttataatttttcatctttcccttgcggtactatatctattgcgccaggtttcaatttctatcgcctatactttatttgggtaaatggtttggc

SEQ ID NO: 54692 - DNA, 120 bp, Homo sapiens
  misc_feature: 1538 for SV(W|O) and mtDNA
ggtagtcaaaatgtaataattattagtagtaaggctaggagggtgttgattattaaaattaaggcgaagtttattactcttttttgaatgttgtcaaaactagttaattggaagttaacg

SEQ ID NO: 54693 - DNA, 120 bp, Homo sapiens
  misc_feature: 1538 for SV(W|O) and mtDNA
cctgtaatattgaacgtaggtgcgataaataatgggatgaggcaggaatcaaagacagatactgcgacatagggtgctccggctccagcgtctcgcaatgctatcgcgtgcatacccccc

SEQ ID NO: 54694 - DNA, 120 bp, Homo sapiens
  misc_feature: 1538 for SV(W|O) and mtDNA
ggattttttaggtagtgggtgttgagcttgaacgctttcttaattggtggctgcttttaggcctactatgggtgttaaattttttactctctctacaaggttttttcctagtgtccaaag

SEQ ID NO: 54695 - DNA, 120 bp, Homo sapiens
  misc_feature: 1538 for SV(W|O) and mtDNA
ggagtaggtttaggttatgtacgtagtctaggccatatgtgttggagattgagactagtagggctaggcccaccgctgcttcgcaggcggcaaagactagtatggcaataggcacaatat

SEQ ID NO: 54696 - DNA, 120 bp, Homo sapiens
  misc_feature: 1538 for SV(W|O) and mtDNA
gatgtaaagtgaaatattagttggcggatgaagcagatagtgaggaaagttgagccaataatgacgtgaagtccgtggaagcctgtggctacaaaaaatgttgagccgtagatgccgtcg

SEQ ID NO: 54697 - DNA, 120 bp, Homo sapiens
  misc_feature: 1538 for SV(W|O) and mtDNA
cctccggcggggtcgaagaaggtggtgttgaggttgcggtctgttagtagtatagtgatgccagcagctaggactgggagagataggagaagtaggactgctgtgattaggacggatcag

SEQ ID NO: 54698 - DNA, 120 bp, Homo sapiens
  misc_feature: 1538 for SV(W|O) and mtDNA
ccgatgtttcaggtttctgagtagagaaatgatccgtaatataggcctcgcccgatgtgtaggaagaggcagataaagaatattgaggcgccattggcgtgaaggtagcggatgattcag

SEQ ID NO: 54699 - DNA, 120 bp, Homo sapiens
  misc_feature: 1538 for SV(W|O) and mtDNA
ctaagcgttttgagctgcattgctgcgtgcttgatgcttgtcccttttgatcgtggtgatttagagggtgaactcactggaacggggatgcttgcatgtgtaatcttactaagagctaat

SEQ ID NO: 54700 - DNA, 120 bp, Homo sapiens
  misc_feature: 1538 for SV(W|O) and mtDNA
cctttaatagcggctgcaccatcgggatgtcctgatccaacatcgaggtcgtaaaccctattgttgatatggactctagaataggattgcgctgttatccctagggtaacttgttccgtt

SEQ ID NO: 54701 - DNA, 120 bp, Homo sapiens
  misc_feature: 1538 for SV(W|O) and mtDNA
cctgatccaacatcgaggtcgtaaaccctattgttgatatggactctagaataggattgcgctgttatccctagggtaacttgttccgttggtcaagttattggatcaattgagtatagt

SEQ ID NO: 54702 - DNA, 120 bp, Homo sapiens
  misc_feature: 1538 for SV(W|O) and mtDNA
catcataatcggaggctttggcaactgactagttcccctaataatcggtgcccccgatatggcgtttccccgcataaacaacataagcttctgactcttacctccctctctcctactcct

SEQ ID NO: 54703 - DNA, 120 bp, Homo sapiens
  misc_feature: 1538 for SV(W|O) and mtDNA
acaaggacaggcccatttgagtattttgttttcaattagggagatagttggtattaggattaggattgttgtgaagtatagtacggatgctacttgtccaatgatggtaaaagggtagct

SEQ ID NO: 54704 - DNA, 120 bp, Homo sapiens
  misc_feature: 1537 for SV(W|O) and mtDNA
tttgactaccacaactcaacggctacatagaaaaatccaccccttacgagtgcggcttcgaccctatatcccccgcccgcgtccctttctccataaaattcttcttagtagctattacct

SEQ ID NO: 54705 - DNA, 120 bp, Homo sapiens
  misc_feature: 1537 for SV(W|O) and mtDNA
accctgaagtttatattcttatcctaccaggcttcggaataatctcccatattgtaacttactactccggaaaaaaagaaccatttggatacataggtatggtctgagctatgatatcaa

SEQ ID NO: 54706 - DNA, 120 bp, Homo sapiens
  misc_feature: 1537 for SV(W|O) and mtDNA
ttcaggttagaatgaggaggtctgcggctaggagtcaataaagtgattggcttagtgggcgaaatattatgctttgttgtttggatatatggaggatggggattattgctaggatgagga

SEQ ID NO: 54707 - DNA, 120 bp, Homo sapiens
  misc_feature: 1537 for SV(W|O) and mtDNA
tgaaacttaagggtcgaaggtggatttagcagtaaactgagagtagagtgcttagttgaacagggccctgaagcgcgtacacaccgcccgtcaccctcctcaagtatacttcaaaggaca

SEQ ID NO: 54708 - DNA, 120 bp, Homo sapiens
  misc_feature: 1537 for SV(W|O) and mtDNA
tcctagggtttatcgtgtgagcacaccatatatttacagtaggaatagacgtagacacacgagcatatttcacctccgctaccataatcatcgctatccccaccggcgtcaaagtattta

SEQ ID NO: 54709 - DNA, 120 bp, Homo sapiens
  misc_feature: 1537 for SV(W|O) and mtDNA
tcaggtttctgagtagagaaatgatccgtaatataggcctcgcccgatgtgtaggaagaggcagataaagaatattgaggcgccattggcgtgaaggtagcggatgattcagccataatt

SEQ ID NO: 54710 - DNA, 120 bp, Homo sapiens
  misc_feature: 1537 for SV(W|O) and mtDNA
gcgcttccaattaggtgcatgagtaggtggcctgcagtaatgttagcggttaggcgtacggccagggctattggttgaatgagtaggctgatggtttcgataataactagtatggggata

SEQ ID NO: 54711 - DNA, 120 bp, Homo sapiens
  misc_feature: 1537 for SV(W|O) and mtDNA
taggattgcttgaatggctgctgtgttggcatctgctcgggcgtatcatcaactgatgagcaagaaggatataattcctacgccctctcagccgatgaacagttggaataggttgttagc

SEQ ID NO: 54712 - DNA, 120 bp, Homo sapiens
  misc_feature: 1537 for SV(W|O) and mtDNA
acagaggcttacgaccccttatttaccgagaaagctcacaagaactgctaactcatgcccccatgtctaacaacatggctttctcaacttttaaaggataacagctatccattggtctta

SEQ ID NO: 54713 - DNA, 120 bp, Homo sapiens
  misc_feature: 1537 for SV(W|O) and mtDNA
ggagtatcaatcacctgagctcaccatagtctaatagaaaacaaccgaaaccaaataattcaagcactgcttattacaattttactgggtctctattttaccctcctacaagcctcagag

SEQ ID NO: 54714 - DNA, 120 bp, Homo sapiens
  misc_feature: 1537 for SV(W|O) and mtDNA
acaacagaggcttacgaccccttatttaccgagaaagctcacaagaactgctaactcatgcccccatgtctaacaacatggctttctcaacttttaaaggataacagctatccattggtc

SEQ ID NO: 54715 - DNA, 120 bp, Homo sapiens
  misc_feature: 1537 for SV(W|O) and mtDNA
gaactgattaatgtttgggtctgagtttatatatcacagtgagaattctatgatggaccatgtaacgaacaatgctacagggatgaatattatggagaagtagtctagtttgaagcttag

SEQ ID NO: 54716 - DNA, 120 bp, Homo sapiens
  misc_feature: 1537 for SV(W|O) and mtDNA
aagtatttagctgactcgccacactccacggaagcaatatgaaatgatctgctgcagtgctctgagccctaggattcatctttcttttcaccgtaggtggcctgactggcattgtattag

SEQ ID NO: 54717 - DNA, 120 bp, Homo sapiens
  misc_feature: 1537 for SV(W|O) and mtDNA
atgatagtgaaatggattttggcgtaggtttggtctagggtgtagcctgagaataggggaaatcagtgaatgaagcctcctatgatggcaaatacagctcctattgataggacatagtgg

SEQ ID NO: 54718 - DNA, 120 bp, Homo sapiens
  misc_feature: 1536 for SV(W|O) and mtDNA
gaacgctttcttaattggtggctgcttttaggcctactatgggtgttaaattttttactctctctacaaggttttttcctagtgtccaaagagctgttcctctttggactaacagttaaa

SEQ ID NO: 54719 - DNA, 120 bp, Homo sapiens
  misc_feature: 1536 for SV(W|O) and mtDNA
ttgcaaagttatttctagttaattcattatgcagaaggtataggggttagtccttgctatattatgcttggttataatttttcatctttcccttgcggtactatatctattgcgccaggt

SEQ ID NO: 54720 - DNA, 120 bp, Homo sapiens
  misc_feature: 1536 for SV(W|O) and mtDNA
ttctccacttcaagtcaactaggactcataatagttacaatcggcatcaaccaaccacacctagcattcctgcacatctgcacccacgccttcttcaaagccatactatttatgtgctcc

SEQ ID NO: 54721 - DNA, 120 bp, Homo sapiens
  misc_feature: 1536 for SV(W|O) and mtDNA
tagtgttgtgtatggttatcatttgttttgaggttagtttgattagtcattgttgggtggtgattagtcggttgttgatgagatatttggaggtggggatcaatagagggggaaatagaa

SEQ ID NO: 54722 - DNA, 120 bp, Homo sapiens
  misc_feature: 1536 for SV(W|O) and mtDNA
tgctacagggatgaatattatggagaagtagtctagtttgaagcttagggagagctgggttgtttgggttgtggctcagtgtcagttcgagataataacttcttggtctaggcacatgaa

SEQ ID NO: 54723 - DNA, 120 bp, Homo sapiens
  misc_feature: 1536 for SV(W|O) and mtDNA
ttacgacctcgatgttggatcaggacatcccgatggtgcagccgctattaaaggttcgtttgttcaacgattaaagtcctacgtgatctgagttcagaccggagtaatccaggtcggttt

SEQ ID NO: 54724 - DNA, 120 bp, Homo sapiens
  misc_feature: 1536 for SV(W|O) and mtDNA
ggtagcataatcacttgttccttaaatagggacctgtatgaatggctccacgagggttcagctgtctcttacttttaaccagtgaaattgacctgcccgtgaagaggcgggcataacaca

SEQ ID NO: 54725 - DNA, 120 bp, Homo sapiens
  misc_feature: 1536 for SV(W|O) and mtDNA
tgtcctgatccaacatcgaggtcgtaaaccctattgttgatatggactctagaataggattgcgctgttatccctagggtaacttgttccgttggtcaagttattggatcaattgagtat

SEQ ID NO: 54726 - DNA, 120 bp, Homo sapiens
  misc_feature: 1536 for SV(W|O) and mtDNA
tctggggtagaaaatgtagcccatttcttgccacctcatgggctacaccttgacctaacgtctttacgtgggtacttgcgcttactttgtagccttcatcagggtttgctgaagatggcg

SEQ ID NO: 54727 - DNA, 120 bp, Homo sapiens
  misc_feature: 1536 for SV(W|O) and mtDNA
aagcaatatgaaatgatctgctgcagtgctctgagccctaggattcatctttcttttcaccgtaggtggcctgactggcattgtattagcaaactcatcactagacatcgtactacacga

SEQ ID NO: 54728 - DNA, 120 bp, Homo sapiens
  misc_feature: 1536 for SV(W|O) and mtDNA
tcaggttcgtcctttagtgttgtgtatggttatcatttgttttgaggttagtttgattagtcattgttgggtggtgattagtcggttgttgatgagatatttggaggtggggatcaatag

SEQ ID NO: 54729 - DNA, 120 bp, Homo sapiens
  misc_feature: 1536 for SV(W|O) and mtDNA
tatgtttgggattttttaggtagtgggtgttgagcttgaacgctttcttaattggtggctgcttttaggcctactatgggtgttaaattttttactctctctacaaggttttttcctagt

SEQ ID NO: 54730 - DNA, 120 bp, Homo sapiens
  misc_feature: 1536 for SV(W|O) and mtDNA
accaacacctctttacagtgaaatgccccaactaaatactaccgtatggcccaccataattacccccatactccttacactattcctcatcacccaactaaaaatattaaacacaaacta

SEQ ID NO: 54731 - DNA, 120 bp, Homo sapiens
  misc_feature: 1536 for SV(W|O) and mtDNA
taggtttaggttatgtacgtagtctaggccatatgtgttggagattgagactagtagggctaggcccaccgctgcttcgcaggcggcaaagactagtatggcaataggcacaatattggc

SEQ ID NO: 54732 - DNA, 120 bp, Homo sapiens
  misc_feature: 1536 for SV(W|O) and mtDNA
gttttttacaactcaggtgagttttagctttattggggagggggtgatctaaaacactctttacgccggcttctattgacttgggttaatcgtgtgaccgcggtggctggcacgaaattg

SEQ ID NO: 54733 - DNA, 120 bp, Homo sapiens
  misc_feature: 1536 for SV(W|O) and mtDNA
gcatttatatagaggagacaagtcgtaacatggtaagtgtactggaaagtgcacttggacgaaccagagtgtagcttaacacaaagcacccaacttacacttaggagatttcaacttaac

SEQ ID NO: 54734 - DNA, 120 bp, Homo sapiens
  misc_feature: 1536 for SV(W|O) and mtDNA
accatttggatacataggtatggtctgagctatgatatcaattggcttcctagggtttatcgtgtgagcacaccatatatttacagtaggaatagacgtagacacacgagcatatttcac

SEQ ID NO: 54735 - DNA, 120 bp, Homo sapiens
  misc_feature: 1536 for SV(W|O) and mtDNA
gggttctgtgggcaaatttaaagttgaactaagattctatcttggacaaccagctatcaccaggctcggtaggtttgtcgcctctacctataaatcttcccactattttgctacatagac

SEQ ID NO: 54736 - DNA, 120 bp, Homo sapiens
  misc_feature: 1536 for SV(W|O) and mtDNA
cttcacaacaatcctaatcctaataccaactatctccctaattgaaaacaaaatactcaaatgggcctgtccttgtagtataaactaatacaccagtcttgtaaaccggagatgaaaacc

SEQ ID NO: 54737 - DNA, 120 bp, Homo sapiens
  misc_feature: 1536 for SV(W|O) and mtDNA
ggaaagtgcacttggacgaaccagagtgtagcttaacacaaagcacccaacttacacttaggagatttcaacttaacttgaccgctctgagctaaacctagccccaaacccactccacct

SEQ ID NO: 54738 - DNA, 120 bp, Homo sapiens
  misc_feature: 1536 for SV(W|O) and mtDNA
atgtactgctcggaggttgggttctgctccgaggtcgccccaaccgaaatttttaatgcaggtttggtagtttaggacctgtgggtttgttaggtactgtttgcattaataaattaaagc

SEQ ID NO: 54739 - DNA, 120 bp, Homo sapiens
  misc_feature: 1536 for SV(W|O) and mtDNA
gctaggcccaccgctgcttcgcaggcggcaaagactagtatggcaataggcacaatattggctaagagggagtgggtgttgagggttatgagagtagctataatgaacagcgatagtatt

SEQ ID NO: 54740 - DNA, 120 bp, Homo sapiens
  misc_feature: 1536 for SV(W|O) and mtDNA
ccacttcttaccacaaggcacacctacaccccttatccccatactagttattatcgaaaccatcagcctactcattcaaccaatagccctggccgtacgcctaaccgctaacattactgc

SEQ ID NO: 54741 - DNA, 120 bp, Homo sapiens
  misc_feature: 1536 for SV(W|O) and mtDNA
ccaccttggctatcatcacccgatgaggcaaccagccagaacgcctgaacgcaggcacatacttcctattctacaccctagtaggctcccttcccctactcatcgcactaatttacactc

SEQ ID NO: 54742 - DNA, 120 bp, Homo sapiens
  misc_feature: 1536 for SV(W|O) and mtDNA
ctgctgcagtgctctgagccctaggattcatctttcttttcaccgtaggtggcctgactggcattgtattagcaaactcatcactagacatcgtactacacgacacgtactacgttgtag

SEQ ID NO: 54743 - DNA, 120 bp, Homo sapiens
  misc_feature: 1536 for SV(W|O) and mtDNA
aacctttaatagcggctgcaccatcgggatgtcctgatccaacatcgaggtcgtaaaccctattgttgatatggactctagaataggattgcgctgttatccctagggtaacttgttccg

SEQ ID NO: 54744 - DNA, 120 bp, Homo sapiens
  misc_feature: 1536 for SV(W|O) and mtDNA
atcgctcacacctcatatcctccctactatgcctagaaggaataatactatcgctgttcattatagctactctcataaccctcaacacccactccctcttagccaatattgtgcctattg

SEQ ID NO: 54745 - DNA, 120 bp, Homo sapiens
  misc_feature: 1536 for SV(W|O) and mtDNA
attcaaccaatagccctggccgtacgcctaaccgctaacattactgcaggccacctactcatgcacctaattggaagcgccaccctagcaatatcaaccattaaccttccctctacactt

SEQ ID NO: 54746 - DNA, 120 bp, Homo sapiens
  misc_feature: 1536 for SV(W|O) and mtDNA
agccttactactaataattattacattttgactaccacaactcaacggctacatagaaaaatccaccccttacgagtgcggcttcgaccctatatcccccgcccgcgtccctttctccat

SEQ ID NO: 54747 - DNA, 120 bp, Homo sapiens
  misc_feature: 1536 for SV(W|O) and mtDNA
aaatatatggtgtgctcacacgataaaccctaggaagccaattgatatcatagctcagaccatacctatgtatccaaatggttctttttttccggagtagtaagttacaatatgggagat

SEQ ID NO: 54748 - DNA, 120 bp, Homo sapiens
  misc_feature: 1536 for SV(W|O) and mtDNA
aattttttactctctctacaaggttttttcctagtgtccaaagagctgttcctctttggactaacagttaaatttacaaggggatttagagggttctgtgggcaaatttaaagttgaact

SEQ ID NO: 54749 - DNA, 120 bp, Homo sapiens
  misc_feature: 1536 for SV(W|O) and mtDNA
accacgatcaaaagggacaagcatcaagcacgcagcaatgcagctcaaaacgcttagcctagccacacccccacgggaaacagcagtgattaacctttagcaataaacgaaagtttaact

SEQ ID NO: 54750 - DNA, 120 bp, Homo sapiens
  misc_feature: 1536 for SV(W|O) and mtDNA
aactcaggtgagttttagctttattggggagggggtgatctaaaacactctttacgccggcttctattgacttgggttaatcgtgtgaccgcggtggctggcacgaaattgaccaaccct

SEQ ID NO: 54751 - DNA, 120 bp, Homo sapiens
  misc_feature: 1536 for SV(W|O) and mtDNA
aggctaagcgttttgagctgcattgctgcgtgcttgatgcttgtcccttttgatcgtggtgatttagagggtgaactcactggaacggggatgcttgcatgtgtaatcttactaagagct

SEQ ID NO: 54752 - DNA, 120 bp, Homo sapiens
  misc_feature: 1536 for SV(W|O) and mtDNA
acgacctcgatgttggatcaggacatcccgatggtgcagccgctattaaaggttcgtttgttcaacgattaaagtcctacgtgatctgagttcagaccggagtaatccaggtcggtttct

SEQ ID NO: 54753 - DNA, 120 bp, Homo sapiens
  misc_feature: 1535 for SV(W|O) and mtDNA
gggattttttaggtagtgggtgttgagcttgaacgctttcttaattggtggctgcttttaggcctactatgggtgttaaattttttactctctctacaaggttttttcctagtgtccaaa

SEQ ID NO: 54754 - DNA, 120 bp, Homo sapiens
  misc_feature: 1535 for SV(W|O) and mtDNA
ttgtagccacaggcttccacggacttcacgtcattattggctcaactttcctcactatctgcttcatccgccaactaatatttcactttacatccaaacatcactttggcttcgaagccg

SEQ ID NO: 54755 - DNA, 120 bp, Homo sapiens
  misc_feature: 1535 for SV(W|O) and mtDNA
agtgaaattgacctgcccgtgaagaggcgggcataacacagcaagacgagaagaccctatggagctttaatttattaatgcaaacagtacctaacaaacccacaggtcctaaactaccaa

SEQ ID NO: 54756 - DNA, 120 bp, Homo sapiens
  misc_feature: 1535 for SV(W|O) and mtDNA
tatttagctgactcgccacactccacggaagcaatatgaaatgatctgctgcagtgctctgagccctaggattcatctttcttttcaccgtaggtggcctgactggcattgtattagcaa

SEQ ID NO: 54757 - DNA, 120 bp, Homo sapiens
  misc_feature: 1535 for SV(W|O) and mtDNA
actgatgagcaagaaggatataattcctacgccctctcagccgatgaacagttggaataggttgttagcggtaactaagattagtatggtaattaggaagatgagtagatatttgaagaa

SEQ ID NO: 54758 - DNA, 120 bp, Homo sapiens
  misc_feature: 1535 for SV(W|O) and mtDNA
tctacacttatcatcttcacaattctaattctactgactatcctagaaatcgctgtcgccttaatccaagcctacgttttcacacttctagtaagcctctacctgcacgacaacacataa

SEQ ID NO: 54759 - DNA, 120 bp, Homo sapiens
  misc_feature: 1535 for SV(W|O) and mtDNA
actgctattattcatcctatgtgggtaattgaggagtatgctaagattttgcgtagctgggtttggtttaatccacctcaactgcctgctatgatggataagattgagagagtgaggaga

SEQ ID NO: 54760 - DNA, 120 bp, Homo sapiens
  misc_feature: 1535 for SV(W|O) and mtDNA
tccttaaatagggacctgtatgaatggctccacgagggttcagctgtctcttacttttaaccagtgaaattgacctgcccgtgaagaggcgggcataacacagcaagacgagaagaccct

SEQ ID NO: 54761 - DNA, 120 bp, Homo sapiens
  misc_feature: 1535 for SV(W|O) and mtDNA
atgctacagggatgaatattatggagaagtagtctagtttgaagcttagggagagctgggttgtttgggttgtggctcagtgtcagttcgagataataacttcttggtctaggcacatga

SEQ ID NO: 54762 - DNA, 120 bp, Homo sapiens
  misc_feature: 1535 for SV(W|O) and mtDNA
tcaaccaatagccctggccgtacgcctaaccgctaacattactgcaggccacctactcatgcacctaattggaagcgccaccctagcaatatcaaccattaaccttccctctacacttat

SEQ ID NO: 54763 - DNA, 120 bp, Homo sapiens
  misc_feature: 1535 for SV(W|O) and mtDNA
taagcgttttgagctgcattgctgcgtgcttgatgcttgtcccttttgatcgtggtgatttagagggtgaactcactggaacggggatgcttgcatgtgtaatcttactaagagctaata

SEQ ID NO: 54764 - DNA, 120 bp, Homo sapiens
  misc_feature: 1535 for SV(W|O) and mtDNA
taattaggctgtgggtggttgtgttgattcaaattatgtgttttttggaaagtcatgtcagtggtagtaatataattgttgggacgattagttttagcattggagtaggtttaggttatg

SEQ ID NO: 54765 - DNA, 120 bp, Homo sapiens
  misc_feature: 1535 for SV(W|O) and mtDNA
ggtatctaatcccagtttgggtcttagctattgtgtgttcagatatgttaaagccactttcgtagtctattttgtgtcaactggagttttttacaactcaggtgagttttagctttattg

SEQ ID NO: 54766 - DNA, 120 bp, Homo sapiens
  misc_feature: 1535 for SV(W|O) and mtDNA
aatttgaagtagatagaaaccgacctggattactccggtctgaactcagatcacgtaggactttaatcgttgaacaaacgaacctttaatagcggctgcaccatcgggatgtcctgatcc

SEQ ID NO: 54767 - DNA, 120 bp, Homo sapiens
  misc_feature: 1535 for SV(W|O) and mtDNA
ggaatttgaagtagatagaaaccgacctggattactccggtctgaactcagatcacgtaggactttaatcgttgaacaaacgaacctttaatagcggctgcaccatcgggatgtcctgat

SEQ ID NO: 54768 - DNA, 120 bp, Homo sapiens
  misc_feature: 1535 for SV(W|O) and mtDNA
gccagaacactacgagccacagcttaaaactcaaaggacctggcggtgcttcatatccctctagaggagcctgttctgtaatcgataaaccccgatcaacctcaccacctcttgctcagc

SEQ ID NO: 54769 - DNA, 120 bp, Homo sapiens
  misc_feature: 1535 for SV(W|O) and mtDNA
gacgggcggtgtgtacgcgcttcagggccctgttcaactaagcactctactctcagtttactgctaaatccaccttcgacccttaagtttcataagggctatcgtagttttctggggtag

SEQ ID NO: 54770 - DNA, 120 bp, Homo sapiens
  misc_feature: 1535 for SV(W|O) and mtDNA
ccggcggggtcgaagaaggtggtgttgaggttgcggtctgttagtagtatagtgatgccagcagctaggactgggagagataggagaagtaggactgctgtgattaggacggatcagacg

SEQ ID NO: 54771 - DNA, 120 bp, Homo sapiens
  misc_feature: 1535 for SV(W|O) and mtDNA
aggattgcttgaatggctgctgtgttggcatctgctcgggcgtatcatcaactgatgagcaagaaggatataattcctacgccctctcagccgatgaacagttggaataggttgttagcg

SEQ ID NO: 54772 - DNA, 120 bp, Homo sapiens
  misc_feature: 1535 for SV(W|O) and mtDNA
aaactcagacccaaacattaatcagttcttcaaatatctactcatcttcctaattaccatactaatcttagttaccgctaacaacctattccaactgttcatcggctgagagggcgtagg

SEQ ID NO: 54773 - DNA, 120 bp, Homo sapiens
  misc_feature: 1535 for SV(W|O) and mtDNA
aattgacctgcccgtgaagaggcgggcataacacagcaagacgagaagaccctatggagctttaatttattaatgcaaacagtacctaacaaacccacaggtcctaaactaccaaacctg

SEQ ID NO: 54774 - DNA, 120 bp, Homo sapiens
  misc_feature: 1535 for SV(W|O) and mtDNA
aaaatgattaaggatactagtataagagatcaggttcgtcctttagtgttgtgtatggttatcatttgttttgaggttagtttgattagtcattgttgggtggtgattagtcggttgttg

SEQ ID NO: 54775 - DNA, 120 bp, Homo sapiens
  misc_feature: 1535 for SV(W|O) and mtDNA
atatcttgttcattgttaaggttgtggatgatggacccggagcacataaatagtatggctttgaagaaggcgtgggtgcagatgtgcaggaatgctaggtgtggttggttgatgccgatt

SEQ ID NO: 54776 - DNA, 120 bp, Homo sapiens
  misc_feature: 1535 for SV(W|O) and mtDNA
aggatggggtgtgataggtggcacggagaattttggattctcagggatgggttcgattctcatagtcctagaaataagggggtttaagctcctattatttactctatcaaagtaactctt

SEQ ID NO: 54777 - DNA, 120 bp, Homo sapiens
  misc_feature: 1534 for SV(W|O) and mtDNA
gtgaaattgacctgcccgtgaagaggcgggcataacacagcaagacgagaagaccctatggagctttaatttattaatgcaaacagtacctaacaaacccacaggtcctaaactaccaaa

SEQ ID NO: 54778 - DNA, 120 bp, Homo sapiens
  misc_feature: 1534 for SV(W|O) and mtDNA
cgggcggtgtgtacgcgcttcagggccctgttcaactaagcactctactctcagtttactgctaaatccaccttcgacccttaagtttcataagggctatcgtagttttctggggtagaa

SEQ ID NO: 54779 - DNA, 120 bp, Homo sapiens
  misc_feature: 1534 for SV(W|O) and mtDNA
tgtttatgcggggaaacgccatatcgggggcaccgattattaggggaactagtcagttgccaaagcctccgattatgatgggtattactatgaagaagattattacaaatgcatgggctg

SEQ ID NO: 54780 - DNA, 120 bp, Homo sapiens
  misc_feature: 1534 for SV(W|O) and mtDNA
tgatctagaaattgccctccttttacccctaccatgagccctacaaacaactaacctgccactaatagttatgtcatccctcttattaatcatcatcctagccctaagtctggcctatga

SEQ ID NO: 54781 - DNA, 120 bp, Homo sapiens
  misc_feature: 1534 for SV(W|O) and mtDNA
gccgatgtttcaggtttctgagtagagaaatgatccgtaatataggcctcgcccgatgtgtaggaagaggcagataaagaatattgaggcgccattggcgtgaaggtagcggatgattca

SEQ ID NO: 54782 - DNA, 120 bp, Homo sapiens
  misc_feature: 1534 for SV(W|O) and mtDNA
aaccatttggatacataggtatggtctgagctatgatatcaattggcttcctagggtttatcgtgtgagcacaccatatatttacagtaggaatagacgtagacacacgagcatatttca

SEQ ID NO: 54783 - DNA, 120 bp, Homo sapiens
  misc_feature: 1534 for SV(W|O) and mtDNA
tccaattgggtatgaggagttcagttatatgtttgggattttttaggtagtgggtgttgagcttgaacgctttcttaattggtggctgcttttaggcctactatgggtgttaaatttttt

SEQ ID NO: 54784 - DNA, 120 bp, Homo sapiens
  misc_feature: 1534 for SV(W|O) and mtDNA
ggtgttgagcttgaacgctttcttaattggtggctgcttttaggcctactatgggtgttaaattttttactctctctacaaggttttttcctagtgtccaaagagctgttcctctttgga

SEQ ID NO: 54785 - DNA, 120 bp, Homo sapiens
  misc_feature: 1534 for SV(W|O) and mtDNA
tcatcgctatccccaccggcgtcaaagtatttagctgactcgccacactccacggaagcaatatgaaatgatctgctgcagtgctctgagccctaggattcatctttcttttcaccgtag

SEQ ID NO: 54786 - DNA, 120 bp, Homo sapiens
  misc_feature: 1534 for SV(W|O) and mtDNA
tatatgtttgggattttttaggtagtgggtgttgagcttgaacgctttcttaattggtggctgcttttaggcctactatgggtgttaaattttttactctctctacaaggttttttccta

SEQ ID NO: 54787 - DNA, 120 bp, Homo sapiens
  misc_feature: 1534 for SV(W|O) and mtDNA
ccccatgtctaacaacatggctttctcaacttttaaaggataacagctatccattggtcttaggccccaaaaattttggtgcaactccaaataaaagtaataaccatgcacactactata

SEQ ID NO: 54788 - DNA, 120 bp, Homo sapiens
  misc_feature: 1534 for SV(W|O) and mtDNA
tagaagtgagatggtaaatgctagtataatatttatgtaaatgaggggcatttggtaaatatgattatcataatttaatgagtcgaaatcattcgttttgtttaaactatataccaattc

SEQ ID NO: 54789 - DNA, 120 bp, Homo sapiens
  misc_feature: 1534 for SV(W|O) and mtDNA
gcatagtggggtatctaatcccagtttgggtcttagctattgtgtgttcagatatgttaaagccactttcgtagtctattttgtgtcaactggagttttttacaactcaggtgagtttta

SEQ ID NO: 54790 - DNA, 120 bp, Homo sapiens
  misc_feature: 1534 for SV(W|O) and mtDNA
gtttgtgtttaatatttttagttgggtgatgaggaatagtgtaaggagtatgggggtaattatggtgggccatacggtagtatttagttggggcatttcactgtaaagaggtgttggttc

SEQ ID NO: 54791 - DNA, 120 bp, Homo sapiens
  misc_feature: 1534 for SV(W|O) and mtDNA
ctcatgcccccatgtctaacaacatggctttctcaacttttaaaggataacagctatccattggtcttaggccccaaaaattttggtgcaactccaaataaaagtaataaccatgcacac

SEQ ID NO: 54792 - DNA, 120 bp, Homo sapiens
  misc_feature: 1534 for SV(W|O) and mtDNA
gtggtagggtggggggcatccatatagtcactccaggtttatggagggttcttctactattaggacttttcgctttgaagcgaaggcttctcaaatcatgaaaattattaatattactgc

SEQ ID NO: 54793 - DNA, 120 bp, Homo sapiens
  misc_feature: 1534 for SV(W|O) and mtDNA
gtccaatgcttcactcagccattttacctcacccccactgatgttcgccgaccgttgactattctctacaaaccacaaagacattggaacactatacctattattcggcgcatgagctgg

SEQ ID NO: 54794 - DNA, 120 bp, Homo sapiens
  misc_feature: 1534 for SV(W|O) and mtDNA
atccccaccttggctatcatcacccgatgaggcaaccagccagaacgcctgaacgcaggcacatacttcctattctacaccctagtaggctcccttcccctactcatcgcactaatttac

SEQ ID NO: 54795 - DNA, 120 bp, Homo sapiens
  misc_feature: 1534 for SV(W|O) and mtDNA
ccaaaccatttacccaaataaagtataggcgatagaaattgaaacctggcgcaatagatatagtaccgcaagggaaagatgaaaaattataaccaagcataatatagcaaggactaaccc

SEQ ID NO: 54796 - DNA, 120 bp, Homo sapiens
  misc_feature: 1534 for SV(W|O) and mtDNA
ggaaacgccatatcgggggcaccgattattaggggaactagtcagttgccaaagcctccgattatgatgggtattactatgaagaagattattacaaatgcatgggctgtgacgataacg

SEQ ID NO: 54797 - DNA, 120 bp, Homo sapiens
  misc_feature: 1534 for SV(W|O) and mtDNA
ataatcggaggctttggcaactgactagttcccctaataatcggtgcccccgatatggcgtttccccgcataaacaacataagcttctgactcttacctccctctctcctactcctgctc

SEQ ID NO: 54798 - DNA, 120 bp, Homo sapiens
  misc_feature: 1534 for SV(W|O) and mtDNA
cttccgtggagtgtggcgagtcagctaaatactttgacgccggtggggatagcgatgattatggtagcggaggtgaaatatgctcgtgtgtctacgtctattcctactgtaaatatatgg

SEQ ID NO: 54799 - DNA, 120 bp, Homo sapiens
  misc_feature: 1534 for SV(W|O) and mtDNA
aatagggacctgtatgaatggctccacgagggttcagctgtctcttacttttaaccagtgaaattgacctgcccgtgaagaggcgggcataacacagcaagacgagaagaccctatggag

SEQ ID NO: 54800 - DNA, 120 bp, Homo sapiens
  misc_feature: 1534 for SV(W|O) and mtDNA
ctcacacctcatatcctccctactatgcctagaaggaataatactatcgctgttcattatagctactctcataaccctcaacacccactccctcttagccaatattgtgcctattgccat

SEQ ID NO: 54801 - DNA, 120 bp, Homo sapiens
  misc_feature: 1534 for SV(W|O) and mtDNA
ctaccagacaaccttagccaaaccatttacccaaataaagtataggcgatagaaattgaaacctggcgcaatagatatagtaccgcaagggaaagatgaaaaattataaccaagcataat

SEQ ID NO: 54802 - DNA, 120 bp, Homo sapiens
  misc_feature: 1534 for SV(W|O) and mtDNA
accaaataattcaagcactgcttattacaattttactgggtctctattttaccctcctacaagcctcagagtacttcgagtctcccttcaccatttccgacggcatctacggctcaacat

SEQ ID NO: 54803 - DNA, 120 bp, Homo sapiens
  misc_feature: 1534 for SV(W|O) and mtDNA
aatacccatcataatcggaggctttggcaactgactagttcccctaataatcggtgcccccgatatggcgtttccccgcataaacaacataagcttctgactcttacctccctctctcct

SEQ ID NO: 54804 - DNA, 120 bp, Homo sapiens
  misc_feature: 1533 for SV(W|O) and mtDNA
ttgccctccttttacccctaccatgagccctacaaacaactaacctgccactaatagttatgtcatccctcttattaatcatcatcctagccctaagtctggcctatgagtgactacaaa

SEQ ID NO: 54805 - DNA, 120 bp, Homo sapiens
  misc_feature: 1533 for SV(W|O) and mtDNA
tttggcaactgactagttcccctaataatcggtgcccccgatatggcgtttccccgcataaacaacataagcttctgactcttacctccctctctcctactcctgctcgcatctgctata

SEQ ID NO: 54806 - DNA, 120 bp, Homo sapiens
  misc_feature: 1533 for SV(W|O) and mtDNA
ttggaacactatacctattattcggcgcatgagctggagtcctaggcacagctctaagcctccttattcgagccgagctgggccagccaggcaaccttctaggtaacgaccacatctaca

SEQ ID NO: 54807 - DNA, 120 bp, Homo sapiens
  misc_feature: 1533 for SV(W|O) and mtDNA
cagacttagggctaggatgatgattaataagagggatgacataactattagtggcaggttagttgtttgtagggctcatggtaggggtaaaaggagggcaatttctagatcaaataataa

SEQ ID NO: 54808 - DNA, 120 bp, Homo sapiens
  misc_feature: 1533 for SV(W|O) and mtDNA
cgcttccaattaggtgcatgagtaggtggcctgcagtaatgttagcggttaggcgtacggccagggctattggttgaatgagtaggctgatggtttcgataataactagtatggggataa

SEQ ID NO: 54809 - DNA, 120 bp, Homo sapiens
  misc_feature: 1533 for SV(W|O) and mtDNA
ttatatagaggagacaagtcgtaacatggtaagtgtactggaaagtgcacttggacgaaccagagtgtagcttaacacaaagcacccaacttacacttaggagatttcaacttaacttga

SEQ ID NO: 54810 - DNA, 120 bp, Homo sapiens
  misc_feature: 1533 for SV(W|O) and mtDNA
aacagctctttggacactaggaaaaaaccttgtagagagagtaaaaaatttaacacccatagtaggcctaaaagcagccaccaattaagaaagcgttcaagctcaacacccactacctaa

SEQ ID NO: 54811 - DNA, 120 bp, Homo sapiens
  misc_feature: 1533 for SV(W|O) and mtDNA
actatttatattatcctaactactaccgcattcctactactcaacttaaactccagcaccacgaccctactactatctcgcacctgaaacaagctaacatgactaacacccttaattcca

SEQ ID NO: 54812 - DNA, 120 bp, Homo sapiens
  misc_feature: 1533 for SV(W|O) and mtDNA
cttactaccagacaaccttagccaaaccatttacccaaataaagtataggcgatagaaattgaaacctggcgcaatagatatagtaccgcaagggaaagatgaaaaattataaccaagca

SEQ ID NO: 54813 - DNA, 120 bp, Homo sapiens
  misc_feature: 1533 for SV(W|O) and mtDNA
tgcatttgtaataatcttcttcatagtaatacccatcataatcggaggctttggcaactgactagttcccctaataatcggtgcccccgatatggcgtttccccgcataaacaacataag

SEQ ID NO: 54814 - DNA, 120 bp, Homo sapiens
  misc_feature: 1533 for SV(W|O) and mtDNA
tgatccaacatcgaggtcgtaaaccctattgttgatatggactctagaataggattgcgctgttatccctagggtaacttgttccgttggtcaagttattggatcaattgagtatagtag

SEQ ID NO: 54815 - DNA, 120 bp, Homo sapiens
  misc_feature: 1533 for SV(W|O) and mtDNA
aatagcggctgcaccatcgggatgtcctgatccaacatcgaggtcgtaaaccctattgttgatatggactctagaataggattgcgctgttatccctagggtaacttgttccgttggtca

SEQ ID NO: 54816 - DNA, 120 bp, Homo sapiens
  misc_feature: 1533 for SV(W|O) and mtDNA
tgaacaaacgaacctttaatagcggctgcaccatcgggatgtcctgatccaacatcgaggtcgtaaaccctattgttgatatggactctagaataggattgcgctgttatccctagggta

SEQ ID NO: 54817 - DNA, 120 bp, Homo sapiens
  misc_feature: 1533 for SV(W|O) and mtDNA
taaatagggacctgtatgaatggctccacgagggttcagctgtctcttacttttaaccagtgaaattgacctgcccgtgaagaggcgggcataacacagcaagacgagaagaccctatgg

SEQ ID NO: 54818 - DNA, 120 bp, Homo sapiens
  misc_feature: 1533 for SV(W|O) and mtDNA
aggtagcataatcacttgttccttaaatagggacctgtatgaatggctccacgagggttcagctgtctcttacttttaaccagtgaaattgacctgcccgtgaagaggcgggcataacac

SEQ ID NO: 54819 - DNA, 120 bp, Homo sapiens
  misc_feature: 1533 for SV(W|O) and mtDNA
agctatgatatcaattggcttcctagggtttatcgtgtgagcacaccatatatttacagtaggaatagacgtagacacacgagcatatttcacctccgctaccataatcatcgctatccc

SEQ ID NO: 54820 - DNA, 120 bp, Homo sapiens
  misc_feature: 1533 for SV(W|O) and mtDNA
gcggggaaacgccatatcgggggcaccgattattaggggaactagtcagttgccaaagcctccgattatgatgggtattactatgaagaagattattacaaatgcatgggctgtgacgat

SEQ ID NO: 54821 - DNA, 120 bp, Homo sapiens
  misc_feature: 1533 for SV(W|O) and mtDNA
gcatccccgttccagtgagttcaccctctaaatcaccacgatcaaaagggacaagcatcaagcacgcagcaatgcagctcaaaacgcttagcctagccacacccccacgggaaacagcag

SEQ ID NO: 54822 - DNA, 120 bp, Homo sapiens
  misc_feature: 1533 for SV(W|O) and mtDNA
gagtaggtttaggttatgtacgtagtctaggccatatgtgttggagattgagactagtagggctaggcccaccgctgcttcgcaggcggcaaagactagtatggcaataggcacaatatt

SEQ ID NO: 54823 - DNA, 120 bp, Homo sapiens
  misc_feature: 1533 for SV(W|O) and mtDNA
gactaccacaactcaacggctacatagaaaaatccaccccttacgagtgcggcttcgaccctatatcccccgcccgcgtccctttctccataaaattcttcttagtagctattaccttct

SEQ ID NO: 54824 - DNA, 120 bp, Homo sapiens
  misc_feature: 1533 for SV(W|O) and mtDNA
aggaggataatgccgatgtttcaggtttctgagtagagaaatgatccgtaatataggcctcgcccgatgtgtaggaagaggcagataaagaatattgaggcgccattggcgtgaaggtag

SEQ ID NO: 54825 - DNA, 120 bp, Homo sapiens
  misc_feature: 1533 for SV(W|O) and mtDNA
cctctacacttatcatcttcacaattctaattctactgactatcctagaaatcgctgtcgccttaatccaagcctacgttttcacacttctagtaagcctctacctgcacgacaacacat

SEQ ID NO: 54826 - DNA, 120 bp, Homo sapiens
  misc_feature: 1533 for SV(W|O) and mtDNA
cccccatgtctaacaacatggctttctcaacttttaaaggataacagctatccattggtcttaggccccaaaaattttggtgcaactccaaataaaagtaataaccatgcacactactat

SEQ ID NO: 54827 - DNA, 120 bp, Homo sapiens
  misc_feature: 1533 for SV(W|O) and mtDNA
aaatcctatatatcttaatggcacatgcagcgcaagtaggtctacaagacgctacttcccctatcatagaagagcttatcacctttcatgatcacgccctcataatcattttccttatct

SEQ ID NO: 54828 - DNA, 120 bp, Homo sapiens
  misc_feature: 1533 for SV(W|O) and mtDNA
acactatacctattattcggcgcatgagctggagtcctaggcacagctctaagcctccttattcgagccgagctgggccagccaggcaaccttctaggtaacgaccacatctacaacgtt

SEQ ID NO: 54829 - DNA, 120 bp, Homo sapiens
  misc_feature: 1532 for SV(W|O) and mtDNA
tgccctccttttacccctaccatgagccctacaaacaactaacctgccactaatagttatgtcatccctcttattaatcatcatcctagccctaagtctggcctatgagtgactacaaaa

SEQ ID NO: 54830 - DNA, 120 bp, Homo sapiens
  misc_feature: 1532 for SV(W|O) and mtDNA
tttaatagcggctgcaccatcgggatgtcctgatccaacatcgaggtcgtaaaccctattgttgatatggactctagaataggattgcgctgttatccctagggtaacttgttccgttgg

SEQ ID NO: 54831 - DNA, 120 bp, Homo sapiens
  misc_feature: 1532 for SV(W|O) and mtDNA
attgccctccttttacccctaccatgagccctacaaacaactaacctgccactaatagttatgtcatccctcttattaatcatcatcctagccctaagtctggcctatgagtgactacaa

SEQ ID NO: 54832 - DNA, 120 bp, Homo sapiens
  misc_feature: 1532 for SV(W|O) and mtDNA
ttggaaaaaggttttcatctccggtttacaagactggtgtattagtttatactacaaggacaggcccatttgagtattttgttttcaattagggagatagttggtattaggattaggatt

SEQ ID NO: 54833 - DNA, 120 bp, Homo sapiens
  misc_feature: 1532 for SV(W|O) and mtDNA
ttgactaccacaactcaacggctacatagaaaaatccaccccttacgagtgcggcttcgaccctatatcccccgcccgcgtccctttctccataaaattcttcttagtagctattacctt

SEQ ID NO: 54834 - DNA, 120 bp, Homo sapiens
  misc_feature: 1532 for SV(W|O) and mtDNA
ttagccaatattgtgcctattgccatactagtctttgccgcctgcgaagcagcggtgggcctagccctactagtctcaatctccaacacatatggcctagactacgtacataacctaaac

SEQ ID NO: 54835 - DNA, 120 bp, Homo sapiens
  misc_feature: 1532 for SV(W|O) and mtDNA
tgaacgctttcttaattggtggctgcttttaggcctactatgggtgttaaattttttactctctctacaaggttttttcctagtgtccaaagagctgttcctctttggactaacagttaa

SEQ ID NO: 54836 - DNA, 120 bp, Homo sapiens
  misc_feature: 1532 for SV(W|O) and mtDNA
tatccaaacaacaaagcataatatttcgcccactaagccaatcactttattgactcctagccgcagacctcctcattctaacctgaatcggaggacaaccagtaagctacccttttacca

SEQ ID NO: 54837 - DNA, 120 bp, Homo sapiens
  misc_feature: 1532 for SV(W|O) and mtDNA
ctgtaatattgaacgtaggtgcgataaataatgggatgaggcaggaatcaaagacagatactgcgacatagggtgctccggctccagcgtctcgcaatgctatcgcgtgcatacccccca

SEQ ID NO: 54838 - DNA, 120 bp, Homo sapiens
  misc_feature: 1532 for SV(W|O) and mtDNA
ctgccataacccaataccaaacgcccctcttcgtctgatccgtcctaatcacagcagtcctacttctcctatctctcccagtcctagctgctggcatcactatactactaacagaccgca

SEQ ID NO: 54839 - DNA, 120 bp, Homo sapiens
  misc_feature: 1532 for SV(W|O) and mtDNA
tctcgcacggactacaaccacgaccaatgatatgaaaaaccatcgttgtatttcaactacaagaacaccaatgaccccaatacgcaaaactaaccccctaataaaattaattaaccactc

SEQ ID NO: 54840 - DNA, 120 bp, Homo sapiens
  misc_feature: 1532 for SV(W|O) and mtDNA
tccaatgcttcactcagccattttacctcacccccactgatgttcgccgaccgttgactattctctacaaaccacaaagacattggaacactatacctattattcggcgcatgagctgga

SEQ ID NO: 54841 - DNA, 120 bp, Homo sapiens
  misc_feature: 1532 for SV(W|O) and mtDNA
gttatgtcatccctcttattaatcatcatcctagccctaagtctggcctatgagtgactacaaaaaggattagactgaaccgaattggtatatagtttaaacaaaacgaatgatttcgac

SEQ ID NO: 54842 - DNA, 120 bp, Homo sapiens
  misc_feature: 1532 for SV(W|O) and mtDNA
gcattggagtaggtttaggttatgtacgtagtctaggccatatgtgttggagattgagactagtagggctaggcccaccgctgcttcgcaggcggcaaagactagtatggcaataggcac

SEQ ID NO: 54843 - DNA, 120 bp, Homo sapiens
  misc_feature: 1532 for SV(W|O) and mtDNA
agaccaagaagttattatctcgaactgacactgagccacaacccaaacaacccagctctccctaagcttcaaactagactacttctccataatattcatccctgtagcattgttcgttac

SEQ ID NO: 54844 - DNA, 120 bp, Homo sapiens
  misc_feature: 1532 for SV(W|O) and mtDNA
ggctttggcaactgactagttcccctaataatcggtgcccccgatatggcgtttccccgcataaacaacataagcttctgactcttacctccctctctcctactcctgctcgcatctgct

SEQ ID NO: 54845 - DNA, 120 bp, Homo sapiens
  misc_feature: 1532 for SV(W|O) and mtDNA
gcttccgtggagtgtggcgagtcagctaaatactttgacgccggtggggatagcgatgattatggtagcggaggtgaaatatgctcgtgtgtctacgtctattcctactgtaaatatatg

SEQ ID NO: 54846 - DNA, 120 bp, Homo sapiens
  misc_feature: 1532 for SV(W|O) and mtDNA
gatgtcctgatccaacatcgaggtcgtaaaccctattgttgatatggactctagaataggattgcgctgttatccctagggtaacttgttccgttggtcaagttattggatcaattgagt

SEQ ID NO: 54847 - DNA, 120 bp, Homo sapiens
  misc_feature: 1532 for SV(W|O) and mtDNA
ctagtataagagatcaggttcgtcctttagtgttgtgtatggttatcatttgttttgaggttagtttgattagtcattgttgggtggtgattagtcggttgttgatgagatatttggagg

SEQ ID NO: 54848 - DNA, 120 bp, Homo sapiens
  misc_feature: 1532 for SV(W|O) and mtDNA
cagttttgttgatttaactgttgaggtttagggctaagcatagtggggtatctaatcccagtttgggtcttagctattgtgtgttcagatatgttaaagccactttcgtagtctattttg

SEQ ID NO: 54849 - DNA, 120 bp, Homo sapiens
  misc_feature: 1532 for SV(W|O) and mtDNA
aaaggttttcatctccggtttacaagactggtgtattagtttatactacaaggacaggcccatttgagtattttgttttcaattagggagatagttggtattaggattaggattgttgtg

SEQ ID NO: 54850 - DNA, 120 bp, Homo sapiens
  misc_feature: 1532 for SV(W|O) and mtDNA
agtttgtgtttaatatttttagttgggtgatgaggaatagtgtaaggagtatgggggtaattatggtgggccatacggtagtatttagttggggcatttcactgtaaagaggtgttggtt

SEQ ID NO: 54851 - DNA, 120 bp, Homo sapiens
  misc_feature: 1531 for SV(W|O) and mtDNA
gggggcatccatatagtcactccaggtttatggagggttcttctactattaggacttttcgctttgaagcgaaggcttctcaaatcatgaaaattattaatattactgctgttagagaaa

SEQ ID NO: 54852 - DNA, 120 bp, Homo sapiens
  misc_feature: 1531 for SV(W|O) and mtDNA
tttatatagaggagacaagtcgtaacatggtaagtgtactggaaagtgcacttggacgaaccagagtgtagcttaacacaaagcacccaacttacacttaggagatttcaacttaacttg

SEQ ID NO: 54853 - DNA, 120 bp, Homo sapiens
  misc_feature: 1531 for SV(W|O) and mtDNA
ttgtataggattgcttgaatggctgctgtgttggcatctgctcgggcgtatcatcaactgatgagcaagaaggatataattcctacgccctctcagccgatgaacagttggaataggttg

SEQ ID NO: 54854 - DNA, 120 bp, Homo sapiens
  misc_feature: 1531 for SV(W|O) and mtDNA
tgaggtaaaatggctgagtgaagcattggactgtaaatctaaagacaggggttaggcctctttttaccagctccgaggtgattttcatattgaattgcaaattcgaagaagcagcttcaa

SEQ ID NO: 54855 - DNA, 120 bp, Homo sapiens
  misc_feature: 1531 for SV(W|O) and mtDNA
taaaacactctttacgccggcttctattgacttgggttaatcgtgtgaccgcggtggctggcacgaaattgaccaaccctggggttagtatagcttagttaaactttcgtttattgctaa

SEQ ID NO: 54856 - DNA, 120 bp, Homo sapiens
  misc_feature: 1531 for SV(W|O) and mtDNA
ttaatagcggctgcaccatcgggatgtcctgatccaacatcgaggtcgtaaaccctattgttgatatggactctagaataggattgcgctgttatccctagggtaacttgttccgttggt

SEQ ID NO: 54857 - DNA, 120 bp, Homo sapiens
  misc_feature: 1531 for SV(W|O) and mtDNA
cctacgccaaaatccatttcactatcatattcatcggcgtaaatctaactttcttcccacaacactttctcggcctatccggaatgccccgacgttactcggactaccccgatgcataca

SEQ ID NO: 54858 - DNA, 120 bp, Homo sapiens
  misc_feature: 1531 for SV(W|O) and mtDNA
ctcgtctggtttcgggggtcttagctttggctctccttgcaaagttatttctagttaattcattatgcagaaggtataggggttagtccttgctatattatgcttggttataatttttca

SEQ ID NO: 54859 - DNA, 120 bp, Homo sapiens
  misc_feature: 1531 for SV(W|O) and mtDNA
tcaaaaaagagtaataaacttcgccttaattttaataatcaacaccctcctagccttactactaataattattacattttgactaccacaactcaacggctacatagaaaaatccacccc

SEQ ID NO: 54860 - DNA, 120 bp, Homo sapiens
  misc_feature: 1531 for SV(W|O) and mtDNA
tacggttgtataggattgcttgaatggctgctgtgttggcatctgctcgggcgtatcatcaactgatgagcaagaaggatataattcctacgccctctcagccgatgaacagttggaata

SEQ ID NO: 54861 - DNA, 120 bp, Homo sapiens
  misc_feature: 1531 for SV(W|O) and mtDNA
cccaataaagctaaaactcacctgagttgtaaaaaactccagttgacacaaaatagactacgaaagtggctttaacatatctgaacacacaatagctaagacccaaactgggattagata

SEQ ID NO: 54862 - DNA, 120 bp, Homo sapiens
  misc_feature: 1531 for SV(W|O) and mtDNA
tagggtttacgacctcgatgttggatcaggacatcccgatggtgcagccgctattaaaggttcgtttgttcaacgattaaagtcctacgtgatctgagttcagaccggagtaatccaggt

SEQ ID NO: 54863 - DNA, 120 bp, Homo sapiens
  misc_feature: 1531 for SV(W|O) and mtDNA
taggctaagcgttttgagctgcattgctgcgtgcttgatgcttgtcccttttgatcgtggtgatttagagggtgaactcactggaacggggatgcttgcatgtgtaatcttactaagagc

SEQ ID NO: 54864 - DNA, 120 bp, Homo sapiens
  misc_feature: 1531 for SV(W|O) and mtDNA
gtttgggattttttaggtagtgggtgttgagcttgaacgctttcttaattggtggctgcttttaggcctactatgggtgttaaattttttactctctctacaaggttttttcctagtgtc

SEQ ID NO: 54865 - DNA, 120 bp, Homo sapiens
  misc_feature: 1531 for SV(W|O) and mtDNA
ggcgcaatagatatagtaccgcaagggaaagatgaaaaattataaccaagcataatatagcaaggactaacccctataccttctgcataatgaattaactagaaataactttgcaaggag

SEQ ID NO: 54866 - DNA, 120 bp, Homo sapiens
  misc_feature: 1531 for SV(W|O) and mtDNA
acagcgcaatcctattctagagtccatatcaacaatagggtttacgacctcgatgttggatcaggacatcccgatggtgcagccgctattaaaggttcgtttgttcaacgattaaagtcc

SEQ ID NO: 54867 - DNA, 120 bp, Homo sapiens
  misc_feature: 1531 for SV(W|O) and mtDNA
acctcgatgttggatcaggacatcccgatggtgcagccgctattaaaggttcgtttgttcaacgattaaagtcctacgtgatctgagttcagaccggagtaatccaggtcggtttctatc

SEQ ID NO: 54868 - DNA, 120 bp, Homo sapiens
  misc_feature: 1531 for SV(W|O) and mtDNA
ctagaccaagaagttattatctcgaactgacactgagccacaacccaaacaacccagctctccctaagcttcaaactagactacttctccataatattcatccctgtagcattgttcgtt

SEQ ID NO: 54869 - DNA, 120 bp, Homo sapiens
  misc_feature: 1531 for SV(W|O) and mtDNA
attcaggttagaatgaggaggtctgcggctaggagtcaataaagtgattggcttagtgggcgaaatattatgctttgttgtttggatatatggaggatggggattattgctaggatgagg

SEQ ID NO: 54870 - DNA, 120 bp, Homo sapiens
  misc_feature: 1531 for SV(W|O) and mtDNA
cagcgcaatcctattctagagtccatatcaacaatagggtttacgacctcgatgttggatcaggacatcccgatggtgcagccgctattaaaggttcgtttgttcaacgattaaagtcct

SEQ ID NO: 54871 - DNA, 120 bp, Homo sapiens
  misc_feature: 1531 for SV(W|O) and mtDNA
caaggacaggcccatttgagtattttgttttcaattagggagatagttggtattaggattaggattgttgtgaagtatagtacggatgctacttgtccaatgatggtaaaagggtagctt

SEQ ID NO: 54872 - DNA, 120 bp, Homo sapiens
  misc_feature: 1531 for SV(W|O) and mtDNA
atttgtaataatcttcttcatagtaatacccatcataatcggaggctttggcaactgactagttcccctaataatcggtgcccccgatatggcgtttccccgcataaacaacataagctt

SEQ ID NO: 54873 - DNA, 120 bp, Homo sapiens
  misc_feature: 1531 for SV(W|O) and mtDNA
accaagaagttattatctcgaactgacactgagccacaacccaaacaacccagctctccctaagcttcaaactagactacttctccataatattcatccctgtagcattgttcgttacat

SEQ ID NO: 54874 - DNA, 120 bp, Homo sapiens
  misc_feature: 1531 for SV(W|O) and mtDNA
atccaacatcgaggtcgtaaaccctattgttgatatggactctagaataggattgcgctgttatccctagggtaacttgttccgttggtcaagttattggatcaattgagtatagtagtt

SEQ ID NO: 54875 - DNA, 120 bp, Homo sapiens
  misc_feature: 1531 for SV(W|O) and mtDNA
aggcgttctggctggttgcctcatcgggtgatgatagccaaggtggggataagtgtggtttcgaagaagatataaaatatgattagttctgtggctgtgaatgttataattaaggagatt

SEQ ID NO: 54876 - DNA, 120 bp, Homo sapiens
  misc_feature: 1530 for SV(W|O) and mtDNA
ttttgactaccacaactcaacggctacatagaaaaatccaccccttacgagtgcggcttcgaccctatatcccccgcccgcgtccctttctccataaaattcttcttagtagctattacc

SEQ ID NO: 54877 - DNA, 120 bp, Homo sapiens
  misc_feature: 1530 for SV(W|O) and mtDNA
ggagttttttacaactcaggtgagttttagctttattggggagggggtgatctaaaacactctttacgccggcttctattgacttgggttaatcgtgtgaccgcggtggctggcacgaaa

SEQ ID NO: 54878 - DNA, 120 bp, Homo sapiens
  misc_feature: 1530 for SV(W|O) and mtDNA
ttactaccagacaaccttagccaaaccatttacccaaataaagtataggcgatagaaattgaaacctggcgcaatagatatagtaccgcaagggaaagatgaaaaattataaccaagcat

SEQ ID NO: 54879 - DNA, 120 bp, Homo sapiens
  misc_feature: 1530 for SV(W|O) and mtDNA
ccctctacacttatcatcttcacaattctaattctactgactatcctagaaatcgctgtcgccttaatccaagcctacgttttcacacttctagtaagcctctacctgcacgacaacaca

SEQ ID NO: 54880 - DNA, 120 bp, Homo sapiens
  misc_feature: 1530 for SV(W|O) and mtDNA
tggcgtaggtttggtctagggtgtagcctgagaataggggaaatcagtgaatgaagcctcctatgatggcaaatacagctcctattgataggacatagtggaagtgggctacaacgtagt

SEQ ID NO: 54881 - DNA, 120 bp, Homo sapiens
  misc_feature: 1530 for SV(W|O) and mtDNA
tagccttactactaataattattacattttgactaccacaactcaacggctacatagaaaaatccaccccttacgagtgcggcttcgaccctatatcccccgcccgcgtccctttctcca

SEQ ID NO: 54882 - DNA, 120 bp, Homo sapiens
  misc_feature: 1530 for SV(W|O) and mtDNA
tagggatgggagggcgatgaggactaggatgatggcgggcaggatagttcagacggtttctatttcctgagcgtctgagatgttagtattagttagttttgttgtgagtgttaggaaaag

SEQ ID NO: 54883 - DNA, 120 bp, Homo sapiens
  misc_feature: 1530 for SV(W|O) and mtDNA
tagagggttctgtgggcaaatttaaagttgaactaagattctatcttggacaaccagctatcaccaggctcggtaggtttgtcgcctctacctataaatcttcccactattttgctacat

SEQ ID NO: 54884 - DNA, 120 bp, Homo sapiens
  misc_feature: 1530 for SV(W|O) and mtDNA
ggcgtaggtttggtctagggtgtagcctgagaataggggaaatcagtgaatgaagcctcctatgatggcaaatacagctcctattgataggacatagtggaagtgggctacaacgtagta

SEQ ID NO: 54885 - DNA, 120 bp, Homo sapiens
  misc_feature: 1530 for SV(W|O) and mtDNA
ccaattgggtatgaggagttcagttatatgtttgggattttttaggtagtgggtgttgagcttgaacgctttcttaattggtggctgcttttaggcctactatgggtgttaaatttttta

SEQ ID NO: 54886 - DNA, 120 bp, Homo sapiens
  misc_feature: 1530 for SV(W|O) and mtDNA
actacgagccacagcttaaaactcaaaggacctggcggtgcttcatatccctctagaggagcctgttctgtaatcgataaaccccgatcaacctcaccacctcttgctcagcctatatac

SEQ ID NO: 54887 - DNA, 120 bp, Homo sapiens
  misc_feature: 1530 for SV(W|O) and mtDNA
ctttcttaattggtggctgcttttaggcctactatgggtgttaaattttttactctctctacaaggttttttcctagtgtccaaagagctgttcctctttggactaacagttaaatttac

SEQ ID NO: 54888 - DNA, 120 bp, Homo sapiens
  misc_feature: 1530 for SV(W|O) and mtDNA
ctcccatattgtaacttactactccggaaaaaaagaaccatttggatacataggtatggtctgagctatgatatcaattggcttcctagggtttatcgtgtgagcacaccatatatttac

SEQ ID NO: 54889 - DNA, 120 bp, Homo sapiens
  misc_feature: 1530 for SV(W|O) and mtDNA
ggggatttagagggttctgtgggcaaatttaaagttgaactaagattctatcttggacaaccagctatcaccaggctcggtaggtttgtcgcctctacctataaatcttcccactatttt

SEQ ID NO: 54890 - DNA, 120 bp, Homo sapiens
  misc_feature: 1530 for SV(W|O) and mtDNA
ggctatcgtagttttctggggtagaaaatgtagcccatttcttgccacctcatgggctacaccttgacctaacgtctttacgtgggtacttgcgcttactttgtagccttcatcagggtt

SEQ ID NO: 54891 - DNA, 120 bp, Homo sapiens
  misc_feature: 1530 for SV(W|O) and mtDNA
ccatcataatcggaggctttggcaactgactagttcccctaataatcggtgcccccgatatggcgtttccccgcataaacaacataagcttctgactcttacctccctctctcctactcc

SEQ ID NO: 54892 - DNA, 120 bp, Homo sapiens
  misc_feature: 1530 for SV(W|O) and mtDNA
gaggctttggcaactgactagttcccctaataatcggtgcccccgatatggcgtttccccgcataaacaacataagcttctgactcttacctccctctctcctactcctgctcgcatctg

SEQ ID NO: 54893 - DNA, 120 bp, Homo sapiens
  misc_feature: 1530 for SV(W|O) and mtDNA
ctaatagttatgtcatccctcttattaatcatcatcctagccctaagtctggcctatgagtgactacaaaaaggattagactgaaccgaattggtatatagtttaaacaaaacgaatgat

SEQ ID NO: 54894 - DNA, 120 bp, Homo sapiens
  misc_feature: 1530 for SV(W|O) and mtDNA
atctgctgcagtgctctgagccctaggattcatctttcttttcaccgtaggtggcctgactggcattgtattagcaaactcatcactagacatcgtactacacgacacgtactacgttgt

SEQ ID NO: 54895 - DNA, 120 bp, Homo sapiens
  misc_feature: 1530 for SV(W|O) and mtDNA
agcagttttgttgatttaactgttgaggtttagggctaagcatagtggggtatctaatcccagtttgggtcttagctattgtgtgttcagatatgttaaagccactttcgtagtctattt

SEQ ID NO: 54896 - DNA, 120 bp, Homo sapiens
  misc_feature: 1529 for SV(W|O) and mtDNA
ttcttaccacaaggcacacctacaccccttatccccatactagttattatcgaaaccatcagcctactcattcaaccaatagccctggccgtacgcctaaccgctaacattactgcaggc

SEQ ID NO: 54897 - DNA, 120 bp, Homo sapiens
  misc_feature: 1529 for SV(W|O) and mtDNA
gccctggccgtacgcctaaccgctaacattactgcaggccacctactcatgcacctaattggaagcgccaccctagcaatatcaaccattaaccttccctctacacttatcatcttcaca

SEQ ID NO: 54898 - DNA, 120 bp, Homo sapiens
  misc_feature: 1529 for SV(W|O) and mtDNA
agcatccccgttccagtgagttcaccctctaaatcaccacgatcaaaagggacaagcatcaagcacgcagcaatgcagctcaaaacgcttagcctagccacacccccacgggaaacagca

SEQ ID NO: 54899 - DNA, 120 bp, Homo sapiens
  misc_feature: 1529 for SV(W|O) and mtDNA
gtatttagctgactcgccacactccacggaagcaatatgaaatgatctgctgcagtgctctgagccctaggattcatctttcttttcaccgtaggtggcctgactggcattgtattagca

SEQ ID NO: 54900 - DNA, 120 bp, Homo sapiens
  misc_feature: 1529 for SV(W|O) and mtDNA
tctaaaacactctttacgccggcttctattgacttgggttaatcgtgtgaccgcggtggctggcacgaaattgaccaaccctggggttagtatagcttagttaaactttcgtttattgct

SEQ ID NO: 54901 - DNA, 120 bp, Homo sapiens
  misc_feature: 1529 for SV(W|O) and mtDNA
tcgggggcaccgattattaggggaactagtcagttgccaaagcctccgattatgatgggtattactatgaagaagattattacaaatgcatgggctgtgacgataacgttgtagatgtgg

SEQ ID NO: 54902 - DNA, 120 bp, Homo sapiens
  misc_feature: 1529 for SV(W|O) and mtDNA
aggaatttgaagtagatagaaaccgacctggattactccggtctgaactcagatcacgtaggactttaatcgttgaacaaacgaacctttaatagcggctgcaccatcgggatgtcctga

SEQ ID NO: 54903 - DNA, 120 bp, Homo sapiens
  misc_feature: 1529 for SV(W|O) and mtDNA
acagctctaagcctccttattcgagccgagctgggccagccaggcaaccttctaggtaacgaccacatctacaacgttatcgtcacagcccatgcatttgtaataatcttcttcatagta

SEQ ID NO: 54904 - DNA, 120 bp, Homo sapiens
  misc_feature: 1529 for SV(W|O) and mtDNA
cctactcatcgcactaatttacactcacaacaccctaggctcactaaacattctactactcactctcactgcccaagaactatcaaactcctgagccaacaacttaatatgactagctta

SEQ ID NO: 54905 - DNA, 120 bp, Homo sapiens
  misc_feature: 1529 for SV(W|O) and mtDNA
aaattttttactctctctacaaggttttttcctagtgtccaaagagctgttcctctttggactaacagttaaatttacaaggggatttagagggttctgtgggcaaatttaaagttgaac

SEQ ID NO: 54906 - DNA, 120 bp, Homo sapiens
  misc_feature: 1529 for SV(W|O) and mtDNA
gtataggattgcttgaatggctgctgtgttggcatctgctcgggcgtatcatcaactgatgagcaagaaggatataattcctacgccctctcagccgatgaacagttggaataggttgtt

SEQ ID NO: 54907 - DNA, 120 bp, Homo sapiens
  misc_feature: 1529 for SV(W|O) and mtDNA
ggtgcatgagtaggtggcctgcagtaatgttagcggttaggcgtacggccagggctattggttgaatgagtaggctgatggtttcgataataactagtatggggataaggggtgtaggtg

SEQ ID NO: 54908 - DNA, 120 bp, Homo sapiens
  misc_feature: 1529 for SV(W|O) and mtDNA
ggcgttctggctggttgcctcatcgggtgatgatagccaaggtggggataagtgtggtttcgaagaagatataaaatatgattagttctgtggctgtgaatgttataattaaggagattt

SEQ ID NO: 54909 - DNA, 120 bp, Homo sapiens
  misc_feature: 1529 for SV(W|O) and mtDNA
ggcccaccgctgcttcgcaggcggcaaagactagtatggcaataggcacaatattggctaagagggagtgggtgttgagggttatgagagtagctataatgaacagcgatagtattattc

SEQ ID NO: 54910 - DNA, 120 bp, Homo sapiens
  misc_feature: 1529 for SV(W|O) and mtDNA
ggatgtcctgatccaacatcgaggtcgtaaaccctattgttgatatggactctagaataggattgcgctgttatccctagggtaacttgttccgttggtcaagttattggatcaattgag

SEQ ID NO: 54911 - DNA, 120 bp, Homo sapiens
  misc_feature: 1529 for SV(W|O) and mtDNA
cgatgtttcaggtttctgagtagagaaatgatccgtaatataggcctcgcccgatgtgtaggaagaggcagataaagaatattgaggcgccattggcgtgaaggtagcggatgattcagc

SEQ ID NO: 54912 - DNA, 120 bp, Homo sapiens
  misc_feature: 1529 for SV(W|O) and mtDNA
ctttggcaactgactagttcccctaataatcggtgcccccgatatggcgtttccccgcataaacaacataagcttctgactcttacctccctctctcctactcctgctcgcatctgctat

SEQ ID NO: 54913 - DNA, 120 bp, Homo sapiens
  misc_feature: 1529 for SV(W|O) and mtDNA
acgatcaaaagggacaagcatcaagcacgcagcaatgcagctcaaaacgcttagcctagccacacccccacgggaaacagcagtgattaacctttagcaataaacgaaagtttaactaag

SEQ ID NO: 54914 - DNA, 120 bp, Homo sapiens
  misc_feature: 1529 for SV(W|O) and mtDNA
atagggtttacgacctcgatgttggatcaggacatcccgatggtgcagccgctattaaaggttcgtttgttcaacgattaaagtcctacgtgatctgagttcagaccggagtaatccagg

SEQ ID NO: 54915 - DNA, 120 bp, Homo sapiens
  misc_feature: 1529 for SV(W|O) and mtDNA
atttttaatgcaggtttggtagtttaggacctgtgggtttgttaggtactgtttgcattaataaattaaagctccatagggtcttctcgtcttgctgtgttatgcccgcctcttcacggg

SEQ ID NO: 54916 - DNA, 120 bp, Homo sapiens
  misc_feature: 1528 for SV(W|O) and mtDNA
ggggaaacgccatatcgggggcaccgattattaggggaactagtcagttgccaaagcctccgattatgatgggtattactatgaagaagattattacaaatgcatgggctgtgacgataa

SEQ ID NO: 54917 - DNA, 120 bp, Homo sapiens
  misc_feature: 1528 for SV(W|O) and mtDNA
cagctctaagcctccttattcgagccgagctgggccagccaggcaaccttctaggtaacgaccacatctacaacgttatcgtcacagcccatgcatttgtaataatcttcttcatagtaa

SEQ ID NO: 54918 - DNA, 120 bp, Homo sapiens
  misc_feature: 1528 for SV(W|O) and mtDNA
tggcaagccaacgccacttatccagtgaaccactatcacgaaaaaaactctacctctctatactaatctccctacaaatctccttaattataacattcacagccacagaactaatcatat

SEQ ID NO: 54919 - DNA, 120 bp, Homo sapiens
  misc_feature: 1528 for SV(W|O) and mtDNA
tggaaaaaggttttcatctccggtttacaagactggtgtattagtttatactacaaggacaggcccatttgagtattttgttttcaattagggagatagttggtattaggattaggattg

SEQ ID NO: 54920 - DNA, 120 bp, Homo sapiens
  misc_feature: 1528 for SV(W|O) and mtDNA
aactgatgagcaagaaggatataattcctacgccctctcagccgatgaacagttggaataggttgttagcggtaactaagattagtatggtaattaggaagatgagtagatatttgaaga

SEQ ID NO: 54921 - DNA, 120 bp, Homo sapiens
  misc_feature: 1528 for SV(W|O) and mtDNA
tcatagctcagaccatacctatgtatccaaatggttctttttttccggagtagtaagttacaatatgggagattattccgaagcctggtaggataagaatataaacttcagggtgaccga

SEQ ID NO: 54922 - DNA, 120 bp, Homo sapiens
  misc_feature: 1528 for SV(W|O) and mtDNA
tccaaacaacaaagcataatatttcgcccactaagccaatcactttattgactcctagccgcagacctcctcattctaacctgaatcggaggacaaccagtaagctacccttttaccatc

SEQ ID NO: 54923 - DNA, 120 bp, Homo sapiens
  misc_feature: 1528 for SV(W|O) and mtDNA
agaacactacgagccacagcttaaaactcaaaggacctggcggtgcttcatatccctctagaggagcctgttctgtaatcgataaaccccgatcaacctcaccacctcttgctcagccta

SEQ ID NO: 54924 - DNA, 120 bp, Homo sapiens
  misc_feature: 1528 for SV(W|O) and mtDNA
ctaaaacactctttacgccggcttctattgacttgggttaatcgtgtgaccgcggtggctggcacgaaattgaccaaccctggggttagtatagcttagttaaactttcgtttattgcta

SEQ ID NO: 54925 - DNA, 120 bp, Homo sapiens
  misc_feature: 1528 for SV(W|O) and mtDNA
acatcctcattactattctgcctagcaaactcaaactacgaacgcactcacagtcgcatcataatcctctctcaaggacttcaaactctactcccactaatagctttttgatgacttcta

SEQ ID NO: 54926 - DNA, 120 bp, Homo sapiens
  misc_feature: 1528 for SV(W|O) and mtDNA
gtgacgggcggtgtgtacgcgcttcagggccctgttcaactaagcactctactctcagtttactgctaaatccaccttcgacccttaagtttcataagggctatcgtagttttctggggt

SEQ ID NO: 54927 - DNA, 120 bp, Homo sapiens
  misc_feature: 1528 for SV(W|O) and mtDNA
agtccatatcaacaatagggtttacgacctcgatgttggatcaggacatcccgatggtgcagccgctattaaaggttcgtttgttcaacgattaaagtcctacgtgatctgagttcagac

SEQ ID NO: 54928 - DNA, 120 bp, Homo sapiens
  misc_feature: 1528 for SV(W|O) and mtDNA
gtactgctcggaggttgggttctgctccgaggtcgccccaaccgaaatttttaatgcaggtttggtagtttaggacctgtgggtttgttaggtactgtttgcattaataaattaaagctc

SEQ ID NO: 54929 - DNA, 120 bp, Homo sapiens
  misc_feature: 1528 for SV(W|O) and mtDNA
gctatcatcacccgatgaggcaaccagccagaacgcctgaacgcaggcacatacttcctattctacaccctagtaggctcccttcccctactcatcgcactaatttacactcacaacacc

SEQ ID NO: 54930 - DNA, 120 bp, Homo sapiens
  misc_feature: 1528 for SV(W|O) and mtDNA
cccttacacaaaatgacatcaaaaaaatcgtagccttctccacttcaagtcaactaggactcataatagttacaatcggcatcaaccaaccacacctagcattcctgcacatctgcaccc

SEQ ID NO: 54931 - DNA, 120 bp, Homo sapiens
  misc_feature: 1528 for SV(W|O) and mtDNA
caatagatatagtaccgcaagggaaagatgaaaaattataaccaagcataatatagcaaggactaacccctataccttctgcataatgaattaactagaaataactttgcaaggagagcc

SEQ ID NO: 54932 - DNA, 120 bp, Homo sapiens
  misc_feature: 1528 for SV(W|O) and mtDNA
gctgactcgccacactccacggaagcaatatgaaatgatctgctgcagtgctctgagccctaggattcatctttcttttcaccgtaggtggcctgactggcattgtattagcaaactcat

SEQ ID NO: 54933 - DNA, 120 bp, Homo sapiens
  misc_feature: 1528 for SV(W|O) and mtDNA
cccatcataatcggaggctttggcaactgactagttcccctaataatcggtgcccccgatatggcgtttccccgcataaacaacataagcttctgactcttacctccctctctcctactc

SEQ ID NO: 54934 - DNA, 120 bp, Homo sapiens
  misc_feature: 1528 for SV(W|O) and mtDNA
cttcttaccacaaggcacacctacaccccttatccccatactagttattatcgaaaccatcagcctactcattcaaccaatagccctggccgtacgcctaaccgctaacattactgcagg

SEQ ID NO: 54935 - DNA, 120 bp, Homo sapiens
  misc_feature: 1528 for SV(W|O) and mtDNA
ccaatgcttcactcagccattttacctcacccccactgatgttcgccgaccgttgactattctctacaaaccacaaagacattggaacactatacctattattcggcgcatgagctggag

SEQ ID NO: 54936 - DNA, 120 bp, Homo sapiens
  misc_feature: 1528 for SV(W|O) and mtDNA
ccccaataaagctaaaactcacctgagttgtaaaaaactccagttgacacaaaatagactacgaaagtggctttaacatatctgaacacacaatagctaagacccaaactgggattagat

SEQ ID NO: 54937 - DNA, 120 bp, Homo sapiens
  misc_feature: 1528 for SV(W|O) and mtDNA
ccactaatagttatgtcatccctcttattaatcatcatcctagccctaagtctggcctatgagtgactacaaaaaggattagactgaaccgaattggtatatagtttaaacaaaacgaat

SEQ ID NO: 54938 - DNA, 120 bp, Homo sapiens
  misc_feature: 1528 for SV(W|O) and mtDNA
aaattatgtgttttttggaaagtcatgtcagtggtagtaatataattgttgggacgattagttttagcattggagtaggtttaggttatgtacgtagtctaggccatatgtgttggagat

SEQ ID NO: 54939 - DNA, 120 bp, Homo sapiens
  misc_feature: 1527 for SV(W|O) and mtDNA
tttctaccccagaaaactacgatagcccttatgaaacttaagggtcgaaggtggatttagcagtaaactgagagtagagtgcttagttgaacagggccctgaagcgcgtacacaccgccc

SEQ ID NO: 54940 - DNA, 120 bp, Homo sapiens
  misc_feature: 1527 for SV(W|O) and mtDNA
ttgacctgcccgtgaagaggcgggcataacacagcaagacgagaagaccctatggagctttaatttattaatgcaaacagtacctaacaaacccacaggtcctaaactaccaaacctgca

SEQ ID NO: 54941 - DNA, 120 bp, Homo sapiens
  misc_feature: 1527 for SV(W|O) and mtDNA
ttcaaaaaagagtaataaacttcgccttaattttaataatcaacaccctcctagccttactactaataattattacattttgactaccacaactcaacggctacatagaaaaatccaccc

SEQ ID NO: 54942 - DNA, 120 bp, Homo sapiens
  misc_feature: 1527 for SV(W|O) and mtDNA
ttatttgatctagaaattgccctccttttacccctaccatgagccctacaaacaactaacctgccactaatagttatgtcatccctcttattaatcatcatcctagccctaagtctggcc

SEQ ID NO: 54943 - DNA, 120 bp, Homo sapiens
  misc_feature: 1527 for SV(W|O) and mtDNA
gctaagcgttttgagctgcattgctgcgtgcttgatgcttgtcccttttgatcgtggtgatttagagggtgaactcactggaacggggatgcttgcatgtgtaatcttactaagagctaa

SEQ ID NO: 54944 - DNA, 120 bp, Homo sapiens
  misc_feature: 1527 for SV(W|O) and mtDNA
gagcttgaacgctttcttaattggtggctgcttttaggcctactatgggtgttaaattttttactctctctacaaggttttttcctagtgtccaaagagctgttcctctttggactaaca

SEQ ID NO: 54945 - DNA, 120 bp, Homo sapiens
  misc_feature: 1527 for SV(W|O) and mtDNA
tgtataggattgcttgaatggctgctgtgttggcatctgctcgggcgtatcatcaactgatgagcaagaaggatataattcctacgccctctcagccgatgaacagttggaataggttgt

SEQ ID NO: 54946 - DNA, 120 bp, Homo sapiens
  misc_feature: 1527 for SV(W|O) and mtDNA
tgcttccgtggagtgtggcgagtcagctaaatactttgacgccggtggggatagcgatgattatggtagcggaggtgaaatatgctcgtgtgtctacgtctattcctactgtaaatatat

SEQ ID NO: 54947 - DNA, 120 bp, Homo sapiens
  misc_feature: 1527 for SV(W|O) and mtDNA
aagatgaaaaattataaccaagcataatatagcaaggactaacccctataccttctgcataatgaattaactagaaataactttgcaaggagagccaaagctaagacccccgaaaccaga

SEQ ID NO: 54948 - DNA, 120 bp, Homo sapiens
  misc_feature: 1527 for SV(W|O) and mtDNA
tcctagaaatcgctgtcgccttaatccaagcctacgttttcacacttctagtaagcctctacctgcacgacaacacataatgacccaccaatcacatgcctatcatatagtaaaacccag

SEQ ID NO: 54949 - DNA, 120 bp, Homo sapiens
  misc_feature: 1527 for SV(W|O) and mtDNA
tcaccctgaagtttatattcttatcctaccaggcttcggaataatctcccatattgtaacttactactccggaaaaaaagaaccatttggatacataggtatggtctgagctatgatatc

SEQ ID NO: 54950 - DNA, 120 bp, Homo sapiens
  misc_feature: 1527 for SV(W|O) and mtDNA
atggcaagccaacgccacttatccagtgaaccactatcacgaaaaaaactctacctctctatactaatctccctacaaatctccttaattataacattcacagccacagaactaatcata

SEQ ID NO: 54951 - DNA, 120 bp, Homo sapiens
  misc_feature: 1527 for SV(W|O) and mtDNA
gctttggcaactgactagttcccctaataatcggtgcccccgatatggcgtttccccgcataaacaacataagcttctgactcttacctccctctctcctactcctgctcgcatctgcta

SEQ ID NO: 54952 - DNA, 120 bp, Homo sapiens
  misc_feature: 1527 for SV(W|O) and mtDNA
tagaaatcgctgtcgccttaatccaagcctacgttttcacacttctagtaagcctctacctgcacgacaacacataatgacccaccaatcacatgcctatcatatagtaaaacccagccc

SEQ ID NO: 54953 - DNA, 120 bp, Homo sapiens
  misc_feature: 1527 for SV(W|O) and mtDNA
taatataaatagttaaattaagaatggttatgttagggttgtacggtagaactgctattattcatcctatgtgggtaattgaggagtatgctaagattttgcgtagctgggtttggttta

SEQ ID NO: 54954 - DNA, 120 bp, Homo sapiens
  misc_feature: 1527 for SV(W|O) and mtDNA
attctcgcacggactacaaccacgaccaatgatatgaaaaaccatcgttgtatttcaactacaagaacaccaatgaccccaatacgcaaaactaaccccctaataaaattaattaaccac

SEQ ID NO: 54955 - DNA, 120 bp, Homo sapiens
  misc_feature: 1527 for SV(W|O) and mtDNA
gtattagaaaaaccatttcataactttgtcaaagttaaattataggctaaatcctatatatcttaatggcacatgcagcgcaagtaggtctacaagacgctacttcccctatcatagaag

SEQ ID NO: 54956 - DNA, 120 bp, Homo sapiens
  misc_feature: 1527 for SV(W|O) and mtDNA
gtaggtttaggttatgtacgtagtctaggccatatgtgttggagattgagactagtagggctaggcccaccgctgcttcgcaggcggcaaagactagtatggcaataggcacaatattgg

SEQ ID NO: 54957 - DNA, 120 bp, Homo sapiens
  misc_feature: 1527 for SV(W|O) and mtDNA
gaaattgacctgcccgtgaagaggcgggcataacacagcaagacgagaagaccctatggagctttaatttattaatgcaaacagtacctaacaaacccacaggtcctaaactaccaaacc

SEQ ID NO: 54958 - DNA, 120 bp, Homo sapiens
  misc_feature: 1527 for SV(W|O) and mtDNA
ccagtgaaattgacctgcccgtgaagaggcgggcataacacagcaagacgagaagaccctatggagctttaatttattaatgcaaacagtacctaacaaacccacaggtcctaaactacc

SEQ ID NO: 54959 - DNA, 120 bp, Homo sapiens
  misc_feature: 1527 for SV(W|O) and mtDNA
ctactaataattattacattttgactaccacaactcaacggctacatagaaaaatccaccccttacgagtgcggcttcgaccctatatcccccgcccgcgtccctttctccataaaattc

SEQ ID NO: 54960 - DNA, 120 bp, Homo sapiens
  misc_feature: 1527 for SV(W|O) and mtDNA
agaagtgagatggtaaatgctagtataatatttatgtaaatgaggggcatttggtaaatatgattatcataatttaatgagtcgaaatcattcgttttgtttaaactatataccaattcg

SEQ ID NO: 54961 - DNA, 120 bp, Homo sapiens
  misc_feature: 1527 for SV(W|O) and mtDNA
ccaagaagttattatctcgaactgacactgagccacaacccaaacaacccagctctccctaagcttcaaactagactacttctccataatattcatccctgtagcattgttcgttacatg

SEQ ID NO: 54962 - DNA, 120 bp, Homo sapiens
  misc_feature: 1527 for SV(W|O) and mtDNA
atccaaacaacaaagcataatatttcgcccactaagccaatcactttattgactcctagccgcagacctcctcattctaacctgaatcggaggacaaccagtaagctacccttttaccat

SEQ ID NO: 54963 - DNA, 120 bp, Homo sapiens
  misc_feature: 1526 for SV(W|O) and mtDNA
ttccgtggagtgtggcgagtcagctaaatactttgacgccggtggggatagcgatgattatggtagcggaggtgaaatatgctcgtgtgtctacgtctattcctactgtaaatatatggt

SEQ ID NO: 54964 - DNA, 120 bp, Homo sapiens
  misc_feature: 1526 for SV(W|O) and mtDNA
tgttccttaaatagggacctgtatgaatggctccacgagggttcagctgtctcttacttttaaccagtgaaattgacctgcccgtgaagaggcgggcataacacagcaagacgagaagac

SEQ ID NO: 54965 - DNA, 120 bp, Homo sapiens
  misc_feature: 1526 for SV(W|O) and mtDNA
acaatgctacagggatgaatattatggagaagtagtctagtttgaagcttagggagagctgggttgtttgggttgtggctcagtgtcagttcgagataataacttcttggtctaggcaca

SEQ ID NO: 54966 - DNA, 120 bp, Homo sapiens
  misc_feature: 1526 for SV(W|O) and mtDNA
actcatgcccccatgtctaacaacatggctttctcaacttttaaaggataacagctatccattggtcttaggccccaaaaattttggtgcaactccaaataaaagtaataaccatgcaca

SEQ ID NO: 54967 - DNA, 120 bp, Homo sapiens
  misc_feature: 1526 for SV(W|O) and mtDNA
gctcacacctcatatcctccctactatgcctagaaggaataatactatcgctgttcattatagctactctcataaccctcaacacccactccctcttagccaatattgtgcctattgcca

SEQ ID NO: 54968 - DNA, 120 bp, Homo sapiens
  misc_feature: 1526 for SV(W|O) and mtDNA
aggagtatcaatcacctgagctcaccatagtctaatagaaaacaaccgaaaccaaataattcaagcactgcttattacaattttactgggtctctattttaccctcctacaagcctcaga

SEQ ID NO: 54969 - DNA, 120 bp, Homo sapiens
  misc_feature: 1526 for SV(W|O) and mtDNA
caaattatgtgttttttggaaagtcatgtcagtggtagtaatataattgttgggacgattagttttagcattggagtaggtttaggttatgtacgtagtctaggccatatgtgttggaga

SEQ ID NO: 54970 - DNA, 120 bp, Homo sapiens
  misc_feature: 1526 for SV(W|O) and mtDNA
tcgatgttggatcaggacatcccgatggtgcagccgctattaaaggttcgtttgttcaacgattaaagtcctacgtgatctgagttcagaccggagtaatccaggtcggtttctatctac

SEQ ID NO: 54971 - DNA, 120 bp, Homo sapiens
  misc_feature: 1526 for SV(W|O) and mtDNA
tcaaattatgtgttttttggaaagtcatgtcagtggtagtaatataattgttgggacgattagttttagcattggagtaggtttaggttatgtacgtagtctaggccatatgtgttggag

SEQ ID NO: 54972 - DNA, 120 bp, Homo sapiens
  misc_feature: 1526 for SV(W|O) and mtDNA
ctttagtgttgtgtatggttatcatttgttttgaggttagtttgattagtcattgttgggtggtgattagtcggttgttgatgagatatttggaggtggggatcaatagagggggaaata

SEQ ID NO: 54973 - DNA, 120 bp, Homo sapiens
  misc_feature: 1526 for SV(W|O) and mtDNA
taccagacaaccttagccaaaccatttacccaaataaagtataggcgatagaaattgaaacctggcgcaatagatatagtaccgcaagggaaagatgaaaaattataaccaagcataata

SEQ ID NO: 54974 - DNA, 120 bp, Homo sapiens
  misc_feature: 1526 for SV(W|O) and mtDNA
tagtaccgttaacttccaattaactagttttgacaacattcaaaaaagagtaataaacttcgccttaattttaataatcaacaccctcctagccttactactaataattattacattttg

SEQ ID NO: 54975 - DNA, 120 bp, Homo sapiens
  misc_feature: 1526 for SV(W|O) and mtDNA
tacgacctcgatgttggatcaggacatcccgatggtgcagccgctattaaaggttcgtttgttcaacgattaaagtcctacgtgatctgagttcagaccggagtaatccaggtcggtttc

SEQ ID NO: 54976 - DNA, 120 bp, Homo sapiens
  misc_feature: 1526 for SV(W|O) and mtDNA
caggaggataatgccgatgtttcaggtttctgagtagagaaatgatccgtaatataggcctcgcccgatgtgtaggaagaggcagataaagaatattgaggcgccattggcgtgaaggta

SEQ ID NO: 54977 - DNA, 120 bp, Homo sapiens
  misc_feature: 1526 for SV(W|O) and mtDNA
gtaagtgtactggaaagtgcacttggacgaaccagagtgtagcttaacacaaagcacccaacttacacttaggagatttcaacttaacttgaccgctctgagctaaacctagccccaaac

SEQ ID NO: 54978 - DNA, 120 bp, Homo sapiens
  misc_feature: 1526 for SV(W|O) and mtDNA
gcgtaggtttggtctagggtgtagcctgagaataggggaaatcagtgaatgaagcctcctatgatggcaaatacagctcctattgataggacatagtggaagtgggctacaacgtagtac

SEQ ID NO: 54979 - DNA, 120 bp, Homo sapiens
  misc_feature: 1526 for SV(W|O) and mtDNA
attaccgggttttcctcttgtaaatatagtttaaccaaaacatcagattgtgaatctgacaacagaggcttacgaccccttatttaccgagaaagctcacaagaactgctaactcatgcc

SEQ ID NO: 54980 - DNA, 120 bp, Homo sapiens
  misc_feature: 1526 for SV(W|O) and mtDNA
gctgaagatggcggtatataggctgagcaagaggtggtgaggttgatcggggtttatcgattacagaacaggctcctctagagggatatgaagcaccgccaggtcctttgagttttaagc

SEQ ID NO: 54981 - DNA, 120 bp, Homo sapiens
  misc_feature: 1526 for SV(W|O) and mtDNA
agtatttagctgactcgccacactccacggaagcaatatgaaatgatctgctgcagtgctctgagccctaggattcatctttcttttcaccgtaggtggcctgactggcattgtattagc

SEQ ID NO: 54982 - DNA, 120 bp, Homo sapiens
  misc_feature: 1526 for SV(W|O) and mtDNA
ctagggtttatcgtgtgagcacaccatatatttacagtaggaatagacgtagacacacgagcatatttcacctccgctaccataatcatcgctatccccaccggcgtcaaagtatttagc

SEQ ID NO: 54983 - DNA, 120 bp, Homo sapiens
  misc_feature: 1526 for SV(W|O) and mtDNA
caaccaatagccctggccgtacgcctaaccgctaacattactgcaggccacctactcatgcacctaattggaagcgccaccctagcaatatcaaccattaaccttccctctacacttatc

SEQ ID NO: 54984 - DNA, 120 bp, Homo sapiens
  misc_feature: 1526 for SV(W|O) and mtDNA
ctgaactcagatcacgtaggactttaatcgttgaacaaacgaacctttaatagcggctgcaccatcgggatgtcctgatccaacatcgaggtcgtaaaccctattgttgatatggactct

SEQ ID NO: 54985 - DNA, 120 bp, Homo sapiens
  misc_feature: 1526 for SV(W|O) and mtDNA
agggtagcttactggttgtcctccgattcaggttagaatgaggaggtctgcggctaggagtcaataaagtgattggcttagtgggcgaaatattatgctttgttgtttggatatatggag

SEQ ID NO: 54986 - DNA, 120 bp, Homo sapiens
  misc_feature: 1526 for SV(W|O) and mtDNA
cgatgttggatcaggacatcccgatggtgcagccgctattaaaggttcgtttgttcaacgattaaagtcctacgtgatctgagttcagaccggagtaatccaggtcggtttctatctact

SEQ ID NO: 54987 - DNA, 120 bp, Homo sapiens
  misc_feature: 1526 for SV(W|O) and mtDNA
agctctaagcctccttattcgagccgagctgggccagccaggcaaccttctaggtaacgaccacatctacaacgttatcgtcacagcccatgcatttgtaataatcttcttcatagtaat

SEQ ID NO: 54988 - DNA, 120 bp, Homo sapiens
  misc_feature: 1526 for SV(W|O) and mtDNA
aaaaatgattaaggatactagtataagagatcaggttcgtcctttagtgttgtgtatggttatcatttgttttgaggttagtttgattagtcattgttgggtggtgattagtcggttgtt

SEQ ID NO: 54989 - DNA, 120 bp, Homo sapiens
  misc_feature: 1525 for SV(W|O) and mtDNA
caactatctccctaattgaaaacaaaatactcaaatgggcctgtccttgtagtataaactaatacaccagtcttgtaaaccggagatgaaaacctttttccaaggacaaatcagagaaaa

SEQ ID NO: 54990 - DNA, 120 bp, Homo sapiens
  misc_feature: 1525 for SV(W|O) and mtDNA
tttggagttgcagttgatgtgtgatagttgagggttgattgctgtacttgcttgtaagcatggggagggggttttgatgtggattgggtttttatgtactacaggtggtcaagtatttat

SEQ ID NO: 54991 - DNA, 120 bp, Homo sapiens
  misc_feature: 1525 for SV(W|O) and mtDNA
ttaccaaaaacatcacctctagcatcaccagtattagaggcaccgcctgcccagtgacacatgtttaacggccgcggtaccctaaccgtgcaaaggtagcataatcacttgttccttaaa

SEQ ID NO: 54992 - DNA, 120 bp, Homo sapiens
  misc_feature: 1525 for SV(W|O) and mtDNA
tgtaataatcttcttcatagtaatacccatcataatcggaggctttggcaactgactagttcccctaataatcggtgcccccgatatggcgtttccccgcataaacaacataagcttctg

SEQ ID NO: 54993 - DNA, 120 bp, Homo sapiens
  misc_feature: 1525 for SV(W|O) and mtDNA
caccctgaagtttatattcttatcctaccaggcttcggaataatctcccatattgtaacttactactccggaaaaaaagaaccatttggatacataggtatggtctgagctatgatatca

SEQ ID NO: 54994 - DNA, 120 bp, Homo sapiens
  misc_feature: 1525 for SV(W|O) and mtDNA
gaccttactttaggatggggtgtgataggtggcacggagaattttggattctcagggatgggttcgattctcatagtcctagaaataagggggtttaagctcctattatttactctatca

SEQ ID NO: 54995 - DNA, 120 bp, Homo sapiens
  misc_feature: 1525 for SV(W|O) and mtDNA
cacggactacaaccacgaccaatgatatgaaaaaccatcgttgtatttcaactacaagaacaccaatgaccccaatacgcaaaactaaccccctaataaaattaattaaccactcattca

SEQ ID NO: 54996 - DNA, 120 bp, Homo sapiens
  misc_feature: 1525 for SV(W|O) and mtDNA
gtgaggtaaaatggctgagtgaagcattggactgtaaatctaaagacaggggttaggcctctttttaccagctccgaggtgattttcatattgaattgcaaattcgaagaagcagcttca

SEQ ID NO: 54997 - DNA, 120 bp, Homo sapiens
  misc_feature: 1525 for SV(W|O) and mtDNA
gcgcaatagatatagtaccgcaagggaaagatgaaaaattataaccaagcataatatagcaaggactaacccctataccttctgcataatgaattaactagaaataactttgcaaggaga

SEQ ID NO: 54998 - DNA, 120 bp, Homo sapiens
  misc_feature: 1525 for SV(W|O) and mtDNA
cgtagttttctggggtagaaaatgtagcccatttcttgccacctcatgggctacaccttgacctaacgtctttacgtgggtacttgcgcttactttgtagccttcatcagggtttgctga

SEQ ID NO: 54999 - DNA, 120 bp, Homo sapiens
  misc_feature: 1525 for SV(W|O) and mtDNA
aaccagtgaaattgacctgcccgtgaagaggcgggcataacacagcaagacgagaagaccctatggagctttaatttattaatgcaaacagtacctaacaaacccacaggtcctaaacta

SEQ ID NO: 55000 - DNA, 120 bp, Homo sapiens
  misc_feature: 1525 for SV(W|O) and mtDNA
tagttatgtcatccctcttattaatcatcatcctagccctaagtctggcctatgagtgactacaaaaaggattagactgaaccgaattggtatatagtttaaacaaaacgaatgatttcg

SEQ ID NO: 55001 - DNA, 120 bp, Homo sapiens
  misc_feature: 1525 for SV(W|O) and mtDNA
taaccattcttaatttaactatttatattatcctaactactaccgcattcctactactcaacttaaactccagcaccacgaccctactactatctcgcacctgaaacaagctaacatgac

SEQ ID NO: 55002 - DNA, 120 bp, Homo sapiens
  misc_feature: 1525 for SV(W|O) and mtDNA
ctgatgagcaagaaggatataattcctacgccctctcagccgatgaacagttggaataggttgttagcggtaactaagattagtatggtaattaggaagatgagtagatatttgaagaac

SEQ ID NO: 55003 - DNA, 120 bp, Homo sapiens
  misc_feature: 1525 for SV(W|O) and mtDNA
gtatctaatcccagtttgggtcttagctattgtgtgttcagatatgttaaagccactttcgtagtctattttgtgtcaactggagttttttacaactcaggtgagttttagctttattgg

SEQ ID NO: 55004 - DNA, 120 bp, Homo sapiens
  misc_feature: 1525 for SV(W|O) and mtDNA
ccaacacctctttacagtgaaatgccccaactaaatactaccgtatggcccaccataattacccccatactccttacactattcctcatcacccaactaaaaatattaaacacaaactac

SEQ ID NO: 55005 - DNA, 120 bp, Homo sapiens
  misc_feature: 1525 for SV(W|O) and mtDNA
ccagaacactacgagccacagcttaaaactcaaaggacctggcggtgcttcatatccctctagaggagcctgttctgtaatcgataaaccccgatcaacctcaccacctcttgctcagcc

SEQ ID NO: 55006 - DNA, 120 bp, Homo sapiens
  misc_feature: 1525 for SV(W|O) and mtDNA
cgagccacagcttaaaactcaaaggacctggcggtgcttcatatccctctagaggagcctgttctgtaatcgataaaccccgatcaacctcaccacctcttgctcagcctatataccgcc

SEQ ID NO: 55007 - DNA, 120 bp, Homo sapiens
  misc_feature: 1525 for SV(W|O) and mtDNA
gcttacatcctcattactattctgcctagcaaactcaaactacgaacgcactcacagtcgcatcataatcctctctcaaggacttcaaactctactcccactaatagctttttgatgact

SEQ ID NO: 55008 - DNA, 120 bp, Homo sapiens
  misc_feature: 1525 for SV(W|O) and mtDNA
gcccatttgagtattttgttttcaattagggagatagttggtattaggattaggattgttgtgaagtatagtacggatgctacttgtccaatgatggtaaaagggtagcttactggttgt

SEQ ID NO: 55009 - DNA, 120 bp, Homo sapiens
  misc_feature: 1525 for SV(W|O) and mtDNA
cttggaaaaaggttttcatctccggtttacaagactggtgtattagtttatactacaaggacaggcccatttgagtattttgttttcaattagggagatagttggtattaggattaggat

SEQ ID NO: 55010 - DNA, 120 bp, Homo sapiens
  misc_feature: 1525 for SV(W|O) and mtDNA
atgcggggaaacgccatatcgggggcaccgattattaggggaactagtcagttgccaaagcctccgattatgatgggtattactatgaagaagattattacaaatgcatgggctgtgacg

SEQ ID NO: 55011 - DNA, 120 bp, Homo sapiens
  misc_feature: 1525 for SV(W|O) and mtDNA
agggatgggagggcgatgaggactaggatgatggcgggcaggatagttcagacggtttctatttcctgagcgtctgagatgttagtattagttagttttgttgtgagtgttaggaaaagg

SEQ ID NO: 55012 - DNA, 120 bp, Homo sapiens
  misc_feature: 1524 for SV(W|O) and mtDNA
ttttggcgtaggtttggtctagggtgtagcctgagaataggggaaatcagtgaatgaagcctcctatgatggcaaatacagctcctattgataggacatagtggaagtgggctacaacgt

SEQ ID NO: 55013 - DNA, 120 bp, Homo sapiens
  misc_feature: 1524 for SV(W|O) and mtDNA
tttgtgtttaatatttttagttgggtgatgaggaatagtgtaaggagtatgggggtaattatggtgggccatacggtagtatttagttggggcatttcactgtaaagaggtgttggttct

SEQ ID NO: 55014 - DNA, 120 bp, Homo sapiens
  misc_feature: 1524 for SV(W|O) and mtDNA
ggtaagtgtactggaaagtgcacttggacgaaccagagtgtagcttaacacaaagcacccaacttacacttaggagatttcaacttaacttgaccgctctgagctaaacctagccccaaa

SEQ ID NO: 55015 - DNA, 120 bp, Homo sapiens
  misc_feature: 1524 for SV(W|O) and mtDNA
tttggcgtaggtttggtctagggtgtagcctgagaataggggaaatcagtgaatgaagcctcctatgatggcaaatacagctcctattgataggacatagtggaagtgggctacaacgta

SEQ ID NO: 55016 - DNA, 120 bp, Homo sapiens
  misc_feature: 1524 for SV(W|O) and mtDNA
gggtcgaaggtggatttagcagtaaactgagagtagagtgcttagttgaacagggccctgaagcgcgtacacaccgcccgtcaccctcctcaagtatacttcaaaggacatttaactaaa

SEQ ID NO: 55017 - DNA, 120 bp, Homo sapiens
  misc_feature: 1524 for SV(W|O) and mtDNA
gtttaatatttttagttgggtgatgaggaatagtgtaaggagtatgggggtaattatggtgggccatacggtagtatttagttggggcatttcactgtaaagaggtgttggttctcttaa

SEQ ID NO: 55018 - DNA, 120 bp, Homo sapiens
  misc_feature: 1524 for SV(W|O) and mtDNA
actggaaagtgcacttggacgaaccagagtgtagcttaacacaaagcacccaacttacacttaggagatttcaacttaacttgaccgctctgagctaaacctagccccaaacccactcca

SEQ ID NO: 55019 - DNA, 120 bp, Homo sapiens
  misc_feature: 1524 for SV(W|O) and mtDNA
tatgttcgcctgtaatattgaacgtaggtgcgataaataatgggatgaggcaggaatcaaagacagatactgcgacatagggtgctccggctccagcgtctcgcaatgctatcgcgtgca

SEQ ID NO: 55020 - DNA, 120 bp, Homo sapiens
  misc_feature: 1524 for SV(W|O) and mtDNA
cttggacgaaccagagtgtagcttaacacaaagcacccaacttacacttaggagatttcaacttaacttgaccgctctgagctaaacctagccccaaacccactccaccttactaccaga

SEQ ID NO: 55021 - DNA, 120 bp, Homo sapiens
  misc_feature: 1524 for SV(W|O) and mtDNA
gggcttacatcctcattactattctgcctagcaaactcaaactacgaacgcactcacagtcgcatcataatcctctctcaaggacttcaaactctactcccactaatagctttttgatga

SEQ ID NO: 55022 - DNA, 120 bp, Homo sapiens
  misc_feature: 1524 for SV(W|O) and mtDNA
cgccgatgaatatgatagtgaaatggattttggcgtaggtttggtctagggtgtagcctgagaataggggaaatcagtgaatgaagcctcctatgatggcaaatacagctcctattgata

SEQ ID NO: 55023 - DNA, 120 bp, Homo sapiens
  misc_feature: 1524 for SV(W|O) and mtDNA
cttcccctactcatcgcactaatttacactcacaacaccctaggctcactaaacattctactactcactctcactgcccaagaactatcaaactcctgagccaacaacttaatatgacta

SEQ ID NO: 55024 - DNA, 120 bp, Homo sapiens
  misc_feature: 1524 for SV(W|O) and mtDNA
tagggtttatcgtgtgagcacaccatatatttacagtaggaatagacgtagacacacgagcatatttcacctccgctaccataatcatcgctatccccaccggcgtcaaagtatttagct

SEQ ID NO: 55025 - DNA, 120 bp, Homo sapiens
  misc_feature: 1524 for SV(W|O) and mtDNA
tactgtttgcattaataaattaaagctccatagggtcttctcgtcttgctgtgttatgcccgcctcttcacgggcaggtcaatttcactggttaaaagtaagagacagctgaaccctcgt

SEQ ID NO: 55026 - DNA, 120 bp, Homo sapiens
  misc_feature: 1524 for SV(W|O) and mtDNA
tactggaaagtgcacttggacgaaccagagtgtagcttaacacaaagcacccaacttacacttaggagatttcaacttaacttgaccgctctgagctaaacctagccccaaacccactcc

SEQ ID NO: 55027 - DNA, 120 bp, Homo sapiens
  misc_feature: 1524 for SV(W|O) and mtDNA
taccaaaaacatcacctctagcatcaccagtattagaggcaccgcctgcccagtgacacatgtttaacggccgcggtaccctaaccgtgcaaaggtagcataatcacttgttccttaaat

SEQ ID NO: 55028 - DNA, 120 bp, Homo sapiens
  misc_feature: 1524 for SV(W|O) and mtDNA
accgctatgtatttcgtacattactgccagccaccatgaatattgtacggtaccataaatacttgaccacctgtagtacataaaaacccaatccacatcaaaaccccctccccatgctta

SEQ ID NO: 55029 - DNA, 120 bp, Homo sapiens
  misc_feature: 1524 for SV(W|O) and mtDNA
ccgttaacttccaattaactagttttgacaacattcaaaaaagagtaataaacttcgccttaattttaataatcaacaccctcctagccttactactaataattattacattttgactac

SEQ ID NO: 55030 - DNA, 120 bp, Homo sapiens
  misc_feature: 1524 for SV(W|O) and mtDNA
gaagtgagatggtaaatgctagtataatatttatgtaaatgaggggcatttggtaaatatgattatcataatttaatgagtcgaaatcattcgttttgtttaaactatataccaattcgg

SEQ ID NO: 55031 - DNA, 120 bp, Homo sapiens
  misc_feature: 1524 for SV(W|O) and mtDNA
gaagcaatatgaaatgatctgctgcagtgctctgagccctaggattcatctttcttttcaccgtaggtggcctgactggcattgtattagcaaactcatcactagacatcgtactacacg

SEQ ID NO: 55032 - DNA, 120 bp, Homo sapiens
  misc_feature: 1524 for SV(W|O) and mtDNA
gaaaaaggttttcatctccggtttacaagactggtgtattagtttatactacaaggacaggcccatttgagtattttgttttcaattagggagatagttggtattaggattaggattgtt

SEQ ID NO: 55033 - DNA, 120 bp, Homo sapiens
  misc_feature: 1524 for SV(W|O) and mtDNA
agacttagggctaggatgatgattaataagagggatgacataactattagtggcaggttagttgtttgtagggctcatggtaggggtaaaaggagggcaatttctagatcaaataataag

SEQ ID NO: 55034 - DNA, 120 bp, Homo sapiens
  misc_feature: 1524 for SV(W|O) and mtDNA
ataggattgcttgaatggctgctgtgttggcatctgctcgggcgtatcatcaactgatgagcaagaaggatataattcctacgccctctcagccgatgaacagttggaataggttgttag

SEQ ID NO: 55035 - DNA, 120 bp, Homo sapiens
  misc_feature: 1524 for SV(W|O) and mtDNA
ccaccaattaagaaagcgttcaagctcaacacccactacctaaaaaatcccaaacatataactgaactcctcatacccaattggaccaatctatcaccctatagaagaactaatgttagt

SEQ ID NO: 55036 - DNA, 120 bp, Homo sapiens
  misc_feature: 1524 for SV(W|O) and mtDNA
cactaatagttatgtcatccctcttattaatcatcatcctagccctaagtctggcctatgagtgactacaaaaaggattagactgaaccgaattggtatatagtttaaacaaaacgaatg

SEQ ID NO: 55037 - DNA, 120 bp, Homo sapiens
  misc_feature: 1524 for SV(W|O) and mtDNA
atttacgccgatgaatatgatagtgaaatggattttggcgtaggtttggtctagggtgtagcctgagaataggggaaatcagtgaatgaagcctcctatgatggcaaatacagctcctat

SEQ ID NO: 55038 - DNA, 120 bp, Homo sapiens
  misc_feature: 1523 for SV(W|O) and mtDNA
ttctcctcactctctcaatcttatccatcatagcaggcagttgaggtggattaaaccaaacccagctacgcaaaatcttagcatactcctcaattacccacataggatgaataatagcag

SEQ ID NO: 55039 - DNA, 120 bp, Homo sapiens
  misc_feature: 1523 for SV(W|O) and mtDNA
agggtcgaaggtggatttagcagtaaactgagagtagagtgcttagttgaacagggccctgaagcgcgtacacaccgcccgtcaccctcctcaagtatacttcaaaggacatttaactaa

SEQ ID NO: 55040 - DNA, 120 bp, Homo sapiens
  misc_feature: 1523 for SV(W|O) and mtDNA
aagtattgactcacccatcaacaaccgctatgtatttcgtacattactgccagccaccatgaatattgtacggtaccataaatacttgaccacctgtagtacataaaaacccaatccaca

SEQ ID NO: 55041 - DNA, 120 bp, Homo sapiens
  misc_feature: 1523 for SV(W|O) and mtDNA
acgccaaaatccatttcactatcatattcatcggcgtaaatctaactttcttcccacaacactttctcggcctatccggaatgccccgacgttactcggactaccccgatgcatacacca

SEQ ID NO: 55042 - DNA, 120 bp, Homo sapiens
  misc_feature: 1523 for SV(W|O) and mtDNA
aactcatgcccccatgtctaacaacatggctttctcaacttttaaaggataacagctatccattggtcttaggccccaaaaattttggtgcaactccaaataaaagtaataaccatgcac

SEQ ID NO: 55043 - DNA, 120 bp, Homo sapiens
  misc_feature: 1523 for SV(W|O) and mtDNA
cacatgaaacatcctatcatctgtaggctcattcatttctctaacagcagtaatattaataattttcatgatttgagaagccttcgcttcaaagcgaaaagtcctaatagtagaagaacc

SEQ ID NO: 55044 - DNA, 120 bp, Homo sapiens
  misc_feature: 1523 for SV(W|O) and mtDNA
ggtgaggtaaaatggctgagtgaagcattggactgtaaatctaaagacaggggttaggcctctttttaccagctccgaggtgattttcatattgaattgcaaattcgaagaagcagcttc

SEQ ID NO: 55045 - DNA, 120 bp, Homo sapiens
  misc_feature: 1523 for SV(W|O) and mtDNA
ggtactgtttgcattaataaattaaagctccatagggtcttctcgtcttgctgtgttatgcccgcctcttcacgggcaggtcaatttcactggttaaaagtaagagacagctgaaccctc

SEQ ID NO: 55046 - DNA, 120 bp, Homo sapiens
  misc_feature: 1523 for SV(W|O) and mtDNA
ggaggataatgccgatgtttcaggtttctgagtagagaaatgatccgtaatataggcctcgcccgatgtgtaggaagaggcagataaagaatattgaggcgccattggcgtgaaggtagc

SEQ ID NO: 55047 - DNA, 120 bp, Homo sapiens
  misc_feature: 1523 for SV(W|O) and mtDNA
gaggaggtctgcggctaggagtcaataaagtgattggcttagtgggcgaaatattatgctttgttgtttggatatatggaggatggggattattgctaggatgaggatggatagtaatag

SEQ ID NO: 55048 - DNA, 120 bp, Homo sapiens
  misc_feature: 1523 for SV(W|O) and mtDNA
gaaaaaaagaaccatttggatacataggtatggtctgagctatgatatcaattggcttcctagggtttatcgtgtgagcacaccatatatttacagtaggaatagacgtagacacacgag

SEQ ID NO: 55049 - DNA, 120 bp, Homo sapiens
  misc_feature: 1523 for SV(W|O) and mtDNA
actagtataagagatcaggttcgtcctttagtgttgtgtatggttatcatttgttttgaggttagtttgattagtcattgttgggtggtgattagtcggttgttgatgagatatttggag

SEQ ID NO: 55050 - DNA, 120 bp, Homo sapiens
  misc_feature: 1523 for SV(W|O) and mtDNA
agatcacgtaggactttaatcgttgaacaaacgaacctttaatagcggctgcaccatcgggatgtcctgatccaacatcgaggtcgtaaaccctattgttgatatggactctagaatagg

SEQ ID NO: 55051 - DNA, 120 bp, Homo sapiens
  misc_feature: 1523 for SV(W|O) and mtDNA
cctagaccaagaagttattatctcgaactgacactgagccacaacccaaacaacccagctctccctaagcttcaaactagactacttctccataatattcatccctgtagcattgttcgt

SEQ ID NO: 55052 - DNA, 120 bp, Homo sapiens
  misc_feature: 1523 for SV(W|O) and mtDNA
catcgctatccccaccggcgtcaaagtatttagctgactcgccacactccacggaagcaatatgaaatgatctgctgcagtgctctgagccctaggattcatctttcttttcaccgtagg

SEQ ID NO: 55053 - DNA, 120 bp, Homo sapiens
  misc_feature: 1523 for SV(W|O) and mtDNA
cccaccgctgcttcgcaggcggcaaagactagtatggcaataggcacaatattggctaagagggagtgggtgttgagggttatgagagtagctataatgaacagcgatagtattattcct

SEQ ID NO: 55054 - DNA, 120 bp, Homo sapiens
  misc_feature: 1523 for SV(W|O) and mtDNA
catttgtaataatcttcttcatagtaatacccatcataatcggaggctttggcaactgactagttcccctaataatcggtgcccccgatatggcgtttccccgcataaacaacataagct

SEQ ID NO: 55055 - DNA, 120 bp, Homo sapiens
  misc_feature: 1523 for SV(W|O) and mtDNA
agtaggtttaggttatgtacgtagtctaggccatatgtgttggagattgagactagtagggctaggcccaccgctgcttcgcaggcggcaaagactagtatggcaataggcacaatattg

SEQ ID NO: 55056 - DNA, 120 bp, Homo sapiens
  misc_feature: 1523 for SV(W|O) and mtDNA
atgccgatgtttcaggtttctgagtagagaaatgatccgtaatataggcctcgcccgatgtgtaggaagaggcagataaagaatattgaggcgccattggcgtgaaggtagcggatgatt

SEQ ID NO: 55057 - DNA, 120 bp, Homo sapiens
  misc_feature: 1523 for SV(W|O) and mtDNA
acggactacaaccacgaccaatgatatgaaaaaccatcgttgtatttcaactacaagaacaccaatgaccccaatacgcaaaactaaccccctaataaaattaattaaccactcattcat

SEQ ID NO: 55058 - DNA, 120 bp, Homo sapiens
  misc_feature: 1522 for SV(W|O) and mtDNA
ttttctaccccagaaaactacgatagcccttatgaaacttaagggtcgaaggtggatttagcagtaaactgagagtagagtgcttagttgaacagggccctgaagcgcgtacacaccgcc

SEQ ID NO: 55059 - DNA, 120 bp, Homo sapiens
  misc_feature: 1522 for SV(W|O) and mtDNA
actaccagacaaccttagccaaaccatttacccaaataaagtataggcgatagaaattgaaacctggcgcaatagatatagtaccgcaagggaaagatgaaaaattataaccaagcataa

SEQ ID NO: 55060 - DNA, 120 bp, Homo sapiens
  misc_feature: 1522 for SV(W|O) and mtDNA
ttacgccgatgaatatgatagtgaaatggattttggcgtaggtttggtctagggtgtagcctgagaataggggaaatcagtgaatgaagcctcctatgatggcaaatacagctcctattg

SEQ ID NO: 55061 - DNA, 120 bp, Homo sapiens
  misc_feature: 1522 for SV(W|O) and mtDNA
gaacaaacgaacctttaatagcggctgcaccatcgggatgtcctgatccaacatcgaggtcgtaaaccctattgttgatatggactctagaataggattgcgctgttatccctagggtaa

SEQ ID NO: 55062 - DNA, 120 bp, Homo sapiens
  misc_feature: 1522 for SV(W|O) and mtDNA
ccttacacaaaatgacatcaaaaaaatcgtagccttctccacttcaagtcaactaggactcataatagttacaatcggcatcaaccaaccacacctagcattcctgcacatctgcaccca

SEQ ID NO: 55063 - DNA, 120 bp, Homo sapiens
  misc_feature: 1522 for SV(W|O) and mtDNA
tggagtaggtttaggttatgtacgtagtctaggccatatgtgttggagattgagactagtagggctaggcccaccgctgcttcgcaggcggcaaagactagtatggcaataggcacaata

SEQ ID NO: 55064 - DNA, 120 bp, Homo sapiens
  misc_feature: 1522 for SV(W|O) and mtDNA
tggaaagtgcacttggacgaaccagagtgtagcttaacacaaagcacccaacttacacttaggagatttcaacttaacttgaccgctctgagctaaacctagccccaaacccactccacc

SEQ ID NO: 55065 - DNA, 120 bp, Homo sapiens
  misc_feature: 1522 for SV(W|O) and mtDNA
tgatctaaaacactctttacgccggcttctattgacttgggttaatcgtgtgaccgcggtggctggcacgaaattgaccaaccctggggttagtatagcttagttaaactttcgtttatt

SEQ ID NO: 55066 - DNA, 120 bp, Homo sapiens
  misc_feature: 1522 for SV(W|O) and mtDNA
tcttaccacaaggcacacctacaccccttatccccatactagttattatcgaaaccatcagcctactcattcaaccaatagccctggccgtacgcctaaccgctaacattactgcaggcc

SEQ ID NO: 55067 - DNA, 120 bp, Homo sapiens
  misc_feature: 1522 for SV(W|O) and mtDNA
agcgttttgagctgcattgctgcgtgcttgatgcttgtcccttttgatcgtggtgatttagagggtgaactcactggaacggggatgcttgcatgtgtaatcttactaagagctaataga

SEQ ID NO: 55068 - DNA, 120 bp, Homo sapiens
  misc_feature: 1522 for SV(W|O) and mtDNA
tatatccaaacaacaaagcataatatttcgcccactaagccaatcactttattgactcctagccgcagacctcctcattctaacctgaatcggaggacaaccagtaagctacccttttac

SEQ ID NO: 55069 - DNA, 120 bp, Homo sapiens
  misc_feature: 1522 for SV(W|O) and mtDNA
ggctaagcgttttgagctgcattgctgcgtgcttgatgcttgtcccttttgatcgtggtgatttagagggtgaactcactggaacggggatgcttgcatgtgtaatcttactaagagcta

SEQ ID NO: 55070 - DNA, 120 bp, Homo sapiens
  misc_feature: 1522 for SV(W|O) and mtDNA
taaacatgtgtcactgggcaggcggtgcctctaatactggtgatgctagaggtgatgtttttggtaaacaggcggggtaagatttgccgagttccttttactttttttaacctttcctta

SEQ ID NO: 55071 - DNA, 120 bp, Homo sapiens
  misc_feature: 1522 for SV(W|O) and mtDNA
gctaaatcctatatatcttaatggcacatgcagcgcaagtaggtctacaagacgctacttcccctatcatagaagagcttatcacctttcatgatcacgccctcataatcattttcctta

SEQ ID NO: 55072 - DNA, 120 bp, Homo sapiens
  misc_feature: 1522 for SV(W|O) and mtDNA
gggaaacgccatatcgggggcaccgattattaggggaactagtcagttgccaaagcctccgattatgatgggtattactatgaagaagattattacaaatgcatgggctgtgacgataac

SEQ ID NO: 55073 - DNA, 120 bp, Homo sapiens
  misc_feature: 1522 for SV(W|O) and mtDNA
gaactaatcatattttatatcttcttcgaaaccacacttatccccaccttggctatcatcacccgatgaggcaaccagccagaacgcctgaacgcaggcacatacttcctattctacacc

SEQ ID NO: 55074 - DNA, 120 bp, Homo sapiens
  misc_feature: 1522 for SV(W|O) and mtDNA
gggctatcgtagttttctggggtagaaaatgtagcccatttcttgccacctcatgggctacaccttgacctaacgtctttacgtgggtacttgcgcttactttgtagccttcatcagggt

SEQ ID NO: 55075 - DNA, 120 bp, Homo sapiens
  misc_feature: 1522 for SV(W|O) and mtDNA
ctccctactatgcctagaaggaataatactatcgctgttcattatagctactctcataaccctcaacacccactccctcttagccaatattgtgcctattgccatactagtctttgccgc

SEQ ID NO: 55076 - DNA, 120 bp, Homo sapiens
  misc_feature: 1522 for SV(W|O) and mtDNA
acttggacgaaccagagtgtagcttaacacaaagcacccaacttacacttaggagatttcaacttaacttgaccgctctgagctaaacctagccccaaacccactccaccttactaccag

SEQ ID NO: 55077 - DNA, 120 bp, Homo sapiens
  misc_feature: 1522 for SV(W|O) and mtDNA
cgtaggtttggtctagggtgtagcctgagaataggggaaatcagtgaatgaagcctcctatgatggcaaatacagctcctattgataggacatagtggaagtgggctacaacgtagtacg

SEQ ID NO: 55078 - DNA, 120 bp, Homo sapiens
  misc_feature: 1522 for SV(W|O) and mtDNA
caagccaacgccacttatccagtgaaccactatcacgaaaaaaactctacctctctatactaatctccctacaaatctccttaattataacattcacagccacagaactaatcatatttt

SEQ ID NO: 55079 - DNA, 120 bp, Homo sapiens
  misc_feature: 1522 for SV(W|O) and mtDNA
aggacctgtgggtttgttaggtactgtttgcattaataaattaaagctccatagggtcttctcgtcttgctgtgttatgcccgcctcttcacgggcaggtcaatttcactggttaaaagt

SEQ ID NO: 55080 - DNA, 120 bp, Homo sapiens
  misc_feature: 1521 for SV(W|O) and mtDNA
caacactaaaggacgaacctgatctcttatactagtatccttaatcatttttattgccacaactaacctcctcggactcctgcctcactcatttacaccaaccacccaactatctataaa

SEQ ID NO: 55081 - DNA, 120 bp, Homo sapiens
  misc_feature: 1521 for SV(W|O) and mtDNA
ccctggccgtacgcctaaccgctaacattactgcaggccacctactcatgcacctaattggaagcgccaccctagcaatatcaaccattaaccttccctctacacttatcatcttcacaa

SEQ ID NO: 55082 - DNA, 120 bp, Homo sapiens
  misc_feature: 1521 for SV(W|O) and mtDNA
ttgggtatgaggagttcagttatatgtttgggattttttaggtagtgggtgttgagcttgaacgctttcttaattggtggctgcttttaggcctactatgggtgttaaattttttactct

SEQ ID NO: 55083 - DNA, 120 bp, Homo sapiens
  misc_feature: 1521 for SV(W|O) and mtDNA
ttatgcggggaaacgccatatcgggggcaccgattattaggggaactagtcagttgccaaagcctccgattatgatgggtattactatgaagaagattattacaaatgcatgggctgtga

SEQ ID NO: 55084 - DNA, 120 bp, Homo sapiens
  misc_feature: 1521 for SV(W|O) and mtDNA
aaccaaataattcaagcactgcttattacaattttactgggtctctattttaccctcctacaagcctcagagtacttcgagtctcccttcaccatttccgacggcatctacggctcaaca

SEQ ID NO: 55085 - DNA, 120 bp, Homo sapiens
  misc_feature: 1521 for SV(W|O) and mtDNA
tgcagttgatgtgtgatagttgagggttgattgctgtacttgcttgtaagcatggggagggggttttgatgtggattgggtttttatgtactacaggtggtcaagtatttatggtaccgt

SEQ ID NO: 55086 - DNA, 120 bp, Homo sapiens
  misc_feature: 1521 for SV(W|O) and mtDNA
gagtccatatcaacaatagggtttacgacctcgatgttggatcaggacatcccgatggtgcagccgctattaaaggttcgtttgttcaacgattaaagtcctacgtgatctgagttcaga

SEQ ID NO: 55087 - DNA, 120 bp, Homo sapiens
  misc_feature: 1521 for SV(W|O) and mtDNA
ggtggggggcatccatatagtcactccaggtttatggagggttcttctactattaggacttttcgctttgaagcgaaggcttctcaaatcatgaaaattattaatattactgctgttaga

SEQ ID NO: 55088 - DNA, 120 bp, Homo sapiens
  misc_feature: 1521 for SV(W|O) and mtDNA
tcgtctggtttcgggggtcttagctttggctctccttgcaaagttatttctagttaattcattatgcagaaggtataggggttagtccttgctatattatgcttggttataatttttcat

SEQ ID NO: 55089 - DNA, 120 bp, Homo sapiens
  misc_feature: 1521 for SV(W|O) and mtDNA
tccatatatccaaacaacaaagcataatatttcgcccactaagccaatcactttattgactcctagccgcagacctcctcattctaacctgaatcggaggacaaccagtaagctaccctt

SEQ ID NO: 55090 - DNA, 120 bp, Homo sapiens
  misc_feature: 1521 for SV(W|O) and mtDNA
tcacacctcatatcctccctactatgcctagaaggaataatactatcgctgttcattatagctactctcataaccctcaacacccactccctcttagccaatattgtgcctattgccata

SEQ ID NO: 55091 - DNA, 120 bp, Homo sapiens
  misc_feature: 1521 for SV(W|O) and mtDNA
gggatgtcctgatccaacatcgaggtcgtaaaccctattgttgatatggactctagaataggattgcgctgttatccctagggtaacttgttccgttggtcaagttattggatcaattga

SEQ ID NO: 55092 - DNA, 120 bp, Homo sapiens
  misc_feature: 1521 for SV(W|O) and mtDNA
tagggtggggggcatccatatagtcactccaggtttatggagggttcttctactattaggacttttcgctttgaagcgaaggcttctcaaatcatgaaaattattaatattactgctgtt

SEQ ID NO: 55093 - DNA, 120 bp, Homo sapiens
  misc_feature: 1521 for SV(W|O) and mtDNA
cttacacaaaatgacatcaaaaaaatcgtagccttctccacttcaagtcaactaggactcataatagttacaatcggcatcaaccaaccacacctagcattcctgcacatctgcacccac

SEQ ID NO: 55094 - DNA, 120 bp, Homo sapiens
  misc_feature: 1521 for SV(W|O) and mtDNA
ctggaaagtgcacttggacgaaccagagtgtagcttaacacaaagcacccaacttacacttaggagatttcaacttaacttgaccgctctgagctaaacctagccccaaacccactccac

SEQ ID NO: 55095 - DNA, 120 bp, Homo sapiens
  misc_feature: 1521 for SV(W|O) and mtDNA
aaaagagtaataaacttcgccttaattttaataatcaacaccctcctagccttactactaataattattacattttgactaccacaactcaacggctacatagaaaaatccaccccttac

SEQ ID NO: 55096 - DNA, 120 bp, Homo sapiens
  misc_feature: 1521 for SV(W|O) and mtDNA
ctacgagccacagcttaaaactcaaaggacctggcggtgcttcatatccctctagaggagcctgttctgtaatcgataaaccccgatcaacctcaccacctcttgctcagcctatatacc

SEQ ID NO: 55097 - DNA, 120 bp, Homo sapiens
  misc_feature: 1521 for SV(W|O) and mtDNA
ccatttgagtattttgttttcaattagggagatagttggtattaggattaggattgttgtgaagtatagtacggatgctacttgtccaatgatggtaaaagggtagcttactggttgtcc

SEQ ID NO: 55098 - DNA, 120 bp, Homo sapiens
  misc_feature: 1521 for SV(W|O) and mtDNA
aggctttggcaactgactagttcccctaataatcggtgcccccgatatggcgtttccccgcataaacaacataagcttctgactcttacctccctctctcctactcctgctcgcatctgc

SEQ ID NO: 55099 - DNA, 120 bp, Homo sapiens
  misc_feature: 1521 for SV(W|O) and mtDNA
caccgctgcttcgcaggcggcaaagactagtatggcaataggcacaatattggctaagagggagtgggtgttgagggttatgagagtagctataatgaacagcgatagtattattccttc

SEQ ID NO: 55100 - DNA, 120 bp, Homo sapiens
  misc_feature: 1521 for SV(W|O) and mtDNA
gaacactatacctattattcggcgcatgagctggagtcctaggcacagctctaagcctccttattcgagccgagctgggccagccaggcaaccttctaggtaacgaccacatctacaacg

SEQ ID NO: 55101 - DNA, 120 bp, Homo sapiens
  misc_feature: 1521 for SV(W|O) and mtDNA
cttgaacgctttcttaattggtggctgcttttaggcctactatgggtgttaaattttttactctctctacaaggttttttcctagtgtccaaagagctgttcctctttggactaacagtt

SEQ ID NO: 55102 - DNA, 120 bp, Homo sapiens
  misc_feature: 1521 for SV(W|O) and mtDNA
cataatcggaggctttggcaactgactagttcccctaataatcggtgcccccgatatggcgtttccccgcataaacaacataagcttctgactcttacctccctctctcctactcctgct

SEQ ID NO: 55103 - DNA, 120 bp, Homo sapiens
  misc_feature: 1521 for SV(W|O) and mtDNA
caatgcttcactcagccattttacctcacccccactgatgttcgccgaccgttgactattctctacaaaccacaaagacattggaacactatacctattattcggcgcatgagctggagt

SEQ ID NO: 55104 - DNA, 120 bp, Homo sapiens
  misc_feature: 1521 for SV(W|O) and mtDNA
aaaaaggttttcatctccggtttacaagactggtgtattagtttatactacaaggacaggcccatttgagtattttgttttcaattagggagatagttggtattaggattaggattgttg

SEQ ID NO: 55105 - DNA, 120 bp, Homo sapiens
  misc_feature: 1521 for SV(W|O) and mtDNA
acgccgatgaatatgatagtgaaatggattttggcgtaggtttggtctagggtgtagcctgagaataggggaaatcagtgaatgaagcctcctatgatggcaaatacagctcctattgat

SEQ ID NO: 55106 - DNA, 120 bp, Homo sapiens
  misc_feature: 1521 for SV(W|O) and mtDNA
acaaacgaacctttaatagcggctgcaccatcgggatgtcctgatccaacatcgaggtcgtaaaccctattgttgatatggactctagaataggattgcgctgttatccctagggtaact

SEQ ID NO: 55107 - DNA, 120 bp, Homo sapiens
  misc_feature: 1521 for SV(W|O) and mtDNA
aacactatacctattattcggcgcatgagctggagtcctaggcacagctctaagcctccttattcgagccgagctgggccagccaggcaaccttctaggtaacgaccacatctacaacgt

SEQ ID NO: 55108 - DNA, 120 bp, Homo sapiens
  misc_feature: 1521 for SV(W|O) and mtDNA
acctttaatagcggctgcaccatcgggatgtcctgatccaacatcgaggtcgtaaaccctattgttgatatggactctagaataggattgcgctgttatccctagggtaacttgttccgt

SEQ ID NO: 55109 - DNA, 120 bp, Homo sapiens
  misc_feature: 1520 for SV(W|O) and mtDNA
atttagctgactcgccacactccacggaagcaatatgaaatgatctgctgcagtgctctgagccctaggattcatctttcttttcaccgtaggtggcctgactggcattgtattagcaaa

SEQ ID NO: 55110 - DNA, 120 bp, Homo sapiens
  misc_feature: 1520 for SV(W|O) and mtDNA
ggaagtcagggttagggtggttatagtagtgtgcatggttattacttttatttggagttgcaccaaaatttttggggcctaagaccaatggatagctgttatcctttaaaagttgagaaa

SEQ ID NO: 55111 - DNA, 120 bp, Homo sapiens
  misc_feature: 1520 for SV(W|O) and mtDNA
tttaatatttttagttgggtgatgaggaatagtgtaaggagtatgggggtaattatggtgggccatacggtagtatttagttggggcatttcactgtaaagaggtgttggttctcttaat

SEQ ID NO: 55112 - DNA, 120 bp, Homo sapiens
  misc_feature: 1520 for SV(W|O) and mtDNA
ttccttaaatagggacctgtatgaatggctccacgagggttcagctgtctcttacttttaaccagtgaaattgacctgcccgtgaagaggcgggcataacacagcaagacgagaagaccc

SEQ ID NO: 55113 - DNA, 120 bp, Homo sapiens
  misc_feature: 1520 for SV(W|O) and mtDNA
acgggcggtgtgtacgcgcttcagggccctgttcaactaagcactctactctcagtttactgctaaatccaccttcgacccttaagtttcataagggctatcgtagttttctggggtaga

SEQ ID NO: 55114 - DNA, 120 bp, Homo sapiens
  misc_feature: 1520 for SV(W|O) and mtDNA
ggaaaaaaagaaccatttggatacataggtatggtctgagctatgatatcaattggcttcctagggtttatcgtgtgagcacaccatatatttacagtaggaatagacgtagacacacga

SEQ ID NO: 55115 - DNA, 120 bp, Homo sapiens
  misc_feature: 1520 for SV(W|O) and mtDNA
agttatgtcatccctcttattaatcatcatcctagccctaagtctggcctatgagtgactacaaaaaggattagactgaaccgaattggtatatagtttaaacaaaacgaatgatttcga

SEQ ID NO: 55116 - DNA, 120 bp, Homo sapiens
  misc_feature: 1520 for SV(W|O) and mtDNA
ccttggaaaaaggttttcatctccggtttacaagactggtgtattagtttatactacaaggacaggcccatttgagtattttgttttcaattagggagatagttggtattaggattagga

SEQ ID NO: 55117 - DNA, 120 bp, Homo sapiens
  misc_feature: 1520 for SV(W|O) and mtDNA
tatgcggggaaacgccatatcgggggcaccgattattaggggaactagtcagttgccaaagcctccgattatgatgggtattactatgaagaagattattacaaatgcatgggctgtgac

SEQ ID NO: 55118 - DNA, 120 bp, Homo sapiens
  misc_feature: 1520 for SV(W|O) and mtDNA
tatcatcacccgatgaggcaaccagccagaacgcctgaacgcaggcacatacttcctattctacaccctagtaggctcccttcccctactcatcgcactaatttacactcacaacaccct

SEQ ID NO: 55119 - DNA, 120 bp, Homo sapiens
  misc_feature: 1520 for SV(W|O) and mtDNA
tagtattggttatggttcattgtccggagagtatattgttgaagaggatagctattagaaggattatggatgcggttgcttgcgtgaggaaatacttgatggcagcttctgtggaacgag

SEQ ID NO: 55120 - DNA, 120 bp, Homo sapiens
  misc_feature: 1520 for SV(W|O) and mtDNA
tagtataagagatcaggttcgtcctttagtgttgtgtatggttatcatttgttttgaggttagtttgattagtcattgttgggtggtgattagtcggttgttgatgagatatttggaggt

SEQ ID NO: 55121 - DNA, 120 bp, Homo sapiens
  misc_feature: 1520 for SV(W|O) and mtDNA
tacatcctcattactattctgcctagcaaactcaaactacgaacgcactcacagtcgcatcataatcctctctcaaggacttcaaactctactcccactaatagctttttgatgacttct

SEQ ID NO: 55122 - DNA, 120 bp, Homo sapiens
  misc_feature: 1520 for SV(W|O) and mtDNA
taatattgaacgtaggtgcgataaataatgggatgaggcaggaatcaaagacagatactgcgacatagggtgctccggctccagcgtctcgcaatgctatcgcgtgcataccccccagac

SEQ ID NO: 55123 - DNA, 120 bp, Homo sapiens
  misc_feature: 1520 for SV(W|O) and mtDNA
taaatcctatatatcttaatggcacatgcagcgcaagtaggtctacaagacgctacttcccctatcatagaagagcttatcacctttcatgatcacgccctcataatcattttccttatc

SEQ ID NO: 55124 - DNA, 120 bp, Homo sapiens
  misc_feature: 1520 for SV(W|O) and mtDNA
aagccaacgccacttatccagtgaaccactatcacgaaaaaaactctacctctctatactaatctccctacaaatctccttaattataacattcacagccacagaactaatcatatttta

SEQ ID NO: 55125 - DNA, 120 bp, Homo sapiens
  misc_feature: 1520 for SV(W|O) and mtDNA
ggcttacatcctcattactattctgcctagcaaactcaaactacgaacgcactcacagtcgcatcataatcctctctcaaggacttcaaactctactcccactaatagctttttgatgac

SEQ ID NO: 55126 - DNA, 120 bp, Homo sapiens
  misc_feature: 1520 for SV(W|O) and mtDNA
gtaggtttggtctagggtgtagcctgagaataggggaaatcagtgaatgaagcctcctatgatggcaaatacagctcctattgataggacatagtggaagtgggctacaacgtagtacgt

SEQ ID NO: 55127 - DNA, 120 bp, Homo sapiens
  misc_feature: 1520 for SV(W|O) and mtDNA
attggaacactatacctattattcggcgcatgagctggagtcctaggcacagctctaagcctccttattcgagccgagctgggccagccaggcaaccttctaggtaacgaccacatctac

SEQ ID NO: 55128 - DNA, 120 bp, Homo sapiens
  misc_feature: 1520 for SV(W|O) and mtDNA
ggcccatttgagtattttgttttcaattagggagatagttggtattaggattaggattgttgtgaagtatagtacggatgctacttgtccaatgatggtaaaagggtagcttactggttg

SEQ ID NO: 55129 - DNA, 120 bp, Homo sapiens
  misc_feature: 1520 for SV(W|O) and mtDNA
gcttcctagggtttatcgtgtgagcacaccatatatttacagtaggaatagacgtagacacacgagcatatttcacctccgctaccataatcatcgctatccccaccggcgtcaaagtat

SEQ ID NO: 55130 - DNA, 120 bp, Homo sapiens
  misc_feature: 1520 for SV(W|O) and mtDNA
gcctactaaccaacacactaaccatataccaatgatggcgcgatgtaacacgagaaagcacataccaaggccaccacacaccacctgtccaaaaaggccttcgatacgggataatcctat

SEQ ID NO: 55131 - DNA, 120 bp, Homo sapiens
  misc_feature: 1520 for SV(W|O) and mtDNA
gatttgtccttggaaaaaggttttcatctccggtttacaagactggtgtattagtttatactacaaggacaggcccatttgagtattttgttttcaattagggagatagttggtattagg

SEQ ID NO: 55132 - DNA, 120 bp, Homo sapiens
  misc_feature: 1520 for SV(W|O) and mtDNA
gatccaacatcgaggtcgtaaaccctattgttgatatggactctagaataggattgcgctgttatccctagggtaacttgttccgttggtcaagttattggatcaattgagtatagtagt

SEQ ID NO: 55133 - DNA, 120 bp, Homo sapiens
  misc_feature: 1520 for SV(W|O) and mtDNA
gaagtcagggttagggtggttatagtagtgtgcatggttattacttttatttggagttgcaccaaaatttttggggcctaagaccaatggatagctgttatcctttaaaagttgagaaag

SEQ ID NO: 55134 - DNA, 120 bp, Homo sapiens
  misc_feature: 1520 for SV(W|O) and mtDNA
agatatagtaccgcaagggaaagatgaaaaattataaccaagcataatatagcaaggactaacccctataccttctgcataatgaattaactagaaataactttgcaaggagagccaaag

SEQ ID NO: 55135 - DNA, 120 bp, Homo sapiens
  misc_feature: 1520 for SV(W|O) and mtDNA
cagaacactacgagccacagcttaaaactcaaaggacctggcggtgcttcatatccctctagaggagcctgttctgtaatcgataaaccccgatcaacctcaccacctcttgctcagcct

SEQ ID NO: 55136 - DNA, 120 bp, Homo sapiens
  misc_feature: 1520 for SV(W|O) and mtDNA
caataaaaatgattaaggatactagtataagagatcaggttcgtcctttagtgttgtgtatggttatcatttgttttgaggttagtttgattagtcattgttgggtggtgattagtcggt

SEQ ID NO: 55137 - DNA, 120 bp, Homo sapiens
  misc_feature: 1520 for SV(W|O) and mtDNA
caaacgaacctttaatagcggctgcaccatcgggatgtcctgatccaacatcgaggtcgtaaaccctattgttgatatggactctagaataggattgcgctgttatccctagggtaactt

SEQ ID NO: 55138 - DNA, 120 bp, Homo sapiens
  misc_feature: 1520 for SV(W|O) and mtDNA
agccaatattgtgcctattgccatactagtctttgccgcctgcgaagcagcggtgggcctagccctactagtctcaatctccaacacatatggcctagactacgtacataacctaaacct

SEQ ID NO: 55139 - DNA, 120 bp, Homo sapiens
  misc_feature: 1520 for SV(W|O) and mtDNA
aacgaacctttaatagcggctgcaccatcgggatgtcctgatccaacatcgaggtcgtaaaccctattgttgatatggactctagaataggattgcgctgttatccctagggtaacttgt

SEQ ID NO: 55140 - DNA, 120 bp, Homo sapiens
  misc_feature: 1519 for SV(W|O) and mtDNA
tttgtaataatcttcttcatagtaatacccatcataatcggaggctttggcaactgactagttcccctaataatcggtgcccccgatatggcgtttccccgcataaacaacataagcttc

SEQ ID NO: 55141 - DNA, 120 bp, Homo sapiens
  misc_feature: 1519 for SV(W|O) and mtDNA
tttacgccgatgaatatgatagtgaaatggattttggcgtaggtttggtctagggtgtagcctgagaataggggaaatcagtgaatgaagcctcctatgatggcaaatacagctcctatt

SEQ ID NO: 55142 - DNA, 120 bp, Homo sapiens
  misc_feature: 1519 for SV(W|O) and mtDNA
gcatgtactgctcggaggttgggttctgctccgaggtcgccccaaccgaaatttttaatgcaggtttggtagtttaggacctgtgggtttgttaggtactgtttgcattaataaattaaa

SEQ ID NO: 55143 - DNA, 120 bp, Homo sapiens
  misc_feature: 1519 for SV(W|O) and mtDNA
ttgtaataatcttcttcatagtaatacccatcataatcggaggctttggcaactgactagttcccctaataatcggtgcccccgatatggcgtttccccgcataaacaacataagcttct

SEQ ID NO: 55144 - DNA, 120 bp, Homo sapiens
  misc_feature: 1519 for SV(W|O) and mtDNA
ggggggcatccatatagtcactccaggtttatggagggttcttctactattaggacttttcgctttgaagcgaaggcttctcaaatcatgaaaattattaatattactgctgttagagaa

SEQ ID NO: 55145 - DNA, 120 bp, Homo sapiens
  misc_feature: 1519 for SV(W|O) and mtDNA
tggagttttttacaactcaggtgagttttagctttattggggagggggtgatctaaaacactctttacgccggcttctattgacttgggttaatcgtgtgaccgcggtggctggcacgaa

SEQ ID NO: 55146 - DNA, 120 bp, Homo sapiens
  misc_feature: 1519 for SV(W|O) and mtDNA
aggttttcatctccggtttacaagactggtgtattagtttatactacaaggacaggcccatttgagtattttgttttcaattagggagatagttggtattaggattaggattgttgtgaa

SEQ ID NO: 55147 - DNA, 120 bp, Homo sapiens
  misc_feature: 1519 for SV(W|O) and mtDNA
cccatgtctaacaacatggctttctcaacttttaaaggataacagctatccattggtcttaggccccaaaaattttggtgcaactccaaataaaagtaataaccatgcacactactataa

SEQ ID NO: 55148 - DNA, 120 bp, Homo sapiens
  misc_feature: 1519 for SV(W|O) and mtDNA
tggggggcatccatatagtcactccaggtttatggagggttcttctactattaggacttttcgctttgaagcgaaggcttctcaaatcatgaaaattattaatattactgctgttagaga

SEQ ID NO: 55149 - DNA, 120 bp, Homo sapiens
  misc_feature: 1519 for SV(W|O) and mtDNA
agctgactcgccacactccacggaagcaatatgaaatgatctgctgcagtgctctgagccctaggattcatctttcttttcaccgtaggtggcctgactggcattgtattagcaaactca

SEQ ID NO: 55150 - DNA, 120 bp, Homo sapiens
  misc_feature: 1519 for SV(W|O) and mtDNA
tgaggaggtctgcggctaggagtcaataaagtgattggcttagtgggcgaaatattatgctttgttgtttggatatatggaggatggggattattgctaggatgaggatggatagtaata

SEQ ID NO: 55151 - DNA, 120 bp, Homo sapiens
  misc_feature: 1519 for SV(W|O) and mtDNA
gacttagggctaggatgatgattaataagagggatgacataactattagtggcaggttagttgtttgtagggctcatggtaggggtaaaaggagggcaatttctagatcaaataataaga

SEQ ID NO: 55152 - DNA, 120 bp, Homo sapiens
  misc_feature: 1519 for SV(W|O) and mtDNA
tctgcggctaggagtcaataaagtgattggcttagtgggcgaaatattatgctttgttgtttggatatatggaggatggggattattgctaggatgaggatggatagtaatagggcaagg

SEQ ID NO: 55153 - DNA, 120 bp, Homo sapiens
  misc_feature: 1519 for SV(W|O) and mtDNA
tccaacatcgaggtcgtaaaccctattgttgatatggactctagaataggattgcgctgttatccctagggtaacttgttccgttggtcaagttattggatcaattgagtatagtagttc

SEQ ID NO: 55154 - DNA, 120 bp, Homo sapiens
  misc_feature: 1519 for SV(W|O) and mtDNA
tagggacctgtatgaatggctccacgagggttcagctgtctcttacttttaaccagtgaaattgacctgcccgtgaagaggcgggcataacacagcaagacgagaagaccctatggagct

SEQ ID NO: 55155 - DNA, 120 bp, Homo sapiens
  misc_feature: 1519 for SV(W|O) and mtDNA
gtcaaagtatttagctgactcgccacactccacggaagcaatatgaaatgatctgctgcagtgctctgagccctaggattcatctttcttttcaccgtaggtggcctgactggcattgta

SEQ ID NO: 55156 - DNA, 120 bp, Homo sapiens
  misc_feature: 1519 for SV(W|O) and mtDNA
ggaacactatacctattattcggcgcatgagctggagtcctaggcacagctctaagcctccttattcgagccgagctgggccagccaggcaaccttctaggtaacgaccacatctacaac

SEQ ID NO: 55157 - DNA, 120 bp, Homo sapiens
  misc_feature: 1519 for SV(W|O) and mtDNA
caagtattgactcacccatcaacaaccgctatgtatttcgtacattactgccagccaccatgaatattgtacggtaccataaatacttgaccacctgtagtacataaaaacccaatccac

SEQ ID NO: 55158 - DNA, 120 bp, Homo sapiens
  misc_feature: 1519 for SV(W|O) and mtDNA
ccgtattactcgcatcaggagtatcaatcacctgagctcaccatagtctaatagaaaacaaccgaaaccaaataattcaagcactgcttattacaattttactgggtctctattttaccc

SEQ ID NO: 55159 - DNA, 120 bp, Homo sapiens
  misc_feature: 1519 for SV(W|O) and mtDNA
gatctaaaacactctttacgccggcttctattgacttgggttaatcgtgtgaccgcggtggctggcacgaaattgaccaaccctggggttagtatagcttagttaaactttcgtttattg

SEQ ID NO: 55160 - DNA, 120 bp, Homo sapiens
  misc_feature: 1519 for SV(W|O) and mtDNA
aaacgaacctttaatagcggctgcaccatcgggatgtcctgatccaacatcgaggtcgtaaaccctattgttgatatggactctagaataggattgcgctgttatccctagggtaacttg

SEQ ID NO: 55161 - DNA, 120 bp, Homo sapiens
  misc_feature: 1519 for SV(W|O) and mtDNA
aaattgacctgcccgtgaagaggcgggcataacacagcaagacgagaagaccctatggagctttaatttattaatgcaaacagtacctaacaaacccacaggtcctaaactaccaaacct

SEQ ID NO: 55162 - DNA, 120 bp, Homo sapiens
  misc_feature: 1518 for SV(W|O) and mtDNA
ttggcgtaggtttggtctagggtgtagcctgagaataggggaaatcagtgaatgaagcctcctatgatggcaaatacagctcctattgataggacatagtggaagtgggctacaacgtag

SEQ ID NO: 55163 - DNA, 120 bp, Homo sapiens
  misc_feature: 1518 for SV(W|O) and mtDNA
tgtaatattgaacgtaggtgcgataaataatgggatgaggcaggaatcaaagacagatactgcgacatagggtgctccggctccagcgtctcgcaatgctatcgcgtgcataccccccag

SEQ ID NO: 55164 - DNA, 120 bp, Homo sapiens
  misc_feature: 1518 for SV(W|O) and mtDNA
tggctgagtgaagcattggactgtaaatctaaagacaggggttaggcctctttttaccagctccgaggtgattttcatattgaattgcaaattcgaagaagcagcttcaaacctgccggg

SEQ ID NO: 55165 - DNA, 120 bp, Homo sapiens
  misc_feature: 1518 for SV(W|O) and mtDNA
aactcagacccaaacattaatcagttcttcaaatatctactcatcttcctaattaccatactaatcttagttaccgctaacaacctattccaactgttcatcggctgagagggcgtagga

SEQ ID NO: 55166 - DNA, 120 bp, Homo sapiens
  misc_feature: 1518 for SV(W|O) and mtDNA
gggtttatcgtgtgagcacaccatatatttacagtaggaatagacgtagacacacgagcatatttcacctccgctaccataatcatcgctatccccaccggcgtcaaagtatttagctga

SEQ ID NO: 55167 - DNA, 120 bp, Homo sapiens
  misc_feature: 1518 for SV(W|O) and mtDNA
caccaattaagaaagcgttcaagctcaacacccactacctaaaaaatcccaaacatataactgaactcctcatacccaattggaccaatctatcaccctatagaagaactaatgttagta

SEQ ID NO: 55168 - DNA, 120 bp, Homo sapiens
  misc_feature: 1518 for SV(W|O) and mtDNA
taataatgacttgttggttgattgtagatattgggctgttaattgtcagttcagtgttttaatctgacgcaggcttatgcggaggagaatgttttcatgttacttatactaacattagtt

SEQ ID NO: 55169 - DNA, 120 bp, Homo sapiens
  misc_feature: 1518 for SV(W|O) and mtDNA
aaagtgcacttggacgaaccagagtgtagcttaacacaaagcacccaacttacacttaggagatttcaacttaacttgaccgctctgagctaaacctagccccaaacccactccacctta

SEQ ID NO: 55170 - DNA, 120 bp, Homo sapiens
  misc_feature: 1518 for SV(W|O) and mtDNA
gttttgagctgcattgctgcgtgcttgatgcttgtcccttttgatcgtggtgatttagagggtgaactcactggaacggggatgcttgcatgtgtaatcttactaagagctaatagaaag

SEQ ID NO: 55171 - DNA, 120 bp, Homo sapiens
  misc_feature: 1518 for SV(W|O) and mtDNA
gtcgaaggtggatttagcagtaaactgagagtagagtgcttagttgaacagggccctgaagcgcgtacacaccgcccgtcaccctcctcaagtatacttcaaaggacatttaactaaaac

SEQ ID NO: 55172 - DNA, 120 bp, Homo sapiens
  misc_feature: 1518 for SV(W|O) and mtDNA
gtggggggcatccatatagtcactccaggtttatggagggttcttctactattaggacttttcgctttgaagcgaaggcttctcaaatcatgaaaattattaatattactgctgttagag

SEQ ID NO: 55173 - DNA, 120 bp, Homo sapiens
  misc_feature: 1518 for SV(W|O) and mtDNA
ggtagggtggggggcatccatatagtcactccaggtttatggagggttcttctactattaggacttttcgctttgaagcgaaggcttctcaaatcatgaaaattattaatattactgctg

SEQ ID NO: 55174 - DNA, 120 bp, Homo sapiens
  misc_feature: 1518 for SV(W|O) and mtDNA
ggtagctcgtctggtttcgggggtcttagctttggctctccttgcaaagttatttctagttaattcattatgcagaaggtataggggttagtccttgctatattatgcttggttataatt

SEQ ID NO: 55175 - DNA, 120 bp, Homo sapiens
  misc_feature: 1518 for SV(W|O) and mtDNA
acgagccacagcttaaaactcaaaggacctggcggtgcttcatatccctctagaggagcctgttctgtaatcgataaaccccgatcaacctcaccacctcttgctcagcctatataccgc

SEQ ID NO: 55176 - DNA, 120 bp, Homo sapiens
  misc_feature: 1518 for SV(W|O) and mtDNA
gaaagtgcacttggacgaaccagagtgtagcttaacacaaagcacccaacttacacttaggagatttcaacttaacttgaccgctctgagctaaacctagccccaaacccactccacctt

SEQ ID NO: 55177 - DNA, 120 bp, Homo sapiens
  misc_feature: 1518 for SV(W|O) and mtDNA
ctatgtatttcgtacattactgccagccaccatgaatattgtacggtaccataaatacttgaccacctgtagtacataaaaacccaatccacatcaaaaccccctccccatgcttacaag

SEQ ID NO: 55178 - DNA, 120 bp, Homo sapiens
  misc_feature: 1518 for SV(W|O) and mtDNA
aagcgttttgagctgcattgctgcgtgcttgatgcttgtcccttttgatcgtggtgatttagagggtgaactcactggaacggggatgcttgcatgtgtaatcttactaagagctaatag

SEQ ID NO: 55179 - DNA, 120 bp, Homo sapiens
  misc_feature: 1518 for SV(W|O) and mtDNA
catcctcattactattctgcctagcaaactcaaactacgaacgcactcacagtcgcatcataatcctctctcaaggacttcaaactctactcccactaatagctttttgatgacttctag

SEQ ID NO: 55180 - DNA, 120 bp, Homo sapiens
  misc_feature: 1518 for SV(W|O) and mtDNA
agtgttgtgtatggttatcatttgttttgaggttagtttgattagtcattgttgggtggtgattagtcggttgttgatgagatatttggaggtggggatcaatagagggggaaatagaat

SEQ ID NO: 55181 - DNA, 120 bp, Homo sapiens
  misc_feature: 1518 for SV(W|O) and mtDNA
aaaattgtaataagcagtgcttgaattatttggtttcggttgttttctattagactatggtgagctcaggtgattgatactcctgatgcgagtaatacggatgtgtttaggagtgggact

SEQ ID NO: 55182 - DNA, 120 bp, Homo sapiens
  misc_feature: 1518 for SV(W|O) and mtDNA
accgctgcttcgcaggcggcaaagactagtatggcaataggcacaatattggctaagagggagtgggtgttgagggttatgagagtagctataatgaacagcgatagtattattccttct

SEQ ID NO: 55183 - DNA, 120 bp, Homo sapiens
  misc_feature: 1517 for SV(W|O) and mtDNA
tttttaatgcaggtttggtagtttaggacctgtgggtttgttaggtactgtttgcattaataaattaaagctccatagggtcttctcgtcttgctgtgttatgcccgcctcttcacgggc

SEQ ID NO: 55184 - DNA, 120 bp, Homo sapiens
  misc_feature: 1517 for SV(W|O) and mtDNA
ttatatgtttgggattttttaggtagtgggtgttgagcttgaacgctttcttaattggtggctgcttttaggcctactatgggtgttaaattttttactctctctacaaggttttttcct

SEQ ID NO: 55185 - DNA, 120 bp, Homo sapiens
  misc_feature: 1517 for SV(W|O) and mtDNA
acaacactaaaggacgaacctgatctcttatactagtatccttaatcatttttattgccacaactaacctcctcggactcctgcctcactcatttacaccaaccacccaactatctataa

SEQ ID NO: 55186 - DNA, 120 bp, Homo sapiens
  misc_feature: 1517 for SV(W|O) and mtDNA
ttaggtactgtttgcattaataaattaaagctccatagggtcttctcgtcttgctgtgttatgcccgcctcttcacgggcaggtcaatttcactggttaaaagtaagagacagctgaacc

SEQ ID NO: 55187 - DNA, 120 bp, Homo sapiens
  misc_feature: 1517 for SV(W|O) and mtDNA
ttagagggttctgtgggcaaatttaaagttgaactaagattctatcttggacaaccagctatcaccaggctcggtaggtttgtcgcctctacctataaatcttcccactattttgctaca

SEQ ID NO: 55188 - DNA, 120 bp, Homo sapiens
  misc_feature: 1517 for SV(W|O) and mtDNA
ttacatcctcattactattctgcctagcaaactcaaactacgaacgcactcacagtcgcatcataatcctctctcaaggacttcaaactctactcccactaatagctttttgatgacttc

SEQ ID NO: 55189 - DNA, 120 bp, Homo sapiens
  misc_feature: 1517 for SV(W|O) and mtDNA
tgttgtgtatggttatcatttgttttgaggttagtttgattagtcattgttgggtggtgattagtcggttgttgatgagatatttggaggtggggatcaatagagggggaaatagaatga

SEQ ID NO: 55190 - DNA, 120 bp, Homo sapiens
  misc_feature: 1517 for SV(W|O) and mtDNA
cgctatgtatttcgtacattactgccagccaccatgaatattgtacggtaccataaatacttgaccacctgtagtacataaaaacccaatccacatcaaaaccccctccccatgcttaca

SEQ ID NO: 55191 - DNA, 120 bp, Homo sapiens
  misc_feature: 1517 for SV(W|O) and mtDNA
atactaatcttagttaccgctaacaacctattccaactgttcatcggctgagagggcgtaggaattatatccttcttgctcatcagttgatgatacgcccgagcagatgccaacacagca

SEQ ID NO: 55192 - DNA, 120 bp, Homo sapiens
  misc_feature: 1517 for SV(W|O) and mtDNA
gtaatattgaacgtaggtgcgataaataatgggatgaggcaggaatcaaagacagatactgcgacatagggtgctccggctccagcgtctcgcaatgctatcgcgtgcataccccccaga

SEQ ID NO: 55193 - DNA, 120 bp, Homo sapiens
  misc_feature: 1517 for SV(W|O) and mtDNA
cacaacactaaaggacgaacctgatctcttatactagtatccttaatcatttttattgccacaactaacctcctcggactcctgcctcactcatttacaccaaccacccaactatctata

SEQ ID NO: 55194 - DNA, 120 bp, Homo sapiens
  misc_feature: 1517 for SV(W|O) and mtDNA
gatttacgccgatgaatatgatagtgaaatggattttggcgtaggtttggtctagggtgtagcctgagaataggggaaatcagtgaatgaagcctcctatgatggcaaatacagctccta

SEQ ID NO: 55195 - DNA, 120 bp, Homo sapiens
  misc_feature: 1517 for SV(W|O) and mtDNA
tacgagccacagcttaaaactcaaaggacctggcggtgcttcatatccctctagaggagcctgttctgtaatcgataaaccccgatcaacctcaccacctcttgctcagcctatataccg

SEQ ID NO: 55196 - DNA, 120 bp, Homo sapiens
  misc_feature: 1517 for SV(W|O) and mtDNA
ctatcatcacccgatgaggcaaccagccagaacgcctgaacgcaggcacatacttcctattctacaccctagtaggctcccttcccctactcatcgcactaatttacactcacaacaccc

SEQ ID NO: 55197 - DNA, 120 bp, Homo sapiens
  misc_feature: 1517 for SV(W|O) and mtDNA
ggggtgatctaaaacactctttacgccggcttctattgacttgggttaatcgtgtgaccgcggtggctggcacgaaattgaccaaccctggggttagtatagcttagttaaactttcgtt

SEQ ID NO: 55198 - DNA, 120 bp, Homo sapiens
  misc_feature: 1517 for SV(W|O) and mtDNA
ggggcatccatatagtcactccaggtttatggagggttcttctactattaggacttttcgctttgaagcgaaggcttctcaaatcatgaaaattattaatattactgctgttagagaaat

SEQ ID NO: 55199 - DNA, 120 bp, Homo sapiens
  misc_feature: 1517 for SV(W|O) and mtDNA
gggctctgccatcttaacaaaccctgttcttgggtgggtgtgggtataatactaagttgagatgatatcatttacgggggaaggcgctttgtgaagtaggccttatttctcttgtccttt

SEQ ID NO: 55200 - DNA, 120 bp, Homo sapiens
  misc_feature: 1517 for SV(W|O) and mtDNA
ggaaaaaggttttcatctccggtttacaagactggtgtattagtttatactacaaggacaggcccatttgagtattttgttttcaattagggagatagttggtattaggattaggattgt

SEQ ID NO: 55201 - DNA, 120 bp, Homo sapiens
  misc_feature: 1517 for SV(W|O) and mtDNA
gcatttgtaataatcttcttcatagtaatacccatcataatcggaggctttggcaactgactagttcccctaataatcggtgcccccgatatggcgtttccccgcataaacaacataagc

SEQ ID NO: 55202 - DNA, 120 bp, Homo sapiens
  misc_feature: 1517 for SV(W|O) and mtDNA
aataatgacttgttggttgattgtagatattgggctgttaattgtcagttcagtgttttaatctgacgcaggcttatgcggaggagaatgttttcatgttacttatactaacattagttc

SEQ ID NO: 55203 - DNA, 120 bp, Homo sapiens
  misc_feature: 1517 for SV(W|O) and mtDNA
cagatcacgtaggactttaatcgttgaacaaacgaacctttaatagcggctgcaccatcgggatgtcctgatccaacatcgaggtcgtaaaccctattgttgatatggactctagaatag

SEQ ID NO: 55204 - DNA, 120 bp, Homo sapiens
  misc_feature: 1517 for SV(W|O) and mtDNA
ctatcgtagttttctggggtagaaaatgtagcccatttcttgccacctcatgggctacaccttgacctaacgtctttacgtgggtacttgcgcttactttgtagccttcatcagggtttg

SEQ ID NO: 55205 - DNA, 120 bp, Homo sapiens
  misc_feature: 1517 for SV(W|O) and mtDNA
atcatagctcagaccatacctatgtatccaaatggttctttttttccggagtagtaagttacaatatgggagattattccgaagcctggtaggataagaatataaacttcagggtgaccg

SEQ ID NO: 55206 - DNA, 120 bp, Homo sapiens
  misc_feature: 1517 for SV(W|O) and mtDNA
cccctactcatcgcactaatttacactcacaacaccctaggctcactaaacattctactactcactctcactgcccaagaactatcaaactcctgagccaacaacttaatatgactagct

SEQ ID NO: 55207 - DNA, 120 bp, Homo sapiens
  misc_feature: 1517 for SV(W|O) and mtDNA
ccaccgctgcttcgcaggcggcaaagactagtatggcaataggcacaatattggctaagagggagtgggtgttgagggttatgagagtagctataatgaacagcgatagtattattcctt

SEQ ID NO: 55208 - DNA, 120 bp, Homo sapiens
  misc_feature: 1517 for SV(W|O) and mtDNA
caaccgctatgtatttcgtacattactgccagccaccatgaatattgtacggtaccataaatacttgaccacctgtagtacataaaaacccaatccacatcaaaaccccctccccatgct

SEQ ID NO: 55209 - DNA, 120 bp, Homo sapiens
  misc_feature: 1517 for SV(W|O) and mtDNA
caaaaaagagtaataaacttcgccttaattttaataatcaacaccctcctagccttactactaataattattacattttgactaccacaactcaacggctacatagaaaaatccacccct

SEQ ID NO: 55210 - DNA, 120 bp, Homo sapiens
  misc_feature: 1516 for SV(W|O) and mtDNA
ttgcagttgatgtgtgatagttgagggttgattgctgtacttgcttgtaagcatggggagggggttttgatgtggattgggtttttatgtactacaggtggtcaagtatttatggtaccg

SEQ ID NO: 55211 - DNA, 120 bp, Homo sapiens
  misc_feature: 1516 for SV(W|O) and mtDNA
tgtttaatatttttagttgggtgatgaggaatagtgtaaggagtatgggggtaattatggtgggccatacggtagtatttagttggggcatttcactgtaaagaggtgttggttctctta

SEQ ID NO: 55212 - DNA, 120 bp, Homo sapiens
  misc_feature: 1516 for SV(W|O) and mtDNA
tgactaccacaactcaacggctacatagaaaaatccaccccttacgagtgcggcttcgaccctatatcccccgcccgcgtccctttctccataaaattcttcttagtagctattaccttc

SEQ ID NO: 55213 - DNA, 120 bp, Homo sapiens
  misc_feature: 1516 for SV(W|O) and mtDNA
tcctccctactatgcctagaaggaataatactatcgctgttcattatagctactctcataaccctcaacacccactccctcttagccaatattgtgcctattgccatactagtctttgcc

SEQ ID NO: 55214 - DNA, 120 bp, Homo sapiens
  misc_feature: 1516 for SV(W|O) and mtDNA
tacgccgatgaatatgatagtgaaatggattttggcgtaggtttggtctagggtgtagcctgagaataggggaaatcagtgaatgaagcctcctatgatggcaaatacagctcctattga

SEQ ID NO: 55215 - DNA, 120 bp, Homo sapiens
  misc_feature: 1516 for SV(W|O) and mtDNA
agcgcaatcctattctagagtccatatcaacaatagggtttacgacctcgatgttggatcaggacatcccgatggtgcagccgctattaaaggttcgtttgttcaacgattaaagtccta

SEQ ID NO: 55216 - DNA, 120 bp, Homo sapiens
  misc_feature: 1516 for SV(W|O) and mtDNA
tacaaatctccttaattataacattcacagccacagaactaatcatattttatatcttcttcgaaaccacacttatccccaccttggctatcatcacccgatgaggcaaccagccagaac

SEQ ID NO: 55217 - DNA, 120 bp, Homo sapiens
  misc_feature: 1516 for SV(W|O) and mtDNA
aaggacaggcccatttgagtattttgttttcaattagggagatagttggtattaggattaggattgttgtgaagtatagtacggatgctacttgtccaatgatggtaaaagggtagctta

SEQ ID NO: 55218 - DNA, 120 bp, Homo sapiens
  misc_feature: 1516 for SV(W|O) and mtDNA
gtgttgagcttgaacgctttcttaattggtggctgcttttaggcctactatgggtgttaaattttttactctctctacaaggttttttcctagtgtccaaagagctgttcctctttggac

SEQ ID NO: 55219 - DNA, 120 bp, Homo sapiens
  misc_feature: 1516 for SV(W|O) and mtDNA
gtattgactcacccatcaacaaccgctatgtatttcgtacattactgccagccaccatgaatattgtacggtaccataaatacttgaccacctgtagtacataaaaacccaatccacatc

SEQ ID NO: 55220 - DNA, 120 bp, Homo sapiens
  misc_feature: 1516 for SV(W|O) and mtDNA
gacatcgtactacacgacacgtactacgttgtagcccacttccactatgtcctatcaataggagctgtatttgccatcataggaggcttcattcactgatttcccctattctcaggctac

SEQ ID NO: 55221 - DNA, 120 bp, Homo sapiens
  misc_feature: 1516 for SV(W|O) and mtDNA
gtaagttgggtgctttgtgttaagctacactctggttcgtccaagtgcactttccagtacacttaccatgttacgacttgtctcctctatataaatgcgtaggggttttagttaaatgtc

SEQ ID NO: 55222 - DNA, 120 bp, Homo sapiens
  misc_feature: 1516 for SV(W|O) and mtDNA
cttcctagggtttatcgtgtgagcacaccatatatttacagtaggaatagacgtagacacacgagcatatttcacctccgctaccataatcatcgctatccccaccggcgtcaaagtatt

SEQ ID NO: 55223 - DNA, 120 bp, Homo sapiens
  misc_feature: 1516 for SV(W|O) and mtDNA
aaagatgaaaaattataaccaagcataatatagcaaggactaacccctataccttctgcataatgaattaactagaaataactttgcaaggagagccaaagctaagacccccgaaaccag

SEQ ID NO: 55224 - DNA, 120 bp, Homo sapiens
  misc_feature: 1516 for SV(W|O) and mtDNA
aagggctatcgtagttttctggggtagaaaatgtagcccatttcttgccacctcatgggctacaccttgacctaacgtctttacgtgggtacttgcgcttactttgtagccttcatcagg

SEQ ID NO: 55225 - DNA, 120 bp, Homo sapiens
  misc_feature: 1516 for SV(W|O) and mtDNA
ccgattcaggttagaatgaggaggtctgcggctaggagtcaataaagtgattggcttagtgggcgaaatattatgctttgttgtttggatatatggaggatggggattattgctaggatg

SEQ ID NO: 55226 - DNA, 120 bp, Homo sapiens
  misc_feature: 1516 for SV(W|O) and mtDNA
ccctactcatcgcactaatttacactcacaacaccctaggctcactaaacattctactactcactctcactgcccaagaactatcaaactcctgagccaacaacttaatatgactagctt

SEQ ID NO: 55227 - DNA, 120 bp, Homo sapiens
  misc_feature: 1516 for SV(W|O) and mtDNA
aatcctatatatcttaatggcacatgcagcgcaagtaggtctacaagacgctacttcccctatcatagaagagcttatcacctttcatgatcacgccctcataatcattttccttatctg

SEQ ID NO: 55228 - DNA, 120 bp, Homo sapiens
  misc_feature: 1516 for SV(W|O) and mtDNA
accagacaaccttagccaaaccatttacccaaataaagtataggcgatagaaattgaaacctggcgcaatagatatagtaccgcaagggaaagatgaaaaattataaccaagcataatat

SEQ ID NO: 55229 - DNA, 120 bp, Homo sapiens
  misc_feature: 1516 for SV(W|O) and mtDNA
agaatgaggaggtctgcggctaggagtcaataaagtgattggcttagtgggcgaaatattatgctttgttgtttggatatatggaggatggggattattgctaggatgaggatggatagt

SEQ ID NO: 55230 - DNA, 120 bp, Homo sapiens
  misc_feature: 1515 for SV(W|O) and mtDNA
ttggcaactgactagttcccctaataatcggtgcccccgatatggcgtttccccgcataaacaacataagcttctgactcttacctccctctctcctactcctgctcgcatctgctatag

SEQ ID NO: 55231 - DNA, 120 bp, Homo sapiens
  misc_feature: 1515 for SV(W|O) and mtDNA
gtcctttagtgttgtgtatggttatcatttgttttgaggttagtttgattagtcattgttgggtggtgattagtcggttgttgatgagatatttggaggtggggatcaatagagggggaa

SEQ ID NO: 55232 - DNA, 120 bp, Homo sapiens
  misc_feature: 1515 for SV(W|O) and mtDNA
tgtactggaaagtgcacttggacgaaccagagtgtagcttaacacaaagcacccaacttacacttaggagatttcaacttaacttgaccgctctgagctaaacctagccccaaacccact

SEQ ID NO: 55233 - DNA, 120 bp, Homo sapiens
  misc_feature: 1515 for SV(W|O) and mtDNA
aaccaatagccctggccgtacgcctaaccgctaacattactgcaggccacctactcatgcacctaattggaagcgccaccctagcaatatcaaccattaaccttccctctacacttatca

SEQ ID NO: 55234 - DNA, 120 bp, Homo sapiens
  misc_feature: 1515 for SV(W|O) and mtDNA
tcgcacggactacaaccacgaccaatgatatgaaaaaccatcgttgtatttcaactacaagaacaccaatgaccccaatacgcaaaactaaccccctaataaaattaattaaccactcat

SEQ ID NO: 55235 - DNA, 120 bp, Homo sapiens
  misc_feature: 1515 for SV(W|O) and mtDNA
ccagacttagggctaggatgatgattaataagagggatgacataactattagtggcaggttagttgtttgtagggctcatggtaggggtaaaaggagggcaatttctagatcaaataata

SEQ ID NO: 55236 - DNA, 120 bp, Homo sapiens
  misc_feature: 1515 for SV(W|O) and mtDNA
ggtcaccctgaagtttatattcttatcctaccaggcttcggaataatctcccatattgtaacttactactccggaaaaaaagaaccatttggatacataggtatggtctgagctatgata

SEQ ID NO: 55237 - DNA, 120 bp, Homo sapiens
  misc_feature: 1515 for SV(W|O) and mtDNA
taggctgtgggtggttgtgttgattcaaattatgtgttttttggaaagtcatgtcagtggtagtaatataattgttgggacgattagttttagcattggagtaggtttaggttatgtacg

SEQ ID NO: 55238 - DNA, 120 bp, Homo sapiens
  misc_feature: 1515 for SV(W|O) and mtDNA
ccgctgcttcgcaggcggcaaagactagtatggcaataggcacaatattggctaagagggagtgggtgttgagggttatgagagtagctataatgaacagcgatagtattattccttcta

SEQ ID NO: 55239 - DNA, 120 bp, Homo sapiens
  misc_feature: 1515 for SV(W|O) and mtDNA
aaaaagagtaataaacttcgccttaattttaataatcaacaccctcctagccttactactaataattattacattttgactaccacaactcaacggctacatagaaaaatccacccctta

SEQ ID NO: 55240 - DNA, 120 bp, Homo sapiens
  misc_feature: 1515 for SV(W|O) and mtDNA
aaaggtagcataatcacttgttccttaaatagggacctgtatgaatggctccacgagggttcagctgtctcttacttttaaccagtgaaattgacctgcccgtgaagaggcgggcataac

SEQ ID NO: 55241 - DNA, 120 bp, Homo sapiens
  misc_feature: 1515 for SV(W|O) and mtDNA
gtccatatcaacaatagggtttacgacctcgatgttggatcaggacatcccgatggtgcagccgctattaaaggttcgtttgttcaacgattaaagtcctacgtgatctgagttcagacc

SEQ ID NO: 55242 - DNA, 120 bp, Homo sapiens
  misc_feature: 1515 for SV(W|O) and mtDNA
ctactcatcgcactaatttacactcacaacaccctaggctcactaaacattctactactcactctcactgcccaagaactatcaaactcctgagccaacaacttaatatgactagcttac

SEQ ID NO: 55243 - DNA, 120 bp, Homo sapiens
  misc_feature: 1515 for SV(W|O) and mtDNA
ggtagtattggttatggttcattgtccggagagtatattgttgaagaggatagctattagaaggattatggatgcggttgcttgcgtgaggaaatacttgatggcagcttctgtggaacg

SEQ ID NO: 55244 - DNA, 120 bp, Homo sapiens
  misc_feature: 1515 for SV(W|O) and mtDNA
gaacctttaatagcggctgcaccatcgggatgtcctgatccaacatcgaggtcgtaaaccctattgttgatatggactctagaataggattgcgctgttatccctagggtaacttgttcc

SEQ ID NO: 55245 - DNA, 120 bp, Homo sapiens
  misc_feature: 1515 for SV(W|O) and mtDNA
attgacctgcccgtgaagaggcgggcataacacagcaagacgagaagaccctatggagctttaatttattaatgcaaacagtacctaacaaacccacaggtcctaaactaccaaacctgc

SEQ ID NO: 55246 - DNA, 120 bp, Homo sapiens
  misc_feature: 1515 for SV(W|O) and mtDNA
atctaaaacactctttacgccggcttctattgacttgggttaatcgtgtgaccgcggtggctggcacgaaattgaccaaccctggggttagtatagcttagttaaactttcgtttattgc

SEQ ID NO: 55247 - DNA, 120 bp, Homo sapiens
  misc_feature: 1515 for SV(W|O) and mtDNA
cccatttgagtattttgttttcaattagggagatagttggtattaggattaggattgttgtgaagtatagtacggatgctacttgtccaatgatggtaaaagggtagcttactggttgtc

SEQ ID NO: 55248 - DNA, 120 bp, Homo sapiens
  misc_feature: 1515 for SV(W|O) and mtDNA
gaacactacgagccacagcttaaaactcaaaggacctggcggtgcttcatatccctctagaggagcctgttctgtaatcgataaaccccgatcaacctcaccacctcttgctcagcctat

SEQ ID NO: 55249 - DNA, 120 bp, Homo sapiens
  misc_feature: 1515 for SV(W|O) and mtDNA
gaaatcgctgtcgccttaatccaagcctacgttttcacacttctagtaagcctctacctgcacgacaacacataatgacccaccaatcacatgcctatcatatagtaaaacccagcccat

SEQ ID NO: 55250 - DNA, 120 bp, Homo sapiens
  misc_feature: 1515 for SV(W|O) and mtDNA
caaaaacatcacctctagcatcaccagtattagaggcaccgcctgcccagtgacacatgtttaacggccgcggtaccctaaccgtgcaaaggtagcataatcacttgttccttaaatagg

SEQ ID NO: 55251 - DNA, 120 bp, Homo sapiens
  misc_feature: 1515 for SV(W|O) and mtDNA
cagtaatgttagcggttaggcgtacggccagggctattggttgaatgagtaggctgatggtttcgataataactagtatggggataaggggtgtaggtgtgccttgtggtaagaagtggg

SEQ ID NO: 55252 - DNA, 120 bp, Homo sapiens
  misc_feature: 1515 for SV(W|O) and mtDNA
accaatagccctggccgtacgcctaaccgctaacattactgcaggccacctactcatgcacctaattggaagcgccaccctagcaatatcaaccattaaccttccctctacacttatcat

SEQ ID NO: 55253 - DNA, 120 bp, Homo sapiens
  misc_feature: 1515 for SV(W|O) and mtDNA
aaacatgtgtcactgggcaggcggtgcctctaatactggtgatgctagaggtgatgtttttggtaaacaggcggggtaagatttgccgagttccttttactttttttaacctttccttat

SEQ ID NO: 55254 - DNA, 120 bp, Homo sapiens
  misc_feature: 1515 for SV(W|O) and mtDNA
acattggaacactatacctattattcggcgcatgagctggagtcctaggcacagctctaagcctccttattcgagccgagctgggccagccaggcaaccttctaggtaacgaccacatct

SEQ ID NO: 55255 - DNA, 120 bp, Homo sapiens
  misc_feature: 1515 for SV(W|O) and mtDNA
aaccgctatgtatttcgtacattactgccagccaccatgaatattgtacggtaccataaatacttgaccacctgtagtacataaaaacccaatccacatcaaaaccccctccccatgctt

SEQ ID NO: 55256 - DNA, 120 bp, Homo sapiens
  misc_feature: 1514 for SV(W|O) and mtDNA
ccaactatctccctaattgaaaacaaaatactcaaatgggcctgtccttgtagtataaactaatacaccagtcttgtaaaccggagatgaaaacctttttccaaggacaaatcagagaaa

SEQ ID NO: 55257 - DNA, 120 bp, Homo sapiens
  misc_feature: 1514 for SV(W|O) and mtDNA
cttaagggtcgaaggtggatttagcagtaaactgagagtagagtgcttagttgaacagggccctgaagcgcgtacacaccgcccgtcaccctcctcaagtatacttcaaaggacatttaa

SEQ ID NO: 55258 - DNA, 120 bp, Homo sapiens
  misc_feature: 1514 for SV(W|O) and mtDNA
tggggtgtgataggtggcacggagaattttggattctcagggatgggttcgattctcatagtcctagaaataagggggtttaagctcctattatttactctatcaaagtaactcttttat

SEQ ID NO: 55259 - DNA, 120 bp, Homo sapiens
  misc_feature: 1514 for SV(W|O) and mtDNA
actgctcggaggttgggttctgctccgaggtcgccccaaccgaaatttttaatgcaggtttggtagtttaggacctgtgggtttgttaggtactgtttgcattaataaattaaagctcca

SEQ ID NO: 55260 - DNA, 120 bp, Homo sapiens
  misc_feature: 1514 for SV(W|O) and mtDNA
tattgactcacccatcaacaaccgctatgtatttcgtacattactgccagccaccatgaatattgtacggtaccataaatacttgaccacctgtagtacataaaaacccaatccacatca

SEQ ID NO: 55261 - DNA, 120 bp, Homo sapiens
  misc_feature: 1514 for SV(W|O) and mtDNA
tcgccagaacactacgagccacagcttaaaactcaaaggacctggcggtgcttcatatccctctagaggagcctgttctgtaatcgataaaccccgatcaacctcaccacctcttgctca

SEQ ID NO: 55262 - DNA, 120 bp, Homo sapiens
  misc_feature: 1514 for SV(W|O) and mtDNA
tccgtattactcgcatcaggagtatcaatcacctgagctcaccatagtctaatagaaaacaaccgaaaccaaataattcaagcactgcttattacaattttactgggtctctattttacc

SEQ ID NO: 55263 - DNA, 120 bp, Homo sapiens
  misc_feature: 1514 for SV(W|O) and mtDNA
aaggttttcatctccggtttacaagactggtgtattagtttatactacaaggacaggcccatttgagtattttgttttcaattagggagatagttggtattaggattaggattgttgtga

SEQ ID NO: 55264 - DNA, 120 bp, Homo sapiens
  misc_feature: 1514 for SV(W|O) and mtDNA
acttgcttgtaagcatggggagggggttttgatgtggattgggtttttatgtactacaggtggtcaagtatttatggtaccgtacaatattcatggtggctggcagtaatgtacgaaata

SEQ ID NO: 55265 - DNA, 120 bp, Homo sapiens
  misc_feature: 1514 for SV(W|O) and mtDNA
atttagagggttctgtgggcaaatttaaagttgaactaagattctatcttggacaaccagctatcaccaggctcggtaggtttgtcgcctctacctataaatcttcccactattttgcta

SEQ ID NO: 55266 - DNA, 120 bp, Homo sapiens
  misc_feature: 1514 for SV(W|O) and mtDNA
tacttgcttgtaagcatggggagggggttttgatgtggattgggtttttatgtactacaggtggtcaagtatttatggtaccgtacaatattcatggtggctggcagtaatgtacgaaat

SEQ ID NO: 55267 - DNA, 120 bp, Homo sapiens
  misc_feature: 1514 for SV(W|O) and mtDNA
ctacgccaaaatccatttcactatcatattcatcggcgtaaatctaactttcttcccacaacactttctcggcctatccggaatgccccgacgttactcggactaccccgatgcatacac

SEQ ID NO: 55268 - DNA, 120 bp, Homo sapiens
  misc_feature: 1514 for SV(W|O) and mtDNA
agccctggccgtacgcctaaccgctaacattactgcaggccacctactcatgcacctaattggaagcgccaccctagcaatatcaaccattaaccttccctctacacttatcatcttcac

SEQ ID NO: 55269 - DNA, 120 bp, Homo sapiens
  misc_feature: 1514 for SV(W|O) and mtDNA
gtcaccctgaagtttatattcttatcctaccaggcttcggaataatctcccatattgtaacttactactccggaaaaaaagaaccatttggatacataggtatggtctgagctatgatat

SEQ ID NO: 55270 - DNA, 120 bp, Homo sapiens
  misc_feature: 1514 for SV(W|O) and mtDNA
accagtgaaattgacctgcccgtgaagaggcgggcataacacagcaagacgagaagaccctatggagctttaatttattaatgcaaacagtacctaacaaacccacaggtcctaaactac

SEQ ID NO: 55271 - DNA, 120 bp, Homo sapiens
  misc_feature: 1514 for SV(W|O) and mtDNA
gcctagaccaagaagttattatctcgaactgacactgagccacaacccaaacaacccagctctccctaagcttcaaactagactacttctccataatattcatccctgtagcattgttcg

SEQ ID NO: 55272 - DNA, 120 bp, Homo sapiens
  misc_feature: 1514 for SV(W|O) and mtDNA
ctcatatcctccctactatgcctagaaggaataatactatcgctgttcattatagctactctcataaccctcaacacccactccctcttagccaatattgtgcctattgccatactagtc

SEQ ID NO: 55273 - DNA, 120 bp, Homo sapiens
  misc_feature: 1514 for SV(W|O) and mtDNA
aatatgatagtgaaatggattttggcgtaggtttggtctagggtgtagcctgagaataggggaaatcagtgaatgaagcctcctatgatggcaaatacagctcctattgataggacatag

SEQ ID NO: 55274 - DNA, 120 bp, Homo sapiens
  misc_feature: 1514 for SV(W|O) and mtDNA
atatgtttgggattttttaggtagtgggtgttgagcttgaacgctttcttaattggtggctgcttttaggcctactatgggtgttaaattttttactctctctacaaggttttttcctag

SEQ ID NO: 55275 - DNA, 120 bp, Homo sapiens
  misc_feature: 1514 for SV(W|O) and mtDNA
cgggcttacatcctcattactattctgcctagcaaactcaaactacgaacgcactcacagtcgcatcataatcctctctcaaggacttcaaactctactcccactaatagctttttgatg

SEQ ID NO: 55276 - DNA, 120 bp, Homo sapiens
  misc_feature: 1514 for SV(W|O) and mtDNA
aaatcgctgtcgccttaatccaagcctacgttttcacacttctagtaagcctctacctgcacgacaacacataatgacccaccaatcacatgcctatcatatagtaaaacccagcccatg

SEQ ID NO: 55277 - DNA, 120 bp, Homo sapiens
  misc_feature: 1514 for SV(W|O) and mtDNA
atacggttgtataggattgcttgaatggctgctgtgttggcatctgctcgggcgtatcatcaactgatgagcaagaaggatataattcctacgccctctcagccgatgaacagttggaat

SEQ ID NO: 55278 - DNA, 120 bp, Homo sapiens
  misc_feature: 1514 for SV(W|O) and mtDNA
atgttcgcctgtaatattgaacgtaggtgcgataaataatgggatgaggcaggaatcaaagacagatactgcgacatagggtgctccggctccagcgtctcgcaatgctatcgcgtgcat

SEQ ID NO: 55279 - DNA, 120 bp, Homo sapiens
  misc_feature: 1514 for SV(W|O) and mtDNA
atatgatagtgaaatggattttggcgtaggtttggtctagggtgtagcctgagaataggggaaatcagtgaatgaagcctcctatgatggcaaatacagctcctattgataggacatagt

SEQ ID NO: 55280 - DNA, 120 bp, Homo sapiens
  misc_feature: 1514 for SV(W|O) and mtDNA
aggtactgtttgcattaataaattaaagctccatagggtcttctcgtcttgctgtgttatgcccgcctcttcacgggcaggtcaatttcactggttaaaagtaagagacagctgaaccct

SEQ ID NO: 55281 - DNA, 120 bp, Homo sapiens
  misc_feature: 1514 for SV(W|O) and mtDNA
aataaaaatgattaaggatactagtataagagatcaggttcgtcctttagtgttgtgtatggttatcatttgttttgaggttagtttgattagtcattgttgggtggtgattagtcggtt

SEQ ID NO: 55282 - DNA, 120 bp, Homo sapiens
  misc_feature: 1514 for SV(W|O) and mtDNA
aaaaaagagtaataaacttcgccttaattttaataatcaacaccctcctagccttactactaataattattacattttgactaccacaactcaacggctacatagaaaaatccacccctt

SEQ ID NO: 55283 - DNA, 120 bp, Homo sapiens
  misc_feature: 1513 for SV(W|O) and mtDNA
tttatgtactatgtactgttaagggtgggtaggtttgttggtatcctagtgggtgaggggtggctttggagttgcagttgatgtgtgatagttgagggttgattgctgtacttgcttgta

SEQ ID NO: 55284 - DNA, 120 bp, Homo sapiens
  misc_feature: 1513 for SV(W|O) and mtDNA
tttatgcggggaaacgccatatcgggggcaccgattattaggggaactagtcagttgccaaagcctccgattatgatgggtattactatgaagaagattattacaaatgcatgggctgtg

SEQ ID NO: 55285 - DNA, 120 bp, Homo sapiens
  misc_feature: 1513 for SV(W|O) and mtDNA
ttgtaactattatgagtcctagttgacttgaagtggagaaggctacgatttttttgatgtcattttgtgtaagggcgcagactgctgcgaacagagtggtgatagcgcctaagcatagtg

SEQ ID NO: 55286 - DNA, 120 bp, Homo sapiens
  misc_feature: 1513 for SV(W|O) and mtDNA
accaactatctccctaattgaaaacaaaatactcaaatgggcctgtccttgtagtataaactaatacaccagtcttgtaaaccggagatgaaaacctttttccaaggacaaatcagagaa

SEQ ID NO: 55287 - DNA, 120 bp, Homo sapiens
  misc_feature: 1513 for SV(W|O) and mtDNA
actcagatcacgtaggactttaatcgttgaacaaacgaacctttaatagcggctgcaccatcgggatgtcctgatccaacatcgaggtcgtaaaccctattgttgatatggactctagaa

SEQ ID NO: 55288 - DNA, 120 bp, Homo sapiens
  misc_feature: 1513 for SV(W|O) and mtDNA
gcttgtaagcatggggagggggttttgatgtggattgggtttttatgtactacaggtggtcaagtatttatggtaccgtacaatattcatggtggctggcagtaatgtacgaaatacata

SEQ ID NO: 55289 - DNA, 120 bp, Homo sapiens
  misc_feature: 1513 for SV(W|O) and mtDNA
accattcttaatttaactatttatattatcctaactactaccgcattcctactactcaacttaaactccagcaccacgaccctactactatctcgcacctgaaacaagctaacatgacta

SEQ ID NO: 55290 - DNA, 120 bp, Homo sapiens
  misc_feature: 1513 for SV(W|O) and mtDNA
atcatcacccgatgaggcaaccagccagaacgcctgaacgcaggcacatacttcctattctacaccctagtaggctcccttcccctactcatcgcactaatttacactcacaacacccta

SEQ ID NO: 55291 - DNA, 120 bp, Homo sapiens
  misc_feature: 1513 for SV(W|O) and mtDNA
tacacaacactaaaggacgaacctgatctcttatactagtatccttaatcatttttattgccacaactaacctcctcggactcctgcctcactcatttacaccaaccacccaactatcta

SEQ ID NO: 55292 - DNA, 120 bp, Homo sapiens
  misc_feature: 1513 for SV(W|O) and mtDNA
gtttatgcggggaaacgccatatcgggggcaccgattattaggggaactagtcagttgccaaagcctccgattatgatgggtattactatgaagaagattattacaaatgcatgggctgt

SEQ ID NO: 55293 - DNA, 120 bp, Homo sapiens
  misc_feature: 1513 for SV(W|O) and mtDNA
gttgtgtatggttatcatttgttttgaggttagtttgattagtcattgttgggtggtgattagtcggttgttgatgagatatttggaggtggggatcaatagagggggaaatagaatgat

SEQ ID NO: 55294 - DNA, 120 bp, Homo sapiens
  misc_feature: 1513 for SV(W|O) and mtDNA
atcctcattactattctgcctagcaaactcaaactacgaacgcactcacagtcgcatcataatcctctctcaaggacttcaaactctactcccactaatagctttttgatgacttctagc

SEQ ID NO: 55295 - DNA, 120 bp, Homo sapiens
  misc_feature: 1513 for SV(W|O) and mtDNA
gccatatcgggggcaccgattattaggggaactagtcagttgccaaagcctccgattatgatgggtattactatgaagaagattattacaaatgcatgggctgtgacgataacgttgtag

SEQ ID NO: 55296 - DNA, 120 bp, Homo sapiens
  misc_feature: 1513 for SV(W|O) and mtDNA
gataatgccgatgtttcaggtttctgagtagagaaatgatccgtaatataggcctcgcccgatgtgtaggaagaggcagataaagaatattgaggcgccattggcgtgaaggtagcggat

SEQ ID NO: 55297 - DNA, 120 bp, Homo sapiens
  misc_feature: 1513 for SV(W|O) and mtDNA
attttatatcttcttcgaaaccacacttatccccaccttggctatcatcacccgatgaggcaaccagccagaacgcctgaacgcaggcacatacttcctattctacaccctagtaggctc

SEQ ID NO: 55298 - DNA, 120 bp, Homo sapiens
  misc_feature: 1513 for SV(W|O) and mtDNA
cttctccacttcaagtcaactaggactcataatagttacaatcggcatcaaccaaccacacctagcattcctgcacatctgcacccacgccttcttcaaagccatactatttatgtgctc

SEQ ID NO: 55299 - DNA, 120 bp, Homo sapiens
  misc_feature: 1513 for SV(W|O) and mtDNA
ctggccgtacgcctaaccgctaacattactgcaggccacctactcatgcacctaattggaagcgccaccctagcaatatcaaccattaaccttccctctacacttatcatcttcacaatt

SEQ ID NO: 55300 - DNA, 120 bp, Homo sapiens
  misc_feature: 1513 for SV(W|O) and mtDNA
aaggtattagaaaaaccatttcataactttgtcaaagttaaattataggctaaatcctatatatcttaatggcacatgcagcgcaagtaggtctacaagacgctacttcccctatcatag

SEQ ID NO: 55301 - DNA, 120 bp, Homo sapiens
  misc_feature: 1513 for SV(W|O) and mtDNA
cagaggcttacgaccccttatttaccgagaaagctcacaagaactgctaactcatgcccccatgtctaacaacatggctttctcaacttttaaaggataacagctatccattggtcttag

SEQ ID NO: 55302 - DNA, 120 bp, Homo sapiens
  misc_feature: 1513 for SV(W|O) and mtDNA
cgggctctgccatcttaacaaaccctgttcttgggtgggtgtgggtataatactaagttgagatgatatcatttacgggggaaggcgctttgtgaagtaggccttatttctcttgtcctt

SEQ ID NO: 55303 - DNA, 120 bp, Homo sapiens
  misc_feature: 1513 for SV(W|O) and mtDNA
cctggccgtacgcctaaccgctaacattactgcaggccacctactcatgcacctaattggaagcgccaccctagcaatatcaaccattaaccttccctctacacttatcatcttcacaat

SEQ ID NO: 55304 - DNA, 120 bp, Homo sapiens
  misc_feature: 1513 for SV(W|O) and mtDNA
cctactaaccaacacactaaccatataccaatgatggcgcgatgtaacacgagaaagcacataccaaggccaccacacaccacctgtccaaaaaggccttcgatacgggataatcctatt

SEQ ID NO: 55305 - DNA, 120 bp, Homo sapiens
  misc_feature: 1513 for SV(W|O) and mtDNA
aatttttaatgcaggtttggtagtttaggacctgtgggtttgttaggtactgtttgcattaataaattaaagctccatagggtcttctcgtcttgctgtgttatgcccgcctcttcacgg

SEQ ID NO: 55306 - DNA, 120 bp, Homo sapiens
  misc_feature: 1513 for SV(W|O) and mtDNA
agggctatcgtagttttctggggtagaaaatgtagcccatttcttgccacctcatgggctacaccttgacctaacgtctttacgtgggtacttgcgcttactttgtagccttcatcaggg

SEQ ID NO: 55307 - DNA, 120 bp, Homo sapiens
  misc_feature: 1513 for SV(W|O) and mtDNA
cataaccattcttaatttaactatttatattatcctaactactaccgcattcctactactcaacttaaactccagcaccacgaccctactactatctcgcacctgaaacaagctaacatg

SEQ ID NO: 55308 - DNA, 120 bp, Homo sapiens
  misc_feature: 1513 for SV(W|O) and mtDNA
aaccattcttaatttaactatttatattatcctaactactaccgcattcctactactcaacttaaactccagcaccacgaccctactactatctcgcacctgaaacaagctaacatgact

SEQ ID NO: 55309 - DNA, 120 bp, Homo sapiens
  misc_feature: 1513 for SV(W|O) and mtDNA
acgaacctttaatagcggctgcaccatcgggatgtcctgatccaacatcgaggtcgtaaaccctattgttgatatggactctagaataggattgcgctgttatccctagggtaacttgtt

SEQ ID NO: 55310 - DNA, 120 bp, Homo sapiens
  misc_feature: 1512 for SV(W|O) and mtDNA
ggtctgcggctaggagtcaataaagtgattggcttagtgggcgaaatattatgctttgttgtttggatatatggaggatggggattattgctaggatgaggatggatagtaatagggcaa

SEQ ID NO: 55311 - DNA, 120 bp, Homo sapiens
  misc_feature: 1512 for SV(W|O) and mtDNA
tggacgaaccagagtgtagcttaacacaaagcacccaacttacacttaggagatttcaacttaacttgaccgctctgagctaaacctagccccaaacccactccaccttactaccagaca

SEQ ID NO: 55312 - DNA, 120 bp, Homo sapiens
  misc_feature: 1512 for SV(W|O) and mtDNA
agaaatcgctgtcgccttaatccaagcctacgttttcacacttctagtaagcctctacctgcacgacaacacataatgacccaccaatcacatgcctatcatatagtaaaacccagccca

SEQ ID NO: 55313 - DNA, 120 bp, Homo sapiens
  misc_feature: 1512 for SV(W|O) and mtDNA
tgcttcactcagccattttacctcacccccactgatgttcgccgaccgttgactattctctacaaaccacaaagacattggaacactatacctattattcggcgcatgagctggagtcct

SEQ ID NO: 55314 - DNA, 120 bp, Homo sapiens
  misc_feature: 1512 for SV(W|O) and mtDNA
tgcctagaccaagaagttattatctcgaactgacactgagccacaacccaaacaacccagctctccctaagcttcaaactagactacttctccataatattcatccctgtagcattgttc

SEQ ID NO: 55315 - DNA, 120 bp, Homo sapiens
  misc_feature: 1512 for SV(W|O) and mtDNA
caggttcgtcctttagtgttgtgtatggttatcatttgttttgaggttagtttgattagtcattgttgggtggtgattagtcggttgttgatgagatatttggaggtggggatcaataga

SEQ ID NO: 55316 - DNA, 120 bp, Homo sapiens
  misc_feature: 1512 for SV(W|O) and mtDNA
tccttggaaaaaggttttcatctccggtttacaagactggtgtattagtttatactacaaggacaggcccatttgagtattttgttttcaattagggagatagttggtattaggattagg

SEQ ID NO: 55317 - DNA, 120 bp, Homo sapiens
  misc_feature: 1512 for SV(W|O) and mtDNA
gatcacgtaggactttaatcgttgaacaaacgaacctttaatagcggctgcaccatcgggatgtcctgatccaacatcgaggtcgtaaaccctattgttgatatggactctagaatagga

SEQ ID NO: 55318 - DNA, 120 bp, Homo sapiens
  misc_feature: 1512 for SV(W|O) and mtDNA
tcctatatatcttaatggcacatgcagcgcaagtaggtctacaagacgctacttcccctatcatagaagagcttatcacctttcatgatcacgccctcataatcattttccttatctgct

SEQ ID NO: 55319 - DNA, 120 bp, Homo sapiens
  misc_feature: 1512 for SV(W|O) and mtDNA
actaatagttatgtcatccctcttattaatcatcatcctagccctaagtctggcctatgagtgactacaaaaaggattagactgaaccgaattggtatatagtttaaacaaaacgaatga

SEQ ID NO: 55320 - DNA, 120 bp, Homo sapiens
  misc_feature: 1512 for SV(W|O) and mtDNA
tcatatcctccctactatgcctagaaggaataatactatcgctgttcattatagctactctcataaccctcaacacccactccctcttagccaatattgtgcctattgccatactagtct

SEQ ID NO: 55321 - DNA, 120 bp, Homo sapiens
  misc_feature: 1512 for SV(W|O) and mtDNA
acatgtgtcactgggcaggcggtgcctctaatactggtgatgctagaggtgatgtttttggtaaacaggcggggtaagatttgccgagttccttttactttttttaacctttccttatga

SEQ ID NO: 55322 - DNA, 120 bp, Homo sapiens
  misc_feature: 1512 for SV(W|O) and mtDNA
agtaccgttaacttccaattaactagttttgacaacattcaaaaaagagtaataaacttcgccttaattttaataatcaacaccctcctagccttactactaataattattacattttga

SEQ ID NO: 55323 - DNA, 120 bp, Homo sapiens
  misc_feature: 1512 for SV(W|O) and mtDNA
tatagttgcaagcaggaggataatgccgatgtttcaggtttctgagtagagaaatgatccgtaatataggcctcgcccgatgtgtaggaagaggcagataaagaatattgaggcgccatt

SEQ ID NO: 55324 - DNA, 120 bp, Homo sapiens
  misc_feature: 1512 for SV(W|O) and mtDNA
taccgttaacttccaattaactagttttgacaacattcaaaaaagagtaataaacttcgccttaattttaataatcaacaccctcctagccttactactaataattattacattttgact

SEQ ID NO: 55325 - DNA, 120 bp, Homo sapiens
  misc_feature: 1512 for SV(W|O) and mtDNA
acttaagggtcgaaggtggatttagcagtaaactgagagtagagtgcttagttgaacagggccctgaagcgcgtacacaccgcccgtcaccctcctcaagtatacttcaaaggacattta

SEQ ID NO: 55326 - DNA, 120 bp, Homo sapiens
  misc_feature: 1512 for SV(W|O) and mtDNA
gggtatgaggagttcagttatatgtttgggattttttaggtagtgggtgttgagcttgaacgctttcttaattggtggctgcttttaggcctactatgggtgttaaattttttactctct

SEQ ID NO: 55327 - DNA, 120 bp, Homo sapiens
  misc_feature: 1512 for SV(W|O) and mtDNA
gctatcgtagttttctggggtagaaaatgtagcccatttcttgccacctcatgggctacaccttgacctaacgtctttacgtgggtacttgcgcttactttgtagccttcatcagggttt

SEQ ID NO: 55328 - DNA, 120 bp, Homo sapiens
  misc_feature: 1512 for SV(W|O) and mtDNA
gattcaggttagaatgaggaggtctgcggctaggagtcaataaagtgattggcttagtgggcgaaatattatgctttgttgtttggatatatggaggatggggattattgctaggatgag

SEQ ID NO: 55329 - DNA, 120 bp, Homo sapiens
  misc_feature: 1512 for SV(W|O) and mtDNA
ctggggtagaaaatgtagcccatttcttgccacctcatgggctacaccttgacctaacgtctttacgtgggtacttgcgcttactttgtagccttcatcagggtttgctgaagatggcgg

SEQ ID NO: 55330 - DNA, 120 bp, Homo sapiens
  misc_feature: 1512 for SV(W|O) and mtDNA
ctaaatcctatatatcttaatggcacatgcagcgcaagtaggtctacaagacgctacttcccctatcatagaagagcttatcacctttcatgatcacgccctcataatcattttccttat

SEQ ID NO: 55331 - DNA, 120 bp, Homo sapiens
  misc_feature: 1512 for SV(W|O) and mtDNA
agcaggaggataatgccgatgtttcaggtttctgagtagagaaatgatccgtaatataggcctcgcccgatgtgtaggaagaggcagataaagaatattgaggcgccattggcgtgaagg

SEQ ID NO: 55332 - DNA, 120 bp, Homo sapiens
  misc_feature: 1512 for SV(W|O) and mtDNA
agtattggttatggttcattgtccggagagtatattgttgaagaggatagctattagaaggattatggatgcggttgcttgcgtgaggaaatacttgatggcagcttctgtggaacgagg

SEQ ID NO: 55333 - DNA, 120 bp, Homo sapiens
  misc_feature: 1512 for SV(W|O) and mtDNA
catatatccaaacaacaaagcataatatttcgcccactaagccaatcactttattgactcctagccgcagacctcctcattctaacctgaatcggaggacaaccagtaagctaccctttt

SEQ ID NO: 55334 - DNA, 120 bp, Homo sapiens
  misc_feature: 1512 for SV(W|O) and mtDNA
agtatgttcgcctgtaatattgaacgtaggtgcgataaataatgggatgaggcaggaatcaaagacagatactgcgacatagggtgctccggctccagcgtctcgcaatgctatcgcgtg

SEQ ID NO: 55335 - DNA, 120 bp, Homo sapiens
  misc_feature: 1512 for SV(W|O) and mtDNA
acaaggcacacctacaccccttatccccatactagttattatcgaaaccatcagcctactcattcaaccaatagccctggccgtacgcctaaccgctaacattactgcaggccacctact

SEQ ID NO: 55336 - DNA, 120 bp, Homo sapiens
  misc_feature: 1512 for SV(W|O) and mtDNA
aggtttggtctagggtgtagcctgagaataggggaaatcagtgaatgaagcctcctatgatggcaaatacagctcctattgataggacatagtggaagtgggctacaacgtagtacgtgt

SEQ ID NO: 55337 - DNA, 120 bp, Homo sapiens
  misc_feature: 1512 for SV(W|O) and mtDNA
aggcccatttgagtattttgttttcaattagggagatagttggtattaggattaggattgttgtgaagtatagtacggatgctacttgtccaatgatggtaaaagggtagcttactggtt

SEQ ID NO: 55338 - DNA, 120 bp, Homo sapiens
  misc_feature: 1512 for SV(W|O) and mtDNA
aagtatgttcgcctgtaatattgaacgtaggtgcgataaataatgggatgaggcaggaatcaaagacagatactgcgacatagggtgctccggctccagcgtctcgcaatgctatcgcgt

SEQ ID NO: 55339 - DNA, 120 bp, Homo sapiens
  misc_feature: 1511 for SV(W|O) and mtDNA
tcctttagtgttgtgtatggttatcatttgttttgaggttagtttgattagtcattgttgggtggtgattagtcggttgttgatgagatatttggaggtggggatcaatagagggggaaa

SEQ ID NO: 55340 - DNA, 120 bp, Homo sapiens
  misc_feature: 1511 for SV(W|O) and mtDNA
ttggagtaggtttaggttatgtacgtagtctaggccatatgtgttggagattgagactagtagggctaggcccaccgctgcttcgcaggcggcaaagactagtatggcaataggcacaat

SEQ ID NO: 55341 - DNA, 120 bp, Homo sapiens
  misc_feature: 1511 for SV(W|O) and mtDNA
ggtattagaaaaaccatttcataactttgtcaaagttaaattataggctaaatcctatatatcttaatggcacatgcagcgcaagtaggtctacaagacgctacttcccctatcatagaa

SEQ ID NO: 55342 - DNA, 120 bp, Homo sapiens
  misc_feature: 1511 for SV(W|O) and mtDNA
taaattttttactctctctacaaggttttttcctagtgtccaaagagctgttcctctttggactaacagttaaatttacaaggggatttagagggttctgtgggcaaatttaaagttgaa

SEQ ID NO: 55343 - DNA, 120 bp, Homo sapiens
  misc_feature: 1511 for SV(W|O) and mtDNA
tcctccggcggggtcgaagaaggtggtgttgaggttgcggtctgttagtagtatagtgatgccagcagctaggactgggagagataggagaagtaggactgctgtgattaggacggatca

SEQ ID NO: 55344 - DNA, 120 bp, Homo sapiens
  misc_feature: 1511 for SV(W|O) and mtDNA
tcgctcacacctcatatcctccctactatgcctagaaggaataatactatcgctgttcattatagctactctcataaccctcaacacccactccctcttagccaatattgtgcctattgc

SEQ ID NO: 55345 - DNA, 120 bp, Homo sapiens
  misc_feature: 1511 for SV(W|O) and mtDNA
cgattcaggttagaatgaggaggtctgcggctaggagtcaataaagtgattggcttagtgggcgaaatattatgctttgttgtttggatatatggaggatggggattattgctaggatga

SEQ ID NO: 55346 - DNA, 120 bp, Homo sapiens
  misc_feature: 1511 for SV(W|O) and mtDNA
tcagatcacgtaggactttaatcgttgaacaaacgaacctttaatagcggctgcaccatcgggatgtcctgatccaacatcgaggtcgtaaaccctattgttgatatggactctagaata

SEQ ID NO: 55347 - DNA, 120 bp, Homo sapiens
  misc_feature: 1511 for SV(W|O) and mtDNA
tcaacttaaactccagcaccacgaccctactactatctcgcacctgaaacaagctaacatgactaacacccttaattccatccaccctcctctccctaggaggcctgcccccgctaaccg

SEQ ID NO: 55348 - DNA, 120 bp, Homo sapiens
  misc_feature: 1511 for SV(W|O) and mtDNA
tatgatagtgaaatggattttggcgtaggtttggtctagggtgtagcctgagaataggggaaatcagtgaatgaagcctcctatgatggcaaatacagctcctattgataggacatagtg

SEQ ID NO: 55349 - DNA, 120 bp, Homo sapiens
  misc_feature: 1511 for SV(W|O) and mtDNA
cggggaaacgccatatcgggggcaccgattattaggggaactagtcagttgccaaagcctccgattatgatgggtattactatgaagaagattattacaaatgcatgggctgtgacgata

SEQ ID NO: 55350 - DNA, 120 bp, Homo sapiens
  misc_feature: 1511 for SV(W|O) and mtDNA
tagccaatattgtgcctattgccatactagtctttgccgcctgcgaagcagcggtgggcctagccctactagtctcaatctccaacacatatggcctagactacgtacataacctaaacc

SEQ ID NO: 55351 - DNA, 120 bp, Homo sapiens
  misc_feature: 1511 for SV(W|O) and mtDNA
tagaggagacaagtcgtaacatggtaagtgtactggaaagtgcacttggacgaaccagagtgtagcttaacacaaagcacccaacttacacttaggagatttcaacttaacttgaccgct

SEQ ID NO: 55352 - DNA, 120 bp, Homo sapiens
  misc_feature: 1511 for SV(W|O) and mtDNA
tacgccaaaatccatttcactatcatattcatcggcgtaaatctaactttcttcccacaacactttctcggcctatccggaatgccccgacgttactcggactaccccgatgcatacacc

SEQ ID NO: 55353 - DNA, 120 bp, Homo sapiens
  misc_feature: 1511 for SV(W|O) and mtDNA
ggggtagaaaatgtagcccatttcttgccacctcatgggctacaccttgacctaacgtctttacgtgggtacttgcgcttactttgtagccttcatcagggtttgctgaagatggcggta

SEQ ID NO: 55354 - DNA, 120 bp, Homo sapiens
  misc_feature: 1511 for SV(W|O) and mtDNA
taagtgtactggaaagtgcacttggacgaaccagagtgtagcttaacacaaagcacccaacttacacttaggagatttcaacttaacttgaccgctctgagctaaacctagccccaaacc

SEQ ID NO: 55355 - DNA, 120 bp, Homo sapiens
  misc_feature: 1511 for SV(W|O) and mtDNA
ggtgatctaaaacactctttacgccggcttctattgacttgggttaatcgtgtgaccgcggtggctggcacgaaattgaccaaccctggggttagtatagcttagttaaactttcgttta

SEQ ID NO: 55356 - DNA, 120 bp, Homo sapiens
  misc_feature: 1511 for SV(W|O) and mtDNA
gtgtttaatatttttagttgggtgatgaggaatagtgtaaggagtatgggggtaattatggtgggccatacggtagtatttagttggggcatttcactgtaaagaggtgttggttctctt

SEQ ID NO: 55357 - DNA, 120 bp, Homo sapiens
  misc_feature: 1511 for SV(W|O) and mtDNA
gtgttgtgtatggttatcatttgttttgaggttagtttgattagtcattgttgggtggtgattagtcggttgttgatgagatatttggaggtggggatcaatagagggggaaatagaatg

SEQ ID NO: 55358 - DNA, 120 bp, Homo sapiens
  misc_feature: 1511 for SV(W|O) and mtDNA
gtgcctagaccaagaagttattatctcgaactgacactgagccacaacccaaacaacccagctctccctaagcttcaaactagactacttctccataatattcatccctgtagcattgtt

SEQ ID NO: 55359 - DNA, 120 bp, Homo sapiens
  misc_feature: 1511 for SV(W|O) and mtDNA
gtctgcggctaggagtcaataaagtgattggcttagtgggcgaaatattatgctttgttgtttggatatatggaggatggggattattgctaggatgaggatggatagtaatagggcaag

SEQ ID NO: 55360 - DNA, 120 bp, Homo sapiens
  misc_feature: 1511 for SV(W|O) and mtDNA
gtagctcgtctggtttcgggggtcttagctttggctctccttgcaaagttatttctagttaattcattatgcagaaggtataggggttagtccttgctatattatgcttggttataattt

SEQ ID NO: 55361 - DNA, 120 bp, Homo sapiens
  misc_feature: 1511 for SV(W|O) and mtDNA
atatccaaacaacaaagcataatatttcgcccactaagccaatcactttattgactcctagccgcagacctcctcattctaacctgaatcggaggacaaccagtaagctacccttttacc

SEQ ID NO: 55362 - DNA, 120 bp, Homo sapiens
  misc_feature: 1511 for SV(W|O) and mtDNA
gggggtgatctaaaacactctttacgccggcttctattgacttgggttaatcgtgtgaccgcggtggctggcacgaaattgaccaaccctggggttagtatagcttagttaaactttcgt

SEQ ID NO: 55363 - DNA, 120 bp, Homo sapiens
  misc_feature: 1511 for SV(W|O) and mtDNA
ggctttggagttgcagttgatgtgtgatagttgagggttgattgctgtacttgcttgtaagcatggggagggggttttgatgtggattgggtttttatgtactacaggtggtcaagtatt

SEQ ID NO: 55364 - DNA, 120 bp, Homo sapiens
  misc_feature: 1511 for SV(W|O) and mtDNA
gcccaccgctgcttcgcaggcggcaaagactagtatggcaataggcacaatattggctaagagggagtgggtgttgagggttatgagagtagctataatgaacagcgatagtattattcc

SEQ ID NO: 55365 - DNA, 120 bp, Homo sapiens
  misc_feature: 1511 for SV(W|O) and mtDNA
gaggaatttgaagtagatagaaaccgacctggattactccggtctgaactcagatcacgtaggactttaatcgttgaacaaacgaacctttaatagcggctgcaccatcgggatgtcctg

SEQ ID NO: 55366 - DNA, 120 bp, Homo sapiens
  misc_feature: 1511 for SV(W|O) and mtDNA
cgaacctttaatagcggctgcaccatcgggatgtcctgatccaacatcgaggtcgtaaaccctattgttgatatggactctagaataggattgcgctgttatccctagggtaacttgttc

SEQ ID NO: 55367 - DNA, 120 bp, Homo sapiens
  misc_feature: 1511 for SV(W|O) and mtDNA
aatattgaacgtaggtgcgataaataatgggatgaggcaggaatcaaagacagatactgcgacatagggtgctccggctccagcgtctcgcaatgctatcgcgtgcataccccccagacg

SEQ ID NO: 55368 - DNA, 120 bp, Homo sapiens
  misc_feature: 1511 for SV(W|O) and mtDNA
cgggggcaccgattattaggggaactagtcagttgccaaagcctccgattatgatgggtattactatgaagaagattattacaaatgcatgggctgtgacgataacgttgtagatgtggt

SEQ ID NO: 55369 - DNA, 120 bp, Homo sapiens
  misc_feature: 1511 for SV(W|O) and mtDNA
cctccctactatgcctagaaggaataatactatcgctgttcattatagctactctcataaccctcaacacccactccctcttagccaatattgtgcctattgccatactagtctttgccg

SEQ ID NO: 55370 - DNA, 120 bp, Homo sapiens
  misc_feature: 1511 for SV(W|O) and mtDNA
cctttagtgttgtgtatggttatcatttgttttgaggttagtttgattagtcattgttgggtggtgattagtcggttgttgatgagatatttggaggtggggatcaatagagggggaaat

SEQ ID NO: 55371 - DNA, 120 bp, Homo sapiens
  misc_feature: 1511 for SV(W|O) and mtDNA
ccatatatccaaacaacaaagcataatatttcgcccactaagccaatcactttattgactcctagccgcagacctcctcattctaacctgaatcggaggacaaccagtaagctacccttt

SEQ ID NO: 55372 - DNA, 120 bp, Homo sapiens
  misc_feature: 1511 for SV(W|O) and mtDNA
acaggcccatttgagtattttgttttcaattagggagatagttggtattaggattaggattgttgtgaagtatagtacggatgctacttgtccaatgatggtaaaagggtagcttactgg

SEQ ID NO: 55373 - DNA, 120 bp, Homo sapiens
  misc_feature: 1511 for SV(W|O) and mtDNA
caggcccatttgagtattttgttttcaattagggagatagttggtattaggattaggattgttgtgaagtatagtacggatgctacttgtccaatgatggtaaaagggtagcttactggt

SEQ ID NO: 55374 - DNA, 120 bp, Homo sapiens
  misc_feature: 1511 for SV(W|O) and mtDNA
aaaggatgcgtagggatgggagggcgatgaggactaggatgatggcgggcaggatagttcagacggtttctatttcctgagcgtctgagatgttagtattagttagttttgttgtgagtg

SEQ ID NO: 55375 - DNA, 120 bp, Homo sapiens
  misc_feature: 1511 for SV(W|O) and mtDNA
accaattaagaaagcgttcaagctcaacacccactacctaaaaaatcccaaacatataactgaactcctcatacccaattggaccaatctatcaccctatagaagaactaatgttagtat

SEQ ID NO: 55376 - DNA, 120 bp, Homo sapiens
  misc_feature: 1511 for SV(W|O) and mtDNA
acacctcatatcctccctactatgcctagaaggaataatactatcgctgttcattatagctactctcataaccctcaacacccactccctcttagccaatattgtgcctattgccatact

SEQ ID NO: 55377 - DNA, 120 bp, Homo sapiens
  misc_feature: 1510 for SV(W|O) and mtDNA
ttgtgtttaatatttttagttgggtgatgaggaatagtgtaaggagtatgggggtaattatggtgggccatacggtagtatttagttggggcatttcactgtaaagaggtgttggttctc

SEQ ID NO: 55378 - DNA, 120 bp, Homo sapiens
  misc_feature: 1510 for SV(W|O) and mtDNA
ctacaaatctccttaattataacattcacagccacagaactaatcatattttatatcttcttcgaaaccacacttatccccaccttggctatcatcacccgatgaggcaaccagccagaa

SEQ ID NO: 55379 - DNA, 120 bp, Homo sapiens
  misc_feature: 1510 for SV(W|O) and mtDNA
ttccctctacacttatcatcttcacaattctaattctactgactatcctagaaatcgctgtcgccttaatccaagcctacgttttcacacttctagtaagcctctacctgcacgacaaca

SEQ ID NO: 55380 - DNA, 120 bp, Homo sapiens
  misc_feature: 1510 for SV(W|O) and mtDNA
ttcccctactcatcgcactaatttacactcacaacaccctaggctcactaaacattctactactcactctcactgcccaagaactatcaaactcctgagccaacaacttaatatgactag

SEQ ID NO: 55381 - DNA, 120 bp, Homo sapiens
  misc_feature: 1510 for SV(W|O) and mtDNA
aactcagatcacgtaggactttaatcgttgaacaaacgaacctttaatagcggctgcaccatcgggatgtcctgatccaacatcgaggtcgtaaaccctattgttgatatggactctaga

SEQ ID NO: 55382 - DNA, 120 bp, Homo sapiens
  misc_feature: 1510 for SV(W|O) and mtDNA
tcataatcggaggctttggcaactgactagttcccctaataatcggtgcccccgatatggcgtttccccgcataaacaacataagcttctgactcttacctccctctctcctactcctgc

SEQ ID NO: 55383 - DNA, 120 bp, Homo sapiens
  misc_feature: 1510 for SV(W|O) and mtDNA
gtaataatcttcttcatagtaatacccatcataatcggaggctttggcaactgactagttcccctaataatcggtgcccccgatatggcgtttccccgcataaacaacataagcttctga

SEQ ID NO: 55384 - DNA, 120 bp, Homo sapiens
  misc_feature: 1510 for SV(W|O) and mtDNA
tatgaggagttcagttatatgtttgggattttttaggtagtgggtgttgagcttgaacgctttcttaattggtggctgcttttaggcctactatgggtgttaaattttttactctctcta

SEQ ID NO: 55385 - DNA, 120 bp, Homo sapiens
  misc_feature: 1510 for SV(W|O) and mtDNA
taataatcttcttcatagtaatacccatcataatcggaggctttggcaactgactagttcccctaataatcggtgcccccgatatggcgtttccccgcataaacaacataagcttctgac

SEQ ID NO: 55386 - DNA, 120 bp, Homo sapiens
  misc_feature: 1510 for SV(W|O) and mtDNA
agggtggggggcatccatatagtcactccaggtttatggagggttcttctactattaggacttttcgctttgaagcgaaggcttctcaaatcatgaaaattattaatattactgctgtta

SEQ ID NO: 55387 - DNA, 120 bp, Homo sapiens
  misc_feature: 1510 for SV(W|O) and mtDNA
cacttatcatcttcacaattctaattctactgactatcctagaaatcgctgtcgccttaatccaagcctacgttttcacacttctagtaagcctctacctgcacgacaacacataatgac

SEQ ID NO: 55388 - DNA, 120 bp, Homo sapiens
  misc_feature: 1510 for SV(W|O) and mtDNA
gcccttacacaaaatgacatcaaaaaaatcgtagccttctccacttcaagtcaactaggactcataatagttacaatcggcatcaaccaaccacacctagcattcctgcacatctgcacc

SEQ ID NO: 55389 - DNA, 120 bp, Homo sapiens
  misc_feature: 1510 for SV(W|O) and mtDNA
gggtgatctaaaacactctttacgccggcttctattgacttgggttaatcgtgtgaccgcggtggctggcacgaaattgaccaaccctggggttagtatagcttagttaaactttcgttt

SEQ ID NO: 55390 - DNA, 120 bp, Homo sapiens
  misc_feature: 1510 for SV(W|O) and mtDNA
cgatcaaaagggacaagcatcaagcacgcagcaatgcagctcaaaacgcttagcctagccacacccccacgggaaacagcagtgattaacctttagcaataaacgaaagtttaactaagc

SEQ ID NO: 55391 - DNA, 120 bp, Homo sapiens
  misc_feature: 1510 for SV(W|O) and mtDNA
cctagaaatcgctgtcgccttaatccaagcctacgttttcacacttctagtaagcctctacctgcacgacaacacataatgacccaccaatcacatgcctatcatatagtaaaacccagc

SEQ ID NO: 55392 - DNA, 120 bp, Homo sapiens
  misc_feature: 1510 for SV(W|O) and mtDNA
gcgttctggctggttgcctcatcgggtgatgatagccaaggtggggataagtgtggtttcgaagaagatataaaatatgattagttctgtggctgtgaatgttataattaaggagatttg

SEQ ID NO: 55393 - DNA, 120 bp, Homo sapiens
  misc_feature: 1510 for SV(W|O) and mtDNA
gccagacttagggctaggatgatgattaataagagggatgacataactattagtggcaggttagttgtttgtagggctcatggtaggggtaaaaggagggcaatttctagatcaaataat

SEQ ID NO: 55394 - DNA, 120 bp, Homo sapiens
  misc_feature: 1510 for SV(W|O) and mtDNA
aatgcttcactcagccattttacctcacccccactgatgttcgccgaccgttgactattctctacaaaccacaaagacattggaacactatacctattattcggcgcatgagctggagtc

SEQ ID NO: 55395 - DNA, 120 bp, Homo sapiens
  misc_feature: 1510 for SV(W|O) and mtDNA
gaactcagatcacgtaggactttaatcgttgaacaaacgaacctttaatagcggctgcaccatcgggatgtcctgatccaacatcgaggtcgtaaaccctattgttgatatggactctag

SEQ ID NO: 55396 - DNA, 120 bp, Homo sapiens
  misc_feature: 1510 for SV(W|O) and mtDNA
ctcagatcacgtaggactttaatcgttgaacaaacgaacctttaatagcggctgcaccatcgggatgtcctgatccaacatcgaggtcgtaaaccctattgttgatatggactctagaat

SEQ ID NO: 55397 - DNA, 120 bp, Homo sapiens
  misc_feature: 1510 for SV(W|O) and mtDNA
caatagccctggccgtacgcctaaccgctaacattactgcaggccacctactcatgcacctaattggaagcgccaccctagcaatatcaaccattaaccttccctctacacttatcatct

SEQ ID NO: 55398 - DNA, 120 bp, Homo sapiens
  misc_feature: 1510 for SV(W|O) and mtDNA
atcattaccgggttttcctcttgtaaatatagtttaaccaaaacatcagattgtgaatctgacaacagaggcttacgaccccttatttaccgagaaagctcacaagaactgctaactcat

SEQ ID NO: 55399 - DNA, 120 bp, Homo sapiens
  misc_feature: 1510 for SV(W|O) and mtDNA
aacttaagggtcgaaggtggatttagcagtaaactgagagtagagtgcttagttgaacagggccctgaagcgcgtacacaccgcccgtcaccctcctcaagtatacttcaaaggacattt

SEQ ID NO: 55400 - DNA, 120 bp, Homo sapiens
  misc_feature: 1509 for SV(W|O) and mtDNA
gtagggatgggagggcgatgaggactaggatgatggcgggcaggatagttcagacggtttctatttcctgagcgtctgagatgttagtattagttagttttgttgtgagtgttaggaaaa

SEQ ID NO: 55401 - DNA, 120 bp, Homo sapiens
  misc_feature: 1509 for SV(W|O) and mtDNA
tggtaagtgtactggaaagtgcacttggacgaaccagagtgtagcttaacacaaagcacccaacttacacttaggagatttcaacttaacttgaccgctctgagctaaacctagccccaa

SEQ ID NO: 55402 - DNA, 120 bp, Homo sapiens
  misc_feature: 1509 for SV(W|O) and mtDNA
atagtaccgcaagggaaagatgaaaaattataaccaagcataatatagcaaggactaacccctataccttctgcataatgaattaactagaaataactttgcaaggagagccaaagctaa

SEQ ID NO: 55403 - DNA, 120 bp, Homo sapiens
  misc_feature: 1509 for SV(W|O) and mtDNA
tgtgtcactgggcaggcggtgcctctaatactggtgatgctagaggtgatgtttttggtaaacaggcggggtaagatttgccgagttccttttactttttttaacctttccttatgagca

SEQ ID NO: 55404 - DNA, 120 bp, Homo sapiens
  misc_feature: 1509 for SV(W|O) and mtDNA
tgcacttggacgaaccagagtgtagcttaacacaaagcacccaacttacacttaggagatttcaacttaacttgaccgctctgagctaaacctagccccaaacccactccaccttactac

SEQ ID NO: 55405 - DNA, 120 bp, Homo sapiens
  misc_feature: 1509 for SV(W|O) and mtDNA
accttagccaaaccatttacccaaataaagtataggcgatagaaattgaaacctggcgcaatagatatagtaccgcaagggaaagatgaaaaattataaccaagcataatatagcaagga

SEQ ID NO: 55406 - DNA, 120 bp, Homo sapiens
  misc_feature: 1509 for SV(W|O) and mtDNA
tacgcctaaccgctaacattactgcaggccacctactcatgcacctaattggaagcgccaccctagcaatatcaaccattaaccttccctctacacttatcatcttcacaattctaattc

SEQ ID NO: 55407 - DNA, 120 bp, Homo sapiens
  misc_feature: 1509 for SV(W|O) and mtDNA
gtttgctgaagatggcggtatataggctgagcaagaggtggtgaggttgatcggggtttatcgattacagaacaggctcctctagagggatatgaagcaccgccaggtcctttgagtttt

SEQ ID NO: 55408 - DNA, 120 bp, Homo sapiens
  misc_feature: 1509 for SV(W|O) and mtDNA
gtattggttatggttcattgtccggagagtatattgttgaagaggatagctattagaaggattatggatgcggttgcttgcgtgaggaaatacttgatggcagcttctgtggaacgaggg

SEQ ID NO: 55409 - DNA, 120 bp, Homo sapiens
  misc_feature: 1509 for SV(W|O) and mtDNA
gtagggtggggggcatccatatagtcactccaggtttatggagggttcttctactattaggacttttcgctttgaagcgaaggcttctcaaatcatgaaaattattaatattactgctgt

SEQ ID NO: 55410 - DNA, 120 bp, Homo sapiens
  misc_feature: 1509 for SV(W|O) and mtDNA
gggtagcttactggttgtcctccgattcaggttagaatgaggaggtctgcggctaggagtcaataaagtgattggcttagtgggcgaaatattatgctttgttgtttggatatatggagg

SEQ ID NO: 55411 - DNA, 120 bp, Homo sapiens
  misc_feature: 1509 for SV(W|O) and mtDNA
aacatgtgtcactgggcaggcggtgcctctaatactggtgatgctagaggtgatgtttttggtaaacaggcggggtaagatttgccgagttccttttactttttttaacctttccttatg

SEQ ID NO: 55412 - DNA, 120 bp, Homo sapiens
  misc_feature: 1509 for SV(W|O) and mtDNA
ataaaaatgattaaggatactagtataagagatcaggttcgtcctttagtgttgtgtatggttatcatttgttttgaggttagtttgattagtcattgttgggtggtgattagtcggttg

SEQ ID NO: 55413 - DNA, 120 bp, Homo sapiens
  misc_feature: 1509 for SV(W|O) and mtDNA
agtattgactcacccatcaacaaccgctatgtatttcgtacattactgccagccaccatgaatattgtacggtaccataaatacttgaccacctgtagtacataaaaacccaatccacat

SEQ ID NO: 55414 - DNA, 120 bp, Homo sapiens
  misc_feature: 1509 for SV(W|O) and mtDNA
atatagtaccgcaagggaaagatgaaaaattataaccaagcataatatagcaaggactaacccctataccttctgcataatgaattaactagaaataactttgcaaggagagccaaagct

SEQ ID NO: 55415 - DNA, 120 bp, Homo sapiens
  misc_feature: 1509 for SV(W|O) and mtDNA
ataatgacttgttggttgattgtagatattgggctgttaattgtcagttcagtgttttaatctgacgcaggcttatgcggaggagaatgttttcatgttacttatactaacattagttct

SEQ ID NO: 55416 - DNA, 120 bp, Homo sapiens
  misc_feature: 1508 for SV(W|O) and mtDNA
gccctccttttacccctaccatgagccctacaaacaactaacctgccactaatagttatgtcatccctcttattaatcatcatcctagccctaagtctggcctatgagtgactacaaaaa

SEQ ID NO: 55417 - DNA, 120 bp, Homo sapiens
  misc_feature: 1508 for SV(W|O) and mtDNA
tttgctgaagatggcggtatataggctgagcaagaggtggtgaggttgatcggggtttatcgattacagaacaggctcctctagagggatatgaagcaccgccaggtcctttgagtttta

SEQ ID NO: 55418 - DNA, 120 bp, Homo sapiens
  misc_feature: 1508 for SV(W|O) and mtDNA
gctatgtatttcgtacattactgccagccaccatgaatattgtacggtaccataaatacttgaccacctgtagtacataaaaacccaatccacatcaaaaccccctccccatgcttacaa

SEQ ID NO: 55419 - DNA, 120 bp, Homo sapiens
  misc_feature: 1508 for SV(W|O) and mtDNA
ttggacgaaccagagtgtagcttaacacaaagcacccaacttacacttaggagatttcaacttaacttgaccgctctgagctaaacctagccccaaacccactccaccttactaccagac

SEQ ID NO: 55420 - DNA, 120 bp, Homo sapiens
  misc_feature: 1508 for SV(W|O) and mtDNA
cacttggacgaaccagagtgtagcttaacacaaagcacccaacttacacttaggagatttcaacttaacttgaccgctctgagctaaacctagccccaaacccactccaccttactacca

SEQ ID NO: 55421 - DNA, 120 bp, Homo sapiens
  misc_feature: 1508 for SV(W|O) and mtDNA
cctacaaatctccttaattataacattcacagccacagaactaatcatattttatatcttcttcgaaaccacacttatccccaccttggctatcatcacccgatgaggcaaccagccaga

SEQ ID NO: 55422 - DNA, 120 bp, Homo sapiens
  misc_feature: 1508 for SV(W|O) and mtDNA
tcccctactcatcgcactaatttacactcacaacaccctaggctcactaaacattctactactcactctcactgcccaagaactatcaaactcctgagccaacaacttaatatgactagc

SEQ ID NO: 55423 - DNA, 120 bp, Homo sapiens
  misc_feature: 1508 for SV(W|O) and mtDNA
gtaaaattgtaataagcagtgcttgaattatttggtttcggttgttttctattagactatggtgagctcaggtgattgatactcctgatgcgagtaatacggatgtgtttaggagtggga

SEQ ID NO: 55424 - DNA, 120 bp, Homo sapiens
  misc_feature: 1508 for SV(W|O) and mtDNA
gctctaagcctccttattcgagccgagctgggccagccaggcaaccttctaggtaacgaccacatctacaacgttatcgtcacagcccatgcatttgtaataatcttcttcatagtaata

SEQ ID NO: 55425 - DNA, 120 bp, Homo sapiens
  misc_feature: 1508 for SV(W|O) and mtDNA
taagttgggtgctttgtgttaagctacactctggttcgtccaagtgcactttccagtacacttaccatgttacgacttgtctcctctatataaatgcgtaggggttttagttaaatgtcc

SEQ ID NO: 55426 - DNA, 120 bp, Homo sapiens
  misc_feature: 1508 for SV(W|O) and mtDNA
agtttaggacctgtgggtttgttaggtactgtttgcattaataaattaaagctccatagggtcttctcgtcttgctgtgttatgcccgcctcttcacgggcaggtcaatttcactggtta

SEQ ID NO: 55427 - DNA, 120 bp, Homo sapiens
  misc_feature: 1508 for SV(W|O) and mtDNA
taaaggatgcgtagggatgggagggcgatgaggactaggatgatggcgggcaggatagttcagacggtttctatttcctgagcgtctgagatgttagtattagttagttttgttgtgagt

SEQ ID NO: 55428 - DNA, 120 bp, Homo sapiens
  misc_feature: 1508 for SV(W|O) and mtDNA
atcctatatatcttaatggcacatgcagcgcaagtaggtctacaagacgctacttcccctatcatagaagagcttatcacctttcatgatcacgccctcataatcattttccttatctgc

SEQ ID NO: 55429 - DNA, 120 bp, Homo sapiens
  misc_feature: 1508 for SV(W|O) and mtDNA
gacattggaacactatacctattattcggcgcatgagctggagtcctaggcacagctctaagcctccttattcgagccgagctgggccagccaggcaaccttctaggtaacgaccacatc

SEQ ID NO: 55430 - DNA, 120 bp, Homo sapiens
  misc_feature: 1508 for SV(W|O) and mtDNA
cagttgatgatacgcccgagcagatgccaacacagcagccattcaagcaatcctatacaaccgtatcggcgatatcggtttcatcctcgccttagcatgatttatcctacactccaactc

SEQ ID NO: 55431 - DNA, 120 bp, Homo sapiens
  misc_feature: 1508 for SV(W|O) and mtDNA
caactgatgagcaagaaggatataattcctacgccctctcagccgatgaacagttggaataggttgttagcggtaactaagattagtatggtaattaggaagatgagtagatatttgaag

SEQ ID NO: 55432 - DNA, 120 bp, Homo sapiens
  misc_feature: 1508 for SV(W|O) and mtDNA
catgtgtcactgggcaggcggtgcctctaatactggtgatgctagaggtgatgtttttggtaaacaggcggggtaagatttgccgagttccttttactttttttaacctttccttatgag

SEQ ID NO: 55433 - DNA, 120 bp, Homo sapiens
  misc_feature: 1508 for SV(W|O) and mtDNA
cagacaaccttagccaaaccatttacccaaataaagtataggcgatagaaattgaaacctggcgcaatagatatagtaccgcaagggaaagatgaaaaattataaccaagcataatatag

SEQ ID NO: 55434 - DNA, 120 bp, Homo sapiens
  misc_feature: 1508 for SV(W|O) and mtDNA
aagttgggtgctttgtgttaagctacactctggttcgtccaagtgcactttccagtacacttaccatgttacgacttgtctcctctatataaatgcgtaggggttttagttaaatgtcct

SEQ ID NO: 55435 - DNA, 120 bp, Homo sapiens
  misc_feature: 1508 for SV(W|O) and mtDNA
agctgaccttactttaggatggggtgtgataggtggcacggagaattttggattctcagggatgggttcgattctcatagtcctagaaataagggggtttaagctcctattatttactct

SEQ ID NO: 55436 - DNA, 120 bp, Homo sapiens
  misc_feature: 1508 for SV(W|O) and mtDNA
aatagccctggccgtacgcctaaccgctaacattactgcaggccacctactcatgcacctaattggaagcgccaccctagcaatatcaaccattaaccttccctctacacttatcatctt

SEQ ID NO: 55437 - DNA, 120 bp, Homo sapiens
  misc_feature: 1508 for SV(W|O) and mtDNA
aaattgtaataagcagtgcttgaattatttggtttcggttgttttctattagactatggtgagctcaggtgattgatactcctgatgcgagtaatacggatgtgtttaggagtgggactt

SEQ ID NO: 55438 - DNA, 120 bp, Homo sapiens
  misc_feature: 1507 for SV(W|O) and mtDNA
ttaacgagggtggtaaggatggggggaattagggaagtcagggttagggtggttatagtagtgtgcatggttattacttttatttggagttgcaccaaaatttttggggcctaagaccaa

SEQ ID NO: 55439 - DNA, 120 bp, Homo sapiens
  misc_feature: 1507 for SV(W|O) and mtDNA
ttaccacaaggcacacctacaccccttatccccatactagttattatcgaaaccatcagcctactcattcaaccaatagccctggccgtacgcctaaccgctaacattactgcaggccac

SEQ ID NO: 55440 - DNA, 120 bp, Homo sapiens
  misc_feature: 1507 for SV(W|O) and mtDNA
tattttatatcttcttcgaaaccacacttatccccaccttggctatcatcacccgatgaggcaaccagccagaacgcctgaacgcaggcacatacttcctattctacaccctagtaggct

SEQ ID NO: 55441 - DNA, 120 bp, Homo sapiens
  misc_feature: 1507 for SV(W|O) and mtDNA
tatgtactatgtactgttaagggtgggtaggtttgttggtatcctagtgggtgaggggtggctttggagttgcagttgatgtgtgatagttgagggttgattgctgtacttgcttgtaag

SEQ ID NO: 55442 - DNA, 120 bp, Homo sapiens
  misc_feature: 1507 for SV(W|O) and mtDNA
ccagacaaccttagccaaaccatttacccaaataaagtataggcgatagaaattgaaacctggcgcaatagatatagtaccgcaagggaaagatgaaaaattataaccaagcataatata

SEQ ID NO: 55443 - DNA, 120 bp, Homo sapiens
  misc_feature: 1507 for SV(W|O) and mtDNA
taggacctgtgggtttgttaggtactgtttgcattaataaattaaagctccatagggtcttctcgtcttgctgtgttatgcccgcctcttcacgggcaggtcaatttcactggttaaaag

SEQ ID NO: 55444 - DNA, 120 bp, Homo sapiens
  misc_feature: 1507 for SV(W|O) and mtDNA
cgccatatcgggggcaccgattattaggggaactagtcagttgccaaagcctccgattatgatgggtattactatgaagaagattattacaaatgcatgggctgtgacgataacgttgta

SEQ ID NO: 55445 - DNA, 120 bp, Homo sapiens
  misc_feature: 1507 for SV(W|O) and mtDNA
gttccttttactttttttaacctttccttatgagcatgcctgtgttgggttgacagtgagggtaataatgacttgttggttgattgtagatattgggctgttaattgtcagttcagtgtt

SEQ ID NO: 55446 - DNA, 120 bp, Homo sapiens
  misc_feature: 1507 for SV(W|O) and mtDNA
gtactgtttgcattaataaattaaagctccatagggtcttctcgtcttgctgtgttatgcccgcctcttcacgggcaggtcaatttcactggttaaaagtaagagacagctgaaccctcg

SEQ ID NO: 55447 - DNA, 120 bp, Homo sapiens
  misc_feature: 1507 for SV(W|O) and mtDNA
cgctcacacctcatatcctccctactatgcctagaaggaataatactatcgctgttcattatagctactctcataaccctcaacacccactccctcttagccaatattgtgcctattgcc

SEQ ID NO: 55448 - DNA, 120 bp, Homo sapiens
  misc_feature: 1507 for SV(W|O) and mtDNA
atcaggagtatcaatcacctgagctcaccatagtctaatagaaaacaaccgaaaccaaataattcaagcactgcttattacaattttactgggtctctattttaccctcctacaagcctc

SEQ ID NO: 55449 - DNA, 120 bp, Homo sapiens
  misc_feature: 1507 for SV(W|O) and mtDNA
cagggtttgctgaagatggcggtatataggctgagcaagaggtggtgaggttgatcggggtttatcgattacagaacaggctcctctagagggatatgaagcaccgccaggtcctttgag

SEQ ID NO: 55450 - DNA, 120 bp, Homo sapiens
  misc_feature: 1507 for SV(W|O) and mtDNA
aaatttttaatgcaggtttggtagtttaggacctgtgggtttgttaggtactgtttgcattaataaattaaagctccatagggtcttctcgtcttgctgtgttatgcccgcctcttcacg

SEQ ID NO: 55451 - DNA, 120 bp, Homo sapiens
  misc_feature: 1507 for SV(W|O) and mtDNA
aaccttagccaaaccatttacccaaataaagtataggcgatagaaattgaaacctggcgcaatagatatagtaccgcaagggaaagatgaaaaattataaccaagcataatatagcaagg

SEQ ID NO: 55452 - DNA, 120 bp, Homo sapiens
  misc_feature: 1507 for SV(W|O) and mtDNA
aaaaacatcacctctagcatcaccagtattagaggcaccgcctgcccagtgacacatgtttaacggccgcggtaccctaaccgtgcaaaggtagcataatcacttgttccttaaataggg

SEQ ID NO: 55453 - DNA, 120 bp, Homo sapiens
  misc_feature: 1507 for SV(W|O) and mtDNA
aatgccgatgtttcaggtttctgagtagagaaatgatccgtaatataggcctcgcccgatgtgtaggaagaggcagataaagaatattgaggcgccattggcgtgaaggtagcggatgat

SEQ ID NO: 55454 - DNA, 120 bp, Homo sapiens
  misc_feature: 1506 for SV(W|O) and mtDNA
ttgtgtatggttatcatttgttttgaggttagtttgattagtcattgttgggtggtgattagtcggttgttgatgagatatttggaggtggggatcaatagagggggaaatagaatgatc

SEQ ID NO: 55455 - DNA, 120 bp, Homo sapiens
  misc_feature: 1506 for SV(W|O) and mtDNA
gcgttttgagctgcattgctgcgtgcttgatgcttgtcccttttgatcgtggtgatttagagggtgaactcactggaacggggatgcttgcatgtgtaatcttactaagagctaatagaa

SEQ ID NO: 55456 - DNA, 120 bp, Homo sapiens
  misc_feature: 1506 for SV(W|O) and mtDNA
ttcaaattatgtgttttttggaaagtcatgtcagtggtagtaatataattgttgggacgattagttttagcattggagtaggtttaggttatgtacgtagtctaggccatatgtgttgga

SEQ ID NO: 55457 - DNA, 120 bp, Homo sapiens
  misc_feature: 1506 for SV(W|O) and mtDNA
ttaggctgtgggtggttgtgttgattcaaattatgtgttttttggaaagtcatgtcagtggtagtaatataattgttgggacgattagttttagcattggagtaggtttaggttatgtac

SEQ ID NO: 55458 - DNA, 120 bp, Homo sapiens
  misc_feature: 1506 for SV(W|O) and mtDNA
tgttgagcttgaacgctttcttaattggtggctgcttttaggcctactatgggtgttaaattttttactctctctacaaggttttttcctagtgtccaaagagctgttcctctttggact

SEQ ID NO: 55459 - DNA, 120 bp, Homo sapiens
  misc_feature: 1506 for SV(W|O) and mtDNA
tgtgtttaatatttttagttgggtgatgaggaatagtgtaaggagtatgggggtaattatggtgggccatacggtagtatttagttggggcatttcactgtaaagaggtgttggttctct

SEQ ID NO: 55460 - DNA, 120 bp, Homo sapiens
  misc_feature: 1506 for SV(W|O) and mtDNA
tgaccttactttaggatggggtgtgataggtggcacggagaattttggattctcagggatgggttcgattctcatagtcctagaaataagggggtttaagctcctattatttactctatc

SEQ ID NO: 55461 - DNA, 120 bp, Homo sapiens
  misc_feature: 1506 for SV(W|O) and mtDNA
taccaactatctccctaattgaaaacaaaatactcaaatgggcctgtccttgtagtataaactaatacaccagtcttgtaaaccggagatgaaaacctttttccaaggacaaatcagaga

SEQ ID NO: 55462 - DNA, 120 bp, Homo sapiens
  misc_feature: 1506 for SV(W|O) and mtDNA
aagggtcgaaggtggatttagcagtaaactgagagtagagtgcttagttgaacagggccctgaagcgcgtacacaccgcccgtcaccctcctcaagtatacttcaaaggacatttaacta

SEQ ID NO: 55463 - DNA, 120 bp, Homo sapiens
  misc_feature: 1506 for SV(W|O) and mtDNA
taatgttagcggttaggcgtacggccagggctattggttgaatgagtaggctgatggtttcgataataactagtatggggataaggggtgtaggtgtgccttgtggtaagaagtgggcta

SEQ ID NO: 55464 - DNA, 120 bp, Homo sapiens
  misc_feature: 1506 for SV(W|O) and mtDNA
cattggaacactatacctattattcggcgcatgagctggagtcctaggcacagctctaagcctccttattcgagccgagctgggccagccaggcaaccttctaggtaacgaccacatcta

SEQ ID NO: 55465 - DNA, 120 bp, Homo sapiens
  misc_feature: 1506 for SV(W|O) and mtDNA
ctagggtgtagcctgagaataggggaaatcagtgaatgaagcctcctatgatggcaaatacagctcctattgataggacatagtggaagtgggctacaacgtagtacgtgtcgtgtagta

SEQ ID NO: 55466 - DNA, 120 bp, Homo sapiens
  misc_feature: 1506 for SV(W|O) and mtDNA
taatgacttgttggttgattgtagatattgggctgttaattgtcagttcagtgttttaatctgacgcaggcttatgcggaggagaatgttttcatgttacttatactaacattagttctt

SEQ ID NO: 55467 - DNA, 120 bp, Homo sapiens
  misc_feature: 1506 for SV(W|O) and mtDNA
taaaattgtaataagcagtgcttgaattatttggtttcggttgttttctattagactatggtgagctcaggtgattgatactcctgatgcgagtaatacggatgtgtttaggagtgggac

SEQ ID NO: 55468 - DNA, 120 bp, Homo sapiens
  misc_feature: 1506 for SV(W|O) and mtDNA
aacaaacgaacctttaatagcggctgcaccatcgggatgtcctgatccaacatcgaggtcgtaaaccctattgttgatatggactctagaataggattgcgctgttatccctagggtaac

SEQ ID NO: 55469 - DNA, 120 bp, Homo sapiens
  misc_feature: 1506 for SV(W|O) and mtDNA
gtatgttcgcctgtaatattgaacgtaggtgcgataaataatgggatgaggcaggaatcaaagacagatactgcgacatagggtgctccggctccagcgtctcgcaatgctatcgcgtgc

SEQ ID NO: 55470 - DNA, 120 bp, Homo sapiens
  misc_feature: 1506 for SV(W|O) and mtDNA
ggaggaatttgaagtagatagaaaccgacctggattactccggtctgaactcagatcacgtaggactttaatcgttgaacaaacgaacctttaatagcggctgcaccatcgggatgtcct

SEQ ID NO: 55471 - DNA, 120 bp, Homo sapiens
  misc_feature: 1506 for SV(W|O) and mtDNA
cattaccgggttttcctcttgtaaatatagtttaaccaaaacatcagattgtgaatctgacaacagaggcttacgaccccttatttaccgagaaagctcacaagaactgctaactcatgc

SEQ ID NO: 55472 - DNA, 120 bp, Homo sapiens
  misc_feature: 1506 for SV(W|O) and mtDNA
ctactaaccaacacactaaccatataccaatgatggcgcgatgtaacacgagaaagcacataccaaggccaccacacaccacctgtccaaaaaggccttcgatacgggataatcctattt

SEQ ID NO: 55473 - DNA, 120 bp, Homo sapiens
  misc_feature: 1506 for SV(W|O) and mtDNA
cgctatccccaccggcgtcaaagtatttagctgactcgccacactccacggaagcaatatgaaatgatctgctgcagtgctctgagccctaggattcatctttcttttcaccgtaggtgg

SEQ ID NO: 55474 - DNA, 120 bp, Homo sapiens
  misc_feature: 1506 for SV(W|O) and mtDNA
acacaacactaaaggacgaacctgatctcttatactagtatccttaatcatttttattgccacaactaacctcctcggactcctgcctcactcatttacaccaaccacccaactatctat

SEQ ID NO: 55475 - DNA, 120 bp, Homo sapiens
  misc_feature: 1506 for SV(W|O) and mtDNA
agccaacgccacttatccagtgaaccactatcacgaaaaaaactctacctctctatactaatctccctacaaatctccttaattataacattcacagccacagaactaatcatattttat

SEQ ID NO: 55476 - DNA, 120 bp, Homo sapiens
  misc_feature: 1506 for SV(W|O) and mtDNA
aaggtggatttagcagtaaactgagagtagagtgcttagttgaacagggccctgaagcgcgtacacaccgcccgtcaccctcctcaagtatacttcaaaggacatttaactaaaacccct

SEQ ID NO: 55477 - DNA, 120 bp, Homo sapiens
  misc_feature: 1505 for SV(W|O) and mtDNA
tttaggacctgtgggtttgttaggtactgtttgcattaataaattaaagctccatagggtcttctcgtcttgctgtgttatgcccgcctcttcacgggcaggtcaatttcactggttaaa

SEQ ID NO: 55478 - DNA, 120 bp, Homo sapiens
  misc_feature: 1505 for SV(W|O) and mtDNA
tttaatgcaggtttggtagtttaggacctgtgggtttgttaggtactgtttgcattaataaattaaagctccatagggtcttctcgtcttgctgtgttatgcccgcctcttcacgggcag

SEQ ID NO: 55479 - DNA, 120 bp, Homo sapiens
  misc_feature: 1505 for SV(W|O) and mtDNA
ttggagttgcagttgatgtgtgatagttgagggttgattgctgtacttgcttgtaagcatggggagggggttttgatgtggattgggtttttatgtactacaggtggtcaagtatttatg

SEQ ID NO: 55480 - DNA, 120 bp, Homo sapiens
  misc_feature: 1505 for SV(W|O) and mtDNA
ttgagcttgaacgctttcttaattggtggctgcttttaggcctactatgggtgttaaattttttactctctctacaaggttttttcctagtgtccaaagagctgttcctctttggactaa

SEQ ID NO: 55481 - DNA, 120 bp, Homo sapiens
  misc_feature: 1505 for SV(W|O) and mtDNA
ttaatgcaggtttggtagtttaggacctgtgggtttgttaggtactgtttgcattaataaattaaagctccatagggtcttctcgtcttgctgtgttatgcccgcctcttcacgggcagg

SEQ ID NO: 55482 - DNA, 120 bp, Homo sapiens
  misc_feature: 1505 for SV(W|O) and mtDNA
tgtgtatggttatcatttgttttgaggttagtttgattagtcattgttgggtggtgattagtcggttgttgatgagatatttggaggtggggatcaatagagggggaaatagaatgatca

SEQ ID NO: 55483 - DNA, 120 bp, Homo sapiens
  misc_feature: 1505 for SV(W|O) and mtDNA
tgcttgtaagcatggggagggggttttgatgtggattgggtttttatgtactacaggtggtcaagtatttatggtaccgtacaatattcatggtggctggcagtaatgtacgaaatacat

SEQ ID NO: 55484 - DNA, 120 bp, Homo sapiens
  misc_feature: 1505 for SV(W|O) and mtDNA
tgatttgtccttggaaaaaggttttcatctccggtttacaagactggtgtattagtttatactacaaggacaggcccatttgagtattttgttttcaattagggagatagttggtattag

SEQ ID NO: 55485 - DNA, 120 bp, Homo sapiens
  misc_feature: 1505 for SV(W|O) and mtDNA
gtagtattggttatggttcattgtccggagagtatattgttgaagaggatagctattagaaggattatggatgcggttgcttgcgtgaggaaatacttgatggcagcttctgtggaacga

SEQ ID NO: 55486 - DNA, 120 bp, Homo sapiens
  misc_feature: 1505 for SV(W|O) and mtDNA
gtgcacttggacgaaccagagtgtagcttaacacaaagcacccaacttacacttaggagatttcaacttaacttgaccgctctgagctaaacctagccccaaacccactccaccttacta

SEQ ID NO: 55487 - DNA, 120 bp, Homo sapiens
  misc_feature: 1505 for SV(W|O) and mtDNA
taagggtcgaaggtggatttagcagtaaactgagagtagagtgcttagttgaacagggccctgaagcgcgtacacaccgcccgtcaccctcctcaagtatacttcaaaggacatttaact

SEQ ID NO: 55488 - DNA, 120 bp, Homo sapiens
  misc_feature: 1505 for SV(W|O) and mtDNA
ctttggagttgcagttgatgtgtgatagttgagggttgattgctgtacttgcttgtaagcatggggagggggttttgatgtggattgggtttttatgtactacaggtggtcaagtattta

SEQ ID NO: 55489 - DNA, 120 bp, Homo sapiens
  misc_feature: 1505 for SV(W|O) and mtDNA
gtgatctaaaacactctttacgccggcttctattgacttgggttaatcgtgtgaccgcggtggctggcacgaaattgaccaaccctggggttagtatagcttagttaaactttcgtttat

SEQ ID NO: 55490 - DNA, 120 bp, Homo sapiens
  misc_feature: 1505 for SV(W|O) and mtDNA
ggtttggtctagggtgtagcctgagaataggggaaatcagtgaatgaagcctcctatgatggcaaatacagctcctattgataggacatagtggaagtgggctacaacgtagtacgtgtc

SEQ ID NO: 55491 - DNA, 120 bp, Homo sapiens
  misc_feature: 1505 for SV(W|O) and mtDNA
aactaatcatattttatatcttcttcgaaaccacacttatccccaccttggctatcatcacccgatgaggcaaccagccagaacgcctgaacgcaggcacatacttcctattctacaccc

SEQ ID NO: 55492 - DNA, 120 bp, Homo sapiens
  misc_feature: 1505 for SV(W|O) and mtDNA
gggatgggagggcgatgaggactaggatgatggcgggcaggatagttcagacggtttctatttcctgagcgtctgagatgttagtattagttagttttgttgtgagtgttaggaaaaggg

SEQ ID NO: 55493 - DNA, 120 bp, Homo sapiens
  misc_feature: 1505 for SV(W|O) and mtDNA
cgccagaacactacgagccacagcttaaaactcaaaggacctggcggtgcttcatatccctctagaggagcctgttctgtaatcgataaaccccgatcaacctcaccacctcttgctcag

SEQ ID NO: 55494 - DNA, 120 bp, Homo sapiens
  misc_feature: 1505 for SV(W|O) and mtDNA
ccaaaaacatcacctctagcatcaccagtattagaggcaccgcctgcccagtgacacatgtttaacggccgcggtaccctaaccgtgcaaaggtagcataatcacttgttccttaaatag

SEQ ID NO: 55495 - DNA, 120 bp, Homo sapiens
  misc_feature: 1505 for SV(W|O) and mtDNA
ctatgcttagccctaaacctcaacagttaaatcaacaaaactgctcgccagaacactacgagccacagcttaaaactcaaaggacctggcggtgcttcatatccctctagaggagcctgt

SEQ ID NO: 55496 - DNA, 120 bp, Homo sapiens
  misc_feature: 1505 for SV(W|O) and mtDNA
agaaaatgtagcccatttcttgccacctcatgggctacaccttgacctaacgtctttacgtgggtacttgcgcttactttgtagccttcatcagggtttgctgaagatggcggtatatag

SEQ ID NO: 55497 - DNA, 120 bp, Homo sapiens
  misc_feature: 1505 for SV(W|O) and mtDNA
aaagtgattggcttagtgggcgaaatattatgctttgttgtttggatatatggaggatggggattattgctaggatgaggatggatagtaatagggcaaggacgcctcctagtttgttag

SEQ ID NO: 55498 - DNA, 120 bp, Homo sapiens
  misc_feature: 1505 for SV(W|O) and mtDNA
cgcacggactacaaccacgaccaatgatatgaaaaaccatcgttgtatttcaactacaagaacaccaatgaccccaatacgcaaaactaaccccctaataaaattaattaaccactcatt

SEQ ID NO: 55499 - DNA, 120 bp, Homo sapiens
  misc_feature: 1505 for SV(W|O) and mtDNA
catatcctccctactatgcctagaaggaataatactatcgctgttcattatagctactctcataaccctcaacacccactccctcttagccaatattgtgcctattgccatactagtctt

SEQ ID NO: 55500 - DNA, 120 bp, Homo sapiens
  misc_feature: 1505 for SV(W|O) and mtDNA
aaacttaagggtcgaaggtggatttagcagtaaactgagagtagagtgcttagttgaacagggccctgaagcgcgtacacaccgcccgtcaccctcctcaagtatacttcaaaggacatt

SEQ ID NO: 55501 - DNA, 120 bp, Homo sapiens
  misc_feature: 1504 for SV(W|O) and mtDNA
cgttttgagctgcattgctgcgtgcttgatgcttgtcccttttgatcgtggtgatttagagggtgaactcactggaacggggatgcttgcatgtgtaatcttactaagagctaatagaaa

SEQ ID NO: 55502 - DNA, 120 bp, Homo sapiens
  misc_feature: 1504 for SV(W|O) and mtDNA
ttactgcaggccacctactcatgcacctaattggaagcgccaccctagcaatatcaaccattaaccttccctctacacttatcatcttcacaattctaattctactgactatcctagaaa

SEQ ID NO: 55503 - DNA, 120 bp, Homo sapiens
  misc_feature: 1504 for SV(W|O) and mtDNA
agggaaagatgaaaaattataaccaagcataatatagcaaggactaacccctataccttctgcataatgaattaactagaaataactttgcaaggagagccaaagctaagacccccgaaa

SEQ ID NO: 55504 - DNA, 120 bp, Homo sapiens
  misc_feature: 1504 for SV(W|O) and mtDNA
ttatgtactatgtactgttaagggtgggtaggtttgttggtatcctagtgggtgaggggtggctttggagttgcagttgatgtgtgatagttgagggttgattgctgtacttgcttgtaa

SEQ ID NO: 55505 - DNA, 120 bp, Homo sapiens
  misc_feature: 1504 for SV(W|O) and mtDNA
tgtggtcgttacctagaaggttgcctggctggcccagctcggctcgaataaggaggcttagagctgtgcctaggactccagctcatgcgccgaataataggtatagtgttccaatgtctt

SEQ ID NO: 55506 - DNA, 120 bp, Homo sapiens
  misc_feature: 1504 for SV(W|O) and mtDNA
agtgtactggaaagtgcacttggacgaaccagagtgtagcttaacacaaagcacccaacttacacttaggagatttcaacttaacttgaccgctctgagctaaacctagccccaaaccca

SEQ ID NO: 55507 - DNA, 120 bp, Homo sapiens
  misc_feature: 1504 for SV(W|O) and mtDNA
tgggtatgaggagttcagttatatgtttgggattttttaggtagtgggtgttgagcttgaacgctttcttaattggtggctgcttttaggcctactatgggtgttaaattttttactctc

SEQ ID NO: 55508 - DNA, 120 bp, Homo sapiens
  misc_feature: 1504 for SV(W|O) and mtDNA
cattactgcaggccacctactcatgcacctaattggaagcgccaccctagcaatatcaaccattaaccttccctctacacttatcatcttcacaattctaattctactgactatcctaga

SEQ ID NO: 55509 - DNA, 120 bp, Homo sapiens
  misc_feature: 1504 for SV(W|O) and mtDNA
tcaggttagaatgaggaggtctgcggctaggagtcaataaagtgattggcttagtgggcgaaatattatgctttgttgtttggatatatggaggatggggattattgctaggatgaggat

SEQ ID NO: 55510 - DNA, 120 bp, Homo sapiens
  misc_feature: 1504 for SV(W|O) and mtDNA
tagtgttctggcgagcagttttgttgatttaactgttgaggtttagggctaagcatagtggggtatctaatcccagtttgggtcttagctattgtgtgttcagatatgttaaagccactt

SEQ ID NO: 55511 - DNA, 120 bp, Homo sapiens
  misc_feature: 1504 for SV(W|O) and mtDNA
ggcctactaaccaacacactaaccatataccaatgatggcgcgatgtaacacgagaaagcacataccaaggccaccacacaccacctgtccaaaaaggccttcgatacgggataatccta

SEQ ID NO: 55512 - DNA, 120 bp, Homo sapiens
  misc_feature: 1504 for SV(W|O) and mtDNA
tagaatgaggaggtctgcggctaggagtcaataaagtgattggcttagtgggcgaaatattatgctttgttgtttggatatatggaggatggggattattgctaggatgaggatggatag

SEQ ID NO: 55513 - DNA, 120 bp, Homo sapiens
  misc_feature: 1504 for SV(W|O) and mtDNA
taagtatgttcgcctgtaatattgaacgtaggtgcgataaataatgggatgaggcaggaatcaaagacagatactgcgacatagggtgctccggctccagcgtctcgcaatgctatcgcg

SEQ ID NO: 55514 - DNA, 120 bp, Homo sapiens
  misc_feature: 1504 for SV(W|O) and mtDNA
gtatgaggagttcagttatatgtttgggattttttaggtagtgggtgttgagcttgaacgctttcttaattggtggctgcttttaggcctactatgggtgttaaattttttactctctct

SEQ ID NO: 55515 - DNA, 120 bp, Homo sapiens
  misc_feature: 1504 for SV(W|O) and mtDNA
caattgggtatgaggagttcagttatatgtttgggattttttaggtagtgggtgttgagcttgaacgctttcttaattggtggctgcttttaggcctactatgggtgttaaattttttac

SEQ ID NO: 55516 - DNA, 120 bp, Homo sapiens
  misc_feature: 1504 for SV(W|O) and mtDNA
caacacctctttacagtgaaatgccccaactaaatactaccgtatggcccaccataattacccccatactccttacactattcctcatcacccaactaaaaatattaaacacaaactacc

SEQ ID NO: 55517 - DNA, 120 bp, Homo sapiens
  misc_feature: 1504 for SV(W|O) and mtDNA
ctagaaatcgctgtcgccttaatccaagcctacgttttcacacttctagtaagcctctacctgcacgacaacacataatgacccaccaatcacatgcctatcatatagtaaaacccagcc

SEQ ID NO: 55518 - DNA, 120 bp, Homo sapiens
  misc_feature: 1504 for SV(W|O) and mtDNA
aagtcagggttagggtggttatagtagtgtgcatggttattacttttatttggagttgcaccaaaatttttggggcctaagaccaatggatagctgttatcctttaaaagttgagaaagc

SEQ ID NO: 55519 - DNA, 120 bp, Homo sapiens
  misc_feature: 1504 for SV(W|O) and mtDNA
gcaataaaaatgattaaggatactagtataagagatcaggttcgtcctttagtgttgtgtatggttatcatttgttttgaggttagtttgattagtcattgttgggtggtgattagtcgg

SEQ ID NO: 55520 - DNA, 120 bp, Homo sapiens
  misc_feature: 1504 for SV(W|O) and mtDNA
gatttagagggttctgtgggcaaatttaaagttgaactaagattctatcttggacaaccagctatcaccaggctcggtaggtttgtcgcctctacctataaatcttcccactattttgct

SEQ ID NO: 55521 - DNA, 120 bp, Homo sapiens
  misc_feature: 1504 for SV(W|O) and mtDNA
caaggcacacctacaccccttatccccatactagttattatcgaaaccatcagcctactcattcaaccaatagccctggccgtacgcctaaccgctaacattactgcaggccacctactc

SEQ ID NO: 55522 - DNA, 120 bp, Homo sapiens
  misc_feature: 1504 for SV(W|O) and mtDNA
agggaggttgaagtgagaggtatggttttgagtagtcctcctatttttcgaatatcttgttcattgttaaggttgtggatgatggacccggagcacataaatagtatggctttgaagaag

SEQ ID NO: 55523 - DNA, 120 bp, Homo sapiens
  misc_feature: 1504 for SV(W|O) and mtDNA
ccgatgaatatgatagtgaaatggattttggcgtaggtttggtctagggtgtagcctgagaataggggaaatcagtgaatgaagcctcctatgatggcaaatacagctcctattgatagg

SEQ ID NO: 55524 - DNA, 120 bp, Homo sapiens
  misc_feature: 1504 for SV(W|O) and mtDNA
ataatgccgatgtttcaggtttctgagtagagaaatgatccgtaatataggcctcgcccgatgtgtaggaagaggcagataaagaatattgaggcgccattggcgtgaaggtagcggatg

SEQ ID NO: 55525 - DNA, 120 bp, Homo sapiens
  misc_feature: 1504 for SV(W|O) and mtDNA
agggtttatcgtgtgagcacaccatatatttacagtaggaatagacgtagacacacgagcatatttcacctccgctaccataatcatcgctatccccaccggcgtcaaagtatttagctg

SEQ ID NO: 55526 - DNA, 120 bp, Homo sapiens
  misc_feature: 1504 for SV(W|O) and mtDNA
atcctattctagagtccatatcaacaatagggtttacgacctcgatgttggatcaggacatcccgatggtgcagccgctattaaaggttcgtttgttcaacgattaaagtcctacgtgat

SEQ ID NO: 55527 - DNA, 120 bp, Homo sapiens
  misc_feature: 1504 for SV(W|O) and mtDNA
acaaaatgacatcaaaaaaatcgtagccttctccacttcaagtcaactaggactcataatagttacaatcggcatcaaccaaccacacctagcattcctgcacatctgcacccacgcctt

SEQ ID NO: 55528 - DNA, 120 bp, Homo sapiens
  misc_feature: 1503 for SV(W|O) and mtDNA
ccaaatgggccattatcgaagaattcacaaaaaacaatagcctcatcatccccaccatcatagccaccatcaccctccttaacctctacttctacctacgcctaatctactccacctcaa

SEQ ID NO: 55529 - DNA, 120 bp, Homo sapiens
  misc_feature: 1503 for SV(W|O) and mtDNA
ttatactaataatcttatagaaatttaggttaaatacagaccaagagccttcaaagccctcagtaagttgcaatacttaatttctgtaacagctaaggactgcaaaaccccactctgcat

SEQ ID NO: 55530 - DNA, 120 bp, Homo sapiens
  misc_feature: 1503 for SV(W|O) and mtDNA
tgtactatgtactgttaagggtgggtaggtttgttggtatcctagtgggtgaggggtggctttggagttgcagttgatgtgtgatagttgagggttgattgctgtacttgcttgtaagca

SEQ ID NO: 55531 - DNA, 120 bp, Homo sapiens
  misc_feature: 1503 for SV(W|O) and mtDNA
tggagttgcagttgatgtgtgatagttgagggttgattgctgtacttgcttgtaagcatggggagggggttttgatgtggattgggtttttatgtactacaggtggtcaagtatttatgg

SEQ ID NO: 55532 - DNA, 120 bp, Homo sapiens
  misc_feature: 1503 for SV(W|O) and mtDNA
gacaaccttagccaaaccatttacccaaataaagtataggcgatagaaattgaaacctggcgcaatagatatagtaccgcaagggaaagatgaaaaattataaccaagcataatatagca

SEQ ID NO: 55533 - DNA, 120 bp, Homo sapiens
  misc_feature: 1503 for SV(W|O) and mtDNA
tcgctatccccaccggcgtcaaagtatttagctgactcgccacactccacggaagcaatatgaaatgatctgctgcagtgctctgagccctaggattcatctttcttttcaccgtaggtg

SEQ ID NO: 55534 - DNA, 120 bp, Homo sapiens
  misc_feature: 1503 for SV(W|O) and mtDNA
atttgtccttggaaaaaggttttcatctccggtttacaagactggtgtattagtttatactacaaggacaggcccatttgagtattttgttttcaattagggagatagttggtattagga

SEQ ID NO: 55535 - DNA, 120 bp, Homo sapiens
  misc_feature: 1503 for SV(W|O) and mtDNA
cacgggcttacatcctcattactattctgcctagcaaactcaaactacgaacgcactcacagtcgcatcataatcctctctcaaggacttcaaactctactcccactaatagctttttga

SEQ ID NO: 55536 - DNA, 120 bp, Homo sapiens
  misc_feature: 1503 for SV(W|O) and mtDNA
ccaattaagaaagcgttcaagctcaacacccactacctaaaaaatcccaaacatataactgaactcctcatacccaattggaccaatctatcaccctatagaagaactaatgttagtata

SEQ ID NO: 55537 - DNA, 120 bp, Homo sapiens
  misc_feature: 1503 for SV(W|O) and mtDNA
gccaacgccacttatccagtgaaccactatcacgaaaaaaactctacctctctatactaatctccctacaaatctccttaattataacattcacagccacagaactaatcatattttata

SEQ ID NO: 55538 - DNA, 120 bp, Homo sapiens
  misc_feature: 1503 for SV(W|O) and mtDNA
cacctcatatcctccctactatgcctagaaggaataatactatcgctgttcattatagctactctcataaccctcaacacccactccctcttagccaatattgtgcctattgccatacta

SEQ ID NO: 55539 - DNA, 120 bp, Homo sapiens
  misc_feature: 1503 for SV(W|O) and mtDNA
gaatgaggaggtctgcggctaggagtcaataaagtgattggcttagtgggcgaaatattatgctttgttgtttggatatatggaggatggggattattgctaggatgaggatggatagta

SEQ ID NO: 55540 - DNA, 120 bp, Homo sapiens
  misc_feature: 1503 for SV(W|O) and mtDNA
taccattggtggccaattgatttgatggtaagggagggatcgttgacctcgtctgttatgtaaaggatgcgtagggatgggagggcgatgaggactaggatgatggcgggcaggatagtt

SEQ ID NO: 55541 - DNA, 120 bp, Homo sapiens
  misc_feature: 1503 for SV(W|O) and mtDNA
taatacccatcataatcggaggctttggcaactgactagttcccctaataatcggtgcccccgatatggcgtttccccgcataaacaacataagcttctgactcttacctccctctctcc

SEQ ID NO: 55542 - DNA, 120 bp, Homo sapiens
  misc_feature: 1503 for SV(W|O) and mtDNA
aaaccaaataattcaagcactgcttattacaattttactgggtctctattttaccctcctacaagcctcagagtacttcgagtctcccttcaccatttccgacggcatctacggctcaac

SEQ ID NO: 55543 - DNA, 120 bp, Homo sapiens
  misc_feature: 1503 for SV(W|O) and mtDNA
gttatatgtttgggattttttaggtagtgggtgttgagcttgaacgctttcttaattggtggctgcttttaggcctactatgggtgttaaattttttactctctctacaaggttttttcc

SEQ ID NO: 55544 - DNA, 120 bp, Homo sapiens
  misc_feature: 1503 for SV(W|O) and mtDNA
cacaaggcacacctacaccccttatccccatactagttattatcgaaaccatcagcctactcattcaaccaatagccctggccgtacgcctaaccgctaacattactgcaggccacctac

SEQ ID NO: 55545 - DNA, 120 bp, Homo sapiens
  misc_feature: 1503 for SV(W|O) and mtDNA
agttgcagttgatgtgtgatagttgagggttgattgctgtacttgcttgtaagcatggggagggggttttgatgtggattgggtttttatgtactacaggtggtcaagtatttatggtac

SEQ ID NO: 55546 - DNA, 120 bp, Homo sapiens
  misc_feature: 1503 for SV(W|O) and mtDNA
gtaaaggatgcgtagggatgggagggcgatgaggactaggatgatggcgggcaggatagttcagacggtttctatttcctgagcgtctgagatgttagtattagttagttttgttgtgag

SEQ ID NO: 55547 - DNA, 120 bp, Homo sapiens
  misc_feature: 1503 for SV(W|O) and mtDNA
ggcaagccaacgccacttatccagtgaaccactatcacgaaaaaaactctacctctctatactaatctccctacaaatctccttaattataacattcacagccacagaactaatcatatt

SEQ ID NO: 55548 - DNA, 120 bp, Homo sapiens
  misc_feature: 1503 for SV(W|O) and mtDNA
agttagatttacgccgatgaatatgatagtgaaatggattttggcgtaggtttggtctagggtgtagcctgagaataggggaaatcagtgaatgaagcctcctatgatggcaaatacagc

SEQ ID NO: 55549 - DNA, 120 bp, Homo sapiens
  misc_feature: 1503 for SV(W|O) and mtDNA
attttctaccccagaaaactacgatagcccttatgaaacttaagggtcgaaggtggatttagcagtaaactgagagtagagtgcttagttgaacagggccctgaagcgcgtacacaccgc

SEQ ID NO: 55550 - DNA, 120 bp, Homo sapiens
  misc_feature: 1503 for SV(W|O) and mtDNA
atattttatatcttcttcgaaaccacacttatccccaccttggctatcatcacccgatgaggcaaccagccagaacgcctgaacgcaggcacatacttcctattctacaccctagtaggc

SEQ ID NO: 55551 - DNA, 120 bp, Homo sapiens
  misc_feature: 1503 for SV(W|O) and mtDNA
gcacggactacaaccacgaccaatgatatgaaaaaccatcgttgtatttcaactacaagaacaccaatgaccccaatacgcaaaactaaccccctaataaaattaattaaccactcattc

SEQ ID NO: 55552 - DNA, 120 bp, Homo sapiens
  misc_feature: 1503 for SV(W|O) and mtDNA
agttatatgtttgggattttttaggtagtgggtgttgagcttgaacgctttcttaattggtggctgcttttaggcctactatgggtgttaaattttttactctctctacaaggttttttc

SEQ ID NO: 55553 - DNA, 120 bp, Homo sapiens
  misc_feature: 1503 for SV(W|O) and mtDNA
caaccttagccaaaccatttacccaaataaagtataggcgatagaaattgaaacctggcgcaatagatatagtaccgcaagggaaagatgaaaaattataaccaagcataatatagcaag

SEQ ID NO: 55554 - DNA, 120 bp, Homo sapiens
  misc_feature: 1503 for SV(W|O) and mtDNA
agcttgaacgctttcttaattggtggctgcttttaggcctactatgggtgttaaattttttactctctctacaaggttttttcctagtgtccaaagagctgttcctctttggactaacag

SEQ ID NO: 55555 - DNA, 120 bp, Homo sapiens
  misc_feature: 1503 for SV(W|O) and mtDNA
ctgctcggaggttgggttctgctccgaggtcgccccaaccgaaatttttaatgcaggtttggtagtttaggacctgtgggtttgttaggtactgtttgcattaataaattaaagctccat

SEQ ID NO: 55556 - DNA, 120 bp, Homo sapiens
  misc_feature: 1503 for SV(W|O) and mtDNA
ctacacttatcatcttcacaattctaattctactgactatcctagaaatcgctgtcgccttaatccaagcctacgttttcacacttctagtaagcctctacctgcacgacaacacataat

SEQ ID NO: 55557 - DNA, 120 bp, Homo sapiens
  misc_feature: 1503 for SV(W|O) and mtDNA
cgtcaaagtatttagctgactcgccacactccacggaagcaatatgaaatgatctgctgcagtgctctgagccctaggattcatctttcttttcaccgtaggtggcctgactggcattgt

SEQ ID NO: 55558 - DNA, 120 bp, Homo sapiens
  misc_feature: 1503 for SV(W|O) and mtDNA
ccgggctctgccatcttaacaaaccctgttcttgggtgggtgtgggtataatactaagttgagatgatatcatttacgggggaaggcgctttgtgaagtaggccttatttctcttgtcct

SEQ ID NO: 55559 - DNA, 120 bp, Homo sapiens
  misc_feature: 1503 for SV(W|O) and mtDNA
atcgggggcaccgattattaggggaactagtcagttgccaaagcctccgattatgatgggtattactatgaagaagattattacaaatgcatgggctgtgacgataacgttgtagatgtg

SEQ ID NO: 55560 - DNA, 120 bp, Homo sapiens
  misc_feature: 1503 for SV(W|O) and mtDNA
caagtacagcaatcaaccctcaactatcacacatcaactgcaactccaaagccacccctcacccactaggataccaacaaacctacccacccttaacagtacatagtacataaagccatt

SEQ ID NO: 55561 - DNA, 120 bp, Homo sapiens
  misc_feature: 1503 for SV(W|O) and mtDNA
atcagggtttgctgaagatggcggtatataggctgagcaagaggtggtgaggttgatcggggtttatcgattacagaacaggctcctctagagggatatgaagcaccgccaggtcctttg

SEQ ID NO: 55562 - DNA, 120 bp, Homo sapiens
  misc_feature: 1503 for SV(W|O) and mtDNA
atcgctatccccaccggcgtcaaagtatttagctgactcgccacactccacggaagcaatatgaaatgatctgctgcagtgctctgagccctaggattcatctttcttttcaccgtaggt

SEQ ID NO: 55563 - DNA, 120 bp, Homo sapiens
  misc_feature: 1502 for SV(W|O) and mtDNA
ttttaatgcaggtttggtagtttaggacctgtgggtttgttaggtactgtttgcattaataaattaaagctccatagggtcttctcgtcttgctgtgttatgcccgcctcttcacgggca

SEQ ID NO: 55564 - DNA, 120 bp, Homo sapiens
  misc_feature: 1502 for SV(W|O) and mtDNA
ttgtccttggaaaaaggttttcatctccggtttacaagactggtgtattagtttatactacaaggacaggcccatttgagtattttgttttcaattagggagatagttggtattaggatt

SEQ ID NO: 55565 - DNA, 120 bp, Homo sapiens
  misc_feature: 1502 for SV(W|O) and mtDNA
ttagatttacgccgatgaatatgatagtgaaatggattttggcgtaggtttggtctagggtgtagcctgagaataggggaaatcagtgaatgaagcctcctatgatggcaaatacagctc

SEQ ID NO: 55566 - DNA, 120 bp, Homo sapiens
  misc_feature: 1502 for SV(W|O) and mtDNA
ttaatatttttagttgggtgatgaggaatagtgtaaggagtatgggggtaattatggtgggccatacggtagtatttagttggggcatttcactgtaaagaggtgttggttctcttaatc

SEQ ID NO: 55567 - DNA, 120 bp, Homo sapiens
  misc_feature: 1502 for SV(W|O) and mtDNA
aggtattagaaaaaccatttcataactttgtcaaagttaaattataggctaaatcctatatatcttaatggcacatgcagcgcaagtaggtctacaagacgctacttcccctatcataga

SEQ ID NO: 55568 - DNA, 120 bp, Homo sapiens
  misc_feature: 1502 for SV(W|O) and mtDNA
cgtcctttagtgttgtgtatggttatcatttgttttgaggttagtttgattagtcattgttgggtggtgattagtcggttgttgatgagatatttggaggtggggatcaatagaggggga

SEQ ID NO: 55569 - DNA, 120 bp, Homo sapiens
  misc_feature: 1502 for SV(W|O) and mtDNA
tcattaccgggttttcctcttgtaaatatagtttaaccaaaacatcagattgtgaatctgacaacagaggcttacgaccccttatttaccgagaaagctcacaagaactgctaactcatg

SEQ ID NO: 55570 - DNA, 120 bp, Homo sapiens
  misc_feature: 1502 for SV(W|O) and mtDNA
tcatcagggtttgctgaagatggcggtatataggctgagcaagaggtggtgaggttgatcggggtttatcgattacagaacaggctcctctagagggatatgaagcaccgccaggtcctt

SEQ ID NO: 55571 - DNA, 120 bp, Homo sapiens
  misc_feature: 1502 for SV(W|O) and mtDNA
tattactcgcatcaggagtatcaatcacctgagctcaccatagtctaatagaaaacaaccgaaaccaaataattcaagcactgcttattacaattttactgggtctctattttaccctcc

SEQ ID NO: 55572 - DNA, 120 bp, Homo sapiens
  misc_feature: 1502 for SV(W|O) and mtDNA
tatatagaggagacaagtcgtaacatggtaagtgtactggaaagtgcacttggacgaaccagagtgtagcttaacacaaagcacccaacttacacttaggagatttcaacttaacttgac

SEQ ID NO: 55573 - DNA, 120 bp, Homo sapiens
  misc_feature: 1502 for SV(W|O) and mtDNA
cgagggtttatttttttggttagaactggaataaaagctagcatgtttatttctaggcctactcaggtaaaaaatcagtgcgagcttagcgctgtgatgagtgtgcctgcaaagatggta

SEQ ID NO: 55574 - DNA, 120 bp, Homo sapiens
  misc_feature: 1502 for SV(W|O) and mtDNA
taacattactgcaggccacctactcatgcacctaattggaagcgccaccctagcaatatcaaccattaaccttccctctacacttatcatcttcacaattctaattctactgactatcct

SEQ ID NO: 55575 - DNA, 120 bp, Homo sapiens
  misc_feature: 1502 for SV(W|O) and mtDNA
gtattactcgcatcaggagtatcaatcacctgagctcaccatagtctaatagaaaacaaccgaaaccaaataattcaagcactgcttattacaattttactgggtctctattttaccctc

SEQ ID NO: 55576 - DNA, 120 bp, Homo sapiens
  misc_feature: 1502 for SV(W|O) and mtDNA
cacacctcatatcctccctactatgcctagaaggaataatactatcgctgttcattatagctactctcataaccctcaacacccactccctcttagccaatattgtgcctattgccatac

SEQ ID NO: 55577 - DNA, 120 bp, Homo sapiens
  misc_feature: 1502 for SV(W|O) and mtDNA
atatagaggagacaagtcgtaacatggtaagtgtactggaaagtgcacttggacgaaccagagtgtagcttaacacaaagcacccaacttacacttaggagatttcaacttaacttgacc

SEQ ID NO: 55578 - DNA, 120 bp, Homo sapiens
  misc_feature: 1502 for SV(W|O) and mtDNA
ggccgtacgcctaaccgctaacattactgcaggccacctactcatgcacctaattggaagcgccaccctagcaatatcaaccattaaccttccctctacacttatcatcttcacaattct

SEQ ID NO: 55579 - DNA, 120 bp, Homo sapiens
  misc_feature: 1502 for SV(W|O) and mtDNA
atgtactatgtactgttaagggtgggtaggtttgttggtatcctagtgggtgaggggtggctttggagttgcagttgatgtgtgatagttgagggttgattgctgtacttgcttgtaagc

SEQ ID NO: 55580 - DNA, 120 bp, Homo sapiens
  misc_feature: 1502 for SV(W|O) and mtDNA
gacaggcccatttgagtattttgttttcaattagggagatagttggtattaggattaggattgttgtgaagtatagtacggatgctacttgtccaatgatggtaaaagggtagcttactg

SEQ ID NO: 55581 - DNA, 120 bp, Homo sapiens
  misc_feature: 1502 for SV(W|O) and mtDNA
ccttcccctactcatcgcactaatttacactcacaacaccctaggctcactaaacattctactactcactctcactgcccaagaactatcaaactcctgagccaacaacttaatatgact

SEQ ID NO: 55582 - DNA, 120 bp, Homo sapiens
  misc_feature: 1502 for SV(W|O) and mtDNA
aacaaccgctatgtatttcgtacattactgccagccaccatgaatattgtacggtaccataaatacttgaccacctgtagtacataaaaacccaatccacatcaaaaccccctccccatg

SEQ ID NO: 55583 - DNA, 120 bp, Homo sapiens
  misc_feature: 1502 for SV(W|O) and mtDNA
atcataatcggaggctttggcaactgactagttcccctaataatcggtgcccccgatatggcgtttccccgcataaacaacataagcttctgactcttacctccctctctcctactcctg

SEQ ID NO: 55584 - DNA, 120 bp, Homo sapiens
  misc_feature: 1502 for SV(W|O) and mtDNA
aatgtagcccatttcttgccacctcatgggctacaccttgacctaacgtctttacgtgggtacttgcgcttactttgtagccttcatcagggtttgctgaagatggcggtatataggctg

SEQ ID NO: 55585 - DNA, 120 bp, Homo sapiens
  misc_feature: 1502 for SV(W|O) and mtDNA
caaatgggccattatcgaagaattcacaaaaaacaatagcctcatcatccccaccatcatagccaccatcaccctccttaacctctacttctacctacgcctaatctactccacctcaat

SEQ ID NO: 55586 - DNA, 120 bp, Homo sapiens
  misc_feature: 1502 for SV(W|O) and mtDNA
aaatgtagcccatttcttgccacctcatgggctacaccttgacctaacgtctttacgtgggtacttgcgcttactttgtagccttcatcagggtttgctgaagatggcggtatataggct

SEQ ID NO: 55587 - DNA, 120 bp, Homo sapiens
  misc_feature: 1501 for SV(W|O) and mtDNA
ttactcgcatcaggagtatcaatcacctgagctcaccatagtctaatagaaaacaaccgaaaccaaataattcaagcactgcttattacaattttactgggtctctattttaccctccta

SEQ ID NO: 55588 - DNA, 120 bp, Homo sapiens
  misc_feature: 1501 for SV(W|O) and mtDNA
gaaagatgaaaaattataaccaagcataatatagcaaggactaacccctataccttctgcataatgaattaactagaaataactttgcaaggagagccaaagctaagacccccgaaacca

SEQ ID NO: 55589 - DNA, 120 bp, Homo sapiens
  misc_feature: 1501 for SV(W|O) and mtDNA
tgctgaagatggcggtatataggctgagcaagaggtggtgaggttgatcggggtttatcgattacagaacaggctcctctagagggatatgaagcaccgccaggtcctttgagttttaag

SEQ ID NO: 55590 - DNA, 120 bp, Homo sapiens
  misc_feature: 1501 for SV(W|O) and mtDNA
tcctcattactattctgcctagcaaactcaaactacgaacgcactcacagtcgcatcataatcctctctcaaggacttcaaactctactcccactaatagctttttgatgacttctagca

SEQ ID NO: 55591 - DNA, 120 bp, Homo sapiens
  misc_feature: 1501 for SV(W|O) and mtDNA
tagccctggccgtacgcctaaccgctaacattactgcaggccacctactcatgcacctaattggaagcgccaccctagcaatatcaaccattaaccttccctctacacttatcatcttca

SEQ ID NO: 55592 - DNA, 120 bp, Homo sapiens
  misc_feature: 1501 for SV(W|O) and mtDNA
ctgcggctaggagtcaataaagtgattggcttagtgggcgaaatattatgctttgttgtttggatatatggaggatggggattattgctaggatgaggatggatagtaatagggcaagga

SEQ ID NO: 55593 - DNA, 120 bp, Homo sapiens
  misc_feature: 1501 for SV(W|O) and mtDNA
tcactgggcaggcggtgcctctaatactggtgatgctagaggtgatgtttttggtaaacaggcggggtaagatttgccgagttccttttactttttttaacctttccttatgagcatgcc

SEQ ID NO: 55594 - DNA, 120 bp, Homo sapiens
  misc_feature: 1501 for SV(W|O) and mtDNA
gcagtacatgctaagacttcaccagtcaaagcgaactactatactcaattgatccaataacttgaccaacggaacaagttaccctagggataacagcgcaatcctattctagagtccata

SEQ ID NO: 55595 - DNA, 120 bp, Homo sapiens
  misc_feature: 1501 for SV(W|O) and mtDNA
tagaaaatgtagcccatttcttgccacctcatgggctacaccttgacctaacgtctttacgtgggtacttgcgcttactttgtagccttcatcagggtttgctgaagatggcggtatata

SEQ ID NO: 55596 - DNA, 120 bp, Homo sapiens
  misc_feature: 1501 for SV(W|O) and mtDNA
aaccagagtgtagcttaacacaaagcacccaacttacacttaggagatttcaacttaacttgaccgctctgagctaaacctagccccaaacccactccaccttactaccagacaacctta

SEQ ID NO: 55597 - DNA, 120 bp, Homo sapiens
  misc_feature: 1501 for SV(W|O) and mtDNA
ggtttgctgaagatggcggtatataggctgagcaagaggtggtgaggttgatcggggtttatcgattacagaacaggctcctctagagggatatgaagcaccgccaggtcctttgagttt

SEQ ID NO: 55598 - DNA, 120 bp, Homo sapiens
  misc_feature: 1501 for SV(W|O) and mtDNA
acacaaaatgacatcaaaaaaatcgtagccttctccacttcaagtcaactaggactcataatagttacaatcggcatcaaccaaccacacctagcattcctgcacatctgcacccacgcc

SEQ ID NO: 55599 - DNA, 120 bp, Homo sapiens
  misc_feature: 1501 for SV(W|O) and mtDNA
ggacaggcccatttgagtattttgttttcaattagggagatagttggtattaggattaggattgttgtgaagtatagtacggatgctacttgtccaatgatggtaaaagggtagcttact

SEQ ID NO: 55600 - DNA, 120 bp, Homo sapiens
  misc_feature: 1501 for SV(W|O) and mtDNA
gcttgaacgctttcttaattggtggctgcttttaggcctactatgggtgttaaattttttactctctctacaaggttttttcctagtgtccaaagagctgttcctctttggactaacagt

SEQ ID NO: 55601 - DNA, 120 bp, Homo sapiens
  misc_feature: 1501 for SV(W|O) and mtDNA
gcaatagatatagtaccgcaagggaaagatgaaaaattataaccaagcataatatagcaaggactaacccctataccttctgcataatgaattaactagaaataactttgcaaggagagc

SEQ ID NO: 55602 - DNA, 120 bp, Homo sapiens
  misc_feature: 1501 for SV(W|O) and mtDNA
gcaaagactagtatggcaataggcacaatattggctaagagggagtgggtgttgagggttatgagagtagctataatgaacagcgatagtattattccttctaggcatagtagggaggat

SEQ ID NO: 55603 - DNA, 120 bp, Homo sapiens
  misc_feature: 1501 for SV(W|O) and mtDNA
ctcctccggcggggtcgaagaaggtggtgttgaggttgcggtctgttagtagtatagtgatgccagcagctaggactgggagagataggagaagtaggactgctgtgattaggacggatc

SEQ ID NO: 55604 - DNA, 120 bp, Homo sapiens
  misc_feature: 1501 for SV(W|O) and mtDNA
gaggataatgccgatgtttcaggtttctgagtagagaaatgatccgtaatataggcctcgcccgatgtgtaggaagaggcagataaagaatattgaggcgccattggcgtgaaggtagcg

SEQ ID NO: 55605 - DNA, 120 bp, Homo sapiens
  misc_feature: 1501 for SV(W|O) and mtDNA
ccgaaatttttaatgcaggtttggtagtttaggacctgtgggtttgttaggtactgtttgcattaataaattaaagctccatagggtcttctcgtcttgctgtgttatgcccgcctcttc

SEQ ID NO: 55606 - DNA, 120 bp, Homo sapiens
  misc_feature: 1501 for SV(W|O) and mtDNA
ccatactaatcttagttaccgctaacaacctattccaactgttcatcggctgagagggcgtaggaattatatccttcttgctcatcagttgatgatacgcccgagcagatgccaacacag

SEQ ID NO: 55607 - DNA, 120 bp, Homo sapiens
  misc_feature: 1501 for SV(W|O) and mtDNA
aatgttagcggttaggcgtacggccagggctattggttgaatgagtaggctgatggtttcgataataactagtatggggataaggggtgtaggtgtgccttgtggtaagaagtgggctag

SEQ ID NO: 55608 - DNA, 120 bp, Homo sapiens
  misc_feature: 1501 for SV(W|O) and mtDNA
actatgcttagccctaaacctcaacagttaaatcaacaaaactgctcgccagaacactacgagccacagcttaaaactcaaaggacctggcggtgcttcatatccctctagaggagcctg

SEQ ID NO: 55609 - DNA, 120 bp, Homo sapiens
  misc_feature: 1501 for SV(W|O) and mtDNA
aattgggtatgaggagttcagttatatgtttgggattttttaggtagtgggtgttgagcttgaacgctttcttaattggtggctgcttttaggcctactatgggtgttaaattttttact

SEQ ID NO: 55610 - DNA, 120 bp, Homo sapiens
  misc_feature: 1500 for SV(W|O) and mtDNA
ttagctgactcgccacactccacggaagcaatatgaaatgatctgctgcagtgctctgagccctaggattcatctttcttttcaccgtaggtggcctgactggcattgtattagcaaact

SEQ ID NO: 55611 - DNA, 120 bp, Homo sapiens
  misc_feature: 1500 for SV(W|O) and mtDNA
tgtaaaggatgcgtagggatgggagggcgatgaggactaggatgatggcgggcaggatagttcagacggtttctatttcctgagcgtctgagatgttagtattagttagttttgttgtga

SEQ ID NO: 55612 - DNA, 120 bp, Homo sapiens
  misc_feature: 1500 for SV(W|O) and mtDNA
agttgatgatacgcccgagcagatgccaacacagcagccattcaagcaatcctatacaaccgtatcggcgatatcggtttcatcctcgccttagcatgatttatcctacactccaactca

SEQ ID NO: 55613 - DNA, 120 bp, Homo sapiens
  misc_feature: 1500 for SV(W|O) and mtDNA
tgacctgcccgtgaagaggcgggcataacacagcaagacgagaagaccctatggagctttaatttattaatgcaaacagtacctaacaaacccacaggtcctaaactaccaaacctgcat

SEQ ID NO: 55614 - DNA, 120 bp, Homo sapiens
  misc_feature: 1500 for SV(W|O) and mtDNA
tgaatatgatagtgaaatggattttggcgtaggtttggtctagggtgtagcctgagaataggggaaatcagtgaatgaagcctcctatgatggcaaatacagctcctattgataggacat

SEQ ID NO: 55615 - DNA, 120 bp, Homo sapiens
  misc_feature: 1500 for SV(W|O) and mtDNA
tcgtagttttctggggtagaaaatgtagcccatttcttgccacctcatgggctacaccttgacctaacgtctttacgtgggtacttgcgcttactttgtagccttcatcagggtttgctg

SEQ ID NO: 55616 - DNA, 120 bp, Homo sapiens
  misc_feature: 1500 for SV(W|O) and mtDNA
taatgccgatgtttcaggtttctgagtagagaaatgatccgtaatataggcctcgcccgatgtgtaggaagaggcagataaagaatattgaggcgccattggcgtgaaggtagcggatga

SEQ ID NO: 55617 - DNA, 120 bp, Homo sapiens
  misc_feature: 1500 for SV(W|O) and mtDNA
tatagtaccgcaagggaaagatgaaaaattataaccaagcataatatagcaaggactaacccctataccttctgcataatgaattaactagaaataactttgcaaggagagccaaagcta

SEQ ID NO: 55618 - DNA, 120 bp, Homo sapiens
  misc_feature: 1500 for SV(W|O) and mtDNA
atcttcttcatagtaatacccatcataatcggaggctttggcaactgactagttcccctaataatcggtgcccccgatatggcgtttccccgcataaacaacataagcttctgactctta

SEQ ID NO: 55619 - DNA, 120 bp, Homo sapiens
  misc_feature: 1500 for SV(W|O) and mtDNA
atggggtgtgataggtggcacggagaattttggattctcagggatgggttcgattctcatagtcctagaaataagggggtttaagctcctattatttactctatcaaagtaactctttta

SEQ ID NO: 55620 - DNA, 120 bp, Homo sapiens
  misc_feature: 1500 for SV(W|O) and mtDNA
gttccttaaatagggacctgtatgaatggctccacgagggttcagctgtctcttacttttaaccagtgaaattgacctgcccgtgaagaggcgggcataacacagcaagacgagaagacc

SEQ ID NO: 55621 - DNA, 120 bp, Homo sapiens
  misc_feature: 1500 for SV(W|O) and mtDNA
agatgaaaaattataaccaagcataatatagcaaggactaacccctataccttctgcataatgaattaactagaaataactttgcaaggagagccaaagctaagacccccgaaaccagac

SEQ ID NO: 55622 - DNA, 120 bp, Homo sapiens
  misc_feature: 1500 for SV(W|O) and mtDNA
gatgaatatgatagtgaaatggattttggcgtaggtttggtctagggtgtagcctgagaataggggaaatcagtgaatgaagcctcctatgatggcaaatacagctcctattgataggac

SEQ ID NO: 55623 - DNA, 120 bp, Homo sapiens
  misc_feature: 1500 for SV(W|O) and mtDNA
gcacttggacgaaccagagtgtagcttaacacaaagcacccaacttacacttaggagatttcaacttaacttgaccgctctgagctaaacctagccccaaacccactccaccttactacc

SEQ ID NO: 55624 - DNA, 120 bp, Homo sapiens
  misc_feature: 1500 for SV(W|O) and mtDNA
gggtggggggcatccatatagtcactccaggtttatggagggttcttctactattaggacttttcgctttgaagcgaaggcttctcaaatcatgaaaattattaatattactgctgttag

SEQ ID NO: 55625 - DNA, 120 bp, Homo sapiens
  misc_feature: 1500 for SV(W|O) and mtDNA
atgcttcactcagccattttacctcacccccactgatgttcgccgaccgttgactattctctacaaaccacaaagacattggaacactatacctattattcggcgcatgagctggagtcc

SEQ ID NO: 55626 - DNA, 120 bp, Homo sapiens
  misc_feature: 1500 for SV(W|O) and mtDNA
gccgatgaatatgatagtgaaatggattttggcgtaggtttggtctagggtgtagcctgagaataggggaaatcagtgaatgaagcctcctatgatggcaaatacagctcctattgatag

SEQ ID NO: 55627 - DNA, 120 bp, Homo sapiens
  misc_feature: 1500 for SV(W|O) and mtDNA
ccaatagccctggccgtacgcctaaccgctaacattactgcaggccacctactcatgcacctaattggaagcgccaccctagcaatatcaaccattaaccttccctctacacttatcatc

SEQ ID NO: 55628 - DNA, 120 bp, Homo sapiens
  misc_feature: 1500 for SV(W|O) and mtDNA
aggttcgtcctttagtgttgtgtatggttatcatttgttttgaggttagtttgattagtcattgttgggtggtgattagtcggttgttgatgagatatttggaggtggggatcaatagag

SEQ ID NO: 55629 - DNA, 120 bp, Homo sapiens
  misc_feature: 1500 for SV(W|O) and mtDNA
cgtattactcgcatcaggagtatcaatcacctgagctcaccatagtctaatagaaaacaaccgaaaccaaataattcaagcactgcttattacaattttactgggtctctattttaccct

SEQ ID NO: 55630 - DNA, 120 bp, Homo sapiens
  misc_feature: 1500 for SV(W|O) and mtDNA
ccaacatcgaggtcgtaaaccctattgttgatatggactctagaataggattgcgctgttatccctagggtaacttgttccgttggtcaagttattggatcaattgagtatagtagttcg

SEQ ID NO: 55631 - DNA, 120 bp, Homo sapiens
  misc_feature: 1500 for SV(W|O) and mtDNA
atgtaaaggatgcgtagggatgggagggcgatgaggactaggatgatggcgggcaggatagttcagacggtttctatttcctgagcgtctgagatgttagtattagttagttttgttgtg

SEQ ID NO: 55632 - DNA, 120 bp, Homo sapiens
  misc_feature: 1500 for SV(W|O) and mtDNA
cacaaaatgacatcaaaaaaatcgtagccttctccacttcaagtcaactaggactcataatagttacaatcggcatcaaccaaccacacctagcattcctgcacatctgcacccacgcct

SEQ ID NO: 55633 - DNA, 120 bp, Homo sapiens
  misc_feature: 1500 for SV(W|O) and mtDNA
attactcgcatcaggagtatcaatcacctgagctcaccatagtctaatagaaaacaaccgaaaccaaataattcaagcactgcttattacaattttactgggtctctattttaccctcct

SEQ ID NO: 55634 - DNA, 120 bp, Homo sapiens
  misc_feature: 1500 for SV(W|O) and mtDNA
aggcacacctacaccccttatccccatactagttattatcgaaaccatcagcctactcattcaaccaatagccctggccgtacgcctaaccgctaacattactgcaggccacctactcat

SEQ ID NO: 55635 - DNA, 120 bp, Homo sapiens
  misc_feature: 1500 for SV(W|O) and mtDNA
ataatataaatagttaaattaagaatggttatgttagggttgtacggtagaactgctattattcatcctatgtgggtaattgaggagtatgctaagattttgcgtagctgggtttggttt

SEQ ID NO: 55636 - DNA, 120 bp, Homo sapiens
  misc_feature: 1500 for SV(W|O) and mtDNA
acccatcataatcggaggctttggcaactgactagttcccctaataatcggtgcccccgatatggcgtttccccgcataaacaacataagcttctgactcttacctccctctctcctact

SEQ ID NO: 55637 - DNA, 120 bp, Homo sapiens
  misc_feature: 1500 for SV(W|O) and mtDNA
acgccatatcgggggcaccgattattaggggaactagtcagttgccaaagcctccgattatgatgggtattactatgaagaagattattacaaatgcatgggctgtgacgataacgttgt

SEQ ID NO: 55638 - DNA, 120 bp, Homo sapiens
  misc_feature: 1499 for SV(W|O) and mtDNA
ttgctgaagatggcggtatataggctgagcaagaggtggtgaggttgatcggggtttatcgattacagaacaggctcctctagagggatatgaagcaccgccaggtcctttgagttttaa

SEQ ID NO: 55639 - DNA, 120 bp, Homo sapiens
  misc_feature: 1499 for SV(W|O) and mtDNA
tgagcttgaacgctttcttaattggtggctgcttttaggcctactatgggtgttaaattttttactctctctacaaggttttttcctagtgtccaaagagctgttcctctttggactaac

SEQ ID NO: 55640 - DNA, 120 bp, Homo sapiens
  misc_feature: 1499 for SV(W|O) and mtDNA
tccgattcaggttagaatgaggaggtctgcggctaggagtcaataaagtgattggcttagtgggcgaaatattatgctttgttgtttggatatatggaggatggggattattgctaggat

SEQ ID NO: 55641 - DNA, 120 bp, Homo sapiens
  misc_feature: 1499 for SV(W|O) and mtDNA
tcagggtttgctgaagatggcggtatataggctgagcaagaggtggtgaggttgatcggggtttatcgattacagaacaggctcctctagagggatatgaagcaccgccaggtcctttga

SEQ ID NO: 55642 - DNA, 120 bp, Homo sapiens
  misc_feature: 1499 for SV(W|O) and mtDNA
aacattactgcaggccacctactcatgcacctaattggaagcgccaccctagcaatatcaaccattaaccttccctctacacttatcatcttcacaattctaattctactgactatccta

SEQ ID NO: 55643 - DNA, 120 bp, Homo sapiens
  misc_feature: 1499 for SV(W|O) and mtDNA
tactgcaggccacctactcatgcacctaattggaagcgccaccctagcaatatcaaccattaaccttccctctacacttatcatcttcacaattctaattctactgactatcctagaaat

SEQ ID NO: 55644 - DNA, 120 bp, Homo sapiens
  misc_feature: 1499 for SV(W|O) and mtDNA
atcctatcatctgtaggctcattcatttctctaacagcagtaatattaataattttcatgatttgagaagccttcgcttcaaagcgaaaagtcctaatagtagaagaaccctccataaac

SEQ ID NO: 55645 - DNA, 120 bp, Homo sapiens
  misc_feature: 1499 for SV(W|O) and mtDNA
gttagatttacgccgatgaatatgatagtgaaatggattttggcgtaggtttggtctagggtgtagcctgagaataggggaaatcagtgaatgaagcctcctatgatggcaaatacagct

SEQ ID NO: 55646 - DNA, 120 bp, Homo sapiens
  misc_feature: 1499 for SV(W|O) and mtDNA
gtgcatgagtaggtggcctgcagtaatgttagcggttaggcgtacggccagggctattggttgaatgagtaggctgatggtttcgataataactagtatggggataaggggtgtaggtgt

SEQ ID NO: 55647 - DNA, 120 bp, Homo sapiens
  misc_feature: 1499 for SV(W|O) and mtDNA
gaaatttttaatgcaggtttggtagtttaggacctgtgggtttgttaggtactgtttgcattaataaattaaagctccatagggtcttctcgtcttgctgtgttatgcccgcctcttcac

SEQ ID NO: 55648 - DNA, 120 bp, Homo sapiens
  misc_feature: 1499 for SV(W|O) and mtDNA
gtacgcctaaccgctaacattactgcaggccacctactcatgcacctaattggaagcgccaccctagcaatatcaaccattaaccttccctctacacttatcatcttcacaattctaatt

SEQ ID NO: 55649 - DNA, 120 bp, Homo sapiens
  misc_feature: 1499 for SV(W|O) and mtDNA
gatatagtaccgcaagggaaagatgaaaaattataaccaagcataatatagcaaggactaacccctataccttctgcataatgaattaactagaaataactttgcaaggagagccaaagc

SEQ ID NO: 55650 - DNA, 120 bp, Homo sapiens
  misc_feature: 1499 for SV(W|O) and mtDNA
atagaggagacaagtcgtaacatggtaagtgtactggaaagtgcacttggacgaaccagagtgtagcttaacacaaagcacccaacttacacttaggagatttcaacttaacttgaccgc

SEQ ID NO: 55651 - DNA, 120 bp, Homo sapiens
  misc_feature: 1499 for SV(W|O) and mtDNA
gagcagttttgttgatttaactgttgaggtttagggctaagcatagtggggtatctaatcccagtttgggtcttagctattgtgtgttcagatatgttaaagccactttcgtagtctatt

SEQ ID NO: 55652 - DNA, 120 bp, Homo sapiens
  misc_feature: 1499 for SV(W|O) and mtDNA
gaaacttaagggtcgaaggtggatttagcagtaaactgagagtagagtgcttagttgaacagggccctgaagcgcgtacacaccgcccgtcaccctcctcaagtatacttcaaaggacat

SEQ ID NO: 55653 - DNA, 120 bp, Homo sapiens
  misc_feature: 1499 for SV(W|O) and mtDNA
ctctgatttgtccttggaaaaaggttttcatctccggtttacaagactggtgtattagtttatactacaaggacaggcccatttgagtattttgttttcaattagggagatagttggtat

SEQ ID NO: 55654 - DNA, 120 bp, Homo sapiens
  misc_feature: 1499 for SV(W|O) and mtDNA
aaagagtaataaacttcgccttaattttaataatcaacaccctcctagccttactactaataattattacattttgactaccacaactcaacggctacatagaaaaatccaccccttacg

SEQ ID NO: 55655 - DNA, 120 bp, Homo sapiens
  misc_feature: 1499 for SV(W|O) and mtDNA
cattttctaccccagaaaactacgatagcccttatgaaacttaagggtcgaaggtggatttagcagtaaactgagagtagagtgcttagttgaacagggccctgaagcgcgtacacaccg

SEQ ID NO: 55656 - DNA, 120 bp, Homo sapiens
  misc_feature: 1499 for SV(W|O) and mtDNA
aggaggtctgcggctaggagtcaataaagtgattggcttagtgggcgaaatattatgctttgttgtttggatatatggaggatggggattattgctaggatgaggatggatagtaatagg

SEQ ID NO: 55657 - DNA, 120 bp, Homo sapiens
  misc_feature: 1499 for SV(W|O) and mtDNA
atgaggaggtctgcggctaggagtcaataaagtgattggcttagtgggcgaaatattatgctttgttgtttggatatatggaggatggggattattgctaggatgaggatggatagtaat

SEQ ID NO: 55658 - DNA, 120 bp, Homo sapiens
  misc_feature: 1499 for SV(W|O) and mtDNA
atacacaacactaaaggacgaacctgatctcttatactagtatccttaatcatttttattgccacaactaacctcctcggactcctgcctcactcatttacaccaaccacccaactatct

SEQ ID NO: 55659 - DNA, 120 bp, Homo sapiens
  misc_feature: 1499 for SV(W|O) and mtDNA
agatttacgccgatgaatatgatagtgaaatggattttggcgtaggtttggtctagggtgtagcctgagaataggggaaatcagtgaatgaagcctcctatgatggcaaatacagctcct

SEQ ID NO: 55660 - DNA, 120 bp, Homo sapiens
  misc_feature: 1499 for SV(W|O) and mtDNA
agaaggcgtgggtgcagatgtgcaggaatgctaggtgtggttggttgatgccgattgtaactattatgagtcctagttgacttgaagtggagaaggctacgatttttttgatgtcatttt

SEQ ID NO: 55661 - DNA, 120 bp, Homo sapiens
  misc_feature: 1498 for SV(W|O) and mtDNA
gagggaggttgaagtgagaggtatggttttgagtagtcctcctatttttcgaatatcttgttcattgttaaggttgtggatgatggacccggagcacataaatagtatggctttgaagaa

SEQ ID NO: 55662 - DNA, 120 bp, Homo sapiens
  misc_feature: 1498 for SV(W|O) and mtDNA
gatacggttgtataggattgcttgaatggctgctgtgttggcatctgctcgggcgtatcatcaactgatgagcaagaaggatataattcctacgccctctcagccgatgaacagttggaa

SEQ ID NO: 55663 - DNA, 120 bp, Homo sapiens
  misc_feature: 1498 for SV(W|O) and mtDNA
ttcagttatatgtttgggattttttaggtagtgggtgttgagcttgaacgctttcttaattggtggctgcttttaggcctactatgggtgttaaattttttactctctctacaaggtttt

SEQ ID NO: 55664 - DNA, 120 bp, Homo sapiens
  misc_feature: 1498 for SV(W|O) and mtDNA
tgtatggttatcatttgttttgaggttagtttgattagtcattgttgggtggtgattagtcggttgttgatgagatatttggaggtggggatcaatagagggggaaatagaatgatcagt

SEQ ID NO: 55665 - DNA, 120 bp, Homo sapiens
  misc_feature: 1498 for SV(W|O) and mtDNA
cgatgaatatgatagtgaaatggattttggcgtaggtttggtctagggtgtagcctgagaataggggaaatcagtgaatgaagcctcctatgatggcaaatacagctcctattgatagga

SEQ ID NO: 55666 - DNA, 120 bp, Homo sapiens
  misc_feature: 1498 for SV(W|O) and mtDNA
ggttagaatgaggaggtctgcggctaggagtcaataaagtgattggcttagtgggcgaaatattatgctttgttgtttggatatatggaggatggggattattgctaggatgaggatgga

SEQ ID NO: 55667 - DNA, 120 bp, Homo sapiens
  misc_feature: 1498 for SV(W|O) and mtDNA
aatcctattctagagtccatatcaacaatagggtttacgacctcgatgttggatcaggacatcccgatggtgcagccgctattaaaggttcgtttgttcaacgattaaagtcctacgtga

SEQ ID NO: 55668 - DNA, 120 bp, Homo sapiens
  misc_feature: 1498 for SV(W|O) and mtDNA
agaaagttagatttacgccgatgaatatgatagtgaaatggattttggcgtaggtttggtctagggtgtagcctgagaataggggaaatcagtgaatgaagcctcctatgatggcaaata

SEQ ID NO: 55669 - DNA, 120 bp, Homo sapiens
  misc_feature: 1498 for SV(W|O) and mtDNA
ccacaaggcacacctacaccccttatccccatactagttattatcgaaaccatcagcctactcattcaaccaatagccctggccgtacgcctaaccgctaacattactgcaggccaccta

SEQ ID NO: 55670 - DNA, 120 bp, Homo sapiens
  misc_feature: 1498 for SV(W|O) and mtDNA
tagctgactcgccacactccacggaagcaatatgaaatgatctgctgcagtgctctgagccctaggattcatctttcttttcaccgtaggtggcctgactggcattgtattagcaaactc

SEQ ID NO: 55671 - DNA, 120 bp, Homo sapiens
  misc_feature: 1498 for SV(W|O) and mtDNA
tactgctcggaggttgggttctgctccgaggtcgccccaaccgaaatttttaatgcaggtttggtagtttaggacctgtgggtttgttaggtactgtttgcattaataaattaaagctcc

SEQ ID NO: 55672 - DNA, 120 bp, Homo sapiens
  misc_feature: 1498 for SV(W|O) and mtDNA
taaaaatgattaaggatactagtataagagatcaggttcgtcctttagtgttgtgtatggttatcatttgttttgaggttagtttgattagtcattgttgggtggtgattagtcggttgt

SEQ ID NO: 55673 - DNA, 120 bp, Homo sapiens
  misc_feature: 1498 for SV(W|O) and mtDNA
gtgtatggttatcatttgttttgaggttagtttgattagtcattgttgggtggtgattagtcggttgttgatgagatatttggaggtggggatcaatagagggggaaatagaatgatcag

SEQ ID NO: 55674 - DNA, 120 bp, Homo sapiens
  misc_feature: 1498 for SV(W|O) and mtDNA
cgcccttacacaaaatgacatcaaaaaaatcgtagccttctccacttcaagtcaactaggactcataatagttacaatcggcatcaaccaaccacacctagcattcctgcacatctgcac

SEQ ID NO: 55675 - DNA, 120 bp, Homo sapiens
  misc_feature: 1498 for SV(W|O) and mtDNA
gggatttagagggttctgtgggcaaatttaaagttgaactaagattctatcttggacaaccagctatcaccaggctcggtaggtttgtcgcctctacctataaatcttcccactattttg

SEQ ID NO: 55676 - DNA, 120 bp, Homo sapiens
  misc_feature: 1498 for SV(W|O) and mtDNA
ggctctgccatcttaacaaaccctgttcttgggtgggtgtgggtataatactaagttgagatgatatcatttacgggggaaggcgctttgtgaagtaggccttatttctcttgtcctttc

SEQ ID NO: 55677 - DNA, 120 bp, Homo sapiens
  misc_feature: 1498 for SV(W|O) and mtDNA
ggatggggtgtgataggtggcacggagaattttggattctcagggatgggttcgattctcatagtcctagaaataagggggtttaagctcctattatttactctatcaaagtaactcttt

SEQ ID NO: 55678 - DNA, 120 bp, Homo sapiens
  misc_feature: 1498 for SV(W|O) and mtDNA
ggagggggtgatctaaaacactctttacgccggcttctattgacttgggttaatcgtgtgaccgcggtggctggcacgaaattgaccaaccctggggttagtatagcttagttaaacttt

SEQ ID NO: 55679 - DNA, 120 bp, Homo sapiens
  misc_feature: 1498 for SV(W|O) and mtDNA
gctttggagttgcagttgatgtgtgatagttgagggttgattgctgtacttgcttgtaagcatggggagggggttttgatgtggattgggtttttatgtactacaggtggtcaagtattt

SEQ ID NO: 55680 - DNA, 120 bp, Homo sapiens
  misc_feature: 1498 for SV(W|O) and mtDNA
gatcaaaagggacaagcatcaagcacgcagcaatgcagctcaaaacgcttagcctagccacacccccacgggaaacagcagtgattaacctttagcaataaacgaaagtttaactaagct

SEQ ID NO: 55681 - DNA, 120 bp, Homo sapiens
  misc_feature: 1498 for SV(W|O) and mtDNA
acctgtgggtttgttaggtactgtttgcattaataaattaaagctccatagggtcttctcgtcttgctgtgttatgcccgcctcttcacgggcaggtcaatttcactggttaaaagtaag

SEQ ID NO: 55682 - DNA, 120 bp, Homo sapiens
  misc_feature: 1498 for SV(W|O) and mtDNA
aagttagatttacgccgatgaatatgatagtgaaatggattttggcgtaggtttggtctagggtgtagcctgagaataggggaaatcagtgaatgaagcctcctatgatggcaaatacag

SEQ ID NO: 55683 - DNA, 120 bp, Homo sapiens
  misc_feature: 1498 for SV(W|O) and mtDNA
cctccgattcaggttagaatgaggaggtctgcggctaggagtcaataaagtgattggcttagtgggcgaaatattatgctttgttgtttggatatatggaggatggggattattgctagg

SEQ ID NO: 55684 - DNA, 120 bp, Homo sapiens
  misc_feature: 1498 for SV(W|O) and mtDNA
aggttagaatgaggaggtctgcggctaggagtcaataaagtgattggcttagtgggcgaaatattatgctttgttgtttggatatatggaggatggggattattgctaggatgaggatgg

SEQ ID NO: 55685 - DNA, 120 bp, Homo sapiens
  misc_feature: 1498 for SV(W|O) and mtDNA
caatcctattctagagtccatatcaacaatagggtttacgacctcgatgttggatcaggacatcccgatggtgcagccgctattaaaggttcgtttgttcaacgattaaagtcctacgtg

SEQ ID NO: 55686 - DNA, 120 bp, Homo sapiens
  misc_feature: 1498 for SV(W|O) and mtDNA
attgtaactattatgagtcctagttgacttgaagtggagaaggctacgatttttttgatgtcattttgtgtaagggcgcagactgctgcgaacagagtggtgatagcgcctaagcatagt

SEQ ID NO: 55687 - DNA, 120 bp, Homo sapiens
  misc_feature: 1498 for SV(W|O) and mtDNA
attgctatagccattatgattattaatgatgagtactgattggtagtattggttatggttcattgtccggagagtatattgttgaagaggatagctattagaaggattatggatgcggtt

SEQ ID NO: 55688 - DNA, 120 bp, Homo sapiens
  misc_feature: 1498 for SV(W|O) and mtDNA
aataatcttcttcatagtaatacccatcataatcggaggctttggcaactgactagttcccctaataatcggtgcccccgatatggcgtttccccgcataaacaacataagcttctgact

SEQ ID NO: 55689 - DNA, 120 bp, Homo sapiens
  misc_feature: 1497 for SV(W|O) and mtDNA
ttaggacctgtgggtttgttaggtactgtttgcattaataaattaaagctccatagggtcttctcgtcttgctgtgttatgcccgcctcttcacgggcaggtcaatttcactggttaaaa

SEQ ID NO: 55690 - DNA, 120 bp, Homo sapiens
  misc_feature: 1497 for SV(W|O) and mtDNA
tttagctgactcgccacactccacggaagcaatatgaaatgatctgctgcagtgctctgagccctaggattcatctttcttttcaccgtaggtggcctgactggcattgtattagcaaac

SEQ ID NO: 55691 - DNA, 120 bp, Homo sapiens
  misc_feature: 1497 for SV(W|O) and mtDNA
acaaccttagccaaaccatttacccaaataaagtataggcgatagaaattgaaacctggcgcaatagatatagtaccgcaagggaaagatgaaaaattataaccaagcataatatagcaa

SEQ ID NO: 55692 - DNA, 120 bp, Homo sapiens
  misc_feature: 1497 for SV(W|O) and mtDNA
attactgcaggccacctactcatgcacctaattggaagcgccaccctagcaatatcaaccattaaccttccctctacacttatcatcttcacaattctaattctactgactatcctagaa

SEQ ID NO: 55693 - DNA, 120 bp, Homo sapiens
  misc_feature: 1497 for SV(W|O) and mtDNA
ttatgcccgcctcttcacgggcaggtcaatttcactggttaaaagtaagagacagctgaaccctcgtggagccattcatacaggtccctatttaaggaacaagtgattatgctacctttg

SEQ ID NO: 55694 - DNA, 120 bp, Homo sapiens
  misc_feature: 1497 for SV(W|O) and mtDNA
tactaggcctactaaccaacacactaaccatataccaatgatggcgcgatgtaacacgagaaagcacataccaaggccaccacacaccacctgtccaaaaaggccttcgatacgggataa

SEQ ID NO: 55695 - DNA, 120 bp, Homo sapiens
  misc_feature: 1497 for SV(W|O) and mtDNA
ttaagggtcgaaggtggatttagcagtaaactgagagtagagtgcttagttgaacagggccctgaagcgcgtacacaccgcccgtcaccctcctcaagtatacttcaaaggacatttaac

SEQ ID NO: 55696 - DNA, 120 bp, Homo sapiens
  misc_feature: 1497 for SV(W|O) and mtDNA
tgtgttgattcaaattatgtgttttttggaaagtcatgtcagtggtagtaatataattgttgggacgattagttttagcattggagtaggtttaggttatgtacgtagtctaggccatat

SEQ ID NO: 55697 - DNA, 120 bp, Homo sapiens
  misc_feature: 1497 for SV(W|O) and mtDNA
aaagttagatttacgccgatgaatatgatagtgaaatggattttggcgtaggtttggtctagggtgtagcctgagaataggggaaatcagtgaatgaagcctcctatgatggcaaataca

SEQ ID NO: 55698 - DNA, 120 bp, Homo sapiens
  misc_feature: 1497 for SV(W|O) and mtDNA
gttaacgagggtggtaaggatggggggaattagggaagtcagggttagggtggttatagtagtgtgcatggttattacttttatttggagttgcaccaaaatttttggggcctaagacca

SEQ ID NO: 55699 - DNA, 120 bp, Homo sapiens
  misc_feature: 1497 for SV(W|O) and mtDNA
tggtctagggtgtagcctgagaataggggaaatcagtgaatgaagcctcctatgatggcaaatacagctcctattgataggacatagtggaagtgggctacaacgtagtacgtgtcgtgt

SEQ ID NO: 55700 - DNA, 120 bp, Homo sapiens
  misc_feature: 1497 for SV(W|O) and mtDNA
aggtctgcggctaggagtcaataaagtgattggcttagtgggcgaaatattatgctttgttgtttggatatatggaggatggggattattgctaggatgaggatggatagtaatagggca

SEQ ID NO: 55701 - DNA, 120 bp, Homo sapiens
  misc_feature: 1497 for SV(W|O) and mtDNA
catcattaccgggttttcctcttgtaaatatagtttaaccaaaacatcagattgtgaatctgacaacagaggcttacgaccccttatttaccgagaaagctcacaagaactgctaactca

SEQ ID NO: 55702 - DNA, 120 bp, Homo sapiens
  misc_feature: 1497 for SV(W|O) and mtDNA
tctgatttgtccttggaaaaaggttttcatctccggtttacaagactggtgtattagtttatactacaaggacaggcccatttgagtattttgttttcaattagggagatagttggtatt

SEQ ID NO: 55703 - DNA, 120 bp, Homo sapiens
  misc_feature: 1497 for SV(W|O) and mtDNA
tccctctacacttatcatcttcacaattctaattctactgactatcctagaaatcgctgtcgccttaatccaagcctacgttttcacacttctagtaagcctctacctgcacgacaacac

SEQ ID NO: 55704 - DNA, 120 bp, Homo sapiens
  misc_feature: 1497 for SV(W|O) and mtDNA
tatagaggagacaagtcgtaacatggtaagtgtactggaaagtgcacttggacgaaccagagtgtagcttaacacaaagcacccaacttacacttaggagatttcaacttaacttgaccg

SEQ ID NO: 55705 - DNA, 120 bp, Homo sapiens
  misc_feature: 1497 for SV(W|O) and mtDNA
tagtaatacccatcataatcggaggctttggcaactgactagttcccctaataatcggtgcccccgatatggcgtttccccgcataaacaacataagcttctgactcttacctccctctc

SEQ ID NO: 55706 - DNA, 120 bp, Homo sapiens
  misc_feature: 1497 for SV(W|O) and mtDNA
tagatttacgccgatgaatatgatagtgaaatggattttggcgtaggtttggtctagggtgtagcctgagaataggggaaatcagtgaatgaagcctcctatgatggcaaatacagctcc

SEQ ID NO: 55707 - DNA, 120 bp, Homo sapiens
  misc_feature: 1497 for SV(W|O) and mtDNA
taacataaccattcttaatttaactatttatattatcctaactactaccgcattcctactactcaacttaaactccagcaccacgaccctactactatctcgcacctgaaacaagctaac

SEQ ID NO: 55708 - DNA, 120 bp, Homo sapiens
  misc_feature: 1497 for SV(W|O) and mtDNA
gttgcagttgatgtgtgatagttgagggttgattgctgtacttgcttgtaagcatggggagggggttttgatgtggattgggtttttatgtactacaggtggtcaagtatttatggtacc

SEQ ID NO: 55709 - DNA, 120 bp, Homo sapiens
  misc_feature: 1497 for SV(W|O) and mtDNA
gcaatcctattctagagtccatatcaacaatagggtttacgacctcgatgttggatcaggacatcccgatggtgcagccgctattaaaggttcgtttgttcaacgattaaagtcctacgt

SEQ ID NO: 55710 - DNA, 120 bp, Homo sapiens
  misc_feature: 1497 for SV(W|O) and mtDNA
ccactatagcagatgcgagcaggagtaggagagagggaggtaagagtcagaagcttatgttgtttatgcggggaaacgccatatcgggggcaccgattattaggggaactagtcagttgc

SEQ ID NO: 55711 - DNA, 120 bp, Homo sapiens
  misc_feature: 1497 for SV(W|O) and mtDNA
agtacatgctaagacttcaccagtcaaagcgaactactatactcaattgatccaataacttgaccaacggaacaagttaccctagggataacagcgcaatcctattctagagtccatatc

SEQ ID NO: 55712 - DNA, 120 bp, Homo sapiens
  misc_feature: 1497 for SV(W|O) and mtDNA
agaggagacaagtcgtaacatggtaagtgtactggaaagtgcacttggacgaaccagagtgtagcttaacacaaagcacccaacttacacttaggagatttcaacttaacttgaccgctc

SEQ ID NO: 55713 - DNA, 120 bp, Homo sapiens
  misc_feature: 1497 for SV(W|O) and mtDNA
aaccctaacataaccattcttaatttaactatttatattatcctaactactaccgcattcctactactcaacttaaactccagcaccacgaccctactactatctcgcacctgaaacaag

SEQ ID NO: 55714 - DNA, 120 bp, Homo sapiens
  misc_feature: 1497 for SV(W|O) and mtDNA
caggagtatcaatcacctgagctcaccatagtctaatagaaaacaaccgaaaccaaataattcaagcactgcttattacaattttactgggtctctattttaccctcctacaagcctcag

SEQ ID NO: 55715 - DNA, 120 bp, Homo sapiens
  misc_feature: 1497 for SV(W|O) and mtDNA
cgtactacacgacacgtactacgttgtagcccacttccactatgtcctatcaataggagctgtatttgccatcataggaggcttcattcactgatttcccctattctcaggctacaccct

SEQ ID NO: 55716 - DNA, 120 bp, Homo sapiens
  misc_feature: 1497 for SV(W|O) and mtDNA
agggggtgatctaaaacactctttacgccggcttctattgacttgggttaatcgtgtgaccgcggtggctggcacgaaattgaccaaccctggggttagtatagcttagttaaactttcg

SEQ ID NO: 55717 - DNA, 120 bp, Homo sapiens
  misc_feature: 1496 for SV(W|O) and mtDNA
atggtaagtgtactggaaagtgcacttggacgaaccagagtgtagcttaacacaaagcacccaacttacacttaggagatttcaacttaacttgaccgctctgagctaaacctagcccca

SEQ ID NO: 55718 - DNA, 120 bp, Homo sapiens
  misc_feature: 1496 for SV(W|O) and mtDNA
aatcgctgtcgccttaatccaagcctacgttttcacacttctagtaagcctctacctgcacgacaacacataatgacccaccaatcacatgcctatcatatagtaaaacccagcccatga

SEQ ID NO: 55719 - DNA, 120 bp, Homo sapiens
  misc_feature: 1496 for SV(W|O) and mtDNA
taggggttttagttaaatgtcctttgaagtatacttgaggagggtgacgggcggtgtgtacgcgcttcagggccctgttcaactaagcactctactctcagtttactgctaaatccacct

SEQ ID NO: 55720 - DNA, 120 bp, Homo sapiens
  misc_feature: 1496 for SV(W|O) and mtDNA
acctacgccaaaatccatttcactatcatattcatcggcgtaaatctaactttcttcccacaacactttctcggcctatccggaatgccccgacgttactcggactaccccgatgcatac

SEQ ID NO: 55721 - DNA, 120 bp, Homo sapiens
  misc_feature: 1496 for SV(W|O) and mtDNA
gtactggaaagtgcacttggacgaaccagagtgtagcttaacacaaagcacccaacttacacttaggagatttcaacttaacttgaccgctctgagctaaacctagccccaaacccactc

SEQ ID NO: 55722 - DNA, 120 bp, Homo sapiens
  misc_feature: 1496 for SV(W|O) and mtDNA
ccgctatgtatttcgtacattactgccagccaccatgaatattgtacggtaccataaatacttgaccacctgtagtacataaaaacccaatccacatcaaaaccccctccccatgcttac

SEQ ID NO: 55723 - DNA, 120 bp, Homo sapiens
  misc_feature: 1496 for SV(W|O) and mtDNA
gggcatccatatagtcactccaggtttatggagggttcttctactattaggacttttcgctttgaagcgaaggcttctcaaatcatgaaaattattaatattactgctgttagagaaatg

SEQ ID NO: 55724 - DNA, 120 bp, Homo sapiens
  misc_feature: 1496 for SV(W|O) and mtDNA
gggaggttgaagtgagaggtatggttttgagtagtcctcctatttttcgaatatcttgttcattgttaaggttgtggatgatggacccggagcacataaatagtatggctttgaagaagg

SEQ ID NO: 55725 - DNA, 120 bp, Homo sapiens
  misc_feature: 1496 for SV(W|O) and mtDNA
ggcacacctacaccccttatccccatactagttattatcgaaaccatcagcctactcattcaaccaatagccctggccgtacgcctaaccgctaacattactgcaggccacctactcatg

SEQ ID NO: 55726 - DNA, 120 bp, Homo sapiens
  misc_feature: 1496 for SV(W|O) and mtDNA
gcaggaggataatgccgatgtttcaggtttctgagtagagaaatgatccgtaatataggcctcgcccgatgtgtaggaagaggcagataaagaatattgaggcgccattggcgtgaaggt

SEQ ID NO: 55727 - DNA, 120 bp, Homo sapiens
  misc_feature: 1496 for SV(W|O) and mtDNA
cggactacaaccacgaccaatgatatgaaaaaccatcgttgtatttcaactacaagaacaccaatgaccccaatacgcaaaactaaccccctaataaaattaattaaccactcattcatc

SEQ ID NO: 55728 - DNA, 120 bp, Homo sapiens
  misc_feature: 1496 for SV(W|O) and mtDNA
actctgaggcttgtaggagggtaaaatagagacccagtaaaattgtaataagcagtgcttgaattatttggtttcggttgttttctattagactatggtgagctcaggtgattgatactc

SEQ ID NO: 55729 - DNA, 120 bp, Homo sapiens
  misc_feature: 1496 for SV(W|O) and mtDNA
ctttttgtagtcactcataggccagacttagggctaggatgatgattaataagagggatgacataactattagtggcaggttagttgtttgtagggctcatggtaggggtaaaaggaggg

SEQ ID NO: 55730 - DNA, 120 bp, Homo sapiens
  misc_feature: 1496 for SV(W|O) and mtDNA
cctaaccgctaacattactgcaggccacctactcatgcacctaattggaagcgccaccctagcaatatcaaccattaaccttccctctacacttatcatcttcacaattctaattctact

SEQ ID NO: 55731 - DNA, 120 bp, Homo sapiens
  misc_feature: 1496 for SV(W|O) and mtDNA
ccgatatcgccgatacggttgtataggattgcttgaatggctgctgtgttggcatctgctcgggcgtatcatcaactgatgagcaagaaggatataattcctacgccctctcagccgatg

SEQ ID NO: 55732 - DNA, 120 bp, Homo sapiens
  misc_feature: 1496 for SV(W|O) and mtDNA
cagtacatgctaagacttcaccagtcaaagcgaactactatactcaattgatccaataacttgaccaacggaacaagttaccctagggataacagcgcaatcctattctagagtccatat

SEQ ID NO: 55733 - DNA, 120 bp, Homo sapiens
  misc_feature: 1496 for SV(W|O) and mtDNA
atggtgagggaggttgaagtgagaggtatggttttgagtagtcctcctatttttcgaatatcttgttcattgttaaggttgtggatgatggacccggagcacataaatagtatggctttg

SEQ ID NO: 55734 - DNA, 120 bp, Homo sapiens
  misc_feature: 1496 for SV(W|O) and mtDNA
aagaaagttagatttacgccgatgaatatgatagtgaaatggattttggcgtaggtttggtctagggtgtagcctgagaataggggaaatcagtgaatgaagcctcctatgatggcaaat

SEQ ID NO: 55735 - DNA, 120 bp, Homo sapiens
  misc_feature: 1496 for SV(W|O) and mtDNA
agcagtacatgctaagacttcaccagtcaaagcgaactactatactcaattgatccaataacttgaccaacggaacaagttaccctagggataacagcgcaatcctattctagagtccat

SEQ ID NO: 55736 - DNA, 120 bp, Homo sapiens
  misc_feature: 1496 for SV(W|O) and mtDNA
agtgttctggcgagcagttttgttgatttaactgttgaggtttagggctaagcatagtggggtatctaatcccagtttgggtcttagctattgtgtgttcagatatgttaaagccacttt

SEQ ID NO: 55737 - DNA, 120 bp, Homo sapiens
  misc_feature: 1496 for SV(W|O) and mtDNA
agtaatacccatcataatcggaggctttggcaactgactagttcccctaataatcggtgcccccgatatggcgtttccccgcataaacaacataagcttctgactcttacctccctctct

SEQ ID NO: 55738 - DNA, 120 bp, Homo sapiens
  misc_feature: 1495 for SV(W|O) and mtDNA
tttatactaataatcttatagaaatttaggttaaatacagaccaagagccttcaaagccctcagtaagttgcaatacttaatttctgtaacagctaaggactgcaaaaccccactctgca

SEQ ID NO: 55739 - DNA, 120 bp, Homo sapiens
  misc_feature: 1495 for SV(W|O) and mtDNA
tttagagggttctgtgggcaaatttaaagttgaactaagattctatcttggacaaccagctatcaccaggctcggtaggtttgtcgcctctacctataaatcttcccactattttgctac

SEQ ID NO: 55740 - DNA, 120 bp, Homo sapiens
  misc_feature: 1495 for SV(W|O) and mtDNA
ttgcttgtaagcatggggagggggttttgatgtggattgggtttttatgtactacaggtggtcaagtatttatggtaccgtacaatattcatggtggctggcagtaatgtacgaaataca

SEQ ID NO: 55741 - DNA, 120 bp, Homo sapiens
  misc_feature: 1495 for SV(W|O) and mtDNA
tgttaggtactgtttgcattaataaattaaagctccatagggtcttctcgtcttgctgtgttatgcccgcctcttcacgggcaggtcaatttcactggttaaaagtaagagacagctgaa

SEQ ID NO: 55742 - DNA, 120 bp, Homo sapiens
  misc_feature: 1495 for SV(W|O) and mtDNA
gtacatgctaagacttcaccagtcaaagcgaactactatactcaattgatccaataacttgaccaacggaacaagttaccctagggataacagcgcaatcctattctagagtccatatca

SEQ ID NO: 55743 - DNA, 120 bp, Homo sapiens
  misc_feature: 1495 for SV(W|O) and mtDNA
aaggcacacctacaccccttatccccatactagttattatcgaaaccatcagcctactcattcaaccaatagccctggccgtacgcctaaccgctaacattactgcaggccacctactca

SEQ ID NO: 55744 - DNA, 120 bp, Homo sapiens
  misc_feature: 1495 for SV(W|O) and mtDNA
ccatatcgggggcaccgattattaggggaactagtcagttgccaaagcctccgattatgatgggtattactatgaagaagattattacaaatgcatgggctgtgacgataacgttgtaga

SEQ ID NO: 55745 - DNA, 120 bp, Homo sapiens
  misc_feature: 1495 for SV(W|O) and mtDNA
tcctatcatctgtaggctcattcatttctctaacagcagtaatattaataattttcatgatttgagaagccttcgcttcaaagcgaaaagtcctaatagtagaagaaccctccataaacc

SEQ ID NO: 55746 - DNA, 120 bp, Homo sapiens
  misc_feature: 1495 for SV(W|O) and mtDNA
accaaaaacatcacctctagcatcaccagtattagaggcaccgcctgcccagtgacacatgtttaacggccgcggtaccctaaccgtgcaaaggtagcataatcacttgttccttaaata

SEQ ID NO: 55747 - DNA, 120 bp, Homo sapiens
  misc_feature: 1495 for SV(W|O) and mtDNA
gttgagcttgaacgctttcttaattggtggctgcttttaggcctactatgggtgttaaattttttactctctctacaaggttttttcctagtgtccaaagagctgttcctctttggacta

SEQ ID NO: 55748 - DNA, 120 bp, Homo sapiens
  misc_feature: 1495 for SV(W|O) and mtDNA
gggtaataatgacttgttggttgattgtagatattgggctgttaattgtcagttcagtgttttaatctgacgcaggcttatgcggaggagaatgttttcatgttacttatactaacatta

SEQ ID NO: 55749 - DNA, 120 bp, Homo sapiens
  misc_feature: 1495 for SV(W|O) and mtDNA
gtttggtctagggtgtagcctgagaataggggaaatcagtgaatgaagcctcctatgatggcaaatacagctcctattgataggacatagtggaagtgggctacaacgtagtacgtgtcg

SEQ ID NO: 55750 - DNA, 120 bp, Homo sapiens
  misc_feature: 1495 for SV(W|O) and mtDNA
aagtgcacttggacgaaccagagtgtagcttaacacaaagcacccaacttacacttaggagatttcaacttaacttgaccgctctgagctaaacctagccccaaacccactccaccttac

SEQ ID NO: 55751 - DNA, 120 bp, Homo sapiens
  misc_feature: 1495 for SV(W|O) and mtDNA
agtcagggttagggtggttatagtagtgtgcatggttattacttttatttggagttgcaccaaaatttttggggcctaagaccaatggatagctgttatcctttaaaagttgagaaagcc

SEQ ID NO: 55752 - DNA, 120 bp, Homo sapiens
  misc_feature: 1495 for SV(W|O) and mtDNA
agacaaccttagccaaaccatttacccaaataaagtataggcgatagaaattgaaacctggcgcaatagatatagtaccgcaagggaaagatgaaaaattataaccaagcataatatagc

SEQ ID NO: 55753 - DNA, 120 bp, Homo sapiens
  misc_feature: 1495 for SV(W|O) and mtDNA
ctaggcctactaaccaacacactaaccatataccaatgatggcgcgatgtaacacgagaaagcacataccaaggccaccacacaccacctgtccaaaaaggccttcgatacgggataatc

SEQ ID NO: 55754 - DNA, 120 bp, Homo sapiens
  misc_feature: 1495 for SV(W|O) and mtDNA
atatcgggggcaccgattattaggggaactagtcagttgccaaagcctccgattatgatgggtattactatgaagaagattattacaaatgcatgggctgtgacgataacgttgtagatg

SEQ ID NO: 55755 - DNA, 120 bp, Homo sapiens
  misc_feature: 1495 for SV(W|O) and mtDNA
caacaaccgctatgtatttcgtacattactgccagccaccatgaatattgtacggtaccataaatacttgaccacctgtagtacataaaaacccaatccacatcaaaaccccctccccat

SEQ ID NO: 55756 - DNA, 120 bp, Homo sapiens
  misc_feature: 1495 for SV(W|O) and mtDNA
agacattggaacactatacctattattcggcgcatgagctggagtcctaggcacagctctaagcctccttattcgagccgagctgggccagccaggcaaccttctaggtaacgaccacat

SEQ ID NO: 55757 - DNA, 120 bp, Homo sapiens
  misc_feature: 1495 for SV(W|O) and mtDNA
agttgggtgctttgtgttaagctacactctggttcgtccaagtgcactttccagtacacttaccatgttacgacttgtctcctctatataaatgcgtaggggttttagttaaatgtcctt

SEQ ID NO: 55758 - DNA, 120 bp, Homo sapiens
  misc_feature: 1495 for SV(W|O) and mtDNA
agaaagtgttgtgggaagaaagttagatttacgccgatgaatatgatagtgaaatggattttggcgtaggtttggtctagggtgtagcctgagaataggggaaatcagtgaatgaagcct

SEQ ID NO: 55759 - DNA, 120 bp, Homo sapiens
  misc_feature: 1495 for SV(W|O) and mtDNA
aggctgtgggtggttgtgttgattcaaattatgtgttttttggaaagtcatgtcagtggtagtaatataattgttgggacgattagttttagcattggagtaggtttaggttatgtacgt

SEQ ID NO: 55760 - DNA, 120 bp, Homo sapiens
  misc_feature: 1495 for SV(W|O) and mtDNA
aacatcgaggtcgtaaaccctattgttgatatggactctagaataggattgcgctgttatccctagggtaacttgttccgttggtcaagttattggatcaattgagtatagtagttcgct

SEQ ID NO: 55761 - DNA, 120 bp, Homo sapiens
  misc_feature: 1494 for SV(W|O) and mtDNA
ttttgagctgcattgctgcgtgcttgatgcttgtcccttttgatcgtggtgatttagagggtgaactcactggaacggggatgcttgcatgtgtaatcttactaagagctaatagaaagg

SEQ ID NO: 55762 - DNA, 120 bp, Homo sapiens
  misc_feature: 1494 for SV(W|O) and mtDNA
tttggtctagggtgtagcctgagaataggggaaatcagtgaatgaagcctcctatgatggcaaatacagctcctattgataggacatagtggaagtgggctacaacgtagtacgtgtcgt

SEQ ID NO: 55763 - DNA, 120 bp, Homo sapiens
  misc_feature: 1494 for SV(W|O) and mtDNA
ttgactcacccatcaacaaccgctatgtatttcgtacattactgccagccaccatgaatattgtacggtaccataaatacttgaccacctgtagtacataaaaacccaatccacatcaaa

SEQ ID NO: 55764 - DNA, 120 bp, Homo sapiens
  misc_feature: 1494 for SV(W|O) and mtDNA
attgaacgtaggtgcgataaataatgggatgaggcaggaatcaaagacagatactgcgacatagggtgctccggctccagcgtctcgcaatgctatcgcgtgcataccccccagacgaaa

SEQ ID NO: 55765 - DNA, 120 bp, Homo sapiens
  misc_feature: 1494 for SV(W|O) and mtDNA
ggacgaaccagagtgtagcttaacacaaagcacccaacttacacttaggagatttcaacttaacttgaccgctctgagctaaacctagccccaaacccactccaccttactaccagacaa

SEQ ID NO: 55766 - DNA, 120 bp, Homo sapiens
  misc_feature: 1494 for SV(W|O) and mtDNA
ttgcccaaatgggccattatcgaagaattcacaaaaaacaatagcctcatcatccccaccatcatagccaccatcaccctccttaacctctacttctacctacgcctaatctactccacc

SEQ ID NO: 55767 - DNA, 120 bp, Homo sapiens
  misc_feature: 1494 for SV(W|O) and mtDNA
attgactcacccatcaacaaccgctatgtatttcgtacattactgccagccaccatgaatattgtacggtaccataaatacttgaccacctgtagtacataaaaacccaatccacatcaa

SEQ ID NO: 55768 - DNA, 120 bp, Homo sapiens
  misc_feature: 1494 for SV(W|O) and mtDNA
ttcatcagggtttgctgaagatggcggtatataggctgagcaagaggtggtgaggttgatcggggtttatcgattacagaacaggctcctctagagggatatgaagcaccgccaggtcct

SEQ ID NO: 55769 - DNA, 120 bp, Homo sapiens
  misc_feature: 1494 for SV(W|O) and mtDNA
ttcagtctaatcctttttgtagtcactcataggccagacttagggctaggatgatgattaataagagggatgacataactattagtggcaggttagttgtttgtagggctcatggtaggg

SEQ ID NO: 55770 - DNA, 120 bp, Homo sapiens
  misc_feature: 1494 for SV(W|O) and mtDNA
tgtaactattatgagtcctagttgacttgaagtggagaaggctacgatttttttgatgtcattttgtgtaagggcgcagactgctgcgaacagagtggtgatagcgcctaagcatagtgt

SEQ ID NO: 55771 - DNA, 120 bp, Homo sapiens
  misc_feature: 1494 for SV(W|O) and mtDNA
tggatgagaatggctgttactacgagggctatgtggctgattgaagagtatgcaatgagcgattttaggtctgtttgtcgtaggcagatggagcttgttataattatgcctcatagggat

SEQ ID NO: 55772 - DNA, 120 bp, Homo sapiens
  misc_feature: 1494 for SV(W|O) and mtDNA
tgattcaaattatgtgttttttggaaagtcatgtcagtggtagtaatataattgttgggacgattagttttagcattggagtaggtttaggttatgtacgtagtctaggccatatgtgtt

SEQ ID NO: 55773 - DNA, 120 bp, Homo sapiens
  misc_feature: 1494 for SV(W|O) and mtDNA
cccaaatgggccattatcgaagaattcacaaaaaacaatagcctcatcatccccaccatcatagccaccatcaccctccttaacctctacttctacctacgcctaatctactccacctca

SEQ ID NO: 55774 - DNA, 120 bp, Homo sapiens
  misc_feature: 1494 for SV(W|O) and mtDNA
ctccgattcaggttagaatgaggaggtctgcggctaggagtcaataaagtgattggcttagtgggcgaaatattatgctttgttgtttggatatatggaggatggggattattgctagga

SEQ ID NO: 55775 - DNA, 120 bp, Homo sapiens
  misc_feature: 1494 for SV(W|O) and mtDNA
ggatgagaatggctgttactacgagggctatgtggctgattgaagagtatgcaatgagcgattttaggtctgtttgtcgtaggcagatggagcttgttataattatgcctcatagggata

SEQ ID NO: 55776 - DNA, 120 bp, Homo sapiens
  misc_feature: 1494 for SV(W|O) and mtDNA
atacccatcataatcggaggctttggcaactgactagttcccctaataatcggtgcccccgatatggcgtttccccgcataaacaacataagcttctgactcttacctccctctctccta

SEQ ID NO: 55777 - DNA, 120 bp, Homo sapiens
  misc_feature: 1494 for SV(W|O) and mtDNA
ggacctgtgggtttgttaggtactgtttgcattaataaattaaagctccatagggtcttctcgtcttgctgtgttatgcccgcctcttcacgggcaggtcaatttcactggttaaaagta

SEQ ID NO: 55778 - DNA, 120 bp, Homo sapiens
  misc_feature: 1494 for SV(W|O) and mtDNA
gttgatgatacgcccgagcagatgccaacacagcagccattcaagcaatcctatacaaccgtatcggcgatatcggtttcatcctcgccttagcatgatttatcctacactccaactcat

SEQ ID NO: 55779 - DNA, 120 bp, Homo sapiens
  misc_feature: 1494 for SV(W|O) and mtDNA
gtgttgattcaaattatgtgttttttggaaagtcatgtcagtggtagtaatataattgttgggacgattagttttagcattggagtaggtttaggttatgtacgtagtctaggccatatg

SEQ ID NO: 55780 - DNA, 120 bp, Homo sapiens
  misc_feature: 1494 for SV(W|O) and mtDNA
gtgtactggaaagtgcacttggacgaaccagagtgtagcttaacacaaagcacccaacttacacttaggagatttcaacttaacttgaccgctctgagctaaacctagccccaaacccac

SEQ ID NO: 55781 - DNA, 120 bp, Homo sapiens
  misc_feature: 1494 for SV(W|O) and mtDNA
gtaactattatgagtcctagttgacttgaagtggagaaggctacgatttttttgatgtcattttgtgtaagggcgcagactgctgcgaacagagtggtgatagcgcctaagcatagtgtt

SEQ ID NO: 55782 - DNA, 120 bp, Homo sapiens
  misc_feature: 1494 for SV(W|O) and mtDNA
gggtagaaaatgtagcccatttcttgccacctcatgggctacaccttgacctaacgtctttacgtgggtacttgcgcttactttgtagccttcatcagggtttgctgaagatggcggtat

SEQ ID NO: 55783 - DNA, 120 bp, Homo sapiens
  misc_feature: 1494 for SV(W|O) and mtDNA
catggtaagtgtactggaaagtgcacttggacgaaccagagtgtagcttaacacaaagcacccaacttacacttaggagatttcaacttaacttgaccgctctgagctaaacctagcccc

SEQ ID NO: 55784 - DNA, 120 bp, Homo sapiens
  misc_feature: 1494 for SV(W|O) and mtDNA
ggaccaatctatcaccctatagaagaactaatgttagtataagtaacatgaaaacattctcctccgcataagcctgcgtcagattaaaacactgaactgacaattaacagcccaatatct

SEQ ID NO: 55785 - DNA, 120 bp, Homo sapiens
  misc_feature: 1494 for SV(W|O) and mtDNA
caacatcgaggtcgtaaaccctattgttgatatggactctagaataggattgcgctgttatccctagggtaacttgttccgttggtcaagttattggatcaattgagtatagtagttcgc

SEQ ID NO: 55786 - DNA, 120 bp, Homo sapiens
  misc_feature: 1494 for SV(W|O) and mtDNA
gccctaaacctcaacagttaaatcaacaaaactgctcgccagaacactacgagccacagcttaaaactcaaaggacctggcggtgcttcatatccctctagaggagcctgttctgtaatc

SEQ ID NO: 55787 - DNA, 120 bp, Homo sapiens
  misc_feature: 1494 for SV(W|O) and mtDNA
ctcgccagaacactacgagccacagcttaaaactcaaaggacctggcggtgcttcatatccctctagaggagcctgttctgtaatcgataaaccccgatcaacctcaccacctcttgctc

SEQ ID NO: 55788 - DNA, 120 bp, Homo sapiens
  misc_feature: 1494 for SV(W|O) and mtDNA
caaaatgacatcaaaaaaatcgtagccttctccacttcaagtcaactaggactcataatagttacaatcggcatcaaccaaccacacctagcattcctgcacatctgcacccacgccttc

SEQ ID NO: 55789 - DNA, 120 bp, Homo sapiens
  misc_feature: 1494 for SV(W|O) and mtDNA
acctcatatcctccctactatgcctagaaggaataatactatcgctgttcattatagctactctcataaccctcaacacccactccctcttagccaatattgtgcctattgccatactag

SEQ ID NO: 55790 - DNA, 120 bp, Homo sapiens
  misc_feature: 1494 for SV(W|O) and mtDNA
cggcgtcaaagtatttagctgactcgccacactccacggaagcaatatgaaatgatctgctgcagtgctctgagccctaggattcatctttcttttcaccgtaggtggcctgactggcat

SEQ ID NO: 55791 - DNA, 120 bp, Homo sapiens
  misc_feature: 1494 for SV(W|O) and mtDNA
cctcatactaggcctactaaccaacacactaaccatataccaatgatggcgcgatgtaacacgagaaagcacataccaaggccaccacacaccacctgtccaaaaaggccttcgatacgg

SEQ ID NO: 55792 - DNA, 120 bp, Homo sapiens
  misc_feature: 1494 for SV(W|O) and mtDNA
caacttaaactccagcaccacgaccctactactatctcgcacctgaaacaagctaacatgactaacacccttaattccatccaccctcctctccctaggaggcctgcccccgctaaccgg

SEQ ID NO: 55793 - DNA, 120 bp, Homo sapiens
  misc_feature: 1494 for SV(W|O) and mtDNA
actaatcatattttatatcttcttcgaaaccacacttatccccaccttggctatcatcacccgatgaggcaaccagccagaacgcctgaacgcaggcacatacttcctattctacaccct

SEQ ID NO: 55794 - DNA, 120 bp, Homo sapiens
  misc_feature: 1494 for SV(W|O) and mtDNA
acgcctaaccgctaacattactgcaggccacctactcatgcacctaattggaagcgccaccctagcaatatcaaccattaaccttccctctacacttatcatcttcacaattctaattct

SEQ ID NO: 55795 - DNA, 120 bp, Homo sapiens
  misc_feature: 1493 for SV(W|O) and mtDNA
tttgtccttggaaaaaggttttcatctccggtttacaagactggtgtattagtttatactacaaggacaggcccatttgagtattttgttttcaattagggagatagttggtattaggat

SEQ ID NO: 55796 - DNA, 120 bp, Homo sapiens
  misc_feature: 1493 for SV(W|O) and mtDNA
gtacttgcttgtaagcatggggagggggttttgatgtggattgggtttttatgtactacaggtggtcaagtatttatggtaccgtacaatattcatggtggctggcagtaatgtacgaaa

SEQ ID NO: 55797 - DNA, 120 bp, Homo sapiens
  misc_feature: 1493 for SV(W|O) and mtDNA
tattgaacgtaggtgcgataaataatgggatgaggcaggaatcaaagacagatactgcgacatagggtgctccggctccagcgtctcgcaatgctatcgcgtgcataccccccagacgaa

SEQ ID NO: 55798 - DNA, 120 bp, Homo sapiens
  misc_feature: 1493 for SV(W|O) and mtDNA
cctcaattacccacataggatgaataatagcagttctaccgtacaaccctaacataaccattcttaatttaactatttatattatcctaactactaccgcattcctactactcaacttaa

SEQ ID NO: 55799 - DNA, 120 bp, Homo sapiens
  misc_feature: 1493 for SV(W|O) and mtDNA
atgaatatgatagtgaaatggattttggcgtaggtttggtctagggtgtagcctgagaataggggaaatcagtgaatgaagcctcctatgatggcaaatacagctcctattgataggaca

SEQ ID NO: 55800 - DNA, 120 bp, Homo sapiens
  misc_feature: 1493 for SV(W|O) and mtDNA
tgtcactgggcaggcggtgcctctaatactggtgatgctagaggtgatgtttttggtaaacaggcggggtaagatttgccgagttccttttactttttttaacctttccttatgagcatg

SEQ ID NO: 55801 - DNA, 120 bp, Homo sapiens
  misc_feature: 1493 for SV(W|O) and mtDNA
tggccgtacgcctaaccgctaacattactgcaggccacctactcatgcacctaattggaagcgccaccctagcaatatcaaccattaaccttccctctacacttatcatcttcacaattc

SEQ ID NO: 55802 - DNA, 120 bp, Homo sapiens
  misc_feature: 1493 for SV(W|O) and mtDNA
tgctatagttgcaagcaggaggataatgccgatgtttcaggtttctgagtagagaaatgatccgtaatataggcctcgcccgatgtgtaggaagaggcagataaagaatattgaggcgcc

SEQ ID NO: 55803 - DNA, 120 bp, Homo sapiens
  misc_feature: 1493 for SV(W|O) and mtDNA
agtaccgcaagggaaagatgaaaaattataaccaagcataatatagcaaggactaacccctataccttctgcataatgaattaactagaaataactttgcaaggagagccaaagctaaga

SEQ ID NO: 55804 - DNA, 120 bp, Homo sapiens
  misc_feature: 1493 for SV(W|O) and mtDNA
tctgcgcccttacacaaaatgacatcaaaaaaatcgtagccttctccacttcaagtcaactaggactcataatagttacaatcggcatcaaccaaccacacctagcattcctgcacatct

SEQ ID NO: 55805 - DNA, 120 bp, Homo sapiens
  misc_feature: 1493 for SV(W|O) and mtDNA
atattgaacgtaggtgcgataaataatgggatgaggcaggaatcaaagacagatactgcgacatagggtgctccggctccagcgtctcgcaatgctatcgcgtgcataccccccagacga

SEQ ID NO: 55806 - DNA, 120 bp, Homo sapiens
  misc_feature: 1493 for SV(W|O) and mtDNA
tcagtctaatcctttttgtagtcactcataggccagacttagggctaggatgatgattaataagagggatgacataactattagtggcaggttagttgtttgtagggctcatggtagggg

SEQ ID NO: 55807 - DNA, 120 bp, Homo sapiens
  misc_feature: 1493 for SV(W|O) and mtDNA
gagttgcagttgatgtgtgatagttgagggttgattgctgtacttgcttgtaagcatggggagggggttttgatgtggattgggtttttatgtactacaggtggtcaagtatttatggta

SEQ ID NO: 55808 - DNA, 120 bp, Homo sapiens
  misc_feature: 1493 for SV(W|O) and mtDNA
taccacaaggcacacctacaccccttatccccatactagttattatcgaaaccatcagcctactcattcaaccaatagccctggccgtacgcctaaccgctaacattactgcaggccacc

SEQ ID NO: 55809 - DNA, 120 bp, Homo sapiens
  misc_feature: 1493 for SV(W|O) and mtDNA
ggtctagggtgtagcctgagaataggggaaatcagtgaatgaagcctcctatgatggcaaatacagctcctattgataggacatagtggaagtgggctacaacgtagtacgtgtcgtgta

SEQ ID NO: 55810 - DNA, 120 bp, Homo sapiens
  misc_feature: 1493 for SV(W|O) and mtDNA
gttagaatgaggaggtctgcggctaggagtcaataaagtgattggcttagtgggcgaaatattatgctttgttgtttggatatatggaggatggggattattgctaggatgaggatggat

SEQ ID NO: 55811 - DNA, 120 bp, Homo sapiens
  misc_feature: 1493 for SV(W|O) and mtDNA
gaaaccgatatcgccgatacggttgtataggattgcttgaatggctgctgtgttggcatctgctcgggcgtatcatcaactgatgagcaagaaggatataattcctacgccctctcagcc

SEQ ID NO: 55812 - DNA, 120 bp, Homo sapiens
  misc_feature: 1493 for SV(W|O) and mtDNA
ggcgtcaaagtatttagctgactcgccacactccacggaagcaatatgaaatgatctgctgcagtgctctgagccctaggattcatctttcttttcaccgtaggtggcctgactggcatt

SEQ ID NO: 55813 - DNA, 120 bp, Homo sapiens
  misc_feature: 1493 for SV(W|O) and mtDNA
ggcaataaaaatgattaaggatactagtataagagatcaggttcgtcctttagtgttgtgtatggttatcatttgttttgaggttagtttgattagtcattgttgggtggtgattagtcg

SEQ ID NO: 55814 - DNA, 120 bp, Homo sapiens
  misc_feature: 1493 for SV(W|O) and mtDNA
atgtgtcactgggcaggcggtgcctctaatactggtgatgctagaggtgatgtttttggtaaacaggcggggtaagatttgccgagttccttttactttttttaacctttccttatgagc

SEQ ID NO: 55815 - DNA, 120 bp, Homo sapiens
  misc_feature: 1493 for SV(W|O) and mtDNA
gaggtctgcggctaggagtcaataaagtgattggcttagtgggcgaaatattatgctttgttgtttggatatatggaggatggggattattgctaggatgaggatggatagtaatagggc

SEQ ID NO: 55816 - DNA, 120 bp, Homo sapiens
  misc_feature: 1493 for SV(W|O) and mtDNA
attgggtatgaggagttcagttatatgtttgggattttttaggtagtgggtgttgagcttgaacgctttcttaattggtggctgcttttaggcctactatgggtgttaaattttttactc

SEQ ID NO: 55817 - DNA, 120 bp, Homo sapiens
  misc_feature: 1493 for SV(W|O) and mtDNA
gacctgcccgtgaagaggcgggcataacacagcaagacgagaagaccctatggagctttaatttattaatgcaaacagtacctaacaaacccacaggtcctaaactaccaaacctgcatt

SEQ ID NO: 55818 - DNA, 120 bp, Homo sapiens
  misc_feature: 1493 for SV(W|O) and mtDNA
agtaccattggtggccaattgatttgatggtaagggagggatcgttgacctcgtctgttatgtaaaggatgcgtagggatgggagggcgatgaggactaggatgatggcgggcaggatag

SEQ ID NO: 55819 - DNA, 120 bp, Homo sapiens
  misc_feature: 1493 for SV(W|O) and mtDNA
atgttagcggttaggcgtacggccagggctattggttgaatgagtaggctgatggtttcgataataactagtatggggataaggggtgtaggtgtgccttgtggtaagaagtgggctagg

SEQ ID NO: 55820 - DNA, 120 bp, Homo sapiens
  misc_feature: 1493 for SV(W|O) and mtDNA
cactgggcaggcggtgcctctaatactggtgatgctagaggtgatgtttttggtaaacaggcggggtaagatttgccgagttccttttactttttttaacctttccttatgagcatgcct

SEQ ID NO: 55821 - DNA, 120 bp, Homo sapiens
  misc_feature: 1493 for SV(W|O) and mtDNA
agtgcacttggacgaaccagagtgtagcttaacacaaagcacccaacttacacttaggagatttcaacttaacttgaccgctctgagctaaacctagccccaaacccactccaccttact

SEQ ID NO: 55822 - DNA, 120 bp, Homo sapiens
  misc_feature: 1493 for SV(W|O) and mtDNA
accacaaggcacacctacaccccttatccccatactagttattatcgaaaccatcagcctactcattcaaccaatagccctggccgtacgcctaaccgctaacattactgcaggccacct

SEQ ID NO: 55823 - DNA, 120 bp, Homo sapiens
  misc_feature: 1493 for SV(W|O) and mtDNA
aggcctactaaccaacacactaaccatataccaatgatggcgcgatgtaacacgagaaagcacataccaaggccaccacacaccacctgtccaaaaaggccttcgatacgggataatcct

SEQ ID NO: 55824 - DNA, 120 bp, Homo sapiens
  misc_feature: 1492 for SV(W|O) and mtDNA
ttcactcagccattttacctcacccccactgatgttcgccgaccgttgactattctctacaaaccacaaagacattggaacactatacctattattcggcgcatgagctggagtcctagg

SEQ ID NO: 55825 - DNA, 120 bp, Homo sapiens
  misc_feature: 1492 for SV(W|O) and mtDNA
aacataaccattcttaatttaactatttatattatcctaactactaccgcattcctactactcaacttaaactccagcaccacgaccctactactatctcgcacctgaaacaagctaaca

SEQ ID NO: 55826 - DNA, 120 bp, Homo sapiens
  misc_feature: 1492 for SV(W|O) and mtDNA
tggtgagggaggttgaagtgagaggtatggttttgagtagtcctcctatttttcgaatatcttgttcattgttaaggttgtggatgatggacccggagcacataaatagtatggctttga

SEQ ID NO: 55827 - DNA, 120 bp, Homo sapiens
  misc_feature: 1492 for SV(W|O) and mtDNA
tggggtagaaaatgtagcccatttcttgccacctcatgggctacaccttgacctaacgtctttacgtgggtacttgcgcttactttgtagccttcatcagggtttgctgaagatggcggt

SEQ ID NO: 55828 - DNA, 120 bp, Homo sapiens
  misc_feature: 1492 for SV(W|O) and mtDNA
gctatagttgcaagcaggaggataatgccgatgtttcaggtttctgagtagagaaatgatccgtaatataggcctcgcccgatgtgtaggaagaggcagataaagaatattgaggcgcca

SEQ ID NO: 55829 - DNA, 120 bp, Homo sapiens
  misc_feature: 1492 for SV(W|O) and mtDNA
tattggttatggttcattgtccggagagtatattgttgaagaggatagctattagaaggattatggatgcggttgcttgcgtgaggaaatacttgatggcagcttctgtggaacgagggt

SEQ ID NO: 55830 - DNA, 120 bp, Homo sapiens
  misc_feature: 1492 for SV(W|O) and mtDNA
tatgcccgcctcttcacgggcaggtcaatttcactggttaaaagtaagagacagctgaaccctcgtggagccattcatacaggtccctatttaaggaacaagtgattatgctacctttgc

SEQ ID NO: 55831 - DNA, 120 bp, Homo sapiens
  misc_feature: 1492 for SV(W|O) and mtDNA
tatcgggggcaccgattattaggggaactagtcagttgccaaagcctccgattatgatgggtattactatgaagaagattattacaaatgcatgggctgtgacgataacgttgtagatgt

SEQ ID NO: 55832 - DNA, 120 bp, Homo sapiens
  misc_feature: 1492 for SV(W|O) and mtDNA
gtactacacgacacgtactacgttgtagcccacttccactatgtcctatcaataggagctgtatttgccatcataggaggcttcattcactgatttcccctattctcaggctacacccta

SEQ ID NO: 55833 - DNA, 120 bp, Homo sapiens
  misc_feature: 1492 for SV(W|O) and mtDNA
cctaattggaagcgccaccctagcaatatcaaccattaaccttccctctacacttatcatcttcacaattctaattctactgactatcctagaaatcgctgtcgccttaatccaagccta

SEQ ID NO: 55834 - DNA, 120 bp, Homo sapiens
  misc_feature: 1492 for SV(W|O) and mtDNA
tacacttatcatcttcacaattctaattctactgactatcctagaaatcgctgtcgccttaatccaagcctacgttttcacacttctagtaagcctctacctgcacgacaacacataatg

SEQ ID NO: 55835 - DNA, 120 bp, Homo sapiens
  misc_feature: 1492 for SV(W|O) and mtDNA
taaagtgattggcttagtgggcgaaatattatgctttgttgtttggatatatggaggatggggattattgctaggatgaggatggatagtaatagggcaaggacgcctcctagtttgtta

SEQ ID NO: 55836 - DNA, 120 bp, Homo sapiens
  misc_feature: 1492 for SV(W|O) and mtDNA
aagtgtactggaaagtgcacttggacgaaccagagtgtagcttaacacaaagcacccaacttacacttaggagatttcaacttaacttgaccgctctgagctaaacctagccccaaaccc

SEQ ID NO: 55837 - DNA, 120 bp, Homo sapiens
  misc_feature: 1492 for SV(W|O) and mtDNA
gggggcaccgattattaggggaactagtcagttgccaaagcctccgattatgatgggtattactatgaagaagattattacaaatgcatgggctgtgacgataacgttgtagatgtggtc

SEQ ID NO: 55838 - DNA, 120 bp, Homo sapiens
  misc_feature: 1492 for SV(W|O) and mtDNA
ggagttgcagttgatgtgtgatagttgagggttgattgctgtacttgcttgtaagcatggggagggggttttgatgtggattgggtttttatgtactacaggtggtcaagtatttatggt

SEQ ID NO: 55839 - DNA, 120 bp, Homo sapiens
  misc_feature: 1492 for SV(W|O) and mtDNA
gcccacgggcttacatcctcattactattctgcctagcaaactcaaactacgaacgcactcacagtcgcatcataatcctctctcaaggacttcaaactctactcccactaatagctttt

SEQ ID NO: 55840 - DNA, 120 bp, Homo sapiens
  misc_feature: 1492 for SV(W|O) and mtDNA
acaaccgctatgtatttcgtacattactgccagccaccatgaatattgtacggtaccataaatacttgaccacctgtagtacataaaaacccaatccacatcaaaaccccctccccatgc

SEQ ID NO: 55841 - DNA, 120 bp, Homo sapiens
  misc_feature: 1492 for SV(W|O) and mtDNA
gatgcgtagggatgggagggcgatgaggactaggatgatggcgggcaggatagttcagacggtttctatttcctgagcgtctgagatgttagtattagttagttttgttgtgagtgttag

SEQ ID NO: 55842 - DNA, 120 bp, Homo sapiens
  misc_feature: 1492 for SV(W|O) and mtDNA
catacacaacactaaaggacgaacctgatctcttatactagtatccttaatcatttttattgccacaactaacctcctcggactcctgcctcactcatttacaccaaccacccaactatc

SEQ ID NO: 55843 - DNA, 120 bp, Homo sapiens
  misc_feature: 1492 for SV(W|O) and mtDNA
atagccctggccgtacgcctaaccgctaacattactgcaggccacctactcatgcacctaattggaagcgccaccctagcaatatcaaccattaaccttccctctacacttatcatcttc

SEQ ID NO: 55844 - DNA, 120 bp, Homo sapiens
  misc_feature: 1492 for SV(W|O) and mtDNA
ctgaccttactttaggatggggtgtgataggtggcacggagaattttggattctcagggatgggttcgattctcatagtcctagaaataagggggtttaagctcctattatttactctat

SEQ ID NO: 55845 - DNA, 120 bp, Homo sapiens
  misc_feature: 1492 for SV(W|O) and mtDNA
ctaagacttcaccagtcaaagcgaactactatactcaattgatccaataacttgaccaacggaacaagttaccctagggataacagcgcaatcctattctagagtccatatcaacaatag

SEQ ID NO: 55846 - DNA, 120 bp, Homo sapiens
  misc_feature: 1492 for SV(W|O) and mtDNA
atttggcctcacgggaggacatagcctatgaaggctgttgctatagttgcaagcaggaggataatgccgatgtttcaggtttctgagtagagaaatgatccgtaatataggcctcgcccg

SEQ ID NO: 55847 - DNA, 120 bp, Homo sapiens
  misc_feature: 1492 for SV(W|O) and mtDNA
atccatatagtcactccaggtttatggagggttcttctactattaggacttttcgctttgaagcgaaggcttctcaaatcatgaaaattattaatattactgctgttagagaaatgaatg

SEQ ID NO: 55848 - DNA, 120 bp, Homo sapiens
  misc_feature: 1492 for SV(W|O) and mtDNA
acataaccattcttaatttaactatttatattatcctaactactaccgcattcctactactcaacttaaactccagcaccacgaccctactactatctcgcacctgaaacaagctaacat

SEQ ID NO: 55849 - DNA, 120 bp, Homo sapiens
  misc_feature: 1492 for SV(W|O) and mtDNA
aggatgcgtagggatgggagggcgatgaggactaggatgatggcgggcaggatagttcagacggtttctatttcctgagcgtctgagatgttagtattagttagttttgttgtgagtgtt

SEQ ID NO: 55850 - DNA, 120 bp, Homo sapiens
  misc_feature: 1492 for SV(W|O) and mtDNA
aatcttcttcatagtaatacccatcataatcggaggctttggcaactgactagttcccctaataatcggtgcccccgatatggcgtttccccgcataaacaacataagcttctgactctt

SEQ ID NO: 55851 - DNA, 120 bp, Homo sapiens
  misc_feature: 1492 for SV(W|O) and mtDNA
aaaccaaaccactttcaccgctacacgaccgggggtatactacggtcaatgctctgaaatctgtggagcaaaccacagtttcatgcccatcgtcctagaattaattcccctaaaaatctt

SEQ ID NO: 55852 - DNA, 120 bp, Homo sapiens
  misc_feature: 1491 for SV(W|O) and mtDNA
ttgttaggtactgtttgcattaataaattaaagctccatagggtcttctcgtcttgctgtgttatgcccgcctcttcacgggcaggtcaatttcactggttaaaagtaagagacagctga

SEQ ID NO: 55853 - DNA, 120 bp, Homo sapiens
  misc_feature: 1491 for SV(W|O) and mtDNA
ttggatgagaatggctgttactacgagggctatgtggctgattgaagagtatgcaatgagcgattttaggtctgtttgtcgtaggcagatggagcttgttataattatgcctcataggga

SEQ ID NO: 55854 - DNA, 120 bp, Homo sapiens
  misc_feature: 1491 for SV(W|O) and mtDNA
ttgctatagttgcaagcaggaggataatgccgatgtttcaggtttctgagtagagaaatgatccgtaatataggcctcgcccgatgtgtaggaagaggcagataaagaatattgaggcgc

SEQ ID NO: 55855 - DNA, 120 bp, Homo sapiens
  misc_feature: 1491 for SV(W|O) and mtDNA
aagggaaagatgaaaaattataaccaagcataatatagcaaggactaacccctataccttctgcataatgaattaactagaaataactttgcaaggagagccaaagctaagacccccgaa

SEQ ID NO: 55856 - DNA, 120 bp, Homo sapiens
  misc_feature: 1491 for SV(W|O) and mtDNA
aatgaggaggtctgcggctaggagtcaataaagtgattggcttagtgggcgaaatattatgctttgttgtttggatatatggaggatggggattattgctaggatgaggatggatagtaa

SEQ ID NO: 55857 - DNA, 120 bp, Homo sapiens
  misc_feature: 1491 for SV(W|O) and mtDNA
cttctcctcactctctcaatcttatccatcatagcaggcagttgaggtggattaaaccaaacccagctacgcaaaatcttagcatactcctcaattacccacataggatgaataatagca

SEQ ID NO: 55858 - DNA, 120 bp, Homo sapiens
  misc_feature: 1491 for SV(W|O) and mtDNA
tcaggagtatcaatcacctgagctcaccatagtctaatagaaaacaaccgaaaccaaataattcaagcactgcttattacaattttactgggtctctattttaccctcctacaagcctca

SEQ ID NO: 55859 - DNA, 120 bp, Homo sapiens
  misc_feature: 1491 for SV(W|O) and mtDNA
tcccttcccctactcatcgcactaatttacactcacaacaccctaggctcactaaacattctactactcactctcactgcccaagaactatcaaactcctgagccaacaacttaatatga

SEQ ID NO: 55860 - DNA, 120 bp, Homo sapiens
  misc_feature: 1491 for SV(W|O) and mtDNA
tcagttgatgatacgcccgagcagatgccaacacagcagccattcaagcaatcctatacaaccgtatcggcgatatcggtttcatcctcgccttagcatgatttatcctacactccaact

SEQ ID NO: 55861 - DNA, 120 bp, Homo sapiens
  misc_feature: 1491 for SV(W|O) and mtDNA
tatgtaaaggatgcgtagggatgggagggcgatgaggactaggatgatggcgggcaggatagttcagacggtttctatttcctgagcgtctgagatgttagtattagttagttttgttgt

SEQ ID NO: 55862 - DNA, 120 bp, Homo sapiens
  misc_feature: 1491 for SV(W|O) and mtDNA
tatgcttagccctaaacctcaacagttaaatcaacaaaactgctcgccagaacactacgagccacagcttaaaactcaaaggacctggcggtgcttcatatccctctagaggagcctgtt

SEQ ID NO: 55863 - DNA, 120 bp, Homo sapiens
  misc_feature: 1491 for SV(W|O) and mtDNA
tagtaccgcaagggaaagatgaaaaattataaccaagcataatatagcaaggactaacccctataccttctgcataatgaattaactagaaataactttgcaaggagagccaaagctaag

SEQ ID NO: 55864 - DNA, 120 bp, Homo sapiens
  misc_feature: 1491 for SV(W|O) and mtDNA
taggtactgtttgcattaataaattaaagctccatagggtcttctcgtcttgctgtgttatgcccgcctcttcacgggcaggtcaatttcactggttaaaagtaagagacagctgaaccc

SEQ ID NO: 55865 - DNA, 120 bp, Homo sapiens
  misc_feature: 1491 for SV(W|O) and mtDNA
gtcctccgattcaggttagaatgaggaggtctgcggctaggagtcaataaagtgattggcttagtgggcgaaatattatgctttgttgtttggatatatggaggatggggattattgcta

SEQ ID NO: 55866 - DNA, 120 bp, Homo sapiens
  misc_feature: 1491 for SV(W|O) and mtDNA
gccgtacgcctaaccgctaacattactgcaggccacctactcatgcacctaattggaagcgccaccctagcaatatcaaccattaaccttccctctacacttatcatcttcacaattcta

SEQ ID NO: 55867 - DNA, 120 bp, Homo sapiens
  misc_feature: 1491 for SV(W|O) and mtDNA
tactaaccaacacactaaccatataccaatgatggcgcgatgtaacacgagaaagcacataccaaggccaccacacaccacctgtccaaaaaggccttcgatacgggataatcctattta

SEQ ID NO: 55868 - DNA, 120 bp, Homo sapiens
  misc_feature: 1491 for SV(W|O) and mtDNA
taaccaacacactaaccatataccaatgatggcgcgatgtaacacgagaaagcacataccaaggccaccacacaccacctgtccaaaaaggccttcgatacgggataatcctatttatta

SEQ ID NO: 55869 - DNA, 120 bp, Homo sapiens
  misc_feature: 1491 for SV(W|O) and mtDNA
gtagaaaatgtagcccatttcttgccacctcatgggctacaccttgacctaacgtctttacgtgggtacttgcgcttactttgtagccttcatcagggtttgctgaagatggcggtatat

SEQ ID NO: 55870 - DNA, 120 bp, Homo sapiens
  misc_feature: 1491 for SV(W|O) and mtDNA
aaaatgtagcccatttcttgccacctcatgggctacaccttgacctaacgtctttacgtgggtacttgcgcttactttgtagccttcatcagggtttgctgaagatggcggtatataggc

SEQ ID NO: 55871 - DNA, 120 bp, Homo sapiens
  misc_feature: 1491 for SV(W|O) and mtDNA
gcaagccaacgccacttatccagtgaaccactatcacgaaaaaaactctacctctctatactaatctccctacaaatctccttaattataacattcacagccacagaactaatcatattt

SEQ ID NO: 55872 - DNA, 120 bp, Homo sapiens
  misc_feature: 1491 for SV(W|O) and mtDNA
gatggggtgtgataggtggcacggagaattttggattctcagggatgggttcgattctcatagtcctagaaataagggggtttaagctcctattatttactctatcaaagtaactctttt

SEQ ID NO: 55873 - DNA, 120 bp, Homo sapiens
  misc_feature: 1491 for SV(W|O) and mtDNA
cgaatatcttgttcattgttaaggttgtggatgatggacccggagcacataaatagtatggctttgaagaaggcgtgggtgcagatgtgcaggaatgctaggtgtggttggttgatgccg

SEQ ID NO: 55874 - DNA, 120 bp, Homo sapiens
  misc_feature: 1491 for SV(W|O) and mtDNA
ccttctccacttcaagtcaactaggactcataatagttacaatcggcatcaaccaaccacacctagcattcctgcacatctgcacccacgccttcttcaaagccatactatttatgtgct

SEQ ID NO: 55875 - DNA, 120 bp, Homo sapiens
  misc_feature: 1491 for SV(W|O) and mtDNA
cctcatatcctccctactatgcctagaaggaataatactatcgctgttcattatagctactctcataaccctcaacacccactccctcttagccaatattgtgcctattgccatactagt

SEQ ID NO: 55876 - DNA, 120 bp, Homo sapiens
  misc_feature: 1491 for SV(W|O) and mtDNA
attaccgggctctgccatcttaacaaaccctgttcttgggtgggtgtgggtataatactaagttgagatgatatcatttacgggggaaggcgctttgtgaagtaggccttatttctcttg

SEQ ID NO: 55877 - DNA, 120 bp, Homo sapiens
  misc_feature: 1491 for SV(W|O) and mtDNA
aaggatgcgtagggatgggagggcgatgaggactaggatgatggcgggcaggatagttcagacggtttctatttcctgagcgtctgagatgttagtattagttagttttgttgtgagtgt

SEQ ID NO: 55878 - DNA, 120 bp, Homo sapiens
  misc_feature: 1491 for SV(W|O) and mtDNA
aatattctttatctgcctcttcctacacatcgggcgaggcctatattacggatcatttctctactcagaaacctgaaacatcggcattatcctcctgcttgcaactatagcaacagcctt

SEQ ID NO: 55879 - DNA, 120 bp, Homo sapiens
  misc_feature: 1490 for SV(W|O) and mtDNA
tgactcacccatcaacaaccgctatgtatttcgtacattactgccagccaccatgaatattgtacggtaccataaatacttgaccacctgtagtacataaaaacccaatccacatcaaaa

SEQ ID NO: 55880 - DNA, 120 bp, Homo sapiens
  misc_feature: 1490 for SV(W|O) and mtDNA
ttgatgatacgcccgagcagatgccaacacagcagccattcaagcaatcctatacaaccgtatcggcgatatcggtttcatcctcgccttagcatgatttatcctacactccaactcatg

SEQ ID NO: 55881 - DNA, 120 bp, Homo sapiens
  misc_feature: 1490 for SV(W|O) and mtDNA
atgctaggctgccaatggtgagggaggttgaagtgagaggtatggttttgagtagtcctcctatttttcgaatatcttgttcattgttaaggttgtggatgatggacccggagcacataa

SEQ ID NO: 55882 - DNA, 120 bp, Homo sapiens
  misc_feature: 1490 for SV(W|O) and mtDNA
tgttgattcaaattatgtgttttttggaaagtcatgtcagtggtagtaatataattgttgggacgattagttttagcattggagtaggtttaggttatgtacgtagtctaggccatatgt

SEQ ID NO: 55883 - DNA, 120 bp, Homo sapiens
  misc_feature: 1490 for SV(W|O) and mtDNA
tcgtcctttagtgttgtgtatggttatcatttgttttgaggttagtttgattagtcattgttgggtggtgattagtcggttgttgatgagatatttggaggtggggatcaatagaggggg

SEQ ID NO: 55884 - DNA, 120 bp, Homo sapiens
  misc_feature: 1490 for SV(W|O) and mtDNA
tcgcatcaggagtatcaatcacctgagctcaccatagtctaatagaaaacaaccgaaaccaaataattcaagcactgcttattacaattttactgggtctctattttaccctcctacaag

SEQ ID NO: 55885 - DNA, 120 bp, Homo sapiens
  misc_feature: 1490 for SV(W|O) and mtDNA
cgatacggttgtataggattgcttgaatggctgctgtgttggcatctgctcgggcgtatcatcaactgatgagcaagaaggatataattcctacgccctctcagccgatgaacagttgga

SEQ ID NO: 55886 - DNA, 120 bp, Homo sapiens
  misc_feature: 1490 for SV(W|O) and mtDNA
ggtagaaaatgtagcccatttcttgccacctcatgggctacaccttgacctaacgtctttacgtgggtacttgcgcttactttgtagccttcatcagggtttgctgaagatggcggtata

SEQ ID NO: 55887 - DNA, 120 bp, Homo sapiens
  misc_feature: 1490 for SV(W|O) and mtDNA
ggctgtgggtggttgtgttgattcaaattatgtgttttttggaaagtcatgtcagtggtagtaatataattgttgggacgattagttttagcattggagtaggtttaggttatgtacgta

SEQ ID NO: 55888 - DNA, 120 bp, Homo sapiens
  misc_feature: 1490 for SV(W|O) and mtDNA
tacaaccctaacataaccattcttaatttaactatttatattatcctaactactaccgcattcctactactcaacttaaactccagcaccacgaccctactactatctcgcacctgaaac

SEQ ID NO: 55889 - DNA, 120 bp, Homo sapiens
  misc_feature: 1490 for SV(W|O) and mtDNA
acctgcccgtgaagaggcgggcataacacagcaagacgagaagaccctatggagctttaatttattaatgcaaacagtacctaacaaacccacaggtcctaaactaccaaacctgcatta

SEQ ID NO: 55890 - DNA, 120 bp, Homo sapiens
  misc_feature: 1490 for SV(W|O) and mtDNA
taagacttcaccagtcaaagcgaactactatactcaattgatccaataacttgaccaacggaacaagttaccctagggataacagcgcaatcctattctagagtccatatcaacaatagg

SEQ ID NO: 55891 - DNA, 120 bp, Homo sapiens
  misc_feature: 1490 for SV(W|O) and mtDNA
actcacccatcaacaaccgctatgtatttcgtacattactgccagccaccatgaatattgtacggtaccataaatacttgaccacctgtagtacataaaaacccaatccacatcaaaacc

SEQ ID NO: 55892 - DNA, 120 bp, Homo sapiens
  misc_feature: 1490 for SV(W|O) and mtDNA
ggaaagatgaaaaattataaccaagcataatatagcaaggactaacccctataccttctgcataatgaattaactagaaataactttgcaaggagagccaaagctaagacccccgaaacc

SEQ ID NO: 55893 - DNA, 120 bp, Homo sapiens
  misc_feature: 1490 for SV(W|O) and mtDNA
ggcctatattacggatcatttctctactcagaaacctgaaacatcggcattatcctcctgcttgcaactatagcaacagccttcataggctatgtcctcccgtgaggccaaatatcattc

SEQ ID NO: 55894 - DNA, 120 bp, Homo sapiens
  misc_feature: 1490 for SV(W|O) and mtDNA
ggaggtctgcggctaggagtcaataaagtgattggcttagtgggcgaaatattatgctttgttgtttggatatatggaggatggggattattgctaggatgaggatggatagtaataggg

SEQ ID NO: 55895 - DNA, 120 bp, Homo sapiens
  misc_feature: 1490 for SV(W|O) and mtDNA
gcacacctacaccccttatccccatactagttattatcgaaaccatcagcctactcattcaaccaatagccctggccgtacgcctaaccgctaacattactgcaggccacctactcatgc

SEQ ID NO: 55896 - DNA, 120 bp, Homo sapiens
  misc_feature: 1490 for SV(W|O) and mtDNA
aattgtaataagcagtgcttgaattatttggtttcggttgttttctattagactatggtgagctcaggtgattgatactcctgatgcgagtaatacggatgtgtttaggagtgggacttc

SEQ ID NO: 55897 - DNA, 120 bp, Homo sapiens
  misc_feature: 1490 for SV(W|O) and mtDNA
cctttttgtagtcactcataggccagacttagggctaggatgatgattaataagagggatgacataactattagtggcaggttagttgtttgtagggctcatggtaggggtaaaaggagg

SEQ ID NO: 55898 - DNA, 120 bp, Homo sapiens
  misc_feature: 1490 for SV(W|O) and mtDNA
aggataatgccgatgtttcaggtttctgagtagagaaatgatccgtaatataggcctcgcccgatgtgtaggaagaggcagataaagaatattgaggcgccattggcgtgaaggtagcgg

SEQ ID NO: 55899 - DNA, 120 bp, Homo sapiens
  misc_feature: 1489 for SV(W|O) and mtDNA
acttagggctaggatgatgattaataagagggatgacataactattagtggcaggttagttgtttgtagggctcatggtaggggtaaaaggagggcaatttctagatcaaataataagaa

SEQ ID NO: 55900 - DNA, 120 bp, Homo sapiens
  misc_feature: 1489 for SV(W|O) and mtDNA
tcaactgatgagcaagaaggatataattcctacgccctctcagccgatgaacagttggaataggttgttagcggtaactaagattagtatggtaattaggaagatgagtagatatttgaa

SEQ ID NO: 55901 - DNA, 120 bp, Homo sapiens
  misc_feature: 1489 for SV(W|O) and mtDNA
ttagaatgaggaggtctgcggctaggagtcaataaagtgattggcttagtgggcgaaatattatgctttgttgtttggatatatggaggatggggattattgctaggatgaggatggata

SEQ ID NO: 55902 - DNA, 120 bp, Homo sapiens
  misc_feature: 1489 for SV(W|O) and mtDNA
gtttaggacctgtgggtttgttaggtactgtttgcattaataaattaaagctccatagggtcttctcgtcttgctgtgttatgcccgcctcttcacgggcaggtcaatttcactggttaa

SEQ ID NO: 55903 - DNA, 120 bp, Homo sapiens
  misc_feature: 1489 for SV(W|O) and mtDNA
cctgtgggtttgttaggtactgtttgcattaataaattaaagctccatagggtcttctcgtcttgctgtgttatgcccgcctcttcacgggcaggtcaatttcactggttaaaagtaaga

SEQ ID NO: 55904 - DNA, 120 bp, Homo sapiens
  misc_feature: 1489 for SV(W|O) and mtDNA
tccccaataaagctaaaactcacctgagttgtaaaaaactccagttgacacaaaatagactacgaaagtggctttaacatatctgaacacacaatagctaagacccaaactgggattaga

SEQ ID NO: 55905 - DNA, 120 bp, Homo sapiens
  misc_feature: 1489 for SV(W|O) and mtDNA
ggcatccatatagtcactccaggtttatggagggttcttctactattaggacttttcgctttgaagcgaaggcttctcaaatcatgaaaattattaatattactgctgttagagaaatga

SEQ ID NO: 55906 - DNA, 120 bp, Homo sapiens
  misc_feature: 1489 for SV(W|O) and mtDNA
tcaataaagtgattggcttagtgggcgaaatattatgctttgttgtttggatatatggaggatggggattattgctaggatgaggatggatagtaatagggcaaggacgcctcctagttt

SEQ ID NO: 55907 - DNA, 120 bp, Homo sapiens
  misc_feature: 1489 for SV(W|O) and mtDNA
tagggttaacgagggtggtaaggatggggggaattagggaagtcagggttagggtggttatagtagtgtgcatggttattacttttatttggagttgcaccaaaatttttggggcctaag

SEQ ID NO: 55908 - DNA, 120 bp, Homo sapiens
  misc_feature: 1489 for SV(W|O) and mtDNA
gctgaccttactttaggatggggtgtgataggtggcacggagaattttggattctcagggatgggttcgattctcatagtcctagaaataagggggtttaagctcctattatttactcta

SEQ ID NO: 55909 - DNA, 120 bp, Homo sapiens
  misc_feature: 1489 for SV(W|O) and mtDNA
gggttgagggataggaggagaatgggggataggtgtatgaacatgagggtgttttctcgtgtgaatgagggttttatgttgttaatgtggtgggtgagtgagccccattgtgttgtggta

SEQ ID NO: 55910 - DNA, 120 bp, Homo sapiens
  misc_feature: 1489 for SV(W|O) and mtDNA
tacacaaaatgacatcaaaaaaatcgtagccttctccacttcaagtcaactaggactcataatagttacaatcggcatcaaccaaccacacctagcattcctgcacatctgcacccacgc

SEQ ID NO: 55911 - DNA, 120 bp, Homo sapiens
  misc_feature: 1489 for SV(W|O) and mtDNA
agtggctttaacatatctgaacacacaatagctaagacccaaactgggattagataccccactatgcttagccctaaacctcaacagttaaatcaacaaaactgctcgccagaacactac

SEQ ID NO: 55912 - DNA, 120 bp, Homo sapiens
  misc_feature: 1489 for SV(W|O) and mtDNA
ggttaacgagggtggtaaggatggggggaattagggaagtcagggttagggtggttatagtagtgtgcatggttattacttttatttggagttgcaccaaaatttttggggcctaagacc

SEQ ID NO: 55913 - DNA, 120 bp, Homo sapiens
  misc_feature: 1489 for SV(W|O) and mtDNA
gcccaaatgggccattatcgaagaattcacaaaaaacaatagcctcatcatccccaccatcatagccaccatcaccctccttaacctctacttctacctacgcctaatctactccacctc

SEQ ID NO: 55914 - DNA, 120 bp, Homo sapiens
  misc_feature: 1489 for SV(W|O) and mtDNA
gagggcgatgaggactaggatgatggcgggcaggatagttcagacggtttctatttcctgagcgtctgagatgttagtattagttagttttgttgtgagtgttaggaaaagggcatacag

SEQ ID NO: 55915 - DNA, 120 bp, Homo sapiens
  misc_feature: 1489 for SV(W|O) and mtDNA
atgcttagccctaaacctcaacagttaaatcaacaaaactgctcgccagaacactacgagccacagcttaaaactcaaaggacctggcggtgcttcatatccctctagaggagcctgttc

SEQ ID NO: 55916 - DNA, 120 bp, Homo sapiens
  misc_feature: 1489 for SV(W|O) and mtDNA
cgcaatagatatagtaccgcaagggaaagatgaaaaattataaccaagcataatatagcaaggactaacccctataccttctgcataatgaattaactagaaataactttgcaaggagag

SEQ ID NO: 55917 - DNA, 120 bp, Homo sapiens
  misc_feature: 1489 for SV(W|O) and mtDNA
ctatagttgcaagcaggaggataatgccgatgtttcaggtttctgagtagagaaatgatccgtaatataggcctcgcccgatgtgtaggaagaggcagataaagaatattgaggcgccat

SEQ ID NO: 55918 - DNA, 120 bp, Homo sapiens
  misc_feature: 1489 for SV(W|O) and mtDNA
aaaccgatatcgccgatacggttgtataggattgcttgaatggctgctgtgttggcatctgctcgggcgtatcatcaactgatgagcaagaaggatataattcctacgccctctcagccg

SEQ ID NO: 55919 - DNA, 120 bp, Homo sapiens
  misc_feature: 1489 for SV(W|O) and mtDNA
cggaggaggagaccccattctataccaacacctattctgatttttcggtcaccctgaagtttatattcttatcctaccaggcttcggaataatctcccatattgtaacttactactccgg

SEQ ID NO: 55920 - DNA, 120 bp, Homo sapiens
  misc_feature: 1489 for SV(W|O) and mtDNA
attcaaattatgtgttttttggaaagtcatgtcagtggtagtaatataattgttgggacgattagttttagcattggagtaggtttaggttatgtacgtagtctaggccatatgtgttgg

SEQ ID NO: 55921 - DNA, 120 bp, Homo sapiens
  misc_feature: 1489 for SV(W|O) and mtDNA
catcgaggtcgtaaaccctattgttgatatggactctagaataggattgcgctgttatccctagggtaacttgttccgttggtcaagttattggatcaattgagtatagtagttcgcttt

SEQ ID NO: 55922 - DNA, 120 bp, Homo sapiens
  misc_feature: 1489 for SV(W|O) and mtDNA
atagtaatacccatcataatcggaggctttggcaactgactagttcccctaataatcggtgcccccgatatggcgtttccccgcataaacaacataagcttctgactcttacctccctct

SEQ ID NO: 55923 - DNA, 120 bp, Homo sapiens
  misc_feature: 1488 for SV(W|O) and mtDNA
tttgttaggtactgtttgcattaataaattaaagctccatagggtcttctcgtcttgctgtgttatgcccgcctcttcacgggcaggtcaatttcactggttaaaagtaagagacagctg

SEQ ID NO: 55924 - DNA, 120 bp, Homo sapiens
  misc_feature: 1488 for SV(W|O) and mtDNA
cgtagggatgggagggcgatgaggactaggatgatggcgggcaggatagttcagacggtttctatttcctgagcgtctgagatgttagtattagttagttttgttgtgagtgttaggaaa

SEQ ID NO: 55925 - DNA, 120 bp, Homo sapiens
  misc_feature: 1488 for SV(W|O) and mtDNA
caaccctaacataaccattcttaatttaactatttatattatcctaactactaccgcattcctactactcaacttaaactccagcaccacgaccctactactatctcgcacctgaaacaa

SEQ ID NO: 55926 - DNA, 120 bp, Homo sapiens
  misc_feature: 1488 for SV(W|O) and mtDNA
ttgattcaaattatgtgttttttggaaagtcatgtcagtggtagtaatataattgttgggacgattagttttagcattggagtaggtttaggttatgtacgtagtctaggccatatgtgt

SEQ ID NO: 55927 - DNA, 120 bp, Homo sapiens
  misc_feature: 1488 for SV(W|O) and mtDNA
ttcgtcctttagtgttgtgtatggttatcatttgttttgaggttagtttgattagtcattgttgggtggtgattagtcggttgttgatgagatatttggaggtggggatcaatagagggg

SEQ ID NO: 55928 - DNA, 120 bp, Homo sapiens
  misc_feature: 1488 for SV(W|O) and mtDNA
ttatgtaaaggatgcgtagggatgggagggcgatgaggactaggatgatggcgggcaggatagttcagacggtttctatttcctgagcgtctgagatgttagtattagttagttttgttg

SEQ ID NO: 55929 - DNA, 120 bp, Homo sapiens
  misc_feature: 1488 for SV(W|O) and mtDNA
ttacacaaaatgacatcaaaaaaatcgtagccttctccacttcaagtcaactaggactcataatagttacaatcggcatcaaccaaccacacctagcattcctgcacatctgcacccacg

SEQ ID NO: 55930 - DNA, 120 bp, Homo sapiens
  misc_feature: 1488 for SV(W|O) and mtDNA
tgaggagttcagttatatgtttgggattttttaggtagtgggtgttgagcttgaacgctttcttaattggtggctgcttttaggcctactatgggtgttaaattttttactctctctaca

SEQ ID NO: 55931 - DNA, 120 bp, Homo sapiens
  misc_feature: 1488 for SV(W|O) and mtDNA
tggcaactgactagttcccctaataatcggtgcccccgatatggcgtttccccgcataaacaacataagcttctgactcttacctccctctctcctactcctgctcgcatctgctatagt

SEQ ID NO: 55932 - DNA, 120 bp, Homo sapiens
  misc_feature: 1488 for SV(W|O) and mtDNA
tgcatgagtaggtggcctgcagtaatgttagcggttaggcgtacggccagggctattggttgaatgagtaggctgatggtttcgataataactagtatggggataaggggtgtaggtgtg

SEQ ID NO: 55933 - DNA, 120 bp, Homo sapiens
  misc_feature: 1488 for SV(W|O) and mtDNA
tgatgatacgcccgagcagatgccaacacagcagccattcaagcaatcctatacaaccgtatcggcgatatcggtttcatcctcgccttagcatgatttatcctacactccaactcatga

SEQ ID NO: 55934 - DNA, 120 bp, Homo sapiens
  misc_feature: 1488 for SV(W|O) and mtDNA
cgaaatttttaatgcaggtttggtagtttaggacctgtgggtttgttaggtactgtttgcattaataaattaaagctccatagggtcttctcgtcttgctgtgttatgcccgcctcttca

SEQ ID NO: 55935 - DNA, 120 bp, Homo sapiens
  misc_feature: 1488 for SV(W|O) and mtDNA
aaccgatatcgccgatacggttgtataggattgcttgaatggctgctgtgttggcatctgctcgggcgtatcatcaactgatgagcaagaaggatataattcctacgccctctcagccga

SEQ ID NO: 55936 - DNA, 120 bp, Homo sapiens
  misc_feature: 1488 for SV(W|O) and mtDNA
tcctccgattcaggttagaatgaggaggtctgcggctaggagtcaataaagtgattggcttagtgggcgaaatattatgctttgttgtttggatatatggaggatggggattattgctag

SEQ ID NO: 55937 - DNA, 120 bp, Homo sapiens
  misc_feature: 1488 for SV(W|O) and mtDNA
tccctactatgcctagaaggaataatactatcgctgttcattatagctactctcataaccctcaacacccactccctcttagccaatattgtgcctattgccatactagtctttgccgcc

SEQ ID NO: 55938 - DNA, 120 bp, Homo sapiens
  misc_feature: 1488 for SV(W|O) and mtDNA
tcatattttatatcttcttcgaaaccacacttatccccaccttggctatcatcacccgatgaggcaaccagccagaacgcctgaacgcaggcacatacttcctattctacaccctagtag

SEQ ID NO: 55939 - DNA, 120 bp, Homo sapiens
  misc_feature: 1488 for SV(W|O) and mtDNA
tcaactggagttttttacaactcaggtgagttttagctttattggggagggggtgatctaaaacactctttacgccggcttctattgacttgggttaatcgtgtgaccgcggtggctggc

SEQ ID NO: 55940 - DNA, 120 bp, Homo sapiens
  misc_feature: 1488 for SV(W|O) and mtDNA
gcttcactcagccattttacctcacccccactgatgttcgccgaccgttgactattctctacaaaccacaaagacattggaacactatacctattattcggcgcatgagctggagtccta

SEQ ID NO: 55941 - DNA, 120 bp, Homo sapiens
  misc_feature: 1488 for SV(W|O) and mtDNA
gaccaatctatcaccctatagaagaactaatgttagtataagtaacatgaaaacattctcctccgcataagcctgcgtcagattaaaacactgaactgacaattaacagcccaatatcta

SEQ ID NO: 55942 - DNA, 120 bp, Homo sapiens
  misc_feature: 1488 for SV(W|O) and mtDNA
tacccatcataatcggaggctttggcaactgactagttcccctaataatcggtgcccccgatatggcgtttccccgcataaacaacataagcttctgactcttacctccctctctcctac

SEQ ID NO: 55943 - DNA, 120 bp, Homo sapiens
  misc_feature: 1488 for SV(W|O) and mtDNA
taatcttcttcatagtaatacccatcataatcggaggctttggcaactgactagttcccctaataatcggtgcccccgatatggcgtttccccgcataaacaacataagcttctgactct

SEQ ID NO: 55944 - DNA, 120 bp, Homo sapiens
  misc_feature: 1488 for SV(W|O) and mtDNA
ctgatttgtccttggaaaaaggttttcatctccggtttacaagactggtgtattagtttatactacaaggacaggcccatttgagtattttgttttcaattagggagatagttggtatta

SEQ ID NO: 55945 - DNA, 120 bp, Homo sapiens
  misc_feature: 1488 for SV(W|O) and mtDNA
ggatgcgtagggatgggagggcgatgaggactaggatgatggcgggcaggatagttcagacggtttctatttcctgagcgtctgagatgttagtattagttagttttgttgtgagtgtta

SEQ ID NO: 55946 - DNA, 120 bp, Homo sapiens
  misc_feature: 1488 for SV(W|O) and mtDNA
atgaggagttcagttatatgtttgggattttttaggtagtgggtgttgagcttgaacgctttcttaattggtggctgcttttaggcctactatgggtgttaaattttttactctctctac

SEQ ID NO: 55947 - DNA, 120 bp, Homo sapiens
  misc_feature: 1488 for SV(W|O) and mtDNA
cgcatcaggagtatcaatcacctgagctcaccatagtctaatagaaaacaaccgaaaccaaataattcaagcactgcttattacaattttactgggtctctattttaccctcctacaagc

SEQ ID NO: 55948 - DNA, 120 bp, Homo sapiens
  misc_feature: 1488 for SV(W|O) and mtDNA
catactaatcttagttaccgctaacaacctattccaactgttcatcggctgagagggcgtaggaattatatccttcttgctcatcagttgatgatacgcccgagcagatgccaacacagc

SEQ ID NO: 55949 - DNA, 120 bp, Homo sapiens
  misc_feature: 1488 for SV(W|O) and mtDNA
aacttaaactccagcaccacgaccctactactatctcgcacctgaaacaagctaacatgactaacacccttaattccatccaccctcctctccctaggaggcctgcccccgctaaccggc

SEQ ID NO: 55950 - DNA, 120 bp, Homo sapiens
  misc_feature: 1488 for SV(W|O) and mtDNA
gagggttgattgctgtacttgcttgtaagcatggggagggggttttgatgtggattgggtttttatgtactacaggtggtcaagtatttatggtaccgtacaatattcatggtggctggc

SEQ ID NO: 55951 - DNA, 120 bp, Homo sapiens
  misc_feature: 1488 for SV(W|O) and mtDNA
actgcaggccacctactcatgcacctaattggaagcgccaccctagcaatatcaaccattaaccttccctctacacttatcatcttcacaattctaattctactgactatcctagaaatc

SEQ ID NO: 55952 - DNA, 120 bp, Homo sapiens
  misc_feature: 1488 for SV(W|O) and mtDNA
gattcaaattatgtgttttttggaaagtcatgtcagtggtagtaatataattgttgggacgattagttttagcattggagtaggtttaggttatgtacgtagtctaggccatatgtgttg

SEQ ID NO: 55953 - DNA, 120 bp, Homo sapiens
  misc_feature: 1488 for SV(W|O) and mtDNA
cgtacgcctaaccgctaacattactgcaggccacctactcatgcacctaattggaagcgccaccctagcaatatcaaccattaaccttccctctacacttatcatcttcacaattctaat

SEQ ID NO: 55954 - DNA, 120 bp, Homo sapiens
  misc_feature: 1488 for SV(W|O) and mtDNA
aagtgattggcttagtgggcgaaatattatgctttgttgtttggatatatggaggatggggattattgctaggatgaggatggatagtaatagggcaaggacgcctcctagtttgttagg

SEQ ID NO: 55955 - DNA, 120 bp, Homo sapiens
  misc_feature: 1488 for SV(W|O) and mtDNA
catccatatagtcactccaggtttatggagggttcttctactattaggacttttcgctttgaagcgaaggcttctcaaatcatgaaaattattaatattactgctgttagagaaatgaat

SEQ ID NO: 55956 - DNA, 120 bp, Homo sapiens
  misc_feature: 1488 for SV(W|O) and mtDNA
aacgccatatcgggggcaccgattattaggggaactagtcagttgccaaagcctccgattatgatgggtattactatgaagaagattattacaaatgcatgggctgtgacgataacgttg

SEQ ID NO: 55957 - DNA, 120 bp, Homo sapiens
  misc_feature: 1488 for SV(W|O) and mtDNA
atatcctccctactatgcctagaaggaataatactatcgctgttcattatagctactctcataaccctcaacacccactccctcttagccaatattgtgcctattgccatactagtcttt

SEQ ID NO: 55958 - DNA, 120 bp, Homo sapiens
  misc_feature: 1487 for SV(W|O) and mtDNA
tttgcccaaatgggccattatcgaagaattcacaaaaaacaatagcctcatcatccccaccatcatagccaccatcaccctccttaacctctacttctacctacgcctaatctactccac

SEQ ID NO: 55959 - DNA, 120 bp, Homo sapiens
  misc_feature: 1487 for SV(W|O) and mtDNA
tacatgctaagacttcaccagtcaaagcgaactactatactcaattgatccaataacttgaccaacggaacaagttaccctagggataacagcgcaatcctattctagagtccatatcaa

SEQ ID NO: 55960 - DNA, 120 bp, Homo sapiens
  misc_feature: 1487 for SV(W|O) and mtDNA
aaggttgcctggctggcccagctcggctcgaataaggaggcttagagctgtgcctaggactccagctcatgcgccgaataataggtatagtgttccaatgtctttgtggtttgtagagaa

SEQ ID NO: 55961 - DNA, 120 bp, Homo sapiens
  misc_feature: 1487 for SV(W|O) and mtDNA
gcgtagggatgggagggcgatgaggactaggatgatggcgggcaggatagttcagacggtttctatttcctgagcgtctgagatgttagtattagttagttttgttgtgagtgttaggaa

SEQ ID NO: 55962 - DNA, 120 bp, Homo sapiens
  misc_feature: 1487 for SV(W|O) and mtDNA
ggtgagggaggttgaagtgagaggtatggttttgagtagtcctcctatttttcgaatatcttgttcattgttaaggttgtggatgatggacccggagcacataaatagtatggctttgaa

SEQ ID NO: 55963 - DNA, 120 bp, Homo sapiens
  misc_feature: 1487 for SV(W|O) and mtDNA
tgctcggaggttgggttctgctccgaggtcgccccaaccgaaatttttaatgcaggtttggtagtttaggacctgtgggtttgttaggtactgtttgcattaataaattaaagctccata

SEQ ID NO: 55964 - DNA, 120 bp, Homo sapiens
  misc_feature: 1487 for SV(W|O) and mtDNA
agggttaacgagggtggtaaggatggggggaattagggaagtcagggttagggtggttatagtagtgtgcatggttattacttttatttggagttgcaccaaaatttttggggcctaaga

SEQ ID NO: 55965 - DNA, 120 bp, Homo sapiens
  misc_feature: 1487 for SV(W|O) and mtDNA
tcatagtaatacccatcataatcggaggctttggcaactgactagttcccctaataatcggtgcccccgatatggcgtttccccgcataaacaacataagcttctgactcttacctccct

SEQ ID NO: 55966 - DNA, 120 bp, Homo sapiens
  misc_feature: 1487 for SV(W|O) and mtDNA
gctaagacttcaccagtcaaagcgaactactatactcaattgatccaataacttgaccaacggaacaagttaccctagggataacagcgcaatcctattctagagtccatatcaacaata

SEQ ID NO: 55967 - DNA, 120 bp, Homo sapiens
  misc_feature: 1487 for SV(W|O) and mtDNA
ccatgtctaacaacatggctttctcaacttttaaaggataacagctatccattggtcttaggccccaaaaattttggtgcaactccaaataaaagtaataaccatgcacactactataac

SEQ ID NO: 55968 - DNA, 120 bp, Homo sapiens
  misc_feature: 1487 for SV(W|O) and mtDNA
gtgtcaactggagttttttacaactcaggtgagttttagctttattggggagggggtgatctaaaacactctttacgccggcttctattgacttgggttaatcgtgtgaccgcggtggct

SEQ ID NO: 55969 - DNA, 120 bp, Homo sapiens
  misc_feature: 1487 for SV(W|O) and mtDNA
gggtttgctgaagatggcggtatataggctgagcaagaggtggtgaggttgatcggggtttatcgattacagaacaggctcctctagagggatatgaagcaccgccaggtcctttgagtt

SEQ ID NO: 55970 - DNA, 120 bp, Homo sapiens
  misc_feature: 1487 for SV(W|O) and mtDNA
ggggtgtgataggtggcacggagaattttggattctcagggatgggttcgattctcatagtcctagaaataagggggtttaagctcctattatttactctatcaaagtaactcttttatc

SEQ ID NO: 55971 - DNA, 120 bp, Homo sapiens
  misc_feature: 1487 for SV(W|O) and mtDNA
gctatccccaccggcgtcaaagtatttagctgactcgccacactccacggaagcaatatgaaatgatctgctgcagtgctctgagccctaggattcatctttcttttcaccgtaggtggc

SEQ ID NO: 55972 - DNA, 120 bp, Homo sapiens
  misc_feature: 1487 for SV(W|O) and mtDNA
gagggggtgatctaaaacactctttacgccggcttctattgacttgggttaatcgtgtgaccgcggtggctggcacgaaattgaccaaccctggggttagtatagcttagttaaactttc

SEQ ID NO: 55973 - DNA, 120 bp, Homo sapiens
  misc_feature: 1487 for SV(W|O) and mtDNA
ccaagcctacgttttcacacttctagtaagcctctacctgcacgacaacacataatgacccaccaatcacatgcctatcatatagtaaaacccagcccatgacccctaacaggggccctc

SEQ ID NO: 55974 - DNA, 120 bp, Homo sapiens
  misc_feature: 1487 for SV(W|O) and mtDNA
gaagcagataaggaaaatgattatgagggcgtgatcatgaaaggtgataagctcttctatgataggggaagtagcgtcttgtagacctacttgcgctgcatgtgccattaagatatatag

SEQ ID NO: 55975 - DNA, 120 bp, Homo sapiens
  misc_feature: 1487 for SV(W|O) and mtDNA
ctttatgtactatgtactgttaagggtgggtaggtttgttggtatcctagtgggtgaggggtggctttggagttgcagttgatgtgtgatagttgagggttgattgctgtacttgcttgt

SEQ ID NO: 55976 - DNA, 120 bp, Homo sapiens
  misc_feature: 1487 for SV(W|O) and mtDNA
ctcatactaggcctactaaccaacacactaaccatataccaatgatggcgcgatgtaacacgagaaagcacataccaaggccaccacacaccacctgtccaaaaaggccttcgatacggg

SEQ ID NO: 55977 - DNA, 120 bp, Homo sapiens
  misc_feature: 1487 for SV(W|O) and mtDNA
accagagtgtagcttaacacaaagcacccaacttacacttaggagatttcaacttaacttgaccgctctgagctaaacctagccccaaacccactccaccttactaccagacaaccttag

SEQ ID NO: 55978 - DNA, 120 bp, Homo sapiens
  misc_feature: 1487 for SV(W|O) and mtDNA
agtgattggcttagtgggcgaaatattatgctttgttgtttggatatatggaggatggggattattgctaggatgaggatggatagtaatagggcaaggacgcctcctagtttgttaggg

SEQ ID NO: 55979 - DNA, 120 bp, Homo sapiens
  misc_feature: 1487 for SV(W|O) and mtDNA
ccacgggcttacatcctcattactattctgcctagcaaactcaaactacgaacgcactcacagtcgcatcataatcctctctcaaggacttcaaactctactcccactaatagctttttg

SEQ ID NO: 55980 - DNA, 120 bp, Homo sapiens
  misc_feature: 1487 for SV(W|O) and mtDNA
aaacatcctatcatctgtaggctcattcatttctctaacagcagtaatattaataattttcatgatttgagaagccttcgcttcaaagcgaaaagtcctaatagtagaagaaccctccat

SEQ ID NO: 55981 - DNA, 120 bp, Homo sapiens
  misc_feature: 1487 for SV(W|O) and mtDNA
acgggcttacatcctcattactattctgcctagcaaactcaaactacgaacgcactcacagtcgcatcataatcctctctcaaggacttcaaactctactcccactaatagctttttgat

SEQ ID NO: 55982 - DNA, 120 bp, Homo sapiens
  misc_feature: 1486 for SV(W|O) and mtDNA
ttttgcccaaatgggccattatcgaagaattcacaaaaaacaatagcctcatcatccccaccatcatagccaccatcaccctccttaacctctacttctacctacgcctaatctactcca

SEQ ID NO: 55983 - DNA, 120 bp, Homo sapiens
  misc_feature: 1486 for SV(W|O) and mtDNA
cctggctggcccagctcggctcgaataaggaggcttagagctgtgcctaggactccagctcatgcgccgaataataggtatagtgttccaatgtctttgtggtttgtagagaatagtcaa

SEQ ID NO: 55984 - DNA, 120 bp, Homo sapiens
  misc_feature: 1486 for SV(W|O) and mtDNA
ttgacaatcgagtagtactcccgattgaagcccccattcgtataataattacatcacaagacgtcttgcactcatgagctgtccccacattaggcttaaaaacagatgcaattcccggac

SEQ ID NO: 55985 - DNA, 120 bp, Homo sapiens
  misc_feature: 1486 for SV(W|O) and mtDNA
tgttgctatagttgcaagcaggaggataatgccgatgtttcaggtttctgagtagagaaatgatccgtaatataggcctcgcccgatgtgtaggaagaggcagataaagaatattgaggc

SEQ ID NO: 55986 - DNA, 120 bp, Homo sapiens
  misc_feature: 1486 for SV(W|O) and mtDNA
tgcctagaaggaataatactatcgctgttcattatagctactctcataaccctcaacacccactccctcttagccaatattgtgcctattgccatactagtctttgccgcctgcgaagca

SEQ ID NO: 55987 - DNA, 120 bp, Homo sapiens
  misc_feature: 1486 for SV(W|O) and mtDNA
ccggcgtcaaagtatttagctgactcgccacactccacggaagcaatatgaaatgatctgctgcagtgctctgagccctaggattcatctttcttttcaccgtaggtggcctgactggca

SEQ ID NO: 55988 - DNA, 120 bp, Homo sapiens
  misc_feature: 1486 for SV(W|O) and mtDNA
ctggagttttttacaactcaggtgagttttagctttattggggagggggtgatctaaaacactctttacgccggcttctattgacttgggttaatcgtgtgaccgcggtggctggcacga

SEQ ID NO: 55989 - DNA, 120 bp, Homo sapiens
  misc_feature: 1486 for SV(W|O) and mtDNA
gaatatcttgttcattgttaaggttgtggatgatggacccggagcacataaatagtatggctttgaagaaggcgtgggtgcagatgtgcaggaatgctaggtgtggttggttgatgccga

SEQ ID NO: 55990 - DNA, 120 bp, Homo sapiens
  misc_feature: 1486 for SV(W|O) and mtDNA
atgtagcccatttcttgccacctcatgggctacaccttgacctaacgtctttacgtgggtacttgcgcttactttgtagccttcatcagggtttgctgaagatggcggtatataggctga

SEQ ID NO: 55991 - DNA, 120 bp, Homo sapiens
  misc_feature: 1486 for SV(W|O) and mtDNA
gaatatgatagtgaaatggattttggcgtaggtttggtctagggtgtagcctgagaataggggaaatcagtgaatgaagcctcctatgatggcaaatacagctcctattgataggacata

SEQ ID NO: 55992 - DNA, 120 bp, Homo sapiens
  misc_feature: 1486 for SV(W|O) and mtDNA
taagggctatcgtagttttctggggtagaaaatgtagcccatttcttgccacctcatgggctacaccttgacctaacgtctttacgtgggtacttgcgcttactttgtagccttcatcag

SEQ ID NO: 55993 - DNA, 120 bp, Homo sapiens
  misc_feature: 1486 for SV(W|O) and mtDNA
aactggagttttttacaactcaggtgagttttagctttattggggagggggtgatctaaaacactctttacgccggcttctattgacttgggttaatcgtgtgaccgcggtggctggcac

SEQ ID NO: 55994 - DNA, 120 bp, Homo sapiens
  misc_feature: 1486 for SV(W|O) and mtDNA
ggtatgaggagttcagttatatgtttgggattttttaggtagtgggtgttgagcttgaacgctttcttaattggtggctgcttttaggcctactatgggtgttaaattttttactctctc

SEQ ID NO: 55995 - DNA, 120 bp, Homo sapiens
  misc_feature: 1486 for SV(W|O) and mtDNA
ggggttgagggataggaggagaatgggggataggtgtatgaacatgagggtgttttctcgtgtgaatgagggttttatgttgttaatgtggtgggtgagtgagccccattgtgttgtggt

SEQ ID NO: 55996 - DNA, 120 bp, Homo sapiens
  misc_feature: 1486 for SV(W|O) and mtDNA
ggatgggagggcgatgaggactaggatgatggcgggcaggatagttcagacggtttctatttcctgagcgtctgagatgttagtattagttagttttgttgtgagtgttaggaaaagggc

SEQ ID NO: 55997 - DNA, 120 bp, Homo sapiens
  misc_feature: 1486 for SV(W|O) and mtDNA
gattagataccccactatgcttagccctaaacctcaacagttaaatcaacaaaactgctcgccagaacactacgagccacagcttaaaactcaaaggacctggcggtgcttcatatccct

SEQ ID NO: 55998 - DNA, 120 bp, Homo sapiens
  misc_feature: 1486 for SV(W|O) and mtDNA
gaggagacaagtcgtaacatggtaagtgtactggaaagtgcacttggacgaaccagagtgtagcttaacacaaagcacccaacttacacttaggagatttcaacttaacttgaccgctct

SEQ ID NO: 55999 - DNA, 120 bp, Homo sapiens
  misc_feature: 1486 for SV(W|O) and mtDNA
gagctcaccatagtctaatagaaaacaaccgaaaccaaataattcaagcactgcttattacaattttactgggtctctattttaccctcctacaagcctcagagtacttcgagtctccct

SEQ ID NO: 56000 - DNA, 120 bp, Homo sapiens
  misc_feature: 1486 for SV(W|O) and mtDNA
acattactgcaggccacctactcatgcacctaattggaagcgccaccctagcaatatcaaccattaaccttccctctacacttatcatcttcacaattctaattctactgactatcctag

SEQ ID NO: 56001 - DNA, 120 bp, Homo sapiens
  misc_feature: 1486 for SV(W|O) and mtDNA
aagcagataaggaaaatgattatgagggcgtgatcatgaaaggtgataagctcttctatgataggggaagtagcgtcttgtagacctacttgcgctgcatgtgccattaagatatatagg

SEQ ID NO: 56002 - DNA, 120 bp, Homo sapiens
  misc_feature: 1486 for SV(W|O) and mtDNA
aacgagggtttatttttttggttagaactggaataaaagctagcatgtttatttctaggcctactcaggtaaaaaatcagtgcgagcttagcgctgtgatgagtgtgcctgcaaagatgg

SEQ ID NO: 56003 - DNA, 120 bp, Homo sapiens
  misc_feature: 1486 for SV(W|O) and mtDNA
ccaccggcgtcaaagtatttagctgactcgccacactccacggaagcaatatgaaatgatctgctgcagtgctctgagccctaggattcatctttcttttcaccgtaggtggcctgactg

SEQ ID NO: 56004 - DNA, 120 bp, Homo sapiens
  misc_feature: 1486 for SV(W|O) and mtDNA
catcagggtttgctgaagatggcggtatataggctgagcaagaggtggtgaggttgatcggggtttatcgattacagaacaggctcctctagagggatatgaagcaccgccaggtccttt

SEQ ID NO: 56005 - DNA, 120 bp, Homo sapiens
  misc_feature: 1486 for SV(W|O) and mtDNA
atcgtagttttctggggtagaaaatgtagcccatttcttgccacctcatgggctacaccttgacctaacgtctttacgtgggtacttgcgcttactttgtagccttcatcagggtttgct

SEQ ID NO: 56006 - DNA, 120 bp, Homo sapiens
  misc_feature: 1485 for SV(W|O) and mtDNA
gaagaaagttagatttacgccgatgaatatgatagtgaaatggattttggcgtaggtttggtctagggtgtagcctgagaataggggaaatcagtgaatgaagcctcctatgatggcaaa

SEQ ID NO: 56007 - DNA, 120 bp, Homo sapiens
  misc_feature: 1485 for SV(W|O) and mtDNA
gaggaggagaccccattctataccaacacctattctgatttttcggtcaccctgaagtttatattcttatcctaccaggcttcggaataatctcccatattgtaacttactactccggaa

SEQ ID NO: 56008 - DNA, 120 bp, Homo sapiens
  misc_feature: 1485 for SV(W|O) and mtDNA
ctaacataaccattcttaatttaactatttatattatcctaactactaccgcattcctactactcaacttaaactccagcaccacgaccctactactatctcgcacctgaaacaagctaa

SEQ ID NO: 56009 - DNA, 120 bp, Homo sapiens
  misc_feature: 1485 for SV(W|O) and mtDNA
atttttagttgggtgatgaggaatagtgtaaggagtatgggggtaattatggtgggccatacggtagtatttagttggggcatttcactgtaaagaggtgttggttctcttaatctttaa

SEQ ID NO: 56010 - DNA, 120 bp, Homo sapiens
  misc_feature: 1485 for SV(W|O) and mtDNA
acaaccctaacataaccattcttaatttaactatttatattatcctaactactaccgcattcctactactcaacttaaactccagcaccacgaccctactactatctcgcacctgaaaca

SEQ ID NO: 56011 - DNA, 120 bp, Homo sapiens
  misc_feature: 1485 for SV(W|O) and mtDNA
tgcggctaggagtcaataaagtgattggcttagtgggcgaaatattatgctttgttgtttggatatatggaggatggggattattgctaggatgaggatggatagtaatagggcaaggac

SEQ ID NO: 56012 - DNA, 120 bp, Homo sapiens
  misc_feature: 1485 for SV(W|O) and mtDNA
agggttgattgctgtacttgcttgtaagcatggggagggggttttgatgtggattgggtttttatgtactacaggtggtcaagtatttatggtaccgtacaatattcatggtggctggca

SEQ ID NO: 56013 - DNA, 120 bp, Homo sapiens
  misc_feature: 1485 for SV(W|O) and mtDNA
tgagggataggaggagaatgggggataggtgtatgaacatgagggtgttttctcgtgtgaatgagggttttatgttgttaatgtggtgggtgagtgagccccattgtgttgtggtaaata

SEQ ID NO: 56014 - DNA, 120 bp, Homo sapiens
  misc_feature: 1485 for SV(W|O) and mtDNA
tgaaacatcctatcatctgtaggctcattcatttctctaacagcagtaatattaataattttcatgatttgagaagccttcgcttcaaagcgaaaagtcctaatagtagaagaaccctcc

SEQ ID NO: 56015 - DNA, 120 bp, Homo sapiens
  misc_feature: 1485 for SV(W|O) and mtDNA
acacttatcatcttcacaattctaattctactgactatcctagaaatcgctgtcgccttaatccaagcctacgttttcacacttctagtaagcctctacctgcacgacaacacataatga

SEQ ID NO: 56016 - DNA, 120 bp, Homo sapiens
  misc_feature: 1485 for SV(W|O) and mtDNA
tatcgtagttttctggggtagaaaatgtagcccatttcttgccacctcatgggctacaccttgacctaacgtctttacgtgggtacttgcgcttactttgtagccttcatcagggtttgc

SEQ ID NO: 56017 - DNA, 120 bp, Homo sapiens
  misc_feature: 1485 for SV(W|O) and mtDNA
aggctcattcatttctctaacagcagtaatattaataattttcatgatttgagaagccttcgcttcaaagcgaaaagtcctaatagtagaagaaccctccataaacctggagtgactata

SEQ ID NO: 56018 - DNA, 120 bp, Homo sapiens
  misc_feature: 1485 for SV(W|O) and mtDNA
cttccctctacacttatcatcttcacaattctaattctactgactatcctagaaatcgctgtcgccttaatccaagcctacgttttcacacttctagtaagcctctacctgcacgacaac

SEQ ID NO: 56019 - DNA, 120 bp, Homo sapiens
  misc_feature: 1485 for SV(W|O) and mtDNA
cccttcccctactcatcgcactaatttacactcacaacaccctaggctcactaaacattctactactcactctcactgcccaagaactatcaaactcctgagccaacaacttaatatgac

SEQ ID NO: 56020 - DNA, 120 bp, Homo sapiens
  misc_feature: 1485 for SV(W|O) and mtDNA
ggtggttgtgttgattcaaattatgtgttttttggaaagtcatgtcagtggtagtaatataattgttgggacgattagttttagcattggagtaggtttaggttatgtacgtagtctagg

SEQ ID NO: 56021 - DNA, 120 bp, Homo sapiens
  misc_feature: 1485 for SV(W|O) and mtDNA
acatgaaacatcctatcatctgtaggctcattcatttctctaacagcagtaatattaataattttcatgatttgagaagccttcgcttcaaagcgaaaagtcctaatagtagaagaaccc

SEQ ID NO: 56022 - DNA, 120 bp, Homo sapiens
  misc_feature: 1485 for SV(W|O) and mtDNA
gcatcaggagtatcaatcacctgagctcaccatagtctaatagaaaacaaccgaaaccaaataattcaagcactgcttattacaattttactgggtctctattttaccctcctacaagcc

SEQ ID NO: 56023 - DNA, 120 bp, Homo sapiens
  misc_feature: 1485 for SV(W|O) and mtDNA
aacatggtaagtgtactggaaagtgcacttggacgaaccagagtgtagcttaacacaaagcacccaacttacacttaggagatttcaacttaacttgaccgctctgagctaaacctagcc

SEQ ID NO: 56024 - DNA, 120 bp, Homo sapiens
  misc_feature: 1485 for SV(W|O) and mtDNA
ggatttagagggttctgtgggcaaatttaaagttgaactaagattctatcttggacaaccagctatcaccaggctcggtaggtttgtcgcctctacctataaatcttcccactattttgc

SEQ ID NO: 56025 - DNA, 120 bp, Homo sapiens
  misc_feature: 1485 for SV(W|O) and mtDNA
atattctttatctgcctcttcctacacatcgggcgaggcctatattacggatcatttctctactcagaaacctgaaacatcggcattatcctcctgcttgcaactatagcaacagccttc

SEQ ID NO: 56026 - DNA, 120 bp, Homo sapiens
  misc_feature: 1485 for SV(W|O) and mtDNA
cttcactcagccattttacctcacccccactgatgttcgccgaccgttgactattctctacaaaccacaaagacattggaacactatacctattattcggcgcatgagctggagtcctag

SEQ ID NO: 56027 - DNA, 120 bp, Homo sapiens
  misc_feature: 1485 for SV(W|O) and mtDNA
aagcaggaggataatgccgatgtttcaggtttctgagtagagaaatgatccgtaatataggcctcgcccgatgtgtaggaagaggcagataaagaatattgaggcgccattggcgtgaag

SEQ ID NO: 56028 - DNA, 120 bp, Homo sapiens
  misc_feature: 1485 for SV(W|O) and mtDNA
cgctgcttcgcaggcggcaaagactagtatggcaataggcacaatattggctaagagggagtgggtgttgagggttatgagagtagctataatgaacagcgatagtattattccttctag

SEQ ID NO: 56029 - DNA, 120 bp, Homo sapiens
  misc_feature: 1485 for SV(W|O) and mtDNA
cctatcatctgtaggctcattcatttctctaacagcagtaatattaataattttcatgatttgagaagccttcgcttcaaagcgaaaagtcctaatagtagaagaaccctccataaacct

SEQ ID NO: 56030 - DNA, 120 bp, Homo sapiens
  misc_feature: 1485 for SV(W|O) and mtDNA
cctatattacggatcatttctctactcagaaacctgaaacatcggcattatcctcctgcttgcaactatagcaacagccttcataggctatgtcctcccgtgaggccaaatatcattctg

SEQ ID NO: 56031 - DNA, 120 bp, Homo sapiens
  misc_feature: 1485 for SV(W|O) and mtDNA
catattttatatcttcttcgaaaccacacttatccccaccttggctatcatcacccgatgaggcaaccagccagaacgcctgaacgcaggcacatacttcctattctacaccctagtagg

SEQ ID NO: 56032 - DNA, 120 bp, Homo sapiens
  misc_feature: 1485 for SV(W|O) and mtDNA
actgggcaggcggtgcctctaatactggtgatgctagaggtgatgtttttggtaaacaggcggggtaagatttgccgagttccttttactttttttaacctttccttatgagcatgcctg

SEQ ID NO: 56033 - DNA, 120 bp, Homo sapiens
  misc_feature: 1485 for SV(W|O) and mtDNA
atcgaggtcgtaaaccctattgttgatatggactctagaataggattgcgctgttatccctagggtaacttgttccgttggtcaagttattggatcaattgagtatagtagttcgctttg

SEQ ID NO: 56034 - DNA, 120 bp, Homo sapiens
  misc_feature: 1485 for SV(W|O) and mtDNA
ataaagtgattggcttagtgggcgaaatattatgctttgttgtttggatatatggaggatggggattattgctaggatgaggatggatagtaatagggcaaggacgcctcctagtttgtt

SEQ ID NO: 56035 - DNA, 120 bp, Homo sapiens
  misc_feature: 1485 for SV(W|O) and mtDNA
aatcatattttatatcttcttcgaaaccacacttatccccaccttggctatcatcacccgatgaggcaaccagccagaacgcctgaacgcaggcacatacttcctattctacaccctagt

SEQ ID NO: 56036 - DNA, 120 bp, Homo sapiens
  misc_feature: 1485 for SV(W|O) and mtDNA
aagaaggcgtgggtgcagatgtgcaggaatgctaggtgtggttggttgatgccgattgtaactattatgagtcctagttgacttgaagtggagaaggctacgatttttttgatgtcattt

SEQ ID NO: 56037 - DNA, 120 bp, Homo sapiens
  misc_feature: 1484 for SV(W|O) and mtDNA
catcctatcatctgtaggctcattcatttctctaacagcagtaatattaataattttcatgatttgagaagccttcgcttcaaagcgaaaagtcctaatagtagaagaaccctccataaa

SEQ ID NO: 56038 - DNA, 120 bp, Homo sapiens
  misc_feature: 1484 for SV(W|O) and mtDNA
ttggtctagggtgtagcctgagaataggggaaatcagtgaatgaagcctcctatgatggcaaatacagctcctattgataggacatagtggaagtgggctacaacgtagtacgtgtcgtg

SEQ ID NO: 56039 - DNA, 120 bp, Homo sapiens
  misc_feature: 1484 for SV(W|O) and mtDNA
gcatccatatagtcactccaggtttatggagggttcttctactattaggacttttcgctttgaagcgaaggcttctcaaatcatgaaaattattaatattactgctgttagagaaatgaa

SEQ ID NO: 56040 - DNA, 120 bp, Homo sapiens
  misc_feature: 1484 for SV(W|O) and mtDNA
tgggcaggcggtgcctctaatactggtgatgctagaggtgatgtttttggtaaacaggcggggtaagatttgccgagttccttttactttttttaacctttccttatgagcatgcctgtg

SEQ ID NO: 56041 - DNA, 120 bp, Homo sapiens
  misc_feature: 1484 for SV(W|O) and mtDNA
gagcagtacatgctaagacttcaccagtcaaagcgaactactatactcaattgatccaataacttgaccaacggaacaagttaccctagggataacagcgcaatcctattctagagtcca

SEQ ID NO: 56042 - DNA, 120 bp, Homo sapiens
  misc_feature: 1484 for SV(W|O) and mtDNA
tggaccaatctatcaccctatagaagaactaatgttagtataagtaacatgaaaacattctcctccgcataagcctgcgtcagattaaaacactgaactgacaattaacagcccaatatc

SEQ ID NO: 56043 - DNA, 120 bp, Homo sapiens
  misc_feature: 1484 for SV(W|O) and mtDNA
tgctaagacttcaccagtcaaagcgaactactatactcaattgatccaataacttgaccaacggaacaagttaccctagggataacagcgcaatcctattctagagtccatatcaacaat

SEQ ID NO: 56044 - DNA, 120 bp, Homo sapiens
  misc_feature: 1484 for SV(W|O) and mtDNA
tgccattaagatatataggatttagcctataatttaactttgacaaagttatgaaatggtttttctaatacctttttgaaaaagtcatggaggccatggggttggcttgaaaccagcttt

SEQ ID NO: 56045 - DNA, 120 bp, Homo sapiens
  misc_feature: 1484 for SV(W|O) and mtDNA
caactggagttttttacaactcaggtgagttttagctttattggggagggggtgatctaaaacactctttacgccggcttctattgacttgggttaatcgtgtgaccgcggtggctggca

SEQ ID NO: 56046 - DNA, 120 bp, Homo sapiens
  misc_feature: 1484 for SV(W|O) and mtDNA
agaccccattctataccaacacctattctgatttttcggtcaccctgaagtttatattcttatcctaccaggcttcggaataatctcccatattgtaacttactactccggaaaaaaaga

SEQ ID NO: 56047 - DNA, 120 bp, Homo sapiens
  misc_feature: 1484 for SV(W|O) and mtDNA
tcgtactacacgacacgtactacgttgtagcccacttccactatgtcctatcaataggagctgtatttgccatcataggaggcttcattcactgatttcccctattctcaggctacaccc

SEQ ID NO: 56048 - DNA, 120 bp, Homo sapiens
  misc_feature: 1484 for SV(W|O) and mtDNA
tcgaaggtggatttagcagtaaactgagagtagagtgcttagttgaacagggccctgaagcgcgtacacaccgcccgtcaccctcctcaagtatacttcaaaggacatttaactaaaacc

SEQ ID NO: 56049 - DNA, 120 bp, Homo sapiens
  misc_feature: 1484 for SV(W|O) and mtDNA
tccgggaattgcatctgtttttaagcctaatgtggggacagctcatgagtgcaagacgtcttgtgatgtaattattatacgaatgggggcttcaatcgggagtactactcgattgtcaac

SEQ ID NO: 56050 - DNA, 120 bp, Homo sapiens
  misc_feature: 1484 for SV(W|O) and mtDNA
ggataatgccgatgtttcaggtttctgagtagagaaatgatccgtaatataggcctcgcccgatgtgtaggaagaggcagataaagaatattgaggcgccattggcgtgaaggtagcgga

SEQ ID NO: 56051 - DNA, 120 bp, Homo sapiens
  misc_feature: 1484 for SV(W|O) and mtDNA
ctaatcatattttatatcttcttcgaaaccacacttatccccaccttggctatcatcacccgatgaggcaaccagccagaacgcctgaacgcaggcacatacttcctattctacacccta

SEQ ID NO: 56052 - DNA, 120 bp, Homo sapiens
  misc_feature: 1484 for SV(W|O) and mtDNA
agtgttgtgggaagaaagttagatttacgccgatgaatatgatagtgaaatggattttggcgtaggtttggtctagggtgtagcctgagaataggggaaatcagtgaatgaagcctccta

SEQ ID NO: 56053 - DNA, 120 bp, Homo sapiens
  misc_feature: 1484 for SV(W|O) and mtDNA
atcatattttatatcttcttcgaaaccacacttatccccaccttggctatcatcacccgatgaggcaaccagccagaacgcctgaacgcaggcacatacttcctattctacaccctagta

SEQ ID NO: 56054 - DNA, 120 bp, Homo sapiens
  misc_feature: 1484 for SV(W|O) and mtDNA
gggaaagatgaaaaattataaccaagcataatatagcaaggactaacccctataccttctgcataatgaattaactagaaataactttgcaaggagagccaaagctaagacccccgaaac

SEQ ID NO: 56055 - DNA, 120 bp, Homo sapiens
  misc_feature: 1484 for SV(W|O) and mtDNA
gtccttggaaaaaggttttcatctccggtttacaagactggtgtattagtttatactacaaggacaggcccatttgagtattttgttttcaattagggagatagttggtattaggattag

SEQ ID NO: 56056 - DNA, 120 bp, Homo sapiens
  misc_feature: 1484 for SV(W|O) and mtDNA
cttgcttgtaagcatggggagggggttttgatgtggattgggtttttatgtactacaggtggtcaagtatttatggtaccgtacaatattcatggtggctggcagtaatgtacgaaatac

SEQ ID NO: 56057 - DNA, 120 bp, Homo sapiens
  misc_feature: 1484 for SV(W|O) and mtDNA
ggatgaaaccgatatcgccgatacggttgtataggattgcttgaatggctgctgtgttggcatctgctcgggcgtatcatcaactgatgagcaagaaggatataattcctacgccctctc

SEQ ID NO: 56058 - DNA, 120 bp, Homo sapiens
  misc_feature: 1484 for SV(W|O) and mtDNA
ggactacaaccacgaccaatgatatgaaaaaccatcgttgtatttcaactacaagaacaccaatgaccccaatacgcaaaactaaccccctaataaaattaattaaccactcattcatcg

SEQ ID NO: 56059 - DNA, 120 bp, Homo sapiens
  misc_feature: 1484 for SV(W|O) and mtDNA
cttcatcagggtttgctgaagatggcggtatataggctgagcaagaggtggtgaggttgatcggggtttatcgattacagaacaggctcctctagagggatatgaagcaccgccaggtcc

SEQ ID NO: 56060 - DNA, 120 bp, Homo sapiens
  misc_feature: 1484 for SV(W|O) and mtDNA
accctaacataaccattcttaatttaactatttatattatcctaactactaccgcattcctactactcaacttaaactccagcaccacgaccctactactatctcgcacctgaaacaagc

SEQ ID NO: 56061 - DNA, 120 bp, Homo sapiens
  misc_feature: 1484 for SV(W|O) and mtDNA
gcctatattacggatcatttctctactcagaaacctgaaacatcggcattatcctcctgcttgcaactatagcaacagccttcataggctatgtcctcccgtgaggccaaatatcattct

SEQ ID NO: 56062 - DNA, 120 bp, Homo sapiens
  misc_feature: 1484 for SV(W|O) and mtDNA
ccttcatcagggtttgctgaagatggcggtatataggctgagcaagaggtggtgaggttgatcggggtttatcgattacagaacaggctcctctagagggatatgaagcaccgccaggtc

SEQ ID NO: 56063 - DNA, 120 bp, Homo sapiens
  misc_feature: 1484 for SV(W|O) and mtDNA
cggggttgagggataggaggagaatgggggataggtgtatgaacatgagggtgttttctcgtgtgaatgagggttttatgttgttaatgtggtgggtgagtgagccccattgtgttgtgg

SEQ ID NO: 56064 - DNA, 120 bp, Homo sapiens
  misc_feature: 1484 for SV(W|O) and mtDNA
catatcgggggcaccgattattaggggaactagtcagttgccaaagcctccgattatgatgggtattactatgaagaagattattacaaatgcatgggctgtgacgataacgttgtagat

SEQ ID NO: 56065 - DNA, 120 bp, Homo sapiens
  misc_feature: 1484 for SV(W|O) and mtDNA
atagttgcaagcaggaggataatgccgatgtttcaggtttctgagtagagaaatgatccgtaatataggcctcgcccgatgtgtaggaagaggcagataaagaatattgaggcgccattg

SEQ ID NO: 56066 - DNA, 120 bp, Homo sapiens
  misc_feature: 1484 for SV(W|O) and mtDNA
agccctaaacctcaacagttaaatcaacaaaactgctcgccagaacactacgagccacagcttaaaactcaaaggacctggcggtgcttcatatccctctagaggagcctgttctgtaat

SEQ ID NO: 56067 - DNA, 120 bp, Homo sapiens
  misc_feature: 1483 for SV(W|O) and mtDNA
ttgtgttgattcaaattatgtgttttttggaaagtcatgtcagtggtagtaatataattgttgggacgattagttttagcattggagtaggtttaggttatgtacgtagtctaggccata

SEQ ID NO: 56068 - DNA, 120 bp, Homo sapiens
  misc_feature: 1483 for SV(W|O) and mtDNA
ttgagggttgattgctgtacttgcttgtaagcatggggagggggttttgatgtggattgggtttttatgtactacaggtggtcaagtatttatggtaccgtacaatattcatggtggctg

SEQ ID NO: 56069 - DNA, 120 bp, Homo sapiens
  misc_feature: 1483 for SV(W|O) and mtDNA
tgtcggggttgagggataggaggagaatgggggataggtgtatgaacatgagggtgttttctcgtgtgaatgagggttttatgttgttaatgtggtgggtgagtgagccccattgtgttg

SEQ ID NO: 56070 - DNA, 120 bp, Homo sapiens
  misc_feature: 1483 for SV(W|O) and mtDNA
tggagccattcatacaggtccctatttaaggaacaagtgattatgctacctttgcacggttagggtaccgcggccgttaaacatgtgtcactgggcaggcggtgcctctaatactggtga

SEQ ID NO: 56071 - DNA, 120 bp, Homo sapiens
  misc_feature: 1483 for SV(W|O) and mtDNA
tgcccaaatgggccattatcgaagaattcacaaaaaacaatagcctcatcatccccaccatcatagccaccatcaccctccttaacctctacttctacctacgcctaatctactccacct

SEQ ID NO: 56072 - DNA, 120 bp, Homo sapiens
  misc_feature: 1483 for SV(W|O) and mtDNA
tgacttgttggttgattgtagatattgggctgttaattgtcagttcagtgttttaatctgacgcaggcttatgcggaggagaatgttttcatgttacttatactaacattagttcttcta

SEQ ID NO: 56073 - DNA, 120 bp, Homo sapiens
  misc_feature: 1483 for SV(W|O) and mtDNA
gcctggctggcccagctcggctcgaataaggaggcttagagctgtgcctaggactccagctcatgcgccgaataataggtatagtgttccaatgtctttgtggtttgtagagaatagtca

SEQ ID NO: 56074 - DNA, 120 bp, Homo sapiens
  misc_feature: 1483 for SV(W|O) and mtDNA
tgaaaccgatatcgccgatacggttgtataggattgcttgaatggctgctgtgttggcatctgctcgggcgtatcatcaactgatgagcaagaaggatataattcctacgccctctcagc

SEQ ID NO: 56075 - DNA, 120 bp, Homo sapiens
  misc_feature: 1483 for SV(W|O) and mtDNA
atcctttttgtagtcactcataggccagacttagggctaggatgatgattaataagagggatgacataactattagtggcaggttagttgtttgtagggctcatggtaggggtaaaagga

SEQ ID NO: 56076 - DNA, 120 bp, Homo sapiens
  misc_feature: 1483 for SV(W|O) and mtDNA
ctatattacggatcatttctctactcagaaacctgaaacatcggcattatcctcctgcttgcaactatagcaacagccttcataggctatgtcctcccgtgaggccaaatatcattctga

SEQ ID NO: 56077 - DNA, 120 bp, Homo sapiens
  misc_feature: 1483 for SV(W|O) and mtDNA
taaacctcaacagttaaatcaacaaaactgctcgccagaacactacgagccacagcttaaaactcaaaggacctggcggtgcttcatatccctctagaggagcctgttctgtaatcgata

SEQ ID NO: 56078 - DNA, 120 bp, Homo sapiens
  misc_feature: 1483 for SV(W|O) and mtDNA
tagtaagtatgttcgcctgtaatattgaacgtaggtgcgataaataatgggatgaggcaggaatcaaagacagatactgcgacatagggtgctccggctccagcgtctcgcaatgctatc

SEQ ID NO: 56079 - DNA, 120 bp, Homo sapiens
  misc_feature: 1483 for SV(W|O) and mtDNA
gttcagttatatgtttgggattttttaggtagtgggtgttgagcttgaacgctttcttaattggtggctgcttttaggcctactatgggtgttaaattttttactctctctacaaggttt

SEQ ID NO: 56080 - DNA, 120 bp, Homo sapiens
  misc_feature: 1483 for SV(W|O) and mtDNA
gtaccgttaacttccaattaactagttttgacaacattcaaaaaagagtaataaacttcgccttaattttaataatcaacaccctcctagccttactactaataattattacattttgac

SEQ ID NO: 56081 - DNA, 120 bp, Homo sapiens
  misc_feature: 1483 for SV(W|O) and mtDNA
gggtttgttaggtactgtttgcattaataaattaaagctccatagggtcttctcgtcttgctgtgttatgcccgcctcttcacgggcaggtcaatttcactggttaaaagtaagagacag

SEQ ID NO: 56082 - DNA, 120 bp, Homo sapiens
  misc_feature: 1483 for SV(W|O) and mtDNA
ggctttaacatatctgaacacacaatagctaagacccaaactgggattagataccccactatgcttagccctaaacctcaacagttaaatcaacaaaactgctcgccagaacactacgag

SEQ ID NO: 56083 - DNA, 120 bp, Homo sapiens
  misc_feature: 1483 for SV(W|O) and mtDNA
agtaatgttagcggttaggcgtacggccagggctattggttgaatgagtaggctgatggtttcgataataactagtatggggataaggggtgtaggtgtgccttgtggtaagaagtgggc

SEQ ID NO: 56084 - DNA, 120 bp, Homo sapiens
  misc_feature: 1483 for SV(W|O) and mtDNA
accggcgtcaaagtatttagctgactcgccacactccacggaagcaatatgaaatgatctgctgcagtgctctgagccctaggattcatctttcttttcaccgtaggtggcctgactggc

SEQ ID NO: 56085 - DNA, 120 bp, Homo sapiens
  misc_feature: 1483 for SV(W|O) and mtDNA
gaggttgaagtgagaggtatggttttgagtagtcctcctatttttcgaatatcttgttcattgttaaggttgtggatgatggacccggagcacataaatagtatggctttgaagaaggcg

SEQ ID NO: 56086 - DNA, 120 bp, Homo sapiens
  misc_feature: 1483 for SV(W|O) and mtDNA
catagtaatacccatcataatcggaggctttggcaactgactagttcccctaataatcggtgcccccgatatggcgtttccccgcataaacaacataagcttctgactcttacctccctc

SEQ ID NO: 56087 - DNA, 120 bp, Homo sapiens
  misc_feature: 1483 for SV(W|O) and mtDNA
gaaaatgtagcccatttcttgccacctcatgggctacaccttgacctaacgtctttacgtgggtacttgcgcttactttgtagccttcatcagggtttgctgaagatggcggtatatagg

SEQ ID NO: 56088 - DNA, 120 bp, Homo sapiens
  misc_feature: 1483 for SV(W|O) and mtDNA
atgaaaccgatatcgccgatacggttgtataggattgcttgaatggctgctgtgttggcatctgctcgggcgtatcatcaactgatgagcaagaaggatataattcctacgccctctcag

SEQ ID NO: 56089 - DNA, 120 bp, Homo sapiens
  misc_feature: 1483 for SV(W|O) and mtDNA
ctccccaataaagctaaaactcacctgagttgtaaaaaactccagttgacacaaaatagactacgaaagtggctttaacatatctgaacacacaatagctaagacccaaactgggattag

SEQ ID NO: 56090 - DNA, 120 bp, Homo sapiens
  misc_feature: 1483 for SV(W|O) and mtDNA
aagacttcaccagtcaaagcgaactactatactcaattgatccaataacttgaccaacggaacaagttaccctagggataacagcgcaatcctattctagagtccatatcaacaataggg

SEQ ID NO: 56091 - DNA, 120 bp, Homo sapiens
  misc_feature: 1483 for SV(W|O) and mtDNA
aggttgcctggctggcccagctcggctcgaataaggaggcttagagctgtgcctaggactccagctcatgcgccgaataataggtatagtgttccaatgtctttgtggtttgtagagaat

SEQ ID NO: 56092 - DNA, 120 bp, Homo sapiens
  misc_feature: 1483 for SV(W|O) and mtDNA
actaggcctactaaccaacacactaaccatataccaatgatggcgcgatgtaacacgagaaagcacataccaaggccaccacacaccacctgtccaaaaaggccttcgatacgggataat

SEQ ID NO: 56093 - DNA, 120 bp, Homo sapiens
  misc_feature: 1483 for SV(W|O) and mtDNA
atgtcggggttgagggataggaggagaatgggggataggtgtatgaacatgagggtgttttctcgtgtgaatgagggttttatgttgttaatgtggtgggtgagtgagccccattgtgtt

SEQ ID NO: 56094 - DNA, 120 bp, Homo sapiens
  misc_feature: 1482 for SV(W|O) and mtDNA
attcagaataataacacacccgaccacaccgctaacaatcaatactaaacccccataaataggagaaggcttagaagaaaaccccacaaaccccattactaaacccacactcaacagaaa

SEQ ID NO: 56095 - DNA, 120 bp, Homo sapiens
  misc_feature: 1482 for SV(W|O) and mtDNA
tgggtttgttaggtactgtttgcattaataaattaaagctccatagggtcttctcgtcttgctgtgttatgcccgcctcttcacgggcaggtcaatttcactggttaaaagtaagagaca

SEQ ID NO: 56096 - DNA, 120 bp, Homo sapiens
  misc_feature: 1482 for SV(W|O) and mtDNA
agcaagtacagcaatcaaccctcaactatcacacatcaactgcaactccaaagccacccctcacccactaggataccaacaaacctacccacccttaacagtacatagtacataaagcca

SEQ ID NO: 56097 - DNA, 120 bp, Homo sapiens
  misc_feature: 1482 for SV(W|O) and mtDNA
tgagggttgattgctgtacttgcttgtaagcatggggagggggttttgatgtggattgggtttttatgtactacaggtggtcaagtatttatggtaccgtacaatattcatggtggctgg

SEQ ID NO: 56098 - DNA, 120 bp, Homo sapiens
  misc_feature: 1482 for SV(W|O) and mtDNA
tctgaactatcctgcccgccatcatcctagtcctcatcgccctcccatccctacgcatcctttacataacagacgaggtcaacgatccctcccttaccatcaaatcaattggccaccaat

SEQ ID NO: 56099 - DNA, 120 bp, Homo sapiens
  misc_feature: 1482 for SV(W|O) and mtDNA
tcctttttgtagtcactcataggccagacttagggctaggatgatgattaataagagggatgacataactattagtggcaggttagttgtttgtagggctcatggtaggggtaaaaggag

SEQ ID NO: 56100 - DNA, 120 bp, Homo sapiens
  misc_feature: 1482 for SV(W|O) and mtDNA
ggaggaggagaccccattctataccaacacctattctgatttttcggtcaccctgaagtttatattcttatcctaccaggcttcggaataatctcccatattgtaacttactactccgga

SEQ ID NO: 56101 - DNA, 120 bp, Homo sapiens
  misc_feature: 1482 for SV(W|O) and mtDNA
tccaagcctacgttttcacacttctagtaagcctctacctgcacgacaacacataatgacccaccaatcacatgcctatcatatagtaaaacccagcccatgacccctaacaggggccct

SEQ ID NO: 56102 - DNA, 120 bp, Homo sapiens
  misc_feature: 1482 for SV(W|O) and mtDNA
ctaggctgccaatggtgagggaggttgaagtgagaggtatggttttgagtagtcctcctatttttcgaatatcttgttcattgttaaggttgtggatgatggacccggagcacataaata

SEQ ID NO: 56103 - DNA, 120 bp, Homo sapiens
  misc_feature: 1482 for SV(W|O) and mtDNA
cagtaccattggtggccaattgatttgatggtaagggagggatcgttgacctcgtctgttatgtaaaggatgcgtagggatgggagggcgatgaggactaggatgatggcgggcaggata

SEQ ID NO: 56104 - DNA, 120 bp, Homo sapiens
  misc_feature: 1482 for SV(W|O) and mtDNA
taggcctactaaccaacacactaaccatataccaatgatggcgcgatgtaacacgagaaagcacataccaaggccaccacacaccacctgtccaaaaaggccttcgatacgggataatcc

SEQ ID NO: 56105 - DNA, 120 bp, Homo sapiens
  misc_feature: 1482 for SV(W|O) and mtDNA
taatcatattttatatcttcttcgaaaccacacttatccccaccttggctatcatcacccgatgaggcaaccagccagaacgcctgaacgcaggcacatacttcctattctacaccctag

SEQ ID NO: 56106 - DNA, 120 bp, Homo sapiens
  misc_feature: 1482 for SV(W|O) and mtDNA
gttgattcaaattatgtgttttttggaaagtcatgtcagtggtagtaatataattgttgggacgattagttttagcattggagtaggtttaggttatgtacgtagtctaggccatatgtg

SEQ ID NO: 56107 - DNA, 120 bp, Homo sapiens
  misc_feature: 1482 for SV(W|O) and mtDNA
gttcagtctaatcctttttgtagtcactcataggccagacttagggctaggatgatgattaataagagggatgacataactattagtggcaggttagttgtttgtagggctcatggtagg

SEQ ID NO: 56108 - DNA, 120 bp, Homo sapiens
  misc_feature: 1482 for SV(W|O) and mtDNA
gggaggaatttgaagtagatagaaaccgacctggattactccggtctgaactcagatcacgtaggactttaatcgttgaacaaacgaacctttaatagcggctgcaccatcgggatgtcc

SEQ ID NO: 56109 - DNA, 120 bp, Homo sapiens
  misc_feature: 1482 for SV(W|O) and mtDNA
cctagaaggaataatactatcgctgttcattatagctactctcataaccctcaacacccactccctcttagccaatattgtgcctattgccatactagtctttgccgcctgcgaagcagc

SEQ ID NO: 56110 - DNA, 120 bp, Homo sapiens
  misc_feature: 1482 for SV(W|O) and mtDNA
gcctagaaggaataatactatcgctgttcattatagctactctcataaccctcaacacccactccctcttagccaatattgtgcctattgccatactagtctttgccgcctgcgaagcag

SEQ ID NO: 56111 - DNA, 120 bp, Homo sapiens
  misc_feature: 1482 for SV(W|O) and mtDNA
ccgggaattgcatctgtttttaagcctaatgtggggacagctcatgagtgcaagacgtcttgtgatgtaattattatacgaatgggggcttcaatcgggagtactactcgattgtcaacg

SEQ ID NO: 56112 - DNA, 120 bp, Homo sapiens
  misc_feature: 1482 for SV(W|O) and mtDNA
ccctactatgcctagaaggaataatactatcgctgttcattatagctactctcataaccctcaacacccactccctcttagccaatattgtgcctattgccatactagtctttgccgcct

SEQ ID NO: 56113 - DNA, 120 bp, Homo sapiens
  misc_feature: 1482 for SV(W|O) and mtDNA
ccctaacataaccattcttaatttaactatttatattatcctaactactaccgcattcctactactcaacttaaactccagcaccacgaccctactactatctcgcacctgaaacaagct

SEQ ID NO: 56114 - DNA, 120 bp, Homo sapiens
  misc_feature: 1482 for SV(W|O) and mtDNA
agccttctccacttcaagtcaactaggactcataatagttacaatcggcatcaaccaaccacacctagcattcctgcacatctgcacccacgccttcttcaaagccatactatttatgtg

SEQ ID NO: 56115 - DNA, 120 bp, Homo sapiens
  misc_feature: 1482 for SV(W|O) and mtDNA
aaaactgctcgccagaacactacgagccacagcttaaaactcaaaggacctggcggtgcttcatatccctctagaggagcctgttctgtaatcgataaaccccgatcaacctcaccacct

SEQ ID NO: 56116 - DNA, 120 bp, Homo sapiens
  misc_feature: 1481 for SV(W|O) and mtDNA
ttttatatcttcttcgaaaccacacttatccccaccttggctatcatcacccgatgaggcaaccagccagaacgcctgaacgcaggcacatacttcctattctacaccctagtaggctcc

SEQ ID NO: 56117 - DNA, 120 bp, Homo sapiens
  misc_feature: 1481 for SV(W|O) and mtDNA
acatcctatcatctgtaggctcattcatttctctaacagcagtaatattaataattttcatgatttgagaagccttcgcttcaaagcgaaaagtcctaatagtagaagaaccctccataa

SEQ ID NO: 56118 - DNA, 120 bp, Homo sapiens
  misc_feature: 1481 for SV(W|O) and mtDNA
tgtagcccatttcttgccacctcatgggctacaccttgacctaacgtctttacgtgggtacttgcgcttactttgtagccttcatcagggtttgctgaagatggcggtatataggctgag

SEQ ID NO: 56119 - DNA, 120 bp, Homo sapiens
  misc_feature: 1481 for SV(W|O) and mtDNA
tggcaataaaaatgattaaggatactagtataagagatcaggttcgtcctttagtgttgtgtatggttatcatttgttttgaggttagtttgattagtcattgttgggtggtgattagtc

SEQ ID NO: 56120 - DNA, 120 bp, Homo sapiens
  misc_feature: 1481 for SV(W|O) and mtDNA
atgcccgcctcttcacgggcaggtcaatttcactggttaaaagtaagagacagctgaaccctcgtggagccattcatacaggtccctatttaaggaacaagtgattatgctacctttgca

SEQ ID NO: 56121 - DNA, 120 bp, Homo sapiens
  misc_feature: 1481 for SV(W|O) and mtDNA
gcagttgatgtgtgatagttgagggttgattgctgtacttgcttgtaagcatggggagggggttttgatgtggattgggtttttatgtactacaggtggtcaagtatttatggtaccgta

SEQ ID NO: 56122 - DNA, 120 bp, Homo sapiens
  misc_feature: 1481 for SV(W|O) and mtDNA
ctggagtttaagttgagtagtaggaatgcggtagtagttaggataatataaatagttaaattaagaatggttatgttagggttgtacggtagaactgctattattcatcctatgtgggta

SEQ ID NO: 56123 - DNA, 120 bp, Homo sapiens
  misc_feature: 1481 for SV(W|O) and mtDNA
taatgctaggctgccaatggtgagggaggttgaagtgagaggtatggttttgagtagtcctcctatttttcgaatatcttgttcattgttaaggttgtggatgatggacccggagcacat

SEQ ID NO: 56124 - DNA, 120 bp, Homo sapiens
  misc_feature: 1481 for SV(W|O) and mtDNA
gttgctatagttgcaagcaggaggataatgccgatgtttcaggtttctgagtagagaaatgatccgtaatataggcctcgcccgatgtgtaggaagaggcagataaagaatattgaggcg

SEQ ID NO: 56125 - DNA, 120 bp, Homo sapiens
  misc_feature: 1481 for SV(W|O) and mtDNA
gtcactgggcaggcggtgcctctaatactggtgatgctagaggtgatgtttttggtaaacaggcggggtaagatttgccgagttccttttactttttttaacctttccttatgagcatgc

SEQ ID NO: 56126 - DNA, 120 bp, Homo sapiens
  misc_feature: 1481 for SV(W|O) and mtDNA
gtactatgtactgttaagggtgggtaggtttgttggtatcctagtgggtgaggggtggctttggagttgcagttgatgtgtgatagttgagggttgattgctgtacttgcttgtaagcat

SEQ ID NO: 56127 - DNA, 120 bp, Homo sapiens
  misc_feature: 1481 for SV(W|O) and mtDNA
ggttcgtcctttagtgttgtgtatggttatcatttgttttgaggttagtttgattagtcattgttgggtggtgattagtcggttgttgatgagatatttggaggtggggatcaatagagg

SEQ ID NO: 56128 - DNA, 120 bp, Homo sapiens
  misc_feature: 1481 for SV(W|O) and mtDNA
gaaggtggatttagcagtaaactgagagtagagtgcttagttgaacagggccctgaagcgcgtacacaccgcccgtcaccctcctcaagtatacttcaaaggacatttaactaaaacccc

SEQ ID NO: 56129 - DNA, 120 bp, Homo sapiens
  misc_feature: 1481 for SV(W|O) and mtDNA
gatgtcggggttgagggataggaggagaatgggggataggtgtatgaacatgagggtgttttctcgtgtgaatgagggttttatgttgttaatgtggtgggtgagtgagccccattgtgt

SEQ ID NO: 56130 - DNA, 120 bp, Homo sapiens
  misc_feature: 1481 for SV(W|O) and mtDNA
cgtctggtttcgggggtcttagctttggctctccttgcaaagttatttctagttaattcattatgcagaaggtataggggttagtccttgctatattatgcttggttataatttttcatc

SEQ ID NO: 56131 - DNA, 120 bp, Homo sapiens
  misc_feature: 1481 for SV(W|O) and mtDNA
gaaagtgttgtgggaagaaagttagatttacgccgatgaatatgatagtgaaatggattttggcgtaggtttggtctagggtgtagcctgagaataggggaaatcagtgaatgaagcctc

SEQ ID NO: 56132 - DNA, 120 bp, Homo sapiens
  misc_feature: 1481 for SV(W|O) and mtDNA
cgagcagttttgttgatttaactgttgaggtttagggctaagcatagtggggtatctaatcccagtttgggtcttagctattgtgtgttcagatatgttaaagccactttcgtagtctat

SEQ ID NO: 56133 - DNA, 120 bp, Homo sapiens
  misc_feature: 1481 for SV(W|O) and mtDNA
ccaacacactaaccatataccaatgatggcgcgatgtaacacgagaaagcacataccaaggccaccacacaccacctgtccaaaaaggccttcgatacgggataatcctatttattacct

SEQ ID NO: 56134 - DNA, 120 bp, Homo sapiens
  misc_feature: 1481 for SV(W|O) and mtDNA
cagttatatgtttgggattttttaggtagtgggtgttgagcttgaacgctttcttaattggtggctgcttttaggcctactatgggtgttaaattttttactctctctacaaggtttttt

SEQ ID NO: 56135 - DNA, 120 bp, Homo sapiens
  misc_feature: 1481 for SV(W|O) and mtDNA
cagggggtttggatgagaatggctgttactacgagggctatgtggctgattgaagagtatgcaatgagcgattttaggtctgtttgtcgtaggcagatggagcttgttataattatgcct

SEQ ID NO: 56136 - DNA, 120 bp, Homo sapiens
  misc_feature: 1481 for SV(W|O) and mtDNA
attgtaataagcagtgcttgaattatttggtttcggttgttttctattagactatggtgagctcaggtgattgatactcctgatgcgagtaatacggatgtgtttaggagtgggacttct

SEQ ID NO: 56137 - DNA, 120 bp, Homo sapiens
  misc_feature: 1481 for SV(W|O) and mtDNA
aggatgaaaccgatatcgccgatacggttgtataggattgcttgaatggctgctgtgttggcatctgctcgggcgtatcatcaactgatgagcaagaaggatataattcctacgccctct

SEQ ID NO: 56138 - DNA, 120 bp, Homo sapiens
  misc_feature: 1480 for SV(W|O) and mtDNA
atgctaagacttcaccagtcaaagcgaactactatactcaattgatccaataacttgaccaacggaacaagttaccctagggataacagcgcaatcctattctagagtccatatcaacaa

SEQ ID NO: 56139 - DNA, 120 bp, Homo sapiens
  misc_feature: 1480 for SV(W|O) and mtDNA
tgtgggtttgttaggtactgtttgcattaataaattaaagctccatagggtcttctcgtcttgctgtgttatgcccgcctcttcacgggcaggtcaatttcactggttaaaagtaagaga

SEQ ID NO: 56140 - DNA, 120 bp, Homo sapiens
  misc_feature: 1480 for SV(W|O) and mtDNA
agcagtctgcgcccttacacaaaatgacatcaaaaaaatcgtagccttctccacttcaagtcaactaggactcataatagttacaatcggcatcaaccaaccacacctagcattcctgca

SEQ ID NO: 56141 - DNA, 120 bp, Homo sapiens
  misc_feature: 1480 for SV(W|O) and mtDNA
gggtgtgataggtggcacggagaattttggattctcagggatgggttcgattctcatagtcctagaaataagggggtttaagctcctattatttactctatcaaagtaactcttttatca

SEQ ID NO: 56142 - DNA, 120 bp, Homo sapiens
  misc_feature: 1480 for SV(W|O) and mtDNA
gatgaaaccgatatcgccgatacggttgtataggattgcttgaatggctgctgtgttggcatctgctcgggcgtatcatcaactgatgagcaagaaggatataattcctacgccctctca

SEQ ID NO: 56143 - DNA, 120 bp, Homo sapiens
  misc_feature: 1480 for SV(W|O) and mtDNA
tgaactatcctgcccgccatcatcctagtcctcatcgccctcccatccctacgcatcctttacataacagacgaggtcaacgatccctcccttaccatcaaatcaattggccaccaatgg

SEQ ID NO: 56144 - DNA, 120 bp, Homo sapiens
  misc_feature: 1480 for SV(W|O) and mtDNA
tcagttatatgtttgggattttttaggtagtgggtgttgagcttgaacgctttcttaattggtggctgcttttaggcctactatgggtgttaaattttttactctctctacaaggttttt

SEQ ID NO: 56145 - DNA, 120 bp, Homo sapiens
  misc_feature: 1480 for SV(W|O) and mtDNA
tcaattacccacataggatgaataatagcagttctaccgtacaaccctaacataaccattcttaatttaactatttatattatcctaactactaccgcattcctactactcaacttaaac

SEQ ID NO: 56146 - DNA, 120 bp, Homo sapiens
  misc_feature: 1480 for SV(W|O) and mtDNA
tagccttctccacttcaagtcaactaggactcataatagttacaatcggcatcaaccaaccacacctagcattcctgcacatctgcacccacgccttcttcaaagccatactatttatgt

SEQ ID NO: 56147 - DNA, 120 bp, Homo sapiens
  misc_feature: 1480 for SV(W|O) and mtDNA
tactcgcatcaggagtatcaatcacctgagctcaccatagtctaatagaaaacaaccgaaaccaaataattcaagcactgcttattacaattttactgggtctctattttaccctcctac

SEQ ID NO: 56148 - DNA, 120 bp, Homo sapiens
  misc_feature: 1480 for SV(W|O) and mtDNA
taatgatgtcggggttgagggataggaggagaatgggggataggtgtatgaacatgagggtgttttctcgtgtgaatgagggttttatgttgttaatgtggtgggtgagtgagccccatt

SEQ ID NO: 56149 - DNA, 120 bp, Homo sapiens
  misc_feature: 1480 for SV(W|O) and mtDNA
gttaggtactgtttgcattaataaattaaagctccatagggtcttctcgtcttgctgtgttatgcccgcctcttcacgggcaggtcaatttcactggttaaaagtaagagacagctgaac

SEQ ID NO: 56150 - DNA, 120 bp, Homo sapiens
  misc_feature: 1480 for SV(W|O) and mtDNA
gtggtcgttacctagaaggttgcctggctggcccagctcggctcgaataaggaggcttagagctgtgcctaggactccagctcatgcgccgaataataggtatagtgttccaatgtcttt

SEQ ID NO: 56151 - DNA, 120 bp, Homo sapiens
  misc_feature: 1480 for SV(W|O) and mtDNA
gtcaactggagttttttacaactcaggtgagttttagctttattggggagggggtgatctaaaacactctttacgccggcttctattgacttgggttaatcgtgtgaccgcggtggctgg

SEQ ID NO: 56152 - DNA, 120 bp, Homo sapiens
  misc_feature: 1480 for SV(W|O) and mtDNA
aaatgggccattatcgaagaattcacaaaaaacaatagcctcatcatccccaccatcatagccaccatcaccctccttaacctctacttctacctacgcctaatctactccacctcaatc

SEQ ID NO: 56153 - DNA, 120 bp, Homo sapiens
  misc_feature: 1480 for SV(W|O) and mtDNA
ccctaaacctcaacagttaaatcaacaaaactgctcgccagaacactacgagccacagcttaaaactcaaaggacctggcggtgcttcatatccctctagaggagcctgttctgtaatcg

SEQ ID NO: 56154 - DNA, 120 bp, Homo sapiens
  misc_feature: 1480 for SV(W|O) and mtDNA
cccaccggcgtcaaagtatttagctgactcgccacactccacggaagcaatatgaaatgatctgctgcagtgctctgagccctaggattcatctttcttttcaccgtaggtggcctgact

SEQ ID NO: 56155 - DNA, 120 bp, Homo sapiens
  misc_feature: 1480 for SV(W|O) and mtDNA
aatgatgtcggggttgagggataggaggagaatgggggataggtgtatgaacatgagggtgttttctcgtgtgaatgagggttttatgttgttaatgtggtgggtgagtgagccccattg

SEQ ID NO: 56156 - DNA, 120 bp, Homo sapiens
  misc_feature: 1480 for SV(W|O) and mtDNA
attggttatggttcattgtccggagagtatattgttgaagaggatagctattagaaggattatggatgcggttgcttgcgtgaggaaatacttgatggcagcttctgtggaacgagggtt

SEQ ID NO: 56157 - DNA, 120 bp, Homo sapiens
  misc_feature: 1480 for SV(W|O) and mtDNA
agggtttgctgaagatggcggtatataggctgagcaagaggtggtgaggttgatcggggtttatcgattacagaacaggctcctctagagggatatgaagcaccgccaggtcctttgagt

SEQ ID NO: 56158 - DNA, 120 bp, Homo sapiens
  misc_feature: 1480 for SV(W|O) and mtDNA
acgagggtttatttttttggttagaactggaataaaagctagcatgtttatttctaggcctactcaggtaaaaaatcagtgcgagcttagcgctgtgatgagtgtgcctgcaaagatggt

SEQ ID NO: 56159 - DNA, 120 bp, Homo sapiens
  misc_feature: 1480 for SV(W|O) and mtDNA
aataaagtgattggcttagtgggcgaaatattatgctttgttgtttggatatatggaggatggggattattgctaggatgaggatggatagtaatagggcaaggacgcctcctagtttgt

SEQ ID NO: 56160 - DNA, 120 bp, Homo sapiens
  misc_feature: 1479 for SV(W|O) and mtDNA
ctcgcatcaggagtatcaatcacctgagctcaccatagtctaatagaaaacaaccgaaaccaaataattcaagcactgcttattacaattttactgggtctctattttaccctcctacaa

SEQ ID NO: 56161 - DNA, 120 bp, Homo sapiens
  misc_feature: 1479 for SV(W|O) and mtDNA
ttagtaagtatgttcgcctgtaatattgaacgtaggtgcgataaataatgggatgaggcaggaatcaaagacagatactgcgacatagggtgctccggctccagcgtctcgcaatgctat

SEQ ID NO: 56162 - DNA, 120 bp, Homo sapiens
  misc_feature: 1479 for SV(W|O) and mtDNA
ccgtacgcctaaccgctaacattactgcaggccacctactcatgcacctaattggaagcgccaccctagcaatatcaaccattaaccttccctctacacttatcatcttcacaattctaa

SEQ ID NO: 56163 - DNA, 120 bp, Homo sapiens
  misc_feature: 1479 for SV(W|O) and mtDNA
tgtagatattgggctgttaattgtcagttcagtgttttaatctgacgcaggcttatgcggaggagaatgttttcatgttacttatactaacattagttcttctatagggtgatagattgg

SEQ ID NO: 56164 - DNA, 120 bp, Homo sapiens
  misc_feature: 1479 for SV(W|O) and mtDNA
tggctttaacatatctgaacacacaatagctaagacccaaactgggattagataccccactatgcttagccctaaacctcaacagttaaatcaacaaaactgctcgccagaacactacga

SEQ ID NO: 56165 - DNA, 120 bp, Homo sapiens
  misc_feature: 1479 for SV(W|O) and mtDNA
tgcgcccttacacaaaatgacatcaaaaaaatcgtagccttctccacttcaagtcaactaggactcataatagttacaatcggcatcaaccaaccacacctagcattcctgcacatctgc

SEQ ID NO: 56166 - DNA, 120 bp, Homo sapiens
  misc_feature: 1479 for SV(W|O) and mtDNA
tgcctggctggcccagctcggctcgaataaggaggcttagagctgtgcctaggactccagctcatgcgccgaataataggtatagtgttccaatgtctttgtggtttgtagagaatagtc

SEQ ID NO: 56167 - DNA, 120 bp, Homo sapiens
  misc_feature: 1479 for SV(W|O) and mtDNA
gcgcccttacacaaaatgacatcaaaaaaatcgtagccttctccacttcaagtcaactaggactcataatagttacaatcggcatcaaccaaccacacctagcattcctgcacatctgca

SEQ ID NO: 56168 - DNA, 120 bp, Homo sapiens
  misc_feature: 1479 for SV(W|O) and mtDNA
tcgaatatcttgttcattgttaaggttgtggatgatggacccggagcacataaatagtatggctttgaagaaggcgtgggtgcagatgtgcaggaatgctaggtgtggttggttgatgcc

SEQ ID NO: 56169 - DNA, 120 bp, Homo sapiens
  misc_feature: 1479 for SV(W|O) and mtDNA
tagcttactggttgtcctccgattcaggttagaatgaggaggtctgcggctaggagtcaataaagtgattggcttagtgggcgaaatattatgctttgttgtttggatatatggaggatg

SEQ ID NO: 56170 - DNA, 120 bp, Homo sapiens
  misc_feature: 1479 for SV(W|O) and mtDNA
ggctgccaatggtgagggaggttgaagtgagaggtatggttttgagtagtcctcctatttttcgaatatcttgttcattgttaaggttgtggatgatggacccggagcacataaatagta

SEQ ID NO: 56171 - DNA, 120 bp, Homo sapiens
  misc_feature: 1479 for SV(W|O) and mtDNA
taaaccaaaccactttcaccgctacacgaccgggggtatactacggtcaatgctctgaaatctgtggagcaaaccacagtttcatgcccatcgtcctagaattaattcccctaaaaatct

SEQ ID NO: 56172 - DNA, 120 bp, Homo sapiens
  misc_feature: 1479 for SV(W|O) and mtDNA
gtgtcactgggcaggcggtgcctctaatactggtgatgctagaggtgatgtttttggtaaacaggcggggtaagatttgccgagttccttttactttttttaacctttccttatgagcat

SEQ ID NO: 56173 - DNA, 120 bp, Homo sapiens
  misc_feature: 1479 for SV(W|O) and mtDNA
accaatctatcaccctatagaagaactaatgttagtataagtaacatgaaaacattctcctccgcataagcctgcgtcagattaaaacactgaactgacaattaacagcccaatatctac

SEQ ID NO: 56174 - DNA, 120 bp, Homo sapiens
  misc_feature: 1479 for SV(W|O) and mtDNA
gtaataatgacttgttggttgattgtagatattgggctgttaattgtcagttcagtgttttaatctgacgcaggcttatgcggaggagaatgttttcatgttacttatactaacattagt

SEQ ID NO: 56175 - DNA, 120 bp, Homo sapiens
  misc_feature: 1479 for SV(W|O) and mtDNA
aggacaggcccatttgagtattttgttttcaattagggagatagttggtattaggattaggattgttgtgaagtatagtacggatgctacttgtccaatgatggtaaaagggtagcttac

SEQ ID NO: 56176 - DNA, 120 bp, Homo sapiens
  misc_feature: 1479 for SV(W|O) and mtDNA
gggaattgcatctgtttttaagcctaatgtggggacagctcatgagtgcaagacgtcttgtgatgtaattattatacgaatgggggcttcaatcgggagtactactcgattgtcaacgtc

SEQ ID NO: 56177 - DNA, 120 bp, Homo sapiens
  misc_feature: 1479 for SV(W|O) and mtDNA
ataatcttcttcatagtaatacccatcataatcggaggctttggcaactgactagttcccctaataatcggtgcccccgatatggcgtttccccgcataaacaacataagcttctgactc

SEQ ID NO: 56178 - DNA, 120 bp, Homo sapiens
  misc_feature: 1479 for SV(W|O) and mtDNA
ctgaactatcctgcccgccatcatcctagtcctcatcgccctcccatccctacgcatcctttacataacagacgaggtcaacgatccctcccttaccatcaaatcaattggccaccaatg

SEQ ID NO: 56179 - DNA, 120 bp, Homo sapiens
  misc_feature: 1479 for SV(W|O) and mtDNA
atgatggcgcgatgtaacacgagaaagcacataccaaggccaccacacaccacctgtccaaaaaggccttcgatacgggataatcctatttattacctcagaagtttttttcttcgcagg

SEQ ID NO: 56180 - DNA, 120 bp, Homo sapiens
  misc_feature: 1479 for SV(W|O) and mtDNA
aatagcagttctaccgtacaaccctaacataaccattcttaatttaactatttatattatcctaactactaccgcattcctactactcaacttaaactccagcaccacgaccctactact

SEQ ID NO: 56181 - DNA, 120 bp, Homo sapiens
  misc_feature: 1479 for SV(W|O) and mtDNA
acctaattggaagcgccaccctagcaatatcaaccattaaccttccctctacacttatcatcttcacaattctaattctactgactatcctagaaatcgctgtcgccttaatccaagcct

SEQ ID NO: 56182 - DNA, 120 bp, Homo sapiens
  misc_feature: 1478 for SV(W|O) and mtDNA
tttaataatcaacaccctcctagccttactactaataattattacattttgactaccacaactcaacggctacatagaaaaatccaccccttacgagtgcggcttcgaccctatatcccc

SEQ ID NO: 56183 - DNA, 120 bp, Homo sapiens
  misc_feature: 1478 for SV(W|O) and mtDNA
ttgtgggaagaaagttagatttacgccgatgaatatgatagtgaaatggattttggcgtaggtttggtctagggtgtagcctgagaataggggaaatcagtgaatgaagcctcctatgat

SEQ ID NO: 56184 - DNA, 120 bp, Homo sapiens
  misc_feature: 1478 for SV(W|O) and mtDNA
ttgtaataagcagtgcttgaattatttggtttcggttgttttctattagactatggtgagctcaggtgattgatactcctgatgcgagtaatacggatgtgtttaggagtgggacttcta

SEQ ID NO: 56185 - DNA, 120 bp, Homo sapiens
  misc_feature: 1478 for SV(W|O) and mtDNA
ttgagggataggaggagaatgggggataggtgtatgaacatgagggtgttttctcgtgtgaatgagggttttatgttgttaatgtggtgggtgagtgagccccattgtgttgtggtaaat

SEQ ID NO: 56186 - DNA, 120 bp, Homo sapiens
  misc_feature: 1478 for SV(W|O) and mtDNA
ttcatagtaatacccatcataatcggaggctttggcaactgactagttcccctaataatcggtgcccccgatatggcgtttccccgcataaacaacataagcttctgactcttacctccc

SEQ ID NO: 56187 - DNA, 120 bp, Homo sapiens
  misc_feature: 1478 for SV(W|O) and mtDNA
ttaccgggctctgccatcttaacaaaccctgttcttgggtgggtgtgggtataatactaagttgagatgatatcatttacgggggaaggcgctttgtgaagtaggccttatttctcttgt

SEQ ID NO: 56188 - DNA, 120 bp, Homo sapiens
  misc_feature: 1478 for SV(W|O) and mtDNA
ctcagccattttacctcacccccactgatgttcgccgaccgttgactattctctacaaaccacaaagacattggaacactatacctattattcggcgcatgagctggagtcctaggcaca

SEQ ID NO: 56189 - DNA, 120 bp, Homo sapiens
  misc_feature: 1478 for SV(W|O) and mtDNA
tgtcaactggagttttttacaactcaggtgagttttagctttattggggagggggtgatctaaaacactctttacgccggcttctattgacttgggttaatcgtgtgaccgcggtggctg

SEQ ID NO: 56190 - DNA, 120 bp, Homo sapiens
  misc_feature: 1478 for SV(W|O) and mtDNA
tggcgagcagttttgttgatttaactgttgaggtttagggctaagcatagtggggtatctaatcccagtttgggtcttagctattgtgtgttcagatatgttaaagccactttcgtagtc

SEQ ID NO: 56191 - DNA, 120 bp, Homo sapiens
  misc_feature: 1478 for SV(W|O) and mtDNA
tgagctcaccatagtctaatagaaaacaaccgaaaccaaataattcaagcactgcttattacaattttactgggtctctattttaccctcctacaagcctcagagtacttcgagtctccc

SEQ ID NO: 56192 - DNA, 120 bp, Homo sapiens
  misc_feature: 1478 for SV(W|O) and mtDNA
aacgtcggggcattccggataggccgagaaagtgttgtgggaagaaagttagatttacgccgatgaatatgatagtgaaatggattttggcgtaggtttggtctagggtgtagcctgaga

SEQ ID NO: 56193 - DNA, 120 bp, Homo sapiens
  misc_feature: 1478 for SV(W|O) and mtDNA
aaaacatcacctctagcatcaccagtattagaggcaccgcctgcccagtgacacatgtttaacggccgcggtaccctaaccgtgcaaaggtagcataatcacttgttccttaaataggga

SEQ ID NO: 56194 - DNA, 120 bp, Homo sapiens
  misc_feature: 1478 for SV(W|O) and mtDNA
tccatatagtcactccaggtttatggagggttcttctactattaggacttttcgctttgaagcgaaggcttctcaaatcatgaaaattattaatattactgctgttagagaaatgaatga

SEQ ID NO: 56195 - DNA, 120 bp, Homo sapiens
  misc_feature: 1478 for SV(W|O) and mtDNA
tatttttagttgggtgatgaggaatagtgtaaggagtatgggggtaattatggtgggccatacggtagtatttagttggggcatttcactgtaaagaggtgttggttctcttaatcttta

SEQ ID NO: 56196 - DNA, 120 bp, Homo sapiens
  misc_feature: 1478 for SV(W|O) and mtDNA
taggctcattcatttctctaacagcagtaatattaataattttcatgatttgagaagccttcgcttcaaagcgaaaagtcctaatagtagaagaaccctccataaacctggagtgactat

SEQ ID NO: 56197 - DNA, 120 bp, Homo sapiens
  misc_feature: 1478 for SV(W|O) and mtDNA
taatatttttagttgggtgatgaggaatagtgtaaggagtatgggggtaattatggtgggccatacggtagtatttagttggggcatttcactgtaaagaggtgttggttctcttaatct

SEQ ID NO: 56198 - DNA, 120 bp, Homo sapiens
  misc_feature: 1478 for SV(W|O) and mtDNA
atcgctgtcgccttaatccaagcctacgttttcacacttctagtaagcctctacctgcacgacaacacataatgacccaccaatcacatgcctatcatatagtaaaacccagcccatgac

SEQ ID NO: 56199 - DNA, 120 bp, Homo sapiens
  misc_feature: 1478 for SV(W|O) and mtDNA
gtaatacccatcataatcggaggctttggcaactgactagttcccctaataatcggtgcccccgatatggcgtttccccgcataaacaacataagcttctgactcttacctccctctctc

SEQ ID NO: 56200 - DNA, 120 bp, Homo sapiens
  misc_feature: 1478 for SV(W|O) and mtDNA
acatggtaagtgtactggaaagtgcacttggacgaaccagagtgtagcttaacacaaagcacccaacttacacttaggagatttcaacttaacttgaccgctctgagctaaacctagccc

SEQ ID NO: 56201 - DNA, 120 bp, Homo sapiens
  misc_feature: 1478 for SV(W|O) and mtDNA
atgcctagaaggaataatactatcgctgttcattatagctactctcataaccctcaacacccactccctcttagccaatattgtgcctattgccatactagtctttgccgcctgcgaagc

SEQ ID NO: 56202 - DNA, 120 bp, Homo sapiens
  misc_feature: 1478 for SV(W|O) and mtDNA
acatcattaccgggttttcctcttgtaaatatagtttaaccaaaacatcagattgtgaatctgacaacagaggcttacgaccccttatttaccgagaaagctcacaagaactgctaactc

SEQ ID NO: 56203 - DNA, 120 bp, Homo sapiens
  misc_feature: 1478 for SV(W|O) and mtDNA
agagtaataaacttcgccttaattttaataatcaacaccctcctagccttactactaataattattacattttgactaccacaactcaacggctacatagaaaaatccaccccttacgag

SEQ ID NO: 56204 - DNA, 120 bp, Homo sapiens
  misc_feature: 1478 for SV(W|O) and mtDNA
ctaaccaacacactaaccatataccaatgatggcgcgatgtaacacgagaaagcacataccaaggccaccacacaccacctgtccaaaaaggccttcgatacgggataatcctatttatt

SEQ ID NO: 56205 - DNA, 120 bp, Homo sapiens
  misc_feature: 1478 for SV(W|O) and mtDNA
atgcgtagggatgggagggcgatgaggactaggatgatggcgggcaggatagttcagacggtttctatttcctgagcgtctgagatgttagtattagttagttttgttgtgagtgttagg

SEQ ID NO: 56206 - DNA, 120 bp, Homo sapiens
  misc_feature: 1478 for SV(W|O) and mtDNA
caccggcgtcaaagtatttagctgactcgccacactccacggaagcaatatgaaatgatctgctgcagtgctctgagccctaggattcatctttcttttcaccgtaggtggcctgactgg

SEQ ID NO: 56207 - DNA, 120 bp, Homo sapiens
  misc_feature: 1478 for SV(W|O) and mtDNA
ccaacgccacttatccagtgaaccactatcacgaaaaaaactctacctctctatactaatctccctacaaatctccttaattataacattcacagccacagaactaatcatattttatat

SEQ ID NO: 56208 - DNA, 120 bp, Homo sapiens
  misc_feature: 1478 for SV(W|O) and mtDNA
catcaggagtatcaatcacctgagctcaccatagtctaatagaaaacaaccgaaaccaaataattcaagcactgcttattacaattttactgggtctctattttaccctcctacaagcct

SEQ ID NO: 56209 - DNA, 120 bp, Homo sapiens
  misc_feature: 1478 for SV(W|O) and mtDNA
cagtctaatcctttttgtagtcactcataggccagacttagggctaggatgatgattaataagagggatgacataactattagtggcaggttagttgtttgtagggctcatggtaggggt

SEQ ID NO: 56210 - DNA, 120 bp, Homo sapiens
  misc_feature: 1478 for SV(W|O) and mtDNA
agtttaagttgagtagtaggaatgcggtagtagttaggataatataaatagttaaattaagaatggttatgttagggttgtacggtagaactgctattattcatcctatgtgggtaattg

SEQ ID NO: 56211 - DNA, 120 bp, Homo sapiens
  misc_feature: 1478 for SV(W|O) and mtDNA
atgatgtcggggttgagggataggaggagaatgggggataggtgtatgaacatgagggtgttttctcgtgtgaatgagggttttatgttgttaatgtggtgggtgagtgagccccattgt

SEQ ID NO: 56212 - DNA, 120 bp, Homo sapiens
  misc_feature: 1477 for SV(W|O) and mtDNA
aggaggagaccccattctataccaacacctattctgatttttcggtcaccctgaagtttatattcttatcctaccaggcttcggaataatctcccatattgtaacttactactccggaaa

SEQ ID NO: 56213 - DNA, 120 bp, Homo sapiens
  misc_feature: 1477 for SV(W|O) and mtDNA
ttggaccaatctatcaccctatagaagaactaatgttagtataagtaacatgaaaacattctcctccgcataagcctgcgtcagattaaaacactgaactgacaattaacagcccaatat

SEQ ID NO: 56214 - DNA, 120 bp, Homo sapiens
  misc_feature: 1477 for SV(W|O) and mtDNA
gaaaccaaataattcaagcactgcttattacaattttactgggtctctattttaccctcctacaagcctcagagtacttcgagtctcccttcaccatttccgacggcatctacggctcaa

SEQ ID NO: 56215 - DNA, 120 bp, Homo sapiens
  misc_feature: 1477 for SV(W|O) and mtDNA
tgtacttgcttgtaagcatggggagggggttttgatgtggattgggtttttatgtactacaggtggtcaagtatttatggtaccgtacaatattcatggtggctggcagtaatgtacgaa

SEQ ID NO: 56216 - DNA, 120 bp, Homo sapiens
  misc_feature: 1477 for SV(W|O) and mtDNA
ggttgagggataggaggagaatgggggataggtgtatgaacatgagggtgttttctcgtgtgaatgagggttttatgttgttaatgtggtgggtgagtgagccccattgtgttgtggtaa

SEQ ID NO: 56217 - DNA, 120 bp, Homo sapiens
  misc_feature: 1477 for SV(W|O) and mtDNA
ttaaattttttactctctctacaaggttttttcctagtgtccaaagagctgttcctctttggactaacagttaaatttacaaggggatttagagggttctgtgggcaaatttaaagttga

SEQ ID NO: 56218 - DNA, 120 bp, Homo sapiens
  misc_feature: 1477 for SV(W|O) and mtDNA
tgctcgccagaacactacgagccacagcttaaaactcaaaggacctggcggtgcttcatatccctctagaggagcctgttctgtaatcgataaaccccgatcaacctcaccacctcttgc

SEQ ID NO: 56219 - DNA, 120 bp, Homo sapiens
  misc_feature: 1477 for SV(W|O) and mtDNA
tgcgtagggatgggagggcgatgaggactaggatgatggcgggcaggatagttcagacggtttctatttcctgagcgtctgagatgttagtattagttagttttgttgtgagtgttagga

SEQ ID NO: 56220 - DNA, 120 bp, Homo sapiens
  misc_feature: 1477 for SV(W|O) and mtDNA
ggtagcttactggttgtcctccgattcaggttagaatgaggaggtctgcggctaggagtcaataaagtgattggcttagtgggcgaaatattatgctttgttgtttggatatatggagga

SEQ ID NO: 56221 - DNA, 120 bp, Homo sapiens
  misc_feature: 1477 for SV(W|O) and mtDNA
tcctcaattacccacataggatgaataatagcagttctaccgtacaaccctaacataaccattcttaatttaactatttatattatcctaactactaccgcattcctactactcaactta

SEQ ID NO: 56222 - DNA, 120 bp, Homo sapiens
  misc_feature: 1477 for SV(W|O) and mtDNA
gtgattggcttagtgggcgaaatattatgctttgttgtttggatatatggaggatggggattattgctaggatgaggatggatagtaatagggcaaggacgcctcctagtttgttaggga

SEQ ID NO: 56223 - DNA, 120 bp, Homo sapiens
  misc_feature: 1477 for SV(W|O) and mtDNA
tcagtaccattggtggccaattgatttgatggtaagggagggatcgttgacctcgtctgttatgtaaaggatgcgtagggatgggagggcgatgaggactaggatgatggcgggcaggat

SEQ ID NO: 56224 - DNA, 120 bp, Homo sapiens
  misc_feature: 1477 for SV(W|O) and mtDNA
tactggttgtcctccgattcaggttagaatgaggaggtctgcggctaggagtcaataaagtgattggcttagtgggcgaaatattatgctttgttgtttggatatatggaggatggggat

SEQ ID NO: 56225 - DNA, 120 bp, Homo sapiens
  misc_feature: 1477 for SV(W|O) and mtDNA
ctggttgtcctccgattcaggttagaatgaggaggtctgcggctaggagtcaataaagtgattggcttagtgggcgaaatattatgctttgttgtttggatatatggaggatggggatta

SEQ ID NO: 56226 - DNA, 120 bp, Homo sapiens
  misc_feature: 1477 for SV(W|O) and mtDNA
gactcacccatcaacaaccgctatgtatttcgtacattactgccagccaccatgaatattgtacggtaccataaatacttgaccacctgtagtacataaaaacccaatccacatcaaaac

SEQ ID NO: 56227 - DNA, 120 bp, Homo sapiens
  misc_feature: 1477 for SV(W|O) and mtDNA
gtggttgtgttgattcaaattatgtgttttttggaaagtcatgtcagtggtagtaatataattgttgggacgattagttttagcattggagtaggtttaggttatgtacgtagtctaggc

SEQ ID NO: 56228 - DNA, 120 bp, Homo sapiens
  misc_feature: 1477 for SV(W|O) and mtDNA
ctctaagcctccttattcgagccgagctgggccagccaggcaaccttctaggtaacgaccacatctacaacgttatcgtcacagcccatgcatttgtaataatcttcttcatagtaatac

SEQ ID NO: 56229 - DNA, 120 bp, Homo sapiens
  misc_feature: 1477 for SV(W|O) and mtDNA
gtagccttctccacttcaagtcaactaggactcataatagttacaatcggcatcaaccaaccacacctagcattcctgcacatctgcacccacgccttcttcaaagccatactatttatg

SEQ ID NO: 56230 - DNA, 120 bp, Homo sapiens
  misc_feature: 1477 for SV(W|O) and mtDNA
ggagtttaagttgagtagtaggaatgcggtagtagttaggataatataaatagttaaattaagaatggttatgttagggttgtacggtagaactgctattattcatcctatgtgggtaat

SEQ ID NO: 56231 - DNA, 120 bp, Homo sapiens
  misc_feature: 1477 for SV(W|O) and mtDNA
ggagccattcatacaggtccctatttaaggaacaagtgattatgctacctttgcacggttagggtaccgcggccgttaaacatgtgtcactgggcaggcggtgcctctaatactggtgat

SEQ ID NO: 56232 - DNA, 120 bp, Homo sapiens
  misc_feature: 1477 for SV(W|O) and mtDNA
caagcaagtacagcaatcaaccctcaactatcacacatcaactgcaactccaaagccacccctcacccactaggataccaacaaacctacccacccttaacagtacatagtacataaagc

SEQ ID NO: 56233 - DNA, 120 bp, Homo sapiens
  misc_feature: 1477 for SV(W|O) and mtDNA
gccttctccacttcaagtcaactaggactcataatagttacaatcggcatcaaccaaccacacctagcattcctgcacatctgcacccacgccttcttcaaagccatactatttatgtgc

SEQ ID NO: 56234 - DNA, 120 bp, Homo sapiens
  misc_feature: 1477 for SV(W|O) and mtDNA
gattaccgggctctgccatcttaacaaaccctgttcttgggtgggtgtgggtataatactaagttgagatgatatcatttacgggggaaggcgctttgtgaagtaggccttatttctctt

SEQ ID NO: 56235 - DNA, 120 bp, Homo sapiens
  misc_feature: 1477 for SV(W|O) and mtDNA
agcctccttattcgagccgagctgggccagccaggcaaccttctaggtaacgaccacatctacaacgttatcgtcacagcccatgcatttgtaataatcttcttcatagtaatacccatc

SEQ ID NO: 56236 - DNA, 120 bp, Homo sapiens
  misc_feature: 1477 for SV(W|O) and mtDNA
ctgcaggccacctactcatgcacctaattggaagcgccaccctagcaatatcaaccattaaccttccctctacacttatcatcttcacaattctaattctactgactatcctagaaatcg

SEQ ID NO: 56237 - DNA, 120 bp, Homo sapiens
  misc_feature: 1477 for SV(W|O) and mtDNA
ctcggaggttgggttctgctccgaggtcgccccaaccgaaatttttaatgcaggtttggtagtttaggacctgtgggtttgttaggtactgtttgcattaataaattaaagctccatagg

SEQ ID NO: 56238 - DNA, 120 bp, Homo sapiens
  misc_feature: 1477 for SV(W|O) and mtDNA
cgcccttaccacgctactcctacctatctccccttttatactaataatcttatagaaatttaggttaaatacagaccaagagccttcaaagccctcagtaagttgcaatacttaatttct

SEQ ID NO: 56239 - DNA, 120 bp, Homo sapiens
  misc_feature: 1477 for SV(W|O) and mtDNA
cccacgggcttacatcctcattactattctgcctagcaaactcaaactacgaacgcactcacagtcgcatcataatcctctctcaaggacttcaaactctactcccactaatagcttttt

SEQ ID NO: 56240 - DNA, 120 bp, Homo sapiens
  misc_feature: 1477 for SV(W|O) and mtDNA
agtaacgtcggggcattccggataggccgagaaagtgttgtgggaagaaagttagatttacgccgatgaatatgatagtgaaatggattttggcgtaggtttggtctagggtgtagcctg

SEQ ID NO: 56241 - DNA, 120 bp, Homo sapiens
  misc_feature: 1477 for SV(W|O) and mtDNA
caataaagtgattggcttagtgggcgaaatattatgctttgttgtttggatatatggaggatggggattattgctaggatgaggatggatagtaatagggcaaggacgcctcctagtttg

SEQ ID NO: 56242 - DNA, 120 bp, Homo sapiens
  misc_feature: 1477 for SV(W|O) and mtDNA
actcatgcacctaattggaagcgccaccctagcaatatcaaccattaaccttccctctacacttatcatcttcacaattctaattctactgactatcctagaaatcgctgtcgccttaat

SEQ ID NO: 56243 - DNA, 120 bp, Homo sapiens
  misc_feature: 1477 for SV(W|O) and mtDNA
atatccttcttgctcatcagttgatgatacgcccgagcagatgccaacacagcagccattcaagcaatcctatacaaccgtatcggcgatatcggtttcatcctcgccttagcatgattt

SEQ ID NO: 56244 - DNA, 120 bp, Homo sapiens
  misc_feature: 1476 for SV(W|O) and mtDNA
ttgaacgtaggtgcgataaataatgggatgaggcaggaatcaaagacagatactgcgacatagggtgctccggctccagcgtctcgcaatgctatcgcgtgcataccccccagacgaaaa

SEQ ID NO: 56245 - DNA, 120 bp, Homo sapiens
  misc_feature: 1476 for SV(W|O) and mtDNA
tgctaggctgccaatggtgagggaggttgaagtgagaggtatggttttgagtagtcctcctatttttcgaatatcttgttcattgttaaggttgtggatgatggacccggagcacataaa

SEQ ID NO: 56246 - DNA, 120 bp, Homo sapiens
  misc_feature: 1476 for SV(W|O) and mtDNA
ttgttggttgattgtagatattgggctgttaattgtcagttcagtgttttaatctgacgcaggcttatgcggaggagaatgttttcatgttacttatactaacattagttcttctatagg

SEQ ID NO: 56247 - DNA, 120 bp, Homo sapiens
  misc_feature: 1476 for SV(W|O) and mtDNA
tgatgtgtgatagttgagggttgattgctgtacttgcttgtaagcatggggagggggttttgatgtggattgggtttttatgtactacaggtggtcaagtatttatggtaccgtacaata

SEQ ID NO: 56248 - DNA, 120 bp, Homo sapiens
  misc_feature: 1476 for SV(W|O) and mtDNA
tctagggtgtagcctgagaataggggaaatcagtgaatgaagcctcctatgatggcaaatacagctcctattgataggacatagtggaagtgggctacaacgtagtacgtgtcgtgtagt

SEQ ID NO: 56249 - DNA, 120 bp, Homo sapiens
  misc_feature: 1476 for SV(W|O) and mtDNA
caaagactagtatggcaataggcacaatattggctaagagggagtgggtgttgagggttatgagagtagctataatgaacagcgatagtattattccttctaggcatagtagggaggata

SEQ ID NO: 56250 - DNA, 120 bp, Homo sapiens
  misc_feature: 1476 for SV(W|O) and mtDNA
cctagaaggttgcctggctggcccagctcggctcgaataaggaggcttagagctgtgcctaggactccagctcatgcgccgaataataggtatagtgttccaatgtctttgtggtttgta

SEQ ID NO: 56251 - DNA, 120 bp, Homo sapiens
  misc_feature: 1476 for SV(W|O) and mtDNA
taacatggtaagtgtactggaaagtgcacttggacgaaccagagtgtagcttaacacaaagcacccaacttacacttaggagatttcaacttaacttgaccgctctgagctaaacctagc

SEQ ID NO: 56252 - DNA, 120 bp, Homo sapiens
  misc_feature: 1476 for SV(W|O) and mtDNA
gtctagggtgtagcctgagaataggggaaatcagtgaatgaagcctcctatgatggcaaatacagctcctattgataggacatagtggaagtgggctacaacgtagtacgtgtcgtgtag

SEQ ID NO: 56253 - DNA, 120 bp, Homo sapiens
  misc_feature: 1476 for SV(W|O) and mtDNA
gcgcaatcctattctagagtccatatcaacaatagggtttacgacctcgatgttggatcaggacatcccgatggtgcagccgctattaaaggttcgtttgttcaacgattaaagtcctac

SEQ ID NO: 56254 - DNA, 120 bp, Homo sapiens
  misc_feature: 1476 for SV(W|O) and mtDNA
ggtttggatgagaatggctgttactacgagggctatgtggctgattgaagagtatgcaatgagcgattttaggtctgtttgtcgtaggcagatggagcttgttataattatgcctcatag

SEQ ID NO: 56255 - DNA, 120 bp, Homo sapiens
  misc_feature: 1476 for SV(W|O) and mtDNA
cgaaggtggatttagcagtaaactgagagtagagtgcttagttgaacagggccctgaagcgcgtacacaccgcccgtcaccctcctcaagtatacttcaaaggacatttaactaaaaccc

SEQ ID NO: 56256 - DNA, 120 bp, Homo sapiens
  misc_feature: 1476 for SV(W|O) and mtDNA
ctagactacgtacataacctaaacctactccaatgctaaaactaatcgtcccaacaattatattactaccactgacatgactttccaaaaaacacataatttgaatcaacacaaccaccc

SEQ ID NO: 56257 - DNA, 120 bp, Homo sapiens
  misc_feature: 1476 for SV(W|O) and mtDNA
gggcaccgattattaggggaactagtcagttgccaaagcctccgattatgatgggtattactatgaagaagattattacaaatgcatgggctgtgacgataacgttgtagatgtggtcgt

SEQ ID NO: 56258 - DNA, 120 bp, Homo sapiens
  misc_feature: 1476 for SV(W|O) and mtDNA
ctaacattactgcaggccacctactcatgcacctaattggaagcgccaccctagcaatatcaaccattaaccttccctctacacttatcatcttcacaattctaattctactgactatcc

SEQ ID NO: 56259 - DNA, 120 bp, Homo sapiens
  misc_feature: 1476 for SV(W|O) and mtDNA
ccttctcctcactctctcaatcttatccatcatagcaggcagttgaggtggattaaaccaaacccagctacgcaaaatcttagcatactcctcaattacccacataggatgaataatagc

SEQ ID NO: 56260 - DNA, 120 bp, Homo sapiens
  misc_feature: 1476 for SV(W|O) and mtDNA
gcaagtacagcaatcaaccctcaactatcacacatcaactgcaactccaaagccacccctcacccactaggataccaacaaacctacccacccttaacagtacatagtacataaagccat

SEQ ID NO: 56261 - DNA, 120 bp, Homo sapiens
  misc_feature: 1476 for SV(W|O) and mtDNA
acatcatcgaaaccgcaaacatatcatacacaaacgcctgagccctatctattactctcatcgctacctccctgacaagcgcctatagcactcgaataattcttctcaccctaacaggtc

SEQ ID NO: 56262 - DNA, 120 bp, Homo sapiens
  misc_feature: 1476 for SV(W|O) and mtDNA
gaaacgccatatcgggggcaccgattattaggggaactagtcagttgccaaagcctccgattatgatgggtattactatgaagaagattattacaaatgcatgggctgtgacgataacgt

SEQ ID NO: 56263 - DNA, 120 bp, Homo sapiens
  misc_feature: 1476 for SV(W|O) and mtDNA
ctgggcaggcggtgcctctaatactggtgatgctagaggtgatgtttttggtaaacaggcggggtaagatttgccgagttccttttactttttttaacctttccttatgagcatgcctgt

SEQ ID NO: 56264 - DNA, 120 bp, Homo sapiens
  misc_feature: 1476 for SV(W|O) and mtDNA
acaaatctccttaattataacattcacagccacagaactaatcatattttatatcttcttcgaaaccacacttatccccaccttggctatcatcacccgatgaggcaaccagccagaacg

SEQ ID NO: 56265 - DNA, 120 bp, Homo sapiens
  misc_feature: 1476 for SV(W|O) and mtDNA
ccggaggaggagaccccattctataccaacacctattctgatttttcggtcaccctgaagtttatattcttatcctaccaggcttcggaataatctcccatattgtaacttactactccg

SEQ ID NO: 56266 - DNA, 120 bp, Homo sapiens
  misc_feature: 1476 for SV(W|O) and mtDNA
agtaagtatgttcgcctgtaatattgaacgtaggtgcgataaataatgggatgaggcaggaatcaaagacagatactgcgacatagggtgctccggctccagcgtctcgcaatgctatcg

SEQ ID NO: 56267 - DNA, 120 bp, Homo sapiens
  misc_feature: 1476 for SV(W|O) and mtDNA
cctactatgcctagaaggaataatactatcgctgttcattatagctactctcataaccctcaacacccactccctcttagccaatattgtgcctattgccatactagtctttgccgcctg

SEQ ID NO: 56268 - DNA, 120 bp, Homo sapiens
  misc_feature: 1476 for SV(W|O) and mtDNA
caatattctttatctgcctcttcctacacatcgggcgaggcctatattacggatcatttctctactcagaaacctgaaacatcggcattatcctcctgcttgcaactatagcaacagcct

SEQ ID NO: 56269 - DNA, 120 bp, Homo sapiens
  misc_feature: 1476 for SV(W|O) and mtDNA
attggaagcgccaccctagcaatatcaaccattaaccttccctctacacttatcatcttcacaattctaattctactgactatcctagaaatcgctgtcgccttaatccaagcctacgtt

SEQ ID NO: 56270 - DNA, 120 bp, Homo sapiens
  misc_feature: 1476 for SV(W|O) and mtDNA
aagcctccttattcgagccgagctgggccagccaggcaaccttctaggtaacgaccacatctacaacgttatcgtcacagcccatgcatttgtaataatcttcttcatagtaatacccat

SEQ ID NO: 56271 - DNA, 120 bp, Homo sapiens
  misc_feature: 1476 for SV(W|O) and mtDNA
accgatatcgccgatacggttgtataggattgcttgaatggctgctgtgttggcatctgctcgggcgtatcatcaactgatgagcaagaaggatataattcctacgccctctcagccgat

SEQ ID NO: 56272 - DNA, 120 bp, Homo sapiens
  misc_feature: 1476 for SV(W|O) and mtDNA
agttccttttactttttttaacctttccttatgagcatgcctgtgttgggttgacagtgagggtaataatgacttgttggttgattgtagatattgggctgttaattgtcagttcagtgt

SEQ ID NO: 56273 - DNA, 120 bp, Homo sapiens
  misc_feature: 1476 for SV(W|O) and mtDNA
agccgtttactcaatcctctgatcagggtgagcatcaaactcaaactacgccctgatcggcgcactgcgagcagtagcccaaacaatctcatatgaagtcaccctagccatcattctact

SEQ ID NO: 56274 - DNA, 120 bp, Homo sapiens
  misc_feature: 1476 for SV(W|O) and mtDNA
aatgatatttggcctcacgggaggacatagcctatgaaggctgttgctatagttgcaagcaggaggataatgccgatgtttcaggtttctgagtagagaaatgatccgtaatataggcct

SEQ ID NO: 56275 - DNA, 120 bp, Homo sapiens
  misc_feature: 1476 for SV(W|O) and mtDNA
aacgccacttatccagtgaaccactatcacgaaaaaaactctacctctctatactaatctccctacaaatctccttaattataacattcacagccacagaactaatcatattttatatct

SEQ ID NO: 56276 - DNA, 120 bp, Homo sapiens
  misc_feature: 1476 for SV(W|O) and mtDNA
actggttgtcctccgattcaggttagaatgaggaggtctgcggctaggagtcaataaagtgattggcttagtgggcgaaatattatgctttgttgtttggatatatggaggatggggatt

SEQ ID NO: 56277 - DNA, 120 bp, Homo sapiens
  misc_feature: 1476 for SV(W|O) and mtDNA
aatggtgagggaggttgaagtgagaggtatggttttgagtagtcctcctatttttcgaatatcttgttcattgttaaggttgtggatgatggacccggagcacataaatagtatggcttt

SEQ ID NO: 56278 - DNA, 120 bp, Homo sapiens
  misc_feature: 1475 for SV(W|O) and mtDNA
ggaggagaccccattctataccaacacctattctgatttttcggtcaccctgaagtttatattcttatcctaccaggcttcggaataatctcccatattgtaacttactactccggaaaa

SEQ ID NO: 56279 - DNA, 120 bp, Homo sapiens
  misc_feature: 1475 for SV(W|O) and mtDNA
tttgttttgaggttagtttgattagtcattgttgggtggtgattagtcggttgttgatgagatatttggaggtggggatcaatagagggggaaatagaatgatcagtactgcggcgggta

SEQ ID NO: 56280 - DNA, 120 bp, Homo sapiens
  misc_feature: 1475 for SV(W|O) and mtDNA
ctcaattacccacataggatgaataatagcagttctaccgtacaaccctaacataaccattcttaatttaactatttatattatcctaactactaccgcattcctactactcaacttaaa

SEQ ID NO: 56281 - DNA, 120 bp, Homo sapiens
  misc_feature: 1475 for SV(W|O) and mtDNA
ttgcctggctggcccagctcggctcgaataaggaggcttagagctgtgcctaggactccagctcatgcgccgaataataggtatagtgttccaatgtctttgtggtttgtagagaatagt

SEQ ID NO: 56282 - DNA, 120 bp, Homo sapiens
  misc_feature: 1475 for SV(W|O) and mtDNA
caattaagaaagcgttcaagctcaacacccactacctaaaaaatcccaaacatataactgaactcctcatacccaattggaccaatctatcaccctatagaagaactaatgttagtataa

SEQ ID NO: 56283 - DNA, 120 bp, Homo sapiens
  misc_feature: 1475 for SV(W|O) and mtDNA
gacctgtgggtttgttaggtactgtttgcattaataaattaaagctccatagggtcttctcgtcttgctgtgttatgcccgcctcttcacgggcaggtcaatttcactggttaaaagtaa

SEQ ID NO: 56284 - DNA, 120 bp, Homo sapiens
  misc_feature: 1475 for SV(W|O) and mtDNA
accatactaatcttagttaccgctaacaacctattccaactgttcatcggctgagagggcgtaggaattatatccttcttgctcatcagttgatgatacgcccgagcagatgccaacaca

SEQ ID NO: 56285 - DNA, 120 bp, Homo sapiens
  misc_feature: 1475 for SV(W|O) and mtDNA
ggttgtgttgattcaaattatgtgttttttggaaagtcatgtcagtggtagtaatataattgttgggacgattagttttagcattggagtaggtttaggttatgtacgtagtctaggcca

SEQ ID NO: 56286 - DNA, 120 bp, Homo sapiens
  misc_feature: 1475 for SV(W|O) and mtDNA
tgccaatggtgagggaggttgaagtgagaggtatggttttgagtagtcctcctatttttcgaatatcttgttcattgttaaggttgtggatgatggacccggagcacataaatagtatgg

SEQ ID NO: 56287 - DNA, 120 bp, Homo sapiens
  misc_feature: 1475 for SV(W|O) and mtDNA
tcagggggtttggatgagaatggctgttactacgagggctatgtggctgattgaagagtatgcaatgagcgattttaggtctgtttgtcgtaggcagatggagcttgttataattatgcc

SEQ ID NO: 56288 - DNA, 120 bp, Homo sapiens
  misc_feature: 1475 for SV(W|O) and mtDNA
atcaactgatgagcaagaaggatataattcctacgccctctcagccgatgaacagttggaataggttgttagcggtaactaagattagtatggtaattaggaagatgagtagatatttga

SEQ ID NO: 56289 - DNA, 120 bp, Homo sapiens
  misc_feature: 1475 for SV(W|O) and mtDNA
aaaggtattagaaaaaccatttcataactttgtcaaagttaaattataggctaaatcctatatatcttaatggcacatgcagcgcaagtaggtctacaagacgctacttcccctatcata

SEQ ID NO: 56290 - DNA, 120 bp, Homo sapiens
  misc_feature: 1475 for SV(W|O) and mtDNA
tatatccttcttgctcatcagttgatgatacgcccgagcagatgccaacacagcagccattcaagcaatcctatacaaccgtatcggcgatatcggtttcatcctcgccttagcatgatt

SEQ ID NO: 56291 - DNA, 120 bp, Homo sapiens
  misc_feature: 1475 for SV(W|O) and mtDNA
taacgtcggggcattccggataggccgagaaagtgttgtgggaagaaagttagatttacgccgatgaatatgatagtgaaatggattttggcgtaggtttggtctagggtgtagcctgag

SEQ ID NO: 56292 - DNA, 120 bp, Homo sapiens
  misc_feature: 1475 for SV(W|O) and mtDNA
ctggctggcccagctcggctcgaataaggaggcttagagctgtgcctaggactccagctcatgcgccgaataataggtatagtgttccaatgtctttgtggtttgtagagaatagtcaac

SEQ ID NO: 56293 - DNA, 120 bp, Homo sapiens
  misc_feature: 1475 for SV(W|O) and mtDNA
gtggagccattcatacaggtccctatttaaggaacaagtgattatgctacctttgcacggttagggtaccgcggccgttaaacatgtgtcactgggcaggcggtgcctctaatactggtg

SEQ ID NO: 56294 - DNA, 120 bp, Homo sapiens
  misc_feature: 1475 for SV(W|O) and mtDNA
ctatccccaccggcgtcaaagtatttagctgactcgccacactccacggaagcaatatgaaatgatctgctgcagtgctctgagccctaggattcatctttcttttcaccgtaggtggcc

SEQ ID NO: 56295 - DNA, 120 bp, Homo sapiens
  misc_feature: 1475 for SV(W|O) and mtDNA
cactatagcagatgcgagcaggagtaggagagagggaggtaagagtcagaagcttatgttgtttatgcggggaaacgccatatcgggggcaccgattattaggggaactagtcagttgcc

SEQ ID NO: 56296 - DNA, 120 bp, Homo sapiens
  misc_feature: 1475 for SV(W|O) and mtDNA
gctgccaatggtgagggaggttgaagtgagaggtatggttttgagtagtcctcctatttttcgaatatcttgttcattgttaaggttgtggatgatggacccggagcacataaatagtat

SEQ ID NO: 56297 - DNA, 120 bp, Homo sapiens
  misc_feature: 1475 for SV(W|O) and mtDNA
gataatataaatagttaaattaagaatggttatgttagggttgtacggtagaactgctattattcatcctatgtgggtaattgaggagtatgctaagattttgcgtagctgggtttggtt

SEQ ID NO: 56298 - DNA, 120 bp, Homo sapiens
  misc_feature: 1475 for SV(W|O) and mtDNA
accattggtggccaattgatttgatggtaagggagggatcgttgacctcgtctgttatgtaaaggatgcgtagggatgggagggcgatgaggactaggatgatggcgggcaggatagttc

SEQ ID NO: 56299 - DNA, 120 bp, Homo sapiens
  misc_feature: 1475 for SV(W|O) and mtDNA
atataccaatgatggcgcgatgtaacacgagaaagcacataccaaggccaccacacaccacctgtccaaaaaggccttcgatacgggataatcctatttattacctcagaagtttttttc

SEQ ID NO: 56300 - DNA, 120 bp, Homo sapiens
  misc_feature: 1475 for SV(W|O) and mtDNA
ctgtgggtttgttaggtactgtttgcattaataaattaaagctccatagggtcttctcgtcttgctgtgttatgcccgcctcttcacgggcaggtcaatttcactggttaaaagtaagag

SEQ ID NO: 56301 - DNA, 120 bp, Homo sapiens
  misc_feature: 1475 for SV(W|O) and mtDNA
actaaccaacacactaaccatataccaatgatggcgcgatgtaacacgagaaagcacataccaaggccaccacacaccacctgtccaaaaaggccttcgatacgggataatcctatttat

SEQ ID NO: 56302 - DNA, 120 bp, Homo sapiens
  misc_feature: 1475 for SV(W|O) and mtDNA
agctcaccatagtctaatagaaaacaaccgaaaccaaataattcaagcactgcttattacaattttactgggtctctattttaccctcctacaagcctcagagtacttcgagtctccctt

SEQ ID NO: 56303 - DNA, 120 bp, Homo sapiens
  misc_feature: 1475 for SV(W|O) and mtDNA
aatatttttagttgggtgatgaggaatagtgtaaggagtatgggggtaattatggtgggccatacggtagtatttagttggggcatttcactgtaaagaggtgttggttctcttaatctt

SEQ ID NO: 56304 - DNA, 120 bp, Homo sapiens
  misc_feature: 1474 for SV(W|O) and mtDNA
gatatcgccgatacggttgtataggattgcttgaatggctgctgtgttggcatctgctcgggcgtatcatcaactgatgagcaagaaggatataattcctacgccctctcagccgatgaa

SEQ ID NO: 56305 - DNA, 120 bp, Homo sapiens
  misc_feature: 1474 for SV(W|O) and mtDNA
ttaccatactaatcttagttaccgctaacaacctattccaactgttcatcggctgagagggcgtaggaattatatccttcttgctcatcagttgatgatacgcccgagcagatgccaaca

SEQ ID NO: 56306 - DNA, 120 bp, Homo sapiens
  misc_feature: 1474 for SV(W|O) and mtDNA
tagccctaaacctcaacagttaaatcaacaaaactgctcgccagaacactacgagccacagcttaaaactcaaaggacctggcggtgcttcatatccctctagaggagcctgttctgtaa

SEQ ID NO: 56307 - DNA, 120 bp, Homo sapiens
  misc_feature: 1474 for SV(W|O) and mtDNA
tgttgtgggaagaaagttagatttacgccgatgaatatgatagtgaaatggattttggcgtaggtttggtctagggtgtagcctgagaataggggaaatcagtgaatgaagcctcctatg

SEQ ID NO: 56308 - DNA, 120 bp, Homo sapiens
  misc_feature: 1474 for SV(W|O) and mtDNA
tggttgtcctccgattcaggttagaatgaggaggtctgcggctaggagtcaataaagtgattggcttagtgggcgaaatattatgctttgttgtttggatatatggaggatggggattat

SEQ ID NO: 56309 - DNA, 120 bp, Homo sapiens
  misc_feature: 1474 for SV(W|O) and mtDNA
atgtctaacaacatggctttctcaacttttaaaggataacagctatccattggtcttaggccccaaaaattttggtgcaactccaaataaaagtaataaccatgcacactactataacca

SEQ ID NO: 56310 - DNA, 120 bp, Homo sapiens
  misc_feature: 1474 for SV(W|O) and mtDNA
tgctggagtttaagttgagtagtaggaatgcggtagtagttaggataatataaatagttaaattaagaatggttatgttagggttgtacggtagaactgctattattcatcctatgtggg

SEQ ID NO: 56311 - DNA, 120 bp, Homo sapiens
  misc_feature: 1474 for SV(W|O) and mtDNA
cgatatcgccgatacggttgtataggattgcttgaatggctgctgtgttggcatctgctcgggcgtatcatcaactgatgagcaagaaggatataattcctacgccctctcagccgatga

SEQ ID NO: 56312 - DNA, 120 bp, Homo sapiens
  misc_feature: 1474 for SV(W|O) and mtDNA
aatgctaggctgccaatggtgagggaggttgaagtgagaggtatggttttgagtagtcctcctatttttcgaatatcttgttcattgttaaggttgtggatgatggacccggagcacata

SEQ ID NO: 56313 - DNA, 120 bp, Homo sapiens
  misc_feature: 1474 for SV(W|O) and mtDNA
aacctacgccaaaatccatttcactatcatattcatcggcgtaaatctaactttcttcccacaacactttctcggcctatccggaatgccccgacgttactcggactaccccgatgcata

SEQ ID NO: 56314 - DNA, 120 bp, Homo sapiens
  misc_feature: 1474 for SV(W|O) and mtDNA
tatattacggatcatttctctactcagaaacctgaaacatcggcattatcctcctgcttgcaactatagcaacagccttcataggctatgtcctcccgtgaggccaaatatcattctgag

SEQ ID NO: 56315 - DNA, 120 bp, Homo sapiens
  misc_feature: 1474 for SV(W|O) and mtDNA
cgcctaaccgctaacattactgcaggccacctactcatgcacctaattggaagcgccaccctagcaatatcaaccattaaccttccctctacacttatcatcttcacaattctaattcta

SEQ ID NO: 56316 - DNA, 120 bp, Homo sapiens
  misc_feature: 1474 for SV(W|O) and mtDNA
tactctgaggcttgtaggagggtaaaatagagacccagtaaaattgtaataagcagtgcttgaattatttggtttcggttgttttctattagactatggtgagctcaggtgattgatact

SEQ ID NO: 56317 - DNA, 120 bp, Homo sapiens
  misc_feature: 1474 for SV(W|O) and mtDNA
gttttgagtagtcctcctatttttcgaatatcttgttcattgttaaggttgtggatgatggacccggagcacataaatagtatggctttgaagaaggcgtgggtgcagatgtgcaggaat

SEQ ID NO: 56318 - DNA, 120 bp, Homo sapiens
  misc_feature: 1474 for SV(W|O) and mtDNA
attaccatactaatcttagttaccgctaacaacctattccaactgttcatcggctgagagggcgtaggaattatatccttcttgctcatcagttgatgatacgcccgagcagatgccaac

SEQ ID NO: 56319 - DNA, 120 bp, Homo sapiens
  misc_feature: 1474 for SV(W|O) and mtDNA
gtaccattggtggccaattgatttgatggtaagggagggatcgttgacctcgtctgttatgtaaaggatgcgtagggatgggagggcgatgaggactaggatgatggcgggcaggatagt

SEQ ID NO: 56320 - DNA, 120 bp, Homo sapiens
  misc_feature: 1474 for SV(W|O) and mtDNA
acattttctaccccagaaaactacgatagcccttatgaaacttaagggtcgaaggtggatttagcagtaaactgagagtagagtgcttagttgaacagggccctgaagcgcgtacacacc

SEQ ID NO: 56321 - DNA, 120 bp, Homo sapiens
  misc_feature: 1474 for SV(W|O) and mtDNA
atccaagcctacgttttcacacttctagtaagcctctacctgcacgacaacacataatgacccaccaatcacatgcctatcatatagtaaaacccagcccatgacccctaacaggggccc

SEQ ID NO: 56322 - DNA, 120 bp, Homo sapiens
  misc_feature: 1474 for SV(W|O) and mtDNA
ggctgagtgaagcattggactgtaaatctaaagacaggggttaggcctctttttaccagctccgaggtgattttcatattgaattgcaaattcgaagaagcagcttcaaacctgccgggg

SEQ ID NO: 56323 - DNA, 120 bp, Homo sapiens
  misc_feature: 1474 for SV(W|O) and mtDNA
cagagtgtagcttaacacaaagcacccaacttacacttaggagatttcaacttaacttgaccgctctgagctaaacctagccccaaacccactccaccttactaccagacaaccttagcc

SEQ ID NO: 56324 - DNA, 120 bp, Homo sapiens
  misc_feature: 1474 for SV(W|O) and mtDNA
ggaggttgaagtgagaggtatggttttgagtagtcctcctatttttcgaatatcttgttcattgttaaggttgtggatgatggacccggagcacataaatagtatggctttgaagaaggc

SEQ ID NO: 56325 - DNA, 120 bp, Homo sapiens
  misc_feature: 1474 for SV(W|O) and mtDNA
gctcgccagaacactacgagccacagcttaaaactcaaaggacctggcggtgcttcatatccctctagaggagcctgttctgtaatcgataaaccccgatcaacctcaccacctcttgct

SEQ ID NO: 56326 - DNA, 120 bp, Homo sapiens
  misc_feature: 1474 for SV(W|O) and mtDNA
gccaatggtgagggaggttgaagtgagaggtatggttttgagtagtcctcctatttttcgaatatcttgttcattgttaaggttgtggatgatggacccggagcacataaatagtatggc

SEQ ID NO: 56327 - DNA, 120 bp, Homo sapiens
  misc_feature: 1474 for SV(W|O) and mtDNA
gatgagaatggctgttactacgagggctatgtggctgattgaagagtatgcaatgagcgattttaggtctgtttgtcgtaggcagatggagcttgttataattatgcctcatagggatag

SEQ ID NO: 56328 - DNA, 120 bp, Homo sapiens
  misc_feature: 1474 for SV(W|O) and mtDNA
aatgacttgttggttgattgtagatattgggctgttaattgtcagttcagtgttttaatctgacgcaggcttatgcggaggagaatgttttcatgttacttatactaacattagttcttc

SEQ ID NO: 56329 - DNA, 120 bp, Homo sapiens
  misc_feature: 1474 for SV(W|O) and mtDNA
agcattgcgagacgctggagccggagcaccctatgtcgcagtatctgtctttgattcctgcctcatcccattatttatcgcacctacgttcaatattacaggcgaacatacttactaaag

SEQ ID NO: 56330 - DNA, 120 bp, Homo sapiens
  misc_feature: 1474 for SV(W|O) and mtDNA
cttagggctaggatgatgattaataagagggatgacataactattagtggcaggttagttgtttgtagggctcatggtaggggtaaaaggagggcaatttctagatcaaataataagaag

SEQ ID NO: 56331 - DNA, 120 bp, Homo sapiens
  misc_feature: 1474 for SV(W|O) and mtDNA
acatcgaggtcgtaaaccctattgttgatatggactctagaataggattgcgctgttatccctagggtaacttgttccgttggtcaagttattggatcaattgagtatagtagttcgctt

SEQ ID NO: 56332 - DNA, 120 bp, Homo sapiens
  misc_feature: 1473 for SV(W|O) and mtDNA
ttttatactaataatcttatagaaatttaggttaaatacagaccaagagccttcaaagccctcagtaagttgcaatacttaatttctgtaacagctaaggactgcaaaaccccactctgc

SEQ ID NO: 56333 - DNA, 120 bp, Homo sapiens
  misc_feature: 1473 for SV(W|O) and mtDNA
acgtcggggcattccggataggccgagaaagtgttgtgggaagaaagttagatttacgccgatgaatatgatagtgaaatggattttggcgtaggtttggtctagggtgtagcctgagaa

SEQ ID NO: 56334 - DNA, 120 bp, Homo sapiens
  misc_feature: 1473 for SV(W|O) and mtDNA
ttcagaataataacacacccgaccacaccgctaacaatcaatactaaacccccataaataggagaaggcttagaagaaaaccccacaaaccccattactaaacccacactcaacagaaac

SEQ ID NO: 56335 - DNA, 120 bp, Homo sapiens
  misc_feature: 1473 for SV(W|O) and mtDNA
aaacctcaacagttaaatcaacaaaactgctcgccagaacactacgagccacagcttaaaactcaaaggacctggcggtgcttcatatccctctagaggagcctgttctgtaatcgataa

SEQ ID NO: 56336 - DNA, 120 bp, Homo sapiens
  misc_feature: 1473 for SV(W|O) and mtDNA
ttaataatcaacaccctcctagccttactactaataattattacattttgactaccacaactcaacggctacatagaaaaatccaccccttacgagtgcggcttcgaccctatatccccc

SEQ ID NO: 56337 - DNA, 120 bp, Homo sapiens
  misc_feature: 1473 for SV(W|O) and mtDNA
tgtccttggaaaaaggttttcatctccggtttacaagactggtgtattagtttatactacaaggacaggcccatttgagtattttgttttcaattagggagatagttggtattaggatta

SEQ ID NO: 56338 - DNA, 120 bp, Homo sapiens
  misc_feature: 1473 for SV(W|O) and mtDNA
aaaagggcatacaggactaggaagcagataaggaaaatgattatgagggcgtgatcatgaaaggtgataagctcttctatgataggggaagtagcgtcttgtagacctacttgcgctgca

SEQ ID NO: 56339 - DNA, 120 bp, Homo sapiens
  misc_feature: 1473 for SV(W|O) and mtDNA
tcttcatagtaatacccatcataatcggaggctttggcaactgactagttcccctaataatcggtgcccccgatatggcgtttccccgcataaacaacataagcttctgactcttacctc

SEQ ID NO: 56340 - DNA, 120 bp, Homo sapiens
  misc_feature: 1473 for SV(W|O) and mtDNA
tcactcagccattttacctcacccccactgatgttcgccgaccgttgactattctctacaaaccacaaagacattggaacactatacctattattcggcgcatgagctggagtcctaggc

SEQ ID NO: 56341 - DNA, 120 bp, Homo sapiens
  misc_feature: 1473 for SV(W|O) and mtDNA
tatttggcctcacgggaggacatagcctatgaaggctgttgctatagttgcaagcaggaggataatgccgatgtttcaggtttctgagtagagaaatgatccgtaatataggcctcgccc

SEQ ID NO: 56342 - DNA, 120 bp, Homo sapiens
  misc_feature: 1473 for SV(W|O) and mtDNA
aaacaaccgaaaccaaataattcaagcactgcttattacaattttactgggtctctattttaccctcctacaagcctcagagtacttcgagtctcccttcaccatttccgacggcatcta

SEQ ID NO: 56343 - DNA, 120 bp, Homo sapiens
  misc_feature: 1473 for SV(W|O) and mtDNA
cggggtagtccgagtaacgtcggggcattccggataggccgagaaagtgttgtgggaagaaagttagatttacgccgatgaatatgatagtgaaatggattttggcgtaggtttggtcta

SEQ ID NO: 56344 - DNA, 120 bp, Homo sapiens
  misc_feature: 1473 for SV(W|O) and mtDNA
taccgggctctgccatcttaacaaaccctgttcttgggtgggtgtgggtataatactaagttgagatgatatcatttacgggggaaggcgctttgtgaagtaggccttatttctcttgtc

SEQ ID NO: 56345 - DNA, 120 bp, Homo sapiens
  misc_feature: 1473 for SV(W|O) and mtDNA
gttcgtcctttagtgttgtgtatggttatcatttgttttgaggttagtttgattagtcattgttgggtggtgattagtcggttgttgatgagatatttggaggtggggatcaatagaggg

SEQ ID NO: 56346 - DNA, 120 bp, Homo sapiens
  misc_feature: 1473 for SV(W|O) and mtDNA
atatcgccgatacggttgtataggattgcttgaatggctgctgtgttggcatctgctcgggcgtatcatcaactgatgagcaagaaggatataattcctacgccctctcagccgatgaac

SEQ ID NO: 56347 - DNA, 120 bp, Homo sapiens
  misc_feature: 1473 for SV(W|O) and mtDNA
gtaatgttagcggttaggcgtacggccagggctattggttgaatgagtaggctgatggtttcgataataactagtatggggataaggggtgtaggtgtgccttgtggtaagaagtgggct

SEQ ID NO: 56348 - DNA, 120 bp, Homo sapiens
  misc_feature: 1473 for SV(W|O) and mtDNA
ggtaataatgacttgttggttgattgtagatattgggctgttaattgtcagttcagtgttttaatctgacgcaggcttatgcggaggagaatgttttcatgttacttatactaacattag

SEQ ID NO: 56349 - DNA, 120 bp, Homo sapiens
  misc_feature: 1473 for SV(W|O) and mtDNA
gctttaacatatctgaacacacaatagctaagacccaaactgggattagataccccactatgcttagccctaaacctcaacagttaaatcaacaaaactgctcgccagaacactacgagc

SEQ ID NO: 56350 - DNA, 120 bp, Homo sapiens
  misc_feature: 1473 for SV(W|O) and mtDNA
gaacgagggtttatttttttggttagaactggaataaaagctagcatgtttatttctaggcctactcaggtaaaaaatcagtgcgagcttagcgctgtgatgagtgtgcctgcaaagatg

SEQ ID NO: 56351 - DNA, 120 bp, Homo sapiens
  misc_feature: 1473 for SV(W|O) and mtDNA
catgtgccattaagatatataggatttagcctataatttaactttgacaaagttatgaaatggtttttctaatacctttttgaaaaagtcatggaggccatggggttggcttgaaaccag

SEQ ID NO: 56352 - DNA, 120 bp, Homo sapiens
  misc_feature: 1473 for SV(W|O) and mtDNA
ctgctcgccagaacactacgagccacagcttaaaactcaaaggacctggcggtgcttcatatccctctagaggagcctgttctgtaatcgataaaccccgatcaacctcaccacctcttg

SEQ ID NO: 56353 - DNA, 120 bp, Homo sapiens
  misc_feature: 1473 for SV(W|O) and mtDNA
ctgccaatggtgagggaggttgaagtgagaggtatggttttgagtagtcctcctatttttcgaatatcttgttcattgttaaggttgtggatgatggacccggagcacataaatagtatg

SEQ ID NO: 56354 - DNA, 120 bp, Homo sapiens
  misc_feature: 1473 for SV(W|O) and mtDNA
cgcaatcctattctagagtccatatcaacaatagggtttacgacctcgatgttggatcaggacatcccgatggtgcagccgctattaaaggttcgtttgttcaacgattaaagtcctacg

SEQ ID NO: 56355 - DNA, 120 bp, Homo sapiens
  misc_feature: 1473 for SV(W|O) and mtDNA
aggcggtgcctctaatactggtgatgctagaggtgatgtttttggtaaacaggcggggtaagatttgccgagttccttttactttttttaacctttccttatgagcatgcctgtgttggg

SEQ ID NO: 56356 - DNA, 120 bp, Homo sapiens
  misc_feature: 1473 for SV(W|O) and mtDNA
agcttactggttgtcctccgattcaggttagaatgaggaggtctgcggctaggagtcaataaagtgattggcttagtgggcgaaatattatgctttgttgtttggatatatggaggatgg

SEQ ID NO: 56357 - DNA, 120 bp, Homo sapiens
  misc_feature: 1473 for SV(W|O) and mtDNA
caggttagaatgaggaggtctgcggctaggagtcaataaagtgattggcttagtgggcgaaatattatgctttgttgtttggatatatggaggatggggattattgctaggatgaggatg

SEQ ID NO: 56358 - DNA, 120 bp, Homo sapiens
  misc_feature: 1473 for SV(W|O) and mtDNA
aggctcccttcccctactcatcgcactaatttacactcacaacaccctaggctcactaaacattctactactcactctcactgcccaagaactatcaaactcctgagccaacaacttaat

SEQ ID NO: 56359 - DNA, 120 bp, Homo sapiens
  misc_feature: 1473 for SV(W|O) and mtDNA
aaagggcatacaggactaggaagcagataaggaaaatgattatgagggcgtgatcatgaaaggtgataagctcttctatgataggggaagtagcgtcttgtagacctacttgcgctgcat

SEQ ID NO: 56360 - DNA, 120 bp, Homo sapiens
  misc_feature: 1473 for SV(W|O) and mtDNA
aaccaaaccactttcaccgctacacgaccgggggtatactacggtcaatgctctgaaatctgtggagcaaaccacagtttcatgcccatcgtcctagaattaattcccctaaaaatcttt

SEQ ID NO: 56361 - DNA, 120 bp, Homo sapiens
  misc_feature: 1472 for SV(W|O) and mtDNA
tttcataagggctatcgtagttttctggggtagaaaatgtagcccatttcttgccacctcatgggctacaccttgacctaacgtctttacgtgggtacttgcgcttactttgtagccttc

SEQ ID NO: 56362 - DNA, 120 bp, Homo sapiens
  misc_feature: 1472 for SV(W|O) and mtDNA
tagcattgcgagacgctggagccggagcaccctatgtcgcagtatctgtctttgattcctgcctcatcccattatttatcgcacctacgttcaatattacaggcgaacatacttactaaa

SEQ ID NO: 56363 - DNA, 120 bp, Homo sapiens
  misc_feature: 1472 for SV(W|O) and mtDNA
ttgatgccgattgtaactattatgagtcctagttgacttgaagtggagaaggctacgatttttttgatgtcattttgtgtaagggcgcagactgctgcgaacagagtggtgatagcgcct

SEQ ID NO: 56364 - DNA, 120 bp, Homo sapiens
  misc_feature: 1472 for SV(W|O) and mtDNA
caaaattcagaataataacacacccgaccacaccgctaacaatcaatactaaacccccataaataggagaaggcttagaagaaaaccccacaaaccccattactaaacccacactcaaca

SEQ ID NO: 56365 - DNA, 120 bp, Homo sapiens
  misc_feature: 1472 for SV(W|O) and mtDNA
tgtgggaagaaagttagatttacgccgatgaatatgatagtgaaatggattttggcgtaggtttggtctagggtgtagcctgagaataggggaaatcagtgaatgaagcctcctatgatg

SEQ ID NO: 56366 - DNA, 120 bp, Homo sapiens
  misc_feature: 1472 for SV(W|O) and mtDNA
tgggagggcgatgaggactaggatgatggcgggcaggatagttcagacggtttctatttcctgagcgtctgagatgttagtattagttagttttgttgtgagtgttaggaaaagggcata

SEQ ID NO: 56367 - DNA, 120 bp, Homo sapiens
  misc_feature: 1472 for SV(W|O) and mtDNA
gatgggagggcgatgaggactaggatgatggcgggcaggatagttcagacggtttctatttcctgagcgtctgagatgttagtattagttagttttgttgtgagtgttaggaaaagggca

SEQ ID NO: 56368 - DNA, 120 bp, Homo sapiens
  misc_feature: 1472 for SV(W|O) and mtDNA
ataagggctatcgtagttttctggggtagaaaatgtagcccatttcttgccacctcatgggctacaccttgacctaacgtctttacgtgggtacttgcgcttactttgtagccttcatca

SEQ ID NO: 56369 - DNA, 120 bp, Homo sapiens
  misc_feature: 1472 for SV(W|O) and mtDNA
tcttcttcatagtaatacccatcataatcggaggctttggcaactgactagttcccctaataatcggtgcccccgatatggcgtttccccgcataaacaacataagcttctgactcttac

SEQ ID NO: 56370 - DNA, 120 bp, Homo sapiens
  misc_feature: 1472 for SV(W|O) and mtDNA
aagagtaataaacttcgccttaattttaataatcaacaccctcctagccttactactaataattattacattttgactaccacaactcaacggctacatagaaaaatccaccccttacga

SEQ ID NO: 56371 - DNA, 120 bp, Homo sapiens
  misc_feature: 1472 for SV(W|O) and mtDNA
caatagctaagacccaaactgggattagataccccactatgcttagccctaaacctcaacagttaaatcaacaaaactgctcgccagaacactacgagccacagcttaaaactcaaagga

SEQ ID NO: 56372 - DNA, 120 bp, Homo sapiens
  misc_feature: 1472 for SV(W|O) and mtDNA
tattctgcctagcaaactcaaactacgaacgcactcacagtcgcatcataatcctctctcaaggacttcaaactctactcccactaatagctttttgatgacttctagcaagcctcgcta

SEQ ID NO: 56373 - DNA, 120 bp, Homo sapiens
  misc_feature: 1472 for SV(W|O) and mtDNA
tacacaatagcttttatagtaaagatacctctttacggactccacttatgactccctaaagcccatgtcgaagcccccatcgctgggtcaatagtacttgccgcagtactcttaaaacta

SEQ ID NO: 56374 - DNA, 120 bp, Homo sapiens
  misc_feature: 1472 for SV(W|O) and mtDNA
ataatagcagttctaccgtacaaccctaacataaccattcttaatttaactatttatattatcctaactactaccgcattcctactactcaacttaaactccagcaccacgaccctacta

SEQ ID NO: 56375 - DNA, 120 bp, Homo sapiens
  misc_feature: 1472 for SV(W|O) and mtDNA
tagccgtttactcaatcctctgatcagggtgagcatcaaactcaaactacgccctgatcggcgcactgcgagcagtagcccaaacaatctcatatgaagtcaccctagccatcattctac

SEQ ID NO: 56376 - DNA, 120 bp, Homo sapiens
  misc_feature: 1472 for SV(W|O) and mtDNA
gttgggtgctttgtgttaagctacactctggttcgtccaagtgcactttccagtacacttaccatgttacgacttgtctcctctatataaatgcgtaggggttttagttaaatgtccttt

SEQ ID NO: 56377 - DNA, 120 bp, Homo sapiens
  misc_feature: 1472 for SV(W|O) and mtDNA
gggttaacgagggtggtaaggatggggggaattagggaagtcagggttagggtggttatagtagtgtgcatggttattacttttatttggagttgcaccaaaatttttggggcctaagac

SEQ ID NO: 56378 - DNA, 120 bp, Homo sapiens
  misc_feature: 1472 for SV(W|O) and mtDNA
gtctgcgcccttacacaaaatgacatcaaaaaaatcgtagccttctccacttcaagtcaactaggactcataatagttacaatcggcatcaaccaaccacacctagcattcctgcacatc

SEQ ID NO: 56379 - DNA, 120 bp, Homo sapiens
  misc_feature: 1472 for SV(W|O) and mtDNA
aatagctaagacccaaactgggattagataccccactatgcttagccctaaacctcaacagttaaatcaacaaaactgctcgccagaacactacgagccacagcttaaaactcaaaggac

SEQ ID NO: 56380 - DNA, 120 bp, Homo sapiens
  misc_feature: 1472 for SV(W|O) and mtDNA
catgtctaacaacatggctttctcaacttttaaaggataacagctatccattggtcttaggccccaaaaattttggtgcaactccaaataaaagtaataaccatgcacactactataacc

SEQ ID NO: 56381 - DNA, 120 bp, Homo sapiens
  misc_feature: 1472 for SV(W|O) and mtDNA
accaacacactaaccatataccaatgatggcgcgatgtaacacgagaaagcacataccaaggccaccacacaccacctgtccaaaaaggccttcgatacgggataatcctatttattacc

SEQ ID NO: 56382 - DNA, 120 bp, Homo sapiens
  misc_feature: 1472 for SV(W|O) and mtDNA
accgggctctgccatcttaacaaaccctgttcttgggtgggtgtgggtataatactaagttgagatgatatcatttacgggggaaggcgctttgtgaagtaggccttatttctcttgtcc

SEQ ID NO: 56383 - DNA, 120 bp, Homo sapiens
  misc_feature: 1472 for SV(W|O) and mtDNA
gctcccttcccctactcatcgcactaatttacactcacaacaccctaggctcactaaacattctactactcactctcactgcccaagaactatcaaactcctgagccaacaacttaatat

SEQ ID NO: 56384 - DNA, 120 bp, Homo sapiens
  misc_feature: 1472 for SV(W|O) and mtDNA
aagcctacgttttcacacttctagtaagcctctacctgcacgacaacacataatgacccaccaatcacatgcctatcatatagtaaaacccagcccatgacccctaacaggggccctctc

SEQ ID NO: 56385 - DNA, 120 bp, Homo sapiens
  misc_feature: 1472 for SV(W|O) and mtDNA
gaagaaggcgtgggtgcagatgtgcaggaatgctaggtgtggttggttgatgccgattgtaactattatgagtcctagttgacttgaagtggagaaggctacgatttttttgatgtcatt

SEQ ID NO: 56386 - DNA, 120 bp, Homo sapiens
  misc_feature: 1472 for SV(W|O) and mtDNA
cttgttggttgattgtagatattgggctgttaattgtcagttcagtgttttaatctgacgcaggcttatgcggaggagaatgttttcatgttacttatactaacattagttcttctatag

SEQ ID NO: 56387 - DNA, 120 bp, Homo sapiens
  misc_feature: 1472 for SV(W|O) and mtDNA
ctgcgcccttacacaaaatgacatcaaaaaaatcgtagccttctccacttcaagtcaactaggactcataatagttacaatcggcatcaaccaaccacacctagcattcctgcacatctg

SEQ ID NO: 56388 - DNA, 120 bp, Homo sapiens
  misc_feature: 1472 for SV(W|O) and mtDNA
cagtagaattagaattgtgaagatgataagtgtagagggaaggttaatggttgatattgctagggtggcgcttccaattaggtgcatgagtaggtggcctgcagtaatgttagcggttag

SEQ ID NO: 56389 - DNA, 120 bp, Homo sapiens
  misc_feature: 1472 for SV(W|O) and mtDNA
agggcgatgaggactaggatgatggcgggcaggatagttcagacggtttctatttcctgagcgtctgagatgttagtattagttagttttgttgtgagtgttaggaaaagggcatacagg

SEQ ID NO: 56390 - DNA, 120 bp, Homo sapiens
  misc_feature: 1472 for SV(W|O) and mtDNA
cctcctccggcggggtcgaagaaggtggtgttgaggttgcggtctgttagtagtatagtgatgccagcagctaggactgggagagataggagaagtaggactgctgtgattaggacggat

SEQ ID NO: 56391 - DNA, 120 bp, Homo sapiens
  misc_feature: 1472 for SV(W|O) and mtDNA
ccgatacggttgtataggattgcttgaatggctgctgtgttggcatctgctcgggcgtatcatcaactgatgagcaagaaggatataattcctacgccctctcagccgatgaacagttgg

SEQ ID NO: 56392 - DNA, 120 bp, Homo sapiens
  misc_feature: 1472 for SV(W|O) and mtDNA
catgaaacatcctatcatctgtaggctcattcatttctctaacagcagtaatattaataattttcatgatttgagaagccttcgcttcaaagcgaaaagtcctaatagtagaagaaccct

SEQ ID NO: 56393 - DNA, 120 bp, Homo sapiens
  misc_feature: 1472 for SV(W|O) and mtDNA
caatggtgagggaggttgaagtgagaggtatggttttgagtagtcctcctatttttcgaatatcttgttcattgttaaggttgtggatgatggacccggagcacataaatagtatggctt

SEQ ID NO: 56394 - DNA, 120 bp, Homo sapiens
  misc_feature: 1472 for SV(W|O) and mtDNA
accgaaatttttaatgcaggtttggtagtttaggacctgtgggtttgttaggtactgtttgcattaataaattaaagctccatagggtcttctcgtcttgctgtgttatgcccgcctctt

SEQ ID NO: 56395 - DNA, 120 bp, Homo sapiens
  misc_feature: 1471 for SV(W|O) and mtDNA
tttggcctcacgggaggacatagcctatgaaggctgttgctatagttgcaagcaggaggataatgccgatgtttcaggtttctgagtagagaaatgatccgtaatataggcctcgcccga

SEQ ID NO: 56396 - DNA, 120 bp, Homo sapiens
  misc_feature: 1471 for SV(W|O) and mtDNA
tttggatgagaatggctgttactacgagggctatgtggctgattgaagagtatgcaatgagcgattttaggtctgtttgtcgtaggcagatggagcttgttataattatgcctcataggg

SEQ ID NO: 56397 - DNA, 120 bp, Homo sapiens
  misc_feature: 1471 for SV(W|O) and mtDNA
ttcataagggctatcgtagttttctggggtagaaaatgtagcccatttcttgccacctcatgggctacaccttgacctaacgtctttacgtgggtacttgcgcttactttgtagccttca

SEQ ID NO: 56398 - DNA, 120 bp, Homo sapiens
  misc_feature: 1471 for SV(W|O) and mtDNA
tggagtttaagttgagtagtaggaatgcggtagtagttaggataatataaatagttaaattaagaatggttatgttagggttgtacggtagaactgctattattcatcctatgtgggtaa

SEQ ID NO: 56399 - DNA, 120 bp, Homo sapiens
  misc_feature: 1471 for SV(W|O) and mtDNA
tgtgtcaactggagttttttacaactcaggtgagttttagctttattggggagggggtgatctaaaacactctttacgccggcttctattgacttgggttaatcgtgtgaccgcggtggc

SEQ ID NO: 56400 - DNA, 120 bp, Homo sapiens
  misc_feature: 1471 for SV(W|O) and mtDNA
ggagggcgatgaggactaggatgatggcgggcaggatagttcagacggtttctatttcctgagcgtctgagatgttagtattagttagttttgttgtgagtgttaggaaaagggcataca

SEQ ID NO: 56401 - DNA, 120 bp, Homo sapiens
  misc_feature: 1471 for SV(W|O) and mtDNA
tggtcgttacctagaaggttgcctggctggcccagctcggctcgaataaggaggcttagagctgtgcctaggactccagctcatgcgccgaataataggtatagtgttccaatgtctttg

SEQ ID NO: 56402 - DNA, 120 bp, Homo sapiens
  misc_feature: 1471 for SV(W|O) and mtDNA
gcctccttattcgagccgagctgggccagccaggcaaccttctaggtaacgaccacatctacaacgttatcgtcacagcccatgcatttgtaataatcttcttcatagtaatacccatca

SEQ ID NO: 56403 - DNA, 120 bp, Homo sapiens
  misc_feature: 1471 for SV(W|O) and mtDNA
aaaaaggtattagaaaaaccatttcataactttgtcaaagttaaattataggctaaatcctatatatcttaatggcacatgcagcgcaagtaggtctacaagacgctacttcccctatca

SEQ ID NO: 56404 - DNA, 120 bp, Homo sapiens
  misc_feature: 1471 for SV(W|O) and mtDNA
tgataaccatacacaacactaaaggacgaacctgatctcttatactagtatccttaatcatttttattgccacaactaacctcctcggactcctgcctcactcatttacaccaaccaccc

SEQ ID NO: 56405 - DNA, 120 bp, Homo sapiens
  misc_feature: 1471 for SV(W|O) and mtDNA
cctaaacctcaacagttaaatcaacaaaactgctcgccagaacactacgagccacagcttaaaactcaaaggacctggcggtgcttcatatccctctagaggagcctgttctgtaatcga

SEQ ID NO: 56406 - DNA, 120 bp, Homo sapiens
  misc_feature: 1471 for SV(W|O) and mtDNA
gggcgatgaggactaggatgatggcgggcaggatagttcagacggtttctatttcctgagcgtctgagatgttagtattagttagttttgttgtgagtgttaggaaaagggcatacagga

SEQ ID NO: 56407 - DNA, 120 bp, Homo sapiens
  misc_feature: 1471 for SV(W|O) and mtDNA
tccactatagcagatgcgagcaggagtaggagagagggaggtaagagtcagaagcttatgttgtttatgcggggaaacgccatatcgggggcaccgattattaggggaactagtcagttg

SEQ ID NO: 56408 - DNA, 120 bp, Homo sapiens
  misc_feature: 1471 for SV(W|O) and mtDNA
gtaggctcattcatttctctaacagcagtaatattaataattttcatgatttgagaagccttcgcttcaaagcgaaaagtcctaatagtagaagaaccctccataaacctggagtgacta

SEQ ID NO: 56409 - DNA, 120 bp, Homo sapiens
  misc_feature: 1471 for SV(W|O) and mtDNA
ctagccgtttactcaatcctctgatcagggtgagcatcaaactcaaactacgccctgatcggcgcactgcgagcagtagcccaaacaatctcatatgaagtcaccctagccatcattcta

SEQ ID NO: 56410 - DNA, 120 bp, Homo sapiens
  misc_feature: 1471 for SV(W|O) and mtDNA
gttgcctggctggcccagctcggctcgaataaggaggcttagagctgtgcctaggactccagctcatgcgccgaataataggtatagtgttccaatgtctttgtggtttgtagagaatag

SEQ ID NO: 56411 - DNA, 120 bp, Homo sapiens
  misc_feature: 1471 for SV(W|O) and mtDNA
gtgttgtgggaagaaagttagatttacgccgatgaatatgatagtgaaatggattttggcgtaggtttggtctagggtgtagcctgagaataggggaaatcagtgaatgaagcctcctat

SEQ ID NO: 56412 - DNA, 120 bp, Homo sapiens
  misc_feature: 1471 for SV(W|O) and mtDNA
gggttgattgctgtacttgcttgtaagcatggggagggggttttgatgtggattgggtttttatgtactacaggtggtcaagtatttatggtaccgtacaatattcatggtggctggcag

SEQ ID NO: 56413 - DNA, 120 bp, Homo sapiens
  misc_feature: 1471 for SV(W|O) and mtDNA
gggggctagtttttgtcatgtgagaagaagcaggccggatgtcagaggggtgccttgggtaacctctgggactcagaagtgaaagggggctattcctagttttattgctatagccattat

SEQ ID NO: 56414 - DNA, 120 bp, Homo sapiens
  misc_feature: 1471 for SV(W|O) and mtDNA
gctgagtgaagcattggactgtaaatctaaagacaggggttaggcctctttttaccagctccgaggtgattttcatattgaattgcaaattcgaagaagcagcttcaaacctgccggggc

SEQ ID NO: 56415 - DNA, 120 bp, Homo sapiens
  misc_feature: 1471 for SV(W|O) and mtDNA
gatatttggcctcacgggaggacatagcctatgaaggctgttgctatagttgcaagcaggaggataatgccgatgtttcaggtttctgagtagagaaatgatccgtaatataggcctcgc

SEQ ID NO: 56416 - DNA, 120 bp, Homo sapiens
  misc_feature: 1471 for SV(W|O) and mtDNA
gattgtaactattatgagtcctagttgacttgaagtggagaaggctacgatttttttgatgtcattttgtgtaagggcgcagactgctgcgaacagagtggtgatagcgcctaagcatag

SEQ ID NO: 56417 - DNA, 120 bp, Homo sapiens
  misc_feature: 1471 for SV(W|O) and mtDNA
gatgatacgcccgagcagatgccaacacagcagccattcaagcaatcctatacaaccgtatcggcgatatcggtttcatcctcgccttagcatgatttatcctacactccaactcatgag

SEQ ID NO: 56418 - DNA, 120 bp, Homo sapiens
  misc_feature: 1471 for SV(W|O) and mtDNA
gagtttaagttgagtagtaggaatgcggtagtagttaggataatataaatagttaaattaagaatggttatgttagggttgtacggtagaactgctattattcatcctatgtgggtaatt

SEQ ID NO: 56419 - DNA, 120 bp, Homo sapiens
  misc_feature: 1471 for SV(W|O) and mtDNA
atgatatttggcctcacgggaggacatagcctatgaaggctgttgctatagttgcaagcaggaggataatgccgatgtttcaggtttctgagtagagaaatgatccgtaatataggcctc

SEQ ID NO: 56420 - DNA, 120 bp, Homo sapiens
  misc_feature: 1471 for SV(W|O) and mtDNA
ctaaacctcaacagttaaatcaacaaaactgctcgccagaacactacgagccacagcttaaaactcaaaggacctggcggtgcttcatatccctctagaggagcctgttctgtaatcgat

SEQ ID NO: 56421 - DNA, 120 bp, Homo sapiens
  misc_feature: 1471 for SV(W|O) and mtDNA
ccatataccaatgatggcgcgatgtaacacgagaaagcacataccaaggccaccacacaccacctgtccaaaaaggccttcgatacgggataatcctatttattacctcagaagtttttt

SEQ ID NO: 56422 - DNA, 120 bp, Homo sapiens
  misc_feature: 1471 for SV(W|O) and mtDNA
catcaactgatgagcaagaaggatataattcctacgccctctcagccgatgaacagttggaataggttgttagcggtaactaagattagtatggtaattaggaagatgagtagatatttg

SEQ ID NO: 56423 - DNA, 120 bp, Homo sapiens
  misc_feature: 1471 for SV(W|O) and mtDNA
atggggtctcctcctccggcggggtcgaagaaggtggtgttgaggttgcggtctgttagtagtatagtgatgccagcagctaggactgggagagataggagaagtaggactgctgtgatt

SEQ ID NO: 56424 - DNA, 120 bp, Homo sapiens
  misc_feature: 1471 for SV(W|O) and mtDNA
atgacttgttggttgattgtagatattgggctgttaattgtcagttcagtgttttaatctgacgcaggcttatgcggaggagaatgttttcatgttacttatactaacattagttcttct

SEQ ID NO: 56425 - DNA, 120 bp, Homo sapiens
  misc_feature: 1471 for SV(W|O) and mtDNA
atatttttagttgggtgatgaggaatagtgtaaggagtatgggggtaattatggtgggccatacggtagtatttagttggggcatttcactgtaaagaggtgttggttctcttaatcttt

SEQ ID NO: 56426 - DNA, 120 bp, Homo sapiens
  misc_feature: 1470 for SV(W|O) and mtDNA
ttttcgaatatcttgttcattgttaaggttgtggatgatggacccggagcacataaatagtatggctttgaagaaggcgtgggtgcagatgtgcaggaatgctaggtgtggttggttgat

SEQ ID NO: 56427 - DNA, 120 bp, Homo sapiens
  misc_feature: 1470 for SV(W|O) and mtDNA
tttgtgtcaactggagttttttacaactcaggtgagttttagctttattggggagggggtgatctaaaacactctttacgccggcttctattgacttgggttaatcgtgtgaccgcggtg

SEQ ID NO: 56428 - DNA, 120 bp, Homo sapiens
  misc_feature: 1470 for SV(W|O) and mtDNA
gtacaaccctaacataaccattcttaatttaactatttatattatcctaactactaccgcattcctactactcaacttaaactccagcaccacgaccctactactatctcgcacctgaaa

SEQ ID NO: 56429 - DNA, 120 bp, Homo sapiens
  misc_feature: 1470 for SV(W|O) and mtDNA
ttcgaatatcttgttcattgttaaggttgtggatgatggacccggagcacataaatagtatggctttgaagaaggcgtgggtgcagatgtgcaggaatgctaggtgtggttggttgatgc

SEQ ID NO: 56430 - DNA, 120 bp, Homo sapiens
  misc_feature: 1470 for SV(W|O) and mtDNA
caagtcgtaacatggtaagtgtactggaaagtgcacttggacgaaccagagtgtagcttaacacaaagcacccaacttacacttaggagatttcaacttaacttgaccgctctgagctaa

SEQ ID NO: 56431 - DNA, 120 bp, Homo sapiens
  misc_feature: 1470 for SV(W|O) and mtDNA
gataaccatacacaacactaaaggacgaacctgatctcttatactagtatccttaatcatttttattgccacaactaacctcctcggactcctgcctcactcatttacaccaaccaccca

SEQ ID NO: 56432 - DNA, 120 bp, Homo sapiens
  misc_feature: 1470 for SV(W|O) and mtDNA
accaatgatatgaaaaaccatcgttgtatttcaactacaagaacaccaatgaccccaatacgcaaaactaaccccctaataaaattaattaaccactcattcatcgacctccccacccca

SEQ ID NO: 56433 - DNA, 120 bp, Homo sapiens
  misc_feature: 1470 for SV(W|O) and mtDNA
tgattggcttagtgggcgaaatattatgctttgttgtttggatatatggaggatggggattattgctaggatgaggatggatagtaatagggcaaggacgcctcctagtttgttagggac

SEQ ID NO: 56434 - DNA, 120 bp, Homo sapiens
  misc_feature: 1470 for SV(W|O) and mtDNA
tgagggaggttgaagtgagaggtatggttttgagtagtcctcctatttttcgaatatcttgttcattgttaaggttgtggatgatggacccggagcacataaatagtatggctttgaaga

SEQ ID NO: 56435 - DNA, 120 bp, Homo sapiens
  misc_feature: 1470 for SV(W|O) and mtDNA
tcctaattaccatactaatcttagttaccgctaacaacctattccaactgttcatcggctgagagggcgtaggaattatatccttcttgctcatcagttgatgatacgcccgagcagatg

SEQ ID NO: 56436 - DNA, 120 bp, Homo sapiens
  misc_feature: 1470 for SV(W|O) and mtDNA
tcattcactgatttcccctattctcaggctacaccctagaccaaacctacgccaaaatccatttcactatcatattcatcggcgtaaatctaactttcttcccacaacactttctcggcc

SEQ ID NO: 56437 - DNA, 120 bp, Homo sapiens
  misc_feature: 1470 for SV(W|O) and mtDNA
tatccttcttgctcatcagttgatgatacgcccgagcagatgccaacacagcagccattcaagcaatcctatacaaccgtatcggcgatatcggtttcatcctcgccttagcatgattta

SEQ ID NO: 56438 - DNA, 120 bp, Homo sapiens
  misc_feature: 1470 for SV(W|O) and mtDNA
caaaagggacaagcatcaagcacgcagcaatgcagctcaaaacgcttagcctagccacacccccacgggaaacagcagtgattaacctttagcaataaacgaaagtttaactaagctata

SEQ ID NO: 56439 - DNA, 120 bp, Homo sapiens
  misc_feature: 1470 for SV(W|O) and mtDNA
cctaacataaccattcttaatttaactatttatattatcctaactactaccgcattcctactactcaacttaaactccagcaccacgaccctactactatctcgcacctgaaacaagcta

SEQ ID NO: 56440 - DNA, 120 bp, Homo sapiens
  misc_feature: 1470 for SV(W|O) and mtDNA
gtttggatgagaatggctgttactacgagggctatgtggctgattgaagagtatgcaatgagcgattttaggtctgtttgtcgtaggcagatggagcttgttataattatgcctcatagg

SEQ ID NO: 56441 - DNA, 120 bp, Homo sapiens
  misc_feature: 1470 for SV(W|O) and mtDNA
gttgagggttgattgctgtacttgcttgtaagcatggggagggggttttgatgtggattgggtttttatgtactacaggtggtcaagtatttatggtaccgtacaatattcatggtggct

SEQ ID NO: 56442 - DNA, 120 bp, Homo sapiens
  misc_feature: 1470 for SV(W|O) and mtDNA
gtggcaataaaaatgattaaggatactagtataagagatcaggttcgtcctttagtgttgtgtatggttatcatttgttttgaggttagtttgattagtcattgttgggtggtgattagt

SEQ ID NO: 56443 - DNA, 120 bp, Homo sapiens
  misc_feature: 1470 for SV(W|O) and mtDNA
gaaagttagatttacgccgatgaatatgatagtgaaatggattttggcgtaggtttggtctagggtgtagcctgagaataggggaaatcagtgaatgaagcctcctatgatggcaaatac

SEQ ID NO: 56444 - DNA, 120 bp, Homo sapiens
  misc_feature: 1470 for SV(W|O) and mtDNA
aaccaacacactaaccatataccaatgatggcgcgatgtaacacgagaaagcacataccaaggccaccacacaccacctgtccaaaaaggccttcgatacgggataatcctatttattac

SEQ ID NO: 56445 - DNA, 120 bp, Homo sapiens
  misc_feature: 1470 for SV(W|O) and mtDNA
ggttgtcctccgattcaggttagaatgaggaggtctgcggctaggagtcaataaagtgattggcttagtgggcgaaatattatgctttgttgtttggatatatggaggatggggattatt

SEQ ID NO: 56446 - DNA, 120 bp, Homo sapiens
  misc_feature: 1470 for SV(W|O) and mtDNA
ctgagctcaccatagtctaatagaaaacaaccgaaaccaaataattcaagcactgcttattacaattttactgggtctctattttaccctcctacaagcctcagagtacttcgagtctcc

SEQ ID NO: 56447 - DNA, 120 bp, Homo sapiens
  misc_feature: 1470 for SV(W|O) and mtDNA
cgagcagtacatgctaagacttcaccagtcaaagcgaactactatactcaattgatccaataacttgaccaacggaacaagttaccctagggataacagcgcaatcctattctagagtcc

SEQ ID NO: 56448 - DNA, 120 bp, Homo sapiens
  misc_feature: 1470 for SV(W|O) and mtDNA
gctgttgctatagttgcaagcaggaggataatgccgatgtttcaggtttctgagtagagaaatgatccgtaatataggcctcgcccgatgtgtaggaagaggcagataaagaatattgag

SEQ ID NO: 56449 - DNA, 120 bp, Homo sapiens
  misc_feature: 1470 for SV(W|O) and mtDNA
gctcggaggttgggttctgctccgaggtcgccccaaccgaaatttttaatgcaggtttggtagtttaggacctgtgggtttgttaggtactgtttgcattaataaattaaagctccatag

SEQ ID NO: 56450 - DNA, 120 bp, Homo sapiens
  misc_feature: 1470 for SV(W|O) and mtDNA
agggaggaatttgaagtagatagaaaccgacctggattactccggtctgaactcagatcacgtaggactttaatcgttgaacaaacgaacctttaatagcggctgcaccatcgggatgtc

SEQ ID NO: 56451 - DNA, 120 bp, Homo sapiens
  misc_feature: 1470 for SV(W|O) and mtDNA
gaaccagagtgtagcttaacacaaagcacccaacttacacttaggagatttcaacttaacttgaccgctctgagctaaacctagccccaaacccactccaccttactaccagacaacctt

SEQ ID NO: 56452 - DNA, 120 bp, Homo sapiens
  misc_feature: 1470 for SV(W|O) and mtDNA
cttagccctaaacctcaacagttaaatcaacaaaactgctcgccagaacactacgagccacagcttaaaactcaaaggacctggcggtgcttcatatccctctagaggagcctgttctgt

SEQ ID NO: 56453 - DNA, 120 bp, Homo sapiens
  misc_feature: 1470 for SV(W|O) and mtDNA
ctattctgcctagcaaactcaaactacgaacgcactcacagtcgcatcataatcctctctcaaggacttcaaactctactcccactaatagctttttgatgacttctagcaagcctcgct

SEQ ID NO: 56454 - DNA, 120 bp, Homo sapiens
  misc_feature: 1470 for SV(W|O) and mtDNA
actggagttttttacaactcaggtgagttttagctttattggggagggggtgatctaaaacactctttacgccggcttctattgacttgggttaatcgtgtgaccgcggtggctggcacg

SEQ ID NO: 56455 - DNA, 120 bp, Homo sapiens
  misc_feature: 1470 for SV(W|O) and mtDNA
aatcctttttgtagtcactcataggccagacttagggctaggatgatgattaataagagggatgacataactattagtggcaggttagttgtttgtagggctcatggtaggggtaaaagg

SEQ ID NO: 56456 - DNA, 120 bp, Homo sapiens
  misc_feature: 1470 for SV(W|O) and mtDNA
catataccaatgatggcgcgatgtaacacgagaaagcacataccaaggccaccacacaccacctgtccaaaaaggccttcgatacgggataatcctatttattacctcagaagttttttt

SEQ ID NO: 56457 - DNA, 120 bp, Homo sapiens
  misc_feature: 1470 for SV(W|O) and mtDNA
caagcctacgttttcacacttctagtaagcctctacctgcacgacaacacataatgacccaccaatcacatgcctatcatatagtaaaacccagcccatgacccctaacaggggccctct

SEQ ID NO: 56458 - DNA, 120 bp, Homo sapiens
  misc_feature: 1469 for SV(W|O) and mtDNA
tttttgcccaaatgggccattatcgaagaattcacaaaaaacaatagcctcatcatccccaccatcatagccaccatcaccctccttaacctctacttctacctacgcctaatctactcc

SEQ ID NO: 56459 - DNA, 120 bp, Homo sapiens
  misc_feature: 1469 for SV(W|O) and mtDNA
gttgagggataggaggagaatgggggataggtgtatgaacatgagggtgttttctcgtgtgaatgagggttttatgttgttaatgtggtgggtgagtgagccccattgtgttgtggtaaa

SEQ ID NO: 56460 - DNA, 120 bp, Homo sapiens
  misc_feature: 1469 for SV(W|O) and mtDNA
cgccttaatccaagcctacgttttcacacttctagtaagcctctacctgcacgacaacacataatgacccaccaatcacatgcctatcatatagtaaaacccagcccatgacccctaaca

SEQ ID NO: 56461 - DNA, 120 bp, Homo sapiens
  misc_feature: 1469 for SV(W|O) and mtDNA
actcgcatcaggagtatcaatcacctgagctcaccatagtctaatagaaaacaaccgaaaccaaataattcaagcactgcttattacaattttactgggtctctattttaccctcctaca

SEQ ID NO: 56462 - DNA, 120 bp, Homo sapiens
  misc_feature: 1469 for SV(W|O) and mtDNA
tgcttagccctaaacctcaacagttaaatcaacaaaactgctcgccagaacactacgagccacagcttaaaactcaaaggacctggcggtgcttcatatccctctagaggagcctgttct

SEQ ID NO: 56463 - DNA, 120 bp, Homo sapiens
  misc_feature: 1469 for SV(W|O) and mtDNA
taggctgccaatggtgagggaggttgaagtgagaggtatggttttgagtagtcctcctatttttcgaatatcttgttcattgttaaggttgtggatgatggacccggagcacataaatag

SEQ ID NO: 56464 - DNA, 120 bp, Homo sapiens
  misc_feature: 1469 for SV(W|O) and mtDNA
gttgtgttgattcaaattatgtgttttttggaaagtcatgtcagtggtagtaatataattgttgggacgattagttttagcattggagtaggtttaggttatgtacgtagtctaggccat

SEQ ID NO: 56465 - DNA, 120 bp, Homo sapiens
  misc_feature: 1469 for SV(W|O) and mtDNA
gttatgtaaaggatgcgtagggatgggagggcgatgaggactaggatgatggcgggcaggatagttcagacggtttctatttcctgagcgtctgagatgttagtattagttagttttgtt

SEQ ID NO: 56466 - DNA, 120 bp, Homo sapiens
  misc_feature: 1469 for SV(W|O) and mtDNA
gggagggcgatgaggactaggatgatggcgggcaggatagttcagacggtttctatttcctgagcgtctgagatgttagtattagttagttttgttgtgagtgttaggaaaagggcatac

SEQ ID NO: 56467 - DNA, 120 bp, Homo sapiens
  misc_feature: 1469 for SV(W|O) and mtDNA
gtagcttactggttgtcctccgattcaggttagaatgaggaggtctgcggctaggagtcaataaagtgattggcttagtgggcgaaatattatgctttgttgtttggatatatggaggat

SEQ ID NO: 56468 - DNA, 120 bp, Homo sapiens
  misc_feature: 1469 for SV(W|O) and mtDNA
gtaagtatgttcgcctgtaatattgaacgtaggtgcgataaataatgggatgaggcaggaatcaaagacagatactgcgacatagggtgctccggctccagcgtctcgcaatgctatcgc

SEQ ID NO: 56469 - DNA, 120 bp, Homo sapiens
  misc_feature: 1469 for SV(W|O) and mtDNA
ggtcgttacctagaaggttgcctggctggcccagctcggctcgaataaggaggcttagagctgtgcctaggactccagctcatgcgccgaataataggtatagtgttccaatgtctttgt

SEQ ID NO: 56470 - DNA, 120 bp, Homo sapiens
  misc_feature: 1469 for SV(W|O) and mtDNA
cttcttcatagtaatacccatcataatcggaggctttggcaactgactagttcccctaataatcggtgcccccgatatggcgtttccccgcataaacaacataagcttctgactcttacc

SEQ ID NO: 56471 - DNA, 120 bp, Homo sapiens
  misc_feature: 1469 for SV(W|O) and mtDNA
ggatatagggtcgaagccgcactcgtaaggggtggatttttctatgtagccgttgagttgtggtagtcaaaatgtaataattattagtagtaaggctaggagggtgttgattattaaaat

SEQ ID NO: 56472 - DNA, 120 bp, Homo sapiens
  misc_feature: 1469 for SV(W|O) and mtDNA
ccagagtgtagcttaacacaaagcacccaacttacacttaggagatttcaacttaacttgaccgctctgagctaaacctagccccaaacccactccaccttactaccagacaaccttagc

SEQ ID NO: 56473 - DNA, 120 bp, Homo sapiens
  misc_feature: 1469 for SV(W|O) and mtDNA
caacacactaaccatataccaatgatggcgcgatgtaacacgagaaagcacataccaaggccaccacacaccacctgtccaaaaaggccttcgatacgggataatcctatttattacctc

SEQ ID NO: 56474 - DNA, 120 bp, Homo sapiens
  misc_feature: 1469 for SV(W|O) and mtDNA
ccatatagtcactccaggtttatggagggttcttctactattaggacttttcgctttgaagcgaaggcttctcaaatcatgaaaattattaatattactgctgttagagaaatgaatgag

SEQ ID NO: 56475 - DNA, 120 bp, Homo sapiens
  misc_feature: 1469 for SV(W|O) and mtDNA
agccttcatcagggtttgctgaagatggcggtatataggctgagcaagaggtggtgaggttgatcggggtttatcgattacagaacaggctcctctagagggatatgaagcaccgccagg

SEQ ID NO: 56476 - DNA, 120 bp, Homo sapiens
  misc_feature: 1469 for SV(W|O) and mtDNA
ccaatggtgagggaggttgaagtgagaggtatggttttgagtagtcctcctatttttcgaatatcttgttcattgttaaggttgtggatgatggacccggagcacataaatagtatggct

SEQ ID NO: 56477 - DNA, 120 bp, Homo sapiens
  misc_feature: 1469 for SV(W|O) and mtDNA
aagggcatacaggactaggaagcagataaggaaaatgattatgagggcgtgatcatgaaaggtgataagctcttctatgataggggaagtagcgtcttgtagacctacttgcgctgcatg

SEQ ID NO: 56478 - DNA, 120 bp, Homo sapiens
  misc_feature: 1469 for SV(W|O) and mtDNA
atgggagggcgatgaggactaggatgatggcgggcaggatagttcagacggtttctatttcctgagcgtctgagatgttagtattagttagttttgttgtgagtgttaggaaaagggcat

SEQ ID NO: 56479 - DNA, 120 bp, Homo sapiens
  misc_feature: 1468 for SV(W|O) and mtDNA
ttttaataatcaacaccctcctagccttactactaataattattacattttgactaccacaactcaacggctacatagaaaaatccaccccttacgagtgcggcttcgaccctatatccc

SEQ ID NO: 56480 - DNA, 120 bp, Homo sapiens
  misc_feature: 1468 for SV(W|O) and mtDNA
ataaccatacacaacactaaaggacgaacctgatctcttatactagtatccttaatcatttttattgccacaactaacctcctcggactcctgcctcactcatttacaccaaccacccaa

SEQ ID NO: 56481 - DNA, 120 bp, Homo sapiens
  misc_feature: 1468 for SV(W|O) and mtDNA
ttcgcagcagtctgcgcccttacacaaaatgacatcaaaaaaatcgtagccttctccacttcaagtcaactaggactcataatagttacaatcggcatcaaccaaccacacctagcattc

SEQ ID NO: 56482 - DNA, 120 bp, Homo sapiens
  misc_feature: 1468 for SV(W|O) and mtDNA
ttcagtaccattggtggccaattgatttgatggtaagggagggatcgttgacctcgtctgttatgtaaaggatgcgtagggatgggagggcgatgaggactaggatgatggcgggcagga

SEQ ID NO: 56483 - DNA, 120 bp, Homo sapiens
  misc_feature: 1468 for SV(W|O) and mtDNA
tcaacaaccgctatgtatttcgtacattactgccagccaccatgaatattgtacggtaccataaatacttgaccacctgtagtacataaaaacccaatccacatcaaaaccccctcccca

SEQ ID NO: 56484 - DNA, 120 bp, Homo sapiens
  misc_feature: 1468 for SV(W|O) and mtDNA
tggcctcacgggaggacatagcctatgaaggctgttgctatagttgcaagcaggaggataatgccgatgtttcaggtttctgagtagagaaatgatccgtaatataggcctcgcccgatg

SEQ ID NO: 56485 - DNA, 120 bp, Homo sapiens
  misc_feature: 1468 for SV(W|O) and mtDNA
tgatgtcggggttgagggataggaggagaatgggggataggtgtatgaacatgagggtgttttctcgtgtgaatgagggttttatgttgttaatgtggtgggtgagtgagccccattgtg

SEQ ID NO: 56486 - DNA, 120 bp, Homo sapiens
  misc_feature: 1468 for SV(W|O) and mtDNA
cgaaaccaaataattcaagcactgcttattacaattttactgggtctctattttaccctcctacaagcctcagagtacttcgagtctcccttcaccatttccgacggcatctacggctca

SEQ ID NO: 56487 - DNA, 120 bp, Homo sapiens
  misc_feature: 1468 for SV(W|O) and mtDNA
ctgtacttgcttgtaagcatggggagggggttttgatgtggattgggtttttatgtactacaggtggtcaagtatttatggtaccgtacaatattcatggtggctggcagtaatgtacga

SEQ ID NO: 56488 - DNA, 120 bp, Homo sapiens
  misc_feature: 1468 for SV(W|O) and mtDNA
tcatactaggcctactaaccaacacactaaccatataccaatgatggcgcgatgtaacacgagaaagcacataccaaggccaccacacaccacctgtccaaaaaggccttcgatacggga

SEQ ID NO: 56489 - DNA, 120 bp, Homo sapiens
  misc_feature: 1468 for SV(W|O) and mtDNA
tcatcaactgatgagcaagaaggatataattcctacgccctctcagccgatgaacagttggaataggttgttagcggtaactaagattagtatggtaattaggaagatgagtagatattt

SEQ ID NO: 56490 - DNA, 120 bp, Homo sapiens
  misc_feature: 1468 for SV(W|O) and mtDNA
tcagccattttacctcacccccactgatgttcgccgaccgttgactattctctacaaaccacaaagacattggaacactatacctattattcggcgcatgagctggagtcctaggcacag

SEQ ID NO: 56491 - DNA, 120 bp, Homo sapiens
  misc_feature: 1468 for SV(W|O) and mtDNA
ccaaaccactttcaccgctacacgaccgggggtatactacggtcaatgctctgaaatctgtggagcaaaccacagtttcatgcccatcgtcctagaattaattcccctaaaaatctttga

SEQ ID NO: 56492 - DNA, 120 bp, Homo sapiens
  misc_feature: 1468 for SV(W|O) and mtDNA
taatagcagttctaccgtacaaccctaacataaccattcttaatttaactatttatattatcctaactactaccgcattcctactactcaacttaaactccagcaccacgaccctactac

SEQ ID NO: 56493 - DNA, 120 bp, Homo sapiens
  misc_feature: 1468 for SV(W|O) and mtDNA
gttaaattttttactctctctacaaggttttttcctagtgtccaaagagctgttcctctttggactaacagttaaatttacaaggggatttagagggttctgtgggcaaatttaaagttg

SEQ ID NO: 56494 - DNA, 120 bp, Homo sapiens
  misc_feature: 1468 for SV(W|O) and mtDNA
gtggctttaacatatctgaacacacaatagctaagacccaaactgggattagataccccactatgcttagccctaaacctcaacagttaaatcaacaaaactgctcgccagaacactacg

SEQ ID NO: 56495 - DNA, 120 bp, Homo sapiens
  misc_feature: 1468 for SV(W|O) and mtDNA
gccggaggaggagaccccattctataccaacacctattctgatttttcggtcaccctgaagtttatattcttatcctaccaggcttcggaataatctcccatattgtaacttactactcc

SEQ ID NO: 56496 - DNA, 120 bp, Homo sapiens
  misc_feature: 1468 for SV(W|O) and mtDNA
aaactgctcgccagaacactacgagccacagcttaaaactcaaaggacctggcggtgcttcatatccctctagaggagcctgttctgtaatcgataaaccccgatcaacctcaccacctc

SEQ ID NO: 56497 - DNA, 120 bp, Homo sapiens
  misc_feature: 1468 for SV(W|O) and mtDNA
atgaaacatcctatcatctgtaggctcattcatttctctaacagcagtaatattaataattttcatgatttgagaagccttcgcttcaaagcgaaaagtcctaatagtagaagaaccctc

SEQ ID NO: 56498 - DNA, 120 bp, Homo sapiens
  misc_feature: 1468 for SV(W|O) and mtDNA
gacttgttggttgattgtagatattgggctgttaattgtcagttcagtgttttaatctgacgcaggcttatgcggaggagaatgttttcatgttacttatactaacattagttcttctat

SEQ ID NO: 56499 - DNA, 120 bp, Homo sapiens
  misc_feature: 1468 for SV(W|O) and mtDNA
cttaatggcacatgcagcgcaagtaggtctacaagacgctacttcccctatcatagaagagcttatcacctttcatgatcacgccctcataatcattttccttatctgcttcctagtcct

SEQ ID NO: 56500 - DNA, 120 bp, Homo sapiens
  misc_feature: 1468 for SV(W|O) and mtDNA
ctgttgctatagttgcaagcaggaggataatgccgatgtttcaggtttctgagtagagaaatgatccgtaatataggcctcgcccgatgtgtaggaagaggcagataaagaatattgagg

SEQ ID NO: 56501 - DNA, 120 bp, Homo sapiens
  misc_feature: 1468 for SV(W|O) and mtDNA
cgggaattgcatctgtttttaagcctaatgtggggacagctcatgagtgcaagacgtcttgtgatgtaattattatacgaatgggggcttcaatcgggagtactactcgattgtcaacgt

SEQ ID NO: 56502 - DNA, 120 bp, Homo sapiens
  misc_feature: 1468 for SV(W|O) and mtDNA
actgctcgccagaacactacgagccacagcttaaaactcaaaggacctggcggtgcttcatatccctctagaggagcctgttctgtaatcgataaaccccgatcaacctcaccacctctt

SEQ ID NO: 56503 - DNA, 120 bp, Homo sapiens
  misc_feature: 1468 for SV(W|O) and mtDNA
aaacgccatatcgggggcaccgattattaggggaactagtcagttgccaaagcctccgattatgatgggtattactatgaagaagattattacaaatgcatgggctgtgacgataacgtt

SEQ ID NO: 56504 - DNA, 120 bp, Homo sapiens
  misc_feature: 1467 for SV(W|O) and mtDNA
aagtcgtaacatggtaagtgtactggaaagtgcacttggacgaaccagagtgtagcttaacacaaagcacccaacttacacttaggagatttcaacttaacttgaccgctctgagctaaa

SEQ ID NO: 56505 - DNA, 120 bp, Homo sapiens
  misc_feature: 1467 for SV(W|O) and mtDNA
ttgtgtcaactggagttttttacaactcaggtgagttttagctttattggggagggggtgatctaaaacactctttacgccggcttctattgacttgggttaatcgtgtgaccgcggtgg

SEQ ID NO: 56506 - DNA, 120 bp, Homo sapiens
  misc_feature: 1467 for SV(W|O) and mtDNA
ttgctgtacttgcttgtaagcatggggagggggttttgatgtggattgggtttttatgtactacaggtggtcaagtatttatggtaccgtacaatattcatggtggctggcagtaatgta

SEQ ID NO: 56507 - DNA, 120 bp, Homo sapiens
  misc_feature: 1467 for SV(W|O) and mtDNA
cctcattactattctgcctagcaaactcaaactacgaacgcactcacagtcgcatcataatcctctctcaaggacttcaaactctactcccactaatagctttttgatgacttctagcaa

SEQ ID NO: 56508 - DNA, 120 bp, Homo sapiens
  misc_feature: 1467 for SV(W|O) and mtDNA
ttcttcatagtaatacccatcataatcggaggctttggcaactgactagttcccctaataatcggtgcccccgatatggcgtttccccgcataaacaacataagcttctgactcttacct

SEQ ID NO: 56509 - DNA, 120 bp, Homo sapiens
  misc_feature: 1467 for SV(W|O) and mtDNA
tcatcagttgatgatacgcccgagcagatgccaacacagcagccattcaagcaatcctatacaaccgtatcggcgatatcggtttcatcctcgccttagcatgatttatcctacactcca

SEQ ID NO: 56510 - DNA, 120 bp, Homo sapiens
  misc_feature: 1467 for SV(W|O) and mtDNA
gaaacatcctatcatctgtaggctcattcatttctctaacagcagtaatattaataattttcatgatttgagaagccttcgcttcaaagcgaaaagtcctaatagtagaagaaccctcca

SEQ ID NO: 56511 - DNA, 120 bp, Homo sapiens
  misc_feature: 1467 for SV(W|O) and mtDNA
cactcagccattttacctcacccccactgatgttcgccgaccgttgactattctctacaaaccacaaagacattggaacactatacctattattcggcgcatgagctggagtcctaggca

SEQ ID NO: 56512 - DNA, 120 bp, Homo sapiens
  misc_feature: 1467 for SV(W|O) and mtDNA
catcatcgaaaccgcaaacatatcatacacaaacgcctgagccctatctattactctcatcgctacctccctgacaagcgcctatagcactcgaataattcttctcaccctaacaggtca

SEQ ID NO: 56513 - DNA, 120 bp, Homo sapiens
  misc_feature: 1467 for SV(W|O) and mtDNA
gttgtgggaagaaagttagatttacgccgatgaatatgatagtgaaatggattttggcgtaggtttggtctagggtgtagcctgagaataggggaaatcagtgaatgaagcctcctatga

SEQ ID NO: 56514 - DNA, 120 bp, Homo sapiens
  misc_feature: 1467 for SV(W|O) and mtDNA
ggctcccttcccctactcatcgcactaatttacactcacaacaccctaggctcactaaacattctactactcactctcactgcccaagaactatcaaactcctgagccaacaacttaata

SEQ ID NO: 56515 - DNA, 120 bp, Homo sapiens
  misc_feature: 1467 for SV(W|O) and mtDNA
cgattgtaactattatgagtcctagttgacttgaagtggagaaggctacgatttttttgatgtcattttgtgtaagggcgcagactgctgcgaacagagtggtgatagcgcctaagcata

SEQ ID NO: 56516 - DNA, 120 bp, Homo sapiens
  misc_feature: 1467 for SV(W|O) and mtDNA
agtctaatcctttttgtagtcactcataggccagacttagggctaggatgatgattaataagagggatgacataactattagtggcaggttagttgtttgtagggctcatggtaggggta

SEQ ID NO: 56517 - DNA, 120 bp, Homo sapiens
  misc_feature: 1467 for SV(W|O) and mtDNA
ggggtagtccgagtaacgtcggggcattccggataggccgagaaagtgttgtgggaagaaagttagatttacgccgatgaatatgatagtgaaatggattttggcgtaggtttggtctag

SEQ ID NO: 56518 - DNA, 120 bp, Homo sapiens
  misc_feature: 1467 for SV(W|O) and mtDNA
gggcaggcggtgcctctaatactggtgatgctagaggtgatgtttttggtaaacaggcggggtaagatttgccgagttccttttactttttttaacctttccttatgagcatgcctgtgt

SEQ ID NO: 56519 - DNA, 120 bp, Homo sapiens
  misc_feature: 1467 for SV(W|O) and mtDNA
ggcttcattcactgatttcccctattctcaggctacaccctagaccaaacctacgccaaaatccatttcactatcatattcatcggcgtaaatctaactttcttcccacaacactttctc

SEQ ID NO: 56520 - DNA, 120 bp, Homo sapiens
  misc_feature: 1467 for SV(W|O) and mtDNA
atgtgccattaagatatataggatttagcctataatttaactttgacaaagttatgaaatggtttttctaatacctttttgaaaaagtcatggaggccatggggttggcttgaaaccagc

SEQ ID NO: 56521 - DNA, 120 bp, Homo sapiens
  misc_feature: 1467 for SV(W|O) and mtDNA
gctggagtttaagttgagtagtaggaatgcggtagtagttaggataatataaatagttaaattaagaatggttatgttagggttgtacggtagaactgctattattcatcctatgtgggt

SEQ ID NO: 56522 - DNA, 120 bp, Homo sapiens
  misc_feature: 1467 for SV(W|O) and mtDNA
gctaggctgccaatggtgagggaggttgaagtgagaggtatggttttgagtagtcctcctatttttcgaatatcttgttcattgttaaggttgtggatgatggacccggagcacataaat

SEQ ID NO: 56523 - DNA, 120 bp, Homo sapiens
  misc_feature: 1467 for SV(W|O) and mtDNA
agggggtttggatgagaatggctgttactacgagggctatgtggctgattgaagagtatgcaatgagcgattttaggtctgtttgtcgtaggcagatggagcttgttataattatgcctc

SEQ ID NO: 56524 - DNA, 120 bp, Homo sapiens
  misc_feature: 1467 for SV(W|O) and mtDNA
ctcattactattctgcctagcaaactcaaactacgaacgcactcacagtcgcatcataatcctctctcaaggacttcaaactctactcccactaatagctttttgatgacttctagcaag

SEQ ID NO: 56525 - DNA, 120 bp, Homo sapiens
  misc_feature: 1467 for SV(W|O) and mtDNA
aaagctattagtgggagtagagtttgaagtccttgagagaggattatgatgcgactgtgagtgcgttcgtagtttgagtttgctaggcagaatagtaatgaggatgtaagcccgtgggcg

SEQ ID NO: 56526 - DNA, 120 bp, Homo sapiens
  misc_feature: 1467 for SV(W|O) and mtDNA
ccatacacaacactaaaggacgaacctgatctcttatactagtatccttaatcatttttattgccacaactaacctcctcggactcctgcctcactcatttacaccaaccacccaactat

SEQ ID NO: 56527 - DNA, 120 bp, Homo sapiens
  misc_feature: 1467 for SV(W|O) and mtDNA
agggtgagaagaattattcgagtgctataggcgcttgtcagggaggtagcgatgagagtaatagatagggctcaggcgtttgtgtatgatatgtttgcggtttcgatgatgtggtctttg

SEQ ID NO: 56528 - DNA, 120 bp, Homo sapiens
  misc_feature: 1467 for SV(W|O) and mtDNA
aaacctacgccaaaatccatttcactatcatattcatcggcgtaaatctaactttcttcccacaacactttctcggcctatccggaatgccccgacgttactcggactaccccgatgcat

SEQ ID NO: 56529 - DNA, 120 bp, Homo sapiens
  misc_feature: 1467 for SV(W|O) and mtDNA
aggctgccaatggtgagggaggttgaagtgagaggtatggttttgagtagtcctcctatttttcgaatatcttgttcattgttaaggttgtggatgatggacccggagcacataaatagt

SEQ ID NO: 56530 - DNA, 120 bp, Homo sapiens
  misc_feature: 1466 for SV(W|O) and mtDNA
aattcagaataataacacacccgaccacaccgctaacaatcaatactaaacccccataaataggagaaggcttagaagaaaaccccacaaaccccattactaaacccacactcaacagaa

SEQ ID NO: 56531 - DNA, 120 bp, Homo sapiens
  misc_feature: 1466 for SV(W|O) and mtDNA
ttaggccccaaaaattttggtgcaactccaaataaaagtaataaccatgcacactactataaccaccctaaccctgacttccctaattccccccatccttaccaccctcgttaaccctaa

SEQ ID NO: 56532 - DNA, 120 bp, Homo sapiens
  misc_feature: 1466 for SV(W|O) and mtDNA
ttactattctgcctagcaaactcaaactacgaacgcactcacagtcgcatcataatcctctctcaaggacttcaaactctactcccactaatagctttttgatgacttctagcaagcctc

SEQ ID NO: 56533 - DNA, 120 bp, Homo sapiens
  misc_feature: 1466 for SV(W|O) and mtDNA
tgttatgtaaaggatgcgtagggatgggagggcgatgaggactaggatgatggcgggcaggatagttcagacggtttctatttcctgagcgtctgagatgttagtattagttagttttgt

SEQ ID NO: 56534 - DNA, 120 bp, Homo sapiens
  misc_feature: 1466 for SV(W|O) and mtDNA
caaacctacgccaaaatccatttcactatcatattcatcggcgtaaatctaactttcttcccacaacactttctcggcctatccggaatgccccgacgttactcggactaccccgatgca

SEQ ID NO: 56535 - DNA, 120 bp, Homo sapiens
  misc_feature: 1466 for SV(W|O) and mtDNA
tgcaggccacctactcatgcacctaattggaagcgccaccctagcaatatcaaccattaaccttccctctacacttatcatcttcacaattctaattctactgactatcctagaaatcgc

SEQ ID NO: 56536 - DNA, 120 bp, Homo sapiens
  misc_feature: 1466 for SV(W|O) and mtDNA
aaattcagaataataacacacccgaccacaccgctaacaatcaatactaaacccccataaataggagaaggcttagaagaaaaccccacaaaccccattactaaacccacactcaacaga

SEQ ID NO: 56537 - DNA, 120 bp, Homo sapiens
  misc_feature: 1466 for SV(W|O) and mtDNA
gaatggggtctcctcctccggcggggtcgaagaaggtggtgttgaggttgcggtctgttagtagtatagtgatgccagcagctaggactgggagagataggagaagtaggactgctgtga

SEQ ID NO: 56538 - DNA, 120 bp, Homo sapiens
  misc_feature: 1466 for SV(W|O) and mtDNA
ggttgcctggctggcccagctcggctcgaataaggaggcttagagctgtgcctaggactccagctcatgcgccgaataataggtatagtgttccaatgtctttgtggtttgtagagaata

SEQ ID NO: 56539 - DNA, 120 bp, Homo sapiens
  misc_feature: 1466 for SV(W|O) and mtDNA
agccttctcctcactctctcaatcttatccatcatagcaggcagttgaggtggattaaaccaaacccagctacgcaaaatcttagcatactcctcaattacccacataggatgaataata

SEQ ID NO: 56540 - DNA, 120 bp, Homo sapiens
  misc_feature: 1466 for SV(W|O) and mtDNA
acaagtcgtaacatggtaagtgtactggaaagtgcacttggacgaaccagagtgtagcttaacacaaagcacccaacttacacttaggagatttcaacttaacttgaccgctctgagcta

SEQ ID NO: 56541 - DNA, 120 bp, Homo sapiens
  misc_feature: 1466 for SV(W|O) and mtDNA
agtcgtaacatggtaagtgtactggaaagtgcacttggacgaaccagagtgtagcttaacacaaagcacccaacttacacttaggagatttcaacttaacttgaccgctctgagctaaac

SEQ ID NO: 56542 - DNA, 120 bp, Homo sapiens
  misc_feature: 1466 for SV(W|O) and mtDNA
cacgaccaatgatatgaaaaaccatcgttgtatttcaactacaagaacaccaatgaccccaatacgcaaaactaaccccctaataaaattaattaaccactcattcatcgacctccccac

SEQ ID NO: 56543 - DNA, 120 bp, Homo sapiens
  misc_feature: 1466 for SV(W|O) and mtDNA
actcagccattttacctcacccccactgatgttcgccgaccgttgactattctctacaaaccacaaagacattggaacactatacctattattcggcgcatgagctggagtcctaggcac

SEQ ID NO: 56544 - DNA, 120 bp, Homo sapiens
  misc_feature: 1466 for SV(W|O) and mtDNA
gtcggggttgagggataggaggagaatgggggataggtgtatgaacatgagggtgttttctcgtgtgaatgagggttttatgttgttaatgtggtgggtgagtgagccccattgtgttgt

SEQ ID NO: 56545 - DNA, 120 bp, Homo sapiens
  misc_feature: 1466 for SV(W|O) and mtDNA
aaacatcacctctagcatcaccagtattagaggcaccgcctgcccagtgacacatgtttaacggccgcggtaccctaaccgtgcaaaggtagcataatcacttgttccttaaatagggac

SEQ ID NO: 56546 - DNA, 120 bp, Homo sapiens
  misc_feature: 1466 for SV(W|O) and mtDNA
gcctaaccgctaacattactgcaggccacctactcatgcacctaattggaagcgccaccctagcaatatcaaccattaaccttccctctacacttatcatcttcacaattctaattctac

SEQ ID NO: 56547 - DNA, 120 bp, Homo sapiens
  misc_feature: 1466 for SV(W|O) and mtDNA
gggtgagaagaattattcgagtgctataggcgcttgtcagggaggtagcgatgagagtaatagatagggctcaggcgtttgtgtatgatatgtttgcggtttcgatgatgtggtctttgg

SEQ ID NO: 56548 - DNA, 120 bp, Homo sapiens
  misc_feature: 1466 for SV(W|O) and mtDNA
gcctcgcccgatgtgtaggaagaggcagataaagaatattgaggcgccattggcgtgaaggtagcggatgattcagccataatttacgtctcgagtgatgtgggcgattgatgaaaaggc

SEQ ID NO: 56549 - DNA, 120 bp, Homo sapiens
  misc_feature: 1466 for SV(W|O) and mtDNA
gatggcgcgatgtaacacgagaaagcacataccaaggccaccacacaccacctgtccaaaaaggccttcgatacgggataatcctatttattacctcagaagtttttttcttcgcaggat

SEQ ID NO: 56550 - DNA, 120 bp, Homo sapiens
  misc_feature: 1466 for SV(W|O) and mtDNA
gaggatgaaaccgatatcgccgatacggttgtataggattgcttgaatggctgctgtgttggcatctgctcgggcgtatcatcaactgatgagcaagaaggatataattcctacgccctc

SEQ ID NO: 56551 - DNA, 120 bp, Homo sapiens
  misc_feature: 1466 for SV(W|O) and mtDNA
gacttcaccagtcaaagcgaactactatactcaattgatccaataacttgaccaacggaacaagttaccctagggataacagcgcaatcctattctagagtccatatcaacaatagggtt

SEQ ID NO: 56552 - DNA, 120 bp, Homo sapiens
  misc_feature: 1466 for SV(W|O) and mtDNA
cttcattcactgatttcccctattctcaggctacaccctagaccaaacctacgccaaaatccatttcactatcatattcatcggcgtaaatctaactttcttcccacaacactttctcgg

SEQ ID NO: 56553 - DNA, 120 bp, Homo sapiens
  misc_feature: 1466 for SV(W|O) and mtDNA
aatgatggcgcgatgtaacacgagaaagcacataccaaggccaccacacaccacctgtccaaaaaggccttcgatacgggataatcctatttattacctcagaagtttttttcttcgcag

SEQ ID NO: 56554 - DNA, 120 bp, Homo sapiens
  misc_feature: 1466 for SV(W|O) and mtDNA
ctcccttcccctactcatcgcactaatttacactcacaacaccctaggctcactaaacattctactactcactctcactgcccaagaactatcaaactcctgagccaacaacttaatatg

SEQ ID NO: 56555 - DNA, 120 bp, Homo sapiens
  misc_feature: 1466 for SV(W|O) and mtDNA
aattggaccaatctatcaccctatagaagaactaatgttagtataagtaacatgaaaacattctcctccgcataagcctgcgtcagattaaaacactgaactgacaattaacagcccaat

SEQ ID NO: 56556 - DNA, 120 bp, Homo sapiens
  misc_feature: 1466 for SV(W|O) and mtDNA
atgagaatggctgttactacgagggctatgtggctgattgaagagtatgcaatgagcgattttaggtctgtttgtcgtaggcagatggagcttgttataattatgcctcatagggatagt

SEQ ID NO: 56557 - DNA, 120 bp, Homo sapiens
  misc_feature: 1466 for SV(W|O) and mtDNA
aagtactctgaggcttgtaggagggtaaaatagagacccagtaaaattgtaataagcagtgcttgaattatttggtttcggttgttttctattagactatggtgagctcaggtgattgat

SEQ ID NO: 56558 - DNA, 120 bp, Homo sapiens
  misc_feature: 1466 for SV(W|O) and mtDNA
ataccaatgatggcgcgatgtaacacgagaaagcacataccaaggccaccacacaccacctgtccaaaaaggccttcgatacgggataatcctatttattacctcagaagtttttttctt

SEQ ID NO: 56559 - DNA, 120 bp, Homo sapiens
  misc_feature: 1466 for SV(W|O) and mtDNA
aaaacaaccgaaaccaaataattcaagcactgcttattacaattttactgggtctctattttaccctcctacaagcctcagagtacttcgagtctcccttcaccatttccgacggcatct

SEQ ID NO: 56560 - DNA, 120 bp, Homo sapiens
  misc_feature: 1466 for SV(W|O) and mtDNA
aacaacttaatatgactagcttacacaatagcttttatagtaaagatacctctttacggactccacttatgactccctaaagcccatgtcgaagcccccatcgctgggtcaatagtactt

SEQ ID NO: 56561 - DNA, 120 bp, Homo sapiens
  misc_feature: 1465 for SV(W|O) and mtDNA
gaggagttcagttatatgtttgggattttttaggtagtgggtgttgagcttgaacgctttcttaattggtggctgcttttaggcctactatgggtgttaaattttttactctctctacaa

SEQ ID NO: 56562 - DNA, 120 bp, Homo sapiens
  misc_feature: 1465 for SV(W|O) and mtDNA
aattaccatactaatcttagttaccgctaacaacctattccaactgttcatcggctgagagggcgtaggaattatatccttcttgctcatcagttgatgatacgcccgagcagatgccaa

SEQ ID NO: 56563 - DNA, 120 bp, Homo sapiens
  misc_feature: 1465 for SV(W|O) and mtDNA
ttcttgctcatcagttgatgatacgcccgagcagatgccaacacagcagccattcaagcaatcctatacaaccgtatcggcgatatcggtttcatcctcgccttagcatgatttatccta

SEQ ID NO: 56564 - DNA, 120 bp, Homo sapiens
  misc_feature: 1465 for SV(W|O) and mtDNA
ttctgcctagcaaactcaaactacgaacgcactcacagtcgcatcataatcctctctcaaggacttcaaactctactcccactaatagctttttgatgacttctagcaagcctcgctaac

SEQ ID NO: 56565 - DNA, 120 bp, Homo sapiens
  misc_feature: 1465 for SV(W|O) and mtDNA
ttcagggggtttggatgagaatggctgttactacgagggctatgtggctgattgaagagtatgcaatgagcgattttaggtctgtttgtcgtaggcagatggagcttgttataattatgc

SEQ ID NO: 56566 - DNA, 120 bp, Homo sapiens
  misc_feature: 1465 for SV(W|O) and mtDNA
ttagggctaggatgatgattaataagagggatgacataactattagtggcaggttagttgtttgtagggctcatggtaggggtaaaaggagggcaatttctagatcaaataataagaagg

SEQ ID NO: 56567 - DNA, 120 bp, Homo sapiens
  misc_feature: 1465 for SV(W|O) and mtDNA
ttagccctaaacctcaacagttaaatcaacaaaactgctcgccagaacactacgagccacagcttaaaactcaaaggacctggcggtgcttcatatccctctagaggagcctgttctgta

SEQ ID NO: 56568 - DNA, 120 bp, Homo sapiens
  misc_feature: 1465 for SV(W|O) and mtDNA
tgttggttgattgtagatattgggctgttaattgtcagttcagtgttttaatctgacgcaggcttatgcggaggagaatgttttcatgttacttatactaacattagttcttctataggg

SEQ ID NO: 56569 - DNA, 120 bp, Homo sapiens
  misc_feature: 1465 for SV(W|O) and mtDNA
tactcaatcctctgatcagggtgagcatcaaactcaaactacgccctgatcggcgcactgcgagcagtagcccaaacaatctcatatgaagtcaccctagccatcattctactatcaaca

SEQ ID NO: 56570 - DNA, 120 bp, Homo sapiens
  misc_feature: 1465 for SV(W|O) and mtDNA
tgttagcggttaggcgtacggccagggctattggttgaatgagtaggctgatggtttcgataataactagtatggggataaggggtgtaggtgtgccttgtggtaagaagtgggctaggg

SEQ ID NO: 56571 - DNA, 120 bp, Homo sapiens
  misc_feature: 1465 for SV(W|O) and mtDNA
ctaatgctaggctgccaatggtgagggaggttgaagtgagaggtatggttttgagtagtcctcctatttttcgaatatcttgttcattgttaaggttgtggatgatggacccggagcaca

SEQ ID NO: 56572 - DNA, 120 bp, Homo sapiens
  misc_feature: 1465 for SV(W|O) and mtDNA
tgatatttggcctcacgggaggacatagcctatgaaggctgttgctatagttgcaagcaggaggataatgccgatgtttcaggtttctgagtagagaaatgatccgtaatataggcctcg

SEQ ID NO: 56573 - DNA, 120 bp, Homo sapiens
  misc_feature: 1465 for SV(W|O) and mtDNA
atgatacgcccgagcagatgccaacacagcagccattcaagcaatcctatacaaccgtatcggcgatatcggtttcatcctcgccttagcatgatttatcctacactccaactcatgaga

SEQ ID NO: 56574 - DNA, 120 bp, Homo sapiens
  misc_feature: 1465 for SV(W|O) and mtDNA
tcgccttaatccaagcctacgttttcacacttctagtaagcctctacctgcacgacaacacataatgacccaccaatcacatgcctatcatatagtaaaacccagcccatgacccctaac

SEQ ID NO: 56575 - DNA, 120 bp, Homo sapiens
  misc_feature: 1465 for SV(W|O) and mtDNA
tcataagggctatcgtagttttctggggtagaaaatgtagcccatttcttgccacctcatgggctacaccttgacctaacgtctttacgtgggtacttgcgcttactttgtagccttcat

SEQ ID NO: 56576 - DNA, 120 bp, Homo sapiens
  misc_feature: 1465 for SV(W|O) and mtDNA
tatttttcgaatatcttgttcattgttaaggttgtggatgatggacccggagcacataaatagtatggctttgaagaaggcgtgggtgcagatgtgcaggaatgctaggtgtggttggtt

SEQ ID NO: 56577 - DNA, 120 bp, Homo sapiens
  misc_feature: 1465 for SV(W|O) and mtDNA
tataccaatgatggcgcgatgtaacacgagaaagcacataccaaggccaccacacaccacctgtccaaaaaggccttcgatacgggataatcctatttattacctcagaagtttttttct

SEQ ID NO: 56578 - DNA, 120 bp, Homo sapiens
  misc_feature: 1465 for SV(W|O) and mtDNA
taccatactaatcttagttaccgctaacaacctattccaactgttcatcggctgagagggcgtaggaattatatccttcttgctcatcagttgatgatacgcccgagcagatgccaacac

SEQ ID NO: 56579 - DNA, 120 bp, Homo sapiens
  misc_feature: 1465 for SV(W|O) and mtDNA
atcagttgatgatacgcccgagcagatgccaacacagcagccattcaagcaatcctatacaaccgtatcggcgatatcggtttcatcctcgccttagcatgatttatcctacactccaac

SEQ ID NO: 56580 - DNA, 120 bp, Homo sapiens
  misc_feature: 1465 for SV(W|O) and mtDNA
gtaatgatgtcggggttgagggataggaggagaatgggggataggtgtatgaacatgagggtgttttctcgtgtgaatgagggttttatgttgttaatgtggtgggtgagtgagccccat

SEQ ID NO: 56581 - DNA, 120 bp, Homo sapiens
  misc_feature: 1465 for SV(W|O) and mtDNA
ggtgtgataggtggcacggagaattttggattctcagggatgggttcgattctcatagtcctagaaataagggggtttaagctcctattatttactctatcaaagtaactcttttatcag

SEQ ID NO: 56582 - DNA, 120 bp, Homo sapiens
  misc_feature: 1465 for SV(W|O) and mtDNA
gcttcattcactgatttcccctattctcaggctacaccctagaccaaacctacgccaaaatccatttcactatcatattcatcggcgtaaatctaactttcttcccacaacactttctcg

SEQ ID NO: 56583 - DNA, 120 bp, Homo sapiens
  misc_feature: 1465 for SV(W|O) and mtDNA
cagccattttacctcacccccactgatgttcgccgaccgttgactattctctacaaaccacaaagacattggaacactatacctattattcggcgcatgagctggagtcctaggcacagc

SEQ ID NO: 56584 - DNA, 120 bp, Homo sapiens
  misc_feature: 1465 for SV(W|O) and mtDNA
gctggcccagctcggctcgaataaggaggcttagagctgtgcctaggactccagctcatgcgccgaataataggtatagtgttccaatgtctttgtggtttgtagagaatagtcaacggt

SEQ ID NO: 56585 - DNA, 120 bp, Homo sapiens
  misc_feature: 1465 for SV(W|O) and mtDNA
actattctgcctagcaaactcaaactacgaacgcactcacagtcgcatcataatcctctctcaaggacttcaaactctactcccactaatagctttttgatgacttctagcaagcctcgc

SEQ ID NO: 56586 - DNA, 120 bp, Homo sapiens
  misc_feature: 1465 for SV(W|O) and mtDNA
caacgccacttatccagtgaaccactatcacgaaaaaaactctacctctctatactaatctccctacaaatctccttaattataacattcacagccacagaactaatcatattttatatc

SEQ ID NO: 56587 - DNA, 120 bp, Homo sapiens
  misc_feature: 1465 for SV(W|O) and mtDNA
atcggggtagtccgagtaacgtcggggcattccggataggccgagaaagtgttgtgggaagaaagttagatttacgccgatgaatatgatagtgaaatggattttggcgtaggtttggtc

SEQ ID NO: 56588 - DNA, 120 bp, Homo sapiens
  misc_feature: 1465 for SV(W|O) and mtDNA
cttcagggggtttggatgagaatggctgttactacgagggctatgtggctgattgaagagtatgcaatgagcgattttaggtctgtttgtcgtaggcagatggagcttgttataattatg

SEQ ID NO: 56589 - DNA, 120 bp, Homo sapiens
  misc_feature: 1465 for SV(W|O) and mtDNA
ctcaatcctctgatcagggtgagcatcaaactcaaactacgccctgatcggcgcactgcgagcagtagcccaaacaatctcatatgaagtcaccctagccatcattctactatcaacatt

SEQ ID NO: 56590 - DNA, 120 bp, Homo sapiens
  misc_feature: 1465 for SV(W|O) and mtDNA
cgattaccgggctctgccatcttaacaaaccctgttcttgggtgggtgtgggtataatactaagttgagatgatatcatttacgggggaaggcgctttgtgaagtaggccttatttctct

SEQ ID NO: 56591 - DNA, 120 bp, Homo sapiens
  misc_feature: 1465 for SV(W|O) and mtDNA
ccaaccgaaatttttaatgcaggtttggtagtttaggacctgtgggtttgttaggtactgtttgcattaataaattaaagctccatagggtcttctcgtcttgctgtgttatgcccgcct

SEQ ID NO: 56592 - DNA, 120 bp, Homo sapiens
  misc_feature: 1465 for SV(W|O) and mtDNA
aatggggtctcctcctccggcggggtcgaagaaggtggtgttgaggttgcggtctgttagtagtatagtgatgccagcagctaggactgggagagataggagaagtaggactgctgtgat

SEQ ID NO: 56593 - DNA, 120 bp, Homo sapiens
  misc_feature: 1465 for SV(W|O) and mtDNA
agacttcaccagtcaaagcgaactactatactcaattgatccaataacttgaccaacggaacaagttaccctagggataacagcgcaatcctattctagagtccatatcaacaatagggt

SEQ ID NO: 56594 - DNA, 120 bp, Homo sapiens
  misc_feature: 1464 for SV(W|O) and mtDNA
tttatatcttcttcgaaaccacacttatccccaccttggctatcatcacccgatgaggcaaccagccagaacgcctgaacgcaggcacatacttcctattctacaccctagtaggctccc

SEQ ID NO: 56595 - DNA, 120 bp, Homo sapiens
  misc_feature: 1464 for SV(W|O) and mtDNA
ttgtggcaataaaaatgattaaggatactagtataagagatcaggttcgtcctttagtgttgtgtatggttatcatttgttttgaggttagtttgattagtcattgttgggtggtgatta

SEQ ID NO: 56596 - DNA, 120 bp, Homo sapiens
  misc_feature: 1464 for SV(W|O) and mtDNA
ttgggtaaatggtttggctaaggttgtctggtagtaaggtggagtgggtttggggctaggtttagctcagagcggtcaagttaagttgaaatctcctaagtgtaagttgggtgctttgtg

SEQ ID NO: 56597 - DNA, 120 bp, Homo sapiens
  misc_feature: 1464 for SV(W|O) and mtDNA
ttggcctcacgggaggacatagcctatgaaggctgttgctatagttgcaagcaggaggataatgccgatgtttcaggtttctgagtagagaaatgatccgtaatataggcctcgcccgat

SEQ ID NO: 56598 - DNA, 120 bp, Homo sapiens
  misc_feature: 1464 for SV(W|O) and mtDNA
ggttttgagtagtcctcctatttttcgaatatcttgttcattgttaaggttgtggatgatggacccggagcacataaatagtatggctttgaagaaggcgtgggtgcagatgtgcaggaa

SEQ ID NO: 56599 - DNA, 120 bp, Homo sapiens
  misc_feature: 1464 for SV(W|O) and mtDNA
ttcattcactgatttcccctattctcaggctacaccctagaccaaacctacgccaaaatccatttcactatcatattcatcggcgtaaatctaactttcttcccacaacactttctcggc

SEQ ID NO: 56600 - DNA, 120 bp, Homo sapiens
  misc_feature: 1464 for SV(W|O) and mtDNA
ttatggttcattgtccggagagtatattgttgaagaggatagctattagaaggattatggatgcggttgcttgcgtgaggaaatacttgatggcagcttctgtggaacgagggtttattt

SEQ ID NO: 56601 - DNA, 120 bp, Homo sapiens
  misc_feature: 1464 for SV(W|O) and mtDNA
ttactggttgtcctccgattcaggttagaatgaggaggtctgcggctaggagtcaataaagtgattggcttagtgggcgaaatattatgctttgttgtttggatatatggaggatgggga

SEQ ID NO: 56602 - DNA, 120 bp, Homo sapiens
  misc_feature: 1464 for SV(W|O) and mtDNA
caagggaaagatgaaaaattataaccaagcataatatagcaaggactaacccctataccttctgcataatgaattaactagaaataactttgcaaggagagccaaagctaagacccccga

SEQ ID NO: 56603 - DNA, 120 bp, Homo sapiens
  misc_feature: 1464 for SV(W|O) and mtDNA
tcggaggttgggttctgctccgaggtcgccccaaccgaaatttttaatgcaggtttggtagtttaggacctgtgggtttgttaggtactgtttgcattaataaattaaagctccataggg

SEQ ID NO: 56604 - DNA, 120 bp, Homo sapiens
  misc_feature: 1464 for SV(W|O) and mtDNA
attggaccaatctatcaccctatagaagaactaatgttagtataagtaacatgaaaacattctcctccgcataagcctgcgtcagattaaaacactgaactgacaattaacagcccaata

SEQ ID NO: 56605 - DNA, 120 bp, Homo sapiens
  misc_feature: 1464 for SV(W|O) and mtDNA
tattacggatcatttctctactcagaaacctgaaacatcggcattatcctcctgcttgcaactatagcaacagccttcataggctatgtcctcccgtgaggccaaatatcattctgaggg

SEQ ID NO: 56606 - DNA, 120 bp, Homo sapiens
  misc_feature: 1464 for SV(W|O) and mtDNA
tatgcctagaaggaataatactatcgctgttcattatagctactctcataaccctcaacacccactccctcttagccaatattgtgcctattgccatactagtctttgccgcctgcgaag

SEQ ID NO: 56607 - DNA, 120 bp, Homo sapiens
  misc_feature: 1464 for SV(W|O) and mtDNA
tacagggaggaatttgaagtagatagaaaccgacctggattactccggtctgaactcagatcacgtaggactttaatcgttgaacaaacgaacctttaatagcggctgcaccatcgggat

SEQ ID NO: 56608 - DNA, 120 bp, Homo sapiens
  misc_feature: 1464 for SV(W|O) and mtDNA
gtttggctaaggttgtctggtagtaaggtggagtgggtttggggctaggtttagctcagagcggtcaagttaagttgaaatctcctaagtgtaagttgggtgctttgtgttaagctacac

SEQ ID NO: 56609 - DNA, 120 bp, Homo sapiens
  misc_feature: 1464 for SV(W|O) and mtDNA
gtgagggaggttgaagtgagaggtatggttttgagtagtcctcctatttttcgaatatcttgttcattgttaaggttgtggatgatggacccggagcacataaatagtatggctttgaag

SEQ ID NO: 56610 - DNA, 120 bp, Homo sapiens
  misc_feature: 1464 for SV(W|O) and mtDNA
ggggcattccggataggccgagaaagtgttgtgggaagaaagttagatttacgccgatgaatatgatagtgaaatggattttggcgtaggtttggtctagggtgtagcctgagaataggg

SEQ ID NO: 56611 - DNA, 120 bp, Homo sapiens
  misc_feature: 1464 for SV(W|O) and mtDNA
ggggcaccgattattaggggaactagtcagttgccaaagcctccgattatgatgggtattactatgaagaagattattacaaatgcatgggctgtgacgataacgttgtagatgtggtcg

SEQ ID NO: 56612 - DNA, 120 bp, Homo sapiens
  misc_feature: 1464 for SV(W|O) and mtDNA
cacctaattggaagcgccaccctagcaatatcaaccattaaccttccctctacacttatcatcttcacaattctaattctactgactatcctagaaatcgctgtcgccttaatccaagcc

SEQ ID NO: 56613 - DNA, 120 bp, Homo sapiens
  misc_feature: 1464 for SV(W|O) and mtDNA
ggaacgagggtttatttttttggttagaactggaataaaagctagcatgtttatttctaggcctactcaggtaaaaaatcagtgcgagcttagcgctgtgatgagtgtgcctgcaaagat

SEQ ID NO: 56614 - DNA, 120 bp, Homo sapiens
  misc_feature: 1464 for SV(W|O) and mtDNA
gagtaacgtcggggcattccggataggccgagaaagtgttgtgggaagaaagttagatttacgccgatgaatatgatagtgaaatggattttggcgtaggtttggtctagggtgtagcct

SEQ ID NO: 56615 - DNA, 120 bp, Homo sapiens
  misc_feature: 1464 for SV(W|O) and mtDNA
gagaccccattctataccaacacctattctgatttttcggtcaccctgaagtttatattcttatcctaccaggcttcggaataatctcccatattgtaacttactactccggaaaaaaag

SEQ ID NO: 56616 - DNA, 120 bp, Homo sapiens
  misc_feature: 1464 for SV(W|O) and mtDNA
actacgtacataacctaaacctactccaatgctaaaactaatcgtcccaacaattatattactaccactgacatgactttccaaaaaacacataatttgaatcaacacaaccacccacag

SEQ ID NO: 56617 - DNA, 120 bp, Homo sapiens
  misc_feature: 1464 for SV(W|O) and mtDNA
aggtaacgaccacatctacaacgttatcgtcacagcccatgcatttgtaataatcttcttcatagtaatacccatcataatcggaggctttggcaactgactagttcccctaataatcgg

SEQ ID NO: 56618 - DNA, 120 bp, Homo sapiens
  misc_feature: 1464 for SV(W|O) and mtDNA
aactgctcgccagaacactacgagccacagcttaaaactcaaaggacctggcggtgcttcatatccctctagaggagcctgttctgtaatcgataaaccccgatcaacctcaccacctct

SEQ ID NO: 56619 - DNA, 120 bp, Homo sapiens
  misc_feature: 1464 for SV(W|O) and mtDNA
acctagaaggttgcctggctggcccagctcggctcgaataaggaggcttagagctgtgcctaggactccagctcatgcgccgaataataggtatagtgttccaatgtctttgtggtttgt

SEQ ID NO: 56620 - DNA, 120 bp, Homo sapiens
  misc_feature: 1463 for SV(W|O) and mtDNA
agcttacacaatagcttttatagtaaagatacctctttacggactccacttatgactccctaaagcccatgtcgaagcccccatcgctgggtcaatagtacttgccgcagtactcttaaa

SEQ ID NO: 56621 - DNA, 120 bp, Homo sapiens
  misc_feature: 1463 for SV(W|O) and mtDNA
ttgtagatattgggctgttaattgtcagttcagtgttttaatctgacgcaggcttatgcggaggagaatgttttcatgttacttatactaacattagttcttctatagggtgatagattg

SEQ ID NO: 56622 - DNA, 120 bp, Homo sapiens
  misc_feature: 1463 for SV(W|O) and mtDNA
ttgatgtgtgatagttgagggttgattgctgtacttgcttgtaagcatggggagggggttttgatgtggattgggtttttatgtactacaggtggtcaagtatttatggtaccgtacaat

SEQ ID NO: 56623 - DNA, 120 bp, Homo sapiens
  misc_feature: 1463 for SV(W|O) and mtDNA
ttccaccccctagcagaaaatagcccactaatccaaactctaacactatgcttaggcgctatcaccactctgttcgcagcagtctgcgcccttacacaaaatgacatcaaaaaaatcgta

SEQ ID NO: 56624 - DNA, 120 bp, Homo sapiens
  misc_feature: 1463 for SV(W|O) and mtDNA
tggaacgagggtttatttttttggttagaactggaataaaagctagcatgtttatttctaggcctactcaggtaaaaaatcagtgcgagcttagcgctgtgatgagtgtgcctgcaaaga

SEQ ID NO: 56625 - DNA, 120 bp, Homo sapiens
  misc_feature: 1463 for SV(W|O) and mtDNA
tcgtagccttctccacttcaagtcaactaggactcataatagttacaatcggcatcaaccaaccacacctagcattcctgcacatctgcacccacgccttcttcaaagccatactattta

SEQ ID NO: 56626 - DNA, 120 bp, Homo sapiens
  misc_feature: 1463 for SV(W|O) and mtDNA
tcggggttgagggataggaggagaatgggggataggtgtatgaacatgagggtgttttctcgtgtgaatgagggttttatgttgttaatgtggtgggtgagtgagccccattgtgttgtg

SEQ ID NO: 56627 - DNA, 120 bp, Homo sapiens
  misc_feature: 1463 for SV(W|O) and mtDNA
tcgctgtcgccttaatccaagcctacgttttcacacttctagtaagcctctacctgcacgacaacacataatgacccaccaatcacatgcctatcatatagtaaaacccagcccatgacc

SEQ ID NO: 56628 - DNA, 120 bp, Homo sapiens
  misc_feature: 1463 for SV(W|O) and mtDNA
tcatcacccgatgaggcaaccagccagaacgcctgaacgcaggcacatacttcctattctacaccctagtaggctcccttcccctactcatcgcactaatttacactcacaacaccctag

SEQ ID NO: 56629 - DNA, 120 bp, Homo sapiens
  misc_feature: 1463 for SV(W|O) and mtDNA
tattagtgggagtagagtttgaagtccttgagagaggattatgatgcgactgtgagtgcgttcgtagtttgagtttgctaggcagaatagtaatgaggatgtaagcccgtgggcgattat

SEQ ID NO: 56630 - DNA, 120 bp, Homo sapiens
  misc_feature: 1463 for SV(W|O) and mtDNA
gggtttggatgagaatggctgttactacgagggctatgtggctgattgaagagtatgcaatgagcgattttaggtctgtttgtcgtaggcagatggagcttgttataattatgcctcata

SEQ ID NO: 56631 - DNA, 120 bp, Homo sapiens
  misc_feature: 1463 for SV(W|O) and mtDNA
gggagtagtgtgattgaggtggagtagattaggcgtaggtagaagtagaggttaaggagggtgatggtggctatgatggtggggatgatgaggctattgttttttgtgaattcttcgata

SEQ ID NO: 56632 - DNA, 120 bp, Homo sapiens
  misc_feature: 1463 for SV(W|O) and mtDNA
taggtaacgaccacatctacaacgttatcgtcacagcccatgcatttgtaataatcttcttcatagtaatacccatcataatcggaggctttggcaactgactagttcccctaataatcg

SEQ ID NO: 56633 - DNA, 120 bp, Homo sapiens
  misc_feature: 1463 for SV(W|O) and mtDNA
taggccccaaaaattttggtgcaactccaaataaaagtaataaccatgcacactactataaccaccctaaccctgacttccctaattccccccatccttaccaccctcgttaaccctaac

SEQ ID NO: 56634 - DNA, 120 bp, Homo sapiens
  misc_feature: 1463 for SV(W|O) and mtDNA
atcaaaagggacaagcatcaagcacgcagcaatgcagctcaaaacgcttagcctagccacacccccacgggaaacagcagtgattaacctttagcaataaacgaaagtttaactaagcta

SEQ ID NO: 56635 - DNA, 120 bp, Homo sapiens
  misc_feature: 1463 for SV(W|O) and mtDNA
gacgaaccagagtgtagcttaacacaaagcacccaacttacacttaggagatttcaacttaacttgaccgctctgagctaaacctagccccaaacccactccaccttactaccagacaac

SEQ ID NO: 56636 - DNA, 120 bp, Homo sapiens
  misc_feature: 1463 for SV(W|O) and mtDNA
gttcattgtccggagagtatattgttgaagaggatagctattagaaggattatggatgcggttgcttgcgtgaggaaatacttgatggcagcttctgtggaacgagggtttatttttttg

SEQ ID NO: 56637 - DNA, 120 bp, Homo sapiens
  misc_feature: 1463 for SV(W|O) and mtDNA
actacaaccacgaccaatgatatgaaaaaccatcgttgtatttcaactacaagaacaccaatgaccccaatacgcaaaactaaccccctaataaaattaattaaccactcattcatcgac

SEQ ID NO: 56638 - DNA, 120 bp, Homo sapiens
  misc_feature: 1463 for SV(W|O) and mtDNA
gtcaataaagtgattggcttagtgggcgaaatattatgctttgttgtttggatatatggaggatggggattattgctaggatgaggatggatagtaatagggcaaggacgcctcctagtt

SEQ ID NO: 56639 - DNA, 120 bp, Homo sapiens
  misc_feature: 1463 for SV(W|O) and mtDNA
ggtttgttaggtactgtttgcattaataaattaaagctccatagggtcttctcgtcttgctgtgttatgcccgcctcttcacgggcaggtcaatttcactggttaaaagtaagagacagc

SEQ ID NO: 56640 - DNA, 120 bp, Homo sapiens
  misc_feature: 1463 for SV(W|O) and mtDNA
ggttcagtctaatcctttttgtagtcactcataggccagacttagggctaggatgatgattaataagagggatgacataactattagtggcaggttagttgtttgtagggctcatggtag

SEQ ID NO: 56641 - DNA, 120 bp, Homo sapiens
  misc_feature: 1463 for SV(W|O) and mtDNA
ctaagcctccttattcgagccgagctgggccagccaggcaaccttctaggtaacgaccacatctacaacgttatcgtcacagcccatgcatttgtaataatcttcttcatagtaataccc

SEQ ID NO: 56642 - DNA, 120 bp, Homo sapiens
  misc_feature: 1463 for SV(W|O) and mtDNA
ggctcattcatttctctaacagcagtaatattaataattttcatgatttgagaagccttcgcttcaaagcgaaaagtcctaatagtagaagaaccctccataaacctggagtgactatat

SEQ ID NO: 56643 - DNA, 120 bp, Homo sapiens
  misc_feature: 1463 for SV(W|O) and mtDNA
cttcatagtaatacccatcataatcggaggctttggcaactgactagttcccctaataatcggtgcccccgatatggcgtttccccgcataaacaacataagcttctgactcttacctcc

SEQ ID NO: 56644 - DNA, 120 bp, Homo sapiens
  misc_feature: 1463 for SV(W|O) and mtDNA
ctacgtacataacctaaacctactccaatgctaaaactaatcgtcccaacaattatattactaccactgacatgactttccaaaaaacacataatttgaatcaacacaaccacccacagc

SEQ ID NO: 56645 - DNA, 120 bp, Homo sapiens
  misc_feature: 1463 for SV(W|O) and mtDNA
gatatagggtcgaagccgcactcgtaaggggtggatttttctatgtagccgttgagttgtggtagtcaaaatgtaataattattagtagtaaggctaggagggtgttgattattaaaatt

SEQ ID NO: 56646 - DNA, 120 bp, Homo sapiens
  misc_feature: 1463 for SV(W|O) and mtDNA
aattaagaaagcgttcaagctcaacacccactacctaaaaaatcccaaacatataactgaactcctcatacccaattggaccaatctatcaccctatagaagaactaatgttagtataag

SEQ ID NO: 56647 - DNA, 120 bp, Homo sapiens
  misc_feature: 1463 for SV(W|O) and mtDNA
ctatcatctgtaggctcattcatttctctaacagcagtaatattaataattttcatgatttgagaagccttcgcttcaaagcgaaaagtcctaatagtagaagaaccctccataaacctg

SEQ ID NO: 56648 - DNA, 120 bp, Homo sapiens
  misc_feature: 1463 for SV(W|O) and mtDNA
accaaaccactttcaccgctacacgaccgggggtatactacggtcaatgctctgaaatctgtggagcaaaccacagtttcatgcccatcgtcctagaattaattcccctaaaaatctttg

SEQ ID NO: 56649 - DNA, 120 bp, Homo sapiens
  misc_feature: 1463 for SV(W|O) and mtDNA
aaccctcgtggagccattcatacaggtccctatttaaggaacaagtgattatgctacctttgcacggttagggtaccgcggccgttaaacatgtgtcactgggcaggcggtgcctctaat

SEQ ID NO: 56650 - DNA, 120 bp, Homo sapiens
  misc_feature: 1463 for SV(W|O) and mtDNA
agtctgcgcccttacacaaaatgacatcaaaaaaatcgtagccttctccacttcaagtcaactaggactcataatagttacaatcggcatcaaccaaccacacctagcattcctgcacat

SEQ ID NO: 56651 - DNA, 120 bp, Homo sapiens
  misc_feature: 1463 for SV(W|O) and mtDNA
atggcacatgcagcgcaagtaggtctacaagacgctacttcccctatcatagaagagcttatcacctttcatgatcacgccctcataatcattttccttatctgcttcctagtcctgtat

SEQ ID NO: 56652 - DNA, 120 bp, Homo sapiens
  misc_feature: 1462 for SV(W|O) and mtDNA
tttttcgaatatcttgttcattgttaaggttgtggatgatggacccggagcacataaatagtatggctttgaagaaggcgtgggtgcagatgtgcaggaatgctaggtgtggttggttga

SEQ ID NO: 56653 - DNA, 120 bp, Homo sapiens
  misc_feature: 1462 for SV(W|O) and mtDNA
ttttgagtagtcctcctatttttcgaatatcttgttcattgttaaggttgtggatgatggacccggagcacataaatagtatggctttgaagaaggcgtgggtgcagatgtgcaggaatg

SEQ ID NO: 56654 - DNA, 120 bp, Homo sapiens
  misc_feature: 1462 for SV(W|O) and mtDNA
ttttaggcctactatgggtgttaaattttttactctctctacaaggttttttcctagtgtccaaagagctgttcctctttggactaacagttaaatttacaaggggatttagagggttct

SEQ ID NO: 56655 - DNA, 120 bp, Homo sapiens
  misc_feature: 1462 for SV(W|O) and mtDNA
catcagttgatgatacgcccgagcagatgccaacacagcagccattcaagcaatcctatacaaccgtatcggcgatatcggtttcatcctcgccttagcatgatttatcctacactccaa

SEQ ID NO: 56656 - DNA, 120 bp, Homo sapiens
  misc_feature: 1462 for SV(W|O) and mtDNA
attctgcctagcaaactcaaactacgaacgcactcacagtcgcatcataatcctctctcaaggacttcaaactctactcccactaatagctttttgatgacttctagcaagcctcgctaa

SEQ ID NO: 56657 - DNA, 120 bp, Homo sapiens
  misc_feature: 1462 for SV(W|O) and mtDNA
cagtctgcgcccttacacaaaatgacatcaaaaaaatcgtagccttctccacttcaagtcaactaggactcataatagttacaatcggcatcaaccaaccacacctagcattcctgcaca

SEQ ID NO: 56658 - DNA, 120 bp, Homo sapiens
  misc_feature: 1462 for SV(W|O) and mtDNA
tgtcctccgattcaggttagaatgaggaggtctgcggctaggagtcaataaagtgattggcttagtgggcgaaatattatgctttgttgtttggatatatggaggatggggattattgct

SEQ ID NO: 56659 - DNA, 120 bp, Homo sapiens
  misc_feature: 1462 for SV(W|O) and mtDNA
tggttttgagtagtcctcctatttttcgaatatcttgttcattgttaaggttgtggatgatggacccggagcacataaatagtatggctttgaagaaggcgtgggtgcagatgtgcagga

SEQ ID NO: 56660 - DNA, 120 bp, Homo sapiens
  misc_feature: 1462 for SV(W|O) and mtDNA
tgggggctagtttttgtcatgtgagaagaagcaggccggatgtcagaggggtgccttgggtaacctctgggactcagaagtgaaagggggctattcctagttttattgctatagccatta

SEQ ID NO: 56661 - DNA, 120 bp, Homo sapiens
  misc_feature: 1462 for SV(W|O) and mtDNA
tagcccatttcttgccacctcatgggctacaccttgacctaacgtctttacgtgggtacttgcgcttactttgtagccttcatcagggtttgctgaagatggcggtatataggctgagca

SEQ ID NO: 56662 - DNA, 120 bp, Homo sapiens
  misc_feature: 1462 for SV(W|O) and mtDNA
gggggtttggatgagaatggctgttactacgagggctatgtggctgattgaagagtatgcaatgagcgattttaggtctgtttgtcgtaggcagatggagcttgttataattatgcctca

SEQ ID NO: 56663 - DNA, 120 bp, Homo sapiens
  misc_feature: 1462 for SV(W|O) and mtDNA
tctaagcctccttattcgagccgagctgggccagccaggcaaccttctaggtaacgaccacatctacaacgttatcgtcacagcccatgcatttgtaataatcttcttcatagtaatacc

SEQ ID NO: 56664 - DNA, 120 bp, Homo sapiens
  misc_feature: 1462 for SV(W|O) and mtDNA
aagctattagtgggagtagagtttgaagtccttgagagaggattatgatgcgactgtgagtgcgttcgtagtttgagtttgctaggcagaatagtaatgaggatgtaagcccgtgggcga

SEQ ID NO: 56665 - DNA, 120 bp, Homo sapiens
  misc_feature: 1462 for SV(W|O) and mtDNA
gactacaaccacgaccaatgatatgaaaaaccatcgttgtatttcaactacaagaacaccaatgaccccaatacgcaaaactaaccccctaataaaattaattaaccactcattcatcga

SEQ ID NO: 56666 - DNA, 120 bp, Homo sapiens
  misc_feature: 1462 for SV(W|O) and mtDNA
tatcatcaactgatgagcaagaaggatataattcctacgccctctcagccgatgaacagttggaataggttgttagcggtaactaagattagtatggtaattaggaagatgagtagatat

SEQ ID NO: 56667 - DNA, 120 bp, Homo sapiens
  misc_feature: 1462 for SV(W|O) and mtDNA
ggttggttgatgccgattgtaactattatgagtcctagttgacttgaagtggagaaggctacgatttttttgatgtcattttgtgtaagggcgcagactgctgcgaacagagtggtgata

SEQ ID NO: 56668 - DNA, 120 bp, Homo sapiens
  misc_feature: 1462 for SV(W|O) and mtDNA
acttgttggttgattgtagatattgggctgttaattgtcagttcagtgttttaatctgacgcaggcttatgcggaggagaatgttttcatgttacttatactaacattagttcttctata

SEQ ID NO: 56669 - DNA, 120 bp, Homo sapiens
  misc_feature: 1462 for SV(W|O) and mtDNA
gccgtttactcaatcctctgatcagggtgagcatcaaactcaaactacgccctgatcggcgcactgcgagcagtagcccaaacaatctcatatgaagtcaccctagccatcattctacta

SEQ ID NO: 56670 - DNA, 120 bp, Homo sapiens
  misc_feature: 1462 for SV(W|O) and mtDNA
aatggcacatgcagcgcaagtaggtctacaagacgctacttcccctatcatagaagagcttatcacctttcatgatcacgccctcataatcattttccttatctgcttcctagtcctgta

SEQ ID NO: 56671 - DNA, 120 bp, Homo sapiens
  misc_feature: 1462 for SV(W|O) and mtDNA
gtggaacgagggtttatttttttggttagaactggaataaaagctagcatgtttatttctaggcctactcaggtaaaaaatcagtgcgagcttagcgctgtgatgagtgtgcctgcaaag

SEQ ID NO: 56672 - DNA, 120 bp, Homo sapiens
  misc_feature: 1462 for SV(W|O) and mtDNA
ccccaccggcgtcaaagtatttagctgactcgccacactccacggaagcaatatgaaatgatctgctgcagtgctctgagccctaggattcatctttcttttcaccgtaggtggcctgac

SEQ ID NO: 56673 - DNA, 120 bp, Homo sapiens
  misc_feature: 1462 for SV(W|O) and mtDNA
atatttggcctcacgggaggacatagcctatgaaggctgttgctatagttgcaagcaggaggataatgccgatgtttcaggtttctgagtagagaaatgatccgtaatataggcctcgcc

SEQ ID NO: 56674 - DNA, 120 bp, Homo sapiens
  misc_feature: 1462 for SV(W|O) and mtDNA
gctcattcatttctctaacagcagtaatattaataattttcatgatttgagaagccttcgcttcaaagcgaaaagtcctaatagtagaagaaccctccataaacctggagtgactatatg

SEQ ID NO: 56675 - DNA, 120 bp, Homo sapiens
  misc_feature: 1462 for SV(W|O) and mtDNA
gcgtcaaagtatttagctgactcgccacactccacggaagcaatatgaaatgatctgctgcagtgctctgagccctaggattcatctttcttttcaccgtaggtggcctgactggcattg

SEQ ID NO: 56676 - DNA, 120 bp, Homo sapiens
  misc_feature: 1462 for SV(W|O) and mtDNA
gagttccttttactttttttaacctttccttatgagcatgcctgtgttgggttgacagtgagggtaataatgacttgttggttgattgtagatattgggctgttaattgtcagttcagtg

SEQ ID NO: 56677 - DNA, 120 bp, Homo sapiens
  misc_feature: 1462 for SV(W|O) and mtDNA
gagccattcatacaggtccctatttaaggaacaagtgattatgctacctttgcacggttagggtaccgcggccgttaaacatgtgtcactgggcaggcggtgcctctaatactggtgatg

SEQ ID NO: 56678 - DNA, 120 bp, Homo sapiens
  misc_feature: 1462 for SV(W|O) and mtDNA
aggagttcagttatatgtttgggattttttaggtagtgggtgttgagcttgaacgctttcttaattggtggctgcttttaggcctactatgggtgttaaattttttactctctctacaag

SEQ ID NO: 56679 - DNA, 120 bp, Homo sapiens
  misc_feature: 1462 for SV(W|O) and mtDNA
aaaattcagaataataacacacccgaccacaccgctaacaatcaatactaaacccccataaataggagaaggcttagaagaaaaccccacaaaccccattactaaacccacactcaacag

SEQ ID NO: 56680 - DNA, 120 bp, Homo sapiens
  misc_feature: 1462 for SV(W|O) and mtDNA
cggggcattccggataggccgagaaagtgttgtgggaagaaagttagatttacgccgatgaatatgatagtgaaatggattttggcgtaggtttggtctagggtgtagcctgagaatagg

SEQ ID NO: 56681 - DNA, 120 bp, Homo sapiens
  misc_feature: 1462 for SV(W|O) and mtDNA
attttgtgtcaactggagttttttacaactcaggtgagttttagctttattggggagggggtgatctaaaacactctttacgccggcttctattgacttgggttaatcgtgtgaccgcgg

SEQ ID NO: 56682 - DNA, 120 bp, Homo sapiens
  misc_feature: 1462 for SV(W|O) and mtDNA
actcaatcctctgatcagggtgagcatcaaactcaaactacgccctgatcggcgcactgcgagcagtagcccaaacaatctcatatgaagtcaccctagccatcattctactatcaacat

SEQ ID NO: 56683 - DNA, 120 bp, Homo sapiens
  misc_feature: 1462 for SV(W|O) and mtDNA
atggcgcgatgtaacacgagaaagcacataccaaggccaccacacaccacctgtccaaaaaggccttcgatacgggataatcctatttattacctcagaagtttttttcttcgcaggatt

SEQ ID NO: 56684 - DNA, 120 bp, Homo sapiens
  misc_feature: 1462 for SV(W|O) and mtDNA
aaccatacacaacactaaaggacgaacctgatctcttatactagtatccttaatcatttttattgccacaactaacctcctcggactcctgcctcactcatttacaccaaccacccaact

SEQ ID NO: 56685 - DNA, 120 bp, Homo sapiens
  misc_feature: 1461 for SV(W|O) and mtDNA
tttcgaatatcttgttcattgttaaggttgtggatgatggacccggagcacataaatagtatggctttgaagaaggcgtgggtgcagatgtgcaggaatgctaggtgtggttggttgatg

SEQ ID NO: 56686 - DNA, 120 bp, Homo sapiens
  misc_feature: 1461 for SV(W|O) and mtDNA
ttgattgctgtacttgcttgtaagcatggggagggggttttgatgtggattgggtttttatgtactacaggtggtcaagtatttatggtaccgtacaatattcatggtggctggcagtaa

SEQ ID NO: 56687 - DNA, 120 bp, Homo sapiens
  misc_feature: 1461 for SV(W|O) and mtDNA
cgtacaaccctaacataaccattcttaatttaactatttatattatcctaactactaccgcattcctactactcaacttaaactccagcaccacgaccctactactatctcgcacctgaa

SEQ ID NO: 56688 - DNA, 120 bp, Homo sapiens
  misc_feature: 1461 for SV(W|O) and mtDNA
ttacacaatagcttttatagtaaagatacctctttacggactccacttatgactccctaaagcccatgtcgaagcccccatcgctgggtcaatagtacttgccgcagtactcttaaaact

SEQ ID NO: 56689 - DNA, 120 bp, Homo sapiens
  misc_feature: 1461 for SV(W|O) and mtDNA
tgttctggcgagcagttttgttgatttaactgttgaggtttagggctaagcatagtggggtatctaatcccagtttgggtcttagctattgtgtgttcagatatgttaaagccactttcg

SEQ ID NO: 56690 - DNA, 120 bp, Homo sapiens
  misc_feature: 1461 for SV(W|O) and mtDNA
tgtgccattaagatatataggatttagcctataatttaactttgacaaagttatgaaatggtttttctaatacctttttgaaaaagtcatggaggccatggggttggcttgaaaccagct

SEQ ID NO: 56691 - DNA, 120 bp, Homo sapiens
  misc_feature: 1461 for SV(W|O) and mtDNA
tgtctaacaacatggctttctcaacttttaaaggataacagctatccattggtcttaggccccaaaaattttggtgcaactccaaataaaagtaataaccatgcacactactataaccac

SEQ ID NO: 56692 - DNA, 120 bp, Homo sapiens
  misc_feature: 1461 for SV(W|O) and mtDNA
aaatgataaccatacacaacactaaaggacgaacctgatctcttatactagtatccttaatcatttttattgccacaactaacctcctcggactcctgcctcactcatttacaccaacca

SEQ ID NO: 56693 - DNA, 120 bp, Homo sapiens
  misc_feature: 1461 for SV(W|O) and mtDNA
ggtaatgatgtcggggttgagggataggaggagaatgggggataggtgtatgaacatgagggtgttttctcgtgtgaatgagggttttatgttgttaatgtggtgggtgagtgagcccca

SEQ ID NO: 56694 - DNA, 120 bp, Homo sapiens
  misc_feature: 1461 for SV(W|O) and mtDNA
tggctttctcaacttttaaaggataacagctatccattggtcttaggccccaaaaattttggtgcaactccaaataaaagtaataaccatgcacactactataaccaccctaaccctgac

SEQ ID NO: 56695 - DNA, 120 bp, Homo sapiens
  misc_feature: 1461 for SV(W|O) and mtDNA
aatgggccattatcgaagaattcacaaaaaacaatagcctcatcatccccaccatcatagccaccatcaccctccttaacctctacttctacctacgcctaatctactccacctcaatca

SEQ ID NO: 56696 - DNA, 120 bp, Homo sapiens
  misc_feature: 1461 for SV(W|O) and mtDNA
tcttaatggcacatgcagcgcaagtaggtctacaagacgctacttcccctatcatagaagagcttatcacctttcatgatcacgccctcataatcattttccttatctgcttcctagtcc

SEQ ID NO: 56697 - DNA, 120 bp, Homo sapiens
  misc_feature: 1461 for SV(W|O) and mtDNA
tcgcccttaccacgctactcctacctatctccccttttatactaataatcttatagaaatttaggttaaatacagaccaagagccttcaaagccctcagtaagttgcaatacttaatttc

SEQ ID NO: 56698 - DNA, 120 bp, Homo sapiens
  misc_feature: 1461 for SV(W|O) and mtDNA
tcaatattctttatctgcctcttcctacacatcgggcgaggcctatattacggatcatttctctactcagaaacctgaaacatcggcattatcctcctgcttgcaactatagcaacagcc

SEQ ID NO: 56699 - DNA, 120 bp, Homo sapiens
  misc_feature: 1461 for SV(W|O) and mtDNA
tatggttttgagtagtcctcctatttttcgaatatcttgttcattgttaaggttgtggatgatggacccggagcacataaatagtatggctttgaagaaggcgtgggtgcagatgtgcag

SEQ ID NO: 56700 - DNA, 120 bp, Homo sapiens
  misc_feature: 1461 for SV(W|O) and mtDNA
tatcttaatggcacatgcagcgcaagtaggtctacaagacgctacttcccctatcatagaagagcttatcacctttcatgatcacgccctcataatcattttccttatctgcttcctagt

SEQ ID NO: 56701 - DNA, 120 bp, Homo sapiens
  misc_feature: 1461 for SV(W|O) and mtDNA
atactaggcctactaaccaacacactaaccatataccaatgatggcgcgatgtaacacgagaaagcacataccaaggccaccacacaccacctgtccaaaaaggccttcgatacgggata

SEQ ID NO: 56702 - DNA, 120 bp, Homo sapiens
  misc_feature: 1461 for SV(W|O) and mtDNA
tacattttctaccccagaaaactacgatagcccttatgaaacttaagggtcgaaggtggatttagcagtaaactgagagtagagtgcttagttgaacagggccctgaagcgcgtacacac

SEQ ID NO: 56703 - DNA, 120 bp, Homo sapiens
  misc_feature: 1461 for SV(W|O) and mtDNA
atatagggtcgaagccgcactcgtaaggggtggatttttctatgtagccgttgagttgtggtagtcaaaatgtaataattattagtagtaaggctaggagggtgttgattattaaaatta

SEQ ID NO: 56704 - DNA, 120 bp, Homo sapiens
  misc_feature: 1461 for SV(W|O) and mtDNA
taacgaccacatctacaacgttatcgtcacagcccatgcatttgtaataatcttcttcatagtaatacccatcataatcggaggctttggcaactgactagttcccctaataatcggtgc

SEQ ID NO: 56705 - DNA, 120 bp, Homo sapiens
  misc_feature: 1461 for SV(W|O) and mtDNA
gtaccgcaagggaaagatgaaaaattataaccaagcataatatagcaaggactaacccctataccttctgcataatgaattaactagaaataactttgcaaggagagccaaagctaagac

SEQ ID NO: 56706 - DNA, 120 bp, Homo sapiens
  misc_feature: 1461 for SV(W|O) and mtDNA
ggggctagtttttgtcatgtgagaagaagcaggccggatgtcagaggggtgccttgggtaacctctgggactcagaagtgaaagggggctattcctagttttattgctatagccattatg

SEQ ID NO: 56707 - DNA, 120 bp, Homo sapiens
  misc_feature: 1461 for SV(W|O) and mtDNA
aagcaagtacagcaatcaaccctcaactatcacacatcaactgcaactccaaagccacccctcacccactaggataccaacaaacctacccacccttaacagtacatagtacataaagcc

SEQ ID NO: 56708 - DNA, 120 bp, Homo sapiens
  misc_feature: 1461 for SV(W|O) and mtDNA
ggcgagcagttttgttgatttaactgttgaggtttagggctaagcatagtggggtatctaatcccagtttgggtcttagctattgtgtgttcagatatgttaaagccactttcgtagtct

SEQ ID NO: 56709 - DNA, 120 bp, Homo sapiens
  misc_feature: 1461 for SV(W|O) and mtDNA
ggagttcagttatatgtttgggattttttaggtagtgggtgttgagcttgaacgctttcttaattggtggctgcttttaggcctactatgggtgttaaattttttactctctctacaagg

SEQ ID NO: 56710 - DNA, 120 bp, Homo sapiens
  misc_feature: 1461 for SV(W|O) and mtDNA
acaagctccatctgcctacgacaaacagacctaaaatcgctcattgcatactcttcaatcagccacatagccctcgtagtaacagccattctcatccaaaccccctgaagcttcaccggc

SEQ ID NO: 56711 - DNA, 120 bp, Homo sapiens
  misc_feature: 1461 for SV(W|O) and mtDNA
ctactatgcctagaaggaataatactatcgctgttcattatagctactctcataaccctcaacacccactccctcttagccaatattgtgcctattgccatactagtctttgccgcctgc

SEQ ID NO: 56712 - DNA, 120 bp, Homo sapiens
  misc_feature: 1461 for SV(W|O) and mtDNA
gaaaacaaccgaaaccaaataattcaagcactgcttattacaattttactgggtctctattttaccctcctacaagcctcagagtacttcgagtctcccttcaccatttccgacggcatc

SEQ ID NO: 56713 - DNA, 120 bp, Homo sapiens
  misc_feature: 1461 for SV(W|O) and mtDNA
gacatcattaccgggttttcctcttgtaaatatagtttaaccaaaacatcagattgtgaatctgacaacagaggcttacgaccccttatttaccgagaaagctcacaagaactgctaact

SEQ ID NO: 56714 - DNA, 120 bp, Homo sapiens
  misc_feature: 1461 for SV(W|O) and mtDNA
ctgcctagcaaactcaaactacgaacgcactcacagtcgcatcataatcctctctcaaggacttcaaactctactcccactaatagctttttgatgacttctagcaagcctcgctaacct

SEQ ID NO: 56715 - DNA, 120 bp, Homo sapiens
  misc_feature: 1461 for SV(W|O) and mtDNA
cgtggagccattcatacaggtccctatttaaggaacaagtgattatgctacctttgcacggttagggtaccgcggccgttaaacatgtgtcactgggcaggcggtgcctctaatactggt

SEQ ID NO: 56716 - DNA, 120 bp, Homo sapiens
  misc_feature: 1461 for SV(W|O) and mtDNA
cgctaacattactgcaggccacctactcatgcacctaattggaagcgccaccctagcaatatcaaccattaaccttccctctacacttatcatcttcacaattctaattctactgactat

SEQ ID NO: 56717 - DNA, 120 bp, Homo sapiens
  misc_feature: 1461 for SV(W|O) and mtDNA
attagtgggagtagagtttgaagtccttgagagaggattatgatgcgactgtgagtgcgttcgtagtttgagtttgctaggcagaatagtaatgaggatgtaagcccgtgggcgattatg

SEQ ID NO: 56718 - DNA, 120 bp, Homo sapiens
  misc_feature: 1461 for SV(W|O) and mtDNA
caacggctacatagaaaaatccaccccttacgagtgcggcttcgaccctatatcccccgcccgcgtccctttctccataaaattcttcttagtagctattaccttcttattatttgatct

SEQ ID NO: 56719 - DNA, 120 bp, Homo sapiens
  misc_feature: 1461 for SV(W|O) and mtDNA
aagccttctcctcactctctcaatcttatccatcatagcaggcagttgaggtggattaaaccaaacccagctacgcaaaatcttagcatactcctcaattacccacataggatgaataat

SEQ ID NO: 56720 - DNA, 120 bp, Homo sapiens
  misc_feature: 1461 for SV(W|O) and mtDNA
aaaaggtattagaaaaaccatttcataactttgtcaaagttaaattataggctaaatcctatatatcttaatggcacatgcagcgcaagtaggtctacaagacgctacttcccctatcat

SEQ ID NO: 56721 - DNA, 120 bp, Homo sapiens
  misc_feature: 1461 for SV(W|O) and mtDNA
atccttcttgctcatcagttgatgatacgcccgagcagatgccaacacagcagccattcaagcaatcctatacaaccgtatcggcgatatcggtttcatcctcgccttagcatgatttat

SEQ ID NO: 56722 - DNA, 120 bp, Homo sapiens
  misc_feature: 1461 for SV(W|O) and mtDNA
aggttgaagtgagaggtatggttttgagtagtcctcctatttttcgaatatcttgttcattgttaaggttgtggatgatggacccggagcacataaatagtatggctttgaagaaggcgt

SEQ ID NO: 56723 - DNA, 120 bp, Homo sapiens
  misc_feature: 1460 for SV(W|O) and mtDNA
gtctgaactatcctgcccgccatcatcctagtcctcatcgccctcccatccctacgcatcctttacataacagacgaggtcaacgatccctcccttaccatcaaatcaattggccaccaa

SEQ ID NO: 56724 - DNA, 120 bp, Homo sapiens
  misc_feature: 1460 for SV(W|O) and mtDNA
ttcctaattaccatactaatcttagttaccgctaacaacctattccaactgttcatcggctgagagggcgtaggaattatatccttcttgctcatcagttgatgatacgcccgagcagat

SEQ ID NO: 56725 - DNA, 120 bp, Homo sapiens
  misc_feature: 1460 for SV(W|O) and mtDNA
ttattcatcctatgtgggtaattgaggagtatgctaagattttgcgtagctgggtttggtttaatccacctcaactgcctgctatgatggataagattgagagagtgaggagaaggctta

SEQ ID NO: 56726 - DNA, 120 bp, Homo sapiens
  misc_feature: 1460 for SV(W|O) and mtDNA
ttacggatcatttctctactcagaaacctgaaacatcggcattatcctcctgcttgcaactatagcaacagccttcataggctatgtcctcccgtgaggccaaatatcattctgaggggc

SEQ ID NO: 56727 - DNA, 120 bp, Homo sapiens
  misc_feature: 1460 for SV(W|O) and mtDNA
ctacattttctaccccagaaaactacgatagcccttatgaaacttaagggtcgaaggtggatttagcagtaaactgagagtagagtgcttagttgaacagggccctgaagcgcgtacaca

SEQ ID NO: 56728 - DNA, 120 bp, Homo sapiens
  misc_feature: 1460 for SV(W|O) and mtDNA
tgtaggctcattcatttctctaacagcagtaatattaataattttcatgatttgagaagccttcgcttcaaagcgaaaagtcctaatagtagaagaaccctccataaacctggagtgact

SEQ ID NO: 56729 - DNA, 120 bp, Homo sapiens
  misc_feature: 1460 for SV(W|O) and mtDNA
taagcctccttattcgagccgagctgggccagccaggcaaccttctaggtaacgaccacatctacaacgttatcgtcacagcccatgcatttgtaataatcttcttcatagtaataccca

SEQ ID NO: 56730 - DNA, 120 bp, Homo sapiens
  misc_feature: 1460 for SV(W|O) and mtDNA
tggggtctcctcctccggcggggtcgaagaaggtggtgttgaggttgcggtctgttagtagtatagtgatgccagcagctaggactgggagagataggagaagtaggactgctgtgatta

SEQ ID NO: 56731 - DNA, 120 bp, Homo sapiens
  misc_feature: 1460 for SV(W|O) and mtDNA
taattaccatactaatcttagttaccgctaacaacctattccaactgttcatcggctgagagggcgtaggaattatatccttcttgctcatcagttgatgatacgcccgagcagatgcca

SEQ ID NO: 56732 - DNA, 120 bp, Homo sapiens
  misc_feature: 1460 for SV(W|O) and mtDNA
tgatgccgattgtaactattatgagtcctagttgacttgaagtggagaaggctacgatttttttgatgtcattttgtgtaagggcgcagactgctgcgaacagagtggtgatagcgccta

SEQ ID NO: 56733 - DNA, 120 bp, Homo sapiens
  misc_feature: 1460 for SV(W|O) and mtDNA
ggaattgcatctgtttttaagcctaatgtggggacagctcatgagtgcaagacgtcttgtgatgtaattattatacgaatgggggcttcaatcgggagtactactcgattgtcaacgtca

SEQ ID NO: 56734 - DNA, 120 bp, Homo sapiens
  misc_feature: 1460 for SV(W|O) and mtDNA
tattctttatctgcctcttcctacacatcgggcgaggcctatattacggatcatttctctactcagaaacctgaaacatcggcattatcctcctgcttgcaactatagcaacagccttca

SEQ ID NO: 56735 - DNA, 120 bp, Homo sapiens
  misc_feature: 1460 for SV(W|O) and mtDNA
tagccttcatcagggtttgctgaagatggcggtatataggctgagcaagaggtggtgaggttgatcggggtttatcgattacagaacaggctcctctagagggatatgaagcaccgccag

SEQ ID NO: 56736 - DNA, 120 bp, Homo sapiens
  misc_feature: 1460 for SV(W|O) and mtDNA
gtatggttatcatttgttttgaggttagtttgattagtcattgttgggtggtgattagtcggttgttgatgagatatttggaggtggggatcaatagagggggaaatagaatgatcagta

SEQ ID NO: 56737 - DNA, 120 bp, Homo sapiens
  misc_feature: 1460 for SV(W|O) and mtDNA
taccaatgatggcgcgatgtaacacgagaaagcacataccaaggccaccacacaccacctgtccaaaaaggccttcgatacgggataatcctatttattacctcagaagtttttttcttc

SEQ ID NO: 56738 - DNA, 120 bp, Homo sapiens
  misc_feature: 1460 for SV(W|O) and mtDNA
gttgtggcaataaaaatgattaaggatactagtataagagatcaggttcgtcctttagtgttgtgtatggttatcatttgttttgaggttagtttgattagtcattgttgggtggtgatt

SEQ ID NO: 56739 - DNA, 120 bp, Homo sapiens
  misc_feature: 1460 for SV(W|O) and mtDNA
gttcgcagcagtctgcgcccttacacaaaatgacatcaaaaaaatcgtagccttctccacttcaagtcaactaggactcataatagttacaatcggcatcaaccaaccacacctagcatt

SEQ ID NO: 56740 - DNA, 120 bp, Homo sapiens
  misc_feature: 1460 for SV(W|O) and mtDNA
gtgggtttgttaggtactgtttgcattaataaattaaagctccatagggtcttctcgtcttgctgtgttatgcccgcctcttcacgggcaggtcaatttcactggttaaaagtaagagac

SEQ ID NO: 56741 - DNA, 120 bp, Homo sapiens
  misc_feature: 1460 for SV(W|O) and mtDNA
gtgggaagaaagttagatttacgccgatgaatatgatagtgaaatggattttggcgtaggtttggtctagggtgtagcctgagaataggggaaatcagtgaatgaagcctcctatgatgg

SEQ ID NO: 56742 - DNA, 120 bp, Homo sapiens
  misc_feature: 1460 for SV(W|O) and mtDNA
gtgccattaagatatataggatttagcctataatttaactttgacaaagttatgaaatggtttttctaatacctttttgaaaaagtcatggaggccatggggttggcttgaaaccagctt

SEQ ID NO: 56743 - DNA, 120 bp, Homo sapiens
  misc_feature: 1460 for SV(W|O) and mtDNA
ctaattggaagcgccaccctagcaatatcaaccattaaccttccctctacacttatcatcttcacaattctaattctactgactatcctagaaatcgctgtcgccttaatccaagcctac

SEQ ID NO: 56744 - DNA, 120 bp, Homo sapiens
  misc_feature: 1460 for SV(W|O) and mtDNA
agacaagtcgtaacatggtaagtgtactggaaagtgcacttggacgaaccagagtgtagcttaacacaaagcacccaacttacacttaggagatttcaacttaacttgaccgctctgagc

SEQ ID NO: 56745 - DNA, 120 bp, Homo sapiens
  misc_feature: 1460 for SV(W|O) and mtDNA
gccttaatccaagcctacgttttcacacttctagtaagcctctacctgcacgacaacacataatgacccaccaatcacatgcctatcatatagtaaaacccagcccatgacccctaacag

SEQ ID NO: 56746 - DNA, 120 bp, Homo sapiens
  misc_feature: 1460 for SV(W|O) and mtDNA
ctaaaccaaaccactttcaccgctacacgaccgggggtatactacggtcaatgctctgaaatctgtggagcaaaccacagtttcatgcccatcgtcctagaattaattcccctaaaaatc

SEQ ID NO: 56747 - DNA, 120 bp, Homo sapiens
  misc_feature: 1460 for SV(W|O) and mtDNA
gagggataggaggagaatgggggataggtgtatgaacatgagggtgttttctcgtgtgaatgagggttttatgttgttaatgtggtgggtgagtgagccccattgtgttgtggtaaatat

SEQ ID NO: 56748 - DNA, 120 bp, Homo sapiens
  misc_feature: 1460 for SV(W|O) and mtDNA
ccgaaaccaaataattcaagcactgcttattacaattttactgggtctctattttaccctcctacaagcctcagagtacttcgagtctcccttcaccatttccgacggcatctacggctc

SEQ ID NO: 56749 - DNA, 120 bp, Homo sapiens
  misc_feature: 1460 for SV(W|O) and mtDNA
acaatagctaagacccaaactgggattagataccccactatgcttagccctaaacctcaacagttaaatcaacaaaactgctcgccagaacactacgagccacagcttaaaactcaaagg

SEQ ID NO: 56750 - DNA, 120 bp, Homo sapiens
  misc_feature: 1460 for SV(W|O) and mtDNA
attactattctgcctagcaaactcaaactacgaacgcactcacagtcgcatcataatcctctctcaaggacttcaaactctactcccactaatagctttttgatgacttctagcaagcct

SEQ ID NO: 56751 - DNA, 120 bp, Homo sapiens
  misc_feature: 1459 for SV(W|O) and mtDNA
ttttgtgtcaactggagttttttacaactcaggtgagttttagctttattggggagggggtgatctaaaacactctttacgccggcttctattgacttgggttaatcgtgtgaccgcggt

SEQ ID NO: 56752 - DNA, 120 bp, Homo sapiens
  misc_feature: 1459 for SV(W|O) and mtDNA
ttggttatggttcattgtccggagagtatattgttgaagaggatagctattagaaggattatggatgcggttgcttgcgtgaggaaatacttgatggcagcttctgtggaacgagggttt

SEQ ID NO: 56753 - DNA, 120 bp, Homo sapiens
  misc_feature: 1459 for SV(W|O) and mtDNA
ttcattgtccggagagtatattgttgaagaggatagctattagaaggattatggatgcggttgcttgcgtgaggaaatacttgatggcagcttctgtggaacgagggtttatttttttgg

SEQ ID NO: 56754 - DNA, 120 bp, Homo sapiens
  misc_feature: 1459 for SV(W|O) and mtDNA
tgttaaattttttactctctctacaaggttttttcctagtgtccaaagagctgttcctctttggactaacagttaaatttacaaggggatttagagggttctgtgggcaaatttaaagtt

SEQ ID NO: 56755 - DNA, 120 bp, Homo sapiens
  misc_feature: 1459 for SV(W|O) and mtDNA
tagactacgtacataacctaaacctactccaatgctaaaactaatcgtcccaacaattatattactaccactgacatgactttccaaaaaacacataatttgaatcaacacaaccaccca

SEQ ID NO: 56756 - DNA, 120 bp, Homo sapiens
  misc_feature: 1459 for SV(W|O) and mtDNA
ccacgaccaatgatatgaaaaaccatcgttgtatttcaactacaagaacaccaatgaccccaatacgcaaaactaaccccctaataaaattaattaaccactcattcatcgacctcccca

SEQ ID NO: 56757 - DNA, 120 bp, Homo sapiens
  misc_feature: 1459 for SV(W|O) and mtDNA
tgcctagcaaactcaaactacgaacgcactcacagtcgcatcataatcctctctcaaggacttcaaactctactcccactaatagctttttgatgacttctagcaagcctcgctaacctc

SEQ ID NO: 56758 - DNA, 120 bp, Homo sapiens
  misc_feature: 1459 for SV(W|O) and mtDNA
tgcacctaattggaagcgccaccctagcaatatcaaccattaaccttccctctacacttatcatcttcacaattctaattctactgactatcctagaaatcgctgtcgccttaatccaag

SEQ ID NO: 56759 - DNA, 120 bp, Homo sapiens
  misc_feature: 1459 for SV(W|O) and mtDNA
cgtccgggaattgcatctgtttttaagcctaatgtggggacagctcatgagtgcaagacgtcttgtgatgtaattattatacgaatgggggcttcaatcgggagtactactcgattgtca

SEQ ID NO: 56760 - DNA, 120 bp, Homo sapiens
  misc_feature: 1459 for SV(W|O) and mtDNA
tgaagtgagaggtatggttttgagtagtcctcctatttttcgaatatcttgttcattgttaaggttgtggatgatggacccggagcacataaatagtatggctttgaagaaggcgtgggt

SEQ ID NO: 56761 - DNA, 120 bp, Homo sapiens
  misc_feature: 1459 for SV(W|O) and mtDNA
tgaaccctcgtggagccattcatacaggtccctatttaaggaacaagtgattatgctacctttgcacggttagggtaccgcggccgttaaacatgtgtcactgggcaggcggtgcctcta

SEQ ID NO: 56762 - DNA, 120 bp, Homo sapiens
  misc_feature: 1459 for SV(W|O) and mtDNA
tcggggcattccggataggccgagaaagtgttgtgggaagaaagttagatttacgccgatgaatatgatagtgaaatggattttggcgtaggtttggtctagggtgtagcctgagaatag

SEQ ID NO: 56763 - DNA, 120 bp, Homo sapiens
  misc_feature: 1459 for SV(W|O) and mtDNA
tacggatcatttctctactcagaaacctgaaacatcggcattatcctcctgcttgcaactatagcaacagccttcataggctatgtcctcccgtgaggccaaatatcattctgaggggcc

SEQ ID NO: 56764 - DNA, 120 bp, Homo sapiens
  misc_feature: 1459 for SV(W|O) and mtDNA
taataatcaacaccctcctagccttactactaataattattacattttgactaccacaactcaacggctacatagaaaaatccaccccttacgagtgcggcttcgaccctatatcccccg

SEQ ID NO: 56765 - DNA, 120 bp, Homo sapiens
  misc_feature: 1459 for SV(W|O) and mtDNA
gtgctggagtttaagttgagtagtaggaatgcggtagtagttaggataatataaatagttaaattaagaatggttatgttagggttgtacggtagaactgctattattcatcctatgtgg

SEQ ID NO: 56766 - DNA, 120 bp, Homo sapiens
  misc_feature: 1459 for SV(W|O) and mtDNA
ggctggcccagctcggctcgaataaggaggcttagagctgtgcctaggactccagctcatgcgccgaataataggtatagtgttccaatgtctttgtggtttgtagagaatagtcaacgg

SEQ ID NO: 56767 - DNA, 120 bp, Homo sapiens
  misc_feature: 1459 for SV(W|O) and mtDNA
aatccaagcctacgttttcacacttctagtaagcctctacctgcacgacaacacataatgacccaccaatcacatgcctatcatatagtaaaacccagcccatgacccctaacaggggcc

SEQ ID NO: 56768 - DNA, 120 bp, Homo sapiens
  misc_feature: 1459 for SV(W|O) and mtDNA
gccgcctagttttaagagtactgcggcaagtactattgacccagcgatgggggcttcgacatgggctttagggagtcataagtggagtccgtaaagaggtatctttactataaaagctat

SEQ ID NO: 56769 - DNA, 120 bp, Homo sapiens
  misc_feature: 1459 for SV(W|O) and mtDNA
gccattaagatatataggatttagcctataatttaactttgacaaagttatgaaatggtttttctaatacctttttgaaaaagtcatggaggccatggggttggcttgaaaccagctttg

SEQ ID NO: 56770 - DNA, 120 bp, Homo sapiens
  misc_feature: 1459 for SV(W|O) and mtDNA
gattgctgtacttgcttgtaagcatggggagggggttttgatgtggattgggtttttatgtactacaggtggtcaagtatttatggtaccgtacaatattcatggtggctggcagtaatg

SEQ ID NO: 56771 - DNA, 120 bp, Homo sapiens
  misc_feature: 1459 for SV(W|O) and mtDNA
ctaggtaacgaccacatctacaacgttatcgtcacagcccatgcatttgtaataatcttcttcatagtaatacccatcataatcggaggctttggcaactgactagttcccctaataatc

SEQ ID NO: 56772 - DNA, 120 bp, Homo sapiens
  misc_feature: 1459 for SV(W|O) and mtDNA
gataggggaagtagcgtcttgtagacctacttgcgctgcatgtgccattaagatatataggatttagcctataatttaactttgacaaagttatgaaatggtttttctaatacctttttg

SEQ ID NO: 56773 - DNA, 120 bp, Homo sapiens
  misc_feature: 1459 for SV(W|O) and mtDNA
cgaaccagagtgtagcttaacacaaagcacccaacttacacttaggagatttcaacttaacttgaccgctctgagctaaacctagccccaaacccactccaccttactaccagacaacct

SEQ ID NO: 56774 - DNA, 120 bp, Homo sapiens
  misc_feature: 1459 for SV(W|O) and mtDNA
atggttttgagtagtcctcctatttttcgaatatcttgttcattgttaaggttgtggatgatggacccggagcacataaatagtatggctttgaagaaggcgtgggtgcagatgtgcagg

SEQ ID NO: 56775 - DNA, 120 bp, Homo sapiens
  misc_feature: 1459 for SV(W|O) and mtDNA
attgtagatattgggctgttaattgtcagttcagtgttttaatctgacgcaggcttatgcggaggagaatgttttcatgttacttatactaacattagttcttctatagggtgatagatt

SEQ ID NO: 56776 - DNA, 120 bp, Homo sapiens
  misc_feature: 1459 for SV(W|O) and mtDNA
attggactgtaaatctaaagacaggggttaggcctctttttaccagctccgaggtgattttcatattgaattgcaaattcgaagaagcagcttcaaacctgccggggcttctcccgcctt

SEQ ID NO: 56777 - DNA, 120 bp, Homo sapiens
  misc_feature: 1459 for SV(W|O) and mtDNA
agaaaacaaccgaaaccaaataattcaagcactgcttattacaattttactgggtctctattttaccctcctacaagcctcagagtacttcgagtctcccttcaccatttccgacggcat

SEQ ID NO: 56778 - DNA, 120 bp, Homo sapiens
  misc_feature: 1459 for SV(W|O) and mtDNA
atcgtagccttctccacttcaagtcaactaggactcataatagttacaatcggcatcaaccaaccacacctagcattcctgcacatctgcacccacgccttcttcaaagccatactattt

SEQ ID NO: 56779 - DNA, 120 bp, Homo sapiens
  misc_feature: 1458 for SV(W|O) and mtDNA
tttgagctgcattgctgcgtgcttgatgcttgtcccttttgatcgtggtgatttagagggtgaactcactggaacggggatgcttgcatgtgtaatcttactaagagctaatagaaaggc

SEQ ID NO: 56780 - DNA, 120 bp, Homo sapiens
  misc_feature: 1458 for SV(W|O) and mtDNA
ccttccctctacacttatcatcttcacaattctaattctactgactatcctagaaatcgctgtcgccttaatccaagcctacgttttcacacttctagtaagcctctacctgcacgacaa

SEQ ID NO: 56781 - DNA, 120 bp, Homo sapiens
  misc_feature: 1458 for SV(W|O) and mtDNA
gttgatgtgtgatagttgagggttgattgctgtacttgcttgtaagcatggggagggggttttgatgtggattgggtttttatgtactacaggtggtcaagtatttatggtaccgtacaa

SEQ ID NO: 56782 - DNA, 120 bp, Homo sapiens
  misc_feature: 1458 for SV(W|O) and mtDNA
ctatgcctagaaggaataatactatcgctgttcattatagctactctcataaccctcaacacccactccctcttagccaatattgtgcctattgccatactagtctttgccgcctgcgaa

SEQ ID NO: 56783 - DNA, 120 bp, Homo sapiens
  misc_feature: 1458 for SV(W|O) and mtDNA
ttaggaaaagggcatacaggactaggaagcagataaggaaaatgattatgagggcgtgatcatgaaaggtgataagctcttctatgataggggaagtagcgtcttgtagacctacttgcg

SEQ ID NO: 56784 - DNA, 120 bp, Homo sapiens
  misc_feature: 1458 for SV(W|O) and mtDNA
tatcgccgatacggttgtataggattgcttgaatggctgctgtgttggcatctgctcgggcgtatcatcaactgatgagcaagaaggatataattcctacgccctctcagccgatgaaca

SEQ ID NO: 56785 - DNA, 120 bp, Homo sapiens
  misc_feature: 1458 for SV(W|O) and mtDNA
tgtcgccttaatccaagcctacgttttcacacttctagtaagcctctacctgcacgacaacacataatgacccaccaatcacatgcctatcatatagtaaaacccagcccatgaccccta

SEQ ID NO: 56786 - DNA, 120 bp, Homo sapiens
  misc_feature: 1458 for SV(W|O) and mtDNA
agttgatgtgtgatagttgagggttgattgctgtacttgcttgtaagcatggggagggggttttgatgtggattgggtttttatgtactacaggtggtcaagtatttatggtaccgtaca

SEQ ID NO: 56787 - DNA, 120 bp, Homo sapiens
  misc_feature: 1458 for SV(W|O) and mtDNA
gcatgtgccattaagatatataggatttagcctataatttaactttgacaaagttatgaaatggtttttctaatacctttttgaaaaagtcatggaggccatggggttggcttgaaacca

SEQ ID NO: 56788 - DNA, 120 bp, Homo sapiens
  misc_feature: 1458 for SV(W|O) and mtDNA
tggttgtgttgattcaaattatgtgttttttggaaagtcatgtcagtggtagtaatataattgttgggacgattagttttagcattggagtaggtttaggttatgtacgtagtctaggcc

SEQ ID NO: 56789 - DNA, 120 bp, Homo sapiens
  misc_feature: 1458 for SV(W|O) and mtDNA
tgggtgatgaggaatagtgtaaggagtatgggggtaattatggtgggccatacggtagtatttagttggggcatttcactgtaaagaggtgttggttctcttaatctttaacttaaaagg

SEQ ID NO: 56790 - DNA, 120 bp, Homo sapiens
  misc_feature: 1458 for SV(W|O) and mtDNA
tgggaagaaagttagatttacgccgatgaatatgatagtgaaatggattttggcgtaggtttggtctagggtgtagcctgagaataggggaaatcagtgaatgaagcctcctatgatggc

SEQ ID NO: 56791 - DNA, 120 bp, Homo sapiens
  misc_feature: 1458 for SV(W|O) and mtDNA
gtagccttcatcagggtttgctgaagatggcggtatataggctgagcaagaggtggtgaggttgatcggggtttatcgattacagaacaggctcctctagagggatatgaagcaccgcca

SEQ ID NO: 56792 - DNA, 120 bp, Homo sapiens
  misc_feature: 1458 for SV(W|O) and mtDNA
tggcgcgatgtaacacgagaaagcacataccaaggccaccacacaccacctgtccaaaaaggccttcgatacgggataatcctatttattacctcagaagtttttttcttcgcaggattt

SEQ ID NO: 56793 - DNA, 120 bp, Homo sapiens
  misc_feature: 1458 for SV(W|O) and mtDNA
gcgtaggggttttagttaaatgtcctttgaagtatacttgaggagggtgacgggcggtgtgtacgcgcttcagggccctgttcaactaagcactctactctcagtttactgctaaatcca

SEQ ID NO: 56794 - DNA, 120 bp, Homo sapiens
  misc_feature: 1458 for SV(W|O) and mtDNA
tgaacgtaggtgcgataaataatgggatgaggcaggaatcaaagacagatactgcgacatagggtgctccggctccagcgtctcgcaatgctatcgcgtgcataccccccagacgaaaat

SEQ ID NO: 56795 - DNA, 120 bp, Homo sapiens
  misc_feature: 1458 for SV(W|O) and mtDNA
tctaaaccaaaccactttcaccgctacacgaccgggggtatactacggtcaatgctctgaaatctgtggagcaaaccacagtttcatgcccatcgtcctagaattaattcccctaaaaat

SEQ ID NO: 56796 - DNA, 120 bp, Homo sapiens
  misc_feature: 1458 for SV(W|O) and mtDNA
actatgcctagaaggaataatactatcgctgttcattatagctactctcataaccctcaacacccactccctcttagccaatattgtgcctattgccatactagtctttgccgcctgcga

SEQ ID NO: 56797 - DNA, 120 bp, Homo sapiens
  misc_feature: 1458 for SV(W|O) and mtDNA
tagttgtggcaataaaaatgattaaggatactagtataagagatcaggttcgtcctttagtgttgtgtatggttatcatttgttttgaggttagtttgattagtcattgttgggtggtga

SEQ ID NO: 56798 - DNA, 120 bp, Homo sapiens
  misc_feature: 1458 for SV(W|O) and mtDNA
tattgctatagccattatgattattaatgatgagtactgattggtagtattggttatggttcattgtccggagagtatattgttgaagaggatagctattagaaggattatggatgcggt

SEQ ID NO: 56799 - DNA, 120 bp, Homo sapiens
  misc_feature: 1458 for SV(W|O) and mtDNA
aacatcctatcatctgtaggctcattcatttctctaacagcagtaatattaataattttcatgatttgagaagccttcgcttcaaagcgaaaagtcctaatagtagaagaaccctccata

SEQ ID NO: 56800 - DNA, 120 bp, Homo sapiens
  misc_feature: 1458 for SV(W|O) and mtDNA
gttgattgtagatattgggctgttaattgtcagttcagtgttttaatctgacgcaggcttatgcggaggagaatgttttcatgttacttatactaacattagttcttctatagggtgata

SEQ ID NO: 56801 - DNA, 120 bp, Homo sapiens
  misc_feature: 1458 for SV(W|O) and mtDNA
tatatcttaatggcacatgcagcgcaagtaggtctacaagacgctacttcccctatcatagaagagcttatcacctttcatgatcacgccctcataatcattttccttatctgcttccta

SEQ ID NO: 56802 - DNA, 120 bp, Homo sapiens
  misc_feature: 1458 for SV(W|O) and mtDNA
gtgaagcttcagggggtttggatgagaatggctgttactacgagggctatgtggctgattgaagagtatgcaatgagcgattttaggtctgtttgtcgtaggcagatggagcttgttata

SEQ ID NO: 56803 - DNA, 120 bp, Homo sapiens
  misc_feature: 1458 for SV(W|O) and mtDNA
ccgctaacattactgcaggccacctactcatgcacctaattggaagcgccaccctagcaatatcaaccattaaccttccctctacacttatcatcttcacaattctaattctactgacta

SEQ ID NO: 56804 - DNA, 120 bp, Homo sapiens
  misc_feature: 1458 for SV(W|O) and mtDNA
tactattctgcctagcaaactcaaactacgaacgcactcacagtcgcatcataatcctctctcaaggacttcaaactctactcccactaatagctttttgatgacttctagcaagcctcg

SEQ ID NO: 56805 - DNA, 120 bp, Homo sapiens
  misc_feature: 1458 for SV(W|O) and mtDNA
tactatgcctagaaggaataatactatcgctgttcattatagctactctcataaccctcaacacccactccctcttagccaatattgtgcctattgccatactagtctttgccgcctgcg

SEQ ID NO: 56806 - DNA, 120 bp, Homo sapiens
  misc_feature: 1458 for SV(W|O) and mtDNA
taatggcacatgcagcgcaagtaggtctacaagacgctacttcccctatcatagaagagcttatcacctttcatgatcacgccctcataatcattttccttatctgcttcctagtcctgt

SEQ ID NO: 56807 - DNA, 120 bp, Homo sapiens
  misc_feature: 1458 for SV(W|O) and mtDNA
ccctcgtggagccattcatacaggtccctatttaaggaacaagtgattatgctacctttgcacggttagggtaccgcggccgttaaacatgtgtcactgggcaggcggtgcctctaatac

SEQ ID NO: 56808 - DNA, 120 bp, Homo sapiens
  misc_feature: 1458 for SV(W|O) and mtDNA
gtaggggttttagttaaatgtcctttgaagtatacttgaggagggtgacgggcggtgtgtacgcgcttcagggccctgttcaactaagcactctactctcagtttactgctaaatccacc

SEQ ID NO: 56809 - DNA, 120 bp, Homo sapiens
  misc_feature: 1458 for SV(W|O) and mtDNA
ggttaggcgtacggccagggctattggttgaatgagtaggctgatggtttcgataataactagtatggggataaggggtgtaggtgtgccttgtggtaagaagtgggctagggcattttt

SEQ ID NO: 56810 - DNA, 120 bp, Homo sapiens
  misc_feature: 1458 for SV(W|O) and mtDNA
caaaactgctcgccagaacactacgagccacagcttaaaactcaaaggacctggcggtgcttcatatccctctagaggagcctgttctgtaatcgataaaccccgatcaacctcaccacc

SEQ ID NO: 56811 - DNA, 120 bp, Homo sapiens
  misc_feature: 1458 for SV(W|O) and mtDNA
gcttactggttgtcctccgattcaggttagaatgaggaggtctgcggctaggagtcaataaagtgattggcttagtgggcgaaatattatgctttgttgtttggatatatggaggatggg

SEQ ID NO: 56812 - DNA, 120 bp, Homo sapiens
  misc_feature: 1458 for SV(W|O) and mtDNA
gcattgcgagacgctggagccggagcaccctatgtcgcagtatctgtctttgattcctgcctcatcccattatttatcgcacctacgttcaatattacaggcgaacatacttactaaagt

SEQ ID NO: 56813 - DNA, 120 bp, Homo sapiens
  misc_feature: 1458 for SV(W|O) and mtDNA
gattgtagatattgggctgttaattgtcagttcagtgttttaatctgacgcaggcttatgcggaggagaatgttttcatgttacttatactaacattagttcttctatagggtgatagat

SEQ ID NO: 56814 - DNA, 120 bp, Homo sapiens
  misc_feature: 1458 for SV(W|O) and mtDNA
cataagggctatcgtagttttctggggtagaaaatgtagcccatttcttgccacctcatgggctacaccttgacctaacgtctttacgtgggtacttgcgcttactttgtagccttcatc

SEQ ID NO: 56815 - DNA, 120 bp, Homo sapiens
  misc_feature: 1458 for SV(W|O) and mtDNA
cctatttttcgaatatcttgttcattgttaaggttgtggatgatggacccggagcacataaatagtatggctttgaagaaggcgtgggtgcagatgtgcaggaatgctaggtgtggttgg

SEQ ID NO: 56816 - DNA, 120 bp, Homo sapiens
  misc_feature: 1458 for SV(W|O) and mtDNA
cctagttttaagagtactgcggcaagtactattgacccagcgatgggggcttcgacatgggctttagggagtcataagtggagtccgtaaagaggtatctttactataaaagctattgtg

SEQ ID NO: 56817 - DNA, 120 bp, Homo sapiens
  misc_feature: 1458 for SV(W|O) and mtDNA
cctagccgtttactcaatcctctgatcagggtgagcatcaaactcaaactacgccctgatcggcgcactgcgagcagtagcccaaacaatctcatatgaagtcaccctagccatcattct

SEQ ID NO: 56818 - DNA, 120 bp, Homo sapiens
  misc_feature: 1458 for SV(W|O) and mtDNA
actagaagtgtgaaaacgtaggcttggattaaggcgacagcgatttctaggatagtcagtagaattagaattgtgaagatgataagtgtagagggaaggttaatggttgatattgctagg

SEQ ID NO: 56819 - DNA, 120 bp, Homo sapiens
  misc_feature: 1458 for SV(W|O) and mtDNA
cagggaggaatttgaagtagatagaaaccgacctggattactccggtctgaactcagatcacgtaggactttaatcgttgaacaaacgaacctttaatagcggctgcaccatcgggatgt

SEQ ID NO: 56820 - DNA, 120 bp, Homo sapiens
  misc_feature: 1458 for SV(W|O) and mtDNA
atttgttttgaggttagtttgattagtcattgttgggtggtgattagtcggttgttgatgagatatttggaggtggggatcaatagagggggaaatagaatgatcagtactgcggcgggt

SEQ ID NO: 56821 - DNA, 120 bp, Homo sapiens
  misc_feature: 1458 for SV(W|O) and mtDNA
aatcgtagccttctccacttcaagtcaactaggactcataatagttacaatcggcatcaaccaaccacacctagcattcctgcacatctgcacccacgccttcttcaaagccatactatt

SEQ ID NO: 56822 - DNA, 120 bp, Homo sapiens
  misc_feature: 1457 for SV(W|O) and mtDNA
gaggagaccccattctataccaacacctattctgatttttcggtcaccctgaagtttatattcttatcctaccaggcttcggaataatctcccatattgtaacttactactccggaaaaa

SEQ ID NO: 56823 - DNA, 120 bp, Homo sapiens
  misc_feature: 1457 for SV(W|O) and mtDNA
aacctcaacagttaaatcaacaaaactgctcgccagaacactacgagccacagcttaaaactcaaaggacctggcggtgcttcatatccctctagaggagcctgttctgtaatcgataaa

SEQ ID NO: 56824 - DNA, 120 bp, Homo sapiens
  misc_feature: 1457 for SV(W|O) and mtDNA
ggaagaaagttagatttacgccgatgaatatgatagtgaaatggattttggcgtaggtttggtctagggtgtagcctgagaataggggaaatcagtgaatgaagcctcctatgatggcaa

SEQ ID NO: 56825 - DNA, 120 bp, Homo sapiens
  misc_feature: 1457 for SV(W|O) and mtDNA
ttctccgatccgtccctaacaaactaggaggcgtccttgccctattactatccatcctcatcctagcaataatccccatcctccatatatccaaacaacaaagcataatatttcgcccac

SEQ ID NO: 56826 - DNA, 120 bp, Homo sapiens
  misc_feature: 1457 for SV(W|O) and mtDNA
ttatatcttcttcgaaaccacacttatccccaccttggctatcatcacccgatgaggcaaccagccagaacgcctgaacgcaggcacatacttcctattctacaccctagtaggctccct

SEQ ID NO: 56827 - DNA, 120 bp, Homo sapiens
  misc_feature: 1457 for SV(W|O) and mtDNA
aggccccaaaaattttggtgcaactccaaataaaagtaataaccatgcacactactataaccaccctaaccctgacttccctaattccccccatccttaccaccctcgttaaccctaaca

SEQ ID NO: 56828 - DNA, 120 bp, Homo sapiens
  misc_feature: 1457 for SV(W|O) and mtDNA
tgtgataggtggcacggagaattttggattctcagggatgggttcgattctcatagtcctagaaataagggggtttaagctcctattatttactctatcaaagtaactcttttatcagac

SEQ ID NO: 56829 - DNA, 120 bp, Homo sapiens
  misc_feature: 1457 for SV(W|O) and mtDNA
attctccgatccgtccctaacaaactaggaggcgtccttgccctattactatccatcctcatcctagcaataatccccatcctccatatatccaaacaacaaagcataatatttcgccca

SEQ ID NO: 56830 - DNA, 120 bp, Homo sapiens
  misc_feature: 1457 for SV(W|O) and mtDNA
tgattgctgtacttgcttgtaagcatggggagggggttttgatgtggattgggtttttatgtactacaggtggtcaagtatttatggtaccgtacaatattcatggtggctggcagtaat

SEQ ID NO: 56831 - DNA, 120 bp, Homo sapiens
  misc_feature: 1457 for SV(W|O) and mtDNA
tgatggcgcgatgtaacacgagaaagcacataccaaggccaccacacaccacctgtccaaaaaggccttcgatacgggataatcctatttattacctcagaagtttttttcttcgcagga

SEQ ID NO: 56832 - DNA, 120 bp, Homo sapiens
  misc_feature: 1457 for SV(W|O) and mtDNA
tagaaggttgcctggctggcccagctcggctcgaataaggaggcttagagctgtgcctaggactccagctcatgcgccgaataataggtatagtgttccaatgtctttgtggtttgtaga

SEQ ID NO: 56833 - DNA, 120 bp, Homo sapiens
  misc_feature: 1457 for SV(W|O) and mtDNA
gtaacgtcggggcattccggataggccgagaaagtgttgtgggaagaaagttagatttacgccgatgaatatgatagtgaaatggattttggcgtaggtttggtctagggtgtagcctga

SEQ ID NO: 56834 - DNA, 120 bp, Homo sapiens
  misc_feature: 1457 for SV(W|O) and mtDNA
tagggctaggatgatgattaataagagggatgacataactattagtggcaggttagttgtttgtagggctcatggtaggggtaaaaggagggcaatttctagatcaaataataagaaggt

SEQ ID NO: 56835 - DNA, 120 bp, Homo sapiens
  misc_feature: 1457 for SV(W|O) and mtDNA
taggcgtacggccagggctattggttgaatgagtaggctgatggtttcgataataactagtatggggataaggggtgtaggtgtgccttgtggtaagaagtgggctagggcatttttaat

SEQ ID NO: 56836 - DNA, 120 bp, Homo sapiens
  misc_feature: 1457 for SV(W|O) and mtDNA
agccgcctagttttaagagtactgcggcaagtactattgacccagcgatgggggcttcgacatgggctttagggagtcataagtggagtccgtaaagaggtatctttactataaaagcta

SEQ ID NO: 56837 - DNA, 120 bp, Homo sapiens
  misc_feature: 1457 for SV(W|O) and mtDNA
tagccgcctagttttaagagtactgcggcaagtactattgacccagcgatgggggcttcgacatgggctttagggagtcataagtggagtccgtaaagaggtatctttactataaaagct

SEQ ID NO: 56838 - DNA, 120 bp, Homo sapiens
  misc_feature: 1457 for SV(W|O) and mtDNA
gcgagcagttttgttgatttaactgttgaggtttagggctaagcatagtggggtatctaatcccagtttgggtcttagctattgtgtgttcagatatgttaaagccactttcgtagtcta

SEQ ID NO: 56839 - DNA, 120 bp, Homo sapiens
  misc_feature: 1457 for SV(W|O) and mtDNA
gtttgttaggtactgtttgcattaataaattaaagctccatagggtcttctcgtcttgctgtgttatgcccgcctcttcacgggcaggtcaatttcactggttaaaagtaagagacagct

SEQ ID NO: 56840 - DNA, 120 bp, Homo sapiens
  misc_feature: 1457 for SV(W|O) and mtDNA
gtttcataagggctatcgtagttttctggggtagaaaatgtagcccatttcttgccacctcatgggctacaccttgacctaacgtctttacgtgggtacttgcgcttactttgtagcctt

SEQ ID NO: 56841 - DNA, 120 bp, Homo sapiens
  misc_feature: 1457 for SV(W|O) and mtDNA
gcagtctgcgcccttacacaaaatgacatcaaaaaaatcgtagccttctccacttcaagtcaactaggactcataatagttacaatcggcatcaaccaaccacacctagcattcctgcac

SEQ ID NO: 56842 - DNA, 120 bp, Homo sapiens
  misc_feature: 1457 for SV(W|O) and mtDNA
aacaaccgaaaccaaataattcaagcactgcttattacaattttactgggtctctattttaccctcctacaagcctcagagtacttcgagtctcccttcaccatttccgacggcatctac

SEQ ID NO: 56843 - DNA, 120 bp, Homo sapiens
  misc_feature: 1457 for SV(W|O) and mtDNA
ggtaacgaccacatctacaacgttatcgtcacagcccatgcatttgtaataatcttcttcatagtaatacccatcataatcggaggctttggcaactgactagttcccctaataatcggt

SEQ ID NO: 56844 - DNA, 120 bp, Homo sapiens
  misc_feature: 1457 for SV(W|O) and mtDNA
ggggagtagtgtgattgaggtggagtagattaggcgtaggtagaagtagaggttaaggagggtgatggtggctatgatggtggggatgatgaggctattgttttttgtgaattcttcgat

SEQ ID NO: 56845 - DNA, 120 bp, Homo sapiens
  misc_feature: 1457 for SV(W|O) and mtDNA
ggcacatgcagcgcaagtaggtctacaagacgctacttcccctatcatagaagagcttatcacctttcatgatcacgccctcataatcattttccttatctgcttcctagtcctgtatgc

SEQ ID NO: 56846 - DNA, 120 bp, Homo sapiens
  misc_feature: 1457 for SV(W|O) and mtDNA
gcccttaccacgctactcctacctatctccccttttatactaataatcttatagaaatttaggttaaatacagaccaagagccttcaaagccctcagtaagttgcaatacttaatttctg

SEQ ID NO: 56847 - DNA, 120 bp, Homo sapiens
  misc_feature: 1457 for SV(W|O) and mtDNA
gatgggggctagtttttgtcatgtgagaagaagcaggccggatgtcagaggggtgccttgggtaacctctgggactcagaagtgaaagggggctattcctagttttattgctatagccat

SEQ ID NO: 56848 - DNA, 120 bp, Homo sapiens
  misc_feature: 1457 for SV(W|O) and mtDNA
gagacaagtcgtaacatggtaagtgtactggaaagtgcacttggacgaaccagagtgtagcttaacacaaagcacccaacttacacttaggagatttcaacttaacttgaccgctctgag

SEQ ID NO: 56849 - DNA, 120 bp, Homo sapiens
  misc_feature: 1457 for SV(W|O) and mtDNA
cacaatagctaagacccaaactgggattagataccccactatgcttagccctaaacctcaacagttaaatcaacaaaactgctcgccagaacactacgagccacagcttaaaactcaaag

SEQ ID NO: 56850 - DNA, 120 bp, Homo sapiens
  misc_feature: 1457 for SV(W|O) and mtDNA
cattcactgatttcccctattctcaggctacaccctagaccaaacctacgccaaaatccatttcactatcatattcatcggcgtaaatctaactttcttcccacaacactttctcggcct

SEQ ID NO: 56851 - DNA, 120 bp, Homo sapiens
  misc_feature: 1457 for SV(W|O) and mtDNA
catactaggcctactaaccaacacactaaccatataccaatgatggcgcgatgtaacacgagaaagcacataccaaggccaccacacaccacctgtccaaaaaggccttcgatacgggat

SEQ ID NO: 56852 - DNA, 120 bp, Homo sapiens
  misc_feature: 1457 for SV(W|O) and mtDNA
aggagacaagtcgtaacatggtaagtgtactggaaagtgcacttggacgaaccagagtgtagcttaacacaaagcacccaacttacacttaggagatttcaacttaacttgaccgctctg

SEQ ID NO: 56853 - DNA, 120 bp, Homo sapiens
  misc_feature: 1457 for SV(W|O) and mtDNA
attaagaaagcgttcaagctcaacacccactacctaaaaaatcccaaacatataactgaactcctcatacccaattggaccaatctatcaccctatagaagaactaatgttagtataagt

SEQ ID NO: 56854 - DNA, 120 bp, Homo sapiens
  misc_feature: 1457 for SV(W|O) and mtDNA
aagcttcagggggtttggatgagaatggctgttactacgagggctatgtggctgattgaagagtatgcaatgagcgattttaggtctgtttgtcgtaggcagatggagcttgttataatt

SEQ ID NO: 56855 - DNA, 120 bp, Homo sapiens
  misc_feature: 1456 for SV(W|O) and mtDNA
gaattgcatctgtttttaagcctaatgtggggacagctcatgagtgcaagacgtcttgtgatgtaattattatacgaatgggggcttcaatcgggagtactactcgattgtcaacgtcaa

SEQ ID NO: 56856 - DNA, 120 bp, Homo sapiens
  misc_feature: 1456 for SV(W|O) and mtDNA
tccgatccgtccctaacaaactaggaggcgtccttgccctattactatccatcctcatcctagcaataatccccatcctccatatatccaaacaacaaagcataatatttcgcccactaa

SEQ ID NO: 56857 - DNA, 120 bp, Homo sapiens
  misc_feature: 1456 for SV(W|O) and mtDNA
ttagtatagcttagttaaactttcgtttattgctaaaggttaatcactgctgtttcccgtgggggtgtggctaggctaagcgttttgagctgcattgctgcgtgcttgatgcttgtccct

SEQ ID NO: 56858 - DNA, 120 bp, Homo sapiens
  misc_feature: 1456 for SV(W|O) and mtDNA
gtcgccttaatccaagcctacgttttcacacttctagtaagcctctacctgcacgacaacacataatgacccaccaatcacatgcctatcatatagtaaaacccagcccatgacccctaa

SEQ ID NO: 56859 - DNA, 120 bp, Homo sapiens
  misc_feature: 1456 for SV(W|O) and mtDNA
tgggtaaatggtttggctaaggttgtctggtagtaaggtggagtgggtttggggctaggtttagctcagagcggtcaagttaagttgaaatctcctaagtgtaagttgggtgctttgtgt

SEQ ID NO: 56860 - DNA, 120 bp, Homo sapiens
  misc_feature: 1456 for SV(W|O) and mtDNA
atccgtccctaacaaactaggaggcgtccttgccctattactatccatcctcatcctagcaataatccccatcctccatatatccaaacaacaaagcataatatttcgcccactaagcca

SEQ ID NO: 56861 - DNA, 120 bp, Homo sapiens
  misc_feature: 1456 for SV(W|O) and mtDNA
tgcccgcctcttcacgggcaggtcaatttcactggttaaaagtaagagacagctgaaccctcgtggagccattcatacaggtccctatttaaggaacaagtgattatgctacctttgcac

SEQ ID NO: 56862 - DNA, 120 bp, Homo sapiens
  misc_feature: 1456 for SV(W|O) and mtDNA
tgattgagatgggggctagtttttgtcatgtgagaagaagcaggccggatgtcagaggggtgccttgggtaacctctgggactcagaagtgaaagggggctattcctagttttattgcta

SEQ ID NO: 56863 - DNA, 120 bp, Homo sapiens
  misc_feature: 1456 for SV(W|O) and mtDNA
tctggcgagcagttttgttgatttaactgttgaggtttagggctaagcatagtggggtatctaatcccagtttgggtcttagctattgtgtgttcagatatgttaaagccactttcgtag

SEQ ID NO: 56864 - DNA, 120 bp, Homo sapiens
  misc_feature: 1456 for SV(W|O) and mtDNA
tccttcttgctcatcagttgatgatacgcccgagcagatgccaacacagcagccattcaagcaatcctatacaaccgtatcggcgatatcggtttcatcctcgccttagcatgatttatc

SEQ ID NO: 56865 - DNA, 120 bp, Homo sapiens
  misc_feature: 1456 for SV(W|O) and mtDNA
taaccgctaacattactgcaggccacctactcatgcacctaattggaagcgccaccctagcaatatcaaccattaaccttccctctacacttatcatcttcacaattctaattctactga

SEQ ID NO: 56866 - DNA, 120 bp, Homo sapiens
  misc_feature: 1456 for SV(W|O) and mtDNA
accatacacaacactaaaggacgaacctgatctcttatactagtatccttaatcatttttattgccacaactaacctcctcggactcctgcctcactcatttacaccaaccacccaacta

SEQ ID NO: 56867 - DNA, 120 bp, Homo sapiens
  misc_feature: 1456 for SV(W|O) and mtDNA
tacacaattctccgatccgtccctaacaaactaggaggcgtccttgccctattactatccatcctcatcctagcaataatccccatcctccatatatccaaacaacaaagcataatattt

SEQ ID NO: 56868 - DNA, 120 bp, Homo sapiens
  misc_feature: 1456 for SV(W|O) and mtDNA
gttgtcctccgattcaggttagaatgaggaggtctgcggctaggagtcaataaagtgattggcttagtgggcgaaatattatgctttgttgtttggatatatggaggatggggattattg

SEQ ID NO: 56869 - DNA, 120 bp, Homo sapiens
  misc_feature: 1456 for SV(W|O) and mtDNA
aaccgctaacattactgcaggccacctactcatgcacctaattggaagcgccaccctagcaatatcaaccattaaccttccctctacacttatcatcttcacaattctaattctactgac

SEQ ID NO: 56870 - DNA, 120 bp, Homo sapiens
  misc_feature: 1456 for SV(W|O) and mtDNA
ggttcattgtccggagagtatattgttgaagaggatagctattagaaggattatggatgcggttgcttgcgtgaggaaatacttgatggcagcttctgtggaacgagggtttattttttt

SEQ ID NO: 56871 - DNA, 120 bp, Homo sapiens
  misc_feature: 1456 for SV(W|O) and mtDNA
cgctgtcgccttaatccaagcctacgttttcacacttctagtaagcctctacctgcacgacaacacataatgacccaccaatcacatgcctatcatatagtaaaacccagcccatgaccc

SEQ ID NO: 56872 - DNA, 120 bp, Homo sapiens
  misc_feature: 1456 for SV(W|O) and mtDNA
gggcattccggataggccgagaaagtgttgtgggaagaaagttagatttacgccgatgaatatgatagtgaaatggattttggcgtaggtttggtctagggtgtagcctgagaatagggg

SEQ ID NO: 56873 - DNA, 120 bp, Homo sapiens
  misc_feature: 1456 for SV(W|O) and mtDNA
ggcaggcggtgcctctaatactggtgatgctagaggtgatgtttttggtaaacaggcggggtaagatttgccgagttccttttactttttttaacctttccttatgagcatgcctgtgtt

SEQ ID NO: 56874 - DNA, 120 bp, Homo sapiens
  misc_feature: 1456 for SV(W|O) and mtDNA
cctaattaccatactaatcttagttaccgctaacaacctattccaactgttcatcggctgagagggcgtaggaattatatccttcttgctcatcagttgatgatacgcccgagcagatgc

SEQ ID NO: 56875 - DNA, 120 bp, Homo sapiens
  misc_feature: 1456 for SV(W|O) and mtDNA
gcagtgattataggctttcgctctaagattaaaaatgccctagcccacttcttaccacaaggcacacctacaccccttatccccatactagttattatcgaaaccatcagcctactcatt

SEQ ID NO: 56876 - DNA, 120 bp, Homo sapiens
  misc_feature: 1456 for SV(W|O) and mtDNA
ctcatgcacctaattggaagcgccaccctagcaatatcaaccattaaccttccctctacacttatcatcttcacaattctaattctactgactatcctagaaatcgctgtcgccttaatc

SEQ ID NO: 56877 - DNA, 120 bp, Homo sapiens
  misc_feature: 1456 for SV(W|O) and mtDNA
cttcttgctcatcagttgatgatacgcccgagcagatgccaacacagcagccattcaagcaatcctatacaaccgtatcggcgatatcggtttcatcctcgccttagcatgatttatcct

SEQ ID NO: 56878 - DNA, 120 bp, Homo sapiens
  misc_feature: 1456 for SV(W|O) and mtDNA
ctgtcgccttaatccaagcctacgttttcacacttctagtaagcctctacctgcacgacaacacataatgacccaccaatcacatgcctatcatatagtaaaacccagcccatgacccct

SEQ ID NO: 56879 - DNA, 120 bp, Homo sapiens
  misc_feature: 1456 for SV(W|O) and mtDNA
ctgagtgaagcattggactgtaaatctaaagacaggggttaggcctctttttaccagctccgaggtgattttcatattgaattgcaaattcgaagaagcagcttcaaacctgccggggct

SEQ ID NO: 56880 - DNA, 120 bp, Homo sapiens
  misc_feature: 1456 for SV(W|O) and mtDNA
acacaatagcttttatagtaaagatacctctttacggactccacttatgactccctaaagcccatgtcgaagcccccatcgctgggtcaatagtacttgccgcagtactcttaaaactag

SEQ ID NO: 56881 - DNA, 120 bp, Homo sapiens
  misc_feature: 1456 for SV(W|O) and mtDNA
ccttttatactaataatcttatagaaatttaggttaaatacagaccaagagccttcaaagccctcagtaagttgcaatacttaatttctgtaacagctaaggactgcaaaaccccactct

SEQ ID NO: 56882 - DNA, 120 bp, Homo sapiens
  misc_feature: 1456 for SV(W|O) and mtDNA
cctccttattcgagccgagctgggccagccaggcaaccttctaggtaacgaccacatctacaacgttatcgtcacagcccatgcatttgtaataatcttcttcatagtaatacccatcat

SEQ ID NO: 56883 - DNA, 120 bp, Homo sapiens
  misc_feature: 1456 for SV(W|O) and mtDNA
cattgcgagacgctggagccggagcaccctatgtcgcagtatctgtctttgattcctgcctcatcccattatttatcgcacctacgttcaatattacaggcgaacatacttactaaagtg

SEQ ID NO: 56884 - DNA, 120 bp, Homo sapiens
  misc_feature: 1456 for SV(W|O) and mtDNA
agggataggaggagaatgggggataggtgtatgaacatgagggtgttttctcgtgtgaatgagggttttatgttgttaatgtggtgggtgagtgagccccattgtgttgtggtaaatatg

SEQ ID NO: 56885 - DNA, 120 bp, Homo sapiens
  misc_feature: 1456 for SV(W|O) and mtDNA
agttgtggcaataaaaatgattaaggatactagtataagagatcaggttcgtcctttagtgttgtgtatggttatcatttgttttgaggttagtttgattagtcattgttgggtggtgat

SEQ ID NO: 56886 - DNA, 120 bp, Homo sapiens
  misc_feature: 1456 for SV(W|O) and mtDNA
aagtgttgtgggaagaaagttagatttacgccgatgaatatgatagtgaaatggattttggcgtaggtttggtctagggtgtagcctgagaataggggaaatcagtgaatgaagcctcct

SEQ ID NO: 56887 - DNA, 120 bp, Homo sapiens
  misc_feature: 1456 for SV(W|O) and mtDNA
aattggaagcgccaccctagcaatatcaaccattaaccttccctctacacttatcatcttcacaattctaattctactgactatcctagaaatcgctgtcgccttaatccaagcctacgt

SEQ ID NO: 56888 - DNA, 120 bp, Homo sapiens
  misc_feature: 1455 for SV(W|O) and mtDNA
caattggaccaatctatcaccctatagaagaactaatgttagtataagtaacatgaaaacattctcctccgcataagcctgcgtcagattaaaacactgaactgacaattaacagcccaa

SEQ ID NO: 56889 - DNA, 120 bp, Homo sapiens
  misc_feature: 1455 for SV(W|O) and mtDNA
ttggactgtaaatctaaagacaggggttaggcctctttttaccagctccgaggtgattttcatattgaattgcaaattcgaagaagcagcttcaaacctgccggggcttctcccgccttt

SEQ ID NO: 56890 - DNA, 120 bp, Homo sapiens
  misc_feature: 1455 for SV(W|O) and mtDNA
ttcatattgaattgcaaattcgaagaagcagcttcaaacctgccggggcttctcccgccttttttcccggcggcgggagaagtagattgaagccagttgattagggtgcttagctgttaa

SEQ ID NO: 56891 - DNA, 120 bp, Homo sapiens
  misc_feature: 1455 for SV(W|O) and mtDNA
tgaagcttcagggggtttggatgagaatggctgttactacgagggctatgtggctgattgaagagtatgcaatgagcgattttaggtctgtttgtcgtaggcagatggagcttgttataa

SEQ ID NO: 56892 - DNA, 120 bp, Homo sapiens
  misc_feature: 1455 for SV(W|O) and mtDNA
gatgccgattgtaactattatgagtcctagttgacttgaagtggagaaggctacgatttttttgatgtcattttgtgtaagggcgcagactgctgcgaacagagtggtgatagcgcctaa

SEQ ID NO: 56893 - DNA, 120 bp, Homo sapiens
  misc_feature: 1455 for SV(W|O) and mtDNA
ttaagaaagcgttcaagctcaacacccactacctaaaaaatcccaaacatataactgaactcctcatacccaattggaccaatctatcaccctatagaagaactaatgttagtataagta

SEQ ID NO: 56894 - DNA, 120 bp, Homo sapiens
  misc_feature: 1455 for SV(W|O) and mtDNA
catgctaagacttcaccagtcaaagcgaactactatactcaattgatccaataacttgaccaacggaacaagttaccctagggataacagcgcaatcctattctagagtccatatcaaca

SEQ ID NO: 56895 - DNA, 120 bp, Homo sapiens
  misc_feature: 1455 for SV(W|O) and mtDNA
tggggagtagtgtgattgaggtggagtagattaggcgtaggtagaagtagaggttaaggagggtgatggtggctatgatggtggggatgatgaggctattgttttttgtgaattcttcga

SEQ ID NO: 56896 - DNA, 120 bp, Homo sapiens
  misc_feature: 1455 for SV(W|O) and mtDNA
tggctaaggttgtctggtagtaaggtggagtgggtttggggctaggtttagctcagagcggtcaagttaagttgaaatctcctaagtgtaagttgggtgctttgtgttaagctacactct

SEQ ID NO: 56897 - DNA, 120 bp, Homo sapiens
  misc_feature: 1455 for SV(W|O) and mtDNA
tgcgtaggggttttagttaaatgtcctttgaagtatacttgaggagggtgacgggcggtgtgtacgcgcttcagggccctgttcaactaagcactctactctcagtttactgctaaatcc

SEQ ID NO: 56898 - DNA, 120 bp, Homo sapiens
  misc_feature: 1455 for SV(W|O) and mtDNA
tagcctttctattagctcttagtaagattacacatgcaagcatccccgttccagtgagttcaccctctaaatcaccacgatcaaaagggacaagcatcaagcacgcagcaatgcagctca

SEQ ID NO: 56899 - DNA, 120 bp, Homo sapiens
  misc_feature: 1455 for SV(W|O) and mtDNA
agcctacgttttcacacttctagtaagcctctacctgcacgacaacacataatgacccaccaatcacatgcctatcatatagtaaaacccagcccatgacccctaacaggggccctctca

SEQ ID NO: 56900 - DNA, 120 bp, Homo sapiens
  misc_feature: 1455 for SV(W|O) and mtDNA
acctgctaggtgtaaggagaagatggttaggtctacggaggctccagggtgggagtagttccctgctaagggagggtagactgttcaacctgttcctgctccggcctccactatagcaga

SEQ ID NO: 56901 - DNA, 120 bp, Homo sapiens
  misc_feature: 1455 for SV(W|O) and mtDNA
tctccgatccgtccctaacaaactaggaggcgtccttgccctattactatccatcctcatcctagcaataatccccatcctccatatatccaaacaacaaagcataatatttcgcccact

SEQ ID NO: 56902 - DNA, 120 bp, Homo sapiens
  misc_feature: 1455 for SV(W|O) and mtDNA
tatggttcattgtccggagagtatattgttgaagaggatagctattagaaggattatggatgcggttgcttgcgtgaggaaatacttgatggcagcttctgtggaacgagggtttatttt

SEQ ID NO: 56903 - DNA, 120 bp, Homo sapiens
  misc_feature: 1455 for SV(W|O) and mtDNA
tatccccaccggcgtcaaagtatttagctgactcgccacactccacggaagcaatatgaaatgatctgctgcagtgctctgagccctaggattcatctttcttttcaccgtaggtggcct

SEQ ID NO: 56904 - DNA, 120 bp, Homo sapiens
  misc_feature: 1455 for SV(W|O) and mtDNA
tatatcttcttcgaaaccacacttatccccaccttggctatcatcacccgatgaggcaaccagccagaacgcctgaacgcaggcacatacttcctattctacaccctagtaggctccctt

SEQ ID NO: 56905 - DNA, 120 bp, Homo sapiens
  misc_feature: 1455 for SV(W|O) and mtDNA
tagttaggataatataaatagttaaattaagaatggttatgttagggttgtacggtagaactgctattattcatcctatgtgggtaattgaggagtatgctaagattttgcgtagctggg

SEQ ID NO: 56906 - DNA, 120 bp, Homo sapiens
  misc_feature: 1455 for SV(W|O) and mtDNA
gccattatcgaagaattcacaaaaaacaatagcctcatcatccccaccatcatagccaccatcaccctccttaacctctacttctacctacgcctaatctactccacctcaatcacacta

SEQ ID NO: 56907 - DNA, 120 bp, Homo sapiens
  misc_feature: 1455 for SV(W|O) and mtDNA
tacaatcttcctaggaacaacatatgacgcactctcccctgaactctacacaacatattttgtcaccaagaccctacttctaacctccctgttcttatgaattcgaacagcatacccccg

SEQ ID NO: 56908 - DNA, 120 bp, Homo sapiens
  misc_feature: 1455 for SV(W|O) and mtDNA
taatccaagcctacgttttcacacttctagtaagcctctacctgcacgacaacacataatgacccaccaatcacatgcctatcatatagtaaaacccagcccatgacccctaacaggggc

SEQ ID NO: 56909 - DNA, 120 bp, Homo sapiens
  misc_feature: 1455 for SV(W|O) and mtDNA
taaccatacacaacactaaaggacgaacctgatctcttatactagtatccttaatcatttttattgccacaactaacctcctcggactcctgcctcactcatttacaccaaccacccaac

SEQ ID NO: 56910 - DNA, 120 bp, Homo sapiens
  misc_feature: 1455 for SV(W|O) and mtDNA
aatgataaccatacacaacactaaaggacgaacctgatctcttatactagtatccttaatcatttttattgccacaactaacctcctcggactcctgcctcactcatttacaccaaccac

SEQ ID NO: 56911 - DNA, 120 bp, Homo sapiens
  misc_feature: 1455 for SV(W|O) and mtDNA
gtctaacaacatggctttctcaacttttaaaggataacagctatccattggtcttaggccccaaaaattttggtgcaactccaaataaaagtaataaccatgcacactactataaccacc

SEQ ID NO: 56912 - DNA, 120 bp, Homo sapiens
  misc_feature: 1455 for SV(W|O) and mtDNA
gtagcccatttcttgccacctcatgggctacaccttgacctaacgtctttacgtgggtacttgcgcttactttgtagccttcatcagggtttgctgaagatggcggtatataggctgagc

SEQ ID NO: 56913 - DNA, 120 bp, Homo sapiens
  misc_feature: 1455 for SV(W|O) and mtDNA
acgaaccagagtgtagcttaacacaaagcacccaacttacacttaggagatttcaacttaacttgaccgctctgagctaaacctagccccaaacccactccaccttactaccagacaacc

SEQ ID NO: 56914 - DNA, 120 bp, Homo sapiens
  misc_feature: 1455 for SV(W|O) and mtDNA
ggttgaagtgagaggtatggttttgagtagtcctcctatttttcgaatatcttgttcattgttaaggttgtggatgatggacccggagcacataaatagtatggctttgaagaaggcgtg

SEQ ID NO: 56915 - DNA, 120 bp, Homo sapiens
  misc_feature: 1455 for SV(W|O) and mtDNA
ggttatggttcattgtccggagagtatattgttgaagaggatagctattagaaggattatggatgcggttgcttgcgtgaggaaatacttgatggcagcttctgtggaacgagggtttat

SEQ ID NO: 56916 - DNA, 120 bp, Homo sapiens
  misc_feature: 1455 for SV(W|O) and mtDNA
ggattagataccccactatgcttagccctaaacctcaacagttaaatcaacaaaactgctcgccagaacactacgagccacagcttaaaactcaaaggacctggcggtgcttcatatccc

SEQ ID NO: 56917 - DNA, 120 bp, Homo sapiens
  misc_feature: 1455 for SV(W|O) and mtDNA
gggagtagagtttgaagtccttgagagaggattatgatgcgactgtgagtgcgttcgtagtttgagtttgctaggcagaatagtaatgaggatgtaagcccgtgggcgattatgagaatg

SEQ ID NO: 56918 - DNA, 120 bp, Homo sapiens
  misc_feature: 1455 for SV(W|O) and mtDNA
cattactattctgcctagcaaactcaaactacgaacgcactcacagtcgcatcataatcctctctcaaggacttcaaactctactcccactaatagctttttgatgacttctagcaagcc

SEQ ID NO: 56919 - DNA, 120 bp, Homo sapiens
  misc_feature: 1455 for SV(W|O) and mtDNA
cccaaccgaaatttttaatgcaggtttggtagtttaggacctgtgggtttgttaggtactgtttgcattaataaattaaagctccatagggtcttctcgtcttgctgtgttatgcccgcc

SEQ ID NO: 56920 - DNA, 120 bp, Homo sapiens
  misc_feature: 1455 for SV(W|O) and mtDNA
ggcctcacgggaggacatagcctatgaaggctgttgctatagttgcaagcaggaggataatgccgatgtttcaggtttctgagtagagaaatgatccgtaatataggcctcgcccgatgt

SEQ ID NO: 56921 - DNA, 120 bp, Homo sapiens
  misc_feature: 1455 for SV(W|O) and mtDNA
aaagtgttgtgggaagaaagttagatttacgccgatgaatatgatagtgaaatggattttggcgtaggtttggtctagggtgtagcctgagaataggggaaatcagtgaatgaagcctcc

SEQ ID NO: 56922 - DNA, 120 bp, Homo sapiens
  misc_feature: 1455 for SV(W|O) and mtDNA
gcctcacgggaggacatagcctatgaaggctgttgctatagttgcaagcaggaggataatgccgatgtttcaggtttctgagtagagaaatgatccgtaatataggcctcgcccgatgtg

SEQ ID NO: 56923 - DNA, 120 bp, Homo sapiens
  misc_feature: 1455 for SV(W|O) and mtDNA
aggcgtacggccagggctattggttgaatgagtaggctgatggtttcgataataactagtatggggataaggggtgtaggtgtgccttgtggtaagaagtgggctagggcatttttaatc

SEQ ID NO: 56924 - DNA, 120 bp, Homo sapiens
  misc_feature: 1455 for SV(W|O) and mtDNA
atcttaatggcacatgcagcgcaagtaggtctacaagacgctacttcccctatcatagaagagcttatcacctttcatgatcacgccctcataatcattttccttatctgcttcctagtc

SEQ ID NO: 56925 - DNA, 120 bp, Homo sapiens
  misc_feature: 1455 for SV(W|O) and mtDNA
ccgatgtgtaggaagaggcagataaagaatattgaggcgccattggcgtgaaggtagcggatgattcagccataatttacgtctcgagtgatgtgggcgattgatgaaaaggcggttgag

SEQ ID NO: 56926 - DNA, 120 bp, Homo sapiens
  misc_feature: 1455 for SV(W|O) and mtDNA
ctatttttcgaatatcttgttcattgttaaggttgtggatgatggacccggagcacataaatagtatggctttgaagaaggcgtgggtgcagatgtgcaggaatgctaggtgtggttggt

SEQ ID NO: 56927 - DNA, 120 bp, Homo sapiens
  misc_feature: 1455 for SV(W|O) and mtDNA
cctcgtggagccattcatacaggtccctatttaaggaacaagtgattatgctacctttgcacggttagggtaccgcggccgttaaacatgtgtcactgggcaggcggtgcctctaatact

SEQ ID NO: 56928 - DNA, 120 bp, Homo sapiens
  misc_feature: 1455 for SV(W|O) and mtDNA
atattacggatcatttctctactcagaaacctgaaacatcggcattatcctcctgcttgcaactatagcaacagccttcataggctatgtcctcccgtgaggccaaatatcattctgagg

SEQ ID NO: 56929 - DNA, 120 bp, Homo sapiens
  misc_feature: 1455 for SV(W|O) and mtDNA
ccgtttactcaatcctctgatcagggtgagcatcaaactcaaactacgccctgatcggcgcactgcgagcagtagcccaaacaatctcatatgaagtcaccctagccatcattctactat

SEQ ID NO: 56930 - DNA, 120 bp, Homo sapiens
  misc_feature: 1455 for SV(W|O) and mtDNA
aattatatccttcttgctcatcagttgatgatacgcccgagcagatgccaacacagcagccattcaagcaatcctatacaaccgtatcggcgatatcggtttcatcctcgccttagcatg

SEQ ID NO: 56931 - DNA, 120 bp, Homo sapiens
  misc_feature: 1455 for SV(W|O) and mtDNA
atttttcgaatatcttgttcattgttaaggttgtggatgatggacccggagcacataaatagtatggctttgaagaaggcgtgggtgcagatgtgcaggaatgctaggtgtggttggttg

SEQ ID NO: 56932 - DNA, 120 bp, Homo sapiens
  misc_feature: 1454 for SV(W|O) and mtDNA
tgtggaacgagggtttatttttttggttagaactggaataaaagctagcatgtttatttctaggcctactcaggtaaaaaatcagtgcgagcttagcgctgtgatgagtgtgcctgcaaa

SEQ ID NO: 56933 - DNA, 120 bp, Homo sapiens
  misc_feature: 1454 for SV(W|O) and mtDNA
cacacaatagctaagacccaaactgggattagataccccactatgcttagccctaaacctcaacagttaaatcaacaaaactgctcgccagaacactacgagccacagcttaaaactcaa

SEQ ID NO: 56934 - DNA, 120 bp, Homo sapiens
  misc_feature: 1454 for SV(W|O) and mtDNA
ttctttatctgcctcttcctacacatcgggcgaggcctatattacggatcatttctctactcagaaacctgaaacatcggcattatcctcctgcttgcaactatagcaacagccttcata

SEQ ID NO: 56935 - DNA, 120 bp, Homo sapiens
  misc_feature: 1454 for SV(W|O) and mtDNA
tggcacatgcagcgcaagtaggtctacaagacgctacttcccctatcatagaagagcttatcacctttcatgatcacgccctcataatcattttccttatctgcttcctagtcctgtatg

SEQ ID NO: 56936 - DNA, 120 bp, Homo sapiens
  misc_feature: 1454 for SV(W|O) and mtDNA
tgagaatggctgttactacgagggctatgtggctgattgaagagtatgcaatgagcgattttaggtctgtttgtcgtaggcagatggagcttgttataattatgcctcatagggatagta

SEQ ID NO: 56937 - DNA, 120 bp, Homo sapiens
  misc_feature: 1454 for SV(W|O) and mtDNA
ggtgagaagaattattcgagtgctataggcgcttgtcagggaggtagcgatgagagtaatagatagggctcaggcgtttgtgtatgatatgtttgcggtttcgatgatgtggtctttgga

SEQ ID NO: 56938 - DNA, 120 bp, Homo sapiens
  misc_feature: 1454 for SV(W|O) and mtDNA
tattttgtgtcaactggagttttttacaactcaggtgagttttagctttattggggagggggtgatctaaaacactctttacgccggcttctattgacttgggttaatcgtgtgaccgcg

SEQ ID NO: 56939 - DNA, 120 bp, Homo sapiens
  misc_feature: 1454 for SV(W|O) and mtDNA
tatcatctgtaggctcattcatttctctaacagcagtaatattaataattttcatgatttgagaagccttcgcttcaaagcgaaaagtcctaatagtagaagaaccctccataaacctgg

SEQ ID NO: 56940 - DNA, 120 bp, Homo sapiens
  misc_feature: 1454 for SV(W|O) and mtDNA
tagtgggagtagagtttgaagtccttgagagaggattatgatgcgactgtgagtgcgttcgtagtttgagtttgctaggcagaatagtaatgaggatgtaagcccgtgggcgattatgag

SEQ ID NO: 56941 - DNA, 120 bp, Homo sapiens
  misc_feature: 1454 for SV(W|O) and mtDNA
atagcagttctaccgtacaaccctaacataaccattcttaatttaactatttatattatcctaactactaccgcattcctactactcaacttaaactccagcaccacgaccctactacta

SEQ ID NO: 56942 - DNA, 120 bp, Homo sapiens
  misc_feature: 1454 for SV(W|O) and mtDNA
aaccttctaggtaacgaccacatctacaacgttatcgtcacagcccatgcatttgtaataatcttcttcatagtaatacccatcataatcggaggctttggcaactgactagttccccta

SEQ ID NO: 56943 - DNA, 120 bp, Homo sapiens
  misc_feature: 1454 for SV(W|O) and mtDNA
tacaaccacgaccaatgatatgaaaaaccatcgttgtatttcaactacaagaacaccaatgaccccaatacgcaaaactaaccccctaataaaattaattaaccactcattcatcgacct

SEQ ID NO: 56944 - DNA, 120 bp, Homo sapiens
  misc_feature: 1454 for SV(W|O) and mtDNA
taacaagctccatctgcctacgacaaacagacctaaaatcgctcattgcatactcttcaatcagccacatagccctcgtagtaacagccattctcatccaaaccccctgaagcttcaccg

SEQ ID NO: 56945 - DNA, 120 bp, Homo sapiens
  misc_feature: 1454 for SV(W|O) and mtDNA
gttaggaaaagggcatacaggactaggaagcagataaggaaaatgattatgagggcgtgatcatgaaaggtgataagctcttctatgataggggaagtagcgtcttgtagacctacttgc

SEQ ID NO: 56946 - DNA, 120 bp, Homo sapiens
  misc_feature: 1454 for SV(W|O) and mtDNA
gcacctaattggaagcgccaccctagcaatatcaaccattaaccttccctctacacttatcatcttcacaattctaattctactgactatcctagaaatcgctgtcgccttaatccaagc

SEQ ID NO: 56947 - DNA, 120 bp, Homo sapiens
  misc_feature: 1454 for SV(W|O) and mtDNA
gcgattaccgggctctgccatcttaacaaaccctgttcttgggtgggtgtgggtataatactaagttgagatgatatcatttacgggggaaggcgctttgtgaagtaggccttatttctc

SEQ ID NO: 56948 - DNA, 120 bp, Homo sapiens
  misc_feature: 1454 for SV(W|O) and mtDNA
gcgatgtaacacgagaaagcacataccaaggccaccacacaccacctgtccaaaaaggccttcgatacgggataatcctatttattacctcagaagtttttttcttcgcaggatttttct

SEQ ID NO: 56949 - DNA, 120 bp, Homo sapiens
  misc_feature: 1454 for SV(W|O) and mtDNA
gcctagttttaagagtactgcggcaagtactattgacccagcgatgggggcttcgacatgggctttagggagtcataagtggagtccgtaaagaggtatctttactataaaagctattgt

SEQ ID NO: 56950 - DNA, 120 bp, Homo sapiens
  misc_feature: 1454 for SV(W|O) and mtDNA
catagccgcctagttttaagagtactgcggcaagtactattgacccagcgatgggggcttcgacatgggctttagggagtcataagtggagtccgtaaagaggtatctttactataaaag

SEQ ID NO: 56951 - DNA, 120 bp, Homo sapiens
  misc_feature: 1454 for SV(W|O) and mtDNA
acacactaaccatataccaatgatggcgcgatgtaacacgagaaagcacataccaaggccaccacacaccacctgtccaaaaaggccttcgatacgggataatcctatttattacctcag

SEQ ID NO: 56952 - DNA, 120 bp, Homo sapiens
  misc_feature: 1454 for SV(W|O) and mtDNA
ctatctataaacctagccatggccatccccttatgagcgggcgcagtgattataggctttcgctctaagattaaaaatgccctagcccacttcttaccacaaggcacacctacacccctt

SEQ ID NO: 56953 - DNA, 120 bp, Homo sapiens
  misc_feature: 1454 for SV(W|O) and mtDNA
cgcctagttttaagagtactgcggcaagtactattgacccagcgatgggggcttcgacatgggctttagggagtcataagtggagtccgtaaagaggtatctttactataaaagctattg

SEQ ID NO: 56954 - DNA, 120 bp, Homo sapiens
  misc_feature: 1454 for SV(W|O) and mtDNA
cgagttccttttactttttttaacctttccttatgagcatgcctgtgttgggttgacagtgagggtaataatgacttgttggttgattgtagatattgggctgttaattgtcagttcagt

SEQ ID NO: 56955 - DNA, 120 bp, Homo sapiens
  misc_feature: 1454 for SV(W|O) and mtDNA
catcacccgatgaggcaaccagccagaacgcctgaacgcaggcacatacttcctattctacaccctagtaggctcccttcccctactcatcgcactaatttacactcacaacaccctagg

SEQ ID NO: 56956 - DNA, 120 bp, Homo sapiens
  misc_feature: 1454 for SV(W|O) and mtDNA
ccgcctagttttaagagtactgcggcaagtactattgacccagcgatgggggcttcgacatgggctttagggagtcataagtggagtccgtaaagaggtatctttactataaaagctatt

SEQ ID NO: 56957 - DNA, 120 bp, Homo sapiens
  misc_feature: 1454 for SV(W|O) and mtDNA
ccgattgtaactattatgagtcctagttgacttgaagtggagaaggctacgatttttttgatgtcattttgtgtaagggcgcagactgctgcgaacagagtggtgatagcgcctaagcat

SEQ ID NO: 56958 - DNA, 120 bp, Homo sapiens
  misc_feature: 1454 for SV(W|O) and mtDNA
agaatggggtctcctcctccggcggggtcgaagaaggtggtgttgaggttgcggtctgttagtagtatagtgatgccagcagctaggactgggagagataggagaagtaggactgctgtg

SEQ ID NO: 56959 - DNA, 120 bp, Homo sapiens
  misc_feature: 1454 for SV(W|O) and mtDNA
atgggggctagtttttgtcatgtgagaagaagcaggccggatgtcagaggggtgccttgggtaacctctgggactcagaagtgaaagggggctattcctagttttattgctatagccatt

SEQ ID NO: 56960 - DNA, 120 bp, Homo sapiens
  misc_feature: 1454 for SV(W|O) and mtDNA
atcatcaactgatgagcaagaaggatataattcctacgccctctcagccgatgaacagttggaataggttgttagcggtaactaagattagtatggtaattaggaagatgagtagatatt

SEQ ID NO: 56961 - DNA, 120 bp, Homo sapiens
  misc_feature: 1454 for SV(W|O) and mtDNA
accgctaacattactgcaggccacctactcatgcacctaattggaagcgccaccctagcaatatcaaccattaaccttccctctacacttatcatcttcacaattctaattctactgact

SEQ ID NO: 56962 - DNA, 120 bp, Homo sapiens
  misc_feature: 1453 for SV(W|O) and mtDNA
tttcacacttctagtaagcctctacctgcacgacaacacataatgacccaccaatcacatgcctatcatatagtaaaacccagcccatgacccctaacaggggccctctcagccctccta

SEQ ID NO: 56963 - DNA, 120 bp, Homo sapiens
  misc_feature: 1453 for SV(W|O) and mtDNA
ttggctaaggttgtctggtagtaaggtggagtgggtttggggctaggtttagctcagagcggtcaagttaagttgaaatctcctaagtgtaagttgggtgctttgtgttaagctacactc

SEQ ID NO: 56964 - DNA, 120 bp, Homo sapiens
  misc_feature: 1453 for SV(W|O) and mtDNA
ttggaagcgccaccctagcaatatcaaccattaaccttccctctacacttatcatcttcacaattctaattctactgactatcctagaaatcgctgtcgccttaatccaagcctacgttt

SEQ ID NO: 56965 - DNA, 120 bp, Homo sapiens
  misc_feature: 1453 for SV(W|O) and mtDNA
agcctttctattagctcttagtaagattacacatgcaagcatccccgttccagtgagttcaccctctaaatcaccacgatcaaaagggacaagcatcaagcacgcagcaatgcagctcaa

SEQ ID NO: 56966 - DNA, 120 bp, Homo sapiens
  misc_feature: 1453 for SV(W|O) and mtDNA
accttctaggtaacgaccacatctacaacgttatcgtcacagcccatgcatttgtaataatcttcttcatagtaatacccatcataatcggaggctttggcaactgactagttcccctaa

SEQ ID NO: 56967 - DNA, 120 bp, Homo sapiens
  misc_feature: 1453 for SV(W|O) and mtDNA
gactacgtacataacctaaacctactccaatgctaaaactaatcgtcccaacaattatattactaccactgacatgactttccaaaaaacacataatttgaatcaacacaaccacccaca

SEQ ID NO: 56968 - DNA, 120 bp, Homo sapiens
  misc_feature: 1453 for SV(W|O) and mtDNA
tgtggcaataaaaatgattaaggatactagtataagagatcaggttcgtcctttagtgttgtgtatggttatcatttgttttgaggttagtttgattagtcattgttgggtggtgattag

SEQ ID NO: 56969 - DNA, 120 bp, Homo sapiens
  misc_feature: 1453 for SV(W|O) and mtDNA
tggttatggttcattgtccggagagtatattgttgaagaggatagctattagaaggattatggatgcggttgcttgcgtgaggaaatacttgatggcagcttctgtggaacgagggttta

SEQ ID NO: 56970 - DNA, 120 bp, Homo sapiens
  misc_feature: 1453 for SV(W|O) and mtDNA
tggctggcccagctcggctcgaataaggaggcttagagctgtgcctaggactccagctcatgcgccgaataataggtatagtgttccaatgtctttgtggtttgtagagaatagtcaacg

SEQ ID NO: 56971 - DNA, 120 bp, Homo sapiens
  misc_feature: 1453 for SV(W|O) and mtDNA
agatgggggctagtttttgtcatgtgagaagaagcaggccggatgtcagaggggtgccttgggtaacctctgggactcagaagtgaaagggggctattcctagttttattgctatagcca

SEQ ID NO: 56972 - DNA, 120 bp, Homo sapiens
  misc_feature: 1453 for SV(W|O) and mtDNA
tgatttcccctattctcaggctacaccctagaccaaacctacgccaaaatccatttcactatcatattcatcggcgtaaatctaactttcttcccacaacactttctcggcctatccgga

SEQ ID NO: 56973 - DNA, 120 bp, Homo sapiens
  misc_feature: 1453 for SV(W|O) and mtDNA
tgagtgaagcattggactgtaaatctaaagacaggggttaggcctctttttaccagctccgaggtgattttcatattgaattgcaaattcgaagaagcagcttcaaacctgccggggctt

SEQ ID NO: 56974 - DNA, 120 bp, Homo sapiens
  misc_feature: 1453 for SV(W|O) and mtDNA
tctgcctagcaaactcaaactacgaacgcactcacagtcgcatcataatcctctctcaaggacttcaaactctactcccactaatagctttttgatgacttctagcaagcctcgctaacc

SEQ ID NO: 56975 - DNA, 120 bp, Homo sapiens
  misc_feature: 1453 for SV(W|O) and mtDNA
tcaaagcgaactactatactcaattgatccaataacttgaccaacggaacaagttaccctagggataacagcgcaatcctattctagagtccatatcaacaatagggtttacgacctcga

SEQ ID NO: 56976 - DNA, 120 bp, Homo sapiens
  misc_feature: 1453 for SV(W|O) and mtDNA
tccccaccggcgtcaaagtatttagctgactcgccacactccacggaagcaatatgaaatgatctgctgcagtgctctgagccctaggattcatctttcttttcaccgtaggtggcctga

SEQ ID NO: 56977 - DNA, 120 bp, Homo sapiens
  misc_feature: 1453 for SV(W|O) and mtDNA
tcaatcctctgatcagggtgagcatcaaactcaaactacgccctgatcggcgcactgcgagcagtagcccaaacaatctcatatgaagtcaccctagccatcattctactatcaacatta

SEQ ID NO: 56978 - DNA, 120 bp, Homo sapiens
  misc_feature: 1453 for SV(W|O) and mtDNA
gtcggggcattccggataggccgagaaagtgttgtgggaagaaagttagatttacgccgatgaatatgatagtgaaatggattttggcgtaggtttggtctagggtgtagcctgagaata

SEQ ID NO: 56979 - DNA, 120 bp, Homo sapiens
  misc_feature: 1453 for SV(W|O) and mtDNA
aaagaccacatcatcgaaaccgcaaacatatcatacacaaacgcctgagccctatctattactctcatcgctacctccctgacaagcgcctatagcactcgaataattcttctcacccta

SEQ ID NO: 56980 - DNA, 120 bp, Homo sapiens
  misc_feature: 1453 for SV(W|O) and mtDNA
taggagtcaataaagtgattggcttagtgggcgaaatattatgctttgttgtttggatatatggaggatggggattattgctaggatgaggatggatagtaatagggcaaggacgcctcc

SEQ ID NO: 56981 - DNA, 120 bp, Homo sapiens
  misc_feature: 1453 for SV(W|O) and mtDNA
gaggtcgccccaaccgaaatttttaatgcaggtttggtagtttaggacctgtgggtttgttaggtactgtttgcattaataaattaaagctccatagggtcttctcgtcttgctgtgtta

SEQ ID NO: 56982 - DNA, 120 bp, Homo sapiens
  misc_feature: 1453 for SV(W|O) and mtDNA
gtcgttacctagaaggttgcctggctggcccagctcggctcgaataaggaggcttagagctgtgcctaggactccagctcatgcgccgaataataggtatagtgttccaatgtctttgtg

SEQ ID NO: 56983 - DNA, 120 bp, Homo sapiens
  misc_feature: 1453 for SV(W|O) and mtDNA
cagttgatgtgtgatagttgagggttgattgctgtacttgcttgtaagcatggggagggggttttgatgtggattgggtttttatgtactacaggtggtcaagtatttatggtaccgtac

SEQ ID NO: 56984 - DNA, 120 bp, Homo sapiens
  misc_feature: 1453 for SV(W|O) and mtDNA
ctttaacatatctgaacacacaatagctaagacccaaactgggattagataccccactatgcttagccctaaacctcaacagttaaatcaacaaaactgctcgccagaacactacgagcc

SEQ ID NO: 56985 - DNA, 120 bp, Homo sapiens
  misc_feature: 1453 for SV(W|O) and mtDNA
ctaattaccatactaatcttagttaccgctaacaacctattccaactgttcatcggctgagagggcgtaggaattatatccttcttgctcatcagttgatgatacgcccgagcagatgcc

SEQ ID NO: 56986 - DNA, 120 bp, Homo sapiens
  misc_feature: 1453 for SV(W|O) and mtDNA
aacgaccacatctacaacgttatcgtcacagcccatgcatttgtaataatcttcttcatagtaatacccatcataatcggaggctttggcaactgactagttcccctaataatcggtgcc

SEQ ID NO: 56987 - DNA, 120 bp, Homo sapiens
  misc_feature: 1453 for SV(W|O) and mtDNA
ggataatataaatagttaaattaagaatggttatgttagggttgtacggtagaactgctattattcatcctatgtgggtaattgaggagtatgctaagattttgcgtagctgggtttggt

SEQ ID NO: 56988 - DNA, 120 bp, Homo sapiens
  misc_feature: 1453 for SV(W|O) and mtDNA
atagccgcctagttttaagagtactgcggcaagtactattgacccagcgatgggggcttcgacatgggctttagggagtcataagtggagtccgtaaagaggtatctttactataaaagc

SEQ ID NO: 56989 - DNA, 120 bp, Homo sapiens
  misc_feature: 1453 for SV(W|O) and mtDNA
gctaacattactgcaggccacctactcatgcacctaattggaagcgccaccctagcaatatcaaccattaaccttccctctacacttatcatcttcacaattctaattctactgactatc

SEQ ID NO: 56990 - DNA, 120 bp, Homo sapiens
  misc_feature: 1453 for SV(W|O) and mtDNA
gattgagatgggggctagtttttgtcatgtgagaagaagcaggccggatgtcagaggggtgccttgggtaacctctgggactcagaagtgaaagggggctattcctagttttattgctat

SEQ ID NO: 56991 - DNA, 120 bp, Homo sapiens
  misc_feature: 1453 for SV(W|O) and mtDNA
gatcatttctctactcagaaacctgaaacatcggcattatcctcctgcttgcaactatagcaacagccttcataggctatgtcctcccgtgaggccaaatatcattctgaggggccacag

SEQ ID NO: 56992 - DNA, 120 bp, Homo sapiens
  misc_feature: 1453 for SV(W|O) and mtDNA
atatcttcttcgaaaccacacttatccccaccttggctatcatcacccgatgaggcaaccagccagaacgcctgaacgcaggcacatacttcctattctacaccctagtaggctcccttc

SEQ ID NO: 56993 - DNA, 120 bp, Homo sapiens
  misc_feature: 1453 for SV(W|O) and mtDNA
gaagcttcagggggtttggatgagaatggctgttactacgagggctatgtggctgattgaagagtatgcaatgagcgattttaggtctgtttgtcgtaggcagatggagcttgttataat

SEQ ID NO: 56994 - DNA, 120 bp, Homo sapiens
  misc_feature: 1453 for SV(W|O) and mtDNA
atatcttaatggcacatgcagcgcaagtaggtctacaagacgctacttcccctatcatagaagagcttatcacctttcatgatcacgccctcataatcattttccttatctgcttcctag

SEQ ID NO: 56995 - DNA, 120 bp, Homo sapiens
  misc_feature: 1453 for SV(W|O) and mtDNA
ccacatcatcgaaaccgcaaacatatcatacacaaacgcctgagccctatctattactctcatcgctacctccctgacaagcgcctatagcactcgaataattcttctcaccctaacagg

SEQ ID NO: 56996 - DNA, 120 bp, Homo sapiens
  misc_feature: 1453 for SV(W|O) and mtDNA
attacggatcatttctctactcagaaacctgaaacatcggcattatcctcctgcttgcaactatagcaacagccttcataggctatgtcctcccgtgaggccaaatatcattctgagggg

SEQ ID NO: 56997 - DNA, 120 bp, Homo sapiens
  misc_feature: 1453 for SV(W|O) and mtDNA
atgtgtgatagttgagggttgattgctgtacttgcttgtaagcatggggagggggttttgatgtggattgggtttttatgtactacaggtggtcaagtatttatggtaccgtacaatatt

SEQ ID NO: 56998 - DNA, 120 bp, Homo sapiens
  misc_feature: 1453 for SV(W|O) and mtDNA
agcaataaaactaggaatagccccctttcacttctgagtcccagaggttacccaaggcacccctctgacatccggcctgcttcttctcacatgacaaaaactagcccccatctcaatcat

SEQ ID NO: 56999 - DNA, 120 bp, Homo sapiens
  misc_feature: 1452 for SV(W|O) and mtDNA
tttggctaaggttgtctggtagtaaggtggagtgggtttggggctaggtttagctcagagcggtcaagttaagttgaaatctcctaagtgtaagttgggtgctttgtgttaagctacact

SEQ ID NO: 57000 - DNA, 120 bp, Homo sapiens
  misc_feature: 1452 for SV(W|O) and mtDNA
acacaatagctaagacccaaactgggattagataccccactatgcttagccctaaacctcaacagttaaatcaacaaaactgctcgccagaacactacgagccacagcttaaaactcaaa

SEQ ID NO: 57001 - DNA, 120 bp, Homo sapiens
  misc_feature: 1452 for SV(W|O) and mtDNA
tttaacatatctgaacacacaatagctaagacccaaactgggattagataccccactatgcttagccctaaacctcaacagttaaatcaacaaaactgctcgccagaacactacgagcca

SEQ ID NO: 57002 - DNA, 120 bp, Homo sapiens
  misc_feature: 1452 for SV(W|O) and mtDNA
tccgtccctaacaaactaggaggcgtccttgccctattactatccatcctcatcctagcaataatccccatcctccatatatccaaacaacaaagcataatatttcgcccactaagccaa

SEQ ID NO: 57003 - DNA, 120 bp, Homo sapiens
  misc_feature: 1452 for SV(W|O) and mtDNA
cttaggagatttcaacttaacttgaccgctctgagctaaacctagccccaaacccactccaccttactaccagacaaccttagccaaaccatttacccaaataaagtataggcgatagaa

SEQ ID NO: 57004 - DNA, 120 bp, Homo sapiens
  misc_feature: 1452 for SV(W|O) and mtDNA
ttaggcgtacggccagggctattggttgaatgagtaggctgatggtttcgataataactagtatggggataaggggtgtaggtgtgccttgtggtaagaagtgggctagggcatttttaa

SEQ ID NO: 57005 - DNA, 120 bp, Homo sapiens
  misc_feature: 1452 for SV(W|O) and mtDNA
taggctcccttcccctactcatcgcactaatttacactcacaacaccctaggctcactaaacattctactactcactctcactgcccaagaactatcaaactcctgagccaacaacttaa

SEQ ID NO: 57006 - DNA, 120 bp, Homo sapiens
  misc_feature: 1452 for SV(W|O) and mtDNA
tactcatgcacctaattggaagcgccaccctagcaatatcaaccattaaccttccctctacacttatcatcttcacaattctaattctactgactatcctagaaatcgctgtcgccttaa

SEQ ID NO: 57007 - DNA, 120 bp, Homo sapiens
  misc_feature: 1452 for SV(W|O) and mtDNA
tcacaaaaaacaatagcctcatcatccccaccatcatagccaccatcaccctccttaacctctacttctacctacgcctaatctactccacctcaatcacactactccccatatctaaca

SEQ ID NO: 57008 - DNA, 120 bp, Homo sapiens
  misc_feature: 1452 for SV(W|O) and mtDNA
gccgattgtaactattatgagtcctagttgacttgaagtggagaaggctacgatttttttgatgtcattttgtgtaagggcgcagactgctgcgaacagagtggtgatagcgcctaagca

SEQ ID NO: 57009 - DNA, 120 bp, Homo sapiens
  misc_feature: 1452 for SV(W|O) and mtDNA
gggaagaaagttagatttacgccgatgaatatgatagtgaaatggattttggcgtaggtttggtctagggtgtagcctgagaataggggaaatcagtgaatgaagcctcctatgatggca

SEQ ID NO: 57010 - DNA, 120 bp, Homo sapiens
  misc_feature: 1452 for SV(W|O) and mtDNA
tcgtggagccattcatacaggtccctatttaaggaacaagtgattatgctacctttgcacggttagggtaccgcggccgttaaacatgtgtcactgggcaggcggtgcctctaatactgg

SEQ ID NO: 57011 - DNA, 120 bp, Homo sapiens
  misc_feature: 1452 for SV(W|O) and mtDNA
tcattactattctgcctagcaaactcaaactacgaacgcactcacagtcgcatcataatcctctctcaaggacttcaaactctactcccactaatagctttttgatgacttctagcaagc

SEQ ID NO: 57012 - DNA, 120 bp, Homo sapiens
  misc_feature: 1452 for SV(W|O) and mtDNA
ccgtacaaccctaacataaccattcttaatttaactatttatattatcctaactactaccgcattcctactactcaacttaaactccagcaccacgaccctactactatctcgcacctga

SEQ ID NO: 57013 - DNA, 120 bp, Homo sapiens
  misc_feature: 1452 for SV(W|O) and mtDNA
aacggctacatagaaaaatccaccccttacgagtgcggcttcgaccctatatcccccgcccgcgtccctttctccataaaattcttcttagtagctattaccttcttattatttgatcta

SEQ ID NO: 57014 - DNA, 120 bp, Homo sapiens
  misc_feature: 1452 for SV(W|O) and mtDNA
ctattagtgggagtagagtttgaagtccttgagagaggattatgatgcgactgtgagtgcgttcgtagtttgagtttgctaggcagaatagtaatgaggatgtaagcccgtgggcgatta

SEQ ID NO: 57015 - DNA, 120 bp, Homo sapiens
  misc_feature: 1452 for SV(W|O) and mtDNA
gtaacatggtaagtgtactggaaagtgcacttggacgaaccagagtgtagcttaacacaaagcacccaacttacacttaggagatttcaacttaacttgaccgctctgagctaaacctag

SEQ ID NO: 57016 - DNA, 120 bp, Homo sapiens
  misc_feature: 1452 for SV(W|O) and mtDNA
ggagatgttggatggggtggggaggtcgatgaatgagtggttaattaattttattagggggttagttttgcgtattggggtcattggtgttcttgtagttgaaatacaacgatggttttt

SEQ ID NO: 57017 - DNA, 120 bp, Homo sapiens
  misc_feature: 1452 for SV(W|O) and mtDNA
gctctgccatcttaacaaaccctgttcttgggtgggtgtgggtataatactaagttgagatgatatcatttacgggggaaggcgctttgtgaagtaggccttatttctcttgtcctttcg

SEQ ID NO: 57018 - DNA, 120 bp, Homo sapiens
  misc_feature: 1452 for SV(W|O) and mtDNA
gctaggagtcaataaagtgattggcttagtgggcgaaatattatgctttgttgtttggatatatggaggatggggattattgctaggatgaggatggatagtaatagggcaaggacgcct

SEQ ID NO: 57019 - DNA, 120 bp, Homo sapiens
  misc_feature: 1452 for SV(W|O) and mtDNA
ctattttgtgtcaactggagttttttacaactcaggtgagttttagctttattggggagggggtgatctaaaacactctttacgccggcttctattgacttgggttaatcgtgtgaccgc

SEQ ID NO: 57020 - DNA, 120 bp, Homo sapiens
  misc_feature: 1452 for SV(W|O) and mtDNA
gcggctaggagtcaataaagtgattggcttagtgggcgaaatattatgctttgttgtttggatatatggaggatggggattattgctaggatgaggatggatagtaatagggcaaggacg

SEQ ID NO: 57021 - DNA, 120 bp, Homo sapiens
  misc_feature: 1452 for SV(W|O) and mtDNA
cccttttatactaataatcttatagaaatttaggttaaatacagaccaagagccttcaaagccctcagtaagttgcaatacttaatttctgtaacagctaaggactgcaaaaccccactc

SEQ ID NO: 57022 - DNA, 120 bp, Homo sapiens
  misc_feature: 1452 for SV(W|O) and mtDNA
acaaccacgaccaatgatatgaaaaaccatcgttgtatttcaactacaagaacaccaatgaccccaatacgcaaaactaaccccctaataaaattaattaaccactcattcatcgacctc

SEQ ID NO: 57023 - DNA, 120 bp, Homo sapiens
  misc_feature: 1452 for SV(W|O) and mtDNA
ctccactatagcagatgcgagcaggagtaggagagagggaggtaagagtcagaagcttatgttgtttatgcggggaaacgccatatcgggggcaccgattattaggggaactagtcagtt

SEQ ID NO: 57024 - DNA, 120 bp, Homo sapiens
  misc_feature: 1452 for SV(W|O) and mtDNA
catgtgagaagaagcaggccggatgtcagaggggtgccttgggtaacctctgggactcagaagtgaaagggggctattcctagttttattgctatagccattatgattattaatgatgag

SEQ ID NO: 57025 - DNA, 120 bp, Homo sapiens
  misc_feature: 1452 for SV(W|O) and mtDNA
cctgctaggtgtaaggagaagatggttaggtctacggaggctccagggtgggagtagttccctgctaagggagggtagactgttcaacctgttcctgctccggcctccactatagcagat

SEQ ID NO: 57026 - DNA, 120 bp, Homo sapiens
  misc_feature: 1452 for SV(W|O) and mtDNA
aataatagcagttctaccgtacaaccctaacataaccattcttaatttaactatttatattatcctaactactaccgcattcctactactcaacttaaactccagcaccacgaccctact

SEQ ID NO: 57027 - DNA, 120 bp, Homo sapiens
  misc_feature: 1451 for SV(W|O) and mtDNA
ggagaccccattctataccaacacctattctgatttttcggtcaccctgaagtttatattcttatcctaccaggcttcggaataatctcccatattgtaacttactactccggaaaaaaa

SEQ ID NO: 57028 - DNA, 120 bp, Homo sapiens
  misc_feature: 1451 for SV(W|O) and mtDNA
ttcggggtatgggcccgatagcttatttagctgaccttactttaggatggggtgtgataggtggcacggagaattttggattctcagggatgggttcgattctcatagtcctagaaataa

SEQ ID NO: 57029 - DNA, 120 bp, Homo sapiens
  misc_feature: 1451 for SV(W|O) and mtDNA
ggagtagtgtgattgaggtggagtagattaggcgtaggtagaagtagaggttaaggagggtgatggtggctatgatggtggggatgatgaggctattgttttttgtgaattcttcgataa

SEQ ID NO: 57030 - DNA, 120 bp, Homo sapiens
  misc_feature: 1451 for SV(W|O) and mtDNA
ttaggataatataaatagttaaattaagaatggttatgttagggttgtacggtagaactgctattattcatcctatgtgggtaattgaggagtatgctaagattttgcgtagctgggttt

SEQ ID NO: 57031 - DNA, 120 bp, Homo sapiens
  misc_feature: 1451 for SV(W|O) and mtDNA
ttactcaatcctctgatcagggtgagcatcaaactcaaactacgccctgatcggcgcactgcgagcagtagcccaaacaatctcatatgaagtcaccctagccatcattctactatcaac

SEQ ID NO: 57032 - DNA, 120 bp, Homo sapiens
  misc_feature: 1451 for SV(W|O) and mtDNA
ttaatggcacatgcagcgcaagtaggtctacaagacgctacttcccctatcatagaagagcttatcacctttcatgatcacgccctcataatcattttccttatctgcttcctagtcctg

SEQ ID NO: 57033 - DNA, 120 bp, Homo sapiens
  misc_feature: 1451 for SV(W|O) and mtDNA
tgggattagataccccactatgcttagccctaaacctcaacagttaaatcaacaaaactgctcgccagaacactacgagccacagcttaaaactcaaaggacctggcggtgcttcatatc

SEQ ID NO: 57034 - DNA, 120 bp, Homo sapiens
  misc_feature: 1451 for SV(W|O) and mtDNA
cacactaaccatataccaatgatggcgcgatgtaacacgagaaagcacataccaaggccaccacacaccacctgtccaaaaaggccttcgatacgggataatcctatttattacctcaga

SEQ ID NO: 57035 - DNA, 120 bp, Homo sapiens
  misc_feature: 1451 for SV(W|O) and mtDNA
gaacgtaggtgcgataaataatgggatgaggcaggaatcaaagacagatactgcgacatagggtgctccggctccagcgtctcgcaatgctatcgcgtgcataccccccagacgaaaata

SEQ ID NO: 57036 - DNA, 120 bp, Homo sapiens
  misc_feature: 1451 for SV(W|O) and mtDNA
agtactctgaggcttgtaggagggtaaaatagagacccagtaaaattgtaataagcagtgcttgaattatttggtttcggttgttttctattagactatggtgagctcaggtgattgata

SEQ ID NO: 57037 - DNA, 120 bp, Homo sapiens
  misc_feature: 1451 for SV(W|O) and mtDNA
aataaaactaggaatagccccctttcacttctgagtcccagaggttacccaaggcacccctctgacatccggcctgcttcttctcacatgacaaaaactagcccccatctcaatcatata

SEQ ID NO: 57038 - DNA, 120 bp, Homo sapiens
  misc_feature: 1451 for SV(W|O) and mtDNA
ctccgatccgtccctaacaaactaggaggcgtccttgccctattactatccatcctcatcctagcaataatccccatcctccatatatccaaacaacaaagcataatatttcgcccacta

SEQ ID NO: 57039 - DNA, 120 bp, Homo sapiens
  misc_feature: 1451 for SV(W|O) and mtDNA
gcgcaagtaggtctacaagacgctacttcccctatcatagaagagcttatcacctttcatgatcacgccctcataatcattttccttatctgcttcctagtcctgtatgcccttttccta

SEQ ID NO: 57040 - DNA, 120 bp, Homo sapiens
  misc_feature: 1451 for SV(W|O) and mtDNA
atatgactagcttacacaatagcttttatagtaaagatacctctttacggactccacttatgactccctaaagcccatgtcgaagcccccatcgctgggtcaatagtacttgccgcagta

SEQ ID NO: 57041 - DNA, 120 bp, Homo sapiens
  misc_feature: 1451 for SV(W|O) and mtDNA
gttgattgctgtacttgcttgtaagcatggggagggggttttgatgtggattgggtttttatgtactacaggtggtcaagtatttatggtaccgtacaatattcatggtggctggcagta

SEQ ID NO: 57042 - DNA, 120 bp, Homo sapiens
  misc_feature: 1451 for SV(W|O) and mtDNA
agcttcagggggtttggatgagaatggctgttactacgagggctatgtggctgattgaagagtatgcaatgagcgattttaggtctgtttgtcgtaggcagatggagcttgttataatta

SEQ ID NO: 57043 - DNA, 120 bp, Homo sapiens
  misc_feature: 1451 for SV(W|O) and mtDNA
acctcaacagttaaatcaacaaaactgctcgccagaacactacgagccacagcttaaaactcaaaggacctggcggtgcttcatatccctctagaggagcctgttctgtaatcgataaac

SEQ ID NO: 57044 - DNA, 120 bp, Homo sapiens
  misc_feature: 1451 for SV(W|O) and mtDNA
gttgatgccgattgtaactattatgagtcctagttgacttgaagtggagaaggctacgatttttttgatgtcattttgtgtaagggcgcagactgctgcgaacagagtggtgatagcgcc

SEQ ID NO: 57045 - DNA, 120 bp, Homo sapiens
  misc_feature: 1451 for SV(W|O) and mtDNA
gttctggcgagcagttttgttgatttaactgttgaggtttagggctaagcatagtggggtatctaatcccagtttgggtcttagctattgtgtgttcagatatgttaaagccactttcgt

SEQ ID NO: 57046 - DNA, 120 bp, Homo sapiens
  misc_feature: 1451 for SV(W|O) and mtDNA
gctgtcgccttaatccaagcctacgttttcacacttctagtaagcctctacctgcacgacaacacataatgacccaccaatcacatgcctatcatatagtaaaacccagcccatgacccc

SEQ ID NO: 57047 - DNA, 120 bp, Homo sapiens
  misc_feature: 1451 for SV(W|O) and mtDNA
gggattagataccccactatgcttagccctaaacctcaacagttaaatcaacaaaactgctcgccagaacactacgagccacagcttaaaactcaaaggacctggcggtgcttcatatcc

SEQ ID NO: 57048 - DNA, 120 bp, Homo sapiens
  misc_feature: 1451 for SV(W|O) and mtDNA
ggccattatcgaagaattcacaaaaaacaatagcctcatcatccccaccatcatagccaccatcaccctccttaacctctacttctacctacgcctaatctactccacctcaatcacact

SEQ ID NO: 57049 - DNA, 120 bp, Homo sapiens
  misc_feature: 1451 for SV(W|O) and mtDNA
gcttttaggcctactatgggtgttaaattttttactctctctacaaggttttttcctagtgtccaaagagctgttcctctttggactaacagttaaatttacaaggggatttagagggtt

SEQ ID NO: 57050 - DNA, 120 bp, Homo sapiens
  misc_feature: 1451 for SV(W|O) and mtDNA
gcttagccctaaacctcaacagttaaatcaacaaaactgctcgccagaacactacgagccacagcttaaaactcaaaggacctggcggtgcttcatatccctctagaggagcctgttctg

SEQ ID NO: 57051 - DNA, 120 bp, Homo sapiens
  misc_feature: 1451 for SV(W|O) and mtDNA
gaggcaccgcctgcccagtgacacatgtttaacggccgcggtaccctaaccgtgcaaaggtagcataatcacttgttccttaaatagggacctgtatgaatggctccacgagggttcagc

SEQ ID NO: 57052 - DNA, 120 bp, Homo sapiens
  misc_feature: 1451 for SV(W|O) and mtDNA
aaccgaaaccaaataattcaagcactgcttattacaattttactgggtctctattttaccctcctacaagcctcagagtacttcgagtctcccttcaccatttccgacggcatctacggc

SEQ ID NO: 57053 - DNA, 120 bp, Homo sapiens
  misc_feature: 1451 for SV(W|O) and mtDNA
atgcgtaggggttttagttaaatgtcctttgaagtatacttgaggagggtgacgggcggtgtgtacgcgcttcagggccctgttcaactaagcactctactctcagtttactgctaaatc

SEQ ID NO: 57054 - DNA, 120 bp, Homo sapiens
  misc_feature: 1451 for SV(W|O) and mtDNA
gagaggtatggttttgagtagtcctcctatttttcgaatatcttgttcattgttaaggttgtggatgatggacccggagcacataaatagtatggctttgaagaaggcgtgggtgcagat

SEQ ID NO: 57055 - DNA, 120 bp, Homo sapiens
  misc_feature: 1451 for SV(W|O) and mtDNA
cttactggttgtcctccgattcaggttagaatgaggaggtctgcggctaggagtcaataaagtgattggcttagtgggcgaaatattatgctttgttgtttggatatatggaggatgggg

SEQ ID NO: 57056 - DNA, 120 bp, Homo sapiens
  misc_feature: 1451 for SV(W|O) and mtDNA
agaggcaccgcctgcccagtgacacatgtttaacggccgcggtaccctaaccgtgcaaaggtagcataatcacttgttccttaaatagggacctgtatgaatggctccacgagggttcag

SEQ ID NO: 57057 - DNA, 120 bp, Homo sapiens
  misc_feature: 1451 for SV(W|O) and mtDNA
cgcagtgattataggctttcgctctaagattaaaaatgccctagcccacttcttaccacaaggcacacctacaccccttatccccatactagttattatcgaaaccatcagcctactcat

SEQ ID NO: 57058 - DNA, 120 bp, Homo sapiens
  misc_feature: 1451 for SV(W|O) and mtDNA
acagggaggaatttgaagtagatagaaaccgacctggattactccggtctgaactcagatcacgtaggactttaatcgttgaacaaacgaacctttaatagcggctgcaccatcgggatg

SEQ ID NO: 57059 - DNA, 120 bp, Homo sapiens
  misc_feature: 1451 for SV(W|O) and mtDNA
catagtctaatagaaaacaaccgaaaccaaataattcaagcactgcttattacaattttactgggtctctattttaccctcctacaagcctcagagtacttcgagtctcccttcaccatt

SEQ ID NO: 57060 - DNA, 120 bp, Homo sapiens
  misc_feature: 1451 for SV(W|O) and mtDNA
caatcttcctaggaacaacatatgacgcactctcccctgaactctacacaacatattttgtcaccaagaccctacttctaacctccctgttcttatgaattcgaacagcatacccccgat

SEQ ID NO: 57061 - DNA, 120 bp, Homo sapiens
  misc_feature: 1451 for SV(W|O) and mtDNA
attgctgtacttgcttgtaagcatggggagggggttttgatgtggattgggtttttatgtactacaggtggtcaagtatttatggtaccgtacaatattcatggtggctggcagtaatgt

SEQ ID NO: 57062 - DNA, 120 bp, Homo sapiens
  misc_feature: 1451 for SV(W|O) and mtDNA
actatctataaacctagccatggccatccccttatgagcgggcgcagtgattataggctttcgctctaagattaaaaatgccctagcccacttcttaccacaaggcacacctacacccct

SEQ ID NO: 57063 - DNA, 120 bp, Homo sapiens
  misc_feature: 1451 for SV(W|O) and mtDNA
agcgcaagtaggtctacaagacgctacttcccctatcatagaagagcttatcacctttcatgatcacgccctcataatcattttccttatctgcttcctagtcctgtatgcccttttcct

SEQ ID NO: 57064 - DNA, 120 bp, Homo sapiens
  misc_feature: 1451 for SV(W|O) and mtDNA
agccattttacctcacccccactgatgttcgccgaccgttgactattctctacaaaccacaaagacattggaacactatacctattattcggcgcatgagctggagtcctaggcacagct

SEQ ID NO: 57065 - DNA, 120 bp, Homo sapiens
  misc_feature: 1451 for SV(W|O) and mtDNA
acttcaccagtcaaagcgaactactatactcaattgatccaataacttgaccaacggaacaagttaccctagggataacagcgcaatcctattctagagtccatatcaacaatagggttt

SEQ ID NO: 57066 - DNA, 120 bp, Homo sapiens
  misc_feature: 1450 for SV(W|O) and mtDNA
ttttcggggtatgggcccgatagcttatttagctgaccttactttaggatggggtgtgataggtggcacggagaattttggattctcagggatgggttcgattctcatagtcctagaaat

SEQ ID NO: 57067 - DNA, 120 bp, Homo sapiens
  misc_feature: 1450 for SV(W|O) and mtDNA
ttggttgattgtagatattgggctgttaattgtcagttcagtgttttaatctgacgcaggcttatgcggaggagaatgttttcatgttacttatactaacattagttcttctatagggtg

SEQ ID NO: 57068 - DNA, 120 bp, Homo sapiens
  misc_feature: 1450 for SV(W|O) and mtDNA
ttatatccttcttgctcatcagttgatgatacgcccgagcagatgccaacacagcagccattcaagcaatcctatacaaccgtatcggcgatatcggtttcatcctcgccttagcatgat

SEQ ID NO: 57069 - DNA, 120 bp, Homo sapiens
  misc_feature: 1450 for SV(W|O) and mtDNA
taacatatctgaacacacaatagctaagacccaaactgggattagataccccactatgcttagccctaaacctcaacagttaaatcaacaaaactgctcgccagaacactacgagccaca

SEQ ID NO: 57070 - DNA, 120 bp, Homo sapiens
  misc_feature: 1450 for SV(W|O) and mtDNA
tgtagccttcatcagggtttgctgaagatggcggtatataggctgagcaagaggtggtgaggttgatcggggtttatcgattacagaacaggctcctctagagggatatgaagcaccgcc

SEQ ID NO: 57071 - DNA, 120 bp, Homo sapiens
  misc_feature: 1450 for SV(W|O) and mtDNA
tctttatctgcctcttcctacacatcgggcgaggcctatattacggatcatttctctactcagaaacctgaaacatcggcattatcctcctgcttgcaactatagcaacagccttcatag

SEQ ID NO: 57072 - DNA, 120 bp, Homo sapiens
  misc_feature: 1450 for SV(W|O) and mtDNA
agtgggagtagagtttgaagtccttgagagaggattatgatgcgactgtgagtgcgttcgtagtttgagtttgctaggcagaatagtaatgaggatgtaagcccgtgggcgattatgaga

SEQ ID NO: 57073 - DNA, 120 bp, Homo sapiens
  misc_feature: 1450 for SV(W|O) and mtDNA
tcggggtatgggcccgatagcttatttagctgaccttactttaggatggggtgtgataggtggcacggagaattttggattctcagggatgggttcgattctcatagtcctagaaataag

SEQ ID NO: 57074 - DNA, 120 bp, Homo sapiens
  misc_feature: 1450 for SV(W|O) and mtDNA
ggaagcagataaggaaaatgattatgagggcgtgatcatgaaaggtgataagctcttctatgataggggaagtagcgtcttgtagacctacttgcgctgcatgtgccattaagatatata

SEQ ID NO: 57075 - DNA, 120 bp, Homo sapiens
  misc_feature: 1450 for SV(W|O) and mtDNA
cgtaacatggtaagtgtactggaaagtgcacttggacgaaccagagtgtagcttaacacaaagcacccaacttacacttaggagatttcaacttaacttgaccgctctgagctaaaccta

SEQ ID NO: 57076 - DNA, 120 bp, Homo sapiens
  misc_feature: 1450 for SV(W|O) and mtDNA
tagctaagacccaaactgggattagataccccactatgcttagccctaaacctcaacagttaaatcaacaaaactgctcgccagaacactacgagccacagcttaaaactcaaaggacct

SEQ ID NO: 57077 - DNA, 120 bp, Homo sapiens
  misc_feature: 1450 for SV(W|O) and mtDNA
taatcctttttgtagtcactcataggccagacttagggctaggatgatgattaataagagggatgacataactattagtggcaggttagttgtttgtagggctcatggtaggggtaaaag

SEQ ID NO: 57078 - DNA, 120 bp, Homo sapiens
  misc_feature: 1450 for SV(W|O) and mtDNA
cttacacaatagcttttatagtaaagatacctctttacggactccacttatgactccctaaagcccatgtcgaagcccccatcgctgggtcaatagtacttgccgcagtactcttaaaac

SEQ ID NO: 57079 - DNA, 120 bp, Homo sapiens
  misc_feature: 1450 for SV(W|O) and mtDNA
agactacgtacataacctaaacctactccaatgctaaaactaatcgtcccaacaattatattactaccactgacatgactttccaaaaaacacataatttgaatcaacacaaccacccac

SEQ ID NO: 57080 - DNA, 120 bp, Homo sapiens
  misc_feature: 1450 for SV(W|O) and mtDNA
atagctaagacccaaactgggattagataccccactatgcttagccctaaacctcaacagttaaatcaacaaaactgctcgccagaacactacgagccacagcttaaaactcaaaggacc

SEQ ID NO: 57081 - DNA, 120 bp, Homo sapiens
  misc_feature: 1450 for SV(W|O) and mtDNA
gggataggaggagaatgggggataggtgtatgaacatgagggtgttttctcgtgtgaatgagggttttatgttgttaatgtggtgggtgagtgagccccattgtgttgtggtaaatatgt

SEQ ID NO: 57082 - DNA, 120 bp, Homo sapiens
  misc_feature: 1450 for SV(W|O) and mtDNA
gcagcagtctgcgcccttacacaaaatgacatcaaaaaaatcgtagccttctccacttcaagtcaactaggactcataatagttacaatcggcatcaaccaaccacacctagcattcctg

SEQ ID NO: 57083 - DNA, 120 bp, Homo sapiens
  misc_feature: 1450 for SV(W|O) and mtDNA
gatgtgtgatagttgagggttgattgctgtacttgcttgtaagcatggggagggggttttgatgtggattgggtttttatgtactacaggtggtcaagtatttatggtaccgtacaatat

SEQ ID NO: 57084 - DNA, 120 bp, Homo sapiens
  misc_feature: 1450 for SV(W|O) and mtDNA
caaccgaaatttttaatgcaggtttggtagtttaggacctgtgggtttgttaggtactgtttgcattaataaattaaagctccatagggtcttctcgtcttgctgtgttatgcccgcctc

SEQ ID NO: 57085 - DNA, 120 bp, Homo sapiens
  misc_feature: 1450 for SV(W|O) and mtDNA
ctagcctttctattagctcttagtaagattacacatgcaagcatccccgttccagtgagttcaccctctaaatcaccacgatcaaaagggacaagcatcaagcacgcagcaatgcagctc

SEQ ID NO: 57086 - DNA, 120 bp, Homo sapiens
  misc_feature: 1450 for SV(W|O) and mtDNA
ctttgaagaaggcgtgggtgcagatgtgcaggaatgctaggtgtggttggttgatgccgattgtaactattatgagtcctagttgacttgaagtggagaaggctacgatttttttgatgt

SEQ ID NO: 57087 - DNA, 120 bp, Homo sapiens
  misc_feature: 1450 for SV(W|O) and mtDNA
atagggtcgaagccgcactcgtaaggggtggatttttctatgtagccgttgagttgtggtagtcaaaatgtaataattattagtagtaaggctaggagggtgttgattattaaaattaag

SEQ ID NO: 57088 - DNA, 120 bp, Homo sapiens
  misc_feature: 1450 for SV(W|O) and mtDNA
ctgctaggtgtaaggagaagatggttaggtctacggaggctccagggtgggagtagttccctgctaagggagggtagactgttcaacctgttcctgctccggcctccactatagcagatg

SEQ ID NO: 57089 - DNA, 120 bp, Homo sapiens
  misc_feature: 1450 for SV(W|O) and mtDNA
cgtagccttctccacttcaagtcaactaggactcataatagttacaatcggcatcaaccaaccacacctagcattcctgcacatctgcacccacgccttcttcaaagccatactatttat

SEQ ID NO: 57090 - DNA, 120 bp, Homo sapiens
  misc_feature: 1450 for SV(W|O) and mtDNA
cctagcctttctattagctcttagtaagattacacatgcaagcatccccgttccagtgagttcaccctctaaatcaccacgatcaaaagggacaagcatcaagcacgcagcaatgcagct

SEQ ID NO: 57091 - DNA, 120 bp, Homo sapiens
  misc_feature: 1450 for SV(W|O) and mtDNA
atccccaccggcgtcaaagtatttagctgactcgccacactccacggaagcaatatgaaatgatctgctgcagtgctctgagccctaggattcatctttcttttcaccgtaggtggcctg

SEQ ID NO: 57092 - DNA, 120 bp, Homo sapiens
  misc_feature: 1450 for SV(W|O) and mtDNA
atcatttctctactcagaaacctgaaacatcggcattatcctcctgcttgcaactatagcaacagccttcataggctatgtcctcccgtgaggccaaatatcattctgaggggccacagt

SEQ ID NO: 57093 - DNA, 120 bp, Homo sapiens
  misc_feature: 1450 for SV(W|O) and mtDNA
agttcagttatatgtttgggattttttaggtagtgggtgttgagcttgaacgctttcttaattggtggctgcttttaggcctactatgggtgttaaattttttactctctctacaaggtt

SEQ ID NO: 57094 - DNA, 120 bp, Homo sapiens
  misc_feature: 1449 for SV(W|O) and mtDNA
ctgaacacacaatagctaagacccaaactgggattagataccccactatgcttagccctaaacctcaacagttaaatcaacaaaactgctcgccagaacactacgagccacagcttaaaa

SEQ ID NO: 57095 - DNA, 120 bp, Homo sapiens
  misc_feature: 1449 for SV(W|O) and mtDNA
tttcatattgaattgcaaattcgaagaagcagcttcaaacctgccggggcttctcccgccttttttcccggcggcgggagaagtagattgaagccagttgattagggtgcttagctgtta

SEQ ID NO: 57096 - DNA, 120 bp, Homo sapiens
  misc_feature: 1449 for SV(W|O) and mtDNA
ttgttttgaggttagtttgattagtcattgttgggtggtgattagtcggttgttgatgagatatttggaggtggggatcaatagagggggaaatagaatgatcagtactgcggcgggtag

SEQ ID NO: 57097 - DNA, 120 bp, Homo sapiens
  misc_feature: 1449 for SV(W|O) and mtDNA
ttcggttcagtctaatcctttttgtagtcactcataggccagacttagggctaggatgatgattaataagagggatgacataactattagtggcaggttagttgtttgtagggctcatgg

SEQ ID NO: 57098 - DNA, 120 bp, Homo sapiens
  misc_feature: 1449 for SV(W|O) and mtDNA
tatagggtcgaagccgcactcgtaaggggtggatttttctatgtagccgttgagttgtggtagtcaaaatgtaataattattagtagtaaggctaggagggtgttgattattaaaattaa

SEQ ID NO: 57099 - DNA, 120 bp, Homo sapiens
  misc_feature: 1449 for SV(W|O) and mtDNA
ttaagtttcataagggctatcgtagttttctggggtagaaaatgtagcccatttcttgccacctcatgggctacaccttgacctaacgtctttacgtgggtacttgcgcttactttgtag

SEQ ID NO: 57100 - DNA, 120 bp, Homo sapiens
  misc_feature: 1449 for SV(W|O) and mtDNA
tgtgatagttgagggttgattgctgtacttgcttgtaagcatggggagggggttttgatgtggattgggtttttatgtactacaggtggtcaagtatttatggtaccgtacaatattcat

SEQ ID NO: 57101 - DNA, 120 bp, Homo sapiens
  misc_feature: 1449 for SV(W|O) and mtDNA
tggttcattgtccggagagtatattgttgaagaggatagctattagaaggattatggatgcggttgcttgcgtgaggaaatacttgatggcagcttctgtggaacgagggtttatttttt

SEQ ID NO: 57102 - DNA, 120 bp, Homo sapiens
  misc_feature: 1449 for SV(W|O) and mtDNA
tgaagaaggcgtgggtgcagatgtgcaggaatgctaggtgtggttggttgatgccgattgtaactattatgagtcctagttgacttgaagtggagaaggctacgatttttttgatgtcat

SEQ ID NO: 57103 - DNA, 120 bp, Homo sapiens
  misc_feature: 1449 for SV(W|O) and mtDNA
acaatcttcctaggaacaacatatgacgcactctcccctgaactctacacaacatattttgtcaccaagaccctacttctaacctccctgttcttatgaattcgaacagcatacccccga

SEQ ID NO: 57104 - DNA, 120 bp, Homo sapiens
  misc_feature: 1449 for SV(W|O) and mtDNA
attatatccttcttgctcatcagttgatgatacgcccgagcagatgccaacacagcagccattcaagcaatcctatacaaccgtatcggcgatatcggtttcatcctcgccttagcatga

SEQ ID NO: 57105 - DNA, 120 bp, Homo sapiens
  misc_feature: 1449 for SV(W|O) and mtDNA
accctcgtggagccattcatacaggtccctatttaaggaacaagtgattatgctacctttgcacggttagggtaccgcggccgttaaacatgtgtcactgggcaggcggtgcctctaata

SEQ ID NO: 57106 - DNA, 120 bp, Homo sapiens
  misc_feature: 1449 for SV(W|O) and mtDNA
gttcagtaccattggtggccaattgatttgatggtaagggagggatcgttgacctcgtctgttatgtaaaggatgcgtagggatgggagggcgatgaggactaggatgatggcgggcagg

SEQ ID NO: 57107 - DNA, 120 bp, Homo sapiens
  misc_feature: 1449 for SV(W|O) and mtDNA
gttatggttcattgtccggagagtatattgttgaagaggatagctattagaaggattatggatgcggttgcttgcgtgaggaaatacttgatggcagcttctgtggaacgagggtttatt

SEQ ID NO: 57108 - DNA, 120 bp, Homo sapiens
  misc_feature: 1449 for SV(W|O) and mtDNA
atgggccattatcgaagaattcacaaaaaacaatagcctcatcatccccaccatcatagccaccatcaccctccttaacctctacttctacctacgcctaatctactccacctcaatcac

SEQ ID NO: 57109 - DNA, 120 bp, Homo sapiens
  misc_feature: 1449 for SV(W|O) and mtDNA
gtgatagttgagggttgattgctgtacttgcttgtaagcatggggagggggttttgatgtggattgggtttttatgtactacaggtggtcaagtatttatggtaccgtacaatattcatg

SEQ ID NO: 57110 - DNA, 120 bp, Homo sapiens
  misc_feature: 1449 for SV(W|O) and mtDNA
gatccgtccctaacaaactaggaggcgtccttgccctattactatccatcctcatcctagcaataatccccatcctccatatatccaaacaacaaagcataatatttcgcccactaagcc

SEQ ID NO: 57111 - DNA, 120 bp, Homo sapiens
  misc_feature: 1449 for SV(W|O) and mtDNA
ggctagtttttgtcatgtgagaagaagcaggccggatgtcagaggggtgccttgggtaacctctgggactcagaagtgaaagggggctattcctagttttattgctatagccattatgat

SEQ ID NO: 57112 - DNA, 120 bp, Homo sapiens
  misc_feature: 1449 for SV(W|O) and mtDNA
gcaggcggtgcctctaatactggtgatgctagaggtgatgtttttggtaaacaggcggggtaagatttgccgagttccttttactttttttaacctttccttatgagcatgcctgtgttg

SEQ ID NO: 57113 - DNA, 120 bp, Homo sapiens
  misc_feature: 1449 for SV(W|O) and mtDNA
gcaggccacctactcatgcacctaattggaagcgccaccctagcaatatcaaccattaaccttccctctacacttatcatcttcacaattctaattctactgactatcctagaaatcgct

SEQ ID NO: 57114 - DNA, 120 bp, Homo sapiens
  misc_feature: 1449 for SV(W|O) and mtDNA
gagtaataaacttcgccttaattttaataatcaacaccctcctagccttactactaataattattacattttgactaccacaactcaacggctacatagaaaaatccaccccttacgagt

SEQ ID NO: 57115 - DNA, 120 bp, Homo sapiens
  misc_feature: 1449 for SV(W|O) and mtDNA
agtcaaagcgaactactatactcaattgatccaataacttgaccaacggaacaagttaccctagggataacagcgcaatcctattctagagtccatatcaacaatagggtttacgacctc

SEQ ID NO: 57116 - DNA, 120 bp, Homo sapiens
  misc_feature: 1449 for SV(W|O) and mtDNA
cctgagctcaccatagtctaatagaaaacaaccgaaaccaaataattcaagcactgcttattacaattttactgggtctctattttaccctcctacaagcctcagagtacttcgagtctc

SEQ ID NO: 57117 - DNA, 120 bp, Homo sapiens
  misc_feature: 1449 for SV(W|O) and mtDNA
cactaaccatataccaatgatggcgcgatgtaacacgagaaagcacataccaaggccaccacacaccacctgtccaaaaaggccttcgatacgggataatcctatttattacctcagaag

SEQ ID NO: 57118 - DNA, 120 bp, Homo sapiens
  misc_feature: 1449 for SV(W|O) and mtDNA
ctgggattagataccccactatgcttagccctaaacctcaacagttaaatcaacaaaactgctcgccagaacactacgagccacagcttaaaactcaaaggacctggcggtgcttcatat

SEQ ID NO: 57119 - DNA, 120 bp, Homo sapiens
  misc_feature: 1449 for SV(W|O) and mtDNA
ctcgtggagccattcatacaggtccctatttaaggaacaagtgattatgctacctttgcacggttagggtaccgcggccgttaaacatgtgtcactgggcaggcggtgcctctaatactg

SEQ ID NO: 57120 - DNA, 120 bp, Homo sapiens
  misc_feature: 1449 for SV(W|O) and mtDNA
ctaacaacatggctttctcaacttttaaaggataacagctatccattggtcttaggccccaaaaattttggtgcaactccaaataaaagtaataaccatgcacactactataaccaccct

SEQ ID NO: 57121 - DNA, 120 bp, Homo sapiens
  misc_feature: 1449 for SV(W|O) and mtDNA
cggttaggcgtacggccagggctattggttgaatgagtaggctgatggtttcgataataactagtatggggataaggggtgtaggtgtgccttgtggtaagaagtgggctagggcatttt

SEQ ID NO: 57122 - DNA, 120 bp, Homo sapiens
  misc_feature: 1449 for SV(W|O) and mtDNA
ccttctaggtaacgaccacatctacaacgttatcgtcacagcccatgcatttgtaataatcttcttcatagtaatacccatcataatcggaggctttggcaactgactagttcccctaat

SEQ ID NO: 57123 - DNA, 120 bp, Homo sapiens
  misc_feature: 1449 for SV(W|O) and mtDNA
ccttaatccaagcctacgttttcacacttctagtaagcctctacctgcacgacaacacataatgacccaccaatcacatgcctatcatatagtaaaacccagcccatgacccctaacagg

SEQ ID NO: 57124 - DNA, 120 bp, Homo sapiens
  misc_feature: 1449 for SV(W|O) and mtDNA
cctactcatgcacctaattggaagcgccaccctagcaatatcaaccattaaccttccctctacacttatcatcttcacaattctaattctactgactatcctagaaatcgctgtcgcctt

SEQ ID NO: 57125 - DNA, 120 bp, Homo sapiens
  misc_feature: 1449 for SV(W|O) and mtDNA
agctattagtgggagtagagtttgaagtccttgagagaggattatgatgcgactgtgagtgcgttcgtagtttgagtttgctaggcagaatagtaatgaggatgtaagcccgtgggcgat

SEQ ID NO: 57126 - DNA, 120 bp, Homo sapiens
  misc_feature: 1449 for SV(W|O) and mtDNA
agttaggataatataaatagttaaattaagaatggttatgttagggttgtacggtagaactgctattattcatcctatgtgggtaattgaggagtatgctaagattttgcgtagctgggt

SEQ ID NO: 57127 - DNA, 120 bp, Homo sapiens
  misc_feature: 1449 for SV(W|O) and mtDNA
agtgttaggaaaagggcatacaggactaggaagcagataaggaaaatgattatgagggcgtgatcatgaaaggtgataagctcttctatgataggggaagtagcgtcttgtagacctact

SEQ ID NO: 57128 - DNA, 120 bp, Homo sapiens
  misc_feature: 1448 for SV(W|O) and mtDNA
ttttcacacttctagtaagcctctacctgcacgacaacacataatgacccaccaatcacatgcctatcatatagtaaaacccagcccatgacccctaacaggggccctctcagccctcct

SEQ ID NO: 57129 - DNA, 120 bp, Homo sapiens
  misc_feature: 1448 for SV(W|O) and mtDNA
ctaatcctttttgtagtcactcataggccagacttagggctaggatgatgattaataagagggatgacataactattagtggcaggttagttgtttgtagggctcatggtaggggtaaaa

SEQ ID NO: 57130 - DNA, 120 bp, Homo sapiens
  misc_feature: 1448 for SV(W|O) and mtDNA
tttgggtaaatggtttggctaaggttgtctggtagtaaggtggagtgggtttggggctaggtttagctcagagcggtcaagttaagttgaaatctcctaagtgtaagttgggtgctttgt

SEQ ID NO: 57131 - DNA, 120 bp, Homo sapiens
  misc_feature: 1448 for SV(W|O) and mtDNA
ttagttgtggcaataaaaatgattaaggatactagtataagagatcaggttcgtcctttagtgttgtgtatggttatcatttgttttgaggttagtttgattagtcattgttgggtggtg

SEQ ID NO: 57132 - DNA, 120 bp, Homo sapiens
  misc_feature: 1448 for SV(W|O) and mtDNA
tggttggttgatgccgattgtaactattatgagtcctagttgacttgaagtggagaaggctacgatttttttgatgtcattttgtgtaagggcgcagactgctgcgaacagagtggtgat

SEQ ID NO: 57133 - DNA, 120 bp, Homo sapiens
  misc_feature: 1448 for SV(W|O) and mtDNA
tgattgtagatattgggctgttaattgtcagttcagtgttttaatctgacgcaggcttatgcggaggagaatgttttcatgttacttatactaacattagttcttctatagggtgataga

SEQ ID NO: 57134 - DNA, 120 bp, Homo sapiens
  misc_feature: 1448 for SV(W|O) and mtDNA
acacacaatagctaagacccaaactgggattagataccccactatgcttagccctaaacctcaacagttaaatcaacaaaactgctcgccagaacactacgagccacagcttaaaactca

SEQ ID NO: 57135 - DNA, 120 bp, Homo sapiens
  misc_feature: 1448 for SV(W|O) and mtDNA
acttaggagatttcaacttaacttgaccgctctgagctaaacctagccccaaacccactccaccttactaccagacaaccttagccaaaccatttacccaaataaagtataggcgataga

SEQ ID NO: 57136 - DNA, 120 bp, Homo sapiens
  misc_feature: 1448 for SV(W|O) and mtDNA
tcggggtagtccgagtaacgtcggggcattccggataggccgagaaagtgttgtgggaagaaagttagatttacgccgatgaatatgatagtgaaatggattttggcgtaggtttggtct

SEQ ID NO: 57137 - DNA, 120 bp, Homo sapiens
  misc_feature: 1448 for SV(W|O) and mtDNA
tatggttatcatttgttttgaggttagtttgattagtcattgttgggtggtgattagtcggttgttgatgagatatttggaggtggggatcaatagagggggaaatagaatgatcagtac

SEQ ID NO: 57138 - DNA, 120 bp, Homo sapiens
  misc_feature: 1448 for SV(W|O) and mtDNA
aattcacaaaaaacaatagcctcatcatccccaccatcatagccaccatcaccctccttaacctctacttctacctacgcctaatctactccacctcaatcacactactccccatatcta

SEQ ID NO: 57139 - DNA, 120 bp, Homo sapiens
  misc_feature: 1448 for SV(W|O) and mtDNA
gttaggcgtacggccagggctattggttgaatgagtaggctgatggtttcgataataactagtatggggataaggggtgtaggtgtgccttgtggtaagaagtgggctagggcattttta

SEQ ID NO: 57140 - DNA, 120 bp, Homo sapiens
  misc_feature: 1448 for SV(W|O) and mtDNA
gttgcaagcaggaggataatgccgatgtttcaggtttctgagtagagaaatgatccgtaatataggcctcgcccgatgtgtaggaagaggcagataaagaatattgaggcgccattggcg

SEQ ID NO: 57141 - DNA, 120 bp, Homo sapiens
  misc_feature: 1448 for SV(W|O) and mtDNA
gtgttctggcgagcagttttgttgatttaactgttgaggtttagggctaagcatagtggggtatctaatcccagtttgggtcttagctattgtgtgttcagatatgttaaagccactttc

SEQ ID NO: 57142 - DNA, 120 bp, Homo sapiens
  misc_feature: 1448 for SV(W|O) and mtDNA
cctcaacagttaaatcaacaaaactgctcgccagaacactacgagccacagcttaaaactcaaaggacctggcggtgcttcatatccctctagaggagcctgttctgtaatcgataaacc

SEQ ID NO: 57143 - DNA, 120 bp, Homo sapiens
  misc_feature: 1448 for SV(W|O) and mtDNA
ggttgattgtagatattgggctgttaattgtcagttcagtgttttaatctgacgcaggcttatgcggaggagaatgttttcatgttacttatactaacattagttcttctatagggtgat

SEQ ID NO: 57144 - DNA, 120 bp, Homo sapiens
  misc_feature: 1448 for SV(W|O) and mtDNA
ggttgattgctgtacttgcttgtaagcatggggagggggttttgatgtggattgggtttttatgtactacaggtggtcaagtatttatggtaccgtacaatattcatggtggctggcagt

SEQ ID NO: 57145 - DNA, 120 bp, Homo sapiens
  misc_feature: 1448 for SV(W|O) and mtDNA
ggttagtatagcttagttaaactttcgtttattgctaaaggttaatcactgctgtttcccgtgggggtgtggctaggctaagcgttttgagctgcattgctgcgtgcttgatgcttgtcc

SEQ ID NO: 57146 - DNA, 120 bp, Homo sapiens
  misc_feature: 1448 for SV(W|O) and mtDNA
atgataaccatacacaacactaaaggacgaacctgatctcttatactagtatccttaatcatttttattgccacaactaacctcctcggactcctgcctcactcatttacaccaaccacc

SEQ ID NO: 57147 - DNA, 120 bp, Homo sapiens
  misc_feature: 1448 for SV(W|O) and mtDNA
ggggtttggatgagaatggctgttactacgagggctatgtggctgattgaagagtatgcaatgagcgattttaggtctgtttgtcgtaggcagatggagcttgttataattatgcctcat

SEQ ID NO: 57148 - DNA, 120 bp, Homo sapiens
  misc_feature: 1448 for SV(W|O) and mtDNA
aaccacgaccaatgatatgaaaaaccatcgttgtatttcaactacaagaacaccaatgaccccaatacgcaaaactaaccccctaataaaattaattaaccactcattcatcgacctccc

SEQ ID NO: 57149 - DNA, 120 bp, Homo sapiens
  misc_feature: 1448 for SV(W|O) and mtDNA
gagatgggggctagtttttgtcatgtgagaagaagcaggccggatgtcagaggggtgccttgggtaacctctgggactcagaagtgaaagggggctattcctagttttattgctatagcc

SEQ ID NO: 57150 - DNA, 120 bp, Homo sapiens
  misc_feature: 1448 for SV(W|O) and mtDNA
ggctaggagtcaataaagtgattggcttagtgggcgaaatattatgctttgttgtttggatatatggaggatggggattattgctaggatgaggatggatagtaatagggcaaggacgcc

SEQ ID NO: 57151 - DNA, 120 bp, Homo sapiens
  misc_feature: 1448 for SV(W|O) and mtDNA
gctgtacttgcttgtaagcatggggagggggttttgatgtggattgggtttttatgtactacaggtggtcaagtatttatggtaccgtacaatattcatggtggctggcagtaatgtacg

SEQ ID NO: 57152 - DNA, 120 bp, Homo sapiens
  misc_feature: 1448 for SV(W|O) and mtDNA
ccaatgatggcgcgatgtaacacgagaaagcacataccaaggccaccacacaccacctgtccaaaaaggccttcgatacgggataatcctatttattacctcagaagtttttttcttcgc

SEQ ID NO: 57153 - DNA, 120 bp, Homo sapiens
  misc_feature: 1448 for SV(W|O) and mtDNA
gcccgcctcttcacgggcaggtcaatttcactggttaaaagtaagagacagctgaaccctcgtggagccattcatacaggtccctatttaaggaacaagtgattatgctacctttgcacg

SEQ ID NO: 57154 - DNA, 120 bp, Homo sapiens
  misc_feature: 1448 for SV(W|O) and mtDNA
ctaggagtcaataaagtgattggcttagtgggcgaaatattatgctttgttgtttggatatatggaggatggggattattgctaggatgaggatggatagtaatagggcaaggacgcctc

SEQ ID NO: 57155 - DNA, 120 bp, Homo sapiens
  misc_feature: 1448 for SV(W|O) and mtDNA
atcgccgatacggttgtataggattgcttgaatggctgctgtgttggcatctgctcgggcgtatcatcaactgatgagcaagaaggatataattcctacgccctctcagccgatgaacag

SEQ ID NO: 57156 - DNA, 120 bp, Homo sapiens
  misc_feature: 1448 for SV(W|O) and mtDNA
cgtcggggcattccggataggccgagaaagtgttgtgggaagaaagttagatttacgccgatgaatatgatagtgaaatggattttggcgtaggtttggtctagggtgtagcctgagaat

SEQ ID NO: 57157 - DNA, 120 bp, Homo sapiens
  misc_feature: 1448 for SV(W|O) and mtDNA
aacaagctccatctgcctacgacaaacagacctaaaatcgctcattgcatactcttcaatcagccacatagccctcgtagtaacagccattctcatccaaaccccctgaagcttcaccgg

SEQ ID NO: 57158 - DNA, 120 bp, Homo sapiens
  misc_feature: 1448 for SV(W|O) and mtDNA
catttgttttgaggttagtttgattagtcattgttgggtggtgattagtcggttgttgatgagatatttggaggtggggatcaatagagggggaaatagaatgatcagtactgcggcggg

SEQ ID NO: 57159 - DNA, 120 bp, Homo sapiens
  misc_feature: 1448 for SV(W|O) and mtDNA
ccccttttatactaataatcttatagaaatttaggttaaatacagaccaagagccttcaaagccctcagtaagttgcaatacttaatttctgtaacagctaaggactgcaaaaccccact

SEQ ID NO: 57160 - DNA, 120 bp, Homo sapiens
  misc_feature: 1448 for SV(W|O) and mtDNA
caggcggtgcctctaatactggtgatgctagaggtgatgtttttggtaaacaggcggggtaagatttgccgagttccttttactttttttaacctttccttatgagcatgcctgtgttgg

SEQ ID NO: 57161 - DNA, 120 bp, Homo sapiens
  misc_feature: 1448 for SV(W|O) and mtDNA
atcgaaaccgcaaacatatcatacacaaacgcctgagccctatctattactctcatcgctacctccctgacaagcgcctatagcactcgaataattcttctcaccctaacaggtcaacct

SEQ ID NO: 57162 - DNA, 120 bp, Homo sapiens
  misc_feature: 1447 for SV(W|O) and mtDNA
ttaggagatttcaacttaacttgaccgctctgagctaaacctagccccaaacccactccaccttactaccagacaaccttagccaaaccatttacccaaataaagtataggcgatagaaa

SEQ ID NO: 57163 - DNA, 120 bp, Homo sapiens
  misc_feature: 1447 for SV(W|O) and mtDNA
tttcggggtatgggcccgatagcttatttagctgaccttactttaggatggggtgtgataggtggcacggagaattttggattctcagggatgggttcgattctcatagtcctagaaata

SEQ ID NO: 57164 - DNA, 120 bp, Homo sapiens
  misc_feature: 1447 for SV(W|O) and mtDNA
ttgtcctccgattcaggttagaatgaggaggtctgcggctaggagtcaataaagtgattggcttagtgggcgaaatattatgctttgttgtttggatatatggaggatggggattattgc

SEQ ID NO: 57165 - DNA, 120 bp, Homo sapiens
  misc_feature: 1447 for SV(W|O) and mtDNA
ttcacaaaaaacaatagcctcatcatccccaccatcatagccaccatcaccctccttaacctctacttctacctacgcctaatctactccacctcaatcacactactccccatatctaac

SEQ ID NO: 57166 - DNA, 120 bp, Homo sapiens
  misc_feature: 1447 for SV(W|O) and mtDNA
ttagtgggagtagagtttgaagtccttgagagaggattatgatgcgactgtgagtgcgttcgtagtttgagtttgctaggcagaatagtaatgaggatgtaagcccgtgggcgattatga

SEQ ID NO: 57167 - DNA, 120 bp, Homo sapiens
  misc_feature: 1447 for SV(W|O) and mtDNA
tgggccattatcgaagaattcacaaaaaacaatagcctcatcatccccaccatcatagccaccatcaccctccttaacctctacttctacctacgcctaatctactccacctcaatcaca

SEQ ID NO: 57168 - DNA, 120 bp, Homo sapiens
  misc_feature: 1447 for SV(W|O) and mtDNA
atcgggcccataccccgaaaatgttggttatacccttcccgtactaattaatcccctggcccaacccgtcatctactctaccatctttgcaggcacactcatcacagcgctaagctcgca

SEQ ID NO: 57169 - DNA, 120 bp, Homo sapiens
  misc_feature: 1447 for SV(W|O) and mtDNA
tgccgattgtaactattatgagtcctagttgacttgaagtggagaaggctacgatttttttgatgtcattttgtgtaagggcgcagactgctgcgaacagagtggtgatagcgcctaagc

SEQ ID NO: 57170 - DNA, 120 bp, Homo sapiens
  misc_feature: 1447 for SV(W|O) and mtDNA
tgatagttgagggttgattgctgtacttgcttgtaagcatggggagggggttttgatgtggattgggtttttatgtactacaggtggtcaagtatttatggtaccgtacaatattcatgg

SEQ ID NO: 57171 - DNA, 120 bp, Homo sapiens
  misc_feature: 1447 for SV(W|O) and mtDNA
acattttcggggtatgggcccgatagcttatttagctgaccttactttaggatggggtgtgataggtggcacggagaattttggattctcagggatgggttcgattctcatagtcctaga

SEQ ID NO: 57172 - DNA, 120 bp, Homo sapiens
  misc_feature: 1447 for SV(W|O) and mtDNA
ggagtagagtttgaagtccttgagagaggattatgatgcgactgtgagtgcgttcgtagtttgagtttgctaggcagaatagtaatgaggatgtaagcccgtgggcgattatgagaatga

SEQ ID NO: 57173 - DNA, 120 bp, Homo sapiens
  misc_feature: 1447 for SV(W|O) and mtDNA
gttagcggttaggcgtacggccagggctattggttgaatgagtaggctgatggtttcgataataactagtatggggataaggggtgtaggtgtgccttgtggtaagaagtgggctagggc

SEQ ID NO: 57174 - DNA, 120 bp, Homo sapiens
  misc_feature: 1447 for SV(W|O) and mtDNA
ggtgaagcttcagggggtttggatgagaatggctgttactacgagggctatgtggctgattgaagagtatgcaatgagcgattttaggtctgtttgtcgtaggcagatggagcttgttat

SEQ ID NO: 57175 - DNA, 120 bp, Homo sapiens
  misc_feature: 1447 for SV(W|O) and mtDNA
aacatcacctctagcatcaccagtattagaggcaccgcctgcccagtgacacatgtttaacggccgcggtaccctaaccgtgcaaaggtagcataatcacttgttccttaaatagggacc

SEQ ID NO: 57176 - DNA, 120 bp, Homo sapiens
  misc_feature: 1447 for SV(W|O) and mtDNA
accacgaccaatgatatgaaaaaccatcgttgtatttcaactacaagaacaccaatgaccccaatacgcaaaactaaccccctaataaaattaattaaccactcattcatcgacctcccc

SEQ ID NO: 57177 - DNA, 120 bp, Homo sapiens
  misc_feature: 1447 for SV(W|O) and mtDNA
gcacatgcagcgcaagtaggtctacaagacgctacttcccctatcatagaagagcttatcacctttcatgatcacgccctcataatcattttccttatctgcttcctagtcctgtatgcc

SEQ ID NO: 57178 - DNA, 120 bp, Homo sapiens
  misc_feature: 1447 for SV(W|O) and mtDNA
ctcatcagttgatgatacgcccgagcagatgccaacacagcagccattcaagcaatcctatacaaccgtatcggcgatatcggtttcatcctcgccttagcatgatttatcctacactcc

SEQ ID NO: 57179 - DNA, 120 bp, Homo sapiens
  misc_feature: 1447 for SV(W|O) and mtDNA
gctttttgcccaaatgggccattatcgaagaattcacaaaaaacaatagcctcatcatccccaccatcatagccaccatcaccctccttaacctctacttctacctacgcctaatctact

SEQ ID NO: 57180 - DNA, 120 bp, Homo sapiens
  misc_feature: 1447 for SV(W|O) and mtDNA
ctttttgcccaaatgggccattatcgaagaattcacaaaaaacaatagcctcatcatccccaccatcatagccaccatcaccctccttaacctctacttctacctacgcctaatctactc

SEQ ID NO: 57181 - DNA, 120 bp, Homo sapiens
  misc_feature: 1447 for SV(W|O) and mtDNA
agaaggttgcctggctggcccagctcggctcgaataaggaggcttagagctgtgcctaggactccagctcatgcgccgaataataggtatagtgttccaatgtctttgtggtttgtagag

SEQ ID NO: 57182 - DNA, 120 bp, Homo sapiens
  misc_feature: 1447 for SV(W|O) and mtDNA
ctcatgggctacaccttgacctaacgtctttacgtgggtacttgcgcttactttgtagccttcatcagggtttgctgaagatggcggtatataggctgagcaagaggtggtgaggttgat

SEQ ID NO: 57183 - DNA, 120 bp, Homo sapiens
  misc_feature: 1447 for SV(W|O) and mtDNA
cctcgcccgatgtgtaggaagaggcagataaagaatattgaggcgccattggcgtgaaggtagcggatgattcagccataatttacgtctcgagtgatgtgggcgattgatgaaaaggcg

SEQ ID NO: 57184 - DNA, 120 bp, Homo sapiens
  misc_feature: 1447 for SV(W|O) and mtDNA
cgcagcagtctgcgcccttacacaaaatgacatcaaaaaaatcgtagccttctccacttcaagtcaactaggactcataatagttacaatcggcatcaaccaaccacacctagcattcct

SEQ ID NO: 57185 - DNA, 120 bp, Homo sapiens
  misc_feature: 1447 for SV(W|O) and mtDNA
atggctgttactacgagggctatgtggctgattgaagagtatgcaatgagcgattttaggtctgtttgtcgtaggcagatggagcttgttataattatgcctcatagggatagtacaagg

SEQ ID NO: 57186 - DNA, 120 bp, Homo sapiens
  misc_feature: 1447 for SV(W|O) and mtDNA
cacatcatcgaaaccgcaaacatatcatacacaaacgcctgagccctatctattactctcatcgctacctccctgacaagcgcctatagcactcgaataattcttctcaccctaacaggt

SEQ ID NO: 57187 - DNA, 120 bp, Homo sapiens
  misc_feature: 1447 for SV(W|O) and mtDNA
caacaacttaatatgactagcttacacaatagcttttatagtaaagatacctctttacggactccacttatgactccctaaagcccatgtcgaagcccccatcgctgggtcaatagtact

SEQ ID NO: 57188 - DNA, 120 bp, Homo sapiens
  misc_feature: 1447 for SV(W|O) and mtDNA
acctactcatgcacctaattggaagcgccaccctagcaatatcaaccattaaccttccctctacacttatcatcttcacaattctaattctactgactatcctagaaatcgctgtcgcct

SEQ ID NO: 57189 - DNA, 120 bp, Homo sapiens
  misc_feature: 1447 for SV(W|O) and mtDNA
aggcaccgcctgcccagtgacacatgtttaacggccgcggtaccctaaccgtgcaaaggtagcataatcacttgttccttaaatagggacctgtatgaatggctccacgagggttcagct

SEQ ID NO: 57190 - DNA, 120 bp, Homo sapiens
  misc_feature: 1447 for SV(W|O) and mtDNA
accatataccaatgatggcgcgatgtaacacgagaaagcacataccaaggccaccacacaccacctgtccaaaaaggccttcgatacgggataatcctatttattacctcagaagttttt

SEQ ID NO: 57191 - DNA, 120 bp, Homo sapiens
  misc_feature: 1446 for SV(W|O) and mtDNA
gatttcaacttaacttgaccgctctgagctaaacctagccccaaacccactccaccttactaccagacaaccttagccaaaccatttacccaaataaagtataggcgatagaaattgaaa

SEQ ID NO: 57192 - DNA, 120 bp, Homo sapiens
  misc_feature: 1446 for SV(W|O) and mtDNA
atcatcgaaaccgcaaacatatcatacacaaacgcctgagccctatctattactctcatcgctacctccctgacaagcgcctatagcactcgaataattcttctcaccctaacaggtcaa

SEQ ID NO: 57193 - DNA, 120 bp, Homo sapiens
  misc_feature: 1446 for SV(W|O) and mtDNA
ttgaagaaggcgtgggtgcagatgtgcaggaatgctaggtgtggttggttgatgccgattgtaactattatgagtcctagttgacttgaagtggagaaggctacgatttttttgatgtca

SEQ ID NO: 57194 - DNA, 120 bp, Homo sapiens
  misc_feature: 1446 for SV(W|O) and mtDNA
gtgggagtagagtttgaagtccttgagagaggattatgatgcgactgtgagtgcgttcgtagtttgagtttgctaggcagaatagtaatgaggatgtaagcccgtgggcgattatgagaa

SEQ ID NO: 57195 - DNA, 120 bp, Homo sapiens
  misc_feature: 1446 for SV(W|O) and mtDNA
caagcaggaggataatgccgatgtttcaggtttctgagtagagaaatgatccgtaatataggcctcgcccgatgtgtaggaagaggcagataaagaatattgaggcgccattggcgtgaa

SEQ ID NO: 57196 - DNA, 120 bp, Homo sapiens
  misc_feature: 1446 for SV(W|O) and mtDNA
aacaacatggctttctcaacttttaaaggataacagctatccattggtcttaggccccaaaaattttggtgcaactccaaataaaagtaataaccatgcacactactataaccaccctaa

SEQ ID NO: 57197 - DNA, 120 bp, Homo sapiens
  misc_feature: 1446 for SV(W|O) and mtDNA
atctgaacacacaatagctaagacccaaactgggattagataccccactatgcttagccctaaacctcaacagttaaatcaacaaaactgctcgccagaacactacgagccacagcttaa

SEQ ID NO: 57198 - DNA, 120 bp, Homo sapiens
  misc_feature: 1446 for SV(W|O) and mtDNA
tctaggtaacgaccacatctacaacgttatcgtcacagcccatgcatttgtaataatcttcttcatagtaatacccatcataatcggaggctttggcaactgactagttcccctaataat

SEQ ID NO: 57199 - DNA, 120 bp, Homo sapiens
  misc_feature: 1446 for SV(W|O) and mtDNA
cggctacatagaaaaatccaccccttacgagtgcggcttcgaccctatatcccccgcccgcgtccctttctccataaaattcttcttagtagctattaccttcttattatttgatctaga

SEQ ID NO: 57200 - DNA, 120 bp, Homo sapiens
  misc_feature: 1446 for SV(W|O) and mtDNA
tctaacaacatggctttctcaacttttaaaggataacagctatccattggtcttaggccccaaaaattttggtgcaactccaaataaaagtaataaccatgcacactactataaccaccc

SEQ ID NO: 57201 - DNA, 120 bp, Homo sapiens
  misc_feature: 1446 for SV(W|O) and mtDNA
gtaagccttctcctcactctctcaatcttatccatcatagcaggcagttgaggtggattaaaccaaacccagctacgcaaaatcttagcatactcctcaattacccacataggatgaata

SEQ ID NO: 57202 - DNA, 120 bp, Homo sapiens
  misc_feature: 1446 for SV(W|O) and mtDNA
gctattaccttcttattatttgatctagaaattgccctccttttacccctaccatgagccctacaaacaactaacctgccactaatagttatgtcatccctcttattaatcatcatccta

SEQ ID NO: 57203 - DNA, 120 bp, Homo sapiens
  misc_feature: 1446 for SV(W|O) and mtDNA
tacctagaaggttgcctggctggcccagctcggctcgaataaggaggcttagagctgtgcctaggactccagctcatgcgccgaataataggtatagtgttccaatgtctttgtggtttg

SEQ ID NO: 57204 - DNA, 120 bp, Homo sapiens
  misc_feature: 1446 for SV(W|O) and mtDNA
ggtaaatggtttggctaaggttgtctggtagtaaggtggagtgggtttggggctaggtttagctcagagcggtcaagttaagttgaaatctcctaagtgtaagttgggtgctttgtgtta

SEQ ID NO: 57205 - DNA, 120 bp, Homo sapiens
  misc_feature: 1446 for SV(W|O) and mtDNA
gtgttaaattttttactctctctacaaggttttttcctagtgtccaaagagctgttcctctttggactaacagttaaatttacaaggggatttagagggttctgtgggcaaatttaaagt

SEQ ID NO: 57206 - DNA, 120 bp, Homo sapiens
  misc_feature: 1446 for SV(W|O) and mtDNA
cgtaggggttttagttaaatgtcctttgaagtatacttgaggagggtgacgggcggtgtgtacgcgcttcagggccctgttcaactaagcactctactctcagtttactgctaaatccac

SEQ ID NO: 57207 - DNA, 120 bp, Homo sapiens
  misc_feature: 1446 for SV(W|O) and mtDNA
gtaacgaccacatctacaacgttatcgtcacagcccatgcatttgtaataatcttcttcatagtaatacccatcataatcggaggctttggcaactgactagttcccctaataatcggtg

SEQ ID NO: 57208 - DNA, 120 bp, Homo sapiens
  misc_feature: 1446 for SV(W|O) and mtDNA
ggtgctggagtttaagttgagtagtaggaatgcggtagtagttaggataatataaatagttaaattaagaatggttatgttagggttgtacggtagaactgctattattcatcctatgtg

SEQ ID NO: 57209 - DNA, 120 bp, Homo sapiens
  misc_feature: 1446 for SV(W|O) and mtDNA
ctacaaccacgaccaatgatatgaaaaaccatcgttgtatttcaactacaagaacaccaatgaccccaatacgcaaaactaaccccctaataaaattaattaaccactcattcatcgacc

SEQ ID NO: 57210 - DNA, 120 bp, Homo sapiens
  misc_feature: 1446 for SV(W|O) and mtDNA
gaccaatgatatgaaaaaccatcgttgtatttcaactacaagaacaccaatgaccccaatacgcaaaactaaccccctaataaaattaattaaccactcattcatcgacctccccacccc

SEQ ID NO: 57211 - DNA, 120 bp, Homo sapiens
  misc_feature: 1446 for SV(W|O) and mtDNA
caaccacgaccaatgatatgaaaaaccatcgttgtatttcaactacaagaacaccaatgaccccaatacgcaaaactaaccccctaataaaattaattaaccactcattcatcgacctcc

SEQ ID NO: 57212 - DNA, 120 bp, Homo sapiens
  misc_feature: 1446 for SV(W|O) and mtDNA
cttttatactaataatcttatagaaatttaggttaaatacagaccaagagccttcaaagccctcagtaagttgcaatacttaatttctgtaacagctaaggactgcaaaaccccactctg

SEQ ID NO: 57213 - DNA, 120 bp, Homo sapiens
  misc_feature: 1446 for SV(W|O) and mtDNA
ctagaagtgtgaaaacgtaggcttggattaaggcgacagcgatttctaggatagtcagtagaattagaattgtgaagatgataagtgtagagggaaggttaatggttgatattgctaggg

SEQ ID NO: 57214 - DNA, 120 bp, Homo sapiens
  misc_feature: 1446 for SV(W|O) and mtDNA
ccattaagatatataggatttagcctataatttaactttgacaaagttatgaaatggtttttctaatacctttttgaaaaagtcatggaggccatggggttggcttgaaaccagctttgg

SEQ ID NO: 57215 - DNA, 120 bp, Homo sapiens
  misc_feature: 1446 for SV(W|O) and mtDNA
acaacttaatatgactagcttacacaatagcttttatagtaaagatacctctttacggactccacttatgactccctaaagcccatgtcgaagcccccatcgctgggtcaatagtacttg

SEQ ID NO: 57216 - DNA, 120 bp, Homo sapiens
  misc_feature: 1446 for SV(W|O) and mtDNA
atttgttgtgggtctcatgagttggagtgtaggataaatcatgctaaggcgaggatgaaaccgatatcgccgatacggttgtataggattgcttgaatggctgctgtgttggcatctgct

SEQ ID NO: 57217 - DNA, 120 bp, Homo sapiens
  misc_feature: 1446 for SV(W|O) and mtDNA
aaatcgtagccttctccacttcaagtcaactaggactcataatagttacaatcggcatcaaccaaccacacctagcattcctgcacatctgcacccacgccttcttcaaagccatactat

SEQ ID NO: 57218 - DNA, 120 bp, Homo sapiens
  misc_feature: 1446 for SV(W|O) and mtDNA
aaccgaaatttttaatgcaggtttggtagtttaggacctgtgggtttgttaggtactgtttgcattaataaattaaagctccatagggtcttctcgtcttgctgtgttatgcccgcctct

SEQ ID NO: 57219 - DNA, 120 bp, Homo sapiens
  misc_feature: 1446 for SV(W|O) and mtDNA
aatatgactagcttacacaatagcttttatagtaaagatacctctttacggactccacttatgactccctaaagcccatgtcgaagcccccatcgctgggtcaatagtacttgccgcagt

SEQ ID NO: 57220 - DNA, 120 bp, Homo sapiens
  misc_feature: 1445 for SV(W|O) and mtDNA
tttttagttgggtgatgaggaatagtgtaaggagtatgggggtaattatggtgggccatacggtagtatttagttggggcatttcactgtaaagaggtgttggttctcttaatctttaac

SEQ ID NO: 57221 - DNA, 120 bp, Homo sapiens
  misc_feature: 1445 for SV(W|O) and mtDNA
gtctaaaccaaaccactttcaccgctacacgaccgggggtatactacggtcaatgctctgaaatctgtggagcaaaccacagtttcatgcccatcgtcctagaattaattcccctaaaaa

SEQ ID NO: 57222 - DNA, 120 bp, Homo sapiens
  misc_feature: 1445 for SV(W|O) and mtDNA
ggccccaaaaattttggtgcaactccaaataaaagtaataaccatgcacactactataaccaccctaaccctgacttccctaattccccccatccttaccaccctcgttaaccctaacaa

SEQ ID NO: 57223 - DNA, 120 bp, Homo sapiens
  misc_feature: 1445 for SV(W|O) and mtDNA
gcccgagcagatgccaacacagcagccattcaagcaatcctatacaaccgtatcggcgatatcggtttcatcctcgccttagcatgatttatcctacactccaactcatgagacccacaa

SEQ ID NO: 57224 - DNA, 120 bp, Homo sapiens
  misc_feature: 1445 for SV(W|O) and mtDNA
gtctaatcctttttgtagtcactcataggccagacttagggctaggatgatgattaataagagggatgacataactattagtggcaggttagttgtttgtagggctcatggtaggggtaa

SEQ ID NO: 57225 - DNA, 120 bp, Homo sapiens
  misc_feature: 1445 for SV(W|O) and mtDNA
ttaatccaagcctacgttttcacacttctagtaagcctctacctgcacgacaacacataatgacccaccaatcacatgcctatcatatagtaaaacccagcccatgacccctaacagggg

SEQ ID NO: 57226 - DNA, 120 bp, Homo sapiens
  misc_feature: 1445 for SV(W|O) and mtDNA
gaccacatcatcgaaaccgcaaacatatcatacacaaacgcctgagccctatctattactctcatcgctacctccctgacaagcgcctatagcactcgaataattcttctcaccctaaca

SEQ ID NO: 57227 - DNA, 120 bp, Homo sapiens
  misc_feature: 1445 for SV(W|O) and mtDNA
ggtttggctaaggttgtctggtagtaaggtggagtgggtttggggctaggtttagctcagagcggtcaagttaagttgaaatctcctaagtgtaagttgggtgctttgtgttaagctaca

SEQ ID NO: 57228 - DNA, 120 bp, Homo sapiens
  misc_feature: 1445 for SV(W|O) and mtDNA
acggatcatttctctactcagaaacctgaaacatcggcattatcctcctgcttgcaactatagcaacagccttcataggctatgtcctcccgtgaggccaaatatcattctgaggggcca

SEQ ID NO: 57229 - DNA, 120 bp, Homo sapiens
  misc_feature: 1445 for SV(W|O) and mtDNA
aaaacgtaggcttggattaaggcgacagcgatttctaggatagtcagtagaattagaattgtgaagatgataagtgtagagggaaggttaatggttgatattgctagggtggcgcttcca

SEQ ID NO: 57230 - DNA, 120 bp, Homo sapiens
  misc_feature: 1445 for SV(W|O) and mtDNA
caatgatggcgcgatgtaacacgagaaagcacataccaaggccaccacacaccacctgtccaaaaaggccttcgatacgggataatcctatttattacctcagaagtttttttcttcgca

SEQ ID NO: 57231 - DNA, 120 bp, Homo sapiens
  misc_feature: 1445 for SV(W|O) and mtDNA
tcgcagcagtctgcgcccttacacaaaatgacatcaaaaaaatcgtagccttctccacttcaagtcaactaggactcataatagttacaatcggcatcaaccaaccacacctagcattcc

SEQ ID NO: 57232 - DNA, 120 bp, Homo sapiens
  misc_feature: 1445 for SV(W|O) and mtDNA
taacaacatggctttctcaacttttaaaggataacagctatccattggtcttaggccccaaaaattttggtgcaactccaaataaaagtaataaccatgcacactactataaccacccta

SEQ ID NO: 57233 - DNA, 120 bp, Homo sapiens
  misc_feature: 1445 for SV(W|O) and mtDNA
agggctaggatgatgattaataagagggatgacataactattagtggcaggttagttgtttgtagggctcatggtaggggtaaaaggagggcaatttctagatcaaataataagaaggta

SEQ ID NO: 57234 - DNA, 120 bp, Homo sapiens
  misc_feature: 1445 for SV(W|O) and mtDNA
ggataggaggagaatgggggataggtgtatgaacatgagggtgttttctcgtgtgaatgagggttttatgttgttaatgtggtgggtgagtgagccccattgtgttgtggtaaatatgta

SEQ ID NO: 57235 - DNA, 120 bp, Homo sapiens
  misc_feature: 1445 for SV(W|O) and mtDNA
taaccaacattttcggggtatgggcccgatagcttatttagctgaccttactttaggatggggtgtgataggtggcacggagaattttggattctcagggatgggttcgattctcatagt

SEQ ID NO: 57236 - DNA, 120 bp, Homo sapiens
  misc_feature: 1445 for SV(W|O) and mtDNA
gttagtatagcttagttaaactttcgtttattgctaaaggttaatcactgctgtttcccgtgggggtgtggctaggctaagcgttttgagctgcattgctgcgtgcttgatgcttgtccc

SEQ ID NO: 57237 - DNA, 120 bp, Homo sapiens
  misc_feature: 1445 for SV(W|O) and mtDNA
gtacgcgcttcagggccctgttcaactaagcactctactctcagtttactgctaaatccaccttcgacccttaagtttcataagggctatcgtagttttctggggtagaaaatgtagccc

SEQ ID NO: 57238 - DNA, 120 bp, Homo sapiens
  misc_feature: 1445 for SV(W|O) and mtDNA
ccgcaagggaaagatgaaaaattataaccaagcataatatagcaaggactaacccctataccttctgcataatgaattaactagaaataactttgcaaggagagccaaagctaagacccc

SEQ ID NO: 57239 - DNA, 120 bp, Homo sapiens
  misc_feature: 1445 for SV(W|O) and mtDNA
aattctccgatccgtccctaacaaactaggaggcgtccttgccctattactatccatcctcatcctagcaataatccccatcctccatatatccaaacaacaaagcataatatttcgccc

SEQ ID NO: 57240 - DNA, 120 bp, Homo sapiens
  misc_feature: 1445 for SV(W|O) and mtDNA
caattctccgatccgtccctaacaaactaggaggcgtccttgccctattactatccatcctcatcctagcaataatccccatcctccatatatccaaacaacaaagcataatatttcgcc

SEQ ID NO: 57241 - DNA, 120 bp, Homo sapiens
  misc_feature: 1445 for SV(W|O) and mtDNA
ccttcttgctcatcagttgatgatacgcccgagcagatgccaacacagcagccattcaagcaatcctatacaaccgtatcggcgatatcggtttcatcctcgccttagcatgatttatcc

SEQ ID NO: 57242 - DNA, 120 bp, Homo sapiens
  misc_feature: 1445 for SV(W|O) and mtDNA
gcttccaccccctagcagaaaatagcccactaatccaaactctaacactatgcttaggcgctatcaccactctgttcgcagcagtctgcgcccttacacaaaatgacatcaaaaaaatcg

SEQ ID NO: 57243 - DNA, 120 bp, Homo sapiens
  misc_feature: 1445 for SV(W|O) and mtDNA
gctattagtgggagtagagtttgaagtccttgagagaggattatgatgcgactgtgagtgcgttcgtagtttgagtttgctaggcagaatagtaatgaggatgtaagcccgtgggcgatt

SEQ ID NO: 57244 - DNA, 120 bp, Homo sapiens
  misc_feature: 1445 for SV(W|O) and mtDNA
acaattctccgatccgtccctaacaaactaggaggcgtccttgccctattactatccatcctcatcctagcaataatccccatcctccatatatccaaacaacaaagcataatatttcgc

SEQ ID NO: 57245 - DNA, 120 bp, Homo sapiens
  misc_feature: 1445 for SV(W|O) and mtDNA
gccttctcctcactctctcaatcttatccatcatagcaggcagttgaggtggattaaaccaaacccagctacgcaaaatcttagcatactcctcaattacccacataggatgaataatag

SEQ ID NO: 57246 - DNA, 120 bp, Homo sapiens
  misc_feature: 1445 for SV(W|O) and mtDNA
atcacccgatgaggcaaccagccagaacgcctgaacgcaggcacatacttcctattctacaccctagtaggctcccttcccctactcatcgcactaatttacactcacaacaccctaggc

SEQ ID NO: 57247 - DNA, 120 bp, Homo sapiens
  misc_feature: 1445 for SV(W|O) and mtDNA
aaccaacattttcggggtatgggcccgatagcttatttagctgaccttactttaggatggggtgtgataggtggcacggagaattttggattctcagggatgggttcgattctcatagtc

SEQ ID NO: 57248 - DNA, 120 bp, Homo sapiens
  misc_feature: 1445 for SV(W|O) and mtDNA
gacaagtcgtaacatggtaagtgtactggaaagtgcacttggacgaaccagagtgtagcttaacacaaagcacccaacttacacttaggagatttcaacttaacttgaccgctctgagct

SEQ ID NO: 57249 - DNA, 120 bp, Homo sapiens
  misc_feature: 1445 for SV(W|O) and mtDNA
cttaatccaagcctacgttttcacacttctagtaagcctctacctgcacgacaacacataatgacccaccaatcacatgcctatcatatagtaaaacccagcccatgacccctaacaggg

SEQ ID NO: 57250 - DNA, 120 bp, Homo sapiens
  misc_feature: 1445 for SV(W|O) and mtDNA
ctcgcccgatgtgtaggaagaggcagataaagaatattgaggcgccattggcgtgaaggtagcggatgattcagccataatttacgtctcgagtgatgtgggcgattgatgaaaaggcgg

SEQ ID NO: 57251 - DNA, 120 bp, Homo sapiens
  misc_feature: 1445 for SV(W|O) and mtDNA
cgatgtaacacgagaaagcacataccaaggccaccacacaccacctgtccaaaaaggccttcgatacgggataatcctatttattacctcagaagtttttttcttcgcaggatttttctg

SEQ ID NO: 57252 - DNA, 120 bp, Homo sapiens
  misc_feature: 1445 for SV(W|O) and mtDNA
cacagatttcagagcattgaccgtagtatacccccggtcgtgtagcggtgaaagtggtttggtttagacgtccgggaattgcatctgtttttaagcctaatgtggggacagctcatgagt

SEQ ID NO: 57253 - DNA, 120 bp, Homo sapiens
  misc_feature: 1445 for SV(W|O) and mtDNA
aacttgaccgctctgagctaaacctagccccaaacccactccaccttactaccagacaaccttagccaaaccatttacccaaataaagtataggcgatagaaattgaaacctggcgcaat

SEQ ID NO: 57254 - DNA, 120 bp, Homo sapiens
  misc_feature: 1445 for SV(W|O) and mtDNA
agtttcataagggctatcgtagttttctggggtagaaaatgtagcccatttcttgccacctcatgggctacaccttgacctaacgtctttacgtgggtacttgcgcttactttgtagcct

SEQ ID NO: 57255 - DNA, 120 bp, Homo sapiens
  misc_feature: 1444 for SV(W|O) and mtDNA
tttgtagccttcatcagggtttgctgaagatggcggtatataggctgagcaagaggtggtgaggttgatcggggtttatcgattacagaacaggctcctctagagggatatgaagcaccg

SEQ ID NO: 57256 - DNA, 120 bp, Homo sapiens
  misc_feature: 1444 for SV(W|O) and mtDNA
attttcggggtatgggcccgatagcttatttagctgaccttactttaggatggggtgtgataggtggcacggagaattttggattctcagggatgggttcgattctcatagtcctagaaa

SEQ ID NO: 57257 - DNA, 120 bp, Homo sapiens
  misc_feature: 1444 for SV(W|O) and mtDNA
cgagcagatgccaacacagcagccattcaagcaatcctatacaaccgtatcggcgatatcggtttcatcctcgccttagcatgatttatcctacactccaactcatgagacccacaacaa

SEQ ID NO: 57258 - DNA, 120 bp, Homo sapiens
  misc_feature: 1444 for SV(W|O) and mtDNA
ttgggtgctttgtgttaagctacactctggttcgtccaagtgcactttccagtacacttaccatgttacgacttgtctcctctatataaatgcgtaggggttttagttaaatgtcctttg

SEQ ID NO: 57259 - DNA, 120 bp, Homo sapiens
  misc_feature: 1444 for SV(W|O) and mtDNA
agcccatttcttgccacctcatgggctacaccttgacctaacgtctttacgtgggtacttgcgcttactttgtagccttcatcagggtttgctgaagatggcggtatataggctgagcaa

SEQ ID NO: 57260 - DNA, 120 bp, Homo sapiens
  misc_feature: 1444 for SV(W|O) and mtDNA
ttctggcgagcagttttgttgatttaactgttgaggtttagggctaagcatagtggggtatctaatcccagtttgggtcttagctattgtgtgttcagatatgttaaagccactttcgta

SEQ ID NO: 57261 - DNA, 120 bp, Homo sapiens
  misc_feature: 1444 for SV(W|O) and mtDNA
cattttcggggtatgggcccgatagcttatttagctgaccttactttaggatggggtgtgataggtggcacggagaattttggattctcagggatgggttcgattctcatagtcctagaa

SEQ ID NO: 57262 - DNA, 120 bp, Homo sapiens
  misc_feature: 1444 for SV(W|O) and mtDNA
tcctctgatcagggtgagcatcaaactcaaactacgccctgatcggcgcactgcgagcagtagcccaaacaatctcatatgaagtcaccctagccatcattctactatcaacattactaa

SEQ ID NO: 57263 - DNA, 120 bp, Homo sapiens
  misc_feature: 1444 for SV(W|O) and mtDNA
ttagcggttaggcgtacggccagggctattggttgaatgagtaggctgatggtttcgataataactagtatggggataaggggtgtaggtgtgccttgtggtaagaagtgggctagggca

SEQ ID NO: 57264 - DNA, 120 bp, Homo sapiens
  misc_feature: 1444 for SV(W|O) and mtDNA
gggctaggatgatgattaataagagggatgacataactattagtggcaggttagttgtttgtagggctcatggtaggggtaaaaggagggcaatttctagatcaaataataagaaggtaa

SEQ ID NO: 57265 - DNA, 120 bp, Homo sapiens
  misc_feature: 1444 for SV(W|O) and mtDNA
tgttaggaaaagggcatacaggactaggaagcagataaggaaaatgattatgagggcgtgatcatgaaaggtgataagctcttctatgataggggaagtagcgtcttgtagacctacttg

SEQ ID NO: 57266 - DNA, 120 bp, Homo sapiens
  misc_feature: 1444 for SV(W|O) and mtDNA
tggttgattgtagatattgggctgttaattgtcagttcagtgttttaatctgacgcaggcttatgcggaggagaatgttttcatgttacttatactaacattagttcttctatagggtga

SEQ ID NO: 57267 - DNA, 120 bp, Homo sapiens
  misc_feature: 1444 for SV(W|O) and mtDNA
cgtctgaactatcctgcccgccatcatcctagtcctcatcgccctcccatccctacgcatcctttacataacagacgaggtcaacgatccctcccttaccatcaaatcaattggccacca

SEQ ID NO: 57268 - DNA, 120 bp, Homo sapiens
  misc_feature: 1444 for SV(W|O) and mtDNA
tgctaggtgtaaggagaagatggttaggtctacggaggctccagggtgggagtagttccctgctaagggagggtagactgttcaacctgttcctgctccggcctccactatagcagatgc

SEQ ID NO: 57269 - DNA, 120 bp, Homo sapiens
  misc_feature: 1444 for SV(W|O) and mtDNA
gtatggttttgagtagtcctcctatttttcgaatatcttgttcattgttaaggttgtggatgatggacccggagcacataaatagtatggctttgaagaaggcgtgggtgcagatgtgca

SEQ ID NO: 57270 - DNA, 120 bp, Homo sapiens
  misc_feature: 1444 for SV(W|O) and mtDNA
tgaataatagcagttctaccgtacaaccctaacataaccattcttaatttaactatttatattatcctaactactaccgcattcctactactcaacttaaactccagcaccacgacccta

SEQ ID NO: 57271 - DNA, 120 bp, Homo sapiens
  misc_feature: 1444 for SV(W|O) and mtDNA
tctaagattaaaaatgccctagcccacttcttaccacaaggcacacctacaccccttatccccatactagttattatcgaaaccatcagcctactcattcaaccaatagccctggccgta

SEQ ID NO: 57272 - DNA, 120 bp, Homo sapiens
  misc_feature: 1444 for SV(W|O) and mtDNA
tcctcctccggcggggtcgaagaaggtggtgttgaggttgcggtctgttagtagtatagtgatgccagcagctaggactgggagagataggagaagtaggactgctgtgattaggacgga

SEQ ID NO: 57273 - DNA, 120 bp, Homo sapiens
  misc_feature: 1444 for SV(W|O) and mtDNA
tcctagcctttctattagctcttagtaagattacacatgcaagcatccccgttccagtgagttcaccctctaaatcaccacgatcaaaagggacaagcatcaagcacgcagcaatgcagc

SEQ ID NO: 57274 - DNA, 120 bp, Homo sapiens
  misc_feature: 1444 for SV(W|O) and mtDNA
gggctagtttttgtcatgtgagaagaagcaggccggatgtcagaggggtgccttgggtaacctctgggactcagaagtgaaagggggctattcctagttttattgctatagccattatga

SEQ ID NO: 57275 - DNA, 120 bp, Homo sapiens
  misc_feature: 1444 for SV(W|O) and mtDNA
tagaagtgtgaaaacgtaggcttggattaaggcgacagcgatttctaggatagtcagtagaattagaattgtgaagatgataagtgtagagggaaggttaatggttgatattgctagggt

SEQ ID NO: 57276 - DNA, 120 bp, Homo sapiens
  misc_feature: 1444 for SV(W|O) and mtDNA
taaccatataccaatgatggcgcgatgtaacacgagaaagcacataccaaggccaccacacaccacctgtccaaaaaggccttcgatacgggataatcctatttattacctcagaagttt

SEQ ID NO: 57277 - DNA, 120 bp, Homo sapiens
  misc_feature: 1444 for SV(W|O) and mtDNA
gtgttaggaaaagggcatacaggactaggaagcagataaggaaaatgattatgagggcgtgatcatgaaaggtgataagctcttctatgataggggaagtagcgtcttgtagacctactt

SEQ ID NO: 57278 - DNA, 120 bp, Homo sapiens
  misc_feature: 1444 for SV(W|O) and mtDNA
gtctattttgtgtcaactggagttttttacaactcaggtgagttttagctttattggggagggggtgatctaaaacactctttacgccggcttctattgacttgggttaatcgtgtgacc

SEQ ID NO: 57279 - DNA, 120 bp, Homo sapiens
  misc_feature: 1444 for SV(W|O) and mtDNA
aagtttcataagggctatcgtagttttctggggtagaaaatgtagcccatttcttgccacctcatgggctacaccttgacctaacgtctttacgtgggtacttgcgcttactttgtagcc

SEQ ID NO: 57280 - DNA, 120 bp, Homo sapiens
  misc_feature: 1444 for SV(W|O) and mtDNA
aggtgtaaggagaagatggttaggtctacggaggctccagggtgggagtagttccctgctaagggagggtagactgttcaacctgttcctgctccggcctccactatagcagatgcgagc

SEQ ID NO: 57281 - DNA, 120 bp, Homo sapiens
  misc_feature: 1444 for SV(W|O) and mtDNA
gagccaacaacttaatatgactagcttacacaatagcttttatagtaaagatacctctttacggactccacttatgactccctaaagcccatgtcgaagcccccatcgctgggtcaatag

SEQ ID NO: 57282 - DNA, 120 bp, Homo sapiens
  misc_feature: 1444 for SV(W|O) and mtDNA
aatggctgttactacgagggctatgtggctgattgaagagtatgcaatgagcgattttaggtctgtttgtcgtaggcagatggagcttgttataattatgcctcatagggatagtacaag

SEQ ID NO: 57283 - DNA, 120 bp, Homo sapiens
  misc_feature: 1444 for SV(W|O) and mtDNA
aacattttcggggtatgggcccgatagcttatttagctgaccttactttaggatggggtgtgataggtggcacggagaattttggattctcagggatgggttcgattctcatagtcctag

SEQ ID NO: 57284 - DNA, 120 bp, Homo sapiens
  misc_feature: 1444 for SV(W|O) and mtDNA
accaatgatggcgcgatgtaacacgagaaagcacataccaaggccaccacacaccacctgtccaaaaaggccttcgatacgggataatcctatttattacctcagaagtttttttcttcg

SEQ ID NO: 57285 - DNA, 120 bp, Homo sapiens
  misc_feature: 1444 for SV(W|O) and mtDNA
atggttcattgtccggagagtatattgttgaagaggatagctattagaaggattatggatgcggttgcttgcgtgaggaaatacttgatggcagcttctgtggaacgagggtttattttt

SEQ ID NO: 57286 - DNA, 120 bp, Homo sapiens
  misc_feature: 1444 for SV(W|O) and mtDNA
agggcatacaggactaggaagcagataaggaaaatgattatgagggcgtgatcatgaaaggtgataagctcttctatgataggggaagtagcgtcttgtagacctacttgcgctgcatgt

SEQ ID NO: 57287 - DNA, 120 bp, Homo sapiens
  misc_feature: 1444 for SV(W|O) and mtDNA
aaccatataccaatgatggcgcgatgtaacacgagaaagcacataccaaggccaccacacaccacctgtccaaaaaggccttcgatacgggataatcctatttattacctcagaagtttt

SEQ ID NO: 57288 - DNA, 120 bp, Homo sapiens
  misc_feature: 1443 for SV(W|O) and mtDNA
tttgaagaaggcgtgggtgcagatgtgcaggaatgctaggtgtggttggttgatgccgattgtaactattatgagtcctagttgacttgaagtggagaaggctacgatttttttgatgtc

SEQ ID NO: 57289 - DNA, 120 bp, Homo sapiens
  misc_feature: 1443 for SV(W|O) and mtDNA
tttattgctatagccattatgattattaatgatgagtactgattggtagtattggttatggttcattgtccggagagtatattgttgaagaggatagctattagaaggattatggatgcg

SEQ ID NO: 57290 - DNA, 120 bp, Homo sapiens
  misc_feature: 1443 for SV(W|O) and mtDNA
tttaggcctactatgggtgttaaattttttactctctctacaaggttttttcctagtgtccaaagagctgttcctctttggactaacagttaaatttacaaggggatttagagggttctg

SEQ ID NO: 57291 - DNA, 120 bp, Homo sapiens
  misc_feature: 1443 for SV(W|O) and mtDNA
tggtttggctaaggttgtctggtagtaaggtggagtgggtttggggctaggtttagctcagagcggtcaagttaagttgaaatctcctaagtgtaagttgggtgctttgtgttaagctac

SEQ ID NO: 57292 - DNA, 120 bp, Homo sapiens
  misc_feature: 1443 for SV(W|O) and mtDNA
tgctcgcatctgctatagtggaggccggagcaggaacaggttgaacagtctaccctcccttagcagggaactactcccaccctggagcctccgtagacctaaccatcttctccttacacc

SEQ ID NO: 57293 - DNA, 120 bp, Homo sapiens
  misc_feature: 1443 for SV(W|O) and mtDNA
aacacactaaccatataccaatgatggcgcgatgtaacacgagaaagcacataccaaggccaccacacaccacctgtccaaaaaggccttcgatacgggataatcctatttattacctca

SEQ ID NO: 57294 - DNA, 120 bp, Homo sapiens
  misc_feature: 1443 for SV(W|O) and mtDNA
tctgcacccacgccttcttcaaagccatactatttatgtgctccgggtccatcatccacaaccttaacaatgaacaagatattcgaaaaataggaggactactcaaaaccatacctctca

SEQ ID NO: 57295 - DNA, 120 bp, Homo sapiens
  misc_feature: 1443 for SV(W|O) and mtDNA
gtgtgataggtggcacggagaattttggattctcagggatgggttcgattctcatagtcctagaaataagggggtttaagctcctattatttactctatcaaagtaactcttttatcaga

SEQ ID NO: 57296 - DNA, 120 bp, Homo sapiens
  misc_feature: 1443 for SV(W|O) and mtDNA
tcctatttttcgaatatcttgttcattgttaaggttgtggatgatggacccggagcacataaatagtatggctttgaagaaggcgtgggtgcagatgtgcaggaatgctaggtgtggttg

SEQ ID NO: 57297 - DNA, 120 bp, Homo sapiens
  misc_feature: 1443 for SV(W|O) and mtDNA
tcattgtccggagagtatattgttgaagaggatagctattagaaggattatggatgcggttgcttgcgtgaggaaatacttgatggcagcttctgtggaacgagggtttatttttttggt

SEQ ID NO: 57298 - DNA, 120 bp, Homo sapiens
  misc_feature: 1443 for SV(W|O) and mtDNA
tcatgggctacaccttgacctaacgtctttacgtgggtacttgcgcttactttgtagccttcatcagggtttgctgaagatggcggtatataggctgagcaagaggtggtgaggttgatc

SEQ ID NO: 57299 - DNA, 120 bp, Homo sapiens
  misc_feature: 1443 for SV(W|O) and mtDNA
ataggggaagtagcgtcttgtagacctacttgcgctgcatgtgccattaagatatataggatttagcctataatttaactttgacaaagttatgaaatggtttttctaatacctttttga

SEQ ID NO: 57300 - DNA, 120 bp, Homo sapiens
  misc_feature: 1443 for SV(W|O) and mtDNA
tatataaatgcgtaggggttttagttaaatgtcctttgaagtatacttgaggagggtgacgggcggtgtgtacgcgcttcagggccctgttcaactaagcactctactctcagtttactg

SEQ ID NO: 57301 - DNA, 120 bp, Homo sapiens
  misc_feature: 1443 for SV(W|O) and mtDNA
taggtgtaaggagaagatggttaggtctacggaggctccagggtgggagtagttccctgctaagggagggtagactgttcaacctgttcctgctccggcctccactatagcagatgcgag

SEQ ID NO: 57302 - DNA, 120 bp, Homo sapiens
  misc_feature: 1443 for SV(W|O) and mtDNA
caacattttcggggtatgggcccgatagcttatttagctgaccttactttaggatggggtgtgataggtggcacggagaattttggattctcagggatgggttcgattctcatagtccta

SEQ ID NO: 57303 - DNA, 120 bp, Homo sapiens
  misc_feature: 1443 for SV(W|O) and mtDNA
taagtttcataagggctatcgtagttttctggggtagaaaatgtagcccatttcttgccacctcatgggctacaccttgacctaacgtctttacgtgggtacttgcgcttactttgtagc

SEQ ID NO: 57304 - DNA, 120 bp, Homo sapiens
  misc_feature: 1443 for SV(W|O) and mtDNA
cttcaccagtcaaagcgaactactatactcaattgatccaataacttgaccaacggaacaagttaccctagggataacagcgcaatcctattctagagtccatatcaacaatagggttta

SEQ ID NO: 57305 - DNA, 120 bp, Homo sapiens
  misc_feature: 1443 for SV(W|O) and mtDNA
acatgctaagacttcaccagtcaaagcgaactactatactcaattgatccaataacttgaccaacggaacaagttaccctagggataacagcgcaatcctattctagagtccatatcaac

SEQ ID NO: 57306 - DNA, 120 bp, Homo sapiens
  misc_feature: 1443 for SV(W|O) and mtDNA
acaaaactgctcgccagaacactacgagccacagcttaaaactcaaaggacctggcggtgcttcatatccctctagaggagcctgttctgtaatcgataaaccccgatcaacctcaccac

SEQ ID NO: 57307 - DNA, 120 bp, Homo sapiens
  misc_feature: 1443 for SV(W|O) and mtDNA
ggcgatgaggactaggatgatggcgggcaggatagttcagacggtttctatttcctgagcgtctgagatgttagtattagttagttttgttgtgagtgttaggaaaagggcatacaggac

SEQ ID NO: 57308 - DNA, 120 bp, Homo sapiens
  misc_feature: 1443 for SV(W|O) and mtDNA
gagtgttaggaaaagggcatacaggactaggaagcagataaggaaaatgattatgagggcgtgatcatgaaaggtgataagctcttctatgataggggaagtagcgtcttgtagacctac

SEQ ID NO: 57309 - DNA, 120 bp, Homo sapiens
  misc_feature: 1443 for SV(W|O) and mtDNA
acgaccaatgatatgaaaaaccatcgttgtatttcaactacaagaacaccaatgaccccaatacgcaaaactaaccccctaataaaattaattaaccactcattcatcgacctccccacc

SEQ ID NO: 57310 - DNA, 120 bp, Homo sapiens
  misc_feature: 1443 for SV(W|O) and mtDNA
gggtaaatggtttggctaaggttgtctggtagtaaggtggagtgggtttggggctaggtttagctcagagcggtcaagttaagttgaaatctcctaagtgtaagttgggtgctttgtgtt

SEQ ID NO: 57311 - DNA, 120 bp, Homo sapiens
  misc_feature: 1443 for SV(W|O) and mtDNA
gcaaacatatcatacacaaacgcctgagccctatctattactctcatcgctacctccctgacaagcgcctatagcactcgaataattcttctcaccctaacaggtcaacctcgcttcccc

SEQ ID NO: 57312 - DNA, 120 bp, Homo sapiens
  misc_feature: 1443 for SV(W|O) and mtDNA
gctcatcagttgatgatacgcccgagcagatgccaacacagcagccattcaagcaatcctatacaaccgtatcggcgatatcggtttcatcctcgccttagcatgatttatcctacactc

SEQ ID NO: 57313 - DNA, 120 bp, Homo sapiens
  misc_feature: 1443 for SV(W|O) and mtDNA
gccttcatcagggtttgctgaagatggcggtatataggctgagcaagaggtggtgaggttgatcggggtttatcgattacagaacaggctcctctagagggatatgaagcaccgccaggt

SEQ ID NO: 57314 - DNA, 120 bp, Homo sapiens
  misc_feature: 1443 for SV(W|O) and mtDNA
gattggcttagtgggcgaaatattatgctttgttgtttggatatatggaggatggggattattgctaggatgaggatggatagtaatagggcaaggacgcctcctagtttgttagggacg

SEQ ID NO: 57315 - DNA, 120 bp, Homo sapiens
  misc_feature: 1443 for SV(W|O) and mtDNA
aacacacaatagctaagacccaaactgggattagataccccactatgcttagccctaaacctcaacagttaaatcaacaaaactgctcgccagaacactacgagccacagcttaaaactc

SEQ ID NO: 57316 - DNA, 120 bp, Homo sapiens
  misc_feature: 1443 for SV(W|O) and mtDNA
gagttcagttatatgtttgggattttttaggtagtgggtgttgagcttgaacgctttcttaattggtggctgcttttaggcctactatgggtgttaaattttttactctctctacaaggt

SEQ ID NO: 57317 - DNA, 120 bp, Homo sapiens
  misc_feature: 1443 for SV(W|O) and mtDNA
cgttttcacacttctagtaagcctctacctgcacgacaacacataatgacccaccaatcacatgcctatcatatagtaaaacccagcccatgacccctaacaggggccctctcagccctc

SEQ ID NO: 57318 - DNA, 120 bp, Homo sapiens
  misc_feature: 1443 for SV(W|O) and mtDNA
ctggcccagctcggctcgaataaggaggcttagagctgtgcctaggactccagctcatgcgccgaataataggtatagtgttccaatgtctttgtggtttgtagagaatagtcaacggtc

SEQ ID NO: 57319 - DNA, 120 bp, Homo sapiens
  misc_feature: 1443 for SV(W|O) and mtDNA
agtagtgtgattgaggtggagtagattaggcgtaggtagaagtagaggttaaggagggtgatggtggctatgatggtggggatgatgaggctattgttttttgtgaattcttcgataatg

SEQ ID NO: 57320 - DNA, 120 bp, Homo sapiens
  misc_feature: 1443 for SV(W|O) and mtDNA
aacacgagaaagcacataccaaggccaccacacaccacctgtccaaaaaggccttcgatacgggataatcctatttattacctcagaagtttttttcttcgcaggatttttctgagcctt

SEQ ID NO: 57321 - DNA, 120 bp, Homo sapiens
  misc_feature: 1442 for SV(W|O) and mtDNA
tttactcaatcctctgatcagggtgagcatcaaactcaaactacgccctgatcggcgcactgcgagcagtagcccaaacaatctcatatgaagtcaccctagccatcattctactatcaa

SEQ ID NO: 57322 - DNA, 120 bp, Homo sapiens
  misc_feature: 1442 for SV(W|O) and mtDNA
tctaatcctttttgtagtcactcataggccagacttagggctaggatgatgattaataagagggatgacataactattagtggcaggttagttgtttgtagggctcatggtaggggtaaa

SEQ ID NO: 57323 - DNA, 120 bp, Homo sapiens
  misc_feature: 1442 for SV(W|O) and mtDNA
ttgaagtgagaggtatggttttgagtagtcctcctatttttcgaatatcttgttcattgttaaggttgtggatgatggacccggagcacataaatagtatggctttgaagaaggcgtggg

SEQ ID NO: 57324 - DNA, 120 bp, Homo sapiens
  misc_feature: 1442 for SV(W|O) and mtDNA
tggtgctggagtttaagttgagtagtaggaatgcggtagtagttaggataatataaatagttaaattaagaatggttatgttagggttgtacggtagaactgctattattcatcctatgt

SEQ ID NO: 57325 - DNA, 120 bp, Homo sapiens
  misc_feature: 1442 for SV(W|O) and mtDNA
ccaattggaccaatctatcaccctatagaagaactaatgttagtataagtaacatgaaaacattctcctccgcataagcctgcgtcagattaaaacactgaactgacaattaacagccca

SEQ ID NO: 57326 - DNA, 120 bp, Homo sapiens
  misc_feature: 1442 for SV(W|O) and mtDNA
tgatacgcccgagcagatgccaacacagcagccattcaagcaatcctatacaaccgtatcggcgatatcggtttcatcctcgccttagcatgatttatcctacactccaactcatgagac

SEQ ID NO: 57327 - DNA, 120 bp, Homo sapiens
  misc_feature: 1442 for SV(W|O) and mtDNA
tctattttgtgtcaactggagttttttacaactcaggtgagttttagctttattggggagggggtgatctaaaacactctttacgccggcttctattgacttgggttaatcgtgtgaccg

SEQ ID NO: 57328 - DNA, 120 bp, Homo sapiens
  misc_feature: 1442 for SV(W|O) and mtDNA
tcggttcagtctaatcctttttgtagtcactcataggccagacttagggctaggatgatgattaataagagggatgacataactattagtggcaggttagttgtttgtagggctcatggt

SEQ ID NO: 57329 - DNA, 120 bp, Homo sapiens
  misc_feature: 1442 for SV(W|O) and mtDNA
ggagacaagtcgtaacatggtaagtgtactggaaagtgcacttggacgaaccagagtgtagcttaacacaaagcacccaacttacacttaggagatttcaacttaacttgaccgctctga

SEQ ID NO: 57330 - DNA, 120 bp, Homo sapiens
  misc_feature: 1442 for SV(W|O) and mtDNA
cctcatgggctacaccttgacctaacgtctttacgtgggtacttgcgcttactttgtagccttcatcagggtttgctgaagatggcggtatataggctgagcaagaggtggtgaggttga

SEQ ID NO: 57331 - DNA, 120 bp, Homo sapiens
  misc_feature: 1442 for SV(W|O) and mtDNA
tagttgcaagcaggaggataatgccgatgtttcaggtttctgagtagagaaatgatccgtaatataggcctcgcccgatgtgtaggaagaggcagataaagaatattgaggcgccattgg

SEQ ID NO: 57332 - DNA, 120 bp, Homo sapiens
  misc_feature: 1442 for SV(W|O) and mtDNA
taggagatttcaacttaacttgaccgctctgagctaaacctagccccaaacccactccaccttactaccagacaaccttagccaaaccatttacccaaataaagtataggcgatagaaat

SEQ ID NO: 57333 - DNA, 120 bp, Homo sapiens
  misc_feature: 1442 for SV(W|O) and mtDNA
cggttcagtctaatcctttttgtagtcactcataggccagacttagggctaggatgatgattaataagagggatgacataactattagtggcaggttagttgtttgtagggctcatggta

SEQ ID NO: 57334 - DNA, 120 bp, Homo sapiens
  misc_feature: 1442 for SV(W|O) and mtDNA
gtgtacgcgcttcagggccctgttcaactaagcactctactctcagtttactgctaaatccaccttcgacccttaagtttcataagggctatcgtagttttctggggtagaaaatgtagc

SEQ ID NO: 57335 - DNA, 120 bp, Homo sapiens
  misc_feature: 1442 for SV(W|O) and mtDNA
gtcaaagcgaactactatactcaattgatccaataacttgaccaacggaacaagttaccctagggataacagcgcaatcctattctagagtccatatcaacaatagggtttacgacctcg

SEQ ID NO: 57336 - DNA, 120 bp, Homo sapiens
  misc_feature: 1442 for SV(W|O) and mtDNA
gtactctgaggcttgtaggagggtaaaatagagacccagtaaaattgtaataagcagtgcttgaattatttggtttcggttgttttctattagactatggtgagctcaggtgattgatac

SEQ ID NO: 57337 - DNA, 120 bp, Homo sapiens
  misc_feature: 1442 for SV(W|O) and mtDNA
gggggtttaagctcctattatttactctatcaaagtaactcttttatcagacatatttcttaggtttgagggggaatgctggagattgtaatgggtatggagacatatcatataagtaat

SEQ ID NO: 57338 - DNA, 120 bp, Homo sapiens
  misc_feature: 1442 for SV(W|O) and mtDNA
ggcgcagtgattataggctttcgctctaagattaaaaatgccctagcccacttcttaccacaaggcacacctacaccccttatccccatactagttattatcgaaaccatcagcctactc

SEQ ID NO: 57339 - DNA, 120 bp, Homo sapiens
  misc_feature: 1442 for SV(W|O) and mtDNA
cacctactcatgcacctaattggaagcgccaccctagcaatatcaaccattaaccttccctctacacttatcatcttcacaattctaattctactgactatcctagaaatcgctgtcgcc

SEQ ID NO: 57340 - DNA, 120 bp, Homo sapiens
  misc_feature: 1442 for SV(W|O) and mtDNA
aacttaatatgactagcttacacaatagcttttatagtaaagatacctctttacggactccacttatgactccctaaagcccatgtcgaagcccccatcgctgggtcaatagtacttgcc

SEQ ID NO: 57341 - DNA, 120 bp, Homo sapiens
  misc_feature: 1442 for SV(W|O) and mtDNA
catcttcctaattaccatactaatcttagttaccgctaacaacctattccaactgttcatcggctgagagggcgtaggaattatatccttcttgctcatcagttgatgatacgcccgagc

SEQ ID NO: 57342 - DNA, 120 bp, Homo sapiens
  misc_feature: 1442 for SV(W|O) and mtDNA
cagcagtctgcgcccttacacaaaatgacatcaaaaaaatcgtagccttctccacttcaagtcaactaggactcataatagttacaatcggcatcaaccaaccacacctagcattcctgc

SEQ ID NO: 57343 - DNA, 120 bp, Homo sapiens
  misc_feature: 1442 for SV(W|O) and mtDNA
atgtaacacgagaaagcacataccaaggccaccacacaccacctgtccaaaaaggccttcgatacgggataatcctatttattacctcagaagtttttttcttcgcaggatttttctgag

SEQ ID NO: 57344 - DNA, 120 bp, Homo sapiens
  misc_feature: 1442 for SV(W|O) and mtDNA
acaaagtaagcgcaagtacccacgtaaagacgttaggtcaaggtgtagcccatgaggtggcaagaaatgggctacattttctaccccagaaaactacgatagcccttatgaaacttaagg

SEQ ID NO: 57345 - DNA, 120 bp, Homo sapiens
  misc_feature: 1442 for SV(W|O) and mtDNA
accgaaaccaaataattcaagcactgcttattacaattttactgggtctctattttaccctcctacaagcctcagagtacttcgagtctcccttcaccatttccgacggcatctacggct

SEQ ID NO: 57346 - DNA, 120 bp, Homo sapiens
  misc_feature: 1442 for SV(W|O) and mtDNA
agccaacaacttaatatgactagcttacacaatagcttttatagtaaagatacctctttacggactccacttatgactccctaaagcccatgtcgaagcccccatcgctgggtcaatagt

SEQ ID NO: 57347 - DNA, 120 bp, Homo sapiens
  misc_feature: 1441 for SV(W|O) and mtDNA
gcttacacaatagcttttatagtaaagatacctctttacggactccacttatgactccctaaagcccatgtcgaagcccccatcgctgggtcaatagtacttgccgcagtactcttaaaa

SEQ ID NO: 57348 - DNA, 120 bp, Homo sapiens
  misc_feature: 1441 for SV(W|O) and mtDNA
aacaaatgataaccatacacaacactaaaggacgaacctgatctcttatactagtatccttaatcatttttattgccacaactaacctcctcggactcctgcctcactcatttacaccaa

SEQ ID NO: 57349 - DNA, 120 bp, Homo sapiens
  misc_feature: 1441 for SV(W|O) and mtDNA
ttctaggtaacgaccacatctacaacgttatcgtcacagcccatgcatttgtaataatcttcttcatagtaatacccatcataatcggaggctttggcaactgactagttcccctaataa

SEQ ID NO: 57350 - DNA, 120 bp, Homo sapiens
  misc_feature: 1441 for SV(W|O) and mtDNA
ttcaccagtcaaagcgaactactatactcaattgatccaataacttgaccaacggaacaagttaccctagggataacagcgcaatcctattctagagtccatatcaacaatagggtttac

SEQ ID NO: 57351 - DNA, 120 bp, Homo sapiens
  misc_feature: 1441 for SV(W|O) and mtDNA
agaatggctgttactacgagggctatgtggctgattgaagagtatgcaatgagcgattttaggtctgtttgtcgtaggcagatggagcttgttataattatgcctcatagggatagtaca

SEQ ID NO: 57352 - DNA, 120 bp, Homo sapiens
  misc_feature: 1441 for SV(W|O) and mtDNA
tgtaaatctaaagacaggggttaggcctctttttaccagctccgaggtgattttcatattgaattgcaaattcgaagaagcagcttcaaacctgccggggcttctcccgccttttttccc

SEQ ID NO: 57353 - DNA, 120 bp, Homo sapiens
  misc_feature: 1441 for SV(W|O) and mtDNA
agtgattataggctttcgctctaagattaaaaatgccctagcccacttcttaccacaaggcacacctacaccccttatccccatactagttattatcgaaaccatcagcctactcattca

SEQ ID NO: 57354 - DNA, 120 bp, Homo sapiens
  misc_feature: 1441 for SV(W|O) and mtDNA
tctgccatcttaacaaaccctgttcttgggtgggtgtgggtataatactaagttgagatgatatcatttacgggggaaggcgctttgtgaagtaggccttatttctcttgtcctttcgta

SEQ ID NO: 57355 - DNA, 120 bp, Homo sapiens
  misc_feature: 1441 for SV(W|O) and mtDNA
tatctataaacctagccatggccatccccttatgagcgggcgcagtgattataggctttcgctctaagattaaaaatgccctagcccacttcttaccacaaggcacacctacacccctta

SEQ ID NO: 57356 - DNA, 120 bp, Homo sapiens
  misc_feature: 1441 for SV(W|O) and mtDNA
ggacgtctaaaccaaaccactttcaccgctacacgaccgggggtatactacggtcaatgctctgaaatctgtggagcaaaccacagtttcatgcccatcgtcctagaattaattccccta

SEQ ID NO: 57357 - DNA, 120 bp, Homo sapiens
  misc_feature: 1441 for SV(W|O) and mtDNA
attcactgatttcccctattctcaggctacaccctagaccaaacctacgccaaaatccatttcactatcatattcatcggcgtaaatctaactttcttcccacaacactttctcggccta

SEQ ID NO: 57358 - DNA, 120 bp, Homo sapiens
  misc_feature: 1441 for SV(W|O) and mtDNA
tactagaagtgtgaaaacgtaggcttggattaaggcgacagcgatttctaggatagtcagtagaattagaattgtgaagatgataagtgtagagggaaggttaatggttgatattgctag

SEQ ID NO: 57359 - DNA, 120 bp, Homo sapiens
  misc_feature: 1441 for SV(W|O) and mtDNA
gggtagtccgagtaacgtcggggcattccggataggccgagaaagtgttgtgggaagaaagttagatttacgccgatgaatatgatagtgaaatggattttggcgtaggtttggtctagg

SEQ ID NO: 57360 - DNA, 120 bp, Homo sapiens
  misc_feature: 1441 for SV(W|O) and mtDNA
ccggtaatgatgtcggggttgagggataggaggagaatgggggataggtgtatgaacatgagggtgttttctcgtgtgaatgagggttttatgttgttaatgtggtgggtgagtgagccc

SEQ ID NO: 57361 - DNA, 120 bp, Homo sapiens
  misc_feature: 1441 for SV(W|O) and mtDNA
ctacgttttcacacttctagtaagcctctacctgcacgacaacacataatgacccaccaatcacatgcctatcatatagtaaaacccagcccatgacccctaacaggggccctctcagcc

SEQ ID NO: 57362 - DNA, 120 bp, Homo sapiens
  misc_feature: 1441 for SV(W|O) and mtDNA
gctccatctgcctacgacaaacagacctaaaatcgctcattgcatactcttcaatcagccacatagccctcgtagtaacagccattctcatccaaaccccctgaagcttcaccggcgcag

SEQ ID NO: 57363 - DNA, 120 bp, Homo sapiens
  misc_feature: 1441 for SV(W|O) and mtDNA
agttgagggttgattgctgtacttgcttgtaagcatggggagggggttttgatgtggattgggtttttatgtactacaggtggtcaagtatttatggtaccgtacaatattcatggtggc

SEQ ID NO: 57364 - DNA, 120 bp, Homo sapiens
  misc_feature: 1441 for SV(W|O) and mtDNA
aacatatctgaacacacaatagctaagacccaaactgggattagataccccactatgcttagccctaaacctcaacagttaaatcaacaaaactgctcgccagaacactacgagccacag

SEQ ID NO: 57365 - DNA, 120 bp, Homo sapiens
  misc_feature: 1441 for SV(W|O) and mtDNA
ctggcgagcagttttgttgatttaactgttgaggtttagggctaagcatagtggggtatctaatcccagtttgggtcttagctattgtgtgttcagatatgttaaagccactttcgtagt

SEQ ID NO: 57366 - DNA, 120 bp, Homo sapiens
  misc_feature: 1441 for SV(W|O) and mtDNA
acggctacatagaaaaatccaccccttacgagtgcggcttcgaccctatatcccccgcccgcgtccctttctccataaaattcttcttagtagctattaccttcttattatttgatctag

SEQ ID NO: 57367 - DNA, 120 bp, Homo sapiens
  misc_feature: 1441 for SV(W|O) and mtDNA
cgttacctagaaggttgcctggctggcccagctcggctcgaataaggaggcttagagctgtgcctaggactccagctcatgcgccgaataataggtatagtgttccaatgtctttgtggt

SEQ ID NO: 57368 - DNA, 120 bp, Homo sapiens
  misc_feature: 1441 for SV(W|O) and mtDNA
cggacgtctaaaccaaaccactttcaccgctacacgaccgggggtatactacggtcaatgctctgaaatctgtggagcaaaccacagtttcatgcccatcgtcctagaattaattcccct

SEQ ID NO: 57369 - DNA, 120 bp, Homo sapiens
  misc_feature: 1441 for SV(W|O) and mtDNA
ccatagtctaatagaaaacaaccgaaaccaaataattcaagcactgcttattacaattttactgggtctctattttaccctcctacaagcctcagagtacttcgagtctcccttcaccat

SEQ ID NO: 57370 - DNA, 120 bp, Homo sapiens
  misc_feature: 1441 for SV(W|O) and mtDNA
caataaaactaggaatagccccctttcacttctgagtcccagaggttacccaaggcacccctctgacatccggcctgcttcttctcacatgacaaaaactagcccccatctcaatcatat

SEQ ID NO: 57371 - DNA, 120 bp, Homo sapiens
  misc_feature: 1441 for SV(W|O) and mtDNA
atatatcttaatggcacatgcagcgcaagtaggtctacaagacgctacttcccctatcatagaagagcttatcacctttcatgatcacgccctcataatcattttccttatctgcttcct

SEQ ID NO: 57372 - DNA, 120 bp, Homo sapiens
  misc_feature: 1440 for SV(W|O) and mtDNA
ttcactgatttcccctattctcaggctacaccctagaccaaacctacgccaaaatccatttcactatcatattcatcggcgtaaatctaactttcttcccacaacactttctcggcctat

SEQ ID NO: 57373 - DNA, 120 bp, Homo sapiens
  misc_feature: 1440 for SV(W|O) and mtDNA
taaatgcgtaggggttttagttaaatgtcctttgaagtatacttgaggagggtgacgggcggtgtgtacgcgcttcagggccctgttcaactaagcactctactctcagtttactgctaa

SEQ ID NO: 57374 - DNA, 120 bp, Homo sapiens
  misc_feature: 1440 for SV(W|O) and mtDNA
aacaaaactgctcgccagaacactacgagccacagcttaaaactcaaaggacctggcggtgcttcatatccctctagaggagcctgttctgtaatcgataaaccccgatcaacctcacca

SEQ ID NO: 57375 - DNA, 120 bp, Homo sapiens
  misc_feature: 1440 for SV(W|O) and mtDNA
tgggagtagagtttgaagtccttgagagaggattatgatgcgactgtgagtgcgttcgtagtttgagtttgctaggcagaatagtaatgaggatgtaagcccgtgggcgattatgagaat

SEQ ID NO: 57376 - DNA, 120 bp, Homo sapiens
  misc_feature: 1440 for SV(W|O) and mtDNA
tgcatgtgccattaagatatataggatttagcctataatttaactttgacaaagttatgaaatggtttttctaatacctttttgaaaaagtcatggaggccatggggttggcttgaaacc

SEQ ID NO: 57377 - DNA, 120 bp, Homo sapiens
  misc_feature: 1440 for SV(W|O) and mtDNA
tgagtgttaggaaaagggcatacaggactaggaagcagataaggaaaatgattatgagggcgtgatcatgaaaggtgataagctcttctatgataggggaagtagcgtcttgtagaccta

SEQ ID NO: 57378 - DNA, 120 bp, Homo sapiens
  misc_feature: 1440 for SV(W|O) and mtDNA
tgagatgggggctagtttttgtcatgtgagaagaagcaggccggatgtcagaggggtgccttgggtaacctctgggactcagaagtgaaagggggctattcctagttttattgctatagc

SEQ ID NO: 57379 - DNA, 120 bp, Homo sapiens
  misc_feature: 1440 for SV(W|O) and mtDNA
tcgtaacatggtaagtgtactggaaagtgcacttggacgaaccagagtgtagcttaacacaaagcacccaacttacacttaggagatttcaacttaacttgaccgctctgagctaaacct

SEQ ID NO: 57380 - DNA, 120 bp, Homo sapiens
  misc_feature: 1440 for SV(W|O) and mtDNA
gcaagcaggaggataatgccgatgtttcaggtttctgagtagagaaatgatccgtaatataggcctcgcccgatgtgtaggaagaggcagataaagaatattgaggcgccattggcgtga

SEQ ID NO: 57381 - DNA, 120 bp, Homo sapiens
  misc_feature: 1440 for SV(W|O) and mtDNA
cttctaggtaacgaccacatctacaacgttatcgtcacagcccatgcatttgtaataatcttcttcatagtaatacccatcataatcggaggctttggcaactgactagttcccctaata

SEQ ID NO: 57382 - DNA, 120 bp, Homo sapiens
  misc_feature: 1440 for SV(W|O) and mtDNA
taggagttgaagattagtccgccgtagtcggtgtactcgtaggttcagtaccattggtggccaattgatttgatggtaagggagggatcgttgacctcgtctgttatgtaaaggatgcgt

SEQ ID NO: 57383 - DNA, 120 bp, Homo sapiens
  misc_feature: 1440 for SV(W|O) and mtDNA
ggggtctcctcctccggcggggtcgaagaaggtggtgttgaggttgcggtctgttagtagtatagtgatgccagcagctaggactgggagagataggagaagtaggactgctgtgattag

SEQ ID NO: 57384 - DNA, 120 bp, Homo sapiens
  misc_feature: 1440 for SV(W|O) and mtDNA
cagcgcaagtaggtctacaagacgctacttcccctatcatagaagagcttatcacctttcatgatcacgccctcataatcattttccttatctgcttcctagtcctgtatgcccttttcc

SEQ ID NO: 57385 - DNA, 120 bp, Homo sapiens
  misc_feature: 1440 for SV(W|O) and mtDNA
agttgcaagcaggaggataatgccgatgtttcaggtttctgagtagagaaatgatccgtaatataggcctcgcccgatgtgtaggaagaggcagataaagaatattgaggcgccattggc

SEQ ID NO: 57386 - DNA, 120 bp, Homo sapiens
  misc_feature: 1440 for SV(W|O) and mtDNA
agccattcatacaggtccctatttaaggaacaagtgattatgctacctttgcacggttagggtaccgcggccgttaaacatgtgtcactgggcaggcggtgcctctaatactggtgatgc

SEQ ID NO: 57387 - DNA, 120 bp, Homo sapiens
  misc_feature: 1440 for SV(W|O) and mtDNA
gaattcacaaaaaacaatagcctcatcatccccaccatcatagccaccatcaccctccttaacctctacttctacctacgcctaatctactccacctcaatcacactactccccatatct

SEQ ID NO: 57388 - DNA, 120 bp, Homo sapiens
  misc_feature: 1440 for SV(W|O) and mtDNA
ctgtggtttgctccacagatttcagagcattgaccgtagtatacccccggtcgtgtagcggtgaaagtggtttggtttagacgtccgggaattgcatctgtttttaagcctaatgtgggg

SEQ ID NO: 57389 - DNA, 120 bp, Homo sapiens
  misc_feature: 1440 for SV(W|O) and mtDNA
ctctgccatcttaacaaaccctgttcttgggtgggtgtgggtataatactaagttgagatgatatcatttacgggggaaggcgctttgtgaagtaggccttatttctcttgtcctttcgt

SEQ ID NO: 57390 - DNA, 120 bp, Homo sapiens
  misc_feature: 1440 for SV(W|O) and mtDNA
atcacctgagctcaccatagtctaatagaaaacaaccgaaaccaaataattcaagcactgcttattacaattttactgggtctctattttaccctcctacaagcctcagagtacttcgag

SEQ ID NO: 57391 - DNA, 120 bp, Homo sapiens
  misc_feature: 1440 for SV(W|O) and mtDNA
agaagtgtgaaaacgtaggcttggattaaggcgacagcgatttctaggatagtcagtagaattagaattgtgaagatgataagtgtagagggaaggttaatggttgatattgctagggtg

SEQ ID NO: 57392 - DNA, 120 bp, Homo sapiens
  misc_feature: 1440 for SV(W|O) and mtDNA
agcggttaggcgtacggccagggctattggttgaatgagtaggctgatggtttcgataataactagtatggggataaggggtgtaggtgtgccttgtggtaagaagtgggctagggcatt

SEQ ID NO: 57393 - DNA, 120 bp, Homo sapiens
  misc_feature: 1440 for SV(W|O) and mtDNA
acctgagctcaccatagtctaatagaaaacaaccgaaaccaaataattcaagcactgcttattacaattttactgggtctctattttaccctcctacaagcctcagagtacttcgagtct

SEQ ID NO: 57394 - DNA, 120 bp, Homo sapiens
  misc_feature: 1439 for SV(W|O) and mtDNA
aggagaccccattctataccaacacctattctgatttttcggtcaccctgaagtttatattcttatcctaccaggcttcggaataatctcccatattgtaacttactactccggaaaaaa

SEQ ID NO: 57395 - DNA, 120 bp, Homo sapiens
  misc_feature: 1439 for SV(W|O) and mtDNA
ttgtagccttcatcagggtttgctgaagatggcggtatataggctgagcaagaggtggtgaggttgatcggggtttatcgattacagaacaggctcctctagagggatatgaagcaccgc

SEQ ID NO: 57396 - DNA, 120 bp, Homo sapiens
  misc_feature: 1439 for SV(W|O) and mtDNA
ttgggtgatgaggaatagtgtaaggagtatgggggtaattatggtgggccatacggtagtatttagttggggcatttcactgtaaagaggtgttggttctcttaatctttaacttaaaag

SEQ ID NO: 57397 - DNA, 120 bp, Homo sapiens
  misc_feature: 1439 for SV(W|O) and mtDNA
atgcacctaattggaagcgccaccctagcaatatcaaccattaaccttccctctacacttatcatcttcacaattctaattctactgactatcctagaaatcgctgtcgccttaatccaa

SEQ ID NO: 57398 - DNA, 120 bp, Homo sapiens
  misc_feature: 1439 for SV(W|O) and mtDNA
ttgattgtagatattgggctgttaattgtcagttcagtgttttaatctgacgcaggcttatgcggaggagaatgttttcatgttacttatactaacattagttcttctatagggtgatag

SEQ ID NO: 57399 - DNA, 120 bp, Homo sapiens
  misc_feature: 1439 for SV(W|O) and mtDNA
ggctacatagaaaaatccaccccttacgagtgcggcttcgaccctatatcccccgcccgcgtccctttctccataaaattcttcttagtagctattaccttcttattatttgatctagaa

SEQ ID NO: 57400 - DNA, 120 bp, Homo sapiens
  misc_feature: 1439 for SV(W|O) and mtDNA
gacgtctaaaccaaaccactttcaccgctacacgaccgggggtatactacggtcaatgctctgaaatctgtggagcaaaccacagtttcatgcccatcgtcctagaattaattcccctaa

SEQ ID NO: 57401 - DNA, 120 bp, Homo sapiens
  misc_feature: 1439 for SV(W|O) and mtDNA
tagaaaacaaccgaaaccaaataattcaagcactgcttattacaattttactgggtctctattttaccctcctacaagcctcagagtacttcgagtctcccttcaccatttccgacggca

SEQ ID NO: 57402 - DNA, 120 bp, Homo sapiens
  misc_feature: 1439 for SV(W|O) and mtDNA
cttcctaattaccatactaatcttagttaccgctaacaacctattccaactgttcatcggctgagagggcgtaggaattatatccttcttgctcatcagttgatgatacgcccgagcaga

SEQ ID NO: 57403 - DNA, 120 bp, Homo sapiens
  misc_feature: 1439 for SV(W|O) and mtDNA
gaaggttgcctggctggcccagctcggctcgaataaggaggcttagagctgtgcctaggactccagctcatgcgccgaataataggtatagtgttccaatgtctttgtggtttgtagaga

SEQ ID NO: 57404 - DNA, 120 bp, Homo sapiens
  misc_feature: 1439 for SV(W|O) and mtDNA
tcgttacctagaaggttgcctggctggcccagctcggctcgaataaggaggcttagagctgtgcctaggactccagctcatgcgccgaataataggtatagtgttccaatgtctttgtgg

SEQ ID NO: 57405 - DNA, 120 bp, Homo sapiens
  misc_feature: 1439 for SV(W|O) and mtDNA
gtacagggaggaatttgaagtagatagaaaccgacctggattactccggtctgaactcagatcacgtaggactttaatcgttgaacaaacgaacctttaatagcggctgcaccatcggga

SEQ ID NO: 57406 - DNA, 120 bp, Homo sapiens
  misc_feature: 1439 for SV(W|O) and mtDNA
gatgtaacacgagaaagcacataccaaggccaccacacaccacctgtccaaaaaggccttcgatacgggataatcctatttattacctcagaagtttttttcttcgcaggatttttctga

SEQ ID NO: 57407 - DNA, 120 bp, Homo sapiens
  misc_feature: 1439 for SV(W|O) and mtDNA
attgagatgggggctagtttttgtcatgtgagaagaagcaggccggatgtcagaggggtgccttgggtaacctctgggactcagaagtgaaagggggctattcctagttttattgctata

SEQ ID NO: 57408 - DNA, 120 bp, Homo sapiens
  misc_feature: 1439 for SV(W|O) and mtDNA
tagcggttaggcgtacggccagggctattggttgaatgagtaggctgatggtttcgataataactagtatggggataaggggtgtaggtgtgccttgtggtaagaagtgggctagggcat

SEQ ID NO: 57409 - DNA, 120 bp, Homo sapiens
  misc_feature: 1439 for SV(W|O) and mtDNA
tacgttttcacacttctagtaagcctctacctgcacgacaacacataatgacccaccaatcacatgcctatcatatagtaaaacccagcccatgacccctaacaggggccctctcagccc

SEQ ID NO: 57410 - DNA, 120 bp, Homo sapiens
  misc_feature: 1439 for SV(W|O) and mtDNA
agaccacatcatcgaaaccgcaaacatatcatacacaaacgcctgagccctatctattactctcatcgctacctccctgacaagcgcctatagcactcgaataattcttctcaccctaac

SEQ ID NO: 57411 - DNA, 120 bp, Homo sapiens
  misc_feature: 1439 for SV(W|O) and mtDNA
gttaggataatataaatagttaaattaagaatggttatgttagggttgtacggtagaactgctattattcatcctatgtgggtaattgaggagtatgctaagattttgcgtagctgggtt

SEQ ID NO: 57412 - DNA, 120 bp, Homo sapiens
  misc_feature: 1439 for SV(W|O) and mtDNA
gggccattatcgaagaattcacaaaaaacaatagcctcatcatccccaccatcatagccaccatcaccctccttaacctctacttctacctacgcctaatctactccacctcaatcacac

SEQ ID NO: 57413 - DNA, 120 bp, Homo sapiens
  misc_feature: 1439 for SV(W|O) and mtDNA
gtcgtaacatggtaagtgtactggaaagtgcacttggacgaaccagagtgtagcttaacacaaagcacccaacttacacttaggagatttcaacttaacttgaccgctctgagctaaacc

SEQ ID NO: 57414 - DNA, 120 bp, Homo sapiens
  misc_feature: 1439 for SV(W|O) and mtDNA
gagaatggctgttactacgagggctatgtggctgattgaagagtatgcaatgagcgattttaggtctgtttgtcgtaggcagatggagcttgttataattatgcctcatagggatagtac

SEQ ID NO: 57415 - DNA, 120 bp, Homo sapiens
  misc_feature: 1439 for SV(W|O) and mtDNA
ggtgttaaattttttactctctctacaaggttttttcctagtgtccaaagagctgttcctctttggactaacagttaaatttacaaggggatttagagggttctgtgggcaaatttaaag

SEQ ID NO: 57416 - DNA, 120 bp, Homo sapiens
  misc_feature: 1439 for SV(W|O) and mtDNA
accgcaagggaaagatgaaaaattataaccaagcataatatagcaaggactaacccctataccttctgcataatgaattaactagaaataactttgcaaggagagccaaagctaagaccc

SEQ ID NO: 57417 - DNA, 120 bp, Homo sapiens
  misc_feature: 1439 for SV(W|O) and mtDNA
cggtaatgatgtcggggttgagggataggaggagaatgggggataggtgtatgaacatgagggtgttttctcgtgtgaatgagggttttatgttgttaatgtggtgggtgagtgagcccc

SEQ ID NO: 57418 - DNA, 120 bp, Homo sapiens
  misc_feature: 1439 for SV(W|O) and mtDNA
ggcgcgatgtaacacgagaaagcacataccaaggccaccacacaccacctgtccaaaaaggccttcgatacgggataatcctatttattacctcagaagtttttttcttcgcaggatttt

SEQ ID NO: 57419 - DNA, 120 bp, Homo sapiens
  misc_feature: 1439 for SV(W|O) and mtDNA
caggcaaccttctaggtaacgaccacatctacaacgttatcgtcacagcccatgcatttgtaataatcttcttcatagtaatacccatcataatcggaggctttggcaactgactagttc

SEQ ID NO: 57420 - DNA, 120 bp, Homo sapiens
  misc_feature: 1439 for SV(W|O) and mtDNA
actcacccaccacattaacaacataaaaccctcattcacacgagaaaacaccctcatgttcatacacctatcccccattctcctcctatccctcaaccccgacatcattaccgggttttc

SEQ ID NO: 57421 - DNA, 120 bp, Homo sapiens
  misc_feature: 1439 for SV(W|O) and mtDNA
cacctgctaggtgtaaggagaagatggttaggtctacggaggctccagggtgggagtagttccctgctaagggagggtagactgttcaacctgttcctgctccggcctccactatagcag

SEQ ID NO: 57422 - DNA, 120 bp, Homo sapiens
  misc_feature: 1439 for SV(W|O) and mtDNA
ctaaccatataccaatgatggcgcgatgtaacacgagaaagcacataccaaggccaccacacaccacctgtccaaaaaggccttcgatacgggataatcctatttattacctcagaagtt

SEQ ID NO: 57423 - DNA, 120 bp, Homo sapiens
  misc_feature: 1439 for SV(W|O) and mtDNA
aagacccaaactgggattagataccccactatgcttagccctaaacctcaacagttaaatcaacaaaactgctcgccagaacactacgagccacagcttaaaactcaaaggacctggcgg

SEQ ID NO: 57424 - DNA, 120 bp, Homo sapiens
  misc_feature: 1439 for SV(W|O) and mtDNA
ccaatgatatgaaaaaccatcgttgtatttcaactacaagaacaccaatgaccccaatacgcaaaactaaccccctaataaaattaattaaccactcattcatcgacctccccaccccat

SEQ ID NO: 57425 - DNA, 120 bp, Homo sapiens
  misc_feature: 1439 for SV(W|O) and mtDNA
attccggataggccgagaaagtgttgtgggaagaaagttagatttacgccgatgaatatgatagtgaaatggattttggcgtaggtttggtctagggtgtagcctgagaataggggaaat

SEQ ID NO: 57426 - DNA, 120 bp, Homo sapiens
  misc_feature: 1439 for SV(W|O) and mtDNA
acgttttcacacttctagtaagcctctacctgcacgacaacacataatgacccaccaatcacatgcctatcatatagtaaaacccagcccatgacccctaacaggggccctctcagccct

SEQ ID NO: 57427 - DNA, 120 bp, Homo sapiens
  misc_feature: 1438 for SV(W|O) and mtDNA
ttttcatattgaattgcaaattcgaagaagcagcttcaaacctgccggggcttctcccgccttttttcccggcggcgggagaagtagattgaagccagttgattagggtgcttagctgtt

SEQ ID NO: 57428 - DNA, 120 bp, Homo sapiens
  misc_feature: 1438 for SV(W|O) and mtDNA
ctgatcaaatatcactctcctacttacaggactcaacatactagtcacagccctatactccctctacatatttaccacaacacaatggggctcactcacccaccacattaacaacataaa

SEQ ID NO: 57429 - DNA, 120 bp, Homo sapiens
  misc_feature: 1438 for SV(W|O) and mtDNA
acgtctaaaccaaaccactttcaccgctacacgaccgggggtatactacggtcaatgctctgaaatctgtggagcaaaccacagtttcatgcccatcgtcctagaattaattcccctaaa

SEQ ID NO: 57430 - DNA, 120 bp, Homo sapiens
  misc_feature: 1438 for SV(W|O) and mtDNA
aaatgcgtaggggttttagttaaatgtcctttgaagtatacttgaggagggtgacgggcggtgtgtacgcgcttcagggccctgttcaactaagcactctactctcagtttactgctaaa

SEQ ID NO: 57431 - DNA, 120 bp, Homo sapiens
  misc_feature: 1438 for SV(W|O) and mtDNA
ttggttgatgccgattgtaactattatgagtcctagttgacttgaagtggagaaggctacgatttttttgatgtcattttgtgtaagggcgcagactgctgcgaacagagtggtgatagc

SEQ ID NO: 57432 - DNA, 120 bp, Homo sapiens
  misc_feature: 1438 for SV(W|O) and mtDNA
ttgcaagcaggaggataatgccgatgtttcaggtttctgagtagagaaatgatccgtaatataggcctcgcccgatgtgtaggaagaggcagataaagaatattgaggcgccattggcgt

SEQ ID NO: 57433 - DNA, 120 bp, Homo sapiens
  misc_feature: 1438 for SV(W|O) and mtDNA
agatttcaacttaacttgaccgctctgagctaaacctagccccaaacccactccaccttactaccagacaaccttagccaaaccatttacccaaataaagtataggcgatagaaattgaa

SEQ ID NO: 57434 - DNA, 120 bp, Homo sapiens
  misc_feature: 1438 for SV(W|O) and mtDNA
ttattgctatagccattatgattattaatgatgagtactgattggtagtattggttatggttcattgtccggagagtatattgttgaagaggatagctattagaaggattatggatgcgg

SEQ ID NO: 57435 - DNA, 120 bp, Homo sapiens
  misc_feature: 1438 for SV(W|O) and mtDNA
ttacctagaaggttgcctggctggcccagctcggctcgaataaggaggcttagagctgtgcctaggactccagctcatgcgccgaataataggtatagtgttccaatgtctttgtggttt

SEQ ID NO: 57436 - DNA, 120 bp, Homo sapiens
  misc_feature: 1438 for SV(W|O) and mtDNA
tgttttctcgtgtgaatgagggttttatgttgttaatgtggtgggtgagtgagccccattgtgttgtggtaaatatgtagagggagtatagggctgtgactagtatgttgagtcctgtaa

SEQ ID NO: 57437 - DNA, 120 bp, Homo sapiens
  misc_feature: 1438 for SV(W|O) and mtDNA
ttaacatatctgaacacacaatagctaagacccaaactgggattagataccccactatgcttagccctaaacctcaacagttaaatcaacaaaactgctcgccagaacactacgagccac

SEQ ID NO: 57438 - DNA, 120 bp, Homo sapiens
  misc_feature: 1438 for SV(W|O) and mtDNA
tgtacgcgcttcagggccctgttcaactaagcactctactctcagtttactgctaaatccaccttcgacccttaagtttcataagggctatcgtagttttctggggtagaaaatgtagcc

SEQ ID NO: 57439 - DNA, 120 bp, Homo sapiens
  misc_feature: 1438 for SV(W|O) and mtDNA
tggagatgttggatggggtggggaggtcgatgaatgagtggttaattaattttattagggggttagttttgcgtattggggtcattggtgttcttgtagttgaaatacaacgatggtttt

SEQ ID NO: 57440 - DNA, 120 bp, Homo sapiens
  misc_feature: 1438 for SV(W|O) and mtDNA
tgctgtacttgcttgtaagcatggggagggggttttgatgtggattgggtttttatgtactacaggtggtcaagtatttatggtaccgtacaatattcatggtggctggcagtaatgtac

SEQ ID NO: 57441 - DNA, 120 bp, Homo sapiens
  misc_feature: 1438 for SV(W|O) and mtDNA
tgcgattaccgggctctgccatcttaacaaaccctgttcttgggtgggtgtgggtataatactaagttgagatgatatcatttacgggggaaggcgctttgtgaagtaggccttatttct

SEQ ID NO: 57442 - DNA, 120 bp, Homo sapiens
  misc_feature: 1438 for SV(W|O) and mtDNA
tcttgctcatcagttgatgatacgcccgagcagatgccaacacagcagccattcaagcaatcctatacaaccgtatcggcgatatcggtttcatcctcgccttagcatgatttatcctac

SEQ ID NO: 57443 - DNA, 120 bp, Homo sapiens
  misc_feature: 1438 for SV(W|O) and mtDNA
tcatcgaaaccgcaaacatatcatacacaaacgcctgagccctatctattactctcatcgctacctccctgacaagcgcctatagcactcgaataattcttctcaccctaacaggtcaac

SEQ ID NO: 57444 - DNA, 120 bp, Homo sapiens
  misc_feature: 1438 for SV(W|O) and mtDNA
gcaataaaactaggaatagccccctttcacttctgagtcccagaggttacccaaggcacccctctgacatccggcctgcttcttctcacatgacaaaaactagcccccatctcaatcata

SEQ ID NO: 57445 - DNA, 120 bp, Homo sapiens
  misc_feature: 1438 for SV(W|O) and mtDNA
ggagtcaataaagtgattggcttagtgggcgaaatattatgctttgttgtttggatatatggaggatggggattattgctaggatgaggatggatagtaatagggcaaggacgcctccta

SEQ ID NO: 57446 - DNA, 120 bp, Homo sapiens
  misc_feature: 1438 for SV(W|O) and mtDNA
ctagtttttgtcatgtgagaagaagcaggccggatgtcagaggggtgccttgggtaacctctgggactcagaagtgaaagggggctattcctagttttattgctatagccattatgatta

SEQ ID NO: 57447 - DNA, 120 bp, Homo sapiens
  misc_feature: 1438 for SV(W|O) and mtDNA
gttttcacacttctagtaagcctctacctgcacgacaacacataatgacccaccaatcacatgcctatcatatagtaaaacccagcccatgacccctaacaggggccctctcagccctcc

SEQ ID NO: 57448 - DNA, 120 bp, Homo sapiens
  misc_feature: 1438 for SV(W|O) and mtDNA
gtggtgctggagtttaagttgagtagtaggaatgcggtagtagttaggataatataaatagttaaattaagaatggttatgttagggttgtacggtagaactgctattattcatcctatg

SEQ ID NO: 57449 - DNA, 120 bp, Homo sapiens
  misc_feature: 1438 for SV(W|O) and mtDNA
attaaccttccctctacacttatcatcttcacaattctaattctactgactatcctagaaatcgctgtcgccttaatccaagcctacgttttcacacttctagtaagcctctacctgcac

SEQ ID NO: 57450 - DNA, 120 bp, Homo sapiens
  misc_feature: 1438 for SV(W|O) and mtDNA
ataaaactaggaatagccccctttcacttctgagtcccagaggttacccaaggcacccctctgacatccggcctgcttcttctcacatgacaaaaactagcccccatctcaatcatatac

SEQ ID NO: 57451 - DNA, 120 bp, Homo sapiens
  misc_feature: 1438 for SV(W|O) and mtDNA
gtaggagttgaagattagtccgccgtagtcggtgtactcgtaggttcagtaccattggtggccaattgatttgatggtaagggagggatcgttgacctcgtctgttatgtaaaggatgcg

SEQ ID NO: 57452 - DNA, 120 bp, Homo sapiens
  misc_feature: 1438 for SV(W|O) and mtDNA
ggttgatgccgattgtaactattatgagtcctagttgacttgaagtggagaaggctacgatttttttgatgtcattttgtgtaagggcgcagactgctgcgaacagagtggtgatagcgc

SEQ ID NO: 57453 - DNA, 120 bp, Homo sapiens
  misc_feature: 1438 for SV(W|O) and mtDNA
ggttcagtaccattggtggccaattgatttgatggtaagggagggatcgttgacctcgtctgttatgtaaaggatgcgtagggatgggagggcgatgaggactaggatgatggcgggcag

SEQ ID NO: 57454 - DNA, 120 bp, Homo sapiens
  misc_feature: 1438 for SV(W|O) and mtDNA
ctttgtagccttcatcagggtttgctgaagatggcggtatataggctgagcaagaggtggtgaggttgatcggggtttatcgattacagaacaggctcctctagagggatatgaagcacc

SEQ ID NO: 57455 - DNA, 120 bp, Homo sapiens
  misc_feature: 1438 for SV(W|O) and mtDNA
cactgatttcccctattctcaggctacaccctagaccaaacctacgccaaaatccatttcactatcatattcatcggcgtaaatctaactttcttcccacaacactttctcggcctatcc

SEQ ID NO: 57456 - DNA, 120 bp, Homo sapiens
  misc_feature: 1438 for SV(W|O) and mtDNA
gcggttaggcgtacggccagggctattggttgaatgagtaggctgatggtttcgataataactagtatggggataaggggtgtaggtgtgccttgtggtaagaagtgggctagggcattt

SEQ ID NO: 57457 - DNA, 120 bp, Homo sapiens
  misc_feature: 1438 for SV(W|O) and mtDNA
ccccaaccgaaatttttaatgcaggtttggtagtttaggacctgtgggtttgttaggtactgtttgcattaataaattaaagctccatagggtcttctcgtcttgctgtgttatgcccgc

SEQ ID NO: 57458 - DNA, 120 bp, Homo sapiens
  misc_feature: 1438 for SV(W|O) and mtDNA
ccacctactcatgcacctaattggaagcgccaccctagcaatatcaaccattaaccttccctctacacttatcatcttcacaattctaattctactgactatcctagaaatcgctgtcgc

SEQ ID NO: 57459 - DNA, 120 bp, Homo sapiens
  misc_feature: 1438 for SV(W|O) and mtDNA
gcatcggggtagtccgagtaacgtcggggcattccggataggccgagaaagtgttgtgggaagaaagttagatttacgccgatgaatatgatagtgaaatggattttggcgtaggtttgg

SEQ ID NO: 57460 - DNA, 120 bp, Homo sapiens
  misc_feature: 1438 for SV(W|O) and mtDNA
gcaagggaaagatgaaaaattataaccaagcataatatagcaaggactaacccctataccttctgcataatgaattaactagaaataactttgcaaggagagccaaagctaagacccccg

SEQ ID NO: 57461 - DNA, 120 bp, Homo sapiens
  misc_feature: 1438 for SV(W|O) and mtDNA
cgtttactcaatcctctgatcagggtgagcatcaaactcaaactacgccctgatcggcgcactgcgagcagtagcccaaacaatctcatatgaagtcaccctagccatcattctactatc

SEQ ID NO: 57462 - DNA, 120 bp, Homo sapiens
  misc_feature: 1438 for SV(W|O) and mtDNA
gaggacatagcctatgaaggctgttgctatagttgcaagcaggaggataatgccgatgtttcaggtttctgagtagagaaatgatccgtaatataggcctcgcccgatgtgtaggaagag

SEQ ID NO: 57463 - DNA, 120 bp, Homo sapiens
  misc_feature: 1438 for SV(W|O) and mtDNA
cagtgattataggctttcgctctaagattaaaaatgccctagcccacttcttaccacaaggcacacctacaccccttatccccatactagttattatcgaaaccatcagcctactcattc

SEQ ID NO: 57464 - DNA, 120 bp, Homo sapiens
  misc_feature: 1438 for SV(W|O) and mtDNA
cgcgatgtaacacgagaaagcacataccaaggccaccacacaccacctgtccaaaaaggccttcgatacgggataatcctatttattacctcagaagtttttttcttcgcaggatttttc

SEQ ID NO: 57465 - DNA, 120 bp, Homo sapiens
  misc_feature: 1438 for SV(W|O) and mtDNA
ccgatccgtccctaacaaactaggaggcgtccttgccctattactatccatcctcatcctagcaataatccccatcctccatatatccaaacaacaaagcataatatttcgcccactaag

SEQ ID NO: 57466 - DNA, 120 bp, Homo sapiens
  misc_feature: 1438 for SV(W|O) and mtDNA
ctgatttcccctattctcaggctacaccctagaccaaacctacgccaaaatccatttcactatcatattcatcggcgtaaatctaactttcttcccacaacactttctcggcctatccgg

SEQ ID NO: 57467 - DNA, 120 bp, Homo sapiens
  misc_feature: 1438 for SV(W|O) and mtDNA
ctcctcaattacccacataggatgaataatagcagttctaccgtacaaccctaacataaccattcttaatttaactatttatattatcctaactactaccgcattcctactactcaactt

SEQ ID NO: 57468 - DNA, 120 bp, Homo sapiens
  misc_feature: 1438 for SV(W|O) and mtDNA
cacttaggagatttcaacttaacttgaccgctctgagctaaacctagccccaaacccactccaccttactaccagacaaccttagccaaaccatttacccaaataaagtataggcgatag

SEQ ID NO: 57469 - DNA, 120 bp, Homo sapiens
  misc_feature: 1438 for SV(W|O) and mtDNA
agacacctgctaggtgtaaggagaagatggttaggtctacggaggctccagggtgggagtagttccctgctaagggagggtagactgttcaacctgttcctgctccggcctccactatag

SEQ ID NO: 57470 - DNA, 120 bp, Homo sapiens
  misc_feature: 1438 for SV(W|O) and mtDNA
acttaatatgactagcttacacaatagcttttatagtaaagatacctctttacggactccacttatgactccctaaagcccatgtcgaagcccccatcgctgggtcaatagtacttgccg

SEQ ID NO: 57471 - DNA, 120 bp, Homo sapiens
  misc_feature: 1438 for SV(W|O) and mtDNA
agtaataaacttcgccttaattttaataatcaacaccctcctagccttactactaataattattacattttgactaccacaactcaacggctacatagaaaaatccaccccttacgagtg

SEQ ID NO: 57472 - DNA, 120 bp, Homo sapiens
  misc_feature: 1438 for SV(W|O) and mtDNA
attctttatctgcctcttcctacacatcgggcgaggcctatattacggatcatttctctactcagaaacctgaaacatcggcattatcctcctgcttgcaactatagcaacagccttcat

SEQ ID NO: 57473 - DNA, 120 bp, Homo sapiens
  misc_feature: 1437 for SV(W|O) and mtDNA
gggtgttaaattttttactctctctacaaggttttttcctagtgtccaaagagctgttcctctttggactaacagttaaatttacaaggggatttagagggttctgtgggcaaatttaaa

SEQ ID NO: 57474 - DNA, 120 bp, Homo sapiens
  misc_feature: 1437 for SV(W|O) and mtDNA
attcacaaaaaacaatagcctcatcatccccaccatcatagccaccatcaccctccttaacctctacttctacctacgcctaatctactccacctcaatcacactactccccatatctaa

SEQ ID NO: 57475 - DNA, 120 bp, Homo sapiens
  misc_feature: 1437 for SV(W|O) and mtDNA
gaaccctcgtggagccattcatacaggtccctatttaaggaacaagtgattatgctacctttgcacggttagggtaccgcggccgttaaacatgtgtcactgggcaggcggtgcctctaa

SEQ ID NO: 57476 - DNA, 120 bp, Homo sapiens
  misc_feature: 1437 for SV(W|O) and mtDNA
cgcccgagcagatgccaacacagcagccattcaagcaatcctatacaaccgtatcggcgatatcggtttcatcctcgccttagcatgatttatcctacactccaactcatgagacccaca

SEQ ID NO: 57477 - DNA, 120 bp, Homo sapiens
  misc_feature: 1437 for SV(W|O) and mtDNA
ggatcatttctctactcagaaacctgaaacatcggcattatcctcctgcttgcaactatagcaacagccttcataggctatgtcctcccgtgaggccaaatatcattctgaggggccaca

SEQ ID NO: 57478 - DNA, 120 bp, Homo sapiens
  misc_feature: 1437 for SV(W|O) and mtDNA
cttgctcatcagttgatgatacgcccgagcagatgccaacacagcagccattcaagcaatcctatacaaccgtatcggcgatatcggtttcatcctcgccttagcatgatttatcctaca

SEQ ID NO: 57479 - DNA, 120 bp, Homo sapiens
  misc_feature: 1437 for SV(W|O) and mtDNA
tgtaacacgagaaagcacataccaaggccaccacacaccacctgtccaaaaaggccttcgatacgggataatcctatttattacctcagaagtttttttcttcgcaggatttttctgagc

SEQ ID NO: 57480 - DNA, 120 bp, Homo sapiens
  misc_feature: 1437 for SV(W|O) and mtDNA
tggttgatgccgattgtaactattatgagtcctagttgacttgaagtggagaaggctacgatttttttgatgtcattttgtgtaagggcgcagactgctgcgaacagagtggtgatagcg

SEQ ID NO: 57481 - DNA, 120 bp, Homo sapiens
  misc_feature: 1437 for SV(W|O) and mtDNA
tggactgtaaatctaaagacaggggttaggcctctttttaccagctccgaggtgattttcatattgaattgcaaattcgaagaagcagcttcaaacctgccggggcttctcccgcctttt

SEQ ID NO: 57482 - DNA, 120 bp, Homo sapiens
  misc_feature: 1437 for SV(W|O) and mtDNA
gtttactcaatcctctgatcagggtgagcatcaaactcaaactacgccctgatcggcgcactgcgagcagtagcccaaacaatctcatatgaagtcaccctagccatcattctactatca

SEQ ID NO: 57483 - DNA, 120 bp, Homo sapiens
  misc_feature: 1437 for SV(W|O) and mtDNA
tgagccaacaacttaatatgactagcttacacaatagcttttatagtaaagatacctctttacggactccacttatgactccctaaagcccatgtcgaagcccccatcgctgggtcaata

SEQ ID NO: 57484 - DNA, 120 bp, Homo sapiens
  misc_feature: 1437 for SV(W|O) and mtDNA
aatcacctgagctcaccatagtctaatagaaaacaaccgaaaccaaataattcaagcactgcttattacaattttactgggtctctattttaccctcctacaagcctcagagtacttcga

SEQ ID NO: 57485 - DNA, 120 bp, Homo sapiens
  misc_feature: 1437 for SV(W|O) and mtDNA
cccgatgtgtaggaagaggcagataaagaatattgaggcgccattggcgtgaaggtagcggatgattcagccataatttacgtctcgagtgatgtgggcgattgatgaaaaggcggttga

SEQ ID NO: 57486 - DNA, 120 bp, Homo sapiens
  misc_feature: 1437 for SV(W|O) and mtDNA
tagtagttaggataatataaatagttaaattaagaatggttatgttagggttgtacggtagaactgctattattcatcctatgtgggtaattgaggagtatgctaagattttgcgtagct

SEQ ID NO: 57487 - DNA, 120 bp, Homo sapiens
  misc_feature: 1437 for SV(W|O) and mtDNA
atggtttggctaaggttgtctggtagtaaggtggagtgggtttggggctaggtttagctcagagcggtcaagttaagttgaaatctcctaagtgtaagttgggtgctttgtgttaagcta

SEQ ID NO: 57488 - DNA, 120 bp, Homo sapiens
  misc_feature: 1437 for SV(W|O) and mtDNA
taccgcaagggaaagatgaaaaattataaccaagcataatatagcaaggactaacccctataccttctgcataatgaattaactagaaataactttgcaaggagagccaaagctaagacc

SEQ ID NO: 57489 - DNA, 120 bp, Homo sapiens
  misc_feature: 1437 for SV(W|O) and mtDNA
taattggaagcgccaccctagcaatatcaaccattaaccttccctctacacttatcatcttcacaattctaattctactgactatcctagaaatcgctgtcgccttaatccaagcctacg

SEQ ID NO: 57490 - DNA, 120 bp, Homo sapiens
  misc_feature: 1437 for SV(W|O) and mtDNA
cccgagcagatgccaacacagcagccattcaagcaatcctatacaaccgtatcggcgatatcggtttcatcctcgccttagcatgatttatcctacactccaactcatgagacccacaac

SEQ ID NO: 57491 - DNA, 120 bp, Homo sapiens
  misc_feature: 1437 for SV(W|O) and mtDNA
gttggttgatgccgattgtaactattatgagtcctagttgacttgaagtggagaaggctacgatttttttgatgtcattttgtgtaagggcgcagactgctgcgaacagagtggtgatag

SEQ ID NO: 57492 - DNA, 120 bp, Homo sapiens
  misc_feature: 1437 for SV(W|O) and mtDNA
acaaatgataaccatacacaacactaaaggacgaacctgatctcttatactagtatccttaatcatttttattgccacaactaacctcctcggactcctgcctcactcatttacaccaac

SEQ ID NO: 57493 - DNA, 120 bp, Homo sapiens
  misc_feature: 1437 for SV(W|O) and mtDNA
gtagttaggataatataaatagttaaattaagaatggttatgttagggttgtacggtagaactgctattattcatcctatgtgggtaattgaggagtatgctaagattttgcgtagctgg

SEQ ID NO: 57494 - DNA, 120 bp, Homo sapiens
  misc_feature: 1437 for SV(W|O) and mtDNA
caaatgataaccatacacaacactaaaggacgaacctgatctcttatactagtatccttaatcatttttattgccacaactaacctcctcggactcctgcctcactcatttacaccaacc

SEQ ID NO: 57495 - DNA, 120 bp, Homo sapiens
  misc_feature: 1437 for SV(W|O) and mtDNA
gggttagtatagcttagttaaactttcgtttattgctaaaggttaatcactgctgtttcccgtgggggtgtggctaggctaagcgttttgagctgcattgctgcgtgcttgatgcttgtc

SEQ ID NO: 57496 - DNA, 120 bp, Homo sapiens
  misc_feature: 1437 for SV(W|O) and mtDNA
cgaccaatgatatgaaaaaccatcgttgtatttcaactacaagaacaccaatgaccccaatacgcaaaactaaccccctaataaaattaattaaccactcattcatcgacctccccaccc

SEQ ID NO: 57497 - DNA, 120 bp, Homo sapiens
  misc_feature: 1437 for SV(W|O) and mtDNA
ggggtttaagctcctattatttactctatcaaagtaactcttttatcagacatatttcttaggtttgagggggaatgctggagattgtaatgggtatggagacatatcatataagtaatg

SEQ ID NO: 57498 - DNA, 120 bp, Homo sapiens
  misc_feature: 1437 for SV(W|O) and mtDNA
cgcaagggaaagatgaaaaattataaccaagcataatatagcaaggactaacccctataccttctgcataatgaattaactagaaataactttgcaaggagagccaaagctaagaccccc

SEQ ID NO: 57499 - DNA, 120 bp, Homo sapiens
  misc_feature: 1437 for SV(W|O) and mtDNA
gacacctgctaggtgtaaggagaagatggttaggtctacggaggctccagggtgggagtagttccctgctaagggagggtagactgttcaacctgttcctgctccggcctccactatagc

SEQ ID NO: 57500 - DNA, 120 bp, Homo sapiens
  misc_feature: 1437 for SV(W|O) and mtDNA
gaaaagggcatacaggactaggaagcagataaggaaaatgattatgagggcgtgatcatgaaaggtgataagctcttctatgataggggaagtagcgtcttgtagacctacttgcgctgc

SEQ ID NO: 57501 - DNA, 120 bp, Homo sapiens
  misc_feature: 1437 for SV(W|O) and mtDNA
gaattatatccttcttgctcatcagttgatgatacgcccgagcagatgccaacacagcagccattcaagcaatcctatacaaccgtatcggcgatatcggtttcatcctcgccttagcat

SEQ ID NO: 57502 - DNA, 120 bp, Homo sapiens
  misc_feature: 1437 for SV(W|O) and mtDNA
cttccaccccctagcagaaaatagcccactaatccaaactctaacactatgcttaggcgctatcaccactctgttcgcagcagtctgcgcccttacacaaaatgacatcaaaaaaatcgt

SEQ ID NO: 57503 - DNA, 120 bp, Homo sapiens
  misc_feature: 1437 for SV(W|O) and mtDNA
ctacatagaaaaatccaccccttacgagtgcggcttcgaccctatatcccccgcccgcgtccctttctccataaaattcttcttagtagctattaccttcttattatttgatctagaaat

SEQ ID NO: 57504 - DNA, 120 bp, Homo sapiens
  misc_feature: 1437 for SV(W|O) and mtDNA
caagctccatctgcctacgacaaacagacctaaaatcgctcattgcatactcttcaatcagccacatagccctcgtagtaacagccattctcatccaaaccccctgaagcttcaccggcg

SEQ ID NO: 57505 - DNA, 120 bp, Homo sapiens
  misc_feature: 1437 for SV(W|O) and mtDNA
ccgtccctaacaaactaggaggcgtccttgccctattactatccatcctcatcctagcaataatccccatcctccatatatccaaacaacaaagcataatatttcgcccactaagccaat

SEQ ID NO: 57506 - DNA, 120 bp, Homo sapiens
  misc_feature: 1437 for SV(W|O) and mtDNA
aggataatataaatagttaaattaagaatggttatgttagggttgtacggtagaactgctattattcatcctatgtgggtaattgaggagtatgctaagattttgcgtagctgggtttgg

SEQ ID NO: 57507 - DNA, 120 bp, Homo sapiens
  misc_feature: 1437 for SV(W|O) and mtDNA
aggagtcaataaagtgattggcttagtgggcgaaatattatgctttgttgtttggatatatggaggatggggattattgctaggatgaggatggatagtaatagggcaaggacgcctcct

SEQ ID NO: 57508 - DNA, 120 bp, Homo sapiens
  misc_feature: 1436 for SV(W|O) and mtDNA
tttgttgtgggtctcatgagttggagtgtaggataaatcatgctaaggcgaggatgaaaccgatatcgccgatacggttgtataggattgcttgaatggctgctgtgttggcatctgctc

SEQ ID NO: 57509 - DNA, 120 bp, Homo sapiens
  misc_feature: 1436 for SV(W|O) and mtDNA
ttccggataggccgagaaagtgttgtgggaagaaagttagatttacgccgatgaatatgatagtgaaatggattttggcgtaggtttggtctagggtgtagcctgagaataggggaaatc

SEQ ID NO: 57510 - DNA, 120 bp, Homo sapiens
  misc_feature: 1436 for SV(W|O) and mtDNA
tgttttgaggttagtttgattagtcattgttgggtggtgattagtcggttgttgatgagatatttggaggtggggatcaatagagggggaaatagaatgatcagtactgcggcgggtagg

SEQ ID NO: 57511 - DNA, 120 bp, Homo sapiens
  misc_feature: 1436 for SV(W|O) and mtDNA
tatcgggcccataccccgaaaatgttggttatacccttcccgtactaattaatcccctggcccaacccgtcatctactctaccatctttgcaggcacactcatcacagcgctaagctcgc

SEQ ID NO: 57512 - DNA, 120 bp, Homo sapiens
  misc_feature: 1436 for SV(W|O) and mtDNA
tagggtcgaagccgcactcgtaaggggtggatttttctatgtagccgttgagttgtggtagtcaaaatgtaataattattagtagtaaggctaggagggtgttgattattaaaattaagg

SEQ ID NO: 57513 - DNA, 120 bp, Homo sapiens
  misc_feature: 1436 for SV(W|O) and mtDNA
aggagttgaagattagtccgccgtagtcggtgtactcgtaggttcagtaccattggtggccaattgatttgatggtaagggagggatcgttgacctcgtctgttatgtaaaggatgcgta

SEQ ID NO: 57514 - DNA, 120 bp, Homo sapiens
  misc_feature: 1436 for SV(W|O) and mtDNA
attgtccggagagtatattgttgaagaggatagctattagaaggattatggatgcggttgcttgcgtgaggaaatacttgatggcagcttctgtggaacgagggtttatttttttggtta

SEQ ID NO: 57515 - DNA, 120 bp, Homo sapiens
  misc_feature: 1436 for SV(W|O) and mtDNA
taacacgagaaagcacataccaaggccaccacacaccacctgtccaaaaaggccttcgatacgggataatcctatttattacctcagaagtttttttcttcgcaggatttttctgagcct

SEQ ID NO: 57516 - DNA, 120 bp, Homo sapiens
  misc_feature: 1436 for SV(W|O) and mtDNA
gttgaagtgagaggtatggttttgagtagtcctcctatttttcgaatatcttgttcattgttaaggttgtggatgatggacccggagcacataaatagtatggctttgaagaaggcgtgg

SEQ ID NO: 57517 - DNA, 120 bp, Homo sapiens
  misc_feature: 1436 for SV(W|O) and mtDNA
gggcatacaggactaggaagcagataaggaaaatgattatgagggcgtgatcatgaaaggtgataagctcttctatgataggggaagtagcgtcttgtagacctacttgcgctgcatgtg

SEQ ID NO: 57518 - DNA, 120 bp, Homo sapiens
  misc_feature: 1436 for SV(W|O) and mtDNA
ggcccagctcggctcgaataaggaggcttagagctgtgcctaggactccagctcatgcgccgaataataggtatagtgttccaatgtctttgtggtttgtagagaatagtcaacggtcgg

SEQ ID NO: 57519 - DNA, 120 bp, Homo sapiens
  misc_feature: 1436 for SV(W|O) and mtDNA
ggcaccgcctgcccagtgacacatgtttaacggccgcggtaccctaaccgtgcaaaggtagcataatcacttgttccttaaatagggacctgtatgaatggctccacgagggttcagctg

SEQ ID NO: 57520 - DNA, 120 bp, Homo sapiens
  misc_feature: 1436 for SV(W|O) and mtDNA
accaacattttcggggtatgggcccgatagcttatttagctgaccttactttaggatggggtgtgataggtggcacggagaattttggattctcagggatgggttcgattctcatagtcc

SEQ ID NO: 57521 - DNA, 120 bp, Homo sapiens
  misc_feature: 1436 for SV(W|O) and mtDNA
gcctagccgtttactcaatcctctgatcagggtgagcatcaaactcaaactacgccctgatcggcgcactgcgagcagtagcccaaacaatctcatatgaagtcaccctagccatcattc

SEQ ID NO: 57522 - DNA, 120 bp, Homo sapiens
  misc_feature: 1436 for SV(W|O) and mtDNA
atataaatgcgtaggggttttagttaaatgtcctttgaagtatacttgaggagggtgacgggcggtgtgtacgcgcttcagggccctgttcaactaagcactctactctcagtttactgc

SEQ ID NO: 57523 - DNA, 120 bp, Homo sapiens
  misc_feature: 1436 for SV(W|O) and mtDNA
caatgatatgaaaaaccatcgttgtatttcaactacaagaacaccaatgaccccaatacgcaaaactaaccccctaataaaattaattaaccactcattcatcgacctccccaccccatc

SEQ ID NO: 57524 - DNA, 120 bp, Homo sapiens
  misc_feature: 1436 for SV(W|O) and mtDNA
accacatcatcgaaaccgcaaacatatcatacacaaacgcctgagccctatctattactctcatcgctacctccctgacaagcgcctatagcactcgaataattcttctcaccctaacag

SEQ ID NO: 57525 - DNA, 120 bp, Homo sapiens
  misc_feature: 1436 for SV(W|O) and mtDNA
ctccatctgcctacgacaaacagacctaaaatcgctcattgcatactcttcaatcagccacatagccctcgtagtaacagccattctcatccaaaccccctgaagcttcaccggcgcagt

SEQ ID NO: 57526 - DNA, 120 bp, Homo sapiens
  misc_feature: 1436 for SV(W|O) and mtDNA
ctagaaggttgcctggctggcccagctcggctcgaataaggaggcttagagctgtgcctaggactccagctcatgcgccgaataataggtatagtgttccaatgtctttgtggtttgtag

SEQ ID NO: 57527 - DNA, 120 bp, Homo sapiens
  misc_feature: 1436 for SV(W|O) and mtDNA
atggggagtagtgtgattgaggtggagtagattaggcgtaggtagaagtagaggttaaggagggtgatggtggctatgatggtggggatgatgaggctattgttttttgtgaattcttcg

SEQ ID NO: 57528 - DNA, 120 bp, Homo sapiens
  misc_feature: 1436 for SV(W|O) and mtDNA
cctctgatcagggtgagcatcaaactcaaactacgccctgatcggcgcactgcgagcagtagcccaaacaatctcatatgaagtcaccctagccatcattctactatcaacattactaat

SEQ ID NO: 57529 - DNA, 120 bp, Homo sapiens
  misc_feature: 1436 for SV(W|O) and mtDNA
agaggtatggttttgagtagtcctcctatttttcgaatatcttgttcattgttaaggttgtggatgatggacccggagcacataaatagtatggctttgaagaaggcgtgggtgcagatg

SEQ ID NO: 57530 - DNA, 120 bp, Homo sapiens
  misc_feature: 1436 for SV(W|O) and mtDNA
agctattaccttcttattatttgatctagaaattgccctccttttacccctaccatgagccctacaaacaactaacctgccactaatagttatgtcatccctcttattaatcatcatcct

SEQ ID NO: 57531 - DNA, 120 bp, Homo sapiens
  misc_feature: 1436 for SV(W|O) and mtDNA
actaaccatataccaatgatggcgcgatgtaacacgagaaagcacataccaaggccaccacacaccacctgtccaaaaaggccttcgatacgggataatcctatttattacctcagaagt

SEQ ID NO: 57532 - DNA, 120 bp, Homo sapiens
  misc_feature: 1436 for SV(W|O) and mtDNA
acgccacttatccagtgaaccactatcacgaaaaaaactctacctctctatactaatctccctacaaatctccttaattataacattcacagccacagaactaatcatattttatatctt

SEQ ID NO: 57533 - DNA, 120 bp, Homo sapiens
  misc_feature: 1435 for SV(W|O) and mtDNA
ttttagttgggtgatgaggaatagtgtaaggagtatgggggtaattatggtgggccatacggtagtatttagttggggcatttcactgtaaagaggtgttggttctcttaatctttaact

SEQ ID NO: 57534 - DNA, 120 bp, Homo sapiens
  misc_feature: 1435 for SV(W|O) and mtDNA
tctgaacacacaatagctaagacccaaactgggattagataccccactatgcttagccctaaacctcaacagttaaatcaacaaaactgctcgccagaacactacgagccacagcttaaa

SEQ ID NO: 57535 - DNA, 120 bp, Homo sapiens
  misc_feature: 1435 for SV(W|O) and mtDNA
ttaacttgaccgctctgagctaaacctagccccaaacccactccaccttactaccagacaaccttagccaaaccatttacccaaataaagtataggcgatagaaattgaaacctggcgca

SEQ ID NO: 57536 - DNA, 120 bp, Homo sapiens
  misc_feature: 1435 for SV(W|O) and mtDNA
accatagtctaatagaaaacaaccgaaaccaaataattcaagcactgcttattacaattttactgggtctctattttaccctcctacaagcctcagagtacttcgagtctcccttcacca

SEQ ID NO: 57537 - DNA, 120 bp, Homo sapiens
  misc_feature: 1435 for SV(W|O) and mtDNA
tggcccagctcggctcgaataaggaggcttagagctgtgcctaggactccagctcatgcgccgaataataggtatagtgttccaatgtctttgtggtttgtagagaatagtcaacggtcg

SEQ ID NO: 57538 - DNA, 120 bp, Homo sapiens
  misc_feature: 1435 for SV(W|O) and mtDNA
catgcacctaattggaagcgccaccctagcaatatcaaccattaaccttccctctacacttatcatcttcacaattctaattctactgactatcctagaaatcgctgtcgccttaatcca

SEQ ID NO: 57539 - DNA, 120 bp, Homo sapiens
  misc_feature: 1435 for SV(W|O) and mtDNA
tgctaatgctaggctgccaatggtgagggaggttgaagtgagaggtatggttttgagtagtcctcctatttttcgaatatcttgttcattgttaaggttgtggatgatggacccggagca

SEQ ID NO: 57540 - DNA, 120 bp, Homo sapiens
  misc_feature: 1435 for SV(W|O) and mtDNA
tgattataggctttcgctctaagattaaaaatgccctagcccacttcttaccacaaggcacacctacaccccttatccccatactagttattatcgaaaccatcagcctactcattcaac

SEQ ID NO: 57541 - DNA, 120 bp, Homo sapiens
  misc_feature: 1435 for SV(W|O) and mtDNA
tcgcccgatgtgtaggaagaggcagataaagaatattgaggcgccattggcgtgaaggtagcggatgattcagccataatttacgtctcgagtgatgtgggcgattgatgaaaaggcggt

SEQ ID NO: 57542 - DNA, 120 bp, Homo sapiens
  misc_feature: 1435 for SV(W|O) and mtDNA
tcaaaagggacaagcatcaagcacgcagcaatgcagctcaaaacgcttagcctagccacacccccacgggaaacagcagtgattaacctttagcaataaacgaaagtttaactaagctat

SEQ ID NO: 57543 - DNA, 120 bp, Homo sapiens
  misc_feature: 1435 for SV(W|O) and mtDNA
ctctgatcagggtgagcatcaaactcaaactacgccctgatcggcgcactgcgagcagtagcccaaacaatctcatatgaagtcaccctagccatcattctactatcaacattactaata

SEQ ID NO: 57544 - DNA, 120 bp, Homo sapiens
  misc_feature: 1435 for SV(W|O) and mtDNA
tataaccaacattttcggggtatgggcccgatagcttatttagctgaccttactttaggatggggtgtgataggtggcacggagaattttggattctcagggatgggttcgattctcata

SEQ ID NO: 57545 - DNA, 120 bp, Homo sapiens
  misc_feature: 1435 for SV(W|O) and mtDNA
gccaacaacttaatatgactagcttacacaatagcttttatagtaaagatacctctttacggactccacttatgactccctaaagcccatgtcgaagcccccatcgctgggtcaatagta

SEQ ID NO: 57546 - DNA, 120 bp, Homo sapiens
  misc_feature: 1435 for SV(W|O) and mtDNA
cttaagtttcataagggctatcgtagttttctggggtagaaaatgtagcccatttcttgccacctcatgggctacaccttgacctaacgtctttacgtgggtacttgcgcttactttgta

SEQ ID NO: 57547 - DNA, 120 bp, Homo sapiens
  misc_feature: 1435 for SV(W|O) and mtDNA
gtgagtgttaggaaaagggcatacaggactaggaagcagataaggaaaatgattatgagggcgtgatcatgaaaggtgataagctcttctatgataggggaagtagcgtcttgtagacct

SEQ ID NO: 57548 - DNA, 120 bp, Homo sapiens
  misc_feature: 1435 for SV(W|O) and mtDNA
cgagtaacgtcggggcattccggataggccgagaaagtgttgtgggaagaaagttagatttacgccgatgaatatgatagtgaaatggattttggcgtaggtttggtctagggtgtagcc

SEQ ID NO: 57549 - DNA, 120 bp, Homo sapiens
  misc_feature: 1435 for SV(W|O) and mtDNA
gcttctgtggaacgagggtttatttttttggttagaactggaataaaagctagcatgtttatttctaggcctactcaggtaaaaaatcagtgcgagcttagcgctgtgatgagtgtgcct

SEQ ID NO: 57550 - DNA, 120 bp, Homo sapiens
  misc_feature: 1435 for SV(W|O) and mtDNA
gcttcagggggtttggatgagaatggctgttactacgagggctatgtggctgattgaagagtatgcaatgagcgattttaggtctgtttgtcgtaggcagatggagcttgttataattat

SEQ ID NO: 57551 - DNA, 120 bp, Homo sapiens
  misc_feature: 1435 for SV(W|O) and mtDNA
cttaacttgaccgctctgagctaaacctagccccaaacccactccaccttactaccagacaaccttagccaaaccatttacccaaataaagtataggcgatagaaattgaaacctggcgc

SEQ ID NO: 57552 - DNA, 120 bp, Homo sapiens
  misc_feature: 1435 for SV(W|O) and mtDNA
gatcggggtttatcgattacagaacaggctcctctagagggatatgaagcaccgccaggtcctttgagttttaagctgtggctcgtagtgttctggcgagcagttttgttgatttaactg

SEQ ID NO: 57553 - DNA, 120 bp, Homo sapiens
  misc_feature: 1435 for SV(W|O) and mtDNA
caaactgggattagataccccactatgcttagccctaaacctcaacagttaaatcaacaaaactgctcgccagaacactacgagccacagcttaaaactcaaaggacctggcggtgcttc

SEQ ID NO: 57554 - DNA, 120 bp, Homo sapiens
  misc_feature: 1435 for SV(W|O) and mtDNA
ccaacattttcggggtatgggcccgatagcttatttagctgaccttactttaggatggggtgtgataggtggcacggagaattttggattctcagggatgggttcgattctcatagtcct

SEQ ID NO: 57555 - DNA, 120 bp, Homo sapiens
  misc_feature: 1435 for SV(W|O) and mtDNA
aatgcgtaggggttttagttaaatgtcctttgaagtatacttgaggagggtgacgggcggtgtgtacgcgcttcagggccctgttcaactaagcactctactctcagtttactgctaaat

SEQ ID NO: 57556 - DNA, 120 bp, Homo sapiens
  misc_feature: 1435 for SV(W|O) and mtDNA
atgaataatagcagttctaccgtacaaccctaacataaccattcttaatttaactatttatattatcctaactactaccgcattcctactactcaacttaaactccagcaccacgaccct

SEQ ID NO: 57557 - DNA, 120 bp, Homo sapiens
  misc_feature: 1434 for SV(W|O) and mtDNA
tttcgataataactagtatggggataaggggtgtaggtgtgccttgtggtaagaagtgggctagggcatttttaatcttagagcgaaagcctataatcactgcgcccgctcataagggga

SEQ ID NO: 57558 - DNA, 120 bp, Homo sapiens
  misc_feature: 1434 for SV(W|O) and mtDNA
ttgagatgggggctagtttttgtcatgtgagaagaagcaggccggatgtcagaggggtgccttgggtaacctctgggactcagaagtgaaagggggctattcctagttttattgctatag

SEQ ID NO: 57559 - DNA, 120 bp, Homo sapiens
  misc_feature: 1434 for SV(W|O) and mtDNA
aaacaaatgataaccatacacaacactaaaggacgaacctgatctcttatactagtatccttaatcatttttattgccacaactaacctcctcggactcctgcctcactcatttacacca

SEQ ID NO: 57560 - DNA, 120 bp, Homo sapiens
  misc_feature: 1434 for SV(W|O) and mtDNA
tacgcgcttcagggccctgttcaactaagcactctactctcagtttactgctaaatccaccttcgacccttaagtttcataagggctatcgtagttttctggggtagaaaatgtagccca

SEQ ID NO: 57561 - DNA, 120 bp, Homo sapiens
  misc_feature: 1434 for SV(W|O) and mtDNA
tggctttgaagaaggcgtgggtgcagatgtgcaggaatgctaggtgtggttggttgatgccgattgtaactattatgagtcctagttgacttgaagtggagaaggctacgatttttttga

SEQ ID NO: 57562 - DNA, 120 bp, Homo sapiens
  misc_feature: 1434 for SV(W|O) and mtDNA
aggttcagtaccattggtggccaattgatttgatggtaagggagggatcgttgacctcgtctgttatgtaaaggatgcgtagggatgggagggcgatgaggactaggatgatggcgggca

SEQ ID NO: 57563 - DNA, 120 bp, Homo sapiens
  misc_feature: 1434 for SV(W|O) and mtDNA
cattaaccttccctctacacttatcatcttcacaattctaattctactgactatcctagaaatcgctgtcgccttaatccaagcctacgttttcacacttctagtaagcctctacctgca

SEQ ID NO: 57564 - DNA, 120 bp, Homo sapiens
  misc_feature: 1434 for SV(W|O) and mtDNA
gcgcagtgattataggctttcgctctaagattaaaaatgccctagcccacttcttaccacaaggcacacctacaccccttatccccatactagttattatcgaaaccatcagcctactca

SEQ ID NO: 57565 - DNA, 120 bp, Homo sapiens
  misc_feature: 1434 for SV(W|O) and mtDNA
ctaggtgtaaggagaagatggttaggtctacggaggctccagggtgggagtagttccctgctaagggagggtagactgttcaacctgttcctgctccggcctccactatagcagatgcga

SEQ ID NO: 57566 - DNA, 120 bp, Homo sapiens
  misc_feature: 1434 for SV(W|O) and mtDNA
tcacctgagctcaccatagtctaatagaaaacaaccgaaaccaaataattcaagcactgcttattacaattttactgggtctctattttaccctcctacaagcctcagagtacttcgagt

SEQ ID NO: 57567 - DNA, 120 bp, Homo sapiens
  misc_feature: 1434 for SV(W|O) and mtDNA
tatttgggtaaatggtttggctaaggttgtctggtagtaaggtggagtgggtttggggctaggtttagctcagagcggtcaagttaagttgaaatctcctaagtgtaagttgggtgcttt

SEQ ID NO: 57568 - DNA, 120 bp, Homo sapiens
  misc_feature: 1434 for SV(W|O) and mtDNA
tatcgcctatactttatttgggtaaatggtttggctaaggttgtctggtagtaaggtggagtgggtttggggctaggtttagctcagagcggtcaagttaagttgaaatctcctaagtgt

SEQ ID NO: 57569 - DNA, 120 bp, Homo sapiens
  misc_feature: 1434 for SV(W|O) and mtDNA
taggataatataaatagttaaattaagaatggttatgttagggttgtacggtagaactgctattattcatcctatgtgggtaattgaggagtatgctaagattttgcgtagctgggtttg

SEQ ID NO: 57570 - DNA, 120 bp, Homo sapiens
  misc_feature: 1434 for SV(W|O) and mtDNA
tagacctacttgcgctgcatgtgccattaagatatataggatttagcctataatttaactttgacaaagttatgaaatggtttttctaatacctttttgaaaaagtcatggaggccatgg

SEQ ID NO: 57571 - DNA, 120 bp, Homo sapiens
  misc_feature: 1434 for SV(W|O) and mtDNA
taaatcaacaaaactgctcgccagaacactacgagccacagcttaaaactcaaaggacctggcggtgcttcatatccctctagaggagcctgttctgtaatcgataaaccccgatcaacc

SEQ ID NO: 57572 - DNA, 120 bp, Homo sapiens
  misc_feature: 1434 for SV(W|O) and mtDNA
gttggttgattgtagatattgggctgttaattgtcagttcagtgttttaatctgacgcaggcttatgcggaggagaatgttttcatgttacttatactaacattagttcttctatagggt

SEQ ID NO: 57573 - DNA, 120 bp, Homo sapiens
  misc_feature: 1434 for SV(W|O) and mtDNA
ccattatcgaagaattcacaaaaaacaatagcctcatcatccccaccatcatagccaccatcaccctccttaacctctacttctacctacgcctaatctactccacctcaatcacactac

SEQ ID NO: 57574 - DNA, 120 bp, Homo sapiens
  misc_feature: 1434 for SV(W|O) and mtDNA
catcgaaaccgcaaacatatcatacacaaacgcctgagccctatctattactctcatcgctacctccctgacaagcgcctatagcactcgaataattcttctcaccctaacaggtcaacc

SEQ ID NO: 57575 - DNA, 120 bp, Homo sapiens
  misc_feature: 1434 for SV(W|O) and mtDNA
ggctttgaagaaggcgtgggtgcagatgtgcaggaatgctaggtgtggttggttgatgccgattgtaactattatgagtcctagttgacttgaagtggagaaggctacgatttttttgat

SEQ ID NO: 57576 - DNA, 120 bp, Homo sapiens
  misc_feature: 1434 for SV(W|O) and mtDNA
cggctaggagtcaataaagtgattggcttagtgggcgaaatattatgctttgttgtttggatatatggaggatggggattattgctaggatgaggatggatagtaatagggcaaggacgc

SEQ ID NO: 57577 - DNA, 120 bp, Homo sapiens
  misc_feature: 1434 for SV(W|O) and mtDNA
caacttaatatgactagcttacacaatagcttttatagtaaagatacctctttacggactccacttatgactccctaaagcccatgtcgaagcccccatcgctgggtcaatagtacttgc

SEQ ID NO: 57578 - DNA, 120 bp, Homo sapiens
  misc_feature: 1434 for SV(W|O) and mtDNA
agcagttctaccgtacaaccctaacataaccattcttaatttaactatttatattatcctaactactaccgcattcctactactcaacttaaactccagcaccacgaccctactactatc

SEQ ID NO: 57579 - DNA, 120 bp, Homo sapiens
  misc_feature: 1434 for SV(W|O) and mtDNA
ctcctatttttcgaatatcttgttcattgttaaggttgtggatgatggacccggagcacataaatagtatggctttgaagaaggcgtgggtgcagatgtgcaggaatgctaggtgtggtt

SEQ ID NO: 57580 - DNA, 120 bp, Homo sapiens
  misc_feature: 1434 for SV(W|O) and mtDNA
cggaggttgggttctgctccgaggtcgccccaaccgaaatttttaatgcaggtttggtagtttaggacctgtgggtttgttaggtactgtttgcattaataaattaaagctccatagggt

SEQ ID NO: 57581 - DNA, 120 bp, Homo sapiens
  misc_feature: 1434 for SV(W|O) and mtDNA
cccgcctcttcacgggcaggtcaatttcactggttaaaagtaagagacagctgaaccctcgtggagccattcatacaggtccctatttaaggaacaagtgattatgctacctttgcacgg

SEQ ID NO: 57582 - DNA, 120 bp, Homo sapiens
  misc_feature: 1434 for SV(W|O) and mtDNA
caaccgaaaccaaataattcaagcactgcttattacaattttactgggtctctattttaccctcctacaagcctcagagtacttcgagtctcccttcaccatttccgacggcatctacgg

SEQ ID NO: 57583 - DNA, 120 bp, Homo sapiens
  misc_feature: 1434 for SV(W|O) and mtDNA
cattgtccggagagtatattgttgaagaggatagctattagaaggattatggatgcggttgcttgcgtgaggaaatacttgatggcagcttctgtggaacgagggtttatttttttggtt

SEQ ID NO: 57584 - DNA, 120 bp, Homo sapiens
  misc_feature: 1434 for SV(W|O) and mtDNA
cattggactgtaaatctaaagacaggggttaggcctctttttaccagctccgaggtgattttcatattgaattgcaaattcgaagaagcagcttcaaacctgccggggcttctcccgcct

SEQ ID NO: 57585 - DNA, 120 bp, Homo sapiens
  misc_feature: 1434 for SV(W|O) and mtDNA
catcggggtagtccgagtaacgtcggggcattccggataggccgagaaagtgttgtgggaagaaagttagatttacgccgatgaatatgatagtgaaatggattttggcgtaggtttggt

SEQ ID NO: 57586 - DNA, 120 bp, Homo sapiens
  misc_feature: 1434 for SV(W|O) and mtDNA
catcacctctagcatcaccagtattagaggcaccgcctgcccagtgacacatgtttaacggccgcggtaccctaaccgtgcaaaggtagcataatcacttgttccttaaatagggacctg

SEQ ID NO: 57587 - DNA, 120 bp, Homo sapiens
  misc_feature: 1434 for SV(W|O) and mtDNA
cagtcaaagcgaactactatactcaattgatccaataacttgaccaacggaacaagttaccctagggataacagcgcaatcctattctagagtccatatcaacaatagggtttacgacct

SEQ ID NO: 57588 - DNA, 120 bp, Homo sapiens
  misc_feature: 1434 for SV(W|O) and mtDNA
atttgggtaaatggtttggctaaggttgtctggtagtaaggtggagtgggtttggggctaggtttagctcagagcggtcaagttaagttgaaatctcctaagtgtaagttgggtgctttg

SEQ ID NO: 57589 - DNA, 120 bp, Homo sapiens
  misc_feature: 1434 for SV(W|O) and mtDNA
atggttatcatttgttttgaggttagtttgattagtcattgttgggtggtgattagtcggttgttgatgagatatttggaggtggggatcaatagagggggaaatagaatgatcagtact

SEQ ID NO: 57590 - DNA, 120 bp, Homo sapiens
  misc_feature: 1434 for SV(W|O) and mtDNA
atgggctacattttctaccccagaaaactacgatagcccttatgaaacttaagggtcgaaggtggatttagcagtaaactgagagtagagtgcttagttgaacagggccctgaagcgcgt

SEQ ID NO: 57591 - DNA, 120 bp, Homo sapiens
  misc_feature: 1434 for SV(W|O) and mtDNA
atgagggtgttttctcgtgtgaatgagggttttatgttgttaatgtggtgggtgagtgagccccattgtgttgtggtaaatatgtagagggagtatagggctgtgactagtatgttgagt

SEQ ID NO: 57592 - DNA, 120 bp, Homo sapiens
  misc_feature: 1434 for SV(W|O) and mtDNA
atctataaacctagccatggccatccccttatgagcgggcgcagtgattataggctttcgctctaagattaaaaatgccctagcccacttcttaccacaaggcacacctacaccccttat

SEQ ID NO: 57593 - DNA, 120 bp, Homo sapiens
  misc_feature: 1434 for SV(W|O) and mtDNA
agtcaataaagtgattggcttagtgggcgaaatattatgctttgttgtttggatatatggaggatggggattattgctaggatgaggatggatagtaatagggcaaggacgcctcctagt

SEQ ID NO: 57594 - DNA, 120 bp, Homo sapiens
  misc_feature: 1433 for SV(W|O) and mtDNA
ccaaaaattttggtgcaactccaaataaaagtaataaccatgcacactactataaccaccctaaccctgacttccctaattccccccatccttaccaccctcgttaaccctaacaaaaaa

SEQ ID NO: 57595 - DNA, 120 bp, Homo sapiens
  misc_feature: 1433 for SV(W|O) and mtDNA
ttttattgctatagccattatgattattaatgatgagtactgattggtagtattggttatggttcattgtccggagagtatattgttgaagaggatagctattagaaggattatggatgc

SEQ ID NO: 57596 - DNA, 120 bp, Homo sapiens
  misc_feature: 1433 for SV(W|O) and mtDNA
gaatggctgttactacgagggctatgtggctgattgaagagtatgcaatgagcgattttaggtctgtttgtcgtaggcagatggagcttgttataattatgcctcatagggatagtacaa

SEQ ID NO: 57597 - DNA, 120 bp, Homo sapiens
  misc_feature: 1433 for SV(W|O) and mtDNA
ttaggcctactatgggtgttaaattttttactctctctacaaggttttttcctagtgtccaaagagctgttcctctttggactaacagttaaatttacaaggggatttagagggttctgt

SEQ ID NO: 57598 - DNA, 120 bp, Homo sapiens
  misc_feature: 1433 for SV(W|O) and mtDNA
tgtgaaaacgtaggcttggattaaggcgacagcgatttctaggatagtcagtagaattagaattgtgaagatgataagtgtagagggaaggttaatggttgatattgctagggtggcgct

SEQ ID NO: 57599 - DNA, 120 bp, Homo sapiens
  misc_feature: 1433 for SV(W|O) and mtDNA
aaaactaggaatagccccctttcacttctgagtcccagaggttacccaaggcacccctctgacatccggcctgcttcttctcacatgacaaaaactagcccccatctcaatcatatacca

SEQ ID NO: 57600 - DNA, 120 bp, Homo sapiens
  misc_feature: 1433 for SV(W|O) and mtDNA
tgcttttaggcctactatgggtgttaaattttttactctctctacaaggttttttcctagtgtccaaagagctgttcctctttggactaacagttaaatttacaaggggatttagagggt

SEQ ID NO: 57601 - DNA, 120 bp, Homo sapiens
  misc_feature: 1433 for SV(W|O) and mtDNA
agctccatctgcctacgacaaacagacctaaaatcgctcattgcatactcttcaatcagccacatagccctcgtagtaacagccattctcatccaaaccccctgaagcttcaccggcgca

SEQ ID NO: 57602 - DNA, 120 bp, Homo sapiens
  misc_feature: 1433 for SV(W|O) and mtDNA
tgcacccacgccttcttcaaagccatactatttatgtgctccgggtccatcatccacaaccttaacaatgaacaagatattcgaaaaataggaggactactcaaaaccatacctctcact

SEQ ID NO: 57603 - DNA, 120 bp, Homo sapiens
  misc_feature: 1433 for SV(W|O) and mtDNA
tcatgcacctaattggaagcgccaccctagcaatatcaaccattaaccttccctctacacttatcatcttcacaattctaattctactgactatcctagaaatcgctgtcgccttaatcc

SEQ ID NO: 57604 - DNA, 120 bp, Homo sapiens
  misc_feature: 1433 for SV(W|O) and mtDNA
tcactgatttcccctattctcaggctacaccctagaccaaacctacgccaaaatccatttcactatcatattcatcggcgtaaatctaactttcttcccacaacactttctcggcctatc

SEQ ID NO: 57605 - DNA, 120 bp, Homo sapiens
  misc_feature: 1433 for SV(W|O) and mtDNA
tcaccatagtctaatagaaaacaaccgaaaccaaataattcaagcactgcttattacaattttactgggtctctattttaccctcctacaagcctcagagtacttcgagtctcccttcac

SEQ ID NO: 57606 - DNA, 120 bp, Homo sapiens
  misc_feature: 1433 for SV(W|O) and mtDNA
tcaatcacctgagctcaccatagtctaatagaaaacaaccgaaaccaaataattcaagcactgcttattacaattttactgggtctctattttaccctcctacaagcctcagagtacttc

SEQ ID NO: 57607 - DNA, 120 bp, Homo sapiens
  misc_feature: 1433 for SV(W|O) and mtDNA
tagtttttgtcatgtgagaagaagcaggccggatgtcagaggggtgccttgggtaacctctgggactcagaagtgaaagggggctattcctagttttattgctatagccattatgattat

SEQ ID NO: 57608 - DNA, 120 bp, Homo sapiens
  misc_feature: 1433 for SV(W|O) and mtDNA
tagtatagcttagttaaactttcgtttattgctaaaggttaatcactgctgtttcccgtgggggtgtggctaggctaagcgttttgagctgcattgctgcgtgcttgatgcttgtccctt

SEQ ID NO: 57609 - DNA, 120 bp, Homo sapiens
  misc_feature: 1433 for SV(W|O) and mtDNA
gttagttgtggcaataaaaatgattaaggatactagtataagagatcaggttcgtcctttagtgttgtgtatggttatcatttgttttgaggttagtttgattagtcattgttgggtggt

SEQ ID NO: 57610 - DNA, 120 bp, Homo sapiens
  misc_feature: 1433 for SV(W|O) and mtDNA
gattataggctttcgctctaagattaaaaatgccctagcccacttcttaccacaaggcacacctacaccccttatccccatactagttattatcgaaaccatcagcctactcattcaacc

SEQ ID NO: 57611 - DNA, 120 bp, Homo sapiens
  misc_feature: 1433 for SV(W|O) and mtDNA
caacaaaactgctcgccagaacactacgagccacagcttaaaactcaaaggacctggcggtgcttcatatccctctagaggagcctgttctgtaatcgataaaccccgatcaacctcacc

SEQ ID NO: 57612 - DNA, 120 bp, Homo sapiens
  misc_feature: 1433 for SV(W|O) and mtDNA
gatacgcccgagcagatgccaacacagcagccattcaagcaatcctatacaaccgtatcggcgatatcggtttcatcctcgccttagcatgatttatcctacactccaactcatgagacc

SEQ ID NO: 57613 - DNA, 120 bp, Homo sapiens
  misc_feature: 1433 for SV(W|O) and mtDNA
aatgatatgaaaaaccatcgttgtatttcaactacaagaacaccaatgaccccaatacgcaaaactaaccccctaataaaattaattaaccactcattcatcgacctccccaccccatcc

SEQ ID NO: 57614 - DNA, 120 bp, Homo sapiens
  misc_feature: 1433 for SV(W|O) and mtDNA
ctataaacctagccatggccatccccttatgagcgggcgcagtgattataggctttcgctctaagattaaaaatgccctagcccacttcttaccacaaggcacacctacaccccttatcc

SEQ ID NO: 57615 - DNA, 120 bp, Homo sapiens
  misc_feature: 1433 for SV(W|O) and mtDNA
cctacgttttcacacttctagtaagcctctacctgcacgacaacacataatgacccaccaatcacatgcctatcatatagtaaaacccagcccatgacccctaacaggggccctctcagc

SEQ ID NO: 57616 - DNA, 120 bp, Homo sapiens
  misc_feature: 1433 for SV(W|O) and mtDNA
ctgactagttcccctaataatcggtgcccccgatatggcgtttccccgcataaacaacataagcttctgactcttacctccctctctcctactcctgctcgcatctgctatagtggaggc

SEQ ID NO: 57617 - DNA, 120 bp, Homo sapiens
  misc_feature: 1433 for SV(W|O) and mtDNA
gatagttgagggttgattgctgtacttgcttgtaagcatggggagggggttttgatgtggattgggtttttatgtactacaggtggtcaagtatttatggtaccgtacaatattcatggt

SEQ ID NO: 57618 - DNA, 120 bp, Homo sapiens
  misc_feature: 1433 for SV(W|O) and mtDNA
cttttaggcctactatgggtgttaaattttttactctctctacaaggttttttcctagtgtccaaagagctgttcctctttggactaacagttaaatttacaaggggatttagagggttc

SEQ ID NO: 57619 - DNA, 120 bp, Homo sapiens
  misc_feature: 1433 for SV(W|O) and mtDNA
ctacacaattctccgatccgtccctaacaaactaggaggcgtccttgccctattactatccatcctcatcctagcaataatccccatcctccatatatccaaacaacaaagcataatatt

SEQ ID NO: 57620 - DNA, 120 bp, Homo sapiens
  misc_feature: 1433 for SV(W|O) and mtDNA
agtgtgaaaacgtaggcttggattaaggcgacagcgatttctaggatagtcagtagaattagaattgtgaagatgataagtgtagagggaaggttaatggttgatattgctagggtggcg

SEQ ID NO: 57621 - DNA, 120 bp, Homo sapiens
  misc_feature: 1433 for SV(W|O) and mtDNA
aggacatagcctatgaaggctgttgctatagttgcaagcaggaggataatgccgatgtttcaggtttctgagtagagaaatgatccgtaatataggcctcgcccgatgtgtaggaagagg

SEQ ID NO: 57622 - DNA, 120 bp, Homo sapiens
  misc_feature: 1433 for SV(W|O) and mtDNA
cctacacaattctccgatccgtccctaacaaactaggaggcgtccttgccctattactatccatcctcatcctagcaataatccccatcctccatatatccaaacaacaaagcataatat

SEQ ID NO: 57623 - DNA, 120 bp, Homo sapiens
  misc_feature: 1433 for SV(W|O) and mtDNA
ccaggcaaccttctaggtaacgaccacatctacaacgttatcgtcacagcccatgcatttgtaataatcttcttcatagtaatacccatcataatcggaggctttggcaactgactagtt

SEQ ID NO: 57624 - DNA, 120 bp, Homo sapiens
  misc_feature: 1433 for SV(W|O) and mtDNA
caaccttctaggtaacgaccacatctacaacgttatcgtcacagcccatgcatttgtaataatcttcttcatagtaatacccatcataatcggaggctttggcaactgactagttcccct

SEQ ID NO: 57625 - DNA, 120 bp, Homo sapiens
  misc_feature: 1433 for SV(W|O) and mtDNA
agtgaagcattggactgtaaatctaaagacaggggttaggcctctttttaccagctccgaggtgattttcatattgaattgcaaattcgaagaagcagcttcaaacctgccggggcttct

SEQ ID NO: 57626 - DNA, 120 bp, Homo sapiens
  misc_feature: 1433 for SV(W|O) and mtDNA
agcctagccgtttactcaatcctctgatcagggtgagcatcaaactcaaactacgccctgatcggcgcactgcgagcagtagcccaaacaatctcatatgaagtcaccctagccatcatt

SEQ ID NO: 57627 - DNA, 120 bp, Homo sapiens
  misc_feature: 1433 for SV(W|O) and mtDNA
aatcttcctaggaacaacatatgacgcactctcccctgaactctacacaacatattttgtcaccaagaccctacttctaacctccctgttcttatgaattcgaacagcatacccccgatt

SEQ ID NO: 57628 - DNA, 120 bp, Homo sapiens
  misc_feature: 1432 for SV(W|O) and mtDNA
cccaaaaattttggtgcaactccaaataaaagtaataaccatgcacactactataaccaccctaaccctgacttccctaattccccccatccttaccaccctcgttaaccctaacaaaaa

SEQ ID NO: 57629 - DNA, 120 bp, Homo sapiens
  misc_feature: 1432 for SV(W|O) and mtDNA
tagcttacacaatagcttttatagtaaagatacctctttacggactccacttatgactccctaaagcccatgtcgaagcccccatcgctgggtcaatagtacttgccgcagtactcttaa

SEQ ID NO: 57630 - DNA, 120 bp, Homo sapiens
  misc_feature: 1432 for SV(W|O) and mtDNA
aatgatatttcctattcgcctacacaattctccgatccgtccctaacaaactaggaggcgtccttgccctattactatccatcctcatcctagcaataatccccatcctccatatatcca

SEQ ID NO: 57631 - DNA, 120 bp, Homo sapiens
  misc_feature: 1432 for SV(W|O) and mtDNA
tgcaagcaggaggataatgccgatgtttcaggtttctgagtagagaaatgatccgtaatataggcctcgcccgatgtgtaggaagaggcagataaagaatattgaggcgccattggcgtg

SEQ ID NO: 57632 - DNA, 120 bp, Homo sapiens
  misc_feature: 1432 for SV(W|O) and mtDNA
caccagtcaaagcgaactactatactcaattgatccaataacttgaccaacggaacaagttaccctagggataacagcgcaatcctattctagagtccatatcaacaatagggtttacga

SEQ ID NO: 57633 - DNA, 120 bp, Homo sapiens
  misc_feature: 1432 for SV(W|O) and mtDNA
tcggtgtactcgtaggttcagtaccattggtggccaattgatttgatggtaagggagggatcgttgacctcgtctgttatgtaaaggatgcgtagggatgggagggcgatgaggactagg

SEQ ID NO: 57634 - DNA, 120 bp, Homo sapiens
  misc_feature: 1432 for SV(W|O) and mtDNA
gagatttcaacttaacttgaccgctctgagctaaacctagccccaaacccactccaccttactaccagacaaccttagccaaaccatttacccaaataaagtataggcgatagaaattga

SEQ ID NO: 57635 - DNA, 120 bp, Homo sapiens
  misc_feature: 1432 for SV(W|O) and mtDNA
tataaatgcgtaggggttttagttaaatgtcctttgaagtatacttgaggagggtgacgggcggtgtgtacgcgcttcagggccctgttcaactaagcactctactctcagtttactgct

SEQ ID NO: 57636 - DNA, 120 bp, Homo sapiens
  misc_feature: 1432 for SV(W|O) and mtDNA
tagttgagggttgattgctgtacttgcttgtaagcatggggagggggttttgatgtggattgggtttttatgtactacaggtggtcaagtatttatggtaccgtacaatattcatggtgg

SEQ ID NO: 57637 - DNA, 120 bp, Homo sapiens
  misc_feature: 1432 for SV(W|O) and mtDNA
aaaagggacaagcatcaagcacgcagcaatgcagctcaaaacgcttagcctagccacacccccacgggaaacagcagtgattaacctttagcaataaacgaaagtttaactaagctatac

SEQ ID NO: 57638 - DNA, 120 bp, Homo sapiens
  misc_feature: 1432 for SV(W|O) and mtDNA
ggtagtccgagtaacgtcggggcattccggataggccgagaaagtgttgtgggaagaaagttagatttacgccgatgaatatgatagtgaaatggattttggcgtaggtttggtctaggg

SEQ ID NO: 57639 - DNA, 120 bp, Homo sapiens
  misc_feature: 1432 for SV(W|O) and mtDNA
aacatggctttctcaacttttaaaggataacagctatccattggtcttaggccccaaaaattttggtgcaactccaaataaaagtaataaccatgcacactactataaccaccctaaccc

SEQ ID NO: 57640 - DNA, 120 bp, Homo sapiens
  misc_feature: 1432 for SV(W|O) and mtDNA
ggcgtacggccagggctattggttgaatgagtaggctgatggtttcgataataactagtatggggataaggggtgtaggtgtgccttgtggtaagaagtgggctagggcatttttaatct

SEQ ID NO: 57641 - DNA, 120 bp, Homo sapiens
  misc_feature: 1432 for SV(W|O) and mtDNA
gctcaccatagtctaatagaaaacaaccgaaaccaaataattcaagcactgcttattacaattttactgggtctctattttaccctcctacaagcctcagagtacttcgagtctcccttc

SEQ ID NO: 57642 - DNA, 120 bp, Homo sapiens
  misc_feature: 1432 for SV(W|O) and mtDNA
gctagtttttgtcatgtgagaagaagcaggccggatgtcagaggggtgccttgggtaacctctgggactcagaagtgaaagggggctattcctagttttattgctatagccattatgatt

SEQ ID NO: 57643 - DNA, 120 bp, Homo sapiens
  misc_feature: 1432 for SV(W|O) and mtDNA
cttaatatgactagcttacacaatagcttttatagtaaagatacctctttacggactccacttatgactccctaaagcccatgtcgaagcccccatcgctgggtcaatagtacttgccgc

SEQ ID NO: 57644 - DNA, 120 bp, Homo sapiens
  misc_feature: 1432 for SV(W|O) and mtDNA
aagctccatctgcctacgacaaacagacctaaaatcgctcattgcatactcttcaatcagccacatagccctcgtagtaacagccattctcatccaaaccccctgaagcttcaccggcgc

SEQ ID NO: 57645 - DNA, 120 bp, Homo sapiens
  misc_feature: 1432 for SV(W|O) and mtDNA
gccgatacggttgtataggattgcttgaatggctgctgtgttggcatctgctcgggcgtatcatcaactgatgagcaagaaggatataattcctacgccctctcagccgatgaacagttg

SEQ ID NO: 57646 - DNA, 120 bp, Homo sapiens
  misc_feature: 1432 for SV(W|O) and mtDNA
agaattcacaaaaaacaatagcctcatcatccccaccatcatagccaccatcaccctccttaacctctacttctacctacgcctaatctactccacctcaatcacactactccccatatc

SEQ ID NO: 57647 - DNA, 120 bp, Homo sapiens
  misc_feature: 1432 for SV(W|O) and mtDNA
gaagtgagaggtatggttttgagtagtcctcctatttttcgaatatcttgttcattgttaaggttgtggatgatggacccggagcacataaatagtatggctttgaagaaggcgtgggtg

SEQ ID NO: 57648 - DNA, 120 bp, Homo sapiens
  misc_feature: 1432 for SV(W|O) and mtDNA
ctatcgggcccataccccgaaaatgttggttatacccttcccgtactaattaatcccctggcccaacccgtcatctactctaccatctttgcaggcacactcatcacagcgctaagctcg

SEQ ID NO: 57649 - DNA, 120 bp, Homo sapiens
  misc_feature: 1432 for SV(W|O) and mtDNA
acttaacttgaccgctctgagctaaacctagccccaaacccactccaccttactaccagacaaccttagccaaaccatttacccaaataaagtataggcgatagaaattgaaacctggcg

SEQ ID NO: 57650 - DNA, 120 bp, Homo sapiens
  misc_feature: 1432 for SV(W|O) and mtDNA
cgaggatgaaaccgatatcgccgatacggttgtataggattgcttgaatggctgctgtgttggcatctgctcgggcgtatcatcaactgatgagcaagaaggatataattcctacgccct

SEQ ID NO: 57651 - DNA, 120 bp, Homo sapiens
  misc_feature: 1432 for SV(W|O) and mtDNA
cctcctatttttcgaatatcttgttcattgttaaggttgtggatgatggacccggagcacataaatagtatggctttgaagaaggcgtgggtgcagatgtgcaggaatgctaggtgtggt

SEQ ID NO: 57652 - DNA, 120 bp, Homo sapiens
  misc_feature: 1432 for SV(W|O) and mtDNA
accgtacaaccctaacataaccattcttaatttaactatttatattatcctaactactaccgcattcctactactcaacttaaactccagcaccacgaccctactactatctcgcacctg

SEQ ID NO: 57653 - DNA, 120 bp, Homo sapiens
  misc_feature: 1432 for SV(W|O) and mtDNA
atagttgagggttgattgctgtacttgcttgtaagcatggggagggggttttgatgtggattgggtttttatgtactacaggtggtcaagtatttatggtaccgtacaatattcatggtg

SEQ ID NO: 57654 - DNA, 120 bp, Homo sapiens
  misc_feature: 1432 for SV(W|O) and mtDNA
acatggctttctcaacttttaaaggataacagctatccattggtcttaggccccaaaaattttggtgcaactccaaataaaagtaataaccatgcacactactataaccaccctaaccct

SEQ ID NO: 57655 - DNA, 120 bp, Homo sapiens
  misc_feature: 1431 for SV(W|O) and mtDNA
ttttatgcgattaccgggctctgccatcttaacaaaccctgttcttgggtgggtgtgggtataatactaagttgagatgatatcatttacgggggaaggcgctttgtgaagtaggcctta

SEQ ID NO: 57656 - DNA, 120 bp, Homo sapiens
  misc_feature: 1431 for SV(W|O) and mtDNA
gccccaaaaattttggtgcaactccaaataaaagtaataaccatgcacactactataaccaccctaaccctgacttccctaattccccccatccttaccaccctcgttaaccctaacaaa

SEQ ID NO: 57657 - DNA, 120 bp, Homo sapiens
  misc_feature: 1431 for SV(W|O) and mtDNA
atgtagcttacctcctcaaagcaatacactgaaaatgtttagacgggctcacatcaccccataaacaaataggtttggtcctagcctttctattagctcttagtaagattacacatgcaa

SEQ ID NO: 57658 - DNA, 120 bp, Homo sapiens
  misc_feature: 1431 for SV(W|O) and mtDNA
ttctactatcaacattactaataagtggctcctttaacctctccacccttatcacaacacaagaacacctctgattactcctgccatcatgacccttggccataatatgatttatctcca

SEQ ID NO: 57659 - DNA, 120 bp, Homo sapiens
  misc_feature: 1431 for SV(W|O) and mtDNA
aagaccacatcatcgaaaccgcaaacatatcatacacaaacgcctgagccctatctattactctcatcgctacctccctgacaagcgcctatagcactcgaataattcttctcaccctaa

SEQ ID NO: 57660 - DNA, 120 bp, Homo sapiens
  misc_feature: 1431 for SV(W|O) and mtDNA
tgtgagtgttaggaaaagggcatacaggactaggaagcagataaggaaaatgattatgagggcgtgatcatgaaaggtgataagctcttctatgataggggaagtagcgtcttgtagacc

SEQ ID NO: 57661 - DNA, 120 bp, Homo sapiens
  misc_feature: 1431 for SV(W|O) and mtDNA
ctcaccatagtctaatagaaaacaaccgaaaccaaataattcaagcactgcttattacaattttactgggtctctattttaccctcctacaagcctcagagtacttcgagtctcccttca

SEQ ID NO: 57662 - DNA, 120 bp, Homo sapiens
  misc_feature: 1431 for SV(W|O) and mtDNA
aaactgggattagataccccactatgcttagccctaaacctcaacagttaaatcaacaaaactgctcgccagaacactacgagccacagcttaaaactcaaaggacctggcggtgcttca

SEQ ID NO: 57663 - DNA, 120 bp, Homo sapiens
  misc_feature: 1431 for SV(W|O) and mtDNA
tctagtaagcctctacctgcacgacaacacataatgacccaccaatcacatgcctatcatatagtaaaacccagcccatgacccctaacaggggccctctcagccctcctaatgacctcc

SEQ ID NO: 57664 - DNA, 120 bp, Homo sapiens
  misc_feature: 1431 for SV(W|O) and mtDNA
atcatctgtaggctcattcatttctctaacagcagtaatattaataattttcatgatttgagaagccttcgcttcaaagcgaaaagtcctaatagtagaagaaccctccataaacctgga

SEQ ID NO: 57665 - DNA, 120 bp, Homo sapiens
  misc_feature: 1431 for SV(W|O) and mtDNA
ctccttattcgagccgagctgggccagccaggcaaccttctaggtaacgaccacatctacaacgttatcgtcacagcccatgcatttgtaataatcttcttcatagtaatacccatcata

SEQ ID NO: 57666 - DNA, 120 bp, Homo sapiens
  misc_feature: 1431 for SV(W|O) and mtDNA
actgggattagataccccactatgcttagccctaaacctcaacagttaaatcaacaaaactgctcgccagaacactacgagccacagcttaaaactcaaaggacctggcggtgcttcata

SEQ ID NO: 57667 - DNA, 120 bp, Homo sapiens
  misc_feature: 1431 for SV(W|O) and mtDNA
ctagcttacacaatagcttttatagtaaagatacctctttacggactccacttatgactccctaaagcccatgtcgaagcccccatcgctgggtcaatagtacttgccgcagtactctta

SEQ ID NO: 57668 - DNA, 120 bp, Homo sapiens
  misc_feature: 1431 for SV(W|O) and mtDNA
gttacctagaaggttgcctggctggcccagctcggctcgaataaggaggcttagagctgtgcctaggactccagctcatgcgccgaataataggtatagtgttccaatgtctttgtggtt

SEQ ID NO: 57669 - DNA, 120 bp, Homo sapiens
  misc_feature: 1431 for SV(W|O) and mtDNA
ggggttagtatagcttagttaaactttcgtttattgctaaaggttaatcactgctgtttcccgtgggggtgtggctaggctaagcgttttgagctgcattgctgcgtgcttgatgcttgt

SEQ ID NO: 57670 - DNA, 120 bp, Homo sapiens
  misc_feature: 1431 for SV(W|O) and mtDNA
ggcggtgcctctaatactggtgatgctagaggtgatgtttttggtaaacaggcggggtaagatttgccgagttccttttactttttttaacctttccttatgagcatgcctgtgttgggt

SEQ ID NO: 57671 - DNA, 120 bp, Homo sapiens
  misc_feature: 1431 for SV(W|O) and mtDNA
gcgatgaggactaggatgatggcgggcaggatagttcagacggtttctatttcctgagcgtctgagatgttagtattagttagttttgttgtgagtgttaggaaaagggcatacaggact

SEQ ID NO: 57672 - DNA, 120 bp, Homo sapiens
  misc_feature: 1431 for SV(W|O) and mtDNA
gcaccgcctgcccagtgacacatgtttaacggccgcggtaccctaaccgtgcaaaggtagcataatcacttgttccttaaatagggacctgtatgaatggctccacgagggttcagctgt

SEQ ID NO: 57673 - DNA, 120 bp, Homo sapiens
  misc_feature: 1431 for SV(W|O) and mtDNA
gagtcaataaagtgattggcttagtgggcgaaatattatgctttgttgtttggatatatggaggatggggattattgctaggatgaggatggatagtaatagggcaaggacgcctcctag

SEQ ID NO: 57674 - DNA, 120 bp, Homo sapiens
  misc_feature: 1431 for SV(W|O) and mtDNA
gagtagtgtgattgaggtggagtagattaggcgtaggtagaagtagaggttaaggagggtgatggtggctatgatggtggggatgatgaggctattgttttttgtgaattcttcgataat

SEQ ID NO: 57675 - DNA, 120 bp, Homo sapiens
  misc_feature: 1431 for SV(W|O) and mtDNA
cttgggtaacctctgggactcagaagtgaaagggggctattcctagttttattgctatagccattatgattattaatgatgagtactgattggtagtattggttatggttcattgtccgg

SEQ ID NO: 57676 - DNA, 120 bp, Homo sapiens
  misc_feature: 1431 for SV(W|O) and mtDNA
ccacagatttcagagcattgaccgtagtatacccccggtcgtgtagcggtgaaagtggtttggtttagacgtccgggaattgcatctgtttttaagcctaatgtggggacagctcatgag

SEQ ID NO: 57677 - DNA, 120 bp, Homo sapiens
  misc_feature: 1431 for SV(W|O) and mtDNA
cgcccgatgtgtaggaagaggcagataaagaatattgaggcgccattggcgtgaaggtagcggatgattcagccataatttacgtctcgagtgatgtgggcgattgatgaaaaggcggtt

SEQ ID NO: 57678 - DNA, 120 bp, Homo sapiens
  misc_feature: 1431 for SV(W|O) and mtDNA
cccttaccacgctactcctacctatctccccttttatactaataatcttatagaaatttaggttaaatacagaccaagagccttcaaagccctcagtaagttgcaatacttaatttctgt

SEQ ID NO: 57679 - DNA, 120 bp, Homo sapiens
  misc_feature: 1431 for SV(W|O) and mtDNA
caaagtaagcgcaagtacccacgtaaagacgttaggtcaaggtgtagcccatgaggtggcaagaaatgggctacattttctaccccagaaaactacgatagcccttatgaaacttaaggg

SEQ ID NO: 57680 - DNA, 120 bp, Homo sapiens
  misc_feature: 1431 for SV(W|O) and mtDNA
actcctcaattacccacataggatgaataatagcagttctaccgtacaaccctaacataaccattcttaatttaactatttatattatcctaactactaccgcattcctactactcaact

SEQ ID NO: 57681 - DNA, 120 bp, Homo sapiens
  misc_feature: 1431 for SV(W|O) and mtDNA
aggagatttcaacttaacttgaccgctctgagctaaacctagccccaaacccactccaccttactaccagacaaccttagccaaaccatttacccaaataaagtataggcgatagaaatt

SEQ ID NO: 57682 - DNA, 120 bp, Homo sapiens
  misc_feature: 1430 for SV(W|O) and mtDNA
taacttgaccgctctgagctaaacctagccccaaacccactccaccttactaccagacaaccttagccaaaccatttacccaaataaagtataggcgatagaaattgaaacctggcgcaa

SEQ ID NO: 57683 - DNA, 120 bp, Homo sapiens
  misc_feature: 1430 for SV(W|O) and mtDNA
ttcaacttaacttgaccgctctgagctaaacctagccccaaacccactccaccttactaccagacaaccttagccaaaccatttacccaaataaagtataggcgatagaaattgaaacct

SEQ ID NO: 57684 - DNA, 120 bp, Homo sapiens
  misc_feature: 1430 for SV(W|O) and mtDNA
taagaaagcgttcaagctcaacacccactacctaaaaaatcccaaacatataactgaactcctcatacccaattggaccaatctatcaccctatagaagaactaatgttagtataagtaa

SEQ ID NO: 57685 - DNA, 120 bp, Homo sapiens
  misc_feature: 1430 for SV(W|O) and mtDNA
ctcgctaacctcgccttaccccccactattaacctactgggagaactctctgtgctagtaaccacgttctcctgatcaaatatcactctcctacttacaggactcaacatactagtcaca

SEQ ID NO: 57686 - DNA, 120 bp, Homo sapiens
  misc_feature: 1430 for SV(W|O) and mtDNA
atcttcctaattaccatactaatcttagttaccgctaacaacctattccaactgttcatcggctgagagggcgtaggaattatatccttcttgctcatcagttgatgatacgcccgagca

SEQ ID NO: 57687 - DNA, 120 bp, Homo sapiens
  misc_feature: 1430 for SV(W|O) and mtDNA
tgcctacgacaaacagacctaaaatcgctcattgcatactcttcaatcagccacatagccctcgtagtaacagccattctcatccaaaccccctgaagcttcaccggcgcagtcattctc

SEQ ID NO: 57688 - DNA, 120 bp, Homo sapiens
  misc_feature: 1430 for SV(W|O) and mtDNA
tgaacacacaatagctaagacccaaactgggattagataccccactatgcttagccctaaacctcaacagttaaatcaacaaaactgctcgccagaacactacgagccacagcttaaaac

SEQ ID NO: 57689 - DNA, 120 bp, Homo sapiens
  misc_feature: 1430 for SV(W|O) and mtDNA
tccatctgcctacgacaaacagacctaaaatcgctcattgcatactcttcaatcagccacatagccctcgtagtaacagccattctcatccaaaccccctgaagcttcaccggcgcagtc

SEQ ID NO: 57690 - DNA, 120 bp, Homo sapiens
  misc_feature: 1430 for SV(W|O) and mtDNA
tcactcacccaccacattaacaacataaaaccctcattcacacgagaaaacaccctcatgttcatacacctatcccccattctcctcctatccctcaaccccgacatcattaccgggttt

SEQ ID NO: 57691 - DNA, 120 bp, Homo sapiens
  misc_feature: 1430 for SV(W|O) and mtDNA
tcacccaccacattaacaacataaaaccctcattcacacgagaaaacaccctcatgttcatacacctatcccccattctcctcctatccctcaaccccgacatcattaccgggttttcct

SEQ ID NO: 57692 - DNA, 120 bp, Homo sapiens
  misc_feature: 1430 for SV(W|O) and mtDNA
ctactcatgcacctaattggaagcgccaccctagcaatatcaaccattaaccttccctctacacttatcatcttcacaattctaattctactgactatcctagaaatcgctgtcgcctta

SEQ ID NO: 57693 - DNA, 120 bp, Homo sapiens
  misc_feature: 1430 for SV(W|O) and mtDNA
taaactgagagtagagtgcttagttgaacagggccctgaagcgcgtacacaccgcccgtcaccctcctcaagtatacttcaaaggacatttaactaaaacccctacgcatttatatagag

SEQ ID NO: 57694 - DNA, 120 bp, Homo sapiens
  misc_feature: 1430 for SV(W|O) and mtDNA
agtctattttgtgtcaactggagttttttacaactcaggtgagttttagctttattggggagggggtgatctaaaacactctttacgccggcttctattgacttgggttaatcgtgtgac

SEQ ID NO: 57695 - DNA, 120 bp, Homo sapiens
  misc_feature: 1430 for SV(W|O) and mtDNA
ccaacaacttaatatgactagcttacacaatagcttttatagtaaagatacctctttacggactccacttatgactccctaaagcccatgtcgaagcccccatcgctgggtcaatagtac

SEQ ID NO: 57696 - DNA, 120 bp, Homo sapiens
  misc_feature: 1430 for SV(W|O) and mtDNA
caccatagtctaatagaaaacaaccgaaaccaaataattcaagcactgcttattacaattttactgggtctctattttaccctcctacaagcctcagagtacttcgagtctcccttcacc

SEQ ID NO: 57697 - DNA, 120 bp, Homo sapiens
  misc_feature: 1430 for SV(W|O) and mtDNA
gggggaagtatgtaggagttgaagattagtccgccgtagtcggtgtactcgtaggttcagtaccattggtggccaattgatttgatggtaagggagggatcgttgacctcgtctgttatg

SEQ ID NO: 57698 - DNA, 120 bp, Homo sapiens
  misc_feature: 1430 for SV(W|O) and mtDNA
ggctaggatgatgattaataagagggatgacataactattagtggcaggttagttgtttgtagggctcatggtaggggtaaaaggagggcaatttctagatcaaataataagaaggtaat

SEQ ID NO: 57699 - DNA, 120 bp, Homo sapiens
  misc_feature: 1430 for SV(W|O) and mtDNA
ccgcaaacatatcatacacaaacgcctgagccctatctattactctcatcgctacctccctgacaagcgcctatagcactcgaataattcttctcaccctaacaggtcaacctcgcttcc

SEQ ID NO: 57700 - DNA, 120 bp, Homo sapiens
  misc_feature: 1430 for SV(W|O) and mtDNA
gcgcgatgtaacacgagaaagcacataccaaggccaccacacaccacctgtccaaaaaggccttcgatacgggataatcctatttattacctcagaagtttttttcttcgcaggattttt

SEQ ID NO: 57701 - DNA, 120 bp, Homo sapiens
  misc_feature: 1430 for SV(W|O) and mtDNA
aagtgagaggtatggttttgagtagtcctcctatttttcgaatatcttgttcattgttaaggttgtggatgatggacccggagcacataaatagtatggctttgaagaaggcgtgggtgc

SEQ ID NO: 57702 - DNA, 120 bp, Homo sapiens
  misc_feature: 1430 for SV(W|O) and mtDNA
gagtgaagcattggactgtaaatctaaagacaggggttaggcctctttttaccagctccgaggtgattttcatattgaattgcaaattcgaagaagcagcttcaaacctgccggggcttc

SEQ ID NO: 57703 - DNA, 120 bp, Homo sapiens
  misc_feature: 1430 for SV(W|O) and mtDNA
gaacacacaatagctaagacccaaactgggattagataccccactatgcttagccctaaacctcaacagttaaatcaacaaaactgctcgccagaacactacgagccacagcttaaaact

SEQ ID NO: 57704 - DNA, 120 bp, Homo sapiens
  misc_feature: 1430 for SV(W|O) and mtDNA
ctttatctgcctcttcctacacatcgggcgaggcctatattacggatcatttctctactcagaaacctgaaacatcggcattatcctcctgcttgcaactatagcaacagccttcatagg

SEQ ID NO: 57705 - DNA, 120 bp, Homo sapiens
  misc_feature: 1430 for SV(W|O) and mtDNA
actcatcttcctaattaccatactaatcttagttaccgctaacaacctattccaactgttcatcggctgagagggcgtaggaattatatccttcttgctcatcagttgatgatacgcccg

SEQ ID NO: 57706 - DNA, 120 bp, Homo sapiens
  misc_feature: 1430 for SV(W|O) and mtDNA
cactcacccaccacattaacaacataaaaccctcattcacacgagaaaacaccctcatgttcatacacctatcccccattctcctcctatccctcaaccccgacatcattaccgggtttt

SEQ ID NO: 57707 - DNA, 120 bp, Homo sapiens
  misc_feature: 1430 for SV(W|O) and mtDNA
agtccgagtaacgtcggggcattccggataggccgagaaagtgttgtgggaagaaagttagatttacgccgatgaatatgatagtgaaatggattttggcgtaggtttggtctagggtgt

SEQ ID NO: 57708 - DNA, 120 bp, Homo sapiens
  misc_feature: 1429 for SV(W|O) and mtDNA
cgtctaaaccaaaccactttcaccgctacacgaccgggggtatactacggtcaatgctctgaaatctgtggagcaaaccacagtttcatgcccatcgtcctagaattaattcccctaaaa

SEQ ID NO: 57709 - DNA, 120 bp, Homo sapiens
  misc_feature: 1429 for SV(W|O) and mtDNA
gctacatagaaaaatccaccccttacgagtgcggcttcgaccctatatcccccgcccgcgtccctttctccataaaattcttcttagtagctattaccttcttattatttgatctagaaa

SEQ ID NO: 57710 - DNA, 120 bp, Homo sapiens
  misc_feature: 1429 for SV(W|O) and mtDNA
acactaaccatataccaatgatggcgcgatgtaacacgagaaagcacataccaaggccaccacacaccacctgtccaaaaaggccttcgatacgggataatcctatttattacctcagaa

SEQ ID NO: 57711 - DNA, 120 bp, Homo sapiens
  misc_feature: 1429 for SV(W|O) and mtDNA
tgtaggagttgaagattagtccgccgtagtcggtgtactcgtaggttcagtaccattggtggccaattgatttgatggtaagggagggatcgttgacctcgtctgttatgtaaaggatgc

SEQ ID NO: 57712 - DNA, 120 bp, Homo sapiens
  misc_feature: 1429 for SV(W|O) and mtDNA
tgctcatcagttgatgatacgcccgagcagatgccaacacagcagccattcaagcaatcctatacaaccgtatcggcgatatcggtttcatcctcgccttagcatgatttatcctacact

SEQ ID NO: 57713 - DNA, 120 bp, Homo sapiens
  misc_feature: 1429 for SV(W|O) and mtDNA
tctgtggaacgagggtttatttttttggttagaactggaataaaagctagcatgtttatttctaggcctactcaggtaaaaaatcagtgcgagcttagcgctgtgatgagtgtgcctgca

SEQ ID NO: 57714 - DNA, 120 bp, Homo sapiens
  misc_feature: 1429 for SV(W|O) and mtDNA
acttattagtaatgttgatagtagaatgatggctagggtgacttcatatgagattgtttgggctactgctcgcagtgcgccgatcagggcgtagtttgagtttgatgctcaccctgatca

SEQ ID NO: 57715 - DNA, 120 bp, Homo sapiens
  misc_feature: 1429 for SV(W|O) and mtDNA
tcaccagtcaaagcgaactactatactcaattgatccaataacttgaccaacggaacaagttaccctagggataacagcgcaatcctattctagagtccatatcaacaatagggtttacg

SEQ ID NO: 57716 - DNA, 120 bp, Homo sapiens
  misc_feature: 1429 for SV(W|O) and mtDNA
tagtctattttgtgtcaactggagttttttacaactcaggtgagttttagctttattggggagggggtgatctaaaacactctttacgccggcttctattgacttgggttaatcgtgtga

SEQ ID NO: 57717 - DNA, 120 bp, Homo sapiens
  misc_feature: 1429 for SV(W|O) and mtDNA
tatgactagcttacacaatagcttttatagtaaagatacctctttacggactccacttatgactccctaaagcccatgtcgaagcccccatcgctgggtcaatagtacttgccgcagtac

SEQ ID NO: 57718 - DNA, 120 bp, Homo sapiens
  misc_feature: 1429 for SV(W|O) and mtDNA
tagcagttctaccgtacaaccctaacataaccattcttaatttaactatttatattatcctaactactaccgcattcctactactcaacttaaactccagcaccacgaccctactactat

SEQ ID NO: 57719 - DNA, 120 bp, Homo sapiens
  misc_feature: 1429 for SV(W|O) and mtDNA
ataaatgcgtaggggttttagttaaatgtcctttgaagtatacttgaggagggtgacgggcggtgtgtacgcgcttcagggccctgttcaactaagcactctactctcagtttactgcta

SEQ ID NO: 57720 - DNA, 120 bp, Homo sapiens
  misc_feature: 1429 for SV(W|O) and mtDNA
ccttaccacgctactcctacctatctccccttttatactaataatcttatagaaatttaggttaaatacagaccaagagccttcaaagccctcagtaagttgcaatacttaatttctgta

SEQ ID NO: 57721 - DNA, 120 bp, Homo sapiens
  misc_feature: 1429 for SV(W|O) and mtDNA
aaaattttggtgcaactccaaataaaagtaataaccatgcacactactataaccaccctaaccctgacttccctaattccccccatccttaccaccctcgttaaccctaacaaaaaaaac

SEQ ID NO: 57722 - DNA, 120 bp, Homo sapiens
  misc_feature: 1429 for SV(W|O) and mtDNA
gttttgaggttagtttgattagtcattgttgggtggtgattagtcggttgttgatgagatatttggaggtggggatcaatagagggggaaatagaatgatcagtactgcggcgggtaggc

SEQ ID NO: 57723 - DNA, 120 bp, Homo sapiens
  misc_feature: 1429 for SV(W|O) and mtDNA
cttacaggactcaacatactagtcacagccctatactccctctacatatttaccacaacacaatggggctcactcacccaccacattaacaacataaaaccctcattcacacgagaaaac

SEQ ID NO: 57724 - DNA, 120 bp, Homo sapiens
  misc_feature: 1429 for SV(W|O) and mtDNA
atttcaacttaacttgaccgctctgagctaaacctagccccaaacccactccaccttactaccagacaaccttagccaaaccatttacccaaataaagtataggcgatagaaattgaaac

SEQ ID NO: 57725 - DNA, 120 bp, Homo sapiens
  misc_feature: 1429 for SV(W|O) and mtDNA
caacatggctttctcaacttttaaaggataacagctatccattggtcttaggccccaaaaattttggtgcaactccaaataaaagtaataaccatgcacactactataaccaccctaacc

SEQ ID NO: 57726 - DNA, 120 bp, Homo sapiens
  misc_feature: 1429 for SV(W|O) and mtDNA
atacgcccgagcagatgccaacacagcagccattcaagcaatcctatacaaccgtatcggcgatatcggtttcatcctcgccttagcatgatttatcctacactccaactcatgagaccc

SEQ ID NO: 57727 - DNA, 120 bp, Homo sapiens
  misc_feature: 1429 for SV(W|O) and mtDNA
gctttgaagaaggcgtgggtgcagatgtgcaggaatgctaggtgtggttggttgatgccgattgtaactattatgagtcctagttgacttgaagtggagaaggctacgatttttttgatg

SEQ ID NO: 57728 - DNA, 120 bp, Homo sapiens
  misc_feature: 1429 for SV(W|O) and mtDNA
cctcaccactacaatcttcctaggaacaacatatgacgcactctcccctgaactctacacaacatattttgtcaccaagaccctacttctaacctccctgttcttatgaattcgaacagc

SEQ ID NO: 57729 - DNA, 120 bp, Homo sapiens
  misc_feature: 1429 for SV(W|O) and mtDNA
cgctaacctcgccttaccccccactattaacctactgggagaactctctgtgctagtaaccacgttctcctgatcaaatatcactctcctacttacaggactcaacatactagtcacagc

SEQ ID NO: 57730 - DNA, 120 bp, Homo sapiens
  misc_feature: 1429 for SV(W|O) and mtDNA
aagtgtgaaaacgtaggcttggattaaggcgacagcgatttctaggatagtcagtagaattagaattgtgaagatgataagtgtagagggaaggttaatggttgatattgctagggtggc

SEQ ID NO: 57731 - DNA, 120 bp, Homo sapiens
  misc_feature: 1429 for SV(W|O) and mtDNA
acacaattctccgatccgtccctaacaaactaggaggcgtccttgccctattactatccatcctcatcctagcaataatccccatcctccatatatccaaacaacaaagcataatatttc

SEQ ID NO: 57732 - DNA, 120 bp, Homo sapiens
  misc_feature: 1429 for SV(W|O) and mtDNA
cactgcccaagaactatcaaactcctgagccaacaacttaatatgactagcttacacaatagcttttatagtaaagatacctctttacggactccacttatgactccctaaagcccatgt

SEQ ID NO: 57733 - DNA, 120 bp, Homo sapiens
  misc_feature: 1429 for SV(W|O) and mtDNA
atgtgagaagaagcaggccggatgtcagaggggtgccttgggtaacctctgggactcagaagtgaaagggggctattcctagttttattgctatagccattatgattattaatgatgagt

SEQ ID NO: 57734 - DNA, 120 bp, Homo sapiens
  misc_feature: 1428 for SV(W|O) and mtDNA
ttaataatcataatggctatagcaataaaactaggaatagccccctttcacttctgagtcccagaggttacccaaggcacccctctgacatccggcctgcttcttctcacatgacaaaaa

SEQ ID NO: 57735 - DNA, 120 bp, Homo sapiens
  misc_feature: 1428 for SV(W|O) and mtDNA
attaataatcataatggctatagcaataaaactaggaatagccccctttcacttctgagtcccagaggttacccaaggcacccctctgacatccggcctgcttcttctcacatgacaaaa

SEQ ID NO: 57736 - DNA, 120 bp, Homo sapiens
  misc_feature: 1428 for SV(W|O) and mtDNA
agaatgggtacaatgaggagtaggaggttggccatgggtatgttgttaagaagaggaattgaacctctgactgtaaagttttaagttttatgcgattaccgggctctgccatcttaacaa

SEQ ID NO: 57737 - DNA, 120 bp, Homo sapiens
  misc_feature: 1428 for SV(W|O) and mtDNA
atgatatttcctattcgcctacacaattctccgatccgtccctaacaaactaggaggcgtccttgccctattactatccatcctcatcctagcaataatccccatcctccatatatccaa

SEQ ID NO: 57738 - DNA, 120 bp, Homo sapiens
  misc_feature: 1428 for SV(W|O) and mtDNA
ttaatatgactagcttacacaatagcttttatagtaaagatacctctttacggactccacttatgactccctaaagcccatgtcgaagcccccatcgctgggtcaatagtacttgccgca

SEQ ID NO: 57739 - DNA, 120 bp, Homo sapiens
  misc_feature: 1428 for SV(W|O) and mtDNA
gtaaatggtttggctaaggttgtctggtagtaaggtggagtgggtttggggctaggtttagctcagagcggtcaagttaagttgaaatctcctaagtgtaagttgggtgctttgtgttaa

SEQ ID NO: 57740 - DNA, 120 bp, Homo sapiens
  misc_feature: 1428 for SV(W|O) and mtDNA
tacgcccgagcagatgccaacacagcagccattcaagcaatcctatacaaccgtatcggcgatatcggtttcatcctcgccttagcatgatttatcctacactccaactcatgagaccca

SEQ ID NO: 57741 - DNA, 120 bp, Homo sapiens
  misc_feature: 1428 for SV(W|O) and mtDNA
tcgaaaccgcaaacatatcatacacaaacgcctgagccctatctattactctcatcgctacctccctgacaagcgcctatagcactcgaataattcttctcaccctaacaggtcaacctc

SEQ ID NO: 57742 - DNA, 120 bp, Homo sapiens
  misc_feature: 1428 for SV(W|O) and mtDNA
tcacccgatgaggcaaccagccagaacgcctgaacgcaggcacatacttcctattctacaccctagtaggctcccttcccctactcatcgcactaatttacactcacaacaccctaggct

SEQ ID NO: 57743 - DNA, 120 bp, Homo sapiens
  misc_feature: 1428 for SV(W|O) and mtDNA
tatttgttgtgggtctcatgagttggagtgtaggataaatcatgctaaggcgaggatgaaaccgatatcgccgatacggttgtataggattgcttgaatggctgctgtgttggcatctgc

SEQ ID NO: 57744 - DNA, 120 bp, Homo sapiens
  misc_feature: 1428 for SV(W|O) and mtDNA
aaaatcgtagccttctccacttcaagtcaactaggactcataatagttacaatcggcatcaaccaaccacacctagcattcctgcacatctgcacccacgccttcttcaaagccatacta

SEQ ID NO: 57745 - DNA, 120 bp, Homo sapiens
  misc_feature: 1428 for SV(W|O) and mtDNA
gtgttttctcgtgtgaatgagggttttatgttgttaatgtggtgggtgagtgagccccattgtgttgtggtaaatatgtagagggagtatagggctgtgactagtatgttgagtcctgta

SEQ ID NO: 57746 - DNA, 120 bp, Homo sapiens
  misc_feature: 1428 for SV(W|O) and mtDNA
gtccgagtaacgtcggggcattccggataggccgagaaagtgttgtgggaagaaagttagatttacgccgatgaatatgatagtgaaatggattttggcgtaggtttggtctagggtgta

SEQ ID NO: 57747 - DNA, 120 bp, Homo sapiens
  misc_feature: 1428 for SV(W|O) and mtDNA
gtaggctcccttcccctactcatcgcactaatttacactcacaacaccctaggctcactaaacattctactactcactctcactgcccaagaactatcaaactcctgagccaacaactta

SEQ ID NO: 57748 - DNA, 120 bp, Homo sapiens
  misc_feature: 1428 for SV(W|O) and mtDNA
cggatcatttctctactcagaaacctgaaacatcggcattatcctcctgcttgcaactatagcaacagccttcataggctatgtcctcccgtgaggccaaatatcattctgaggggccac

SEQ ID NO: 57749 - DNA, 120 bp, Homo sapiens
  misc_feature: 1428 for SV(W|O) and mtDNA
gtgagaagaattattcgagtgctataggcgcttgtcagggaggtagcgatgagagtaatagatagggctcaggcgtttgtgtatgatatgtttgcggtttcgatgatgtggtctttggag

SEQ ID NO: 57750 - DNA, 120 bp, Homo sapiens
  misc_feature: 1428 for SV(W|O) and mtDNA
cccggtaatgatgtcggggttgagggataggaggagaatgggggataggtgtatgaacatgagggtgttttctcgtgtgaatgagggttttatgttgttaatgtggtgggtgagtgagcc

SEQ ID NO: 57751 - DNA, 120 bp, Homo sapiens
  misc_feature: 1428 for SV(W|O) and mtDNA
aggcaaccttctaggtaacgaccacatctacaacgttatcgtcacagcccatgcatttgtaataatcttcttcatagtaatacccatcataatcggaggctttggcaactgactagttcc

SEQ ID NO: 57752 - DNA, 120 bp, Homo sapiens
  misc_feature: 1428 for SV(W|O) and mtDNA
catgagggtgttttctcgtgtgaatgagggttttatgttgttaatgtggtgggtgagtgagccccattgtgttgtggtaaatatgtagagggagtatagggctgtgactagtatgttgag

SEQ ID NO: 57753 - DNA, 120 bp, Homo sapiens
  misc_feature: 1428 for SV(W|O) and mtDNA
aatgggctacattttctaccccagaaaactacgatagcccttatgaaacttaagggtcgaaggtggatttagcagtaaactgagagtagagtgcttagttgaacagggccctgaagcgcg

SEQ ID NO: 57754 - DNA, 120 bp, Homo sapiens
  misc_feature: 1428 for SV(W|O) and mtDNA
actagttcccctaataatcggtgcccccgatatggcgtttccccgcataaacaacataagcttctgactcttacctccctctctcctactcctgctcgcatctgctatagtggaggccgg

SEQ ID NO: 57755 - DNA, 120 bp, Homo sapiens
  misc_feature: 1428 for SV(W|O) and mtDNA
agacctacttgcgctgcatgtgccattaagatatataggatttagcctataatttaactttgacaaagttatgaaatggtttttctaatacctttttgaaaaagtcatggaggccatggg

SEQ ID NO: 57756 - DNA, 120 bp, Homo sapiens
  misc_feature: 1428 for SV(W|O) and mtDNA
aactcactggaacggggatgcttgcatgtgtaatcttactaagagctaatagaaaggctaggaccaaacctatttgtttatggggtgatgtgagcccgtctaaacattttcagtgtattg

SEQ ID NO: 57757 - DNA, 120 bp, Homo sapiens
  misc_feature: 1427 for SV(W|O) and mtDNA
ttctgtggaacgagggtttatttttttggttagaactggaataaaagctagcatgtttatttctaggcctactcaggtaaaaaatcagtgcgagcttagcgctgtgatgagtgtgcctgc

SEQ ID NO: 57758 - DNA, 120 bp, Homo sapiens
  misc_feature: 1427 for SV(W|O) and mtDNA
ttattataataaacaccctcaccactacaatcttcctaggaacaacatatgacgcactctcccctgaactctacacaacatattttgtcaccaagaccctacttctaacctccctgttct

SEQ ID NO: 57759 - DNA, 120 bp, Homo sapiens
  misc_feature: 1427 for SV(W|O) and mtDNA
acacctgctaggtgtaaggagaagatggttaggtctacggaggctccagggtgggagtagttccctgctaagggagggtagactgttcaacctgttcctgctccggcctccactatagca

SEQ ID NO: 57760 - DNA, 120 bp, Homo sapiens
  misc_feature: 1427 for SV(W|O) and mtDNA
tatgtagcttacctcctcaaagcaatacactgaaaatgtttagacgggctcacatcaccccataaacaaataggtttggtcctagcctttctattagctcttagtaagattacacatgca

SEQ ID NO: 57761 - DNA, 120 bp, Homo sapiens
  misc_feature: 1427 for SV(W|O) and mtDNA
tatgtaggagttgaagattagtccgccgtagtcggtgtactcgtaggttcagtaccattggtggccaattgatttgatggtaagggagggatcgttgacctcgtctgttatgtaaaggat

SEQ ID NO: 57762 - DNA, 120 bp, Homo sapiens
  misc_feature: 1427 for SV(W|O) and mtDNA
taaatttctataagattattagtataaaaggggagataggtaggagtagcgtggtaagggcgatgagtgtggggaggaatggggtgggttttgtatgttcaaactgtcattttattttta

SEQ ID NO: 57763 - DNA, 120 bp, Homo sapiens
  misc_feature: 1427 for SV(W|O) and mtDNA
caagatattcgaaaaataggaggactactcaaaaccatacctctcacttcaacctccctcaccattggcagcctagcattagcaggaatacctttcctcacaggtttctactccaaagac

SEQ ID NO: 57764 - DNA, 120 bp, Homo sapiens
  misc_feature: 1427 for SV(W|O) and mtDNA
gtagtccgagtaacgtcggggcattccggataggccgagaaagtgttgtgggaagaaagttagatttacgccgatgaatatgatagtgaaatggattttggcgtaggtttggtctagggt

SEQ ID NO: 57765 - DNA, 120 bp, Homo sapiens
  misc_feature: 1427 for SV(W|O) and mtDNA
gggtctcctcctccggcggggtcgaagaaggtggtgttgaggttgcggtctgttagtagtatagtgatgccagcagctaggactgggagagataggagaagtaggactgctgtgattagg

SEQ ID NO: 57766 - DNA, 120 bp, Homo sapiens
  misc_feature: 1427 for SV(W|O) and mtDNA
gctaggtgtaaggagaagatggttaggtctacggaggctccagggtgggagtagttccctgctaagggagggtagactgttcaacctgttcctgctccggcctccactatagcagatgcg

SEQ ID NO: 57767 - DNA, 120 bp, Homo sapiens
  misc_feature: 1427 for SV(W|O) and mtDNA
ctcctcctccggcggggtcgaagaaggtggtgttgaggttgcggtctgttagtagtatagtgatgccagcagctaggactgggagagataggagaagtaggactgctgtgattaggacgg

SEQ ID NO: 57768 - DNA, 120 bp, Homo sapiens
  misc_feature: 1427 for SV(W|O) and mtDNA
cggtgcctctaatactggtgatgctagaggtgatgtttttggtaaacaggcggggtaagatttgccgagttccttttactttttttaacctttccttatgagcatgcctgtgttgggttg

SEQ ID NO: 57769 - DNA, 120 bp, Homo sapiens
  misc_feature: 1427 for SV(W|O) and mtDNA
aaactgagagtagagtgcttagttgaacagggccctgaagcgcgtacacaccgcccgtcaccctcctcaagtatacttcaaaggacatttaactaaaacccctacgcatttatatagagg

SEQ ID NO: 57770 - DNA, 120 bp, Homo sapiens
  misc_feature: 1427 for SV(W|O) and mtDNA
aggccacctactcatgcacctaattggaagcgccaccctagcaatatcaaccattaaccttccctctacacttatcatcttcacaattctaattctactgactatcctagaaatcgctgt

SEQ ID NO: 57771 - DNA, 120 bp, Homo sapiens
  misc_feature: 1426 for SV(W|O) and mtDNA
tgatcaaatatcactctcctacttacaggactcaacatactagtcacagccctatactccctctacatatttaccacaacacaatggggctcactcacccaccacattaacaacataaaa

SEQ ID NO: 57772 - DNA, 120 bp, Homo sapiens
  misc_feature: 1426 for SV(W|O) and mtDNA
ttgtccggagagtatattgttgaagaggatagctattagaaggattatggatgcggttgcttgcgtgaggaaatacttgatggcagcttctgtggaacgagggtttatttttttggttag

SEQ ID NO: 57773 - DNA, 120 bp, Homo sapiens
  misc_feature: 1426 for SV(W|O) and mtDNA
gtccggagagtatattgttgaagaggatagctattagaaggattatggatgcggttgcttgcgtgaggaaatacttgatggcagcttctgtggaacgagggtttatttttttggttagaa

SEQ ID NO: 57774 - DNA, 120 bp, Homo sapiens
  misc_feature: 1426 for SV(W|O) and mtDNA
ccgagcagatgccaacacagcagccattcaagcaatcctatacaaccgtatcggcgatatcggtttcatcctcgccttagcatgatttatcctacactccaactcatgagacccacaaca

SEQ ID NO: 57775 - DNA, 120 bp, Homo sapiens
  misc_feature: 1426 for SV(W|O) and mtDNA
tgtggtttgctccacagatttcagagcattgaccgtagtatacccccggtcgtgtagcggtgaaagtggtttggtttagacgtccgggaattgcatctgtttttaagcctaatgtgggga

SEQ ID NO: 57776 - DNA, 120 bp, Homo sapiens
  misc_feature: 1426 for SV(W|O) and mtDNA
accttccctctacacttatcatcttcacaattctaattctactgactatcctagaaatcgctgtcgccttaatccaagcctacgttttcacacttctagtaagcctctacctgcacgaca

SEQ ID NO: 57777 - DNA, 120 bp, Homo sapiens
  misc_feature: 1426 for SV(W|O) and mtDNA
tgtatttaacctaaatttctataagattattagtataaaaggggagataggtaggagtagcgtggtaagggcgatgagtgtggggaggaatggggtgggttttgtatgttcaaactgtca

SEQ ID NO: 57778 - DNA, 120 bp, Homo sapiens
  misc_feature: 1426 for SV(W|O) and mtDNA
ggaggacatagcctatgaaggctgttgctatagttgcaagcaggaggataatgccgatgtttcaggtttctgagtagagaaatgatccgtaatataggcctcgcccgatgtgtaggaaga

SEQ ID NO: 57779 - DNA, 120 bp, Homo sapiens
  misc_feature: 1426 for SV(W|O) and mtDNA
tccgagtaacgtcggggcattccggataggccgagaaagtgttgtgggaagaaagttagatttacgccgatgaatatgatagtgaaatggattttggcgtaggtttggtctagggtgtag

SEQ ID NO: 57780 - DNA, 120 bp, Homo sapiens
  misc_feature: 1426 for SV(W|O) and mtDNA
tatctactcatcttcctaattaccatactaatcttagttaccgctaacaacctattccaactgttcatcggctgagagggcgtaggaattatatccttcttgctcatcagttgatgatac

SEQ ID NO: 57781 - DNA, 120 bp, Homo sapiens
  misc_feature: 1426 for SV(W|O) and mtDNA
taggcctactatgggtgttaaattttttactctctctacaaggttttttcctagtgtccaaagagctgttcctctttggactaacagttaaatttacaaggggatttagagggttctgtg

SEQ ID NO: 57782 - DNA, 120 bp, Homo sapiens
  misc_feature: 1426 for SV(W|O) and mtDNA
tacacgaccgggggtatactacggtcaatgctctgaaatctgtggagcaaaccacagtttcatgcccatcgtcctagaattaattcccctaaaaatctttgaaatagggcccgtatttac

SEQ ID NO: 57783 - DNA, 120 bp, Homo sapiens
  misc_feature: 1426 for SV(W|O) and mtDNA
gtgaaaacgtaggcttggattaaggcgacagcgatttctaggatagtcagtagaattagaattgtgaagatgataagtgtagagggaaggttaatggttgatattgctagggtggcgctt

SEQ ID NO: 57784 - DNA, 120 bp, Homo sapiens
  misc_feature: 1426 for SV(W|O) and mtDNA
gtaagcctctacctgcacgacaacacataatgacccaccaatcacatgcctatcatatagtaaaacccagcccatgacccctaacaggggccctctcagccctcctaatgacctccggcc

SEQ ID NO: 57785 - DNA, 120 bp, Homo sapiens
  misc_feature: 1426 for SV(W|O) and mtDNA
gaaaacgtaggcttggattaaggcgacagcgatttctaggatagtcagtagaattagaattgtgaagatgataagtgtagagggaaggttaatggttgatattgctagggtggcgcttcc

SEQ ID NO: 57786 - DNA, 120 bp, Homo sapiens
  misc_feature: 1426 for SV(W|O) and mtDNA
cgatccgtccctaacaaactaggaggcgtccttgccctattactatccatcctcatcctagcaataatccccatcctccatatatccaaacaacaaagcataatatttcgcccactaagc

SEQ ID NO: 57787 - DNA, 120 bp, Homo sapiens
  misc_feature: 1426 for SV(W|O) and mtDNA
aacttaacttgaccgctctgagctaaacctagccccaaacccactccaccttactaccagacaaccttagccaaaccatttacccaaataaagtataggcgatagaaattgaaacctggc

SEQ ID NO: 57788 - DNA, 120 bp, Homo sapiens
  misc_feature: 1426 for SV(W|O) and mtDNA
cgcttccaccccctagcagaaaatagcccactaatccaaactctaacactatgcttaggcgctatcaccactctgttcgcagcagtctgcgcccttacacaaaatgacatcaaaaaaatc

SEQ ID NO: 57789 - DNA, 120 bp, Homo sapiens
  misc_feature: 1426 for SV(W|O) and mtDNA
gaccgggggtatactacggtcaatgctctgaaatctgtggagcaaaccacagtttcatgcccatcgtcctagaattaattcccctaaaaatctttgaaatagggcccgtatttaccctat

SEQ ID NO: 57790 - DNA, 120 bp, Homo sapiens
  misc_feature: 1426 for SV(W|O) and mtDNA
ctgttatgtaaaggatgcgtagggatgggagggcgatgaggactaggatgatggcgggcaggatagttcagacggtttctatttcctgagcgtctgagatgttagtattagttagttttg

SEQ ID NO: 57791 - DNA, 120 bp, Homo sapiens
  misc_feature: 1426 for SV(W|O) and mtDNA
atctactcatcttcctaattaccatactaatcttagttaccgctaacaacctattccaactgttcatcggctgagagggcgtaggaattatatccttcttgctcatcagttgatgatacg

SEQ ID NO: 57792 - DNA, 120 bp, Homo sapiens
  misc_feature: 1426 for SV(W|O) and mtDNA
acaaccgaaaccaaataattcaagcactgcttattacaattttactgggtctctattttaccctcctacaagcctcagagtacttcgagtctcccttcaccatttccgacggcatctacg

SEQ ID NO: 57793 - DNA, 120 bp, Homo sapiens
  misc_feature: 1426 for SV(W|O) and mtDNA
cgtaagccttctcctcactctctcaatcttatccatcatagcaggcagttgaggtggattaaaccaaacccagctacgcaaaatcttagcatactcctcaattacccacataggatgaat

SEQ ID NO: 57794 - DNA, 120 bp, Homo sapiens
  misc_feature: 1426 for SV(W|O) and mtDNA
actgatttcccctattctcaggctacaccctagaccaaacctacgccaaaatccatttcactatcatattcatcggcgtaaatctaactttcttcccacaacactttctcggcctatccg

SEQ ID NO: 57795 - DNA, 120 bp, Homo sapiens
  misc_feature: 1426 for SV(W|O) and mtDNA
actgactagttcccctaataatcggtgcccccgatatggcgtttccccgcataaacaacataagcttctgactcttacctccctctctcctactcctgctcgcatctgctatagtggagg

SEQ ID NO: 57796 - DNA, 120 bp, Homo sapiens
  misc_feature: 1426 for SV(W|O) and mtDNA
caggccacctactcatgcacctaattggaagcgccaccctagcaatatcaaccattaaccttccctctacacttatcatcttcacaattctaattctactgactatcctagaaatcgctg

SEQ ID NO: 57797 - DNA, 120 bp, Homo sapiens
  misc_feature: 1425 for SV(W|O) and mtDNA
acttacaggactcaacatactagtcacagccctatactccctctacatatttaccacaacacaatggggctcactcacccaccacattaacaacataaaaccctcattcacacgagaaaa

SEQ ID NO: 57798 - DNA, 120 bp, Homo sapiens
  misc_feature: 1425 for SV(W|O) and mtDNA
ttcacacttctagtaagcctctacctgcacgacaacacataatgacccaccaatcacatgcctatcatatagtaaaacccagcccatgacccctaacaggggccctctcagccctcctaa

SEQ ID NO: 57799 - DNA, 120 bp, Homo sapiens
  misc_feature: 1425 for SV(W|O) and mtDNA
tgatttagagggtgaactcactggaacggggatgcttgcatgtgtaatcttactaagagctaatagaaaggctaggaccaaacctatttgtttatggggtgatgtgagcccgtctaaaca

SEQ ID NO: 57800 - DNA, 120 bp, Homo sapiens
  misc_feature: 1425 for SV(W|O) and mtDNA
ctaaagcccatgtcgaagcccccatcgctgggtcaatagtacttgccgcagtactcttaaaactaggcggctatggtataatacgcctcacactcattctcaaccccctgacaaaacaca

SEQ ID NO: 57801 - DNA, 120 bp, Homo sapiens
  misc_feature: 1425 for SV(W|O) and mtDNA
tgtggttggttgatgccgattgtaactattatgagtcctagttgacttgaagtggagaaggctacgatttttttgatgtcattttgtgtaagggcgcagactgctgcgaacagagtggtg

SEQ ID NO: 57802 - DNA, 120 bp, Homo sapiens
  misc_feature: 1425 for SV(W|O) and mtDNA
gtgataggtggcacggagaattttggattctcagggatgggttcgattctcatagtcctagaaataagggggtttaagctcctattatttactctatcaaagtaactcttttatcagaca

SEQ ID NO: 57803 - DNA, 120 bp, Homo sapiens
  misc_feature: 1425 for SV(W|O) and mtDNA
tgattttcatattgaattgcaaattcgaagaagcagcttcaaacctgccggggcttctcccgccttttttcccggcggcgggagaagtagattgaagccagttgattagggtgcttagct

SEQ ID NO: 57804 - DNA, 120 bp, Homo sapiens
  misc_feature: 1425 for SV(W|O) and mtDNA
tcatgtgagaagaagcaggccggatgtcagaggggtgccttgggtaacctctgggactcagaagtgaaagggggctattcctagttttattgctatagccattatgattattaatgatga

SEQ ID NO: 57805 - DNA, 120 bp, Homo sapiens
  misc_feature: 1425 for SV(W|O) and mtDNA
gctaggatgatgattaataagagggatgacataactattagtggcaggttagttgtttgtagggctcatggtaggggtaaaaggagggcaatttctagatcaaataataagaaggtaata

SEQ ID NO: 57806 - DNA, 120 bp, Homo sapiens
  misc_feature: 1425 for SV(W|O) and mtDNA
tatctgaacacacaatagctaagacccaaactgggattagataccccactatgcttagccctaaacctcaacagttaaatcaacaaaactgctcgccagaacactacgagccacagctta

SEQ ID NO: 57807 - DNA, 120 bp, Homo sapiens
  misc_feature: 1425 for SV(W|O) and mtDNA
atcctctgatcagggtgagcatcaaactcaaactacgccctgatcggcgcactgcgagcagtagcccaaacaatctcatatgaagtcaccctagccatcattctactatcaacattacta

SEQ ID NO: 57808 - DNA, 120 bp, Homo sapiens
  misc_feature: 1425 for SV(W|O) and mtDNA
acgcccgagcagatgccaacacagcagccattcaagcaatcctatacaaccgtatcggcgatatcggtttcatcctcgccttagcatgatttatcctacactccaactcatgagacccac

SEQ ID NO: 57809 - DNA, 120 bp, Homo sapiens
  misc_feature: 1425 for SV(W|O) and mtDNA
accagtcaaagcgaactactatactcaattgatccaataacttgaccaacggaacaagttaccctagggataacagcgcaatcctattctagagtccatatcaacaatagggtttacgac

SEQ ID NO: 57810 - DNA, 120 bp, Homo sapiens
  misc_feature: 1425 for SV(W|O) and mtDNA
ggtttaagctcctattatttactctatcaaagtaactcttttatcagacatatttcttaggtttgagggggaatgctggagattgtaatgggtatggagacatatcatataagtaatgct

SEQ ID NO: 57811 - DNA, 120 bp, Homo sapiens
  misc_feature: 1425 for SV(W|O) and mtDNA
ggttatcatttgttttgaggttagtttgattagtcattgttgggtggtgattagtcggttgttgatgagatatttggaggtggggatcaatagagggggaaatagaatgatcagtactgc

SEQ ID NO: 57812 - DNA, 120 bp, Homo sapiens
  misc_feature: 1425 for SV(W|O) and mtDNA
gcgaggatgaaaccgatatcgccgatacggttgtataggattgcttgaatggctgctgtgttggcatctgctcgggcgtatcatcaactgatgagcaagaaggatataattcctacgccc

SEQ ID NO: 57813 - DNA, 120 bp, Homo sapiens
  misc_feature: 1425 for SV(W|O) and mtDNA
ctcacccaccacattaacaacataaaaccctcattcacacgagaaaacaccctcatgttcatacacctatcccccattctcctcctatccctcaaccccgacatcattaccgggttttcc

SEQ ID NO: 57814 - DNA, 120 bp, Homo sapiens
  misc_feature: 1425 for SV(W|O) and mtDNA
gctatcgggcccataccccgaaaatgttggttatacccttcccgtactaattaatcccctggcccaacccgtcatctactctaccatctttgcaggcacactcatcacagcgctaagctc

SEQ ID NO: 57815 - DNA, 120 bp, Homo sapiens
  misc_feature: 1425 for SV(W|O) and mtDNA
gcctctacctgcacgacaacacataatgacccaccaatcacatgcctatcatatagtaaaacccagcccatgacccctaacaggggccctctcagccctcctaatgacctccggcctagc

SEQ ID NO: 57816 - DNA, 120 bp, Homo sapiens
  misc_feature: 1425 for SV(W|O) and mtDNA
gcctagcaaactcaaactacgaacgcactcacagtcgcatcataatcctctctcaaggacttcaaactctactcccactaatagctttttgatgacttctagcaagcctcgctaacctcg

SEQ ID NO: 57817 - DNA, 120 bp, Homo sapiens
  misc_feature: 1425 for SV(W|O) and mtDNA
cacctgagctcaccatagtctaatagaaaacaaccgaaaccaaataattcaagcactgcttattacaattttactgggtctctattttaccctcctacaagcctcagagtacttcgagtc

SEQ ID NO: 57818 - DNA, 120 bp, Homo sapiens
  misc_feature: 1425 for SV(W|O) and mtDNA
ataaccaacattttcggggtatgggcccgatagcttatttagctgaccttactttaggatggggtgtgataggtggcacggagaattttggattctcagggatgggttcgattctcatag

SEQ ID NO: 57819 - DNA, 120 bp, Homo sapiens
  misc_feature: 1425 for SV(W|O) and mtDNA
cacaattctccgatccgtccctaacaaactaggaggcgtccttgccctattactatccatcctcatcctagcaataatccccatcctccatatatccaaacaacaaagcataatatttcg

SEQ ID NO: 57820 - DNA, 120 bp, Homo sapiens
  misc_feature: 1425 for SV(W|O) and mtDNA
aggctcactaaacattctactactcactctcactgcccaagaactatcaaactcctgagccaacaacttaatatgactagcttacacaatagcttttatagtaaagatacctctttacgg

SEQ ID NO: 57821 - DNA, 120 bp, Homo sapiens
  misc_feature: 1425 for SV(W|O) and mtDNA
cccaccacattaacaacataaaaccctcattcacacgagaaaacaccctcatgttcatacacctatcccccattctcctcctatccctcaaccccgacatcattaccgggttttcctctt

SEQ ID NO: 57822 - DNA, 120 bp, Homo sapiens
  misc_feature: 1425 for SV(W|O) and mtDNA
atgtaggagttgaagattagtccgccgtagtcggtgtactcgtaggttcagtaccattggtggccaattgatttgatggtaagggagggatcgttgacctcgtctgttatgtaaaggatg

SEQ ID NO: 57823 - DNA, 120 bp, Homo sapiens
  misc_feature: 1425 for SV(W|O) and mtDNA
aggttgggttctgctccgaggtcgccccaaccgaaatttttaatgcaggtttggtagtttaggacctgtgggtttgttaggtactgtttgcattaataaattaaagctccatagggtctt

SEQ ID NO: 57824 - DNA, 120 bp, Homo sapiens
  misc_feature: 1424 for SV(W|O) and mtDNA
cattaataatcataatggctatagcaataaaactaggaatagccccctttcacttctgagtcccagaggttacccaaggcacccctctgacatccggcctgcttcttctcacatgacaaa

SEQ ID NO: 57825 - DNA, 120 bp, Homo sapiens
  misc_feature: 1424 for SV(W|O) and mtDNA
tttatgtagcttacctcctcaaagcaatacactgaaaatgtttagacgggctcacatcaccccataaacaaataggtttggtcctagcctttctattagctcttagtaagattacacatg

SEQ ID NO: 57826 - DNA, 120 bp, Homo sapiens
  misc_feature: 1424 for SV(W|O) and mtDNA
cacaaaaaacaatagcctcatcatccccaccatcatagccaccatcaccctccttaacctctacttctacctacgcctaatctactccacctcaatcacactactccccatatctaacaa

SEQ ID NO: 57827 - DNA, 120 bp, Homo sapiens
  misc_feature: 1424 for SV(W|O) and mtDNA
tcattaataatcataatggctatagcaataaaactaggaatagccccctttcacttctgagtcccagaggttacccaaggcacccctctgacatccggcctgcttcttctcacatgacaa

SEQ ID NO: 57828 - DNA, 120 bp, Homo sapiens
  misc_feature: 1424 for SV(W|O) and mtDNA
gtgattataggctttcgctctaagattaaaaatgccctagcccacttcttaccacaaggcacacctacaccccttatccccatactagttattatcgaaaccatcagcctactcattcaa

SEQ ID NO: 57829 - DNA, 120 bp, Homo sapiens
  misc_feature: 1424 for SV(W|O) and mtDNA
taggggaagtagcgtcttgtagacctacttgcgctgcatgtgccattaagatatataggatttagcctataatttaactttgacaaagttatgaaatggtttttctaatacctttttgaa

SEQ ID NO: 57830 - DNA, 120 bp, Homo sapiens
  misc_feature: 1424 for SV(W|O) and mtDNA
ctagcctagccgtttactcaatcctctgatcagggtgagcatcaaactcaaactacgccctgatcggcgcactgcgagcagtagcccaaacaatctcatatgaagtcaccctagccatca

SEQ ID NO: 57831 - DNA, 120 bp, Homo sapiens
  misc_feature: 1424 for SV(W|O) and mtDNA
attttggtgcaactccaaataaaagtaataaccatgcacactactataaccaccctaaccctgacttccctaattccccccatccttaccaccctcgttaaccctaacaaaaaaaactca

SEQ ID NO: 57832 - DNA, 120 bp, Homo sapiens
  misc_feature: 1424 for SV(W|O) and mtDNA
tgaaaacgtaggcttggattaaggcgacagcgatttctaggatagtcagtagaattagaattgtgaagatgataagtgtagagggaaggttaatggttgatattgctagggtggcgcttc

SEQ ID NO: 57833 - DNA, 120 bp, Homo sapiens
  misc_feature: 1424 for SV(W|O) and mtDNA
tctataaacctagccatggccatccccttatgagcgggcgcagtgattataggctttcgctctaagattaaaaatgccctagcccacttcttaccacaaggcacacctacaccccttatc

SEQ ID NO: 57834 - DNA, 120 bp, Homo sapiens
  misc_feature: 1424 for SV(W|O) and mtDNA
tcctcctatttttcgaatatcttgttcattgttaaggttgtggatgatggacccggagcacataaatagtatggctttgaagaaggcgtgggtgcagatgtgcaggaatgctaggtgtgg

SEQ ID NO: 57835 - DNA, 120 bp, Homo sapiens
  misc_feature: 1424 for SV(W|O) and mtDNA
tcacatggctaggccggaggtcattaggagggctgagagggcccctgttaggggtcatgggctgggttttactatatgataggcatgtgattggtgggtcattatgtgttgtcgtgcagg

SEQ ID NO: 57836 - DNA, 120 bp, Homo sapiens
  misc_feature: 1424 for SV(W|O) and mtDNA
tcaacttaacttgaccgctctgagctaaacctagccccaaacccactccaccttactaccagacaaccttagccaaaccatttacccaaataaagtataggcgatagaaattgaaacctg

SEQ ID NO: 57837 - DNA, 120 bp, Homo sapiens
  misc_feature: 1424 for SV(W|O) and mtDNA
tagtccgagtaacgtcggggcattccggataggccgagaaagtgttgtgggaagaaagttagatttacgccgatgaatatgatagtgaaatggattttggcgtaggtttggtctagggtg

SEQ ID NO: 57838 - DNA, 120 bp, Homo sapiens
  misc_feature: 1424 for SV(W|O) and mtDNA
aaaaacaatagcctcatcatccccaccatcatagccaccatcaccctccttaacctctacttctacctacgcctaatctactccacctcaatcacactactccccatatctaacaacgta

SEQ ID NO: 57839 - DNA, 120 bp, Homo sapiens
  misc_feature: 1424 for SV(W|O) and mtDNA
taatatgactagcttacacaatagcttttatagtaaagatacctctttacggactccacttatgactccctaaagcccatgtcgaagcccccatcgctgggtcaatagtacttgccgcag

SEQ ID NO: 57840 - DNA, 120 bp, Homo sapiens
  misc_feature: 1424 for SV(W|O) and mtDNA
taagacccaaactgggattagataccccactatgcttagccctaaacctcaacagttaaatcaacaaaactgctcgccagaacactacgagccacagcttaaaactcaaaggacctggcg

SEQ ID NO: 57841 - DNA, 120 bp, Homo sapiens
  misc_feature: 1424 for SV(W|O) and mtDNA
ctgcatgtgccattaagatatataggatttagcctataatttaactttgacaaagttatgaaatggtttttctaatacctttttgaaaaagtcatggaggccatggggttggcttgaaac

SEQ ID NO: 57842 - DNA, 120 bp, Homo sapiens
  misc_feature: 1424 for SV(W|O) and mtDNA
gtcctagcctttctattagctcttagtaagattacacatgcaagcatccccgttccagtgagttcaccctctaaatcaccacgatcaaaagggacaagcatcaagcacgcagcaatgcag

SEQ ID NO: 57843 - DNA, 120 bp, Homo sapiens
  misc_feature: 1424 for SV(W|O) and mtDNA
gagtagagtttgaagtccttgagagaggattatgatgcgactgtgagtgcgttcgtagtttgagtttgctaggcagaatagtaatgaggatgtaagcccgtgggcgattatgagaatgac

SEQ ID NO: 57844 - DNA, 120 bp, Homo sapiens
  misc_feature: 1424 for SV(W|O) and mtDNA
caatcctctgatcagggtgagcatcaaactcaaactacgccctgatcggcgcactgcgagcagtagcccaaacaatctcatatgaagtcaccctagccatcattctactatcaacattac

SEQ ID NO: 57845 - DNA, 120 bp, Homo sapiens
  misc_feature: 1424 for SV(W|O) and mtDNA
ctcaacagttaaatcaacaaaactgctcgccagaacactacgagccacagcttaaaactcaaaggacctggcggtgcttcatatccctctagaggagcctgttctgtaatcgataaaccc

SEQ ID NO: 57846 - DNA, 120 bp, Homo sapiens
  misc_feature: 1424 for SV(W|O) and mtDNA
gggaggacatagcctatgaaggctgttgctatagttgcaagcaggaggataatgccgatgtttcaggtttctgagtagagaaatgatccgtaatataggcctcgcccgatgtgtaggaag

SEQ ID NO: 57847 - DNA, 120 bp, Homo sapiens
  misc_feature: 1424 for SV(W|O) and mtDNA
cgcaaacatatcatacacaaacgcctgagccctatctattactctcatcgctacctccctgacaagcgcctatagcactcgaataattcttctcaccctaacaggtcaacctcgcttccc

SEQ ID NO: 57848 - DNA, 120 bp, Homo sapiens
  misc_feature: 1424 for SV(W|O) and mtDNA
ggaggttgggttctgctccgaggtcgccccaaccgaaatttttaatgcaggtttggtagtttaggacctgtgggtttgttaggtactgtttgcattaataaattaaagctccatagggtc

SEQ ID NO: 57849 - DNA, 120 bp, Homo sapiens
  misc_feature: 1424 for SV(W|O) and mtDNA
cttgcgctgcatgtgccattaagatatataggatttagcctataatttaactttgacaaagttatgaaatggtttttctaatacctttttgaaaaagtcatggaggccatggggttggct

SEQ ID NO: 57850 - DNA, 120 bp, Homo sapiens
  misc_feature: 1424 for SV(W|O) and mtDNA
atgccgattgtaactattatgagtcctagttgacttgaagtggagaaggctacgatttttttgatgtcattttgtgtaagggcgcagactgctgcgaacagagtggtgatagcgcctaag

SEQ ID NO: 57851 - DNA, 120 bp, Homo sapiens
  misc_feature: 1424 for SV(W|O) and mtDNA
cgtggtgctggagtttaagttgagtagtaggaatgcggtagtagttaggataatataaatagttaaattaagaatggttatgttagggttgtacggtagaactgctattattcatcctat

SEQ ID NO: 57852 - DNA, 120 bp, Homo sapiens
  misc_feature: 1424 for SV(W|O) and mtDNA
cgccgatacggttgtataggattgcttgaatggctgctgtgttggcatctgctcgggcgtatcatcaactgatgagcaagaaggatataattcctacgccctctcagccgatgaacagtt

SEQ ID NO: 57853 - DNA, 120 bp, Homo sapiens
  misc_feature: 1424 for SV(W|O) and mtDNA
atggctttgaagaaggcgtgggtgcagatgtgcaggaatgctaggtgtggttggttgatgccgattgtaactattatgagtcctagttgacttgaagtggagaaggctacgatttttttg

SEQ ID NO: 57854 - DNA, 120 bp, Homo sapiens
  misc_feature: 1424 for SV(W|O) and mtDNA
aatcttagcatactcctcaattacccacataggatgaataatagcagttctaccgtacaaccctaacataaccattcttaatttaactatttatattatcctaactactaccgcattcct

SEQ ID NO: 57855 - DNA, 120 bp, Homo sapiens
  misc_feature: 1424 for SV(W|O) and mtDNA
aatggtttggctaaggttgtctggtagtaaggtggagtgggtttggggctaggtttagctcagagcggtcaagttaagttgaaatctcctaagtgtaagttgggtgctttgtgttaagct

SEQ ID NO: 57856 - DNA, 120 bp, Homo sapiens
  misc_feature: 1423 for SV(W|O) and mtDNA
aaactaggaatagccccctttcacttctgagtcccagaggttacccaaggcacccctctgacatccggcctgcttcttctcacatgacaaaaactagcccccatctcaatcatataccaa

SEQ ID NO: 57857 - DNA, 120 bp, Homo sapiens
  misc_feature: 1423 for SV(W|O) and mtDNA
ttgctcatcagttgatgatacgcccgagcagatgccaacacagcagccattcaagcaatcctatacaaccgtatcggcgatatcggtttcatcctcgccttagcatgatttatcctacac

SEQ ID NO: 57858 - DNA, 120 bp, Homo sapiens
  misc_feature: 1423 for SV(W|O) and mtDNA
cgggaggacatagcctatgaaggctgttgctatagttgcaagcaggaggataatgccgatgtttcaggtttctgagtagagaaatgatccgtaatataggcctcgcccgatgtgtaggaa

SEQ ID NO: 57859 - DNA, 120 bp, Homo sapiens
  misc_feature: 1423 for SV(W|O) and mtDNA
ttatcatttgttttgaggttagtttgattagtcattgttgggtggtgattagtcggttgttgatgagatatttggaggtggggatcaatagagggggaaatagaatgatcagtactgcgg

SEQ ID NO: 57860 - DNA, 120 bp, Homo sapiens
  misc_feature: 1423 for SV(W|O) and mtDNA
agggggtttaagctcctattatttactctatcaaagtaactcttttatcagacatatttcttaggtttgagggggaatgctggagattgtaatgggtatggagacatatcatataagtaa

SEQ ID NO: 57861 - DNA, 120 bp, Homo sapiens
  misc_feature: 1423 for SV(W|O) and mtDNA
tggttatcatttgttttgaggttagtttgattagtcattgttgggtggtgattagtcggttgttgatgagatatttggaggtggggatcaatagagggggaaatagaatgatcagtactg

SEQ ID NO: 57862 - DNA, 120 bp, Homo sapiens
  misc_feature: 1423 for SV(W|O) and mtDNA
gcctacgacaaacagacctaaaatcgctcattgcatactcttcaatcagccacatagccctcgtagtaacagccattctcatccaaaccccctgaagcttcaccggcgcagtcattctca

SEQ ID NO: 57863 - DNA, 120 bp, Homo sapiens
  misc_feature: 1423 for SV(W|O) and mtDNA
ctcatcttcctaattaccatactaatcttagttaccgctaacaacctattccaactgttcatcggctgagagggcgtaggaattatatccttcttgctcatcagttgatgatacgcccga

SEQ ID NO: 57864 - DNA, 120 bp, Homo sapiens
  misc_feature: 1423 for SV(W|O) and mtDNA
tcgccgatacggttgtataggattgcttgaatggctgctgtgttggcatctgctcgggcgtatcatcaactgatgagcaagaaggatataattcctacgccctctcagccgatgaacagt

SEQ ID NO: 57865 - DNA, 120 bp, Homo sapiens
  misc_feature: 1423 for SV(W|O) and mtDNA
ggtctcctcctccggcggggtcgaagaaggtggtgttgaggttgcggtctgttagtagtatagtgatgccagcagctaggactgggagagataggagaagtaggactgctgtgattagga

SEQ ID NO: 57866 - DNA, 120 bp, Homo sapiens
  misc_feature: 1423 for SV(W|O) and mtDNA
gcctacacaattctccgatccgtccctaacaaactaggaggcgtccttgccctattactatccatcctcatcctagcaataatccccatcctccatatatccaaacaacaaagcataata

SEQ ID NO: 57867 - DNA, 120 bp, Homo sapiens
  misc_feature: 1423 for SV(W|O) and mtDNA
tattataataaacaccctcaccactacaatcttcctaggaacaacatatgacgcactctcccctgaactctacacaacatattttgtcaccaagaccctacttctaacctccctgttctt

SEQ ID NO: 57868 - DNA, 120 bp, Homo sapiens
  misc_feature: 1423 for SV(W|O) and mtDNA
tatggctttgaagaaggcgtgggtgcagatgtgcaggaatgctaggtgtggttggttgatgccgattgtaactattatgagtcctagttgacttgaagtggagaaggctacgattttttt

SEQ ID NO: 57869 - DNA, 120 bp, Homo sapiens
  misc_feature: 1423 for SV(W|O) and mtDNA
ctcacgggaggacatagcctatgaaggctgttgctatagttgcaagcaggaggataatgccgatgtttcaggtttctgagtagagaaatgatccgtaatataggcctcgcccgatgtgta

SEQ ID NO: 57870 - DNA, 120 bp, Homo sapiens
  misc_feature: 1423 for SV(W|O) and mtDNA
gtataaccaacattttcggggtatgggcccgatagcttatttagctgaccttactttaggatggggtgtgataggtggcacggagaattttggattctcagggatgggttcgattctcat

SEQ ID NO: 57871 - DNA, 120 bp, Homo sapiens
  misc_feature: 1423 for SV(W|O) and mtDNA
ctactcatcttcctaattaccatactaatcttagttaccgctaacaacctattccaactgttcatcggctgagagggcgtaggaattatatccttcttgctcatcagttgatgatacgcc

SEQ ID NO: 57872 - DNA, 120 bp, Homo sapiens
  misc_feature: 1423 for SV(W|O) and mtDNA
ggcgaggatgaaaccgatatcgccgatacggttgtataggattgcttgaatggctgctgtgttggcatctgctcgggcgtatcatcaactgatgagcaagaaggatataattcctacgcc

SEQ ID NO: 57873 - DNA, 120 bp, Homo sapiens
  misc_feature: 1423 for SV(W|O) and mtDNA
ctgctaatgctaggctgccaatggtgagggaggttgaagtgagaggtatggttttgagtagtcctcctatttttcgaatatcttgttcattgttaaggttgtggatgatggacccggagc

SEQ ID NO: 57874 - DNA, 120 bp, Homo sapiens
  misc_feature: 1423 for SV(W|O) and mtDNA
gcctgcccagtgacacatgtttaacggccgcggtaccctaaccgtgcaaaggtagcataatcacttgttccttaaatagggacctgtatgaatggctccacgagggttcagctgtctctt

SEQ ID NO: 57875 - DNA, 120 bp, Homo sapiens
  misc_feature: 1423 for SV(W|O) and mtDNA
atagaaaacaaccgaaaccaaataattcaagcactgcttattacaattttactgggtctctattttaccctcctacaagcctcagagtacttcgagtctcccttcaccatttccgacggc

SEQ ID NO: 57876 - DNA, 120 bp, Homo sapiens
  misc_feature: 1423 for SV(W|O) and mtDNA
gcagttctaccgtacaaccctaacataaccattcttaatttaactatttatattatcctaactactaccgcattcctactactcaacttaaactccagcaccacgaccctactactatct

SEQ ID NO: 57877 - DNA, 120 bp, Homo sapiens
  misc_feature: 1423 for SV(W|O) and mtDNA
aattttggtgcaactccaaataaaagtaataaccatgcacactactataaccaccctaaccctgacttccctaattccccccatccttaccaccctcgttaaccctaacaaaaaaaactc

SEQ ID NO: 57878 - DNA, 120 bp, Homo sapiens
  misc_feature: 1423 for SV(W|O) and mtDNA
cattctactatcaacattactaataagtggctcctttaacctctccacccttatcacaacacaagaacacctctgattactcctgccatcatgacccttggccataatatgatttatctc

SEQ ID NO: 57879 - DNA, 120 bp, Homo sapiens
  misc_feature: 1423 for SV(W|O) and mtDNA
gaactcactggaacggggatgcttgcatgtgtaatcttactaagagctaatagaaaggctaggaccaaacctatttgtttatggggtgatgtgagcccgtctaaacattttcagtgtatt

SEQ ID NO: 57880 - DNA, 120 bp, Homo sapiens
  misc_feature: 1423 for SV(W|O) and mtDNA
atgcgattaccgggctctgccatcttaacaaaccctgttcttgggtgggtgtgggtataatactaagttgagatgatatcatttacgggggaaggcgctttgtgaagtaggccttatttc

SEQ ID NO: 57881 - DNA, 120 bp, Homo sapiens
  misc_feature: 1423 for SV(W|O) and mtDNA
ctgatcagggtgagcatcaaactcaaactacgccctgatcggcgcactgcgagcagtagcccaaacaatctcatatgaagtcaccctagccatcattctactatcaacattactaataag

SEQ ID NO: 57882 - DNA, 120 bp, Homo sapiens
  misc_feature: 1423 for SV(W|O) and mtDNA
ctctaagattaaaaatgccctagcccacttcttaccacaaggcacacctacaccccttatccccatactagttattatcgaaaccatcagcctactcattcaaccaatagccctggccgt

SEQ ID NO: 57883 - DNA, 120 bp, Homo sapiens
  misc_feature: 1423 for SV(W|O) and mtDNA
cgcctgcccagtgacacatgtttaacggccgcggtaccctaaccgtgcaaaggtagcataatcacttgttccttaaatagggacctgtatgaatggctccacgagggttcagctgtctct

SEQ ID NO: 57884 - DNA, 120 bp, Homo sapiens
  misc_feature: 1423 for SV(W|O) and mtDNA
cctcacgggaggacatagcctatgaaggctgttgctatagttgcaagcaggaggataatgccgatgtttcaggtttctgagtagagaaatgatccgtaatataggcctcgcccgatgtgt

SEQ ID NO: 57885 - DNA, 120 bp, Homo sapiens
  misc_feature: 1423 for SV(W|O) and mtDNA
ccaaactgggattagataccccactatgcttagccctaaacctcaacagttaaatcaacaaaactgctcgccagaacactacgagccacagcttaaaactcaaaggacctggcggtgctt

SEQ ID NO: 57886 - DNA, 120 bp, Homo sapiens
  misc_feature: 1423 for SV(W|O) and mtDNA
agctaagacccaaactgggattagataccccactatgcttagccctaaacctcaacagttaaatcaacaaaactgctcgccagaacactacgagccacagcttaaaactcaaaggacctg

SEQ ID NO: 57887 - DNA, 120 bp, Homo sapiens
  misc_feature: 1423 for SV(W|O) and mtDNA
aggtatggttttgagtagtcctcctatttttcgaatatcttgttcattgttaaggttgtggatgatggacccggagcacataaatagtatggctttgaagaaggcgtgggtgcagatgtg

SEQ ID NO: 57888 - DNA, 120 bp, Homo sapiens
  misc_feature: 1423 for SV(W|O) and mtDNA
atatggggagtagtgtgattgaggtggagtagattaggcgtaggtagaagtagaggttaaggagggtgatggtggctatgatggtggggatgatgaggctattgttttttgtgaattctt

SEQ ID NO: 57889 - DNA, 120 bp, Homo sapiens
  misc_feature: 1423 for SV(W|O) and mtDNA
aaattttggtgcaactccaaataaaagtaataaccatgcacactactataaccaccctaaccctgacttccctaattccccccatccttaccaccctcgttaaccctaacaaaaaaaact

SEQ ID NO: 57890 - DNA, 120 bp, Homo sapiens
  misc_feature: 1423 for SV(W|O) and mtDNA
acatcacctctagcatcaccagtattagaggcaccgcctgcccagtgacacatgtttaacggccgcggtaccctaaccgtgcaaaggtagcataatcacttgttccttaaatagggacct

SEQ ID NO: 57891 - DNA, 120 bp, Homo sapiens
  misc_feature: 1422 for SV(W|O) and mtDNA
gaatgggtacaatgaggagtaggaggttggccatgggtatgttgttaagaagaggaattgaacctctgactgtaaagttttaagttttatgcgattaccgggctctgccatcttaacaaa

SEQ ID NO: 57892 - DNA, 120 bp, Homo sapiens
  misc_feature: 1422 for SV(W|O) and mtDNA
ttactagaagtgtgaaaacgtaggcttggattaaggcgacagcgatttctaggatagtcagtagaattagaattgtgaagatgataagtgtagagggaaggttaatggttgatattgcta

SEQ ID NO: 57893 - DNA, 120 bp, Homo sapiens
  misc_feature: 1422 for SV(W|O) and mtDNA
tagaatgggtacaatgaggagtaggaggttggccatgggtatgttgttaagaagaggaattgaacctctgactgtaaagttttaagttttatgcgattaccgggctctgccatcttaaca

SEQ ID NO: 57894 - DNA, 120 bp, Homo sapiens
  misc_feature: 1422 for SV(W|O) and mtDNA
tgtccggagagtatattgttgaagaggatagctattagaaggattatggatgcggttgcttgcgtgaggaaatacttgatggcagcttctgtggaacgagggtttatttttttggttaga

SEQ ID NO: 57895 - DNA, 120 bp, Homo sapiens
  misc_feature: 1422 for SV(W|O) and mtDNA
tggctgttactacgagggctatgtggctgattgaagagtatgcaatgagcgattttaggtctgtttgtcgtaggcagatggagcttgttataattatgcctcatagggatagtacaagga

SEQ ID NO: 57896 - DNA, 120 bp, Homo sapiens
  misc_feature: 1422 for SV(W|O) and mtDNA
tgcccaagaactatcaaactcctgagccaacaacttaatatgactagcttacacaatagcttttatagtaaagatacctctttacggactccacttatgactccctaaagcccatgtcga

SEQ ID NO: 57897 - DNA, 120 bp, Homo sapiens
  misc_feature: 1422 for SV(W|O) and mtDNA
agttaaatcaacaaaactgctcgccagaacactacgagccacagcttaaaactcaaaggacctggcggtgcttcatatccctctagaggagcctgttctgtaatcgataaaccccgatca

SEQ ID NO: 57898 - DNA, 120 bp, Homo sapiens
  misc_feature: 1422 for SV(W|O) and mtDNA
ataggaggagaatgggggataggtgtatgaacatgagggtgttttctcgtgtgaatgagggttttatgttgttaatgtggtgggtgagtgagccccattgtgttgtggtaaatatgtaga

SEQ ID NO: 57899 - DNA, 120 bp, Homo sapiens
  misc_feature: 1422 for SV(W|O) and mtDNA
gagacacctgctaggtgtaaggagaagatggttaggtctacggaggctccagggtgggagtagttccctgctaagggagggtagactgttcaacctgttcctgctccggcctccactata

SEQ ID NO: 57900 - DNA, 120 bp, Homo sapiens
  misc_feature: 1422 for SV(W|O) and mtDNA
taaaactaggaatagccccctttcacttctgagtcccagaggttacccaaggcacccctctgacatccggcctgcttcttctcacatgacaaaaactagcccccatctcaatcatatacc

SEQ ID NO: 57901 - DNA, 120 bp, Homo sapiens
  misc_feature: 1422 for SV(W|O) and mtDNA
gctaatgctaggctgccaatggtgagggaggttgaagtgagaggtatggttttgagtagtcctcctatttttcgaatatcttgttcattgttaaggttgtggatgatggacccggagcac

SEQ ID NO: 57902 - DNA, 120 bp, Homo sapiens
  misc_feature: 1422 for SV(W|O) and mtDNA
gaataatagcagttctaccgtacaaccctaacataaccattcttaatttaactatttatattatcctaactactaccgcattcctactactcaacttaaactccagcaccacgaccctac

SEQ ID NO: 57903 - DNA, 120 bp, Homo sapiens
  misc_feature: 1422 for SV(W|O) and mtDNA
ctacgcaaaatcttagcatactcctcaattacccacataggatgaataatagcagttctaccgtacaaccctaacataaccattcttaatttaactatttatattatcctaactactacc

SEQ ID NO: 57904 - DNA, 120 bp, Homo sapiens
  misc_feature: 1422 for SV(W|O) and mtDNA
gggtgatgaggaatagtgtaaggagtatgggggtaattatggtgggccatacggtagtatttagttggggcatttcactgtaaagaggtgttggttctcttaatctttaacttaaaaggt

SEQ ID NO: 57905 - DNA, 120 bp, Homo sapiens
  misc_feature: 1422 for SV(W|O) and mtDNA
ccggacgtctaaaccaaaccactttcaccgctacacgaccgggggtatactacggtcaatgctctgaaatctgtggagcaaaccacagtttcatgcccatcgtcctagaattaattcccc

SEQ ID NO: 57906 - DNA, 120 bp, Homo sapiens
  misc_feature: 1422 for SV(W|O) and mtDNA
gcaaccttctaggtaacgaccacatctacaacgttatcgtcacagcccatgcatttgtaataatcttcttcatagtaatacccatcataatcggaggctttggcaactgactagttcccc

SEQ ID NO: 57907 - DNA, 120 bp, Homo sapiens
  misc_feature: 1422 for SV(W|O) and mtDNA
ggagacacctgctaggtgtaaggagaagatggttaggtctacggaggctccagggtgggagtagttccctgctaagggagggtagactgttcaacctgttcctgctccggcctccactat

SEQ ID NO: 57908 - DNA, 120 bp, Homo sapiens
  misc_feature: 1422 for SV(W|O) and mtDNA
ctgtaaatctaaagacaggggttaggcctctttttaccagctccgaggtgattttcatattgaattgcaaattcgaagaagcagcttcaaacctgccggggcttctcccgccttttttcc

SEQ ID NO: 57909 - DNA, 120 bp, Homo sapiens
  misc_feature: 1422 for SV(W|O) and mtDNA
aaatatcactctcctacttacaggactcaacatactagtcacagccctatactccctctacatatttaccacaacacaatggggctcactcacccaccacattaacaacataaaaccctc

SEQ ID NO: 57910 - DNA, 120 bp, Homo sapiens
  misc_feature: 1422 for SV(W|O) and mtDNA
cagttctaccgtacaaccctaacataaccattcttaatttaactatttatattatcctaactactaccgcattcctactactcaacttaaactccagcaccacgaccctactactatctc

SEQ ID NO: 57911 - DNA, 120 bp, Homo sapiens
  misc_feature: 1422 for SV(W|O) and mtDNA
cttagcatactcctcaattacccacataggatgaataatagcagttctaccgtacaaccctaacataaccattcttaatttaactatttatattatcctaactactaccgcattcctact

SEQ ID NO: 57912 - DNA, 120 bp, Homo sapiens
  misc_feature: 1422 for SV(W|O) and mtDNA
ctgcttttaggcctactatgggtgttaaattttttactctctctacaaggttttttcctagtgtccaaagagctgttcctctttggactaacagttaaatttacaaggggatttagaggg

SEQ ID NO: 57913 - DNA, 120 bp, Homo sapiens
  misc_feature: 1422 for SV(W|O) and mtDNA
ctattaccttcttattatttgatctagaaattgccctccttttacccctaccatgagccctacaaacaactaacctgccactaatagttatgtcatccctcttattaatcatcatcctag

SEQ ID NO: 57914 - DNA, 120 bp, Homo sapiens
  misc_feature: 1422 for SV(W|O) and mtDNA
atactttatttgggtaaatggtttggctaaggttgtctggtagtaaggtggagtgggtttggggctaggtttagctcagagcggtcaagttaagttgaaatctcctaagtgtaagttggg

SEQ ID NO: 57915 - DNA, 120 bp, Homo sapiens
  misc_feature: 1422 for SV(W|O) and mtDNA
agtagttaggataatataaatagttaaattaagaatggttatgttagggttgtacggtagaactgctattattcatcctatgtgggtaattgaggagtatgctaagattttgcgtagctg

SEQ ID NO: 57916 - DNA, 120 bp, Homo sapiens
  misc_feature: 1421 for SV(W|O) and mtDNA
caaaaattttggtgcaactccaaataaaagtaataaccatgcacactactataaccaccctaaccctgacttccctaattccccccatccttaccaccctcgttaaccctaacaaaaaaa

SEQ ID NO: 57917 - DNA, 120 bp, Homo sapiens
  misc_feature: 1421 for SV(W|O) and mtDNA
ctgtggaacgagggtttatttttttggttagaactggaataaaagctagcatgtttatttctaggcctactcaggtaaaaaatcagtgcgagcttagcgctgtgatgagtgtgcctgcaa

SEQ ID NO: 57918 - DNA, 120 bp, Homo sapiens
  misc_feature: 1421 for SV(W|O) and mtDNA
ttctagtaagcctctacctgcacgacaacacataatgacccaccaatcacatgcctatcatatagtaaaacccagcccatgacccctaacaggggccctctcagccctcctaatgacctc

SEQ ID NO: 57919 - DNA, 120 bp, Homo sapiens
  misc_feature: 1421 for SV(W|O) and mtDNA
tctgatcagggtgagcatcaaactcaaactacgccctgatcggcgcactgcgagcagtagcccaaacaatctcatatgaagtcaccctagccatcattctactatcaacattactaataa

SEQ ID NO: 57920 - DNA, 120 bp, Homo sapiens
  misc_feature: 1421 for SV(W|O) and mtDNA
ttacctcctcaaagcaatacactgaaaatgtttagacgggctcacatcaccccataaacaaataggtttggtcctagcctttctattagctcttagtaagattacacatgcaagcatccc

SEQ ID NO: 57921 - DNA, 120 bp, Homo sapiens
  misc_feature: 1421 for SV(W|O) and mtDNA
ttaaatttgcccacagaaccctctaaatccccttgtaaatttaactgttagtccaaagaggaacagctctttggacactaggaaaaaaccttgtagagagagtaaaaaatttaacaccca

SEQ ID NO: 57922 - DNA, 120 bp, Homo sapiens
  misc_feature: 1421 for SV(W|O) and mtDNA
cgcaaaatcttagcatactcctcaattacccacataggatgaataatagcagttctaccgtacaaccctaacataaccattcttaatttaactatttatattatcctaactactaccgca

SEQ ID NO: 57923 - DNA, 120 bp, Homo sapiens
  misc_feature: 1421 for SV(W|O) and mtDNA
gacatagcctatgaaggctgttgctatagttgcaagcaggaggataatgccgatgtttcaggtttctgagtagagaaatgatccgtaatataggcctcgcccgatgtgtaggaagaggca

SEQ ID NO: 57924 - DNA, 120 bp, Homo sapiens
  misc_feature: 1421 for SV(W|O) and mtDNA
tgagggtgttttctcgtgtgaatgagggttttatgttgttaatgtggtgggtgagtgagccccattgtgttgtggtaaatatgtagagggagtatagggctgtgactagtatgttgagtc

SEQ ID NO: 57925 - DNA, 120 bp, Homo sapiens
  misc_feature: 1421 for SV(W|O) and mtDNA
tctactatcaacattactaataagtggctcctttaacctctccacccttatcacaacacaagaacacctctgattactcctgccatcatgacccttggccataatatgatttatctccac

SEQ ID NO: 57926 - DNA, 120 bp, Homo sapiens
  misc_feature: 1421 for SV(W|O) and mtDNA
tcgctaacctcgccttaccccccactattaacctactgggagaactctctgtgctagtaaccacgttctcctgatcaaatatcactctcctacttacaggactcaacatactagtcacag

SEQ ID NO: 57927 - DNA, 120 bp, Homo sapiens
  misc_feature: 1421 for SV(W|O) and mtDNA
acacttctagtaagcctctacctgcacgacaacacataatgacccaccaatcacatgcctatcatatagtaaaacccagcccatgacccctaacaggggccctctcagccctcctaatga

SEQ ID NO: 57928 - DNA, 120 bp, Homo sapiens
  misc_feature: 1421 for SV(W|O) and mtDNA
tcatcttcctaattaccatactaatcttagttaccgctaacaacctattccaactgttcatcggctgagagggcgtaggaattatatccttcttgctcatcagttgatgatacgcccgag

SEQ ID NO: 57929 - DNA, 120 bp, Homo sapiens
  misc_feature: 1421 for SV(W|O) and mtDNA
tcacacttctagtaagcctctacctgcacgacaacacataatgacccaccaatcacatgcctatcatatagtaaaacccagcccatgacccctaacaggggccctctcagccctcctaat

SEQ ID NO: 57930 - DNA, 120 bp, Homo sapiens
  misc_feature: 1421 for SV(W|O) and mtDNA
atgtggtctttggagtagaaacctgtgaggaaaggtattcctgctaatgctaggctgccaatggtgagggaggttgaagtgagaggtatggttttgagtagtcctcctatttttcgaata

SEQ ID NO: 57931 - DNA, 120 bp, Homo sapiens
  misc_feature: 1421 for SV(W|O) and mtDNA
tatcatttgttttgaggttagtttgattagtcattgttgggtggtgattagtcggttgttgatgagatatttggaggtggggatcaatagagggggaaatagaatgatcagtactgcggc

SEQ ID NO: 57932 - DNA, 120 bp, Homo sapiens
  misc_feature: 1421 for SV(W|O) and mtDNA
tatagaatggggtctcctcctccggcggggtcgaagaaggtggtgttgaggttgcggtctgttagtagtatagtgatgccagcagctaggactgggagagataggagaagtaggactgct

SEQ ID NO: 57933 - DNA, 120 bp, Homo sapiens
  misc_feature: 1421 for SV(W|O) and mtDNA
atttacgggggaaggcgctttgtgaagtaggccttatttctcttgtcctttcgtacagggaggaatttgaagtagatagaaaccgacctggattactccggtctgaactcagatcacgta

SEQ ID NO: 57934 - DNA, 120 bp, Homo sapiens
  misc_feature: 1421 for SV(W|O) and mtDNA
taagcctctacctgcacgacaacacataatgacccaccaatcacatgcctatcatatagtaaaacccagcccatgacccctaacaggggccctctcagccctcctaatgacctccggcct

SEQ ID NO: 57935 - DNA, 120 bp, Homo sapiens
  misc_feature: 1421 for SV(W|O) and mtDNA
gttatcatttgttttgaggttagtttgattagtcattgttgggtggtgattagtcggttgttgatgagatatttggaggtggggatcaatagagggggaaatagaatgatcagtactgcg

SEQ ID NO: 57936 - DNA, 120 bp, Homo sapiens
  misc_feature: 1421 for SV(W|O) and mtDNA
cacttctagtaagcctctacctgcacgacaacacataatgacccaccaatcacatgcctatcatatagtaaaacccagcccatgacccctaacaggggccctctcagccctcctaatgac

SEQ ID NO: 57937 - DNA, 120 bp, Homo sapiens
  misc_feature: 1421 for SV(W|O) and mtDNA
ggctttttgcccaaatgggccattatcgaagaattcacaaaaaacaatagcctcatcatccccaccatcatagccaccatcaccctccttaacctctacttctacctacgcctaatctac

SEQ ID NO: 57938 - DNA, 120 bp, Homo sapiens
  misc_feature: 1421 for SV(W|O) and mtDNA
gtaataaacttcgccttaattttaataatcaacaccctcctagccttactactaataattattacattttgactaccacaactcaacggctacatagaaaaatccaccccttacgagtgc

SEQ ID NO: 57939 - DNA, 120 bp, Homo sapiens
  misc_feature: 1421 for SV(W|O) and mtDNA
aattattcgagtgctataggcgcttgtcagggaggtagcgatgagagtaatagatagggctcaggcgtttgtgtatgatatgtttgcggtttcgatgatgtggtctttggagtagaaacc

SEQ ID NO: 57940 - DNA, 120 bp, Homo sapiens
  misc_feature: 1421 for SV(W|O) and mtDNA
ggggtgccttgggtaacctctgggactcagaagtgaaagggggctattcctagttttattgctatagccattatgattattaatgatgagtactgattggtagtattggttatggttcat

SEQ ID NO: 57941 - DNA, 120 bp, Homo sapiens
  misc_feature: 1421 for SV(W|O) and mtDNA
ggccacctactcatgcacctaattggaagcgccaccctagcaatatcaaccattaaccttccctctacacttatcatcttcacaattctaattctactgactatcctagaaatcgctgtc

SEQ ID NO: 57942 - DNA, 120 bp, Homo sapiens
  misc_feature: 1421 for SV(W|O) and mtDNA
ccgagtaacgtcggggcattccggataggccgagaaagtgttgtgggaagaaagttagatttacgccgatgaatatgatagtgaaatggattttggcgtaggtttggtctagggtgtagc

SEQ ID NO: 57943 - DNA, 120 bp, Homo sapiens
  misc_feature: 1421 for SV(W|O) and mtDNA
gcccgatgtgtaggaagaggcagataaagaatattgaggcgccattggcgtgaaggtagcggatgattcagccataatttacgtctcgagtgatgtgggcgattgatgaaaaggcggttg

SEQ ID NO: 57944 - DNA, 120 bp, Homo sapiens
  misc_feature: 1421 for SV(W|O) and mtDNA
gcccgaatgatatttcctattcgcctacacaattctccgatccgtccctaacaaactaggaggcgtccttgccctattactatccatcctcatcctagcaataatccccatcctccatat

SEQ ID NO: 57945 - DNA, 120 bp, Homo sapiens
  misc_feature: 1421 for SV(W|O) and mtDNA
agcatcaccagtattagaggcaccgcctgcccagtgacacatgtttaacggccgcggtaccctaaccgtgcaaaggtagcataatcacttgttccttaaatagggacctgtatgaatggc

SEQ ID NO: 57946 - DNA, 120 bp, Homo sapiens
  misc_feature: 1421 for SV(W|O) and mtDNA
gccatggggttggcttgaaaccagctttggggggttcgattccttccttttttgtctagattttatgtatacgggttcttcgaatgtgtggtagggtggggggcatccatatagtcactc

SEQ ID NO: 57947 - DNA, 120 bp, Homo sapiens
  misc_feature: 1421 for SV(W|O) and mtDNA
gattttcatattgaattgcaaattcgaagaagcagcttcaaacctgccggggcttctcccgccttttttcccggcggcgggagaagtagattgaagccagttgattagggtgcttagctg

SEQ ID NO: 57948 - DNA, 120 bp, Homo sapiens
  misc_feature: 1421 for SV(W|O) and mtDNA
gaggttgggttctgctccgaggtcgccccaaccgaaatttttaatgcaggtttggtagtttaggacctgtgggtttgttaggtactgtttgcattaataaattaaagctccatagggtct

SEQ ID NO: 57949 - DNA, 120 bp, Homo sapiens
  misc_feature: 1421 for SV(W|O) and mtDNA
gaagtgtgaaaacgtaggcttggattaaggcgacagcgatttctaggatagtcagtagaattagaattgtgaagatgataagtgtagagggaaggttaatggttgatattgctagggtgg

SEQ ID NO: 57950 - DNA, 120 bp, Homo sapiens
  misc_feature: 1421 for SV(W|O) and mtDNA
cgccacttatccagtgaaccactatcacgaaaaaaactctacctctctatactaatctccctacaaatctccttaattataacattcacagccacagaactaatcatattttatatcttc

SEQ ID NO: 57951 - DNA, 120 bp, Homo sapiens
  misc_feature: 1421 for SV(W|O) and mtDNA
cggggtttatcgattacagaacaggctcctctagagggatatgaagcaccgccaggtcctttgagttttaagctgtggctcgtagtgttctggcgagcagttttgttgatttaactgttg

SEQ ID NO: 57952 - DNA, 120 bp, Homo sapiens
  misc_feature: 1421 for SV(W|O) and mtDNA
cccaaactgggattagataccccactatgcttagccctaaacctcaacagttaaatcaacaaaactgctcgccagaacactacgagccacagcttaaaactcaaaggacctggcggtgct

SEQ ID NO: 57953 - DNA, 120 bp, Homo sapiens
  misc_feature: 1421 for SV(W|O) and mtDNA
ccagccaggcaaccttctaggtaacgaccacatctacaacgttatcgtcacagcccatgcatttgtaataatcttcttcatagtaatacccatcataatcggaggctttggcaactgact

SEQ ID NO: 57954 - DNA, 120 bp, Homo sapiens
  misc_feature: 1421 for SV(W|O) and mtDNA
catctgcctacgacaaacagacctaaaatcgctcattgcatactcttcaatcagccacatagccctcgtagtaacagccattctcatccaaaccccctgaagcttcaccggcgcagtcat

SEQ ID NO: 57955 - DNA, 120 bp, Homo sapiens
  misc_feature: 1421 for SV(W|O) and mtDNA
attgcgagacgctggagccggagcaccctatgtcgcagtatctgtctttgattcctgcctcatcccattatttatcgcacctacgttcaatattacaggcgaacatacttactaaagtgt

SEQ ID NO: 57956 - DNA, 120 bp, Homo sapiens
  misc_feature: 1421 for SV(W|O) and mtDNA
agtatagcttagttaaactttcgtttattgctaaaggttaatcactgctgtttcccgtgggggtgtggctaggctaagcgttttgagctgcattgctgcgtgcttgatgcttgtcccttt

SEQ ID NO: 57957 - DNA, 120 bp, Homo sapiens
  misc_feature: 1421 for SV(W|O) and mtDNA
agctatcgggcccataccccgaaaatgttggttatacccttcccgtactaattaatcccctggcccaacccgtcatctactctaccatctttgcaggcacactcatcacagcgctaagct

SEQ ID NO: 57958 - DNA, 120 bp, Homo sapiens
  misc_feature: 1420 for SV(W|O) and mtDNA
tttatgcgattaccgggctctgccatcttaacaaaccctgttcttgggtgggtgtgggtataatactaagttgagatgatatcatttacgggggaaggcgctttgtgaagtaggccttat

SEQ ID NO: 57959 - DNA, 120 bp, Homo sapiens
  misc_feature: 1420 for SV(W|O) and mtDNA
tgtgagaagaagcaggccggatgtcagaggggtgccttgggtaacctctgggactcagaagtgaaagggggctattcctagttttattgctatagccattatgattattaatgatgagta

SEQ ID NO: 57960 - DNA, 120 bp, Homo sapiens
  misc_feature: 1420 for SV(W|O) and mtDNA
tgccatcttaacaaaccctgttcttgggtgggtgtgggtataatactaagttgagatgatatcatttacgggggaaggcgctttgtgaagtaggccttatttctcttgtcctttcgtaca

SEQ ID NO: 57961 - DNA, 120 bp, Homo sapiens
  misc_feature: 1420 for SV(W|O) and mtDNA
tgggggaagtatgtaggagttgaagattagtccgccgtagtcggtgtactcgtaggttcagtaccattggtggccaattgatttgatggtaagggagggatcgttgacctcgtctgttat

SEQ ID NO: 57962 - DNA, 120 bp, Homo sapiens
  misc_feature: 1420 for SV(W|O) and mtDNA
tctactcatcttcctaattaccatactaatcttagttaccgctaacaacctattccaactgttcatcggctgagagggcgtaggaattatatccttcttgctcatcagttgatgatacgc

SEQ ID NO: 57963 - DNA, 120 bp, Homo sapiens
  misc_feature: 1420 for SV(W|O) and mtDNA
gttgaagattagtccgccgtagtcggtgtactcgtaggttcagtaccattggtggccaattgatttgatggtaagggagggatcgttgacctcgtctgttatgtaaaggatgcgtaggga

SEQ ID NO: 57964 - DNA, 120 bp, Homo sapiens
  misc_feature: 1420 for SV(W|O) and mtDNA
gtggttggttgatgccgattgtaactattatgagtcctagttgacttgaagtggagaaggctacgatttttttgatgtcattttgtgtaagggcgcagactgctgcgaacagagtggtga

SEQ ID NO: 57965 - DNA, 120 bp, Homo sapiens
  misc_feature: 1420 for SV(W|O) and mtDNA
aagcctctacctgcacgacaacacataatgacccaccaatcacatgcctatcatatagtaaaacccagcccatgacccctaacaggggccctctcagccctcctaatgacctccggccta

SEQ ID NO: 57966 - DNA, 120 bp, Homo sapiens
  misc_feature: 1420 for SV(W|O) and mtDNA
taggaggagaatgggggataggtgtatgaacatgagggtgttttctcgtgtgaatgagggttttatgttgttaatgtggtgggtgagtgagccccattgtgttgtggtaaatatgtagag

SEQ ID NO: 57967 - DNA, 120 bp, Homo sapiens
  misc_feature: 1420 for SV(W|O) and mtDNA
tagcctagccgtttactcaatcctctgatcagggtgagcatcaaactcaaactacgccctgatcggcgcactgcgagcagtagcccaaacaatctcatatgaagtcaccctagccatcat

SEQ ID NO: 57968 - DNA, 120 bp, Homo sapiens
  misc_feature: 1420 for SV(W|O) and mtDNA
tagaatggggtctcctcctccggcggggtcgaagaaggtggtgttgaggttgcggtctgttagtagtatagtgatgccagcagctaggactgggagagataggagaagtaggactgctgt

SEQ ID NO: 57969 - DNA, 120 bp, Homo sapiens
  misc_feature: 1420 for SV(W|O) and mtDNA
tacttgcgctgcatgtgccattaagatatataggatttagcctataatttaactttgacaaagttatgaaatggtttttctaatacctttttgaaaaagtcatggaggccatggggttgg

SEQ ID NO: 57970 - DNA, 120 bp, Homo sapiens
  misc_feature: 1420 for SV(W|O) and mtDNA
tactcatcttcctaattaccatactaatcttagttaccgctaacaacctattccaactgttcatcggctgagagggcgtaggaattatatccttcttgctcatcagttgatgatacgccc

SEQ ID NO: 57971 - DNA, 120 bp, Homo sapiens
  misc_feature: 1420 for SV(W|O) and mtDNA
tacatagaaaaatccaccccttacgagtgcggcttcgaccctatatcccccgcccgcgtccctttctccataaaattcttcttagtagctattaccttcttattatttgatctagaaatt

SEQ ID NO: 57972 - DNA, 120 bp, Homo sapiens
  misc_feature: 1420 for SV(W|O) and mtDNA
taaatggtttggctaaggttgtctggtagtaaggtggagtgggtttggggctaggtttagctcagagcggtcaagttaagttgaaatctcctaagtgtaagttgggtgctttgtgttaag

SEQ ID NO: 57973 - DNA, 120 bp, Homo sapiens
  misc_feature: 1420 for SV(W|O) and mtDNA
gttttatgcgattaccgggctctgccatcttaacaaaccctgttcttgggtgggtgtgggtataatactaagttgagatgatatcatttacgggggaaggcgctttgtgaagtaggcctt

SEQ ID NO: 57974 - DNA, 120 bp, Homo sapiens
  misc_feature: 1420 for SV(W|O) and mtDNA
aaatgggctacattttctaccccagaaaactacgatagcccttatgaaacttaagggtcgaaggtggatttagcagtaaactgagagtagagtgcttagttgaacagggccctgaagcgc

SEQ ID NO: 57975 - DNA, 120 bp, Homo sapiens
  misc_feature: 1420 for SV(W|O) and mtDNA
gcaaaatcttagcatactcctcaattacccacataggatgaataatagcagttctaccgtacaaccctaacataaccattcttaatttaactatttatattatcctaactactaccgcat

SEQ ID NO: 57976 - DNA, 120 bp, Homo sapiens
  misc_feature: 1420 for SV(W|O) and mtDNA
actgcccaagaactatcaaactcctgagccaacaacttaatatgactagcttacacaatagcttttatagtaaagatacctctttacggactccacttatgactccctaaagcccatgtc

SEQ ID NO: 57977 - DNA, 120 bp, Homo sapiens
  misc_feature: 1420 for SV(W|O) and mtDNA
acgtccgggaattgcatctgtttttaagcctaatgtggggacagctcatgagtgcaagacgtcttgtgatgtaattattatacgaatgggggcttcaatcgggagtactactcgattgtc

SEQ ID NO: 57978 - DNA, 120 bp, Homo sapiens
  misc_feature: 1420 for SV(W|O) and mtDNA
ccgactacggcggactaatcttcaactcctacatacttcccccattattcctagaaccaggcgacctgcgactccttgacgttgacaatcgagtagtactcccgattgaagcccccattc

SEQ ID NO: 57979 - DNA, 120 bp, Homo sapiens
  misc_feature: 1420 for SV(W|O) and mtDNA
cttctgtggaacgagggtttatttttttggttagaactggaataaaagctagcatgtttatttctaggcctactcaggtaaaaaatcagtgcgagcttagcgctgtgatgagtgtgcctg

SEQ ID NO: 57980 - DNA, 120 bp, Homo sapiens
  misc_feature: 1420 for SV(W|O) and mtDNA
ataagggggtttaagctcctattatttactctatcaaagtaactcttttatcagacatatttcttaggtttgagggggaatgctggagattgtaatgggtatggagacatatcatataag

SEQ ID NO: 57981 - DNA, 120 bp, Homo sapiens
  misc_feature: 1420 for SV(W|O) and mtDNA
cctgctaatgctaggctgccaatggtgagggaggttgaagtgagaggtatggttttgagtagtcctcctatttttcgaatatcttgttcattgttaaggttgtggatgatggacccggag

SEQ ID NO: 57982 - DNA, 120 bp, Homo sapiens
  misc_feature: 1420 for SV(W|O) and mtDNA
ctatataaatgcgtaggggttttagttaaatgtcctttgaagtatacttgaggagggtgacgggcggtgtgtacgcgcttcagggccctgttcaactaagcactctactctcagtttact

SEQ ID NO: 57983 - DNA, 120 bp, Homo sapiens
  misc_feature: 1420 for SV(W|O) and mtDNA
cgtacagggaggaatttgaagtagatagaaaccgacctggattactccggtctgaactcagatcacgtaggactttaatcgttgaacaaacgaacctttaatagcggctgcaccatcggg

SEQ ID NO: 57984 - DNA, 120 bp, Homo sapiens
  misc_feature: 1420 for SV(W|O) and mtDNA
ccttgggtaacctctgggactcagaagtgaaagggggctattcctagttttattgctatagccattatgattattaatgatgagtactgattggtagtattggttatggttcattgtccg

SEQ ID NO: 57985 - DNA, 120 bp, Homo sapiens
  misc_feature: 1420 for SV(W|O) and mtDNA
ccttattcgagccgagctgggccagccaggcaaccttctaggtaacgaccacatctacaacgttatcgtcacagcccatgcatttgtaataatcttcttcatagtaatacccatcataat

SEQ ID NO: 57986 - DNA, 120 bp, Homo sapiens
  misc_feature: 1420 for SV(W|O) and mtDNA
cctacttgcgctgcatgtgccattaagatatataggatttagcctataatttaactttgacaaagttatgaaatggtttttctaatacctttttgaaaaagtcatggaggccatggggtt

SEQ ID NO: 57987 - DNA, 120 bp, Homo sapiens
  misc_feature: 1420 for SV(W|O) and mtDNA
caacttaacttgaccgctctgagctaaacctagccccaaacccactccaccttactaccagacaaccttagccaaaccatttacccaaataaagtataggcgatagaaattgaaacctgg

SEQ ID NO: 57988 - DNA, 120 bp, Homo sapiens
  misc_feature: 1419 for SV(W|O) and mtDNA
ttatgtagcttacctcctcaaagcaatacactgaaaatgtttagacgggctcacatcaccccataaacaaataggtttggtcctagcctttctattagctcttagtaagattacacatgc

SEQ ID NO: 57989 - DNA, 120 bp, Homo sapiens
  misc_feature: 1419 for SV(W|O) and mtDNA
attagaatgggtacaatgaggagtaggaggttggccatgggtatgttgttaagaagaggaattgaacctctgactgtaaagttttaagttttatgcgattaccgggctctgccatcttaa

SEQ ID NO: 57990 - DNA, 120 bp, Homo sapiens
  misc_feature: 1419 for SV(W|O) and mtDNA
tgtcatgtgagaagaagcaggccggatgtcagaggggtgccttgggtaacctctgggactcagaagtgaaagggggctattcctagttttattgctatagccattatgattattaatgat

SEQ ID NO: 57991 - DNA, 120 bp, Homo sapiens
  misc_feature: 1419 for SV(W|O) and mtDNA
gtgtgatagttgagggttgattgctgtacttgcttgtaagcatggggagggggttttgatgtggattgggtttttatgtactacaggtggtcaagtatttatggtaccgtacaatattca

SEQ ID NO: 57992 - DNA, 120 bp, Homo sapiens
  misc_feature: 1419 for SV(W|O) and mtDNA
tccccttttatactaataatcttatagaaatttaggttaaatacagaccaagagccttcaaagccctcagtaagttgcaatacttaatttctgtaacagctaaggactgcaaaaccccac

SEQ ID NO: 57993 - DNA, 120 bp, Homo sapiens
  misc_feature: 1419 for SV(W|O) and mtDNA
tcatttctctactcagaaacctgaaacatcggcattatcctcctgcttgcaactatagcaacagccttcataggctatgtcctcccgtgaggccaaatatcattctgaggggccacagta

SEQ ID NO: 57994 - DNA, 120 bp, Homo sapiens
  misc_feature: 1419 for SV(W|O) and mtDNA
tcattctactatcaacattactaataagtggctcctttaacctctccacccttatcacaacacaagaacacctctgattactcctgccatcatgacccttggccataatatgatttatct

SEQ ID NO: 57995 - DNA, 120 bp, Homo sapiens
  misc_feature: 1419 for SV(W|O) and mtDNA
tcaacagttaaatcaacaaaactgctcgccagaacactacgagccacagcttaaaactcaaaggacctggcggtgcttcatatccctctagaggagcctgttctgtaatcgataaacccc

SEQ ID NO: 57996 - DNA, 120 bp, Homo sapiens
  misc_feature: 1419 for SV(W|O) and mtDNA
tatgcgattaccgggctctgccatcttaacaaaccctgttcttgggtgggtgtgggtataatactaagttgagatgatatcatttacgggggaaggcgctttgtgaagtaggccttattt

SEQ ID NO: 57997 - DNA, 120 bp, Homo sapiens
  misc_feature: 1419 for SV(W|O) and mtDNA
tatactttatttgggtaaatggtttggctaaggttgtctggtagtaaggtggagtgggtttggggctaggtttagctcagagcggtcaagttaagttgaaatctcctaagtgtaagttgg

SEQ ID NO: 57998 - DNA, 120 bp, Homo sapiens
  misc_feature: 1419 for SV(W|O) and mtDNA
taggttcagtaccattggtggccaattgatttgatggtaagggagggatcgttgacctcgtctgttatgtaaaggatgcgtagggatgggagggcgatgaggactaggatgatggcgggc

SEQ ID NO: 57999 - DNA, 120 bp, Homo sapiens
  misc_feature: 1419 for SV(W|O) and mtDNA
tacctcctcaaagcaatacactgaaaatgtttagacgggctcacatcaccccataaacaaataggtttggtcctagcctttctattagctcttagtaagattacacatgcaagcatcccc

SEQ ID NO: 58000 - DNA, 120 bp, Homo sapiens
  misc_feature: 1419 for SV(W|O) and mtDNA
gtgaactcactggaacggggatgcttgcatgtgtaatcttactaagagctaatagaaaggctaggaccaaacctatttgtttatggggtgatgtgagcccgtctaaacattttcagtgta

SEQ ID NO: 58001 - DNA, 120 bp, Homo sapiens
  misc_feature: 1419 for SV(W|O) and mtDNA
gtaacacgagaaagcacataccaaggccaccacacaccacctgtccaaaaaggccttcgatacgggataatcctatttattacctcagaagtttttttcttcgcaggatttttctgagcc

SEQ ID NO: 58002 - DNA, 120 bp, Homo sapiens
  misc_feature: 1419 for SV(W|O) and mtDNA
ccagtcaaagcgaactactatactcaattgatccaataacttgaccaacggaacaagttaccctagggataacagcgcaatcctattctagagtccatatcaacaatagggtttacgacc

SEQ ID NO: 58003 - DNA, 120 bp, Homo sapiens
  misc_feature: 1419 for SV(W|O) and mtDNA
attctactatcaacattactaataagtggctcctttaacctctccacccttatcacaacacaagaacacctctgattactcctgccatcatgacccttggccataatatgatttatctcc

SEQ ID NO: 58004 - DNA, 120 bp, Homo sapiens
  misc_feature: 1419 for SV(W|O) and mtDNA
acatatctgaacacacaatagctaagacccaaactgggattagataccccactatgcttagccctaaacctcaacagttaaatcaacaaaactgctcgccagaacactacgagccacagc

SEQ ID NO: 58005 - DNA, 120 bp, Homo sapiens
  misc_feature: 1419 for SV(W|O) and mtDNA
gacgtccgggaattgcatctgtttttaagcctaatgtggggacagctcatgagtgcaagacgtcttgtgatgtaattattatacgaatgggggcttcaatcgggagtactactcgattgt

SEQ ID NO: 58006 - DNA, 120 bp, Homo sapiens
  misc_feature: 1419 for SV(W|O) and mtDNA
ccgagttccttttactttttttaacctttccttatgagcatgcctgtgttgggttgacagtgagggtaataatgacttgttggttgattgtagatattgggctgttaattgtcagttcag

SEQ ID NO: 58007 - DNA, 120 bp, Homo sapiens
  misc_feature: 1419 for SV(W|O) and mtDNA
atagaatggggtctcctcctccggcggggtcgaagaaggtggtgttgaggttgcggtctgttagtagtatagtgatgccagcagctaggactgggagagataggagaagtaggactgctg

SEQ ID NO: 58008 - DNA, 120 bp, Homo sapiens
  misc_feature: 1419 for SV(W|O) and mtDNA
atttaacctaaatttctataagattattagtataaaaggggagataggtaggagtagcgtggtaagggcgatgagtgtggggaggaatggggtgggttttgtatgttcaaactgtcattt

SEQ ID NO: 58009 - DNA, 120 bp, Homo sapiens
  misc_feature: 1419 for SV(W|O) and mtDNA
agacccaaactgggattagataccccactatgcttagccctaaacctcaacagttaaatcaacaaaactgctcgccagaacactacgagccacagcttaaaactcaaaggacctggcggt

SEQ ID NO: 58010 - DNA, 120 bp, Homo sapiens
  misc_feature: 1418 for SV(W|O) and mtDNA
tccgcttccaccccctagcagaaaatagcccactaatccaaactctaacactatgcttaggcgctatcaccactctgttcgcagcagtctgcgcccttacacaaaatgacatcaaaaaaa

SEQ ID NO: 58011 - DNA, 120 bp, Homo sapiens
  misc_feature: 1418 for SV(W|O) and mtDNA
ccccaaaaattttggtgcaactccaaataaaagtaataaccatgcacactactataaccaccctaaccctgacttccctaattccccccatccttaccaccctcgttaaccctaacaaaa

SEQ ID NO: 58012 - DNA, 120 bp, Homo sapiens
  misc_feature: 1418 for SV(W|O) and mtDNA
ggtgatttagagggtgaactcactggaacggggatgcttgcatgtgtaatcttactaagagctaatagaaaggctaggaccaaacctatttgtttatggggtgatgtgagcccgtctaaa

SEQ ID NO: 58013 - DNA, 120 bp, Homo sapiens
  misc_feature: 1418 for SV(W|O) and mtDNA
taaacaaataggtttggtcctagcctttctattagctcttagtaagattacacatgcaagcatccccgttccagtgagttcaccctctaaatcaccacgatcaaaagggacaagcatcaa

SEQ ID NO: 58014 - DNA, 120 bp, Homo sapiens
  misc_feature: 1418 for SV(W|O) and mtDNA
ctccccttttatactaataatcttatagaaatttaggttaaatacagaccaagagccttcaaagccctcagtaagttgcaatacttaatttctgtaacagctaaggactgcaaaacccca

SEQ ID NO: 58015 - DNA, 120 bp, Homo sapiens
  misc_feature: 1418 for SV(W|O) and mtDNA
ggaattatatccttcttgctcatcagttgatgatacgcccgagcagatgccaacacagcagccattcaagcaatcctatacaaccgtatcggcgatatcggtttcatcctcgccttagca

SEQ ID NO: 58016 - DNA, 120 bp, Homo sapiens
  misc_feature: 1418 for SV(W|O) and mtDNA
tcttcctaggaacaacatatgacgcactctcccctgaactctacacaacatattttgtcaccaagaccctacttctaacctccctgttcttatgaattcgaacagcatacccccgattcc

SEQ ID NO: 58017 - DNA, 120 bp, Homo sapiens
  misc_feature: 1418 for SV(W|O) and mtDNA
ctagttcccctaataatcggtgcccccgatatggcgtttccccgcataaacaacataagcttctgactcttacctccctctctcctactcctgctcgcatctgctatagtggaggccgga

SEQ ID NO: 58018 - DNA, 120 bp, Homo sapiens
  misc_feature: 1418 for SV(W|O) and mtDNA
tccgaggtcgccccaaccgaaatttttaatgcaggtttggtagtttaggacctgtgggtttgttaggtactgtttgcattaataaattaaagctccatagggtcttctcgtcttgctgtg

SEQ ID NO: 58019 - DNA, 120 bp, Homo sapiens
  misc_feature: 1418 for SV(W|O) and mtDNA
aacctcgccttaccccccactattaacctactgggagaactctctgtgctagtaaccacgttctcctgatcaaatatcactctcctacttacaggactcaacatactagtcacagcccta

SEQ ID NO: 58020 - DNA, 120 bp, Homo sapiens
  misc_feature: 1418 for SV(W|O) and mtDNA
cggctttttgcccaaatgggccattatcgaagaattcacaaaaaacaatagcctcatcatccccaccatcatagccaccatcaccctccttaacctctacttctacctacgcctaatcta

SEQ ID NO: 58021 - DNA, 120 bp, Homo sapiens
  misc_feature: 1418 for SV(W|O) and mtDNA
tacaatgaggagtaggaggttggccatgggtatgttgttaagaagaggaattgaacctctgactgtaaagttttaagttttatgcgattaccgggctctgccatcttaacaaaccctgtt

SEQ ID NO: 58022 - DNA, 120 bp, Homo sapiens
  misc_feature: 1418 for SV(W|O) and mtDNA
taataaacttcgccttaattttaataatcaacaccctcctagccttactactaataattattacattttgactaccacaactcaacggctacatagaaaaatccaccccttacgagtgcg

SEQ ID NO: 58023 - DNA, 120 bp, Homo sapiens
  misc_feature: 1418 for SV(W|O) and mtDNA
attataataaacaccctcaccactacaatcttcctaggaacaacatatgacgcactctcccctgaactctacacaacatattttgtcaccaagaccctacttctaacctccctgttctta

SEQ ID NO: 58024 - DNA, 120 bp, Homo sapiens
  misc_feature: 1418 for SV(W|O) and mtDNA
ctgcacccacgccttcttcaaagccatactatttatgtgctccgggtccatcatccacaaccttaacaatgaacaagatattcgaaaaataggaggactactcaaaaccatacctctcac

SEQ ID NO: 58025 - DNA, 120 bp, Homo sapiens
  misc_feature: 1418 for SV(W|O) and mtDNA
gccagccaggcaaccttctaggtaacgaccacatctacaacgttatcgtcacagcccatgcatttgtaataatcttcttcatagtaatacccatcataatcggaggctttggcaactgac

SEQ ID NO: 58026 - DNA, 120 bp, Homo sapiens
  misc_feature: 1418 for SV(W|O) and mtDNA
ggtgttttctcgtgtgaatgagggttttatgttgttaatgtggtgggtgagtgagccccattgtgttgtggtaaatatgtagagggagtatagggctgtgactagtatgttgagtcctgt

SEQ ID NO: 58027 - DNA, 120 bp, Homo sapiens
  misc_feature: 1418 for SV(W|O) and mtDNA
ctagcaaactcaaactacgaacgcactcacagtcgcatcataatcctctctcaaggacttcaaactctactcccactaatagctttttgatgacttctagcaagcctcgctaacctcgcc

SEQ ID NO: 58028 - DNA, 120 bp, Homo sapiens
  misc_feature: 1418 for SV(W|O) and mtDNA
ggacatagcctatgaaggctgttgctatagttgcaagcaggaggataatgccgatgtttcaggtttctgagtagagaaatgatccgtaatataggcctcgcccgatgtgtaggaagaggc

SEQ ID NO: 58029 - DNA, 120 bp, Homo sapiens
  misc_feature: 1418 for SV(W|O) and mtDNA
aaatggtttggctaaggttgtctggtagtaaggtggagtgggtttggggctaggtttagctcagagcggtcaagttaagttgaaatctcctaagtgtaagttgggtgctttgtgttaagc

SEQ ID NO: 58030 - DNA, 120 bp, Homo sapiens
  misc_feature: 1418 for SV(W|O) and mtDNA
ccattaaccttccctctacacttatcatcttcacaattctaattctactgactatcctagaaatcgctgtcgccttaatccaagcctacgttttcacacttctagtaagcctctacctgc

SEQ ID NO: 58031 - DNA, 120 bp, Homo sapiens
  misc_feature: 1418 for SV(W|O) and mtDNA
gatgatgtggtctttggagtagaaacctgtgaggaaaggtattcctgctaatgctaggctgccaatggtgagggaggttgaagtgagaggtatggttttgagtagtcctcctatttttcg

SEQ ID NO: 58032 - DNA, 120 bp, Homo sapiens
  misc_feature: 1418 for SV(W|O) and mtDNA
gagatgttggatggggtggggaggtcgatgaatgagtggttaattaattttattagggggttagttttgcgtattggggtcattggtgttcttgtagttgaaatacaacgatggtttttc

SEQ ID NO: 58033 - DNA, 120 bp, Homo sapiens
  misc_feature: 1418 for SV(W|O) and mtDNA
ccgcctgcccagtgacacatgtttaacggccgcggtaccctaaccgtgcaaaggtagcataatcacttgttccttaaatagggacctgtatgaatggctccacgagggttcagctgtctc

SEQ ID NO: 58034 - DNA, 120 bp, Homo sapiens
  misc_feature: 1418 for SV(W|O) and mtDNA
aaaatcttagcatactcctcaattacccacataggatgaataatagcagttctaccgtacaaccctaacataaccattcttaatttaactatttatattatcctaactactaccgcattc

SEQ ID NO: 58035 - DNA, 120 bp, Homo sapiens
  misc_feature: 1418 for SV(W|O) and mtDNA
atcttcctaggaacaacatatgacgcactctcccctgaactctacacaacatattttgtcaccaagaccctacttctaacctccctgttcttatgaattcgaacagcatacccccgattc

SEQ ID NO: 58036 - DNA, 120 bp, Homo sapiens
  misc_feature: 1418 for SV(W|O) and mtDNA
agcctctacctgcacgacaacacataatgacccaccaatcacatgcctatcatatagtaaaacccagcccatgacccctaacaggggccctctcagccctcctaatgacctccggcctag

SEQ ID NO: 58037 - DNA, 120 bp, Homo sapiens
  misc_feature: 1418 for SV(W|O) and mtDNA
cgcctacacaattctccgatccgtccctaacaaactaggaggcgtccttgccctattactatccatcctcatcctagcaataatccccatcctccatatatccaaacaacaaagcataat

SEQ ID NO: 58038 - DNA, 120 bp, Homo sapiens
  misc_feature: 1418 for SV(W|O) and mtDNA
catggctttctcaacttttaaaggataacagctatccattggtcttaggccccaaaaattttggtgcaactccaaataaaagtaataaccatgcacactactataaccaccctaaccctg

SEQ ID NO: 58039 - DNA, 120 bp, Homo sapiens
  misc_feature: 1418 for SV(W|O) and mtDNA
aactgggattagataccccactatgcttagccctaaacctcaacagttaaatcaacaaaactgctcgccagaacactacgagccacagcttaaaactcaaaggacctggcggtgcttcat

SEQ ID NO: 58040 - DNA, 120 bp, Homo sapiens
  misc_feature: 1418 for SV(W|O) and mtDNA
atcggggtttatcgattacagaacaggctcctctagagggatatgaagcaccgccaggtcctttgagttttaagctgtggctcgtagtgttctggcgagcagttttgttgatttaactgt

SEQ ID NO: 58041 - DNA, 120 bp, Homo sapiens
  misc_feature: 1418 for SV(W|O) and mtDNA
acgaccgggggtatactacggtcaatgctctgaaatctgtggagcaaaccacagtttcatgcccatcgtcctagaattaattcccctaaaaatctttgaaatagggcccgtatttaccct

SEQ ID NO: 58042 - DNA, 120 bp, Homo sapiens
  misc_feature: 1418 for SV(W|O) and mtDNA
aaagtaagcgcaagtacccacgtaaagacgttaggtcaaggtgtagcccatgaggtggcaagaaatgggctacattttctaccccagaaaactacgatagcccttatgaaacttaagggt

SEQ ID NO: 58043 - DNA, 120 bp, Homo sapiens
  misc_feature: 1417 for SV(W|O) and mtDNA
ttttcaaaaaggtattagaaaaaccatttcataactttgtcaaagttaaattataggctaaatcctatatatcttaatggcacatgcagcgcaagtaggtctacaagacgctacttcccc

SEQ ID NO: 58044 - DNA, 120 bp, Homo sapiens
  misc_feature: 1417 for SV(W|O) and mtDNA
tttagttgggtgatgaggaatagtgtaaggagtatgggggtaattatggtgggccatacggtagtatttagttggggcatttcactgtaaagaggtgttggttctcttaatctttaactt

SEQ ID NO: 58045 - DNA, 120 bp, Homo sapiens
  misc_feature: 1417 for SV(W|O) and mtDNA
gaagtatgtaggagttgaagattagtccgccgtagtcggtgtactcgtaggttcagtaccattggtggccaattgatttgatggtaagggagggatcgttgacctcgtctgttatgtaaa

SEQ ID NO: 58046 - DNA, 120 bp, Homo sapiens
  misc_feature: 1417 for SV(W|O) and mtDNA
ttctgctccgaggtcgccccaaccgaaatttttaatgcaggtttggtagtttaggacctgtgggtttgttaggtactgtttgcattaataaattaaagctccatagggtcttctcgtctt

SEQ ID NO: 58047 - DNA, 120 bp, Homo sapiens
  misc_feature: 1417 for SV(W|O) and mtDNA
gcccaagaactatcaaactcctgagccaacaacttaatatgactagcttacacaatagcttttatagtaaagatacctctttacggactccacttatgactccctaaagcccatgtcgaa

SEQ ID NO: 58048 - DNA, 120 bp, Homo sapiens
  misc_feature: 1417 for SV(W|O) and mtDNA
ttagttgggtgatgaggaatagtgtaaggagtatgggggtaattatggtgggccatacggtagtatttagttggggcatttcactgtaaagaggtgttggttctcttaatctttaactta

SEQ ID NO: 58049 - DNA, 120 bp, Homo sapiens
  misc_feature: 1417 for SV(W|O) and mtDNA
cttaccacgctactcctacctatctccccttttatactaataatcttatagaaatttaggttaaatacagaccaagagccttcaaagccctcagtaagttgcaatacttaatttctgtaa

SEQ ID NO: 58050 - DNA, 120 bp, Homo sapiens
  misc_feature: 1417 for SV(W|O) and mtDNA
tagttgggtgatgaggaatagtgtaaggagtatgggggtaattatggtgggccatacggtagtatttagttggggcatttcactgtaaagaggtgttggttctcttaatctttaacttaa

SEQ ID NO: 58051 - DNA, 120 bp, Homo sapiens
  misc_feature: 1417 for SV(W|O) and mtDNA
atgatatgaaaaaccatcgttgtatttcaactacaagaacaccaatgaccccaatacgcaaaactaaccccctaataaaattaattaaccactcattcatcgacctccccaccccatcca

SEQ ID NO: 58052 - DNA, 120 bp, Homo sapiens
  misc_feature: 1417 for SV(W|O) and mtDNA
tgaactcactggaacggggatgcttgcatgtgtaatcttactaagagctaatagaaaggctaggaccaaacctatttgtttatggggtgatgtgagcccgtctaaacattttcagtgtat

SEQ ID NO: 58053 - DNA, 120 bp, Homo sapiens
  misc_feature: 1417 for SV(W|O) and mtDNA
tcttcctaattaccatactaatcttagttaccgctaacaacctattccaactgttcatcggctgagagggcgtaggaattatatccttcttgctcatcagttgatgatacgcccgagcag

SEQ ID NO: 58054 - DNA, 120 bp, Homo sapiens
  misc_feature: 1417 for SV(W|O) and mtDNA
cctacttacaggactcaacatactagtcacagccctatactccctctacatatttaccacaacacaatggggctcactcacccaccacattaacaacataaaaccctcattcacacgaga

SEQ ID NO: 58055 - DNA, 120 bp, Homo sapiens
  misc_feature: 1417 for SV(W|O) and mtDNA
ctcatcatccccaccatcatagccaccatcaccctccttaacctctacttctacctacgcctaatctactccacctcaatcacactactccccatatctaacaacgtaaaaataaaatga

SEQ ID NO: 58056 - DNA, 120 bp, Homo sapiens
  misc_feature: 1417 for SV(W|O) and mtDNA
tcatttgttttgaggttagtttgattagtcattgttgggtggtgattagtcggttgttgatgagatatttggaggtggggatcaatagagggggaaatagaatgatcagtactgcggcgg

SEQ ID NO: 58057 - DNA, 120 bp, Homo sapiens
  misc_feature: 1417 for SV(W|O) and mtDNA
tataaacctagccatggccatccccttatgagcgggcgcagtgattataggctttcgctctaagattaaaaatgccctagcccacttcttaccacaaggcacacctacaccccttatccc

SEQ ID NO: 58058 - DNA, 120 bp, Homo sapiens
  misc_feature: 1417 for SV(W|O) and mtDNA
tagtaaccacgttctcctgatcaaatatcactctcctacttacaggactcaacatactagtcacagccctatactccctctacatatttaccacaacacaatggggctcactcacccacc

SEQ ID NO: 58059 - DNA, 120 bp, Homo sapiens
  misc_feature: 1417 for SV(W|O) and mtDNA
taggaattatatccttcttgctcatcagttgatgatacgcccgagcagatgccaacacagcagccattcaagcaatcctatacaaccgtatcggcgatatcggtttcatcctcgccttag

SEQ ID NO: 58060 - DNA, 120 bp, Homo sapiens
  misc_feature: 1417 for SV(W|O) and mtDNA
cctgcccagtgacacatgtttaacggccgcggtaccctaaccgtgcaaaggtagcataatcacttgttccttaaatagggacctgtatgaatggctccacgagggttcagctgtctctta

SEQ ID NO: 58061 - DNA, 120 bp, Homo sapiens
  misc_feature: 1417 for SV(W|O) and mtDNA
acaacatggctttctcaacttttaaaggataacagctatccattggtcttaggccccaaaaattttggtgcaactccaaataaaagtaataaccatgcacactactataaccaccctaac

SEQ ID NO: 58062 - DNA, 120 bp, Homo sapiens
  misc_feature: 1417 for SV(W|O) and mtDNA
gtaggttcagtaccattggtggccaattgatttgatggtaagggagggatcgttgacctcgtctgttatgtaaaggatgcgtagggatgggagggcgatgaggactaggatgatggcggg

SEQ ID NO: 58063 - DNA, 120 bp, Homo sapiens
  misc_feature: 1417 for SV(W|O) and mtDNA
cctctacctgcacgacaacacataatgacccaccaatcacatgcctatcatatagtaaaacccagcccatgacccctaacaggggccctctcagccctcctaatgacctccggcctagcc

SEQ ID NO: 58064 - DNA, 120 bp, Homo sapiens
  misc_feature: 1417 for SV(W|O) and mtDNA
gatttagagggtgaactcactggaacggggatgcttgcatgtgtaatcttactaagagctaatagaaaggctaggaccaaacctatttgtttatggggtgatgtgagcccgtctaaacat

SEQ ID NO: 58065 - DNA, 120 bp, Homo sapiens
  misc_feature: 1417 for SV(W|O) and mtDNA
gataggaggagaatgggggataggtgtatgaacatgagggtgttttctcgtgtgaatgagggttttatgttgttaatgtggtgggtgagtgagccccattgtgttgtggtaaatatgtag

SEQ ID NO: 58066 - DNA, 120 bp, Homo sapiens
  misc_feature: 1417 for SV(W|O) and mtDNA
gactgtaaatctaaagacaggggttaggcctctttttaccagctccgaggtgattttcatattgaattgcaaattcgaagaagcagcttcaaacctgccggggcttctcccgcctttttt

SEQ ID NO: 58067 - DNA, 120 bp, Homo sapiens
  misc_feature: 1417 for SV(W|O) and mtDNA
caccgcctgcccagtgacacatgtttaacggccgcggtaccctaaccgtgcaaaggtagcataatcacttgttccttaaatagggacctgtatgaatggctccacgagggttcagctgtc

SEQ ID NO: 58068 - DNA, 120 bp, Homo sapiens
  misc_feature: 1417 for SV(W|O) and mtDNA
ctgcctacgacaaacagacctaaaatcgctcattgcatactcttcaatcagccacatagccctcgtagtaacagccattctcatccaaaccccctgaagcttcaccggcgcagtcattct

SEQ ID NO: 58069 - DNA, 120 bp, Homo sapiens
  misc_feature: 1417 for SV(W|O) and mtDNA
ctagtaagcctctacctgcacgacaacacataatgacccaccaatcacatgcctatcatatagtaaaacccagcccatgacccctaacaggggccctctcagccctcctaatgacctccg

SEQ ID NO: 58070 - DNA, 120 bp, Homo sapiens
  misc_feature: 1417 for SV(W|O) and mtDNA
ctacttgcgctgcatgtgccattaagatatataggatttagcctataatttaactttgacaaagttatgaaatggtttttctaatacctttttgaaaaagtcatggaggccatggggttg

SEQ ID NO: 58071 - DNA, 120 bp, Homo sapiens
  misc_feature: 1417 for SV(W|O) and mtDNA
aaaaatcgtagccttctccacttcaagtcaactaggactcataatagttacaatcggcatcaaccaaccacacctagcattcctgcacatctgcacccacgccttcttcaaagccatact

SEQ ID NO: 58072 - DNA, 120 bp, Homo sapiens
  misc_feature: 1417 for SV(W|O) and mtDNA
accgcctgcccagtgacacatgtttaacggccgcggtaccctaaccgtgcaaaggtagcataatcacttgttccttaaatagggacctgtatgaatggctccacgagggttcagctgtct

SEQ ID NO: 58073 - DNA, 120 bp, Homo sapiens
  misc_feature: 1416 for SV(W|O) and mtDNA
aactaggaatagccccctttcacttctgagtcccagaggttacccaaggcacccctctgacatccggcctgcttcttctcacatgacaaaaactagcccccatctcaatcatataccaaa

SEQ ID NO: 58074 - DNA, 120 bp, Homo sapiens
  misc_feature: 1416 for SV(W|O) and mtDNA
gtaggtgcgataaataatgggatgaggcaggaatcaaagacagatactgcgacatagggtgctccggctccagcgtctcgcaatgctatcgcgtgcataccccccagacgaaaataccaa

SEQ ID NO: 58075 - DNA, 120 bp, Homo sapiens
  misc_feature: 1416 for SV(W|O) and mtDNA
ttgcgctgcatgtgccattaagatatataggatttagcctataatttaactttgacaaagttatgaaatggtttttctaatacctttttgaaaaagtcatggaggccatggggttggctt

SEQ ID NO: 58076 - DNA, 120 bp, Homo sapiens
  misc_feature: 1416 for SV(W|O) and mtDNA
tacgacaaacagacctaaaatcgctcattgcatactcttcaatcagccacatagccctcgtagtaacagccattctcatccaaaccccctgaagcttcaccggcgcagtcattctcataa

SEQ ID NO: 58077 - DNA, 120 bp, Homo sapiens
  misc_feature: 1416 for SV(W|O) and mtDNA
tgtcagaggggtgccttgggtaacctctgggactcagaagtgaaagggggctattcctagttttattgctatagccattatgattattaatgatgagtactgattggtagtattggttat

SEQ ID NO: 58078 - DNA, 120 bp, Homo sapiens
  misc_feature: 1416 for SV(W|O) and mtDNA
ccatctgcctacgacaaacagacctaaaatcgctcattgcatactcttcaatcagccacatagccctcgtagtaacagccattctcatccaaaccccctgaagcttcaccggcgcagtca

SEQ ID NO: 58079 - DNA, 120 bp, Homo sapiens
  misc_feature: 1416 for SV(W|O) and mtDNA
tctagcctagccgtttactcaatcctctgatcagggtgagcatcaaactcaaactacgccctgatcggcgcactgcgagcagtagcccaaacaatctcatatgaagtcaccctagccatc

SEQ ID NO: 58080 - DNA, 120 bp, Homo sapiens
  misc_feature: 1416 for SV(W|O) and mtDNA
accgtctgaactatcctgcccgccatcatcctagtcctcatcgccctcccatccctacgcatcctttacataacagacgaggtcaacgatccctcccttaccatcaaatcaattggccac

SEQ ID NO: 58081 - DNA, 120 bp, Homo sapiens
  misc_feature: 1416 for SV(W|O) and mtDNA
gtcgtggtgctggagtttaagttgagtagtaggaatgcggtagtagttaggataatataaatagttaaattaagaatggttatgttagggttgtacggtagaactgctattattcatcct

SEQ ID NO: 58082 - DNA, 120 bp, Homo sapiens
  misc_feature: 1416 for SV(W|O) and mtDNA
gtagtctattttgtgtcaactggagttttttacaactcaggtgagttttagctttattggggagggggtgatctaaaacactctttacgccggcttctattgacttgggttaatcgtgtg

SEQ ID NO: 58083 - DNA, 120 bp, Homo sapiens
  misc_feature: 1416 for SV(W|O) and mtDNA
aaaacaaatgataaccatacacaacactaaaggacgaacctgatctcttatactagtatccttaatcatttttattgccacaactaacctcctcggactcctgcctcactcatttacacc

SEQ ID NO: 58084 - DNA, 120 bp, Homo sapiens
  misc_feature: 1416 for SV(W|O) and mtDNA
cacgaccgggggtatactacggtcaatgctctgaaatctgtggagcaaaccacagtttcatgcccatcgtcctagaattaattcccctaaaaatctttgaaatagggcccgtatttaccc

SEQ ID NO: 58085 - DNA, 120 bp, Homo sapiens
  misc_feature: 1416 for SV(W|O) and mtDNA
ggactgtaaatctaaagacaggggttaggcctctttttaccagctccgaggtgattttcatattgaattgcaaattcgaagaagcagcttcaaacctgccggggcttctcccgccttttt

SEQ ID NO: 58086 - DNA, 120 bp, Homo sapiens
  misc_feature: 1416 for SV(W|O) and mtDNA
aggcgaggatgaaaccgatatcgccgatacggttgtataggattgcttgaatggctgctgtgttggcatctgctcgggcgtatcatcaactgatgagcaagaaggatataattcctacgc

SEQ ID NO: 58087 - DNA, 120 bp, Homo sapiens
  misc_feature: 1416 for SV(W|O) and mtDNA
acgcaaaatcttagcatactcctcaattacccacataggatgaataatagcagttctaccgtacaaccctaacataaccattcttaatttaactatttatattatcctaactactaccgc

SEQ ID NO: 58088 - DNA, 120 bp, Homo sapiens
  misc_feature: 1416 for SV(W|O) and mtDNA
gccatcttaacaaaccctgttcttgggtgggtgtgggtataatactaagttgagatgatatcatttacgggggaaggcgctttgtgaagtaggccttatttctcttgtcctttcgtacag

SEQ ID NO: 58089 - DNA, 120 bp, Homo sapiens
  misc_feature: 1416 for SV(W|O) and mtDNA
gccaggcaaccttctaggtaacgaccacatctacaacgttatcgtcacagcccatgcatttgtaataatcttcttcatagtaatacccatcataatcggaggctttggcaactgactagt

SEQ ID NO: 58090 - DNA, 120 bp, Homo sapiens
  misc_feature: 1416 for SV(W|O) and mtDNA
gatgaggactaggatgatggcgggcaggatagttcagacggtttctatttcctgagcgtctgagatgttagtattagttagttttgttgtgagtgttaggaaaagggcatacaggactag

SEQ ID NO: 58091 - DNA, 120 bp, Homo sapiens
  misc_feature: 1416 for SV(W|O) and mtDNA
gaggtatggttttgagtagtcctcctatttttcgaatatcttgttcattgttaaggttgtggatgatggacccggagcacataaatagtatggctttgaagaaggcgtgggtgcagatgt

SEQ ID NO: 58092 - DNA, 120 bp, Homo sapiens
  misc_feature: 1416 for SV(W|O) and mtDNA
cacatggctaggccggaggtcattaggagggctgagagggcccctgttaggggtcatgggctgggttttactatatgataggcatgtgattggtgggtcattatgtgttgtcgtgcaggt

SEQ ID NO: 58093 - DNA, 120 bp, Homo sapiens
  misc_feature: 1416 for SV(W|O) and mtDNA
aaatcaacaaaactgctcgccagaacactacgagccacagcttaaaactcaaaggacctggcggtgcttcatatccctctagaggagcctgttctgtaatcgataaaccccgatcaacct

SEQ ID NO: 58094 - DNA, 120 bp, Homo sapiens
  misc_feature: 1416 for SV(W|O) and mtDNA
aacctaaatttctataagattattagtataaaaggggagataggtaggagtagcgtggtaagggcgatgagtgtggggaggaatggggtgggttttgtatgttcaaactgtcattttatt

SEQ ID NO: 58095 - DNA, 120 bp, Homo sapiens
  misc_feature: 1415 for SV(W|O) and mtDNA
atccgcttccaccccctagcagaaaatagcccactaatccaaactctaacactatgcttaggcgctatcaccactctgttcgcagcagtctgcgcccttacacaaaatgacatcaaaaaa

SEQ ID NO: 58096 - DNA, 120 bp, Homo sapiens
  misc_feature: 1415 for SV(W|O) and mtDNA
gctgcatgtgccattaagatatataggatttagcctataatttaactttgacaaagttatgaaatggtttttctaatacctttttgaaaaagtcatggaggccatggggttggcttgaaa

SEQ ID NO: 58097 - DNA, 120 bp, Homo sapiens
  misc_feature: 1415 for SV(W|O) and mtDNA
tagcctcatcatccccaccatcatagccaccatcaccctccttaacctctacttctacctacgcctaatctactccacctcaatcacactactccccatatctaacaacgtaaaaataaa

SEQ ID NO: 58098 - DNA, 120 bp, Homo sapiens
  misc_feature: 1415 for SV(W|O) and mtDNA
ggctgttactacgagggctatgtggctgattgaagagtatgcaatgagcgattttaggtctgtttgtcgtaggcagatggagcttgttataattatgcctcatagggatagtacaaggaa

SEQ ID NO: 58099 - DNA, 120 bp, Homo sapiens
  misc_feature: 1415 for SV(W|O) and mtDNA
cctgatcaaatatcactctcctacttacaggactcaacatactagtcacagccctatactccctctacatatttaccacaacacaatggggctcactcacccaccacattaacaacataa

SEQ ID NO: 58100 - DNA, 120 bp, Homo sapiens
  misc_feature: 1415 for SV(W|O) and mtDNA
atatttcctattcgcctacacaattctccgatccgtccctaacaaactaggaggcgtccttgccctattactatccatcctcatcctagcaataatccccatcctccatatatccaaaca

SEQ ID NO: 58101 - DNA, 120 bp, Homo sapiens
  misc_feature: 1415 for SV(W|O) and mtDNA
attataggctttcgctctaagattaaaaatgccctagcccacttcttaccacaaggcacacctacaccccttatccccatactagttattatcgaaaccatcagcctactcattcaacca

SEQ ID NO: 58102 - DNA, 120 bp, Homo sapiens
  misc_feature: 1415 for SV(W|O) and mtDNA
tgataggtggcacggagaattttggattctcagggatgggttcgattctcatagtcctagaaataagggggtttaagctcctattatttactctatcaaagtaactcttttatcagacat

SEQ ID NO: 58103 - DNA, 120 bp, Homo sapiens
  misc_feature: 1415 for SV(W|O) and mtDNA
gccgagttccttttactttttttaacctttccttatgagcatgcctgtgttgggttgacagtgagggtaataatgacttgttggttgattgtagatattgggctgttaattgtcagttca

SEQ ID NO: 58104 - DNA, 120 bp, Homo sapiens
  misc_feature: 1415 for SV(W|O) and mtDNA
tctatataaatgcgtaggggttttagttaaatgtcctttgaagtatacttgaggagggtgacgggcggtgtgtacgcgcttcagggccctgttcaactaagcactctactctcagtttac

SEQ ID NO: 58105 - DNA, 120 bp, Homo sapiens
  misc_feature: 1415 for SV(W|O) and mtDNA
tcggctcgaataaggaggcttagagctgtgcctaggactccagctcatgcgccgaataataggtatagtgttccaatgtctttgtggtttgtagagaatagtcaacggtcggcgaacatc

SEQ ID NO: 58106 - DNA, 120 bp, Homo sapiens
  misc_feature: 1415 for SV(W|O) and mtDNA
cttcgccttaattttaataatcaacaccctcctagccttactactaataattattacattttgactaccacaactcaacggctacatagaaaaatccaccccttacgagtgcggcttcga

SEQ ID NO: 58107 - DNA, 120 bp, Homo sapiens
  misc_feature: 1415 for SV(W|O) and mtDNA
tatttaacctaaatttctataagattattagtataaaaggggagataggtaggagtagcgtggtaagggcgatgagtgtggggaggaatggggtgggttttgtatgttcaaactgtcatt

SEQ ID NO: 58108 - DNA, 120 bp, Homo sapiens
  misc_feature: 1415 for SV(W|O) and mtDNA
tatggggagtagtgtgattgaggtggagtagattaggcgtaggtagaagtagaggttaaggagggtgatggtggctatgatggtggggatgatgaggctattgttttttgtgaattcttc

SEQ ID NO: 58109 - DNA, 120 bp, Homo sapiens
  misc_feature: 1415 for SV(W|O) and mtDNA
cgaccgggggtatactacggtcaatgctctgaaatctgtggagcaaaccacagtttcatgcccatcgtcctagaattaattcccctaaaaatctttgaaatagggcccgtatttacccta

SEQ ID NO: 58110 - DNA, 120 bp, Homo sapiens
  misc_feature: 1415 for SV(W|O) and mtDNA
cgtacggccagggctattggttgaatgagtaggctgatggtttcgataataactagtatggggataaggggtgtaggtgtgccttgtggtaagaagtgggctagggcatttttaatctta

SEQ ID NO: 58111 - DNA, 120 bp, Homo sapiens
  misc_feature: 1415 for SV(W|O) and mtDNA
aagaaagcgttcaagctcaacacccactacctaaaaaatcccaaacatataactgaactcctcatacccaattggaccaatctatcaccctatagaagaactaatgttagtataagtaac

SEQ ID NO: 58112 - DNA, 120 bp, Homo sapiens
  misc_feature: 1415 for SV(W|O) and mtDNA
gtgaagcattggactgtaaatctaaagacaggggttaggcctctttttaccagctccgaggtgattttcatattgaattgcaaattcgaagaagcagcttcaaacctgccggggcttctc

SEQ ID NO: 58113 - DNA, 120 bp, Homo sapiens
  misc_feature: 1415 for SV(W|O) and mtDNA
gctacgcaaaatcttagcatactcctcaattacccacataggatgaataatagcagttctaccgtacaaccctaacataaccattcttaatttaactatttatattatcctaactactac

SEQ ID NO: 58114 - DNA, 120 bp, Homo sapiens
  misc_feature: 1415 for SV(W|O) and mtDNA
atgggtacaatgaggagtaggaggttggccatgggtatgttgttaagaagaggaattgaacctctgactgtaaagttttaagttttatgcgattaccgggctctgccatcttaacaaacc

SEQ ID NO: 58115 - DNA, 120 bp, Homo sapiens
  misc_feature: 1415 for SV(W|O) and mtDNA
ggtgaactcactggaacggggatgcttgcatgtgtaatcttactaagagctaatagaaaggctaggaccaaacctatttgtttatggggtgatgtgagcccgtctaaacattttcagtgt

SEQ ID NO: 58116 - DNA, 120 bp, Homo sapiens
  misc_feature: 1415 for SV(W|O) and mtDNA
gatgtggtctttggagtagaaacctgtgaggaaaggtattcctgctaatgctaggctgccaatggtgagggaggttgaagtgagaggtatggttttgagtagtcctcctatttttcgaat

SEQ ID NO: 58117 - DNA, 120 bp, Homo sapiens
  misc_feature: 1415 for SV(W|O) and mtDNA
cacttattagtaatgttgatagtagaatgatggctagggtgacttcatatgagattgtttgggctactgctcgcagtgcgccgatcagggcgtagtttgagtttgatgctcaccctgatc

SEQ ID NO: 58118 - DNA, 120 bp, Homo sapiens
  misc_feature: 1415 for SV(W|O) and mtDNA
gacctacttgcgctgcatgtgccattaagatatataggatttagcctataatttaactttgacaaagttatgaaatggtttttctaatacctttttgaaaaagtcatggaggccatgggg

SEQ ID NO: 58119 - DNA, 120 bp, Homo sapiens
  misc_feature: 1415 for SV(W|O) and mtDNA
aagtaagcgcaagtacccacgtaaagacgttaggtcaaggtgtagcccatgaggtggcaagaaatgggctacattttctaccccagaaaactacgatagcccttatgaaacttaagggtc

SEQ ID NO: 58120 - DNA, 120 bp, Homo sapiens
  misc_feature: 1415 for SV(W|O) and mtDNA
acatagcctatgaaggctgttgctatagttgcaagcaggaggataatgccgatgtttcaggtttctgagtagagaaatgatccgtaatataggcctcgcccgatgtgtaggaagaggcag

SEQ ID NO: 58121 - DNA, 120 bp, Homo sapiens
  misc_feature: 1415 for SV(W|O) and mtDNA
ctccgaggtcgccccaaccgaaatttttaatgcaggtttggtagtttaggacctgtgggtttgttaggtactgtttgcattaataaattaaagctccatagggtcttctcgtcttgctgt

SEQ ID NO: 58122 - DNA, 120 bp, Homo sapiens
  misc_feature: 1415 for SV(W|O) and mtDNA
cgatggtttttcatatcattggtcgtggttgtagtccgtgcgagaataatgatgtatgctttgtttctgttgagtgtgggtttagtaatggggtttgtggggttttcttctaagccttct

SEQ ID NO: 58123 - DNA, 120 bp, Homo sapiens
  misc_feature: 1415 for SV(W|O) and mtDNA
cctcatcatccccaccatcatagccaccatcaccctccttaacctctacttctacctacgcctaatctactccacctcaatcacactactccccatatctaacaacgtaaaaataaaatg

SEQ ID NO: 58124 - DNA, 120 bp, Homo sapiens
  misc_feature: 1415 for SV(W|O) and mtDNA
ccggctttttgcccaaatgggccattatcgaagaattcacaaaaaacaatagcctcatcatccccaccatcatagccaccatcaccctccttaacctctacttctacctacgcctaatct

SEQ ID NO: 58125 - DNA, 120 bp, Homo sapiens
  misc_feature: 1415 for SV(W|O) and mtDNA
acagatttcagagcattgaccgtagtatacccccggtcgtgtagcggtgaaagtggtttggtttagacgtccgggaattgcatctgtttttaagcctaatgtggggacagctcatgagtg

SEQ ID NO: 58126 - DNA, 120 bp, Homo sapiens
  misc_feature: 1415 for SV(W|O) and mtDNA
cacgagaaagcacataccaaggccaccacacaccacctgtccaaaaaggccttcgatacgggataatcctatttattacctcagaagtttttttcttcgcaggatttttctgagcctttt

SEQ ID NO: 58127 - DNA, 120 bp, Homo sapiens
  misc_feature: 1415 for SV(W|O) and mtDNA
atgactagcttacacaatagcttttatagtaaagatacctctttacggactccacttatgactccctaaagcccatgtcgaagcccccatcgctgggtcaatagtacttgccgcagtact

SEQ ID NO: 58128 - DNA, 120 bp, Homo sapiens
  misc_feature: 1415 for SV(W|O) and mtDNA
aggtcgccccaaccgaaatttttaatgcaggtttggtagtttaggacctgtgggtttgttaggtactgtttgcattaataaattaaagctccatagggtcttctcgtcttgctgtgttat

SEQ ID NO: 58129 - DNA, 120 bp, Homo sapiens
  misc_feature: 1415 for SV(W|O) and mtDNA
aatcctctgatcagggtgagcatcaaactcaaactacgccctgatcggcgcactgcgagcagtagcccaaacaatctcatatgaagtcaccctagccatcattctactatcaacattact

SEQ ID NO: 58130 - DNA, 120 bp, Homo sapiens
  misc_feature: 1415 for SV(W|O) and mtDNA
acccaccacattaacaacataaaaccctcattcacacgagaaaacaccctcatgttcatacacctatcccccattctcctcctatccctcaaccccgacatcattaccgggttttcctct

SEQ ID NO: 58131 - DNA, 120 bp, Homo sapiens
  misc_feature: 1415 for SV(W|O) and mtDNA
acacgagaaagcacataccaaggccaccacacaccacctgtccaaaaaggccttcgatacgggataatcctatttattacctcagaagtttttttcttcgcaggatttttctgagccttt

SEQ ID NO: 58132 - DNA, 120 bp, Homo sapiens
  misc_feature: 1414 for SV(W|O) and mtDNA
aaaaattttggtgcaactccaaataaaagtaataaccatgcacactactataaccaccctaaccctgacttccctaattccccccatccttaccaccctcgttaaccctaacaaaaaaaa

SEQ ID NO: 58133 - DNA, 120 bp, Homo sapiens
  misc_feature: 1414 for SV(W|O) and mtDNA
acaatagcctcatcatccccaccatcatagccaccatcaccctccttaacctctacttctacctacgcctaatctactccacctcaatcacactactccccatatctaacaacgtaaaaa

SEQ ID NO: 58134 - DNA, 120 bp, Homo sapiens
  misc_feature: 1414 for SV(W|O) and mtDNA
tgatatttcctattcgcctacacaattctccgatccgtccctaacaaactaggaggcgtccttgccctattactatccatcctcatcctagcaataatccccatcctccatatatccaaa

SEQ ID NO: 58135 - DNA, 120 bp, Homo sapiens
  misc_feature: 1414 for SV(W|O) and mtDNA
tttatctgcctcttcctacacatcgggcgaggcctatattacggatcatttctctactcagaaacctgaaacatcggcattatcctcctgcttgcaactatagcaacagccttcataggc

SEQ ID NO: 58136 - DNA, 120 bp, Homo sapiens
  misc_feature: 1414 for SV(W|O) and mtDNA
cagctcggctcgaataaggaggcttagagctgtgcctaggactccagctcatgcgccgaataataggtatagtgttccaatgtctttgtggtttgtagagaatagtcaacggtcggcgaa

SEQ ID NO: 58137 - DNA, 120 bp, Homo sapiens
  misc_feature: 1414 for SV(W|O) and mtDNA
ttcgataataactagtatggggataaggggtgtaggtgtgccttgtggtaagaagtgggctagggcatttttaatcttagagcgaaagcctataatcactgcgcccgctcataaggggat

SEQ ID NO: 58138 - DNA, 120 bp, Homo sapiens
  misc_feature: 1414 for SV(W|O) and mtDNA
ttataataaacaccctcaccactacaatcttcctaggaacaacatatgacgcactctcccctgaactctacacaacatattttgtcaccaagaccctacttctaacctccctgttcttat

SEQ ID NO: 58139 - DNA, 120 bp, Homo sapiens
  misc_feature: 1414 for SV(W|O) and mtDNA
gagagtagagtgcttagttgaacagggccctgaagcgcgtacacaccgcccgtcaccctcctcaagtatacttcaaaggacatttaactaaaacccctacgcatttatatagaggagaca

SEQ ID NO: 58140 - DNA, 120 bp, Homo sapiens
  misc_feature: 1414 for SV(W|O) and mtDNA
aggggtgccttgggtaacctctgggactcagaagtgaaagggggctattcctagttttattgctatagccattatgattattaatgatgagtactgattggtagtattggttatggttca

SEQ ID NO: 58141 - DNA, 120 bp, Homo sapiens
  misc_feature: 1414 for SV(W|O) and mtDNA
tctgtaggctcattcatttctctaacagcagtaatattaataattttcatgatttgagaagccttcgcttcaaagcgaaaagtcctaatagtagaagaaccctccataaacctggagtga

SEQ ID NO: 58142 - DNA, 120 bp, Homo sapiens
  misc_feature: 1414 for SV(W|O) and mtDNA
tcggggtttatcgattacagaacaggctcctctagagggatatgaagcaccgccaggtcctttgagttttaagctgtggctcgtagtgttctggcgagcagttttgttgatttaactgtt

SEQ ID NO: 58143 - DNA, 120 bp, Homo sapiens
  misc_feature: 1414 for SV(W|O) and mtDNA
ggtgcctctaatactggtgatgctagaggtgatgtttttggtaaacaggcggggtaagatttgccgagttccttttactttttttaacctttccttatgagcatgcctgtgttgggttga

SEQ ID NO: 58144 - DNA, 120 bp, Homo sapiens
  misc_feature: 1414 for SV(W|O) and mtDNA
tagctattaccttcttattatttgatctagaaattgccctccttttacccctaccatgagccctacaaacaactaacctgccactaatagttatgtcatccctcttattaatcatcatcc

SEQ ID NO: 58145 - DNA, 120 bp, Homo sapiens
  misc_feature: 1414 for SV(W|O) and mtDNA
aatgggtacaatgaggagtaggaggttggccatgggtatgttgttaagaagaggaattgaacctctgactgtaaagttttaagttttatgcgattaccgggctctgccatcttaacaaac

SEQ ID NO: 58146 - DNA, 120 bp, Homo sapiens
  misc_feature: 1414 for SV(W|O) and mtDNA
gtcatgtgagaagaagcaggccggatgtcagaggggtgccttgggtaacctctgggactcagaagtgaaagggggctattcctagttttattgctatagccattatgattattaatgatg

SEQ ID NO: 58147 - DNA, 120 bp, Homo sapiens
  misc_feature: 1414 for SV(W|O) and mtDNA
ggttgggttctgctccgaggtcgccccaaccgaaatttttaatgcaggtttggtagtttaggacctgtgggtttgttaggtactgtttgcattaataaattaaagctccatagggtcttc

SEQ ID NO: 58148 - DNA, 120 bp, Homo sapiens
  misc_feature: 1414 for SV(W|O) and mtDNA
ggttagttgtggcaataaaaatgattaaggatactagtataagagatcaggttcgtcctttagtgttgtgtatggttatcatttgttttgaggttagtttgattagtcattgttgggtgg

SEQ ID NO: 58149 - DNA, 120 bp, Homo sapiens
  misc_feature: 1414 for SV(W|O) and mtDNA
ctaacctcgccttaccccccactattaacctactgggagaactctctgtgctagtaaccacgttctcctgatcaaatatcactctcctacttacaggactcaacatactagtcacagccc

SEQ ID NO: 58150 - DNA, 120 bp, Homo sapiens
  misc_feature: 1414 for SV(W|O) and mtDNA
ggctcgaataaggaggcttagagctgtgcctaggactccagctcatgcgccgaataataggtatagtgttccaatgtctttgtggtttgtagagaatagtcaacggtcggcgaacatcag

SEQ ID NO: 58151 - DNA, 120 bp, Homo sapiens
  misc_feature: 1414 for SV(W|O) and mtDNA
ggatgtcagaggggtgccttgggtaacctctgggactcagaagtgaaagggggctattcctagttttattgctatagccattatgattattaatgatgagtactgattggtagtattggt

SEQ ID NO: 58152 - DNA, 120 bp, Homo sapiens
  misc_feature: 1414 for SV(W|O) and mtDNA
agttcccctaataatcggtgcccccgatatggcgtttccccgcataaacaacataagcttctgactcttacctccctctctcctactcctgctcgcatctgctatagtggaggccggagc

SEQ ID NO: 58153 - DNA, 120 bp, Homo sapiens
  misc_feature: 1414 for SV(W|O) and mtDNA
gccccaaccgaaatttttaatgcaggtttggtagtttaggacctgtgggtttgttaggtactgtttgcattaataaattaaagctccatagggtcttctcgtcttgctgtgttatgcccg

SEQ ID NO: 58154 - DNA, 120 bp, Homo sapiens
  misc_feature: 1414 for SV(W|O) and mtDNA
acttgcgctgcatgtgccattaagatatataggatttagcctataatttaactttgacaaagttatgaaatggtttttctaatacctttttgaaaaagtcatggaggccatggggttggc

SEQ ID NO: 58155 - DNA, 120 bp, Homo sapiens
  misc_feature: 1414 for SV(W|O) and mtDNA
ctgcccaagaactatcaaactcctgagccaacaacttaatatgactagcttacacaatagcttttatagtaaagatacctctttacggactccacttatgactccctaaagcccatgtcg

SEQ ID NO: 58156 - DNA, 120 bp, Homo sapiens
  misc_feature: 1414 for SV(W|O) and mtDNA
caatcacctgagctcaccatagtctaatagaaaacaaccgaaaccaaataattcaagcactgcttattacaattttactgggtctctattttaccctcctacaagcctcagagtacttcg

SEQ ID NO: 58157 - DNA, 120 bp, Homo sapiens
  misc_feature: 1414 for SV(W|O) and mtDNA
aagcccgaatgatatttcctattcgcctacacaattctccgatccgtccctaacaaactaggaggcgtccttgccctattactatccatcctcatcctagcaataatccccatcctccat

SEQ ID NO: 58158 - DNA, 120 bp, Homo sapiens
  misc_feature: 1414 for SV(W|O) and mtDNA
agaggggtgccttgggtaacctctgggactcagaagtgaaagggggctattcctagttttattgctatagccattatgattattaatgatgagtactgattggtagtattggttatggtt

SEQ ID NO: 58159 - DNA, 120 bp, Homo sapiens
  misc_feature: 1413 for SV(W|O) and mtDNA
tttcaacttaacttgaccgctctgagctaaacctagccccaaacccactccaccttactaccagacaaccttagccaaaccatttacccaaataaagtataggcgatagaaattgaaacc

SEQ ID NO: 58160 - DNA, 120 bp, Homo sapiens
  misc_feature: 1413 for SV(W|O) and mtDNA
aggggaagtagcgtcttgtagacctacttgcgctgcatgtgccattaagatatataggatttagcctataatttaactttgacaaagttatgaaatggtttttctaatacctttttgaaa

SEQ ID NO: 58161 - DNA, 120 bp, Homo sapiens
  misc_feature: 1413 for SV(W|O) and mtDNA
ttagaatgggtacaatgaggagtaggaggttggccatgggtatgttgttaagaagaggaattgaacctctgactgtaaagttttaagttttatgcgattaccgggctctgccatcttaac

SEQ ID NO: 58162 - DNA, 120 bp, Homo sapiens
  misc_feature: 1413 for SV(W|O) and mtDNA
ttaaatcaacaaaactgctcgccagaacactacgagccacagcttaaaactcaaaggacctggcggtgcttcatatccctctagaggagcctgttctgtaatcgataaaccccgatcaac

SEQ ID NO: 58163 - DNA, 120 bp, Homo sapiens
  misc_feature: 1413 for SV(W|O) and mtDNA
agtttatgtagcttacctcctcaaagcaatacactgaaaatgtttagacgggctcacatcaccccataaacaaataggtttggtcctagcctttctattagctcttagtaagattacaca

SEQ ID NO: 58164 - DNA, 120 bp, Homo sapiens
  misc_feature: 1413 for SV(W|O) and mtDNA
agatattcgaaaaataggaggactactcaaaaccatacctctcacttcaacctccctcaccattggcagcctagcattagcaggaatacctttcctcacaggtttctactccaaagacca

SEQ ID NO: 58165 - DNA, 120 bp, Homo sapiens
  misc_feature: 1413 for SV(W|O) and mtDNA
cggctcgaataaggaggcttagagctgtgcctaggactccagctcatgcgccgaataataggtatagtgttccaatgtctttgtggtttgtagagaatagtcaacggtcggcgaacatca

SEQ ID NO: 58166 - DNA, 120 bp, Homo sapiens
  misc_feature: 1413 for SV(W|O) and mtDNA
tgactagttcccctaataatcggtgcccccgatatggcgtttccccgcataaacaacataagcttctgactcttacctccctctctcctactcctgctcgcatctgctatagtggaggcc

SEQ ID NO: 58167 - DNA, 120 bp, Homo sapiens
  misc_feature: 1413 for SV(W|O) and mtDNA
tctgtatttaacctaaatttctataagattattagtataaaaggggagataggtaggagtagcgtggtaagggcgatgagtgtggggaggaatggggtgggttttgtatgttcaaactgt

SEQ ID NO: 58168 - DNA, 120 bp, Homo sapiens
  misc_feature: 1413 for SV(W|O) and mtDNA
tcgtggtgctggagtttaagttgagtagtaggaatgcggtagtagttaggataatataaatagttaaattaagaatggttatgttagggttgtacggtagaactgctattattcatccta

SEQ ID NO: 58169 - DNA, 120 bp, Homo sapiens
  misc_feature: 1413 for SV(W|O) and mtDNA
tataataaacaccctcaccactacaatcttcctaggaacaacatatgacgcactctcccctgaactctacacaacatattttgtcaccaagaccctacttctaacctccctgttcttatg

SEQ ID NO: 58170 - DNA, 120 bp, Homo sapiens
  misc_feature: 1413 for SV(W|O) and mtDNA
tagcatcaccagtattagaggcaccgcctgcccagtgacacatgtttaacggccgcggtaccctaaccgtgcaaaggtagcataatcacttgttccttaaatagggacctgtatgaatgg

SEQ ID NO: 58171 - DNA, 120 bp, Homo sapiens
  misc_feature: 1413 for SV(W|O) and mtDNA
aagggggtttaagctcctattatttactctatcaaagtaactcttttatcagacatatttcttaggtttgagggggaatgctggagattgtaatgggtatggagacatatcatataagta

SEQ ID NO: 58172 - DNA, 120 bp, Homo sapiens
  misc_feature: 1413 for SV(W|O) and mtDNA
tactcctcaattacccacataggatgaataatagcagttctaccgtacaaccctaacataaccattcttaatttaactatttatattatcctaactactaccgcattcctactactcaac

SEQ ID NO: 58173 - DNA, 120 bp, Homo sapiens
  misc_feature: 1413 for SV(W|O) and mtDNA
tacgcaaaatcttagcatactcctcaattacccacataggatgaataatagcagttctaccgtacaaccctaacataaccattcttaatttaactatttatattatcctaactactaccg

SEQ ID NO: 58174 - DNA, 120 bp, Homo sapiens
  misc_feature: 1413 for SV(W|O) and mtDNA
gtgatgaggaatagtgtaaggagtatgggggtaattatggtgggccatacggtagtatttagttggggcatttcactgtaaagaggtgttggttctcttaatctttaacttaaaaggtta

SEQ ID NO: 58175 - DNA, 120 bp, Homo sapiens
  misc_feature: 1413 for SV(W|O) and mtDNA
taacctcgccttaccccccactattaacctactgggagaactctctgtgctagtaaccacgttctcctgatcaaatatcactctcctacttacaggactcaacatactagtcacagccct

SEQ ID NO: 58176 - DNA, 120 bp, Homo sapiens
  misc_feature: 1413 for SV(W|O) and mtDNA
atgtcagaggggtgccttgggtaacctctgggactcagaagtgaaagggggctattcctagttttattgctatagccattatgattattaatgatgagtactgattggtagtattggtta

SEQ ID NO: 58177 - DNA, 120 bp, Homo sapiens
  misc_feature: 1413 for SV(W|O) and mtDNA
ctgtaggctcattcatttctctaacagcagtaatattaataattttcatgatttgagaagccttcgcttcaaagcgaaaagtcctaatagtagaagaaccctccataaacctggagtgac

SEQ ID NO: 58178 - DNA, 120 bp, Homo sapiens
  misc_feature: 1413 for SV(W|O) and mtDNA
atcaaatatcactctcctacttacaggactcaacatactagtcacagccctatactccctctacatatttaccacaacacaatggggctcactcacccaccacattaacaacataaaacc

SEQ ID NO: 58179 - DNA, 120 bp, Homo sapiens
  misc_feature: 1413 for SV(W|O) and mtDNA
ggtatggttttgagtagtcctcctatttttcgaatatcttgttcattgttaaggttgtggatgatggacccggagcacataaatagtatggctttgaagaaggcgtgggtgcagatgtgc

SEQ ID NO: 58180 - DNA, 120 bp, Homo sapiens
  misc_feature: 1413 for SV(W|O) and mtDNA
gggtgccttgggtaacctctgggactcagaagtgaaagggggctattcctagttttattgctatagccattatgattattaatgatgagtactgattggtagtattggttatggttcatt

SEQ ID NO: 58181 - DNA, 120 bp, Homo sapiens
  misc_feature: 1413 for SV(W|O) and mtDNA
gggccagccaggcaaccttctaggtaacgaccacatctacaacgttatcgtcacagcccatgcatttgtaataatcttcttcatagtaatacccatcataatcggaggctttggcaactg

SEQ ID NO: 58182 - DNA, 120 bp, Homo sapiens
  misc_feature: 1413 for SV(W|O) and mtDNA
ggagttgaagattagtccgccgtagtcggtgtactcgtaggttcagtaccattggtggccaattgatttgatggtaagggagggatcgttgacctcgtctgttatgtaaaggatgcgtag

SEQ ID NO: 58183 - DNA, 120 bp, Homo sapiens
  misc_feature: 1413 for SV(W|O) and mtDNA
gcctacgttttcacacttctagtaagcctctacctgcacgacaacacataatgacccaccaatcacatgcctatcatatagtaaaacccagcccatgacccctaacaggggccctctcag

SEQ ID NO: 58184 - DNA, 120 bp, Homo sapiens
  misc_feature: 1413 for SV(W|O) and mtDNA
gccacctactcatgcacctaattggaagcgccaccctagcaatatcaaccattaaccttccctctacacttatcatcttcacaattctaattctactgactatcctagaaatcgctgtcg

SEQ ID NO: 58185 - DNA, 120 bp, Homo sapiens
  misc_feature: 1413 for SV(W|O) and mtDNA
accgcaaacatatcatacacaaacgcctgagccctatctattactctcatcgctacctccctgacaagcgcctatagcactcgaataattcttctcaccctaacaggtcaacctcgcttc

SEQ ID NO: 58186 - DNA, 120 bp, Homo sapiens
  misc_feature: 1413 for SV(W|O) and mtDNA
actgtaaatctaaagacaggggttaggcctctttttaccagctccgaggtgattttcatattgaattgcaaattcgaagaagcagcttcaaacctgccggggcttctcccgccttttttc

SEQ ID NO: 58187 - DNA, 120 bp, Homo sapiens
  misc_feature: 1413 for SV(W|O) and mtDNA
atttgccgagttccttttactttttttaacctttccttatgagcatgcctgtgttgggttgacagtgagggtaataatgacttgttggttgattgtagatattgggctgttaattgtcag

SEQ ID NO: 58188 - DNA, 120 bp, Homo sapiens
  misc_feature: 1413 for SV(W|O) and mtDNA
agccaggcaaccttctaggtaacgaccacatctacaacgttatcgtcacagcccatgcatttgtaataatcttcttcatagtaatacccatcataatcggaggctttggcaactgactag

SEQ ID NO: 58189 - DNA, 120 bp, Homo sapiens
  misc_feature: 1413 for SV(W|O) and mtDNA
agaagaattattcgagtgctataggcgcttgtcagggaggtagcgatgagagtaatagatagggctcaggcgtttgtgtatgatatgtttgcggtttcgatgatgtggtctttggagtag

SEQ ID NO: 58190 - DNA, 120 bp, Homo sapiens
  misc_feature: 1413 for SV(W|O) and mtDNA
cgaaaccgcaaacatatcatacacaaacgcctgagccctatctattactctcatcgctacctccctgacaagcgcctatagcactcgaataattcttctcaccctaacaggtcaacctcg

SEQ ID NO: 58191 - DNA, 120 bp, Homo sapiens
  misc_feature: 1413 for SV(W|O) and mtDNA
cgaggtcgccccaaccgaaatttttaatgcaggtttggtagtttaggacctgtgggtttgttaggtactgtttgcattaataaattaaagctccatagggtcttctcgtcttgctgtgtt

SEQ ID NO: 58192 - DNA, 120 bp, Homo sapiens
  misc_feature: 1413 for SV(W|O) and mtDNA
cctatactttatttgggtaaatggtttggctaaggttgtctggtagtaaggtggagtgggtttggggctaggtttagctcagagcggtcaagttaagttgaaatctcctaagtgtaagtt

SEQ ID NO: 58193 - DNA, 120 bp, Homo sapiens
  misc_feature: 1413 for SV(W|O) and mtDNA
ccgcttccaccccctagcagaaaatagcccactaatccaaactctaacactatgcttaggcgctatcaccactctgttcgcagcagtctgcgcccttacacaaaatgacatcaaaaaaat

SEQ ID NO: 58194 - DNA, 120 bp, Homo sapiens
  misc_feature: 1413 for SV(W|O) and mtDNA
ataatgggggaagtatgtaggagttgaagattagtccgccgtagtcggtgtactcgtaggttcagtaccattggtggccaattgatttgatggtaagggagggatcgttgacctcgtctg

SEQ ID NO: 58195 - DNA, 120 bp, Homo sapiens
  misc_feature: 1413 for SV(W|O) and mtDNA
agacgtccgggaattgcatctgtttttaagcctaatgtggggacagctcatgagtgcaagacgtcttgtgatgtaattattatacgaatgggggcttcaatcgggagtactactcgattg

SEQ ID NO: 58196 - DNA, 120 bp, Homo sapiens
  misc_feature: 1413 for SV(W|O) and mtDNA
aaagtgaactgtatccgacatctggttcctacttcagggtcataaagcctaaatagcccacacgttccccttaaataagacatcacgatggatcacaggtctatcaccctattaaccact

SEQ ID NO: 58197 - DNA, 120 bp, Homo sapiens
  misc_feature: 1413 for SV(W|O) and mtDNA
agggtataaccaacattttcggggtatgggcccgatagcttatttagctgaccttactttaggatggggtgtgataggtggcacggagaattttggattctcagggatgggttcgattct

SEQ ID NO: 58198 - DNA, 120 bp, Homo sapiens
  misc_feature: 1413 for SV(W|O) and mtDNA
accgactacggcggactaatcttcaactcctacatacttcccccattattcctagaaccaggcgacctgcgactccttgacgttgacaatcgagtagtactcccgattgaagcccccatt

SEQ ID NO: 58199 - DNA, 120 bp, Homo sapiens
  misc_feature: 1412 for SV(W|O) and mtDNA
gttgggtgatgaggaatagtgtaaggagtatgggggtaattatggtgggccatacggtagtatttagttggggcatttcactgtaaagaggtgttggttctcttaatctttaacttaaaa

SEQ ID NO: 58200 - DNA, 120 bp, Homo sapiens
  misc_feature: 1412 for SV(W|O) and mtDNA
gttctcctgatcaaatatcactctcctacttacaggactcaacatactagtcacagccctatactccctctacatatttaccacaacacaatggggctcactcacccaccacattaacaa

SEQ ID NO: 58201 - DNA, 120 bp, Homo sapiens
  misc_feature: 1412 for SV(W|O) and mtDNA
ttatttgggtaaatggtttggctaaggttgtctggtagtaaggtggagtgggtttggggctaggtttagctcagagcggtcaagttaagttgaaatctcctaagtgtaagttgggtgctt

SEQ ID NO: 58202 - DNA, 120 bp, Homo sapiens
  misc_feature: 1412 for SV(W|O) and mtDNA
accctcaccactacaatcttcctaggaacaacatatgacgcactctcccctgaactctacacaacatattttgtcaccaagaccctacttctaacctccctgttcttatgaattcgaaca

SEQ ID NO: 58203 - DNA, 120 bp, Homo sapiens
  misc_feature: 1412 for SV(W|O) and mtDNA
tgtgtgatagttgagggttgattgctgtacttgcttgtaagcatggggagggggttttgatgtggattgggtttttatgtactacaggtggtcaagtatttatggtaccgtacaatattc

SEQ ID NO: 58204 - DNA, 120 bp, Homo sapiens
  misc_feature: 1412 for SV(W|O) and mtDNA
cctttcgtacagggaggaatttgaagtagatagaaaccgacctggattactccggtctgaactcagatcacgtaggactttaatcgttgaacaaacgaacctttaatagcggctgcacca

SEQ ID NO: 58205 - DNA, 120 bp, Homo sapiens
  misc_feature: 1412 for SV(W|O) and mtDNA
tgggtgctttgtgttaagctacactctggttcgtccaagtgcactttccagtacacttaccatgttacgacttgtctcctctatataaatgcgtaggggttttagttaaatgtcctttga

SEQ ID NO: 58206 - DNA, 120 bp, Homo sapiens
  misc_feature: 1412 for SV(W|O) and mtDNA
tgggccagccaggcaaccttctaggtaacgaccacatctacaacgttatcgtcacagcccatgcatttgtaataatcttcttcatagtaatacccatcataatcggaggctttggcaact

SEQ ID NO: 58207 - DNA, 120 bp, Homo sapiens
  misc_feature: 1412 for SV(W|O) and mtDNA
acaagatattcgaaaaataggaggactactcaaaaccatacctctcacttcaacctccctcaccattggcagcctagcattagcaggaatacctttcctcacaggtttctactccaaaga

SEQ ID NO: 58208 - DNA, 120 bp, Homo sapiens
  misc_feature: 1412 for SV(W|O) and mtDNA
tcatcatccccaccatcatagccaccatcaccctccttaacctctacttctacctacgcctaatctactccacctcaatcacactactccccatatctaacaacgtaaaaataaaatgac

SEQ ID NO: 58209 - DNA, 120 bp, Homo sapiens
  misc_feature: 1412 for SV(W|O) and mtDNA
acatgagggtgttttctcgtgtgaatgagggttttatgttgttaatgtggtgggtgagtgagccccattgtgttgtggtaaatatgtagagggagtatagggctgtgactagtatgttga

SEQ ID NO: 58210 - DNA, 120 bp, Homo sapiens
  misc_feature: 1412 for SV(W|O) and mtDNA
agcccgaatgatatttcctattcgcctacacaattctccgatccgtccctaacaaactaggaggcgtccttgccctattactatccatcctcatcctagcaataatccccatcctccata

SEQ ID NO: 58211 - DNA, 120 bp, Homo sapiens
  misc_feature: 1412 for SV(W|O) and mtDNA
taaagcccatgtcgaagcccccatcgctgggtcaatagtacttgccgcagtactcttaaaactaggcggctatggtataatacgcctcacactcattctcaaccccctgacaaaacacat

SEQ ID NO: 58212 - DNA, 120 bp, Homo sapiens
  misc_feature: 1412 for SV(W|O) and mtDNA
gatcaaatatcactctcctacttacaggactcaacatactagtcacagccctatactccctctacatatttaccacaacacaatggggctcactcacccaccacattaacaacataaaac

SEQ ID NO: 58213 - DNA, 120 bp, Homo sapiens
  misc_feature: 1412 for SV(W|O) and mtDNA
gtaaatctaaagacaggggttaggcctctttttaccagctccgaggtgattttcatattgaattgcaaattcgaagaagcagcttcaaacctgccggggcttctcccgccttttttcccg

SEQ ID NO: 58214 - DNA, 120 bp, Homo sapiens
  misc_feature: 1412 for SV(W|O) and mtDNA
gatgaataatagcagttctaccgtacaaccctaacataaccattcttaatttaactatttatattatcctaactactaccgcattcctactactcaacttaaactccagcaccacgaccc

SEQ ID NO: 58215 - DNA, 120 bp, Homo sapiens
  misc_feature: 1412 for SV(W|O) and mtDNA
gctaacctcgccttaccccccactattaacctactgggagaactctctgtgctagtaaccacgttctcctgatcaaatatcactctcctacttacaggactcaacatactagtcacagcc

SEQ ID NO: 58216 - DNA, 120 bp, Homo sapiens
  misc_feature: 1412 for SV(W|O) and mtDNA
gctccgaggtcgccccaaccgaaatttttaatgcaggtttggtagtttaggacctgtgggtttgttaggtactgtttgcattaataaattaaagctccatagggtcttctcgtcttgctg

SEQ ID NO: 58217 - DNA, 120 bp, Homo sapiens
  misc_feature: 1412 for SV(W|O) and mtDNA
gctatttgttgtgggtctcatgagttggagtgtaggataaatcatgctaaggcgaggatgaaaccgatatcgccgatacggttgtataggattgcttgaatggctgctgtgttggcatct

SEQ ID NO: 58218 - DNA, 120 bp, Homo sapiens
  misc_feature: 1412 for SV(W|O) and mtDNA
gcgtacggccagggctattggttgaatgagtaggctgatggtttcgataataactagtatggggataaggggtgtaggtgtgccttgtggtaagaagtgggctagggcatttttaatctt

SEQ ID NO: 58219 - DNA, 120 bp, Homo sapiens
  misc_feature: 1412 for SV(W|O) and mtDNA
gcggtgcctctaatactggtgatgctagaggtgatgtttttggtaaacaggcggggtaagatttgccgagttccttttactttttttaacctttccttatgagcatgcctgtgttgggtt

SEQ ID NO: 58220 - DNA, 120 bp, Homo sapiens
  misc_feature: 1412 for SV(W|O) and mtDNA
cctagcaaactcaaactacgaacgcactcacagtcgcatcataatcctctctcaaggacttcaaactctactcccactaatagctttttgatgacttctagcaagcctcgctaacctcgc

SEQ ID NO: 58221 - DNA, 120 bp, Homo sapiens
  misc_feature: 1412 for SV(W|O) and mtDNA
gcctcatcatccccaccatcatagccaccatcaccctccttaacctctacttctacctacgcctaatctactccacctcaatcacactactccccatatctaacaacgtaaaaataaaat

SEQ ID NO: 58222 - DNA, 120 bp, Homo sapiens
  misc_feature: 1412 for SV(W|O) and mtDNA
ctcactcacccaccacattaacaacataaaaccctcattcacacgagaaaacaccctcatgttcatacacctatcccccattctcctcctatccctcaaccccgacatcattaccgggtt

SEQ ID NO: 58223 - DNA, 120 bp, Homo sapiens
  misc_feature: 1412 for SV(W|O) and mtDNA
ccgcctcttcacgggcaggtcaatttcactggttaaaagtaagagacagctgaaccctcgtggagccattcatacaggtccctatttaaggaacaagtgattatgctacctttgcacggt

SEQ ID NO: 58224 - DNA, 120 bp, Homo sapiens
  misc_feature: 1412 for SV(W|O) and mtDNA
aaagtggtttggtttagacgtccgggaattgcatctgtttttaagcctaatgtggggacagctcatgagtgcaagacgtcttgtgatgtaattattatacgaatgggggcttcaatcggg

SEQ ID NO: 58225 - DNA, 120 bp, Homo sapiens
  misc_feature: 1412 for SV(W|O) and mtDNA
caaaatcttagcatactcctcaattacccacataggatgaataatagcagttctaccgtacaaccctaacataaccattcttaatttaactatttatattatcctaactactaccgcatt

SEQ ID NO: 58226 - DNA, 120 bp, Homo sapiens
  misc_feature: 1412 for SV(W|O) and mtDNA
attttcatattgaattgcaaattcgaagaagcagcttcaaacctgccggggcttctcccgccttttttcccggcggcgggagaagtagattgaagccagttgattagggtgcttagctgt

SEQ ID NO: 58227 - DNA, 120 bp, Homo sapiens
  misc_feature: 1412 for SV(W|O) and mtDNA
atatcactctcctacttacaggactcaacatactagtcacagccctatactccctctacatatttaccacaacacaatggggctcactcacccaccacattaacaacataaaaccctcat

SEQ ID NO: 58228 - DNA, 120 bp, Homo sapiens
  misc_feature: 1411 for SV(W|O) and mtDNA
tttgccgagttccttttactttttttaacctttccttatgagcatgcctgtgttgggttgacagtgagggtaataatgacttgttggttgattgtagatattgggctgttaattgtcagt

SEQ ID NO: 58229 - DNA, 120 bp, Homo sapiens
  misc_feature: 1411 for SV(W|O) and mtDNA
agttgggtgatgaggaatagtgtaaggagtatgggggtaattatggtgggccatacggtagtatttagttggggcatttcactgtaaagaggtgttggttctcttaatctttaacttaaa

SEQ ID NO: 58230 - DNA, 120 bp, Homo sapiens
  misc_feature: 1411 for SV(W|O) and mtDNA
gcattccggataggccgagaaagtgttgtgggaagaaagttagatttacgccgatgaatatgatagtgaaatggattttggcgtaggtttggtctagggtgtagcctgagaataggggaa

SEQ ID NO: 58231 - DNA, 120 bp, Homo sapiens
  misc_feature: 1411 for SV(W|O) and mtDNA
ttagcatactcctcaattacccacataggatgaataatagcagttctaccgtacaaccctaacataaccattcttaatttaactatttatattatcctaactactaccgcattcctacta

SEQ ID NO: 58232 - DNA, 120 bp, Homo sapiens
  misc_feature: 1411 for SV(W|O) and mtDNA
aaaacaatagcctcatcatccccaccatcatagccaccatcaccctccttaacctctacttctacctacgcctaatctactccacctcaatcacactactccccatatctaacaacgtaa

SEQ ID NO: 58233 - DNA, 120 bp, Homo sapiens
  misc_feature: 1411 for SV(W|O) and mtDNA
caagcccgaatgatatttcctattcgcctacacaattctccgatccgtccctaacaaactaggaggcgtccttgccctattactatccatcctcatcctagcaataatccccatcctcca

SEQ ID NO: 58234 - DNA, 120 bp, Homo sapiens
  misc_feature: 1411 for SV(W|O) and mtDNA
tgagaagaattattcgagtgctataggcgcttgtcagggaggtagcgatgagagtaatagatagggctcaggcgtttgtgtatgatatgtttgcggtttcgatgatgtggtctttggagt

SEQ ID NO: 58235 - DNA, 120 bp, Homo sapiens
  misc_feature: 1411 for SV(W|O) and mtDNA
agatgttggatggggtggggaggtcgatgaatgagtggttaattaattttattagggggttagttttgcgtattggggtcattggtgttcttgtagttgaaatacaacgatggtttttca

SEQ ID NO: 58236 - DNA, 120 bp, Homo sapiens
  misc_feature: 1411 for SV(W|O) and mtDNA
tcgtaggttcagtaccattggtggccaattgatttgatggtaagggagggatcgttgacctcgtctgttatgtaaaggatgcgtagggatgggagggcgatgaggactaggatgatggcg

SEQ ID NO: 58237 - DNA, 120 bp, Homo sapiens
  misc_feature: 1411 for SV(W|O) and mtDNA
tcatctgtaggctcattcatttctctaacagcagtaatattaataattttcatgatttgagaagccttcgcttcaaagcgaaaagtcctaatagtagaagaaccctccataaacctggag

SEQ ID NO: 58238 - DNA, 120 bp, Homo sapiens
  misc_feature: 1411 for SV(W|O) and mtDNA
tcaagcccgaatgatatttcctattcgcctacacaattctccgatccgtccctaacaaactaggaggcgtccttgccctattactatccatcctcatcctagcaataatccccatcctcc

SEQ ID NO: 58239 - DNA, 120 bp, Homo sapiens
  misc_feature: 1411 for SV(W|O) and mtDNA
tatcactctcctacttacaggactcaacatactagtcacagccctatactccctctacatatttaccacaacacaatggggctcactcacccaccacattaacaacataaaaccctcatt

SEQ ID NO: 58240 - DNA, 120 bp, Homo sapiens
  misc_feature: 1411 for SV(W|O) and mtDNA
atcttagcatactcctcaattacccacataggatgaataatagcagttctaccgtacaaccctaacataaccattcttaatttaactatttatattatcctaactactaccgcattccta

SEQ ID NO: 58241 - DNA, 120 bp, Homo sapiens
  misc_feature: 1411 for SV(W|O) and mtDNA
taagatttgccgagttccttttactttttttaacctttccttatgagcatgcctgtgttgggttgacagtgagggtaataatgacttgttggttgattgtagatattgggctgttaattg

SEQ ID NO: 58242 - DNA, 120 bp, Homo sapiens
  misc_feature: 1411 for SV(W|O) and mtDNA
ccatcattctactatcaacattactaataagtggctcctttaacctctccacccttatcacaacacaagaacacctctgattactcctgccatcatgacccttggccataatatgattta

SEQ ID NO: 58243 - DNA, 120 bp, Homo sapiens
  misc_feature: 1411 for SV(W|O) and mtDNA
cagtttatgtagcttacctcctcaaagcaatacactgaaaatgtttagacgggctcacatcaccccataaacaaataggtttggtcctagcctttctattagctcttagtaagattacac

SEQ ID NO: 58244 - DNA, 120 bp, Homo sapiens
  misc_feature: 1411 for SV(W|O) and mtDNA
gtggagatgttggatggggtggggaggtcgatgaatgagtggttaattaattttattagggggttagttttgcgtattggggtcattggtgttcttgtagttgaaatacaacgatggttt

SEQ ID NO: 58245 - DNA, 120 bp, Homo sapiens
  misc_feature: 1411 for SV(W|O) and mtDNA
ggtgatgaggaatagtgtaaggagtatgggggtaattatggtgggccatacggtagtatttagttggggcatttcactgtaaagaggtgttggttctcttaatctttaacttaaaaggtt

SEQ ID NO: 58246 - DNA, 120 bp, Homo sapiens
  misc_feature: 1411 for SV(W|O) and mtDNA
acttctagtaagcctctacctgcacgacaacacataatgacccaccaatcacatgcctatcatatagtaaaacccagcccatgacccctaacaggggccctctcagccctcctaatgacc

SEQ ID NO: 58247 - DNA, 120 bp, Homo sapiens
  misc_feature: 1411 for SV(W|O) and mtDNA
cccggacgtctaaaccaaaccactttcaccgctacacgaccgggggtatactacggtcaatgctctgaaatctgtggagcaaaccacagtttcatgcccatcgtcctagaattaattccc

SEQ ID NO: 58248 - DNA, 120 bp, Homo sapiens
  misc_feature: 1411 for SV(W|O) and mtDNA
ctaggaatagccccctttcacttctgagtcccagaggttacccaaggcacccctctgacatccggcctgcttcttctcacatgacaaaaactagcccccatctcaatcatataccaaatc

SEQ ID NO: 58249 - DNA, 120 bp, Homo sapiens
  misc_feature: 1411 for SV(W|O) and mtDNA
gaataatgggggaagtatgtaggagttgaagattagtccgccgtagtcggtgtactcgtaggttcagtaccattggtggccaattgatttgatggtaagggagggatcgttgacctcgtc

SEQ ID NO: 58250 - DNA, 120 bp, Homo sapiens
  misc_feature: 1411 for SV(W|O) and mtDNA
aagtatgtaggagttgaagattagtccgccgtagtcggtgtactcgtaggttcagtaccattggtggccaattgatttgatggtaagggagggatcgttgacctcgtctgttatgtaaag

SEQ ID NO: 58251 - DNA, 120 bp, Homo sapiens
  misc_feature: 1411 for SV(W|O) and mtDNA
aataaacttcgccttaattttaataatcaacaccctcctagccttactactaataattattacattttgactaccacaactcaacggctacatagaaaaatccaccccttacgagtgcgg

SEQ ID NO: 58252 - DNA, 120 bp, Homo sapiens
  misc_feature: 1411 for SV(W|O) and mtDNA
catcattctactatcaacattactaataagtggctcctttaacctctccacccttatcacaacacaagaacacctctgattactcctgccatcatgacccttggccataatatgatttat

SEQ ID NO: 58253 - DNA, 120 bp, Homo sapiens
  misc_feature: 1411 for SV(W|O) and mtDNA
aaactgtggtttgctccacagatttcagagcattgaccgtagtatacccccggtcgtgtagcggtgaaagtggtttggtttagacgtccgggaattgcatctgtttttaagcctaatgtg

SEQ ID NO: 58254 - DNA, 120 bp, Homo sapiens
  misc_feature: 1411 for SV(W|O) and mtDNA
agtagctattaccttcttattatttgatctagaaattgccctccttttacccctaccatgagccctacaaacaactaacctgccactaatagttatgtcatccctcttattaatcatcat

SEQ ID NO: 58255 - DNA, 120 bp, Homo sapiens
  misc_feature: 1411 for SV(W|O) and mtDNA
aatatcaaccattaaccttccctctacacttatcatcttcacaattctaattctactgactatcctagaaatcgctgtcgccttaatccaagcctacgttttcacacttctagtaagcct

SEQ ID NO: 58256 - DNA, 120 bp, Homo sapiens
  misc_feature: 1410 for SV(W|O) and mtDNA
ttgtgagtgttaggaaaagggcatacaggactaggaagcagataaggaaaatgattatgagggcgtgatcatgaaaggtgataagctcttctatgataggggaagtagcgtcttgtagac

SEQ ID NO: 58257 - DNA, 120 bp, Homo sapiens
  misc_feature: 1410 for SV(W|O) and mtDNA
atagcctcatcatccccaccatcatagccaccatcaccctccttaacctctacttctacctacgcctaatctactccacctcaatcacactactccccatatctaacaacgtaaaaataa

SEQ ID NO: 58258 - DNA, 120 bp, Homo sapiens
  misc_feature: 1410 for SV(W|O) and mtDNA
ttatgcgattaccgggctctgccatcttaacaaaccctgttcttgggtgggtgtgggtataatactaagttgagatgatatcatttacgggggaaggcgctttgtgaagtaggccttatt

SEQ ID NO: 58259 - DNA, 120 bp, Homo sapiens
  misc_feature: 1410 for SV(W|O) and mtDNA
tctcctgatcaaatatcactctcctacttacaggactcaacatactagtcacagccctatactccctctacatatttaccacaacacaatggggctcactcacccaccacattaacaaca

SEQ ID NO: 58260 - DNA, 120 bp, Homo sapiens
  misc_feature: 1410 for SV(W|O) and mtDNA
tgggtacaatgaggagtaggaggttggccatgggtatgttgttaagaagaggaattgaacctctgactgtaaagttttaagttttatgcgattaccgggctctgccatcttaacaaaccc

SEQ ID NO: 58261 - DNA, 120 bp, Homo sapiens
  misc_feature: 1410 for SV(W|O) and mtDNA
tgggcatgaaactgtggtttgctccacagatttcagagcattgaccgtagtatacccccggtcgtgtagcggtgaaagtggtttggtttagacgtccgggaattgcatctgtttttaagc

SEQ ID NO: 58262 - DNA, 120 bp, Homo sapiens
  misc_feature: 1410 for SV(W|O) and mtDNA
cgatgaggactaggatgatggcgggcaggatagttcagacggtttctatttcctgagcgtctgagatgttagtattagttagttttgttgtgagtgttaggaaaagggcatacaggacta

SEQ ID NO: 58263 - DNA, 120 bp, Homo sapiens
  misc_feature: 1410 for SV(W|O) and mtDNA
gaattattcgagtgctataggcgcttgtcagggaggtagcgatgagagtaatagatagggctcaggcgtttgtgtatgatatgtttgcggtttcgatgatgtggtctttggagtagaaac

SEQ ID NO: 58264 - DNA, 120 bp, Homo sapiens
  misc_feature: 1410 for SV(W|O) and mtDNA
aagatattcgaaaaataggaggactactcaaaaccatacctctcacttcaacctccctcaccattggcagcctagcattagcaggaatacctttcctcacaggtttctactccaaagacc

SEQ ID NO: 58265 - DNA, 120 bp, Homo sapiens
  misc_feature: 1410 for SV(W|O) and mtDNA
acacgaccgggggtatactacggtcaatgctctgaaatctgtggagcaaaccacagtttcatgcccatcgtcctagaattaattcccctaaaaatctttgaaatagggcccgtatttacc

SEQ ID NO: 58266 - DNA, 120 bp, Homo sapiens
  misc_feature: 1410 for SV(W|O) and mtDNA
ggctatttgttgtgggtctcatgagttggagtgtaggataaatcatgctaaggcgaggatgaaaccgatatcgccgatacggttgtataggattgcttgaatggctgctgtgttggcatc

SEQ ID NO: 58267 - DNA, 120 bp, Homo sapiens
  misc_feature: 1410 for SV(W|O) and mtDNA
gccttgggtaacctctgggactcagaagtgaaagggggctattcctagttttattgctatagccattatgattattaatgatgagtactgattggtagtattggttatggttcattgtcc

SEQ ID NO: 58268 - DNA, 120 bp, Homo sapiens
  misc_feature: 1410 for SV(W|O) and mtDNA
aaatcttagcatactcctcaattacccacataggatgaataatagcagttctaccgtacaaccctaacataaccattcttaatttaactatttatattatcctaactactaccgcattcc

SEQ ID NO: 58269 - DNA, 120 bp, Homo sapiens
  misc_feature: 1410 for SV(W|O) and mtDNA
agtaagcctctacctgcacgacaacacataatgacccaccaatcacatgcctatcatatagtaaaacccagcccatgacccctaacaggggccctctcagccctcctaatgacctccggc

SEQ ID NO: 58270 - DNA, 120 bp, Homo sapiens
  misc_feature: 1410 for SV(W|O) and mtDNA
accggctttttgcccaaatgggccattatcgaagaattcacaaaaaacaatagcctcatcatccccaccatcatagccaccatcaccctccttaacctctacttctacctacgcctaatc

SEQ ID NO: 58271 - DNA, 120 bp, Homo sapiens
  misc_feature: 1410 for SV(W|O) and mtDNA
gacccaaactgggattagataccccactatgcttagccctaaacctcaacagttaaatcaacaaaactgctcgccagaacactacgagccacagcttaaaactcaaaggacctggcggtg

SEQ ID NO: 58272 - DNA, 120 bp, Homo sapiens
  misc_feature: 1410 for SV(W|O) and mtDNA
cttctagtaagcctctacctgcacgacaacacataatgacccaccaatcacatgcctatcatatagtaaaacccagcccatgacccctaacaggggccctctcagccctcctaatgacct

SEQ ID NO: 58273 - DNA, 120 bp, Homo sapiens
  misc_feature: 1410 for SV(W|O) and mtDNA
ccctcaccactacaatcttcctaggaacaacatatgacgcactctcccctgaactctacacaacatattttgtcaccaagaccctacttctaacctccctgttcttatgaattcgaacag

SEQ ID NO: 58274 - DNA, 120 bp, Homo sapiens
  misc_feature: 1410 for SV(W|O) and mtDNA
ctatactttatttgggtaaatggtttggctaaggttgtctggtagtaaggtggagtgggtttggggctaggtttagctcagagcggtcaagttaagttgaaatctcctaagtgtaagttg

SEQ ID NO: 58275 - DNA, 120 bp, Homo sapiens
  misc_feature: 1410 for SV(W|O) and mtDNA
cctaaatttctataagattattagtataaaaggggagataggtaggagtagcgtggtaagggcgatgagtgtggggaggaatggggtgggttttgtatgttcaaactgtcattttatttt

SEQ ID NO: 58276 - DNA, 120 bp, Homo sapiens
  misc_feature: 1410 for SV(W|O) and mtDNA
atttagagggtgaactcactggaacggggatgcttgcatgtgtaatcttactaagagctaatagaaaggctaggaccaaacctatttgtttatggggtgatgtgagcccgtctaaacatt

SEQ ID NO: 58277 - DNA, 120 bp, Homo sapiens
  misc_feature: 1410 for SV(W|O) and mtDNA
attattcgagtgctataggcgcttgtcagggaggtagcgatgagagtaatagatagggctcaggcgtttgtgtatgatatgtttgcggtttcgatgatgtggtctttggagtagaaacct

SEQ ID NO: 58278 - DNA, 120 bp, Homo sapiens
  misc_feature: 1410 for SV(W|O) and mtDNA
atctgcctacgacaaacagacctaaaatcgctcattgcatactcttcaatcagccacatagccctcgtagtaacagccattctcatccaaaccccctgaagcttcaccggcgcagtcatt

SEQ ID NO: 58279 - DNA, 120 bp, Homo sapiens
  misc_feature: 1410 for SV(W|O) and mtDNA
atatctgaacacacaatagctaagacccaaactgggattagataccccactatgcttagccctaaacctcaacagttaaatcaacaaaactgctcgccagaacactacgagccacagctt

SEQ ID NO: 58280 - DNA, 120 bp, Homo sapiens
  misc_feature: 1409 for SV(W|O) and mtDNA
gttaaatcaacaaaactgctcgccagaacactacgagccacagcttaaaactcaaaggacctggcggtgcttcatatccctctagaggagcctgttctgtaatcgataaaccccgatcaa

SEQ ID NO: 58281 - DNA, 120 bp, Homo sapiens
  misc_feature: 1409 for SV(W|O) and mtDNA
ttatctgcctcttcctacacatcgggcgaggcctatattacggatcatttctctactcagaaacctgaaacatcggcattatcctcctgcttgcaactatagcaacagccttcataggct

SEQ ID NO: 58282 - DNA, 120 bp, Homo sapiens
  misc_feature: 1409 for SV(W|O) and mtDNA
cgtaggtgcgataaataatgggatgaggcaggaatcaaagacagatactgcgacatagggtgctccggctccagcgtctcgcaatgctatcgcgtgcataccccccagacgaaaatacca

SEQ ID NO: 58283 - DNA, 120 bp, Homo sapiens
  misc_feature: 1409 for SV(W|O) and mtDNA
gccttcataggctatgtcctcccgtgaggccaaatatcattctgaggggccacagtaattacaaacttactatccgccatcccatacattgggacagacctagttcaatgaatctgagga

SEQ ID NO: 58284 - DNA, 120 bp, Homo sapiens
  misc_feature: 1409 for SV(W|O) and mtDNA
ggctcactaaacattctactactcactctcactgcccaagaactatcaaactcctgagccaacaacttaatatgactagcttacacaatagcttttatagtaaagatacctctttacgga

SEQ ID NO: 58285 - DNA, 120 bp, Homo sapiens
  misc_feature: 1409 for SV(W|O) and mtDNA
ggccagccaggcaaccttctaggtaacgaccacatctacaacgttatcgtcacagcccatgcatttgtaataatcttcttcatagtaatacccatcataatcggaggctttggcaactga

SEQ ID NO: 58286 - DNA, 120 bp, Homo sapiens
  misc_feature: 1409 for SV(W|O) and mtDNA
tcaaatatcactctcctacttacaggactcaacatactagtcacagccctatactccctctacatatttaccacaacacaatggggctcactcacccaccacattaacaacataaaaccc

SEQ ID NO: 58287 - DNA, 120 bp, Homo sapiens
  misc_feature: 1409 for SV(W|O) and mtDNA
atgttggatggggtggggaggtcgatgaatgagtggttaattaattttattagggggttagttttgcgtattggggtcattggtgttcttgtagttgaaatacaacgatggtttttcata

SEQ ID NO: 58288 - DNA, 120 bp, Homo sapiens
  misc_feature: 1409 for SV(W|O) and mtDNA
tagttcccctaataatcggtgcccccgatatggcgtttccccgcataaacaacataagcttctgactcttacctccctctctcctactcctgctcgcatctgctatagtggaggccggag

SEQ ID NO: 58289 - DNA, 120 bp, Homo sapiens
  misc_feature: 1409 for SV(W|O) and mtDNA
taaatctaaagacaggggttaggcctctttttaccagctccgaggtgattttcatattgaattgcaaattcgaagaagcagcttcaaacctgccggggcttctcccgccttttttcccgg

SEQ ID NO: 58290 - DNA, 120 bp, Homo sapiens
  misc_feature: 1409 for SV(W|O) and mtDNA
gtgtgaaaacgtaggcttggattaaggcgacagcgatttctaggatagtcagtagaattagaattgtgaagatgataagtgtagagggaaggttaatggttgatattgctagggtggcgc

SEQ ID NO: 58291 - DNA, 120 bp, Homo sapiens
  misc_feature: 1409 for SV(W|O) and mtDNA
gtcggtgtactcgtaggttcagtaccattggtggccaattgatttgatggtaagggagggatcgttgacctcgtctgttatgtaaaggatgcgtagggatgggagggcgatgaggactag

SEQ ID NO: 58292 - DNA, 120 bp, Homo sapiens
  misc_feature: 1409 for SV(W|O) and mtDNA
aaaaaatcgtagccttctccacttcaagtcaactaggactcataatagttacaatcggcatcaaccaaccacacctagcattcctgcacatctgcacccacgccttcttcaaagccatac

SEQ ID NO: 58293 - DNA, 120 bp, Homo sapiens
  misc_feature: 1409 for SV(W|O) and mtDNA
gtacggccagggctattggttgaatgagtaggctgatggtttcgataataactagtatggggataaggggtgtaggtgtgccttgtggtaagaagtgggctagggcatttttaatcttag

SEQ ID NO: 58294 - DNA, 120 bp, Homo sapiens
  misc_feature: 1409 for SV(W|O) and mtDNA
ctgccatcttaacaaaccctgttcttgggtgggtgtgggtataatactaagttgagatgatatcatttacgggggaaggcgctttgtgaagtaggccttatttctcttgtcctttcgtac

SEQ ID NO: 58295 - DNA, 120 bp, Homo sapiens
  misc_feature: 1409 for SV(W|O) and mtDNA
ggtcgtggtgctggagtttaagttgagtagtaggaatgcggtagtagttaggataatataaatagttaaattaagaatggttatgttagggttgtacggtagaactgctattattcatcc

SEQ ID NO: 58296 - DNA, 120 bp, Homo sapiens
  misc_feature: 1409 for SV(W|O) and mtDNA
agggtcgaagccgcactcgtaaggggtggatttttctatgtagccgttgagttgtggtagtcaaaatgtaataattattagtagtaaggctaggagggtgttgattattaaaattaaggc

SEQ ID NO: 58297 - DNA, 120 bp, Homo sapiens
  misc_feature: 1409 for SV(W|O) and mtDNA
atcattctactatcaacattactaataagtggctcctttaacctctccacccttatcacaacacaagaacacctctgattactcctgccatcatgacccttggccataatatgatttatc

SEQ ID NO: 58298 - DNA, 120 bp, Homo sapiens
  misc_feature: 1409 for SV(W|O) and mtDNA
aagtgaactgtatccgacatctggttcctacttcagggtcataaagcctaaatagcccacacgttccccttaaataagacatcacgatggatcacaggtctatcaccctattaaccactc

SEQ ID NO: 58299 - DNA, 120 bp, Homo sapiens
  misc_feature: 1409 for SV(W|O) and mtDNA
cacccaccacattaacaacataaaaccctcattcacacgagaaaacaccctcatgttcatacacctatcccccattctcctcctatccctcaaccccgacatcattaccgggttttcctc

SEQ ID NO: 58300 - DNA, 120 bp, Homo sapiens
  misc_feature: 1409 for SV(W|O) and mtDNA
ctgtatttaacctaaatttctataagattattagtataaaaggggagataggtaggagtagcgtggtaagggcgatgagtgtggggaggaatggggtgggttttgtatgttcaaactgtc

SEQ ID NO: 58301 - DNA, 120 bp, Homo sapiens
  misc_feature: 1409 for SV(W|O) and mtDNA
ctcggctcgaataaggaggcttagagctgtgcctaggactccagctcatgcgccgaataataggtatagtgttccaatgtctttgtggtttgtagagaatagtcaacggtcggcgaacat

SEQ ID NO: 58302 - DNA, 120 bp, Homo sapiens
  misc_feature: 1409 for SV(W|O) and mtDNA
ctaaatttctataagattattagtataaaaggggagataggtaggagtagcgtggtaagggcgatgagtgtggggaggaatggggtgggttttgtatgttcaaactgtcattttattttt

SEQ ID NO: 58303 - DNA, 120 bp, Homo sapiens
  misc_feature: 1409 for SV(W|O) and mtDNA
ccatcttaacaaaccctgttcttgggtgggtgtgggtataatactaagttgagatgatatcatttacgggggaaggcgctttgtgaagtaggccttatttctcttgtcctttcgtacagg

SEQ ID NO: 58304 - DNA, 120 bp, Homo sapiens
  misc_feature: 1409 for SV(W|O) and mtDNA
agttgaagattagtccgccgtagtcggtgtactcgtaggttcagtaccattggtggccaattgatttgatggtaagggagggatcgttgacctcgtctgttatgtaaaggatgcgtaggg

SEQ ID NO: 58305 - DNA, 120 bp, Homo sapiens
  misc_feature: 1409 for SV(W|O) and mtDNA
aagattagtccgccgtagtcggtgtactcgtaggttcagtaccattggtggccaattgatttgatggtaagggagggatcgttgacctcgtctgttatgtaaaggatgcgtagggatggg

SEQ ID NO: 58306 - DNA, 120 bp, Homo sapiens
  misc_feature: 1409 for SV(W|O) and mtDNA
actaggaatagccccctttcacttctgagtcccagaggttacccaaggcacccctctgacatccggcctgcttcttctcacatgacaaaaactagcccccatctcaatcatataccaaat

SEQ ID NO: 58307 - DNA, 120 bp, Homo sapiens
  misc_feature: 1409 for SV(W|O) and mtDNA
atgaaactgtggtttgctccacagatttcagagcattgaccgtagtatacccccggtcgtgtagcggtgaaagtggtttggtttagacgtccgggaattgcatctgtttttaagcctaat

SEQ ID NO: 58308 - DNA, 120 bp, Homo sapiens
  misc_feature: 1409 for SV(W|O) and mtDNA
agtagagtttgaagtccttgagagaggattatgatgcgactgtgagtgcgttcgtagtttgagtttgctaggcagaatagtaatgaggatgtaagcccgtgggcgattatgagaatgact

SEQ ID NO: 58309 - DNA, 120 bp, Homo sapiens
  misc_feature: 1409 for SV(W|O) and mtDNA
aaacattattataataaacaccctcaccactacaatcttcctaggaacaacatatgacgcactctcccctgaactctacacaacatattttgtcaccaagaccctacttctaacctccct

SEQ ID NO: 58310 - DNA, 120 bp, Homo sapiens
  misc_feature: 1408 for SV(W|O) and mtDNA
taggtgcgataaataatgggatgaggcaggaatcaaagacagatactgcgacatagggtgctccggctccagcgtctcgcaatgctatcgcgtgcataccccccagacgaaaataccaaa

SEQ ID NO: 58311 - DNA, 120 bp, Homo sapiens
  misc_feature: 1408 for SV(W|O) and mtDNA
gggtcttagctattgtgtgttcagatatgttaaagccactttcgtagtctattttgtgtcaactggagttttttacaactcaggtgagttttagctttattggggagggggtgatctaaa

SEQ ID NO: 58312 - DNA, 120 bp, Homo sapiens
  misc_feature: 1408 for SV(W|O) and mtDNA
tccttattcgagccgagctgggccagccaggcaaccttctaggtaacgaccacatctacaacgttatcgtcacagcccatgcatttgtaataatcttcttcatagtaatacccatcataa

SEQ ID NO: 58313 - DNA, 120 bp, Homo sapiens
  misc_feature: 1408 for SV(W|O) and mtDNA
ttaaccttccctctacacttatcatcttcacaattctaattctactgactatcctagaaatcgctgtcgccttaatccaagcctacgttttcacacttctagtaagcctctacctgcacg

SEQ ID NO: 58314 - DNA, 120 bp, Homo sapiens
  misc_feature: 1408 for SV(W|O) and mtDNA
tactaatctccctacaaatctccttaattataacattcacagccacagaactaatcatattttatatcttcttcgaaaccacacttatccccaccttggctatcatcacccgatgaggca

SEQ ID NO: 58315 - DNA, 120 bp, Homo sapiens
  misc_feature: 1408 for SV(W|O) and mtDNA
ataaacaaataggtttggtcctagcctttctattagctcttagtaagattacacatgcaagcatccccgttccagtgagttcaccctctaaatcaccacgatcaaaagggacaagcatca

SEQ ID NO: 58316 - DNA, 120 bp, Homo sapiens
  misc_feature: 1408 for SV(W|O) and mtDNA
agaagaagcaggccggatgtcagaggggtgccttgggtaacctctgggactcagaagtgaaagggggctattcctagttttattgctatagccattatgattattaatgatgagtactga

SEQ ID NO: 58317 - DNA, 120 bp, Homo sapiens
  misc_feature: 1408 for SV(W|O) and mtDNA
aatagcctcatcatccccaccatcatagccaccatcaccctccttaacctctacttctacctacgcctaatctactccacctcaatcacactactccccatatctaacaacgtaaaaata

SEQ ID NO: 58318 - DNA, 120 bp, Homo sapiens
  misc_feature: 1408 for SV(W|O) and mtDNA
tattagaaggattatggatgcggttgcttgcgtgaggaaatacttgatggcagcttctgtggaacgagggtttatttttttggttagaactggaataaaagctagcatgtttatttctag

SEQ ID NO: 58319 - DNA, 120 bp, Homo sapiens
  misc_feature: 1408 for SV(W|O) and mtDNA
cagccaggcaaccttctaggtaacgaccacatctacaacgttatcgtcacagcccatgcatttgtaataatcttcttcatagtaatacccatcataatcggaggctttggcaactgacta

SEQ ID NO: 58320 - DNA, 120 bp, Homo sapiens
  misc_feature: 1408 for SV(W|O) and mtDNA
gtagacctacttgcgctgcatgtgccattaagatatataggatttagcctataatttaactttgacaaagttatgaaatggtttttctaatacctttttgaaaaagtcatggaggccatg

SEQ ID NO: 58321 - DNA, 120 bp, Homo sapiens
  misc_feature: 1408 for SV(W|O) and mtDNA
ccgtctgaactatcctgcccgccatcatcctagtcctcatcgccctcccatccctacgcatcctttacataacagacgaggtcaacgatccctcccttaccatcaaatcaattggccacc

SEQ ID NO: 58322 - DNA, 120 bp, Homo sapiens
  misc_feature: 1408 for SV(W|O) and mtDNA
gcattggactgtaaatctaaagacaggggttaggcctctttttaccagctccgaggtgattttcatattgaattgcaaattcgaagaagcagcttcaaacctgccggggcttctcccgcc

SEQ ID NO: 58323 - DNA, 120 bp, Homo sapiens
  misc_feature: 1408 for SV(W|O) and mtDNA
cacccgatgaggcaaccagccagaacgcctgaacgcaggcacatacttcctattctacaccctagtaggctcccttcccctactcatcgcactaatttacactcacaacaccctaggctc

SEQ ID NO: 58324 - DNA, 120 bp, Homo sapiens
  misc_feature: 1408 for SV(W|O) and mtDNA
gaagaagcaggccggatgtcagaggggtgccttgggtaacctctgggactcagaagtgaaagggggctattcctagttttattgctatagccattatgattattaatgatgagtactgat

SEQ ID NO: 58325 - DNA, 120 bp, Homo sapiens
  misc_feature: 1408 for SV(W|O) and mtDNA
ctcgaataaggaggcttagagctgtgcctaggactccagctcatgcgccgaataataggtatagtgttccaatgtctttgtggtttgtagagaatagtcaacggtcggcgaacatcagtg

SEQ ID NO: 58326 - DNA, 120 bp, Homo sapiens
  misc_feature: 1408 for SV(W|O) and mtDNA
ccaccacattaacaacataaaaccctcattcacacgagaaaacaccctcatgttcatacacctatcccccattctcctcctatccctcaaccccgacatcattaccgggttttcctcttg

SEQ ID NO: 58327 - DNA, 120 bp, Homo sapiens
  misc_feature: 1408 for SV(W|O) and mtDNA
ataaacaccctcaccactacaatcttcctaggaacaacatatgacgcactctcccctgaactctacacaacatattttgtcaccaagaccctacttctaacctccctgttcttatgaatt

SEQ ID NO: 58328 - DNA, 120 bp, Homo sapiens
  misc_feature: 1408 for SV(W|O) and mtDNA
agggtgttttctcgtgtgaatgagggttttatgttgttaatgtggtgggtgagtgagccccattgtgttgtggtaaatatgtagagggagtatagggctgtgactagtatgttgagtcct

SEQ ID NO: 58329 - DNA, 120 bp, Homo sapiens
  misc_feature: 1408 for SV(W|O) and mtDNA
aaaaaacaatagcctcatcatccccaccatcatagccaccatcaccctccttaacctctacttctacctacgcctaatctactccacctcaatcacactactccccatatctaacaacgt

SEQ ID NO: 58330 - DNA, 120 bp, Homo sapiens
  misc_feature: 1408 for SV(W|O) and mtDNA
acctacttgcgctgcatgtgccattaagatatataggatttagcctataatttaactttgacaaagttatgaaatggtttttctaatacctttttgaaaaagtcatggaggccatggggt

SEQ ID NO: 58331 - DNA, 120 bp, Homo sapiens
  misc_feature: 1408 for SV(W|O) and mtDNA
aacgatggtttttcatatcattggtcgtggttgtagtccgtgcgagaataatgatgtatgctttgtttctgttgagtgtgggtttagtaatggggtttgtggggttttcttctaagcctt

SEQ ID NO: 58332 - DNA, 120 bp, Homo sapiens
  misc_feature: 1407 for SV(W|O) and mtDNA
agcctcatcatccccaccatcatagccaccatcaccctccttaacctctacttctacctacgcctaatctactccacctcaatcacactactccccatatctaacaacgtaaaaataaaa

SEQ ID NO: 58333 - DNA, 120 bp, Homo sapiens
  misc_feature: 1407 for SV(W|O) and mtDNA
ttgccgagttccttttactttttttaacctttccttatgagcatgcctgtgttgggttgacagtgagggtaataatgacttgttggttgattgtagatattgggctgttaattgtcagtt

SEQ ID NO: 58334 - DNA, 120 bp, Homo sapiens
  misc_feature: 1407 for SV(W|O) and mtDNA
ttcgccttaattttaataatcaacaccctcctagccttactactaataattattacattttgactaccacaactcaacggctacatagaaaaatccaccccttacgagtgcggcttcgac

SEQ ID NO: 58335 - DNA, 120 bp, Homo sapiens
  misc_feature: 1407 for SV(W|O) and mtDNA
ttcctgctaatgctaggctgccaatggtgagggaggttgaagtgagaggtatggttttgagtagtcctcctatttttcgaatatcttgttcattgttaaggttgtggatgatggacccgg

SEQ ID NO: 58336 - DNA, 120 bp, Homo sapiens
  misc_feature: 1407 for SV(W|O) and mtDNA
ataggtttggtcctagcctttctattagctcttagtaagattacacatgcaagcatccccgttccagtgagttcaccctctaaatcaccacgatcaaaagggacaagcatcaagcacgca

SEQ ID NO: 58337 - DNA, 120 bp, Homo sapiens
  misc_feature: 1407 for SV(W|O) and mtDNA
tgccttgggtaacctctgggactcagaagtgaaagggggctattcctagttttattgctatagccattatgattattaatgatgagtactgattggtagtattggttatggttcattgtc

SEQ ID NO: 58338 - DNA, 120 bp, Homo sapiens
  misc_feature: 1407 for SV(W|O) and mtDNA
tgagagtagagtgcttagttgaacagggccctgaagcgcgtacacaccgcccgtcaccctcctcaagtatacttcaaaggacatttaactaaaacccctacgcatttatatagaggagac

SEQ ID NO: 58339 - DNA, 120 bp, Homo sapiens
  misc_feature: 1407 for SV(W|O) and mtDNA
tgaagcattggactgtaaatctaaagacaggggttaggcctctttttaccagctccgaggtgattttcatattgaattgcaaattcgaagaagcagcttcaaacctgccggggcttctcc

SEQ ID NO: 58340 - DNA, 120 bp, Homo sapiens
  misc_feature: 1407 for SV(W|O) and mtDNA
tctgttatgtaaaggatgcgtagggatgggagggcgatgaggactaggatgatggcgggcaggatagttcagacggtttctatttcctgagcgtctgagatgttagtattagttagtttt

SEQ ID NO: 58341 - DNA, 120 bp, Homo sapiens
  misc_feature: 1407 for SV(W|O) and mtDNA
ccagctcggctcgaataaggaggcttagagctgtgcctaggactccagctcatgcgccgaataataggtatagtgttccaatgtctttgtggtttgtagagaatagtcaacggtcggcga

SEQ ID NO: 58342 - DNA, 120 bp, Homo sapiens
  misc_feature: 1407 for SV(W|O) and mtDNA
tcgataataactagtatggggataaggggtgtaggtgtgccttgtggtaagaagtgggctagggcatttttaatcttagagcgaaagcctataatcactgcgcccgctcataaggggatg

SEQ ID NO: 58343 - DNA, 120 bp, Homo sapiens
  misc_feature: 1407 for SV(W|O) and mtDNA
tcaacaaaactgctcgccagaacactacgagccacagcttaaaactcaaaggacctggcggtgcttcatatccctctagaggagcctgttctgtaatcgataaaccccgatcaacctcac

SEQ ID NO: 58344 - DNA, 120 bp, Homo sapiens
  misc_feature: 1407 for SV(W|O) and mtDNA
tatcaaccattaaccttccctctacacttatcatcttcacaattctaattctactgactatcctagaaatcgctgtcgccttaatccaagcctacgttttcacacttctagtaagcctct

SEQ ID NO: 58345 - DNA, 120 bp, Homo sapiens
  misc_feature: 1407 for SV(W|O) and mtDNA
ctattagaaggattatggatgcggttgcttgcgtgaggaaatacttgatggcagcttctgtggaacgagggtttatttttttggttagaactggaataaaagctagcatgtttatttcta

SEQ ID NO: 58346 - DNA, 120 bp, Homo sapiens
  misc_feature: 1407 for SV(W|O) and mtDNA
taataatcataatggctatagcaataaaactaggaatagccccctttcacttctgagtcccagaggttacccaaggcacccctctgacatccggcctgcttcttctcacatgacaaaaac

SEQ ID NO: 58347 - DNA, 120 bp, Homo sapiens
  misc_feature: 1407 for SV(W|O) and mtDNA
gtttatgtagcttacctcctcaaagcaatacactgaaaatgtttagacgggctcacatcaccccataaacaaataggtttggtcctagcctttctattagctcttagtaagattacacat

SEQ ID NO: 58348 - DNA, 120 bp, Homo sapiens
  misc_feature: 1407 for SV(W|O) and mtDNA
gttactacgagggctatgtggctgattgaagagtatgcaatgagcgattttaggtctgtttgtcgtaggcagatggagcttgttataattatgcctcatagggatagtacaaggaagggg

SEQ ID NO: 58349 - DNA, 120 bp, Homo sapiens
  misc_feature: 1407 for SV(W|O) and mtDNA
gtgattttcatattgaattgcaaattcgaagaagcagcttcaaacctgccggggcttctcccgccttttttcccggcggcgggagaagtagattgaagccagttgattagggtgcttagc

SEQ ID NO: 58350 - DNA, 120 bp, Homo sapiens
  misc_feature: 1407 for SV(W|O) and mtDNA
gctcactaaacattctactactcactctcactgcccaagaactatcaaactcctgagccaacaacttaatatgactagcttacacaatagcttttatagtaaagatacctctttacggac

SEQ ID NO: 58351 - DNA, 120 bp, Homo sapiens
  misc_feature: 1407 for SV(W|O) and mtDNA
acgtaggtgcgataaataatgggatgaggcaggaatcaaagacagatactgcgacatagggtgctccggctccagcgtctcgcaatgctatcgcgtgcataccccccagacgaaaatacc

SEQ ID NO: 58352 - DNA, 120 bp, Homo sapiens
  misc_feature: 1407 for SV(W|O) and mtDNA
agcttctgtggaacgagggtttatttttttggttagaactggaataaaagctagcatgtttatttctaggcctactcaggtaaaaaatcagtgcgagcttagcgctgtgatgagtgtgcc

SEQ ID NO: 58353 - DNA, 120 bp, Homo sapiens
  misc_feature: 1407 for SV(W|O) and mtDNA
gaatgatatttcctattcgcctacacaattctccgatccgtccctaacaaactaggaggcgtccttgccctattactatccatcctcatcctagcaataatccccatcctccatatatcc

SEQ ID NO: 58354 - DNA, 120 bp, Homo sapiens
  misc_feature: 1407 for SV(W|O) and mtDNA
cctcaaagcaatacactgaaaatgtttagacgggctcacatcaccccataaacaaataggtttggtcctagcctttctattagctcttagtaagattacacatgcaagcatccccgttcc

SEQ ID NO: 58355 - DNA, 120 bp, Homo sapiens
  misc_feature: 1407 for SV(W|O) and mtDNA
ctaagacccaaactgggattagataccccactatgcttagccctaaacctcaacagttaaatcaacaaaactgctcgccagaacactacgagccacagcttaaaactcaaaggacctggc

SEQ ID NO: 58356 - DNA, 120 bp, Homo sapiens
  misc_feature: 1407 for SV(W|O) and mtDNA
gccacttatccagtgaaccactatcacgaaaaaaactctacctctctatactaatctccctacaaatctccttaattataacattcacagccacagaactaatcatattttatatcttct

SEQ ID NO: 58357 - DNA, 120 bp, Homo sapiens
  misc_feature: 1407 for SV(W|O) and mtDNA
gatggtttttcatatcattggtcgtggttgtagtccgtgcgagaataatgatgtatgctttgtttctgttgagtgtgggtttagtaatggggtttgtggggttttcttctaagccttctc

SEQ ID NO: 58358 - DNA, 120 bp, Homo sapiens
  misc_feature: 1407 for SV(W|O) and mtDNA
atatcaaccattaaccttccctctacacttatcatcttcacaattctaattctactgactatcctagaaatcgctgtcgccttaatccaagcctacgttttcacacttctagtaagcctc

SEQ ID NO: 58359 - DNA, 120 bp, Homo sapiens
  misc_feature: 1407 for SV(W|O) and mtDNA
gactagttcccctaataatcggtgcccccgatatggcgtttccccgcataaacaacataagcttctgactcttacctccctctctcctactcctgctcgcatctgctatagtggaggccg

SEQ ID NO: 58360 - DNA, 120 bp, Homo sapiens
  misc_feature: 1407 for SV(W|O) and mtDNA
cgtaggaattatatccttcttgctcatcagttgatgatacgcccgagcagatgccaacacagcagccattcaagcaatcctatacaaccgtatcggcgatatcggtttcatcctcgcctt

SEQ ID NO: 58361 - DNA, 120 bp, Homo sapiens
  misc_feature: 1407 for SV(W|O) and mtDNA
actgtggtttgctccacagatttcagagcattgaccgtagtatacccccggtcgtgtagcggtgaaagtggtttggtttagacgtccgggaattgcatctgtttttaagcctaatgtggg

SEQ ID NO: 58362 - DNA, 120 bp, Homo sapiens
  misc_feature: 1407 for SV(W|O) and mtDNA
aggcctactatgggtgttaaattttttactctctctacaaggttttttcctagtgtccaaagagctgttcctctttggactaacagttaaatttacaaggggatttagagggttctgtgg

SEQ ID NO: 58363 - DNA, 120 bp, Homo sapiens
  misc_feature: 1407 for SV(W|O) and mtDNA
cacacttctagtaagcctctacctgcacgacaacacataatgacccaccaatcacatgcctatcatatagtaaaacccagcccatgacccctaacaggggccctctcagccctcctaatg

SEQ ID NO: 58364 - DNA, 120 bp, Homo sapiens
  misc_feature: 1407 for SV(W|O) and mtDNA
agttttattgctatagccattatgattattaatgatgagtactgattggtagtattggttatggttcattgtccggagagtatattgttgaagaggatagctattagaaggattatggat

SEQ ID NO: 58365 - DNA, 120 bp, Homo sapiens
  misc_feature: 1407 for SV(W|O) and mtDNA
aaccgcaaacatatcatacacaaacgcctgagccctatctattactctcatcgctacctccctgacaagcgcctatagcactcgaataattcttctcaccctaacaggtcaacctcgctt

SEQ ID NO: 58366 - DNA, 120 bp, Homo sapiens
  misc_feature: 1406 for SV(W|O) and mtDNA
tttaacctaaatttctataagattattagtataaaaggggagataggtaggagtagcgtggtaagggcgatgagtgtggggaggaatggggtgggttttgtatgttcaaactgtcatttt

SEQ ID NO: 58367 - DNA, 120 bp, Homo sapiens
  misc_feature: 1406 for SV(W|O) and mtDNA
actaatctccctacaaatctccttaattataacattcacagccacagaactaatcatattttatatcttcttcgaaaccacacttatccccaccttggctatcatcacccgatgaggcaa

SEQ ID NO: 58368 - DNA, 120 bp, Homo sapiens
  misc_feature: 1406 for SV(W|O) and mtDNA
ctacttacaggactcaacatactagtcacagccctatactccctctacatatttaccacaacacaatggggctcactcacccaccacattaacaacataaaaccctcattcacacgagaa

SEQ ID NO: 58369 - DNA, 120 bp, Homo sapiens
  misc_feature: 1406 for SV(W|O) and mtDNA
ttattcgagtgctataggcgcttgtcagggaggtagcgatgagagtaatagatagggctcaggcgtttgtgtatgatatgtttgcggtttcgatgatgtggtctttggagtagaaacctg

SEQ ID NO: 58370 - DNA, 120 bp, Homo sapiens
  misc_feature: 1406 for SV(W|O) and mtDNA
tgatgaggaatagtgtaaggagtatgggggtaattatggtgggccatacggtagtatttagttggggcatttcactgtaaagaggtgttggttctcttaatctttaacttaaaaggttaa

SEQ ID NO: 58371 - DNA, 120 bp, Homo sapiens
  misc_feature: 1406 for SV(W|O) and mtDNA
tgttactacgagggctatgtggctgattgaagagtatgcaatgagcgattttaggtctgtttgtcgtaggcagatggagcttgttataattatgcctcatagggatagtacaaggaaggg

SEQ ID NO: 58372 - DNA, 120 bp, Homo sapiens
  misc_feature: 1406 for SV(W|O) and mtDNA
tgtggtctttggagtagaaacctgtgaggaaaggtattcctgctaatgctaggctgccaatggtgagggaggttgaagtgagaggtatggttttgagtagtcctcctatttttcgaatat

SEQ ID NO: 58373 - DNA, 120 bp, Homo sapiens
  misc_feature: 1406 for SV(W|O) and mtDNA
tggtttttcatatcattggtcgtggttgtagtccgtgcgagaataatgatgtatgctttgtttctgttgagtgtgggtttagtaatggggtttgtggggttttcttctaagccttctcct

SEQ ID NO: 58374 - DNA, 120 bp, Homo sapiens
  misc_feature: 1406 for SV(W|O) and mtDNA
agggctatttgttgtgggtctcatgagttggagtgtaggataaatcatgctaaggcgaggatgaaaccgatatcgccgatacggttgtataggattgcttgaatggctgctgtgttggca

SEQ ID NO: 58375 - DNA, 120 bp, Homo sapiens
  misc_feature: 1406 for SV(W|O) and mtDNA
catagcctatgaaggctgttgctatagttgcaagcaggaggataatgccgatgtttcaggtttctgagtagagaaatgatccgtaatataggcctcgcccgatgtgtaggaagaggcaga

SEQ ID NO: 58376 - DNA, 120 bp, Homo sapiens
  misc_feature: 1406 for SV(W|O) and mtDNA
tctccccttttatactaataatcttatagaaatttaggttaaatacagaccaagagccttcaaagccctcagtaagttgcaatacttaatttctgtaacagctaaggactgcaaaacccc

SEQ ID NO: 58377 - DNA, 120 bp, Homo sapiens
  misc_feature: 1406 for SV(W|O) and mtDNA
aagcgttcaagctcaacacccactacctaaaaaatcccaaacatataactgaactcctcatacccaattggaccaatctatcaccctatagaagaactaatgttagtataagtaacatga

SEQ ID NO: 58378 - DNA, 120 bp, Homo sapiens
  misc_feature: 1406 for SV(W|O) and mtDNA
aaagcccatgtcgaagcccccatcgctgggtcaatagtacttgccgcagtactcttaaaactaggcggctatggtataatacgcctcacactcattctcaaccccctgacaaaacacata

SEQ ID NO: 58379 - DNA, 120 bp, Homo sapiens
  misc_feature: 1406 for SV(W|O) and mtDNA
aaatttgcccacagaaccctctaaatccccttgtaaatttaactgttagtccaaagaggaacagctctttggacactaggaaaaaaccttgtagagagagtaaaaaatttaacacccata

SEQ ID NO: 58380 - DNA, 120 bp, Homo sapiens
  misc_feature: 1406 for SV(W|O) and mtDNA
accgggggtatactacggtcaatgctctgaaatctgtggagcaaaccacagtttcatgcccatcgtcctagaattaattcccctaaaaatctttgaaatagggcccgtatttaccctata

SEQ ID NO: 58381 - DNA, 120 bp, Homo sapiens
  misc_feature: 1406 for SV(W|O) and mtDNA
gagaagaattattcgagtgctataggcgcttgtcagggaggtagcgatgagagtaatagatagggctcaggcgtttgtgtatgatatgtttgcggtttcgatgatgtggtctttggagta

SEQ ID NO: 58382 - DNA, 120 bp, Homo sapiens
  misc_feature: 1406 for SV(W|O) and mtDNA
tacacctatcccccattctcctcctatccctcaaccccgacatcattaccgggttttcctcttgtaaatatagtttaaccaaaacatcagattgtgaatctgacaacagaggcttacgac

SEQ ID NO: 58383 - DNA, 120 bp, Homo sapiens
  misc_feature: 1406 for SV(W|O) and mtDNA
ataaaatgacagtttgaacatacaaaacccaccccattcctccccacactcatcgcccttaccacgctactcctacctatctccccttttatactaataatcttatagaaatttaggtta

SEQ ID NO: 58384 - DNA, 120 bp, Homo sapiens
  misc_feature: 1406 for SV(W|O) and mtDNA
taaagtgaactgtatccgacatctggttcctacttcagggtcataaagcctaaatagcccacacgttccccttaaataagacatcacgatggatcacaggtctatcaccctattaaccac

SEQ ID NO: 58385 - DNA, 120 bp, Homo sapiens
  misc_feature: 1406 for SV(W|O) and mtDNA
taaacttcgccttaattttaataatcaacaccctcctagccttactactaataattattacattttgactaccacaactcaacggctacatagaaaaatccaccccttacgagtgcggct

SEQ ID NO: 58386 - DNA, 120 bp, Homo sapiens
  misc_feature: 1406 for SV(W|O) and mtDNA
gatatttcctattcgcctacacaattctccgatccgtccctaacaaactaggaggcgtccttgccctattactatccatcctcatcctagcaataatccccatcctccatatatccaaac

SEQ ID NO: 58387 - DNA, 120 bp, Homo sapiens
  misc_feature: 1406 for SV(W|O) and mtDNA
gttgggttctgctccgaggtcgccccaaccgaaatttttaatgcaggtttggtagtttaggacctgtgggtttgttaggtactgtttgcattaataaattaaagctccatagggtcttct

SEQ ID NO: 58388 - DNA, 120 bp, Homo sapiens
  misc_feature: 1406 for SV(W|O) and mtDNA
aacgtaggtgcgataaataatgggatgaggcaggaatcaaagacagatactgcgacatagggtgctccggctccagcgtctcgcaatgctatcgcgtgcataccccccagacgaaaatac

SEQ ID NO: 58389 - DNA, 120 bp, Homo sapiens
  misc_feature: 1406 for SV(W|O) and mtDNA
ggttctgctccgaggtcgccccaaccgaaatttttaatgcaggtttggtagtttaggacctgtgggtttgttaggtactgtttgcattaataaattaaagctccatagggtcttctcgtc

SEQ ID NO: 58390 - DNA, 120 bp, Homo sapiens
  misc_feature: 1406 for SV(W|O) and mtDNA
cttacctcctcaaagcaatacactgaaaatgtttagacgggctcacatcaccccataaacaaataggtttggtcctagcctttctattagctcttagtaagattacacatgcaagcatcc

SEQ ID NO: 58391 - DNA, 120 bp, Homo sapiens
  misc_feature: 1406 for SV(W|O) and mtDNA
gagggtgttttctcgtgtgaatgagggttttatgttgttaatgtggtgggtgagtgagccccattgtgttgtggtaaatatgtagagggagtatagggctgtgactagtatgttgagtcc

SEQ ID NO: 58392 - DNA, 120 bp, Homo sapiens
  misc_feature: 1406 for SV(W|O) and mtDNA
gaaaccgcaaacatatcatacacaaacgcctgagccctatctattactctcatcgctacctccctgacaagcgcctatagcactcgaataattcttctcaccctaacaggtcaacctcgc

SEQ ID NO: 58393 - DNA, 120 bp, Homo sapiens
  misc_feature: 1406 for SV(W|O) and mtDNA
gatgtcagaggggtgccttgggtaacctctgggactcagaagtgaaagggggctattcctagttttattgctatagccattatgattattaatgatgagtactgattggtagtattggtt

SEQ ID NO: 58394 - DNA, 120 bp, Homo sapiens
  misc_feature: 1406 for SV(W|O) and mtDNA
attattataataaacaccctcaccactacaatcttcctaggaacaacatatgacgcactctcccctgaactctacacaacatattttgtcaccaagaccctacttctaacctccctgttc

SEQ ID NO: 58395 - DNA, 120 bp, Homo sapiens
  misc_feature: 1406 for SV(W|O) and mtDNA
aagcgcaagtacccacgtaaagacgttaggtcaaggtgtagcccatgaggtggcaagaaatgggctacattttctaccccagaaaactacgatagcccttatgaaacttaagggtcgaag

SEQ ID NO: 58396 - DNA, 120 bp, Homo sapiens
  misc_feature: 1406 for SV(W|O) and mtDNA
ctatttgttgtgggtctcatgagttggagtgtaggataaatcatgctaaggcgaggatgaaaccgatatcgccgatacggttgtataggattgcttgaatggctgctgtgttggcatctg

SEQ ID NO: 58397 - DNA, 120 bp, Homo sapiens
  misc_feature: 1406 for SV(W|O) and mtDNA
attcctgctaatgctaggctgccaatggtgagggaggttgaagtgagaggtatggttttgagtagtcctcctatttttcgaatatcttgttcattgttaaggttgtggatgatggacccg

SEQ ID NO: 58398 - DNA, 120 bp, Homo sapiens
  misc_feature: 1406 for SV(W|O) and mtDNA
cggatgtcagaggggtgccttgggtaacctctgggactcagaagtgaaagggggctattcctagttttattgctatagccattatgattattaatgatgagtactgattggtagtattgg

SEQ ID NO: 58399 - DNA, 120 bp, Homo sapiens
  misc_feature: 1406 for SV(W|O) and mtDNA
agccttcataggctatgtcctcccgtgaggccaaatatcattctgaggggccacagtaattacaaacttactatccgccatcccatacattgggacagacctagttcaatgaatctgagg

SEQ ID NO: 58400 - DNA, 120 bp, Homo sapiens
  misc_feature: 1406 for SV(W|O) and mtDNA
cattattcctagaaccaggcgacctgcgactccttgacgttgacaatcgagtagtactcccgattgaagcccccattcgtataataattacatcacaagacgtcttgcactcatgagctg

SEQ ID NO: 58401 - DNA, 120 bp, Homo sapiens
  misc_feature: 1406 for SV(W|O) and mtDNA
catcactatactactaacagaccgcaacctcaacaccaccttcttcgaccccgccggaggaggagaccccattctataccaacacctattctgatttttcggtcaccctgaagtttatat

SEQ ID NO: 58402 - DNA, 120 bp, Homo sapiens
  misc_feature: 1406 for SV(W|O) and mtDNA
atcgtggtgatttagagggtgaactcactggaacggggatgcttgcatgtgtaatcttactaagagctaatagaaaggctaggaccaaacctatttgtttatggggtgatgtgagcccgt

SEQ ID NO: 58403 - DNA, 120 bp, Homo sapiens
  misc_feature: 1406 for SV(W|O) and mtDNA
aaaccgcaaacatatcatacacaaacgcctgagccctatctattactctcatcgctacctccctgacaagcgcctatagcactcgaataattcttctcaccctaacaggtcaacctcgct

SEQ ID NO: 58404 - DNA, 120 bp, Homo sapiens
  misc_feature: 1406 for SV(W|O) and mtDNA
aataatgggggaagtatgtaggagttgaagattagtccgccgtagtcggtgtactcgtaggttcagtaccattggtggccaattgatttgatggtaagggagggatcgttgacctcgtct

SEQ ID NO: 58405 - DNA, 120 bp, Homo sapiens
  misc_feature: 1405 for SV(W|O) and mtDNA
ggtcttagctattgtgtgttcagatatgttaaagccactttcgtagtctattttgtgtcaactggagttttttacaactcaggtgagttttagctttattggggagggggtgatctaaaa

SEQ ID NO: 58406 - DNA, 120 bp, Homo sapiens
  misc_feature: 1405 for SV(W|O) and mtDNA
ttactttgtagccttcatcagggtttgctgaagatggcggtatataggctgagcaagaggtggtgaggttgatcggggtttatcgattacagaacaggctcctctagagggatatgaagc

SEQ ID NO: 58407 - DNA, 120 bp, Homo sapiens
  misc_feature: 1405 for SV(W|O) and mtDNA
tgttggatggggtggggaggtcgatgaatgagtggttaattaattttattagggggttagttttgcgtattggggtcattggtgttcttgtagttgaaatacaacgatggtttttcatat

SEQ ID NO: 58408 - DNA, 120 bp, Homo sapiens
  misc_feature: 1405 for SV(W|O) and mtDNA
gctcggctcgaataaggaggcttagagctgtgcctaggactccagctcatgcgccgaataataggtatagtgttccaatgtctttgtggtttgtagagaatagtcaacggtcggcgaaca

SEQ ID NO: 58409 - DNA, 120 bp, Homo sapiens
  misc_feature: 1405 for SV(W|O) and mtDNA
ctactatcaacattactaataagtggctcctttaacctctccacccttatcacaacacaagaacacctctgattactcctgccatcatgacccttggccataatatgatttatctccaca

SEQ ID NO: 58410 - DNA, 120 bp, Homo sapiens
  misc_feature: 1405 for SV(W|O) and mtDNA
catcatccccaccatcatagccaccatcaccctccttaacctctacttctacctacgcctaatctactccacctcaatcacactactccccatatctaacaacgtaaaaataaaatgaca

SEQ ID NO: 58411 - DNA, 120 bp, Homo sapiens
  misc_feature: 1405 for SV(W|O) and mtDNA
ctctacctgcacgacaacacataatgacccaccaatcacatgcctatcatatagtaaaacccagcccatgacccctaacaggggccctctcagccctcctaatgacctccggcctagcca

SEQ ID NO: 58412 - DNA, 120 bp, Homo sapiens
  misc_feature: 1405 for SV(W|O) and mtDNA
aagtggtttggtttagacgtccgggaattgcatctgtttttaagcctaatgtggggacagctcatgagtgcaagacgtcttgtgatgtaattattatacgaatgggggcttcaatcggga

SEQ ID NO: 58413 - DNA, 120 bp, Homo sapiens
  misc_feature: 1405 for SV(W|O) and mtDNA
ggcattccggataggccgagaaagtgttgtgggaagaaagttagatttacgccgatgaatatgatagtgaaatggattttggcgtaggtttggtctagggtgtagcctgagaatagggga

SEQ ID NO: 58414 - DNA, 120 bp, Homo sapiens
  misc_feature: 1405 for SV(W|O) and mtDNA
taggaatagccccctttcacttctgagtcccagaggttacccaaggcacccctctgacatccggcctgcttcttctcacatgacaaaaactagcccccatctcaatcatataccaaatct

SEQ ID NO: 58415 - DNA, 120 bp, Homo sapiens
  misc_feature: 1405 for SV(W|O) and mtDNA
taggaataatgggggaagtatgtaggagttgaagattagtccgccgtagtcggtgtactcgtaggttcagtaccattggtggccaattgatttgatggtaagggagggatcgttgacctc

SEQ ID NO: 58416 - DNA, 120 bp, Homo sapiens
  misc_feature: 1405 for SV(W|O) and mtDNA
taaacaccctcaccactacaatcttcctaggaacaacatatgacgcactctcccctgaactctacacaacatattttgtcaccaagaccctacttctaacctccctgttcttatgaattc

SEQ ID NO: 58417 - DNA, 120 bp, Homo sapiens
  misc_feature: 1405 for SV(W|O) and mtDNA
agctcggctcgaataaggaggcttagagctgtgcctaggactccagctcatgcgccgaataataggtatagtgttccaatgtctttgtggtttgtagagaatagtcaacggtcggcgaac

SEQ ID NO: 58418 - DNA, 120 bp, Homo sapiens
  misc_feature: 1405 for SV(W|O) and mtDNA
aaccttccctctacacttatcatcttcacaattctaattctactgactatcctagaaatcgctgtcgccttaatccaagcctacgttttcacacttctagtaagcctctacctgcacgac

SEQ ID NO: 58419 - DNA, 120 bp, Homo sapiens
  misc_feature: 1405 for SV(W|O) and mtDNA
gtatttaacctaaatttctataagattattagtataaaaggggagataggtaggagtagcgtggtaagggcgatgagtgtggggaggaatggggtgggttttgtatgttcaaactgtcat

SEQ ID NO: 58420 - DNA, 120 bp, Homo sapiens
  misc_feature: 1405 for SV(W|O) and mtDNA
gggcgcagtgattataggctttcgctctaagattaaaaatgccctagcccacttcttaccacaaggcacacctacaccccttatccccatactagttattatcgaaaccatcagcctact

SEQ ID NO: 58421 - DNA, 120 bp, Homo sapiens
  misc_feature: 1405 for SV(W|O) and mtDNA
aaacagacctaaaatcgctcattgcatactcttcaatcagccacatagccctcgtagtaacagccattctcatccaaaccccctgaagcttcaccggcgcagtcattctcataatcgccc

SEQ ID NO: 58422 - DNA, 120 bp, Homo sapiens
  misc_feature: 1405 for SV(W|O) and mtDNA
aaacaatgttcaaccagtaactactactaatcaacgcccataatcatacaaagcccccgcaccaataggatcctcccgaatcaaccctgacccctctccttcataaattattcagcttcc

SEQ ID NO: 58423 - DNA, 120 bp, Homo sapiens
  misc_feature: 1405 for SV(W|O) and mtDNA
agcccatgtcgaagcccccatcgctgggtcaatagtacttgccgcagtactcttaaaactaggcggctatggtataatacgcctcacactcattctcaaccccctgacaaaacacatagc

SEQ ID NO: 58424 - DNA, 120 bp, Homo sapiens
  misc_feature: 1405 for SV(W|O) and mtDNA
aaatctaaagacaggggttaggcctctttttaccagctccgaggtgattttcatattgaattgcaaattcgaagaagcagcttcaaacctgccggggcttctcccgccttttttcccggc

SEQ ID NO: 58425 - DNA, 120 bp, Homo sapiens
  misc_feature: 1405 for SV(W|O) and mtDNA
ctcgtaggttcagtaccattggtggccaattgatttgatggtaagggagggatcgttgacctcgtctgttatgtaaaggatgcgtagggatgggagggcgatgaggactaggatgatggc

SEQ ID NO: 58426 - DNA, 120 bp, Homo sapiens
  misc_feature: 1405 for SV(W|O) and mtDNA
cttattcgagccgagctgggccagccaggcaaccttctaggtaacgaccacatctacaacgttatcgtcacagcccatgcatttgtaataatcttcttcatagtaatacccatcataatc

SEQ ID NO: 58427 - DNA, 120 bp, Homo sapiens
  misc_feature: 1405 for SV(W|O) and mtDNA
atcaagcccgaatgatatttcctattcgcctacacaattctccgatccgtccctaacaaactaggaggcgtccttgccctattactatccatcctcatcctagcaataatccccatcctc

SEQ ID NO: 58428 - DNA, 120 bp, Homo sapiens
  misc_feature: 1405 for SV(W|O) and mtDNA
gaatagccccctttcacttctgagtcccagaggttacccaaggcacccctctgacatccggcctgcttcttctcacatgacaaaaactagcccccatctcaatcatataccaaatctctc

SEQ ID NO: 58429 - DNA, 120 bp, Homo sapiens
  misc_feature: 1405 for SV(W|O) and mtDNA
gaagcaggccggatgtcagaggggtgccttgggtaacctctgggactcagaagtgaaagggggctattcctagttttattgctatagccattatgattattaatgatgagtactgattgg

SEQ ID NO: 58430 - DNA, 120 bp, Homo sapiens
  misc_feature: 1405 for SV(W|O) and mtDNA
atcatttgttttgaggttagtttgattagtcattgttgggtggtgattagtcggttgttgatgagatatttggaggtggggatcaatagagggggaaatagaatgatcagtactgcggcg

SEQ ID NO: 58431 - DNA, 120 bp, Homo sapiens
  misc_feature: 1405 for SV(W|O) and mtDNA
ccacttattagtaatgttgatagtagaatgatggctagggtgacttcatatgagattgtttgggctactgctcgcagtgcgccgatcagggcgtagtttgagtttgatgctcaccctgat

SEQ ID NO: 58432 - DNA, 120 bp, Homo sapiens
  misc_feature: 1405 for SV(W|O) and mtDNA
catactcttcaatcagccacatagccctcgtagtaacagccattctcatccaaaccccctgaagcttcaccggcgcagtcattctcataatcgcccacgggcttacatcctcattactat

SEQ ID NO: 58433 - DNA, 120 bp, Homo sapiens
  misc_feature: 1405 for SV(W|O) and mtDNA
caaatatcactctcctacttacaggactcaacatactagtcacagccctatactccctctacatatttaccacaacacaatggggctcactcacccaccacattaacaacataaaaccct

SEQ ID NO: 58434 - DNA, 120 bp, Homo sapiens
  misc_feature: 1405 for SV(W|O) and mtDNA
aaccggctttttgcccaaatgggccattatcgaagaattcacaaaaaacaatagcctcatcatccccaccatcatagccaccatcaccctccttaacctctacttctacctacgcctaat

SEQ ID NO: 58435 - DNA, 120 bp, Homo sapiens
  misc_feature: 1405 for SV(W|O) and mtDNA
aagttgttggctcaggagtttgatagttcttgggcagtgagagtgagtagtagaatgtttagtgagcctagggtgttgtgagtgtaaattagtgcgatgagtaggggaagggagcctact

SEQ ID NO: 58436 - DNA, 120 bp, Homo sapiens
  misc_feature: 1405 for SV(W|O) and mtDNA
agccatcattctactatcaacattactaataagtggctcctttaacctctccacccttatcacaacacaagaacacctctgattactcctgccatcatgacccttggccataatatgatt

SEQ ID NO: 58437 - DNA, 120 bp, Homo sapiens
  misc_feature: 1405 for SV(W|O) and mtDNA
actcttcaatcagccacatagccctcgtagtaacagccattctcatccaaaccccctgaagcttcaccggcgcagtcattctcataatcgcccacgggcttacatcctcattactattct

SEQ ID NO: 58438 - DNA, 120 bp, Homo sapiens
  misc_feature: 1404 for SV(W|O) and mtDNA
catccgcttccaccccctagcagaaaatagcccactaatccaaactctaacactatgcttaggcgctatcaccactctgttcgcagcagtctgcgcccttacacaaaatgacatcaaaaa

SEQ ID NO: 58439 - DNA, 120 bp, Homo sapiens
  misc_feature: 1404 for SV(W|O) and mtDNA
tttcctattcgcctacacaattctccgatccgtccctaacaaactaggaggcgtccttgccctattactatccatcctcatcctagcaataatccccatcctccatatatccaaacaaca

SEQ ID NO: 58440 - DNA, 120 bp, Homo sapiens
  misc_feature: 1404 for SV(W|O) and mtDNA
cattccggataggccgagaaagtgttgtgggaagaaagttagatttacgccgatgaatatgatagtgaaatggattttggcgtaggtttggtctagggtgtagcctgagaataggggaaa

SEQ ID NO: 58441 - DNA, 120 bp, Homo sapiens
  misc_feature: 1404 for SV(W|O) and mtDNA
ttgggttctgctccgaggtcgccccaaccgaaatttttaatgcaggtttggtagtttaggacctgtgggtttgttaggtactgtttgcattaataaattaaagctccatagggtcttctc

SEQ ID NO: 58442 - DNA, 120 bp, Homo sapiens
  misc_feature: 1404 for SV(W|O) and mtDNA
atactcctcaattacccacataggatgaataatagcagttctaccgtacaaccctaacataaccattcttaatttaactatttatattatcctaactactaccgcattcctactactcaa

SEQ ID NO: 58443 - DNA, 120 bp, Homo sapiens
  misc_feature: 1404 for SV(W|O) and mtDNA
ttctcctgatcaaatatcactctcctacttacaggactcaacatactagtcacagccctatactccctctacatatttaccacaacacaatggggctcactcacccaccacattaacaac

SEQ ID NO: 58444 - DNA, 120 bp, Homo sapiens
  misc_feature: 1404 for SV(W|O) and mtDNA
taaaatgacagtttgaacatacaaaacccaccccattcctccccacactcatcgcccttaccacgctactcctacctatctccccttttatactaataatcttatagaaatttaggttaa

SEQ ID NO: 58445 - DNA, 120 bp, Homo sapiens
  misc_feature: 1404 for SV(W|O) and mtDNA
agaaagcgttcaagctcaacacccactacctaaaaaatcccaaacatataactgaactcctcatacccaattggaccaatctatcaccctatagaagaactaatgttagtataagtaaca

SEQ ID NO: 58446 - DNA, 120 bp, Homo sapiens
  misc_feature: 1404 for SV(W|O) and mtDNA
tggggttagtatagcttagttaaactttcgtttattgctaaaggttaatcactgctgtttcccgtgggggtgtggctaggctaagcgttttgagctgcattgctgcgtgcttgatgcttg

SEQ ID NO: 58447 - DNA, 120 bp, Homo sapiens
  misc_feature: 1404 for SV(W|O) and mtDNA
tgctccgaggtcgccccaaccgaaatttttaatgcaggtttggtagtttaggacctgtgggtttgttaggtactgtttgcattaataaattaaagctccatagggtcttctcgtcttgct

SEQ ID NO: 58448 - DNA, 120 bp, Homo sapiens
  misc_feature: 1404 for SV(W|O) and mtDNA
tgatttcacggaggatggtggtcaagggacccctatctgaggggggtcatccatggggacgagaagggatttgactgtaatgtgctatgtacggtaaatggctttatgtactatgtactg

SEQ ID NO: 58449 - DNA, 120 bp, Homo sapiens
  misc_feature: 1404 for SV(W|O) and mtDNA
tagtagctattaccttcttattatttgatctagaaattgccctccttttacccctaccatgagccctacaaacaactaacctgccactaatagttatgtcatccctcttattaatcatca

SEQ ID NO: 58450 - DNA, 120 bp, Homo sapiens
  misc_feature: 1404 for SV(W|O) and mtDNA
tcgccccaaccgaaatttttaatgcaggtttggtagtttaggacctgtgggtttgttaggtactgtttgcattaataaattaaagctccatagggtcttctcgtcttgctgtgttatgcc

SEQ ID NO: 58451 - DNA, 120 bp, Homo sapiens
  misc_feature: 1404 for SV(W|O) and mtDNA
acgggaggacatagcctatgaaggctgttgctatagttgcaagcaggaggataatgccgatgtttcaggtttctgagtagagaaatgatccgtaatataggcctcgcccgatgtgtagga

SEQ ID NO: 58452 - DNA, 120 bp, Homo sapiens
  misc_feature: 1404 for SV(W|O) and mtDNA
ataataaacaccctcaccactacaatcttcctaggaacaacatatgacgcactctcccctgaactctacacaacatattttgtcaccaagaccctacttctaacctccctgttcttatga

SEQ ID NO: 58453 - DNA, 120 bp, Homo sapiens
  misc_feature: 1404 for SV(W|O) and mtDNA
tatttcaactacaagaacaccaatgaccccaatacgcaaaactaaccccctaataaaattaattaaccactcattcatcgacctccccaccccatccaacatctccacatgatgaaactt

SEQ ID NO: 58454 - DNA, 120 bp, Homo sapiens
  misc_feature: 1404 for SV(W|O) and mtDNA
ataggctttcgctctaagattaaaaatgccctagcccacttcttaccacaaggcacacctacaccccttatccccatactagttattatcgaaaccatcagcctactcattcaaccaata

SEQ ID NO: 58455 - DNA, 120 bp, Homo sapiens
  misc_feature: 1404 for SV(W|O) and mtDNA
ctacgacaaacagacctaaaatcgctcattgcatactcttcaatcagccacatagccctcgtagtaacagccattctcatccaaaccccctgaagcttcaccggcgcagtcattctcata

SEQ ID NO: 58456 - DNA, 120 bp, Homo sapiens
  misc_feature: 1404 for SV(W|O) and mtDNA
tagcaaactcaaactacgaacgcactcacagtcgcatcataatcctctctcaaggacttcaaactctactcccactaatagctttttgatgacttctagcaagcctcgctaacctcgcct

SEQ ID NO: 58457 - DNA, 120 bp, Homo sapiens
  misc_feature: 1404 for SV(W|O) and mtDNA
attgcatactcttcaatcagccacatagccctcgtagtaacagccattctcatccaaaccccctgaagcttcaccggcgcagtcattctcataatcgcccacgggcttacatcctcatta

SEQ ID NO: 58458 - DNA, 120 bp, Homo sapiens
  misc_feature: 1404 for SV(W|O) and mtDNA
acaaaaaacaatagcctcatcatccccaccatcatagccaccatcaccctccttaacctctacttctacctacgcctaatctactccacctcaatcacactactccccatatctaacaac

SEQ ID NO: 58459 - DNA, 120 bp, Homo sapiens
  misc_feature: 1404 for SV(W|O) and mtDNA
ggtgtactcgtaggttcagtaccattggtggccaattgatttgatggtaagggagggatcgttgacctcgtctgttatgtaaaggatgcgtagggatgggagggcgatgaggactaggat

SEQ ID NO: 58460 - DNA, 120 bp, Homo sapiens
  misc_feature: 1404 for SV(W|O) and mtDNA
ggtcgccccaaccgaaatttttaatgcaggtttggtagtttaggacctgtgggtttgttaggtactgtttgcattaataaattaaagctccatagggtcttctcgtcttgctgtgttatg

SEQ ID NO: 58461 - DNA, 120 bp, Homo sapiens
  misc_feature: 1404 for SV(W|O) and mtDNA
aagtcctacgtgatctgagttcagaccggagtaatccaggtcggtttctatctacttcaaattcctccctgtacgaaaggacaagagaaataaggcctacttcacaaagcgccttccccc

SEQ ID NO: 58462 - DNA, 120 bp, Homo sapiens
  misc_feature: 1404 for SV(W|O) and mtDNA
ggcaaccttctaggtaacgaccacatctacaacgttatcgtcacagcccatgcatttgtaataatcttcttcatagtaatacccatcataatcggaggctttggcaactgactagttccc

SEQ ID NO: 58463 - DNA, 120 bp, Homo sapiens
  misc_feature: 1404 for SV(W|O) and mtDNA
ggagatttcaacttaacttgaccgctctgagctaaacctagccccaaacccactccaccttactaccagacaaccttagccaaaccatttacccaaataaagtataggcgatagaaattg

SEQ ID NO: 58464 - DNA, 120 bp, Homo sapiens
  misc_feature: 1404 for SV(W|O) and mtDNA
atggtttttcatatcattggtcgtggttgtagtccgtgcgagaataatgatgtatgctttgtttctgttgagtgtgggtttagtaatggggtttgtggggttttcttctaagccttctcc

SEQ ID NO: 58465 - DNA, 120 bp, Homo sapiens
  misc_feature: 1404 for SV(W|O) and mtDNA
aagctatcgggcccataccccgaaaatgttggttatacccttcccgtactaattaatcccctggcccaacccgtcatctactctaccatctttgcaggcacactcatcacagcgctaagc

SEQ ID NO: 58466 - DNA, 120 bp, Homo sapiens
  misc_feature: 1404 for SV(W|O) and mtDNA
gagaaaacaccctcatgttcatacacctatcccccattctcctcctatccctcaaccccgacatcattaccgggttttcctcttgtaaatatagtttaaccaaaacatcagattgtgaat

SEQ ID NO: 58467 - DNA, 120 bp, Homo sapiens
  misc_feature: 1404 for SV(W|O) and mtDNA
gaaatgggctacattttctaccccagaaaactacgatagcccttatgaaacttaagggtcgaaggtggatttagcagtaaactgagagtagagtgcttagttgaacagggccctgaagcg

SEQ ID NO: 58468 - DNA, 120 bp, Homo sapiens
  misc_feature: 1404 for SV(W|O) and mtDNA
cccagctcggctcgaataaggaggcttagagctgtgcctaggactccagctcatgcgccgaataataggtatagtgttccaatgtctttgtggtttgtagagaatagtcaacggtcggcg

SEQ ID NO: 58469 - DNA, 120 bp, Homo sapiens
  misc_feature: 1404 for SV(W|O) and mtDNA
cactggaacggggatgcttgcatgtgtaatcttactaagagctaatagaaaggctaggaccaaacctatttgtttatggggtgatgtgagcccgtctaaacattttcagtgtattgcttt

SEQ ID NO: 58470 - DNA, 120 bp, Homo sapiens
  misc_feature: 1404 for SV(W|O) and mtDNA
aaccacgttctcctgatcaaatatcactctcctacttacaggactcaacatactagtcacagccctatactccctctacatatttaccacaacacaatggggctcactcacccaccacat

SEQ ID NO: 58471 - DNA, 120 bp, Homo sapiens
  misc_feature: 1403 for SV(W|O) and mtDNA
agaattattcgagtgctataggcgcttgtcagggaggtagcgatgagagtaatagatagggctcaggcgtttgtgtatgatatgtttgcggtttcgatgatgtggtctttggagtagaaa

SEQ ID NO: 58472 - DNA, 120 bp, Homo sapiens
  misc_feature: 1403 for SV(W|O) and mtDNA
ttgcgagacgctggagccggagcaccctatgtcgcagtatctgtctttgattcctgcctcatcccattatttatcgcacctacgttcaatattacaggcgaacatacttactaaagtgtg

SEQ ID NO: 58473 - DNA, 120 bp, Homo sapiens
  misc_feature: 1403 for SV(W|O) and mtDNA
tcgcctacacaattctccgatccgtccctaacaaactaggaggcgtccttgccctattactatccatcctcatcctagcaataatccccatcctccatatatccaaacaacaaagcataa

SEQ ID NO: 58474 - DNA, 120 bp, Homo sapiens
  misc_feature: 1403 for SV(W|O) and mtDNA
tgtggagatgttggatggggtggggaggtcgatgaatgagtggttaattaattttattagggggttagttttgcgtattggggtcattggtgttcttgtagttgaaatacaacgatggtt

SEQ ID NO: 58475 - DNA, 120 bp, Homo sapiens
  misc_feature: 1403 for SV(W|O) and mtDNA
aacagacctaaaatcgctcattgcatactcttcaatcagccacatagccctcgtagtaacagccattctcatccaaaccccctgaagcttcaccggcgcagtcattctcataatcgccca

SEQ ID NO: 58476 - DNA, 120 bp, Homo sapiens
  misc_feature: 1403 for SV(W|O) and mtDNA
aaccgtctgaactatcctgcccgccatcatcctagtcctcatcgccctcccatccctacgcatcctttacataacagacgaggtcaacgatccctcccttaccatcaaatcaattggcca

SEQ ID NO: 58477 - DNA, 120 bp, Homo sapiens
  misc_feature: 1403 for SV(W|O) and mtDNA
ggtcctagcctttctattagctcttagtaagattacacatgcaagcatccccgttccagtgagttcaccctctaaatcaccacgatcaaaagggacaagcatcaagcacgcagcaatgca

SEQ ID NO: 58478 - DNA, 120 bp, Homo sapiens
  misc_feature: 1403 for SV(W|O) and mtDNA
tgaaactgtggtttgctccacagatttcagagcattgaccgtagtatacccccggtcgtgtagcggtgaaagtggtttggtttagacgtccgggaattgcatctgtttttaagcctaatg

SEQ ID NO: 58479 - DNA, 120 bp, Homo sapiens
  misc_feature: 1403 for SV(W|O) and mtDNA
atgatgtggtctttggagtagaaacctgtgaggaaaggtattcctgctaatgctaggctgccaatggtgagggaggttgaagtgagaggtatggttttgagtagtcctcctatttttcga

SEQ ID NO: 58480 - DNA, 120 bp, Homo sapiens
  misc_feature: 1403 for SV(W|O) and mtDNA
acgagaaagcacataccaaggccaccacacaccacctgtccaaaaaggccttcgatacgggataatcctatttattacctcagaagtttttttcttcgcaggatttttctgagcctttta

SEQ ID NO: 58481 - DNA, 120 bp, Homo sapiens
  misc_feature: 1403 for SV(W|O) and mtDNA
gtgccttgggtaacctctgggactcagaagtgaaagggggctattcctagttttattgctatagccattatgattattaatgatgagtactgattggtagtattggttatggttcattgt

SEQ ID NO: 58482 - DNA, 120 bp, Homo sapiens
  misc_feature: 1403 for SV(W|O) and mtDNA
gtgagaagaagcaggccggatgtcagaggggtgccttgggtaacctctgggactcagaagtgaaagggggctattcctagttttattgctatagccattatgattattaatgatgagtac

SEQ ID NO: 58483 - DNA, 120 bp, Homo sapiens
  misc_feature: 1403 for SV(W|O) and mtDNA
gggtgaactcactggaacggggatgcttgcatgtgtaatcttactaagagctaatagaaaggctaggaccaaacctatttgtttatggggtgatgtgagcccgtctaaacattttcagtg

SEQ ID NO: 58484 - DNA, 120 bp, Homo sapiens
  misc_feature: 1403 for SV(W|O) and mtDNA
aggaattatatccttcttgctcatcagttgatgatacgcccgagcagatgccaacacagcagccattcaagcaatcctatacaaccgtatcggcgatatcggtttcatcctcgccttagc

SEQ ID NO: 58485 - DNA, 120 bp, Homo sapiens
  misc_feature: 1403 for SV(W|O) and mtDNA
gatttcacggaggatggtggtcaagggacccctatctgaggggggtcatccatggggacgagaagggatttgactgtaatgtgctatgtacggtaaatggctttatgtactatgtactgt

SEQ ID NO: 58486 - DNA, 120 bp, Homo sapiens
  misc_feature: 1403 for SV(W|O) and mtDNA
gatgttggatggggtggggaggtcgatgaatgagtggttaattaattttattagggggttagttttgcgtattggggtcattggtgttcttgtagttgaaatacaacgatggtttttcat

SEQ ID NO: 58487 - DNA, 120 bp, Homo sapiens
  misc_feature: 1403 for SV(W|O) and mtDNA
gagttgaagattagtccgccgtagtcggtgtactcgtaggttcagtaccattggtggccaattgatttgatggtaagggagggatcgttgacctcgtctgttatgtaaaggatgcgtagg

SEQ ID NO: 58488 - DNA, 120 bp, Homo sapiens
  misc_feature: 1403 for SV(W|O) and mtDNA
ccttcataggctatgtcctcccgtgaggccaaatatcattctgaggggccacagtaattacaaacttactatccgccatcccatacattgggacagacctagttcaatgaatctgaggag

SEQ ID NO: 58489 - DNA, 120 bp, Homo sapiens
  misc_feature: 1403 for SV(W|O) and mtDNA
cgtaggttcagtaccattggtggccaattgatttgatggtaagggagggatcgttgacctcgtctgttatgtaaaggatgcgtagggatgggagggcgatgaggactaggatgatggcgg

SEQ ID NO: 58490 - DNA, 120 bp, Homo sapiens
  misc_feature: 1403 for SV(W|O) and mtDNA
aatttctataagattattagtataaaaggggagataggtaggagtagcgtggtaagggcgatgagtgtggggaggaatggggtgggttttgtatgttcaaactgtcattttatttttacg

SEQ ID NO: 58491 - DNA, 120 bp, Homo sapiens
  misc_feature: 1403 for SV(W|O) and mtDNA
aactgtggtttgctccacagatttcagagcattgaccgtagtatacccccggtcgtgtagcggtgaaagtggtttggtttagacgtccgggaattgcatctgtttttaagcctaatgtgg

SEQ ID NO: 58492 - DNA, 120 bp, Homo sapiens
  misc_feature: 1403 for SV(W|O) and mtDNA
aaagcgttcaagctcaacacccactacctaaaaaatcccaaacatataactgaactcctcatacccaattggaccaatctatcaccctatagaagaactaatgttagtataagtaacatg

SEQ ID NO: 58493 - DNA, 120 bp, Homo sapiens
  misc_feature: 1402 for SV(W|O) and mtDNA
tttttcaaaaaggtattagaaaaaccatttcataactttgtcaaagttaaattataggctaaatcctatatatcttaatggcacatgcagcgcaagtaggtctacaagacgctacttccc

SEQ ID NO: 58494 - DNA, 120 bp, Homo sapiens
  misc_feature: 1402 for SV(W|O) and mtDNA
acgtaagccttctcctcactctctcaatcttatccatcatagcaggcagttgaggtggattaaaccaaacccagctacgcaaaatcttagcatactcctcaattacccacataggatgaa

SEQ ID NO: 58495 - DNA, 120 bp, Homo sapiens
  misc_feature: 1402 for SV(W|O) and mtDNA
agtaaccacgttctcctgatcaaatatcactctcctacttacaggactcaacatactagtcacagccctatactccctctacatatttaccacaacacaatggggctcactcacccacca

SEQ ID NO: 58496 - DNA, 120 bp, Homo sapiens
  misc_feature: 1402 for SV(W|O) and mtDNA
tctcctcctccggcggggtcgaagaaggtggtgttgaggttgcggtctgttagtagtatagtgatgccagcagctaggactgggagagataggagaagtaggactgctgtgattaggacg

SEQ ID NO: 58497 - DNA, 120 bp, Homo sapiens
  misc_feature: 1402 for SV(W|O) and mtDNA
atcgcctatactttatttgggtaaatggtttggctaaggttgtctggtagtaaggtggagtgggtttggggctaggtttagctcagagcggtcaagttaagttgaaatctcctaagtgta

SEQ ID NO: 58498 - DNA, 120 bp, Homo sapiens
  misc_feature: 1402 for SV(W|O) and mtDNA
gattagaatgggtacaatgaggagtaggaggttggccatgggtatgttgttaagaagaggaattgaacctctgactgtaaagttttaagttttatgcgattaccgggctctgccatctta

SEQ ID NO: 58499 - DNA, 120 bp, Homo sapiens
  misc_feature: 1402 for SV(W|O) and mtDNA
gtttcgataataactagtatggggataaggggtgtaggtgtgccttgtggtaagaagtgggctagggcatttttaatcttagagcgaaagcctataatcactgcgcccgctcataagggg

SEQ ID NO: 58500 - DNA, 120 bp, Homo sapiens
  misc_feature: 1402 for SV(W|O) and mtDNA
gtgatttagagggtgaactcactggaacggggatgcttgcatgtgtaatcttactaagagctaatagaaaggctaggaccaaacctatttgtttatggggtgatgtgagcccgtctaaac

SEQ ID NO: 58501 - DNA, 120 bp, Homo sapiens
  misc_feature: 1402 for SV(W|O) and mtDNA
caaataggtttggtcctagcctttctattagctcttagtaagattacacatgcaagcatccccgttccagtgagttcaccctctaaatcaccacgatcaaaagggacaagcatcaagcac

SEQ ID NO: 58502 - DNA, 120 bp, Homo sapiens
  misc_feature: 1402 for SV(W|O) and mtDNA
aaatttctataagattattagtataaaaggggagataggtaggagtagcgtggtaagggcgatgagtgtggggaggaatggggtgggttttgtatgttcaaactgtcattttatttttac

SEQ ID NO: 58503 - DNA, 120 bp, Homo sapiens
  misc_feature: 1402 for SV(W|O) and mtDNA
ggtgccttgggtaacctctgggactcagaagtgaaagggggctattcctagttttattgctatagccattatgattattaatgatgagtactgattggtagtattggttatggttcattg

SEQ ID NO: 58504 - DNA, 120 bp, Homo sapiens
  misc_feature: 1402 for SV(W|O) and mtDNA
ggggaagtatgtaggagttgaagattagtccgccgtagtcggtgtactcgtaggttcagtaccattggtggccaattgatttgatggtaagggagggatcgttgacctcgtctgttatgt

SEQ ID NO: 58505 - DNA, 120 bp, Homo sapiens
  misc_feature: 1402 for SV(W|O) and mtDNA
gggctatttgttgtgggtctcatgagttggagtgtaggataaatcatgctaaggcgaggatgaaaccgatatcgccgatacggttgtataggattgcttgaatggctgctgtgttggcat

SEQ ID NO: 58506 - DNA, 120 bp, Homo sapiens
  misc_feature: 1402 for SV(W|O) and mtDNA
gctgcttttaggcctactatgggtgttaaattttttactctctctacaaggttttttcctagtgtccaaagagctgttcctctttggactaacagttaaatttacaaggggatttagagg

SEQ ID NO: 58507 - DNA, 120 bp, Homo sapiens
  misc_feature: 1402 for SV(W|O) and mtDNA
agcattggactgtaaatctaaagacaggggttaggcctctttttaccagctccgaggtgattttcatattgaattgcaaattcgaagaagcagcttcaaacctgccggggcttctcccgc

SEQ ID NO: 58508 - DNA, 120 bp, Homo sapiens
  misc_feature: 1402 for SV(W|O) and mtDNA
cagatttcagagcattgaccgtagtatacccccggtcgtgtagcggtgaaagtggtttggtttagacgtccgggaattgcatctgtttttaagcctaatgtggggacagctcatgagtgc

SEQ ID NO: 58509 - DNA, 120 bp, Homo sapiens
  misc_feature: 1402 for SV(W|O) and mtDNA
aatcaacaaaactgctcgccagaacactacgagccacagcttaaaactcaaaggacctggcggtgcttcatatccctctagaggagcctgttctgtaatcgataaaccccgatcaacctc

SEQ ID NO: 58510 - DNA, 120 bp, Homo sapiens
  misc_feature: 1402 for SV(W|O) and mtDNA
atcacatggctaggccggaggtcattaggagggctgagagggcccctgttaggggtcatgggctgggttttactatatgataggcatgtgattggtgggtcattatgtgttgtcgtgcag

SEQ ID NO: 58511 - DNA, 120 bp, Homo sapiens
  misc_feature: 1402 for SV(W|O) and mtDNA
ctcctcaaagcaatacactgaaaatgtttagacgggctcacatcaccccataaacaaataggtttggtcctagcctttctattagctcttagtaagattacacatgcaagcatccccgtt

SEQ ID NO: 58512 - DNA, 120 bp, Homo sapiens
  misc_feature: 1402 for SV(W|O) and mtDNA
ctaggaataatgggggaagtatgtaggagttgaagattagtccgccgtagtcggtgtactcgtaggttcagtaccattggtggccaattgatttgatggtaagggagggatcgttgacct

SEQ ID NO: 58513 - DNA, 120 bp, Homo sapiens
  misc_feature: 1402 for SV(W|O) and mtDNA
cgcctcttcacgggcaggtcaatttcactggttaaaagtaagagacagctgaaccctcgtggagccattcatacaggtccctatttaaggaacaagtgattatgctacctttgcacggtt

SEQ ID NO: 58514 - DNA, 120 bp, Homo sapiens
  misc_feature: 1402 for SV(W|O) and mtDNA
cctacgacaaacagacctaaaatcgctcattgcatactcttcaatcagccacatagccctcgtagtaacagccattctcatccaaaccccctgaagcttcaccggcgcagtcattctcat

SEQ ID NO: 58515 - DNA, 120 bp, Homo sapiens
  misc_feature: 1402 for SV(W|O) and mtDNA
aaggtattcctgctaatgctaggctgccaatggtgagggaggttgaagtgagaggtatggttttgagtagtcctcctatttttcgaatatcttgttcattgttaaggttgtggatgatgg

SEQ ID NO: 58516 - DNA, 120 bp, Homo sapiens
  misc_feature: 1402 for SV(W|O) and mtDNA
cagaggggtgccttgggtaacctctgggactcagaagtgaaagggggctattcctagttttattgctatagccattatgattattaatgatgagtactgattggtagtattggttatggt

SEQ ID NO: 58517 - DNA, 120 bp, Homo sapiens
  misc_feature: 1402 for SV(W|O) and mtDNA
atactcttcaatcagccacatagccctcgtagtaacagccattctcatccaaaccccctgaagcttcaccggcgcagtcattctcataatcgcccacgggcttacatcctcattactatt

SEQ ID NO: 58518 - DNA, 120 bp, Homo sapiens
  misc_feature: 1402 for SV(W|O) and mtDNA
agggtgaactcactggaacggggatgcttgcatgtgtaatcttactaagagctaatagaaaggctaggaccaaacctatttgtttatggggtgatgtgagcccgtctaaacattttcagt

SEQ ID NO: 58519 - DNA, 120 bp, Homo sapiens
  misc_feature: 1401 for SV(W|O) and mtDNA
tatttcctattcgcctacacaattctccgatccgtccctaacaaactaggaggcgtccttgccctattactatccatcctcatcctagcaataatccccatcctccatatatccaaacaa

SEQ ID NO: 58520 - DNA, 120 bp, Homo sapiens
  misc_feature: 1401 for SV(W|O) and mtDNA
agagtagagtgcttagttgaacagggccctgaagcgcgtacacaccgcccgtcaccctcctcaagtatacttcaaaggacatttaactaaaacccctacgcatttatatagaggagacaa

SEQ ID NO: 58521 - DNA, 120 bp, Homo sapiens
  misc_feature: 1401 for SV(W|O) and mtDNA
aagaattattcgagtgctataggcgcttgtcagggaggtagcgatgagagtaatagatagggctcaggcgtttgtgtatgatatgtttgcggtttcgatgatgtggtctttggagtagaa

SEQ ID NO: 58522 - DNA, 120 bp, Homo sapiens
  misc_feature: 1401 for SV(W|O) and mtDNA
tcttagctattgtgtgttcagatatgttaaagccactttcgtagtctattttgtgtcaactggagttttttacaactcaggtgagttttagctttattggggagggggtgatctaaaaca

SEQ ID NO: 58523 - DNA, 120 bp, Homo sapiens
  misc_feature: 1401 for SV(W|O) and mtDNA
tgtagcttacctcctcaaagcaatacactgaaaatgtttagacgggctcacatcaccccataaacaaataggtttggtcctagcctttctattagctcttagtaagattacacatgcaag

SEQ ID NO: 58524 - DNA, 120 bp, Homo sapiens
  misc_feature: 1401 for SV(W|O) and mtDNA
taataactagtatggggataaggggtgtaggtgtgccttgtggtaagaagtgggctagggcatttttaatcttagagcgaaagcctataatcactgcgcccgctcataaggggatggcca

SEQ ID NO: 58525 - DNA, 120 bp, Homo sapiens
  misc_feature: 1401 for SV(W|O) and mtDNA
tgagaagaagcaggccggatgtcagaggggtgccttgggtaacctctgggactcagaagtgaaagggggctattcctagttttattgctatagccattatgattattaatgatgagtact

SEQ ID NO: 58526 - DNA, 120 bp, Homo sapiens
  misc_feature: 1401 for SV(W|O) and mtDNA
tgaagattagtccgccgtagtcggtgtactcgtaggttcagtaccattggtggccaattgatttgatggtaagggagggatcgttgacctcgtctgttatgtaaaggatgcgtagggatg

SEQ ID NO: 58527 - DNA, 120 bp, Homo sapiens
  misc_feature: 1401 for SV(W|O) and mtDNA
tcctgctaatgctaggctgccaatggtgagggaggttgaagtgagaggtatggttttgagtagtcctcctatttttcgaatatcttgttcattgttaaggttgtggatgatggacccgga

SEQ ID NO: 58528 - DNA, 120 bp, Homo sapiens
  misc_feature: 1401 for SV(W|O) and mtDNA
tccacagatttcagagcattgaccgtagtatacccccggtcgtgtagcggtgaaagtggtttggtttagacgtccgggaattgcatctgtttttaagcctaatgtggggacagctcatga

SEQ ID NO: 58529 - DNA, 120 bp, Homo sapiens
  misc_feature: 1401 for SV(W|O) and mtDNA
gactaatcttcaactcctacatacttcccccattattcctagaaccaggcgacctgcgactccttgacgttgacaatcgagtagtactcccgattgaagcccccattcgtataataatta

SEQ ID NO: 58530 - DNA, 120 bp, Homo sapiens
  misc_feature: 1401 for SV(W|O) and mtDNA
ccacgttctcctgatcaaatatcactctcctacttacaggactcaacatactagtcacagccctatactccctctacatatttaccacaacacaatggggctcactcacccaccacatta

SEQ ID NO: 58531 - DNA, 120 bp, Homo sapiens
  misc_feature: 1401 for SV(W|O) and mtDNA
caccctcaccactacaatcttcctaggaacaacatatgacgcactctcccctgaactctacacaacatattttgtcaccaagaccctacttctaacctccctgttcttatgaattcgaac

SEQ ID NO: 58532 - DNA, 120 bp, Homo sapiens
  misc_feature: 1401 for SV(W|O) and mtDNA
caaaacaaatgataaccatacacaacactaaaggacgaacctgatctcttatactagtatccttaatcatttttattgccacaactaacctcctcggactcctgcctcactcatttacac

SEQ ID NO: 58533 - DNA, 120 bp, Homo sapiens
  misc_feature: 1401 for SV(W|O) and mtDNA
ctagtaaccacgttctcctgatcaaatatcactctcctacttacaggactcaacatactagtcacagccctatactccctctacatatttaccacaacacaatggggctcactcacccac

SEQ ID NO: 58534 - DNA, 120 bp, Homo sapiens
  misc_feature: 1401 for SV(W|O) and mtDNA
gtcagaggggtgccttgggtaacctctgggactcagaagtgaaagggggctattcctagttttattgctatagccattatgattattaatgatgagtactgattggtagtattggttatg

SEQ ID NO: 58535 - DNA, 120 bp, Homo sapiens
  misc_feature: 1401 for SV(W|O) and mtDNA
gggtgttttctcgtgtgaatgagggttttatgttgttaatgtggtgggtgagtgagccccattgtgttgtggtaaatatgtagagggagtatagggctgtgactagtatgttgagtcctg

SEQ ID NO: 58536 - DNA, 120 bp, Homo sapiens
  misc_feature: 1401 for SV(W|O) and mtDNA
gggcatgaaactgtggtttgctccacagatttcagagcattgaccgtagtatacccccggtcgtgtagcggtgaaagtggtttggtttagacgtccgggaattgcatctgtttttaagcc

SEQ ID NO: 58537 - DNA, 120 bp, Homo sapiens
  misc_feature: 1401 for SV(W|O) and mtDNA
cgccccaaccgaaatttttaatgcaggtttggtagtttaggacctgtgggtttgttaggtactgtttgcattaataaattaaagctccatagggtcttctcgtcttgctgtgttatgccc

SEQ ID NO: 58538 - DNA, 120 bp, Homo sapiens
  misc_feature: 1401 for SV(W|O) and mtDNA
aatagccccctttcacttctgagtcccagaggttacccaaggcacccctctgacatccggcctgcttcttctcacatgacaaaaactagcccccatctcaatcatataccaaatctctcc

SEQ ID NO: 58539 - DNA, 120 bp, Homo sapiens
  misc_feature: 1401 for SV(W|O) and mtDNA
gctcgaataaggaggcttagagctgtgcctaggactccagctcatgcgccgaataataggtatagtgttccaatgtctttgtggtttgtagagaatagtcaacggtcggcgaacatcagt

SEQ ID NO: 58540 - DNA, 120 bp, Homo sapiens
  misc_feature: 1401 for SV(W|O) and mtDNA
gctattagaaggattatggatgcggttgcttgcgtgaggaaatacttgatggcagcttctgtggaacgagggtttatttttttggttagaactggaataaaagctagcatgtttatttct

SEQ ID NO: 58541 - DNA, 120 bp, Homo sapiens
  misc_feature: 1401 for SV(W|O) and mtDNA
ataaacttcgccttaattttaataatcaacaccctcctagccttactactaataattattacattttgactaccacaactcaacggctacatagaaaaatccaccccttacgagtgcggc

SEQ ID NO: 58542 - DNA, 120 bp, Homo sapiens
  misc_feature: 1401 for SV(W|O) and mtDNA
actcactggaacggggatgcttgcatgtgtaatcttactaagagctaatagaaaggctaggaccaaacctatttgtttatggggtgatgtgagcccgtctaaacattttcagtgtattgc

SEQ ID NO: 58543 - DNA, 120 bp, Homo sapiens
  misc_feature: 1401 for SV(W|O) and mtDNA
atcatccccaccatcatagccaccatcaccctccttaacctctacttctacctacgcctaatctactccacctcaatcacactactccccatatctaacaacgtaaaaataaaatgacag

SEQ ID NO: 58544 - DNA, 120 bp, Homo sapiens
  misc_feature: 1401 for SV(W|O) and mtDNA
actttatttgggtaaatggtttggctaaggttgtctggtagtaaggtggagtgggtttggggctaggtttagctcagagcggtcaagttaagttgaaatctcctaagtgtaagttgggtg

SEQ ID NO: 58545 - DNA, 120 bp, Homo sapiens
  misc_feature: 1401 for SV(W|O) and mtDNA
caatagcctcatcatccccaccatcatagccaccatcaccctccttaacctctacttctacctacgcctaatctactccacctcaatcacactactccccatatctaacaacgtaaaaat

SEQ ID NO: 58546 - DNA, 120 bp, Homo sapiens
  misc_feature: 1401 for SV(W|O) and mtDNA
aacatgagggtgttttctcgtgtgaatgagggttttatgttgttaatgtggtgggtgagtgagccccattgtgttgtggtaaatatgtagagggagtatagggctgtgactagtatgttg

SEQ ID NO: 58547 - DNA, 120 bp, Homo sapiens
  misc_feature: 1401 for SV(W|O) and mtDNA
attattcctagaaccaggcgacctgcgactccttgacgttgacaatcgagtagtactcccgattgaagcccccattcgtataataattacatcacaagacgtcttgcactcatgagctgt

SEQ ID NO: 58548 - DNA, 120 bp, Homo sapiens
  misc_feature: 1400 for SV(W|O) and mtDNA
ttttgaggttagtttgattagtcattgttgggtggtgattagtcggttgttgatgagatatttggaggtggggatcaatagagggggaaatagaatgatcagtactgcggcgggtaggcc

SEQ ID NO: 58549 - DNA, 120 bp, Homo sapiens
  misc_feature: 1400 for SV(W|O) and mtDNA
ttcgtagtctattttgtgtcaactggagttttttacaactcaggtgagttttagctttattggggagggggtgatctaaaacactctttacgccggcttctattgacttgggttaatcgt

SEQ ID NO: 58550 - DNA, 120 bp, Homo sapiens
  misc_feature: 1400 for SV(W|O) and mtDNA
ttaattaaccactcattcatcgacctccccaccccatccaacatctccacatgatgaaacttcggctcactccttggcgcctgcctgattctccaaatcaccacaggactattcctagcc

SEQ ID NO: 58551 - DNA, 120 bp, Homo sapiens
  misc_feature: 1400 for SV(W|O) and mtDNA
cctctagcctagccgtttactcaatcctctgatcagggtgagcatcaaactcaaactacgccctgatcggcgcactgcgagcagtagcccaaacaatctcatatgaagtcaccctagcca

SEQ ID NO: 58552 - DNA, 120 bp, Homo sapiens
  misc_feature: 1400 for SV(W|O) and mtDNA
tactttgtagccttcatcagggtttgctgaagatggcggtatataggctgagcaagaggtggtgaggttgatcggggtttatcgattacagaacaggctcctctagagggatatgaagca

SEQ ID NO: 58553 - DNA, 120 bp, Homo sapiens
  misc_feature: 1400 for SV(W|O) and mtDNA
gttcccctaataatcggtgcccccgatatggcgtttccccgcataaacaacataagcttctgactcttacctccctctctcctactcctgctcgcatctgctatagtggaggccggagca

SEQ ID NO: 58554 - DNA, 120 bp, Homo sapiens
  misc_feature: 1400 for SV(W|O) and mtDNA
tctgcctacgacaaacagacctaaaatcgctcattgcatactcttcaatcagccacatagccctcgtagtaacagccattctcatccaaaccccctgaagcttcaccggcgcagtcattc

SEQ ID NO: 58555 - DNA, 120 bp, Homo sapiens
  misc_feature: 1400 for SV(W|O) and mtDNA
gttgtgagtgttaggaaaagggcatacaggactaggaagcagataaggaaaatgattatgagggcgtgatcatgaaaggtgataagctcttctatgataggggaagtagcgtcttgtaga

SEQ ID NO: 58556 - DNA, 120 bp, Homo sapiens
  misc_feature: 1400 for SV(W|O) and mtDNA
aactgagagtagagtgcttagttgaacagggccctgaagcgcgtacacaccgcccgtcaccctcctcaagtatacttcaaaggacatttaactaaaacccctacgcatttatatagagga

SEQ ID NO: 58557 - DNA, 120 bp, Homo sapiens
  misc_feature: 1400 for SV(W|O) and mtDNA
atggctttctcaacttttaaaggataacagctatccattggtcttaggccccaaaaattttggtgcaactccaaataaaagtaataaccatgcacactactataaccaccctaaccctga

SEQ ID NO: 58558 - DNA, 120 bp, Homo sapiens
  misc_feature: 1400 for SV(W|O) and mtDNA
tcagaggggtgccttgggtaacctctgggactcagaagtgaaagggggctattcctagttttattgctatagccattatgattattaatgatgagtactgattggtagtattggttatgg

SEQ ID NO: 58559 - DNA, 120 bp, Homo sapiens
  misc_feature: 1400 for SV(W|O) and mtDNA
tagtaagcctctacctgcacgacaacacataatgacccaccaatcacatgcctatcatatagtaaaacccagcccatgacccctaacaggggccctctcagccctcctaatgacctccgg

SEQ ID NO: 58560 - DNA, 120 bp, Homo sapiens
  misc_feature: 1400 for SV(W|O) and mtDNA
taccgtacaaccctaacataaccattcttaatttaactatttatattatcctaactactaccgcattcctactactcaacttaaactccagcaccacgaccctactactatctcgcacct

SEQ ID NO: 58561 - DNA, 120 bp, Homo sapiens
  misc_feature: 1400 for SV(W|O) and mtDNA
atgggggaagtatgtaggagttgaagattagtccgccgtagtcggtgtactcgtaggttcagtaccattggtggccaattgatttgatggtaagggagggatcgttgacctcgtctgtta

SEQ ID NO: 58562 - DNA, 120 bp, Homo sapiens
  misc_feature: 1400 for SV(W|O) and mtDNA
actttgtagccttcatcagggtttgctgaagatggcggtatataggctgagcaagaggtggtgaggttgatcggggtttatcgattacagaacaggctcctctagagggatatgaagcac

SEQ ID NO: 58563 - DNA, 120 bp, Homo sapiens
  misc_feature: 1400 for SV(W|O) and mtDNA
gggtttaagctcctattatttactctatcaaagtaactcttttatcagacatatttcttaggtttgagggggaatgctggagattgtaatgggtatggagacatatcatataagtaatgc

SEQ ID NO: 58564 - DNA, 120 bp, Homo sapiens
  misc_feature: 1400 for SV(W|O) and mtDNA
agaaatgggctacattttctaccccagaaaactacgatagcccttatgaaacttaagggtcgaaggtggatttagcagtaaactgagagtagagtgcttagttgaacagggccctgaagc

SEQ ID NO: 58565 - DNA, 120 bp, Homo sapiens
  misc_feature: 1400 for SV(W|O) and mtDNA
acccggtaatgatgtcggggttgagggataggaggagaatgggggataggtgtatgaacatgagggtgttttctcgtgtgaatgagggttttatgttgttaatgtggtgggtgagtgagc

SEQ ID NO: 58566 - DNA, 120 bp, Homo sapiens
  misc_feature: 1400 for SV(W|O) and mtDNA
cccacgtaaagacgttaggtcaaggtgtagcccatgaggtggcaagaaatgggctacattttctaccccagaaaactacgatagcccttatgaaacttaagggtcgaaggtggatttagc

SEQ ID NO: 58567 - DNA, 120 bp, Homo sapiens
  misc_feature: 1400 for SV(W|O) and mtDNA
atatcatttacgggggaaggcgctttgtgaagtaggccttatttctcttgtcctttcgtacagggaggaatttgaagtagatagaaaccgacctggattactccggtctgaactcagatc

SEQ ID NO: 58568 - DNA, 120 bp, Homo sapiens
  misc_feature: 1400 for SV(W|O) and mtDNA
gagaagaagcaggccggatgtcagaggggtgccttgggtaacctctgggactcagaagtgaaagggggctattcctagttttattgctatagccattatgattattaatgatgagtactg

SEQ ID NO: 58569 - DNA, 120 bp, Homo sapiens
  misc_feature: 1400 for SV(W|O) and mtDNA
gactagcttacacaatagcttttatagtaaagatacctctttacggactccacttatgactccctaaagcccatgtcgaagcccccatcgctgggtcaatagtacttgccgcagtactct

SEQ ID NO: 58570 - DNA, 120 bp, Homo sapiens
  misc_feature: 1400 for SV(W|O) and mtDNA
ctatcccccattctcctcctatccctcaaccccgacatcattaccgggttttcctcttgtaaatatagtttaaccaaaacatcagattgtgaatctgacaacagaggcttacgacccctt

SEQ ID NO: 58571 - DNA, 120 bp, Homo sapiens
  misc_feature: 1400 for SV(W|O) and mtDNA
ccatcgttgtatttcaactacaagaacaccaatgaccccaatacgcaaaactaaccccctaataaaattaattaaccactcattcatcgacctccccaccccatccaacatctccacatg

SEQ ID NO: 58572 - DNA, 120 bp, Homo sapiens
  misc_feature: 1400 for SV(W|O) and mtDNA
caccgactacggcggactaatcttcaactcctacatacttcccccattattcctagaaccaggcgacctgcgactccttgacgttgacaatcgagtagtactcccgattgaagcccccat

SEQ ID NO: 58573 - DNA, 120 bp, Homo sapiens
  misc_feature: 1400 for SV(W|O) and mtDNA
aggtgcgataaataatgggatgaggcaggaatcaaagacagatactgcgacatagggtgctccggctccagcgtctcgcaatgctatcgcgtgcataccccccagacgaaaataccaaat

SEQ ID NO: 58574 - DNA, 120 bp, Homo sapiens
  misc_feature: 1400 for SV(W|O) and mtDNA
aatagaaaccgtctgaactatcctgcccgccatcatcctagtcctcatcgccctcccatccctacgcatcctttacataacagacgaggtcaacgatccctcccttaccatcaaatcaat

SEQ ID NO: 58575 - DNA, 120 bp, Homo sapiens
  misc_feature: 1400 for SV(W|O) and mtDNA
aataaacaccctcaccactacaatcttcctaggaacaacatatgacgcactctcccctgaactctacacaacatattttgtcaccaagaccctacttctaacctccctgttcttatgaat

SEQ ID NO: 58576 - DNA, 120 bp, Homo sapiens
  misc_feature: 1400 for SV(W|O) and mtDNA
aattcccggacgtctaaaccaaaccactttcaccgctacacgaccgggggtatactacggtcaatgctctgaaatctgtggagcaaaccacagtttcatgcccatcgtcctagaattaat

SEQ ID NO: 58577 - DNA, 120 bp, Homo sapiens
  misc_feature: 1400 for SV(W|O) and mtDNA
atagcctatgaaggctgttgctatagttgcaagcaggaggataatgccgatgtttcaggtttctgagtagagaaatgatccgtaatataggcctcgcccgatgtgtaggaagaggcagat

SEQ ID NO: 58578 - DNA, 120 bp, Homo sapiens
  misc_feature: 1400 for SV(W|O) and mtDNA
aataatcataatggctatagcaataaaactaggaatagccccctttcacttctgagtcccagaggttacccaaggcacccctctgacatccggcctgcttcttctcacatgacaaaaact

SEQ ID NO: 58579 - DNA, 120 bp, Homo sapiens
  misc_feature: 1399 for SV(W|O) and mtDNA
tacttacaggactcaacatactagtcacagccctatactccctctacatatttaccacaacacaatggggctcactcacccaccacattaacaacataaaaccctcattcacacgagaaa

SEQ ID NO: 58580 - DNA, 120 bp, Homo sapiens
  misc_feature: 1399 for SV(W|O) and mtDNA
ggaagtatgtaggagttgaagattagtccgccgtagtcggtgtactcgtaggttcagtaccattggtggccaattgatttgatggtaagggagggatcgttgacctcgtctgttatgtaa

SEQ ID NO: 58581 - DNA, 120 bp, Homo sapiens
  misc_feature: 1399 for SV(W|O) and mtDNA
tgcctctaatactggtgatgctagaggtgatgtttttggtaaacaggcggggtaagatttgccgagttccttttactttttttaacctttccttatgagcatgcctgtgttgggttgaca

SEQ ID NO: 58582 - DNA, 120 bp, Homo sapiens
  misc_feature: 1399 for SV(W|O) and mtDNA
ggtttggtcctagcctttctattagctcttagtaagattacacatgcaagcatccccgttccagtgagttcaccctctaaatcaccacgatcaaaagggacaagcatcaagcacgcagca

SEQ ID NO: 58583 - DNA, 120 bp, Homo sapiens
  misc_feature: 1399 for SV(W|O) and mtDNA
tgccgagttccttttactttttttaacctttccttatgagcatgcctgtgttgggttgacagtgagggtaataatgacttgttggttgattgtagatattgggctgttaattgtcagttc

SEQ ID NO: 58584 - DNA, 120 bp, Homo sapiens
  misc_feature: 1399 for SV(W|O) and mtDNA
aatatcactctcctacttacaggactcaacatactagtcacagccctatactccctctacatatttaccacaacacaatggggctcactcacccaccacattaacaacataaaaccctca

SEQ ID NO: 58585 - DNA, 120 bp, Homo sapiens
  misc_feature: 1399 for SV(W|O) and mtDNA
tgagcgggcgcagtgattataggctttcgctctaagattaaaaatgccctagcccacttcttaccacaaggcacacctacaccccttatccccatactagttattatcgaaaccatcagc

SEQ ID NO: 58586 - DNA, 120 bp, Homo sapiens
  misc_feature: 1399 for SV(W|O) and mtDNA
ggtataaccaacattttcggggtatgggcccgatagcttatttagctgaccttactttaggatggggtgtgataggtggcacggagaattttggattctcagggatgggttcgattctca

SEQ ID NO: 58587 - DNA, 120 bp, Homo sapiens
  misc_feature: 1399 for SV(W|O) and mtDNA
ctgagagtagagtgcttagttgaacagggccctgaagcgcgtacacaccgcccgtcaccctcctcaagtatacttcaaaggacatttaactaaaacccctacgcatttatatagaggaga

SEQ ID NO: 58588 - DNA, 120 bp, Homo sapiens
  misc_feature: 1399 for SV(W|O) and mtDNA
tctacctgcacgacaacacataatgacccaccaatcacatgcctatcatatagtaaaacccagcccatgacccctaacaggggccctctcagccctcctaatgacctccggcctagccat

SEQ ID NO: 58589 - DNA, 120 bp, Homo sapiens
  misc_feature: 1399 for SV(W|O) and mtDNA
taaccttccctctacacttatcatcttcacaattctaattctactgactatcctagaaatcgctgtcgccttaatccaagcctacgttttcacacttctagtaagcctctacctgcacga

SEQ ID NO: 58590 - DNA, 120 bp, Homo sapiens
  misc_feature: 1399 for SV(W|O) and mtDNA
tcgatgatgtggtctttggagtagaaacctgtgaggaaaggtattcctgctaatgctaggctgccaatggtgagggaggttgaagtgagaggtatggttttgagtagtcctcctattttt

SEQ ID NO: 58591 - DNA, 120 bp, Homo sapiens
  misc_feature: 1399 for SV(W|O) and mtDNA
agattagtccgccgtagtcggtgtactcgtaggttcagtaccattggtggccaattgatttgatggtaagggagggatcgttgacctcgtctgttatgtaaaggatgcgtagggatggga

SEQ ID NO: 58592 - DNA, 120 bp, Homo sapiens
  misc_feature: 1399 for SV(W|O) and mtDNA
tactttatttgggtaaatggtttggctaaggttgtctggtagtaaggtggagtgggtttggggctaggtttagctcagagcggtcaagttaagttgaaatctcctaagtgtaagttgggt

SEQ ID NO: 58593 - DNA, 120 bp, Homo sapiens
  misc_feature: 1399 for SV(W|O) and mtDNA
tactacgagggctatgtggctgattgaagagtatgcaatgagcgattttaggtctgtttgtcgtaggcagatggagcttgttataattatgcctcatagggatagtacaaggaaggggta

SEQ ID NO: 58594 - DNA, 120 bp, Homo sapiens
  misc_feature: 1399 for SV(W|O) and mtDNA
gttggccatgggtatgttgttaagaagaggaattgaacctctgactgtaaagttttaagttttatgcgattaccgggctctgccatcttaacaaaccctgttcttgggtgggtgtgggta

SEQ ID NO: 58595 - DNA, 120 bp, Homo sapiens
  misc_feature: 1399 for SV(W|O) and mtDNA
ctattaacctactgggagaactctctgtgctagtaaccacgttctcctgatcaaatatcactctcctacttacaggactcaacatactagtcacagccctatactccctctacatattta

SEQ ID NO: 58596 - DNA, 120 bp, Homo sapiens
  misc_feature: 1399 for SV(W|O) and mtDNA
gttttattgctatagccattatgattattaatgatgagtactgattggtagtattggttatggttcattgtccggagagtatattgttgaagaggatagctattagaaggattatggatg

SEQ ID NO: 58597 - DNA, 120 bp, Homo sapiens
  misc_feature: 1399 for SV(W|O) and mtDNA
gtggtttgctccacagatttcagagcattgaccgtagtatacccccggtcgtgtagcggtgaaagtggtttggtttagacgtccgggaattgcatctgtttttaagcctaatgtggggac

SEQ ID NO: 58598 - DNA, 120 bp, Homo sapiens
  misc_feature: 1399 for SV(W|O) and mtDNA
gtaatcgcataaaacttaaaactttacagtcagaggttcaattcctcttcttaacaacatacccatggccaacctcctactcctcattgtacccattctaatcgcaatggcattcctaat

SEQ ID NO: 58599 - DNA, 120 bp, Homo sapiens
  misc_feature: 1399 for SV(W|O) and mtDNA
ggactaatcttcaactcctacatacttcccccattattcctagaaccaggcgacctgcgactccttgacgttgacaatcgagtagtactcccgattgaagcccccattcgtataataatt

SEQ ID NO: 58600 - DNA, 120 bp, Homo sapiens
  misc_feature: 1399 for SV(W|O) and mtDNA
cttagtagctattaccttcttattatttgatctagaaattgccctccttttacccctaccatgagccctacaaacaactaacctgccactaatagttatgtcatccctcttattaatcat

SEQ ID NO: 58601 - DNA, 120 bp, Homo sapiens
  misc_feature: 1399 for SV(W|O) and mtDNA
cttactagaagtgtgaaaacgtaggcttggattaaggcgacagcgatttctaggatagtcagtagaattagaattgtgaagatgataagtgtagagggaaggttaatggttgatattgct

SEQ ID NO: 58602 - DNA, 120 bp, Homo sapiens
  misc_feature: 1399 for SV(W|O) and mtDNA
agtggtttggtttagacgtccgggaattgcatctgtttttaagcctaatgtggggacagctcatgagtgcaagacgtcttgtgatgtaattattatacgaatgggggcttcaatcgggag

SEQ ID NO: 58603 - DNA, 120 bp, Homo sapiens
  misc_feature: 1399 for SV(W|O) and mtDNA
caaaaaacaatagcctcatcatccccaccatcatagccaccatcaccctccttaacctctacttctacctacgcctaatctactccacctcaatcacactactccccatatctaacaacg

SEQ ID NO: 58604 - DNA, 120 bp, Homo sapiens
  misc_feature: 1399 for SV(W|O) and mtDNA
attagtccgccgtagtcggtgtactcgtaggttcagtaccattggtggccaattgatttgatggtaagggagggatcgttgacctcgtctgttatgtaaaggatgcgtagggatgggagg

SEQ ID NO: 58605 - DNA, 120 bp, Homo sapiens
  misc_feature: 1399 for SV(W|O) and mtDNA
cctatcccccattctcctcctatccctcaaccccgacatcattaccgggttttcctcttgtaaatatagtttaaccaaaacatcagattgtgaatctgacaacagaggcttacgacccct

SEQ ID NO: 58606 - DNA, 120 bp, Homo sapiens
  misc_feature: 1399 for SV(W|O) and mtDNA
atgaggactaggatgatggcgggcaggatagttcagacggtttctatttcctgagcgtctgagatgttagtattagttagttttgttgtgagtgttaggaaaagggcatacaggactagg

SEQ ID NO: 58607 - DNA, 120 bp, Homo sapiens
  misc_feature: 1399 for SV(W|O) and mtDNA
cacgggaggacatagcctatgaaggctgttgctatagttgcaagcaggaggataatgccgatgtttcaggtttctgagtagagaaatgatccgtaatataggcctcgcccgatgtgtagg

SEQ ID NO: 58608 - DNA, 120 bp, Homo sapiens
  misc_feature: 1399 for SV(W|O) and mtDNA
catatctgaacacacaatagctaagacccaaactgggattagataccccactatgcttagccctaaacctcaacagttaaatcaacaaaactgctcgccagaacactacgagccacagct

SEQ ID NO: 58609 - DNA, 120 bp, Homo sapiens
  misc_feature: 1399 for SV(W|O) and mtDNA
aacattattataataaacaccctcaccactacaatcttcctaggaacaacatatgacgcactctcccctgaactctacacaacatattttgtcaccaagaccctacttctaacctccctg

SEQ ID NO: 58610 - DNA, 120 bp, Homo sapiens
  misc_feature: 1399 for SV(W|O) and mtDNA
atctgtaggctcattcatttctctaacagcagtaatattaataattttcatgatttgagaagccttcgcttcaaagcgaaaagtcctaatagtagaagaaccctccataaacctggagtg

SEQ ID NO: 58611 - DNA, 120 bp, Homo sapiens
  misc_feature: 1399 for SV(W|O) and mtDNA
accatcgttgtatttcaactacaagaacaccaatgaccccaatacgcaaaactaaccccctaataaaattaattaaccactcattcatcgacctccccaccccatccaacatctccacat

SEQ ID NO: 58612 - DNA, 120 bp, Homo sapiens
  misc_feature: 1399 for SV(W|O) and mtDNA
atcgttgtatttcaactacaagaacaccaatgaccccaatacgcaaaactaaccccctaataaaattaattaaccactcattcatcgacctccccaccccatccaacatctccacatgat

SEQ ID NO: 58613 - DNA, 120 bp, Homo sapiens
  misc_feature: 1398 for SV(W|O) and mtDNA
ttgtatttcaactacaagaacaccaatgaccccaatacgcaaaactaaccccctaataaaattaattaaccactcattcatcgacctccccaccccatccaacatctccacatgatgaaa

SEQ ID NO: 58614 - DNA, 120 bp, Homo sapiens
  misc_feature: 1398 for SV(W|O) and mtDNA
ttgcatactcttcaatcagccacatagccctcgtagtaacagccattctcatccaaaccccctgaagcttcaccggcgcagtcattctcataatcgcccacgggcttacatcctcattac

SEQ ID NO: 58615 - DNA, 120 bp, Homo sapiens
  misc_feature: 1398 for SV(W|O) and mtDNA
tgatgtggtctttggagtagaaacctgtgaggaaaggtattcctgctaatgctaggctgccaatggtgagggaggttgaagtgagaggtatggttttgagtagtcctcctatttttcgaa

SEQ ID NO: 58616 - DNA, 120 bp, Homo sapiens
  misc_feature: 1398 for SV(W|O) and mtDNA
ttagagggtgaactcactggaacggggatgcttgcatgtgtaatcttactaagagctaatagaaaggctaggaccaaacctatttgtttatggggtgatgtgagcccgtctaaacatttt

SEQ ID NO: 58617 - DNA, 120 bp, Homo sapiens
  misc_feature: 1398 for SV(W|O) and mtDNA
tagcttacctcctcaaagcaatacactgaaaatgtttagacgggctcacatcaccccataaacaaataggtttggtcctagcctttctattagctcttagtaagattacacatgcaagca

SEQ ID NO: 58618 - DNA, 120 bp, Homo sapiens
  misc_feature: 1398 for SV(W|O) and mtDNA
atcaacaaaactgctcgccagaacactacgagccacagcttaaaactcaaaggacctggcggtgcttcatatccctctagaggagcctgttctgtaatcgataaaccccgatcaacctca

SEQ ID NO: 58619 - DNA, 120 bp, Homo sapiens
  misc_feature: 1398 for SV(W|O) and mtDNA
tctaccgtacaaccctaacataaccattcttaatttaactatttatattatcctaactactaccgcattcctactactcaacttaaactccagcaccacgaccctactactatctcgcac

SEQ ID NO: 58620 - DNA, 120 bp, Homo sapiens
  misc_feature: 1398 for SV(W|O) and mtDNA
tcgtggtgatttagagggtgaactcactggaacggggatgcttgcatgtgtaatcttactaagagctaatagaaaggctaggaccaaacctatttgtttatggggtgatgtgagcccgtc

SEQ ID NO: 58621 - DNA, 120 bp, Homo sapiens
  misc_feature: 1398 for SV(W|O) and mtDNA
tcgtagtctattttgtgtcaactggagttttttacaactcaggtgagttttagctttattggggagggggtgatctaaaacactctttacgccggcttctattgacttgggttaatcgtg

SEQ ID NO: 58622 - DNA, 120 bp, Homo sapiens
  misc_feature: 1398 for SV(W|O) and mtDNA
tagttttattgctatagccattatgattattaatgatgagtactgattggtagtattggttatggttcattgtccggagagtatattgttgaagaggatagctattagaaggattatgga

SEQ ID NO: 58623 - DNA, 120 bp, Homo sapiens
  misc_feature: 1398 for SV(W|O) and mtDNA
tcatttacgggggaaggcgctttgtgaagtaggccttatttctcttgtcctttcgtacagggaggaatttgaagtagatagaaaccgacctggattactccggtctgaactcagatcacg

SEQ ID NO: 58624 - DNA, 120 bp, Homo sapiens
  misc_feature: 1398 for SV(W|O) and mtDNA
tcacgggaggacatagcctatgaaggctgttgctatagttgcaagcaggaggataatgccgatgtttcaggtttctgagtagagaaatgatccgtaatataggcctcgcccgatgtgtag

SEQ ID NO: 58625 - DNA, 120 bp, Homo sapiens
  misc_feature: 1398 for SV(W|O) and mtDNA
tacttgcgcttactttgtagccttcatcagggtttgctgaagatggcggtatataggctgagcaagaggtggtgaggttgatcggggtttatcgattacagaacaggctcctctagaggg

SEQ ID NO: 58626 - DNA, 120 bp, Homo sapiens
  misc_feature: 1398 for SV(W|O) and mtDNA
tacctgcacgacaacacataatgacccaccaatcacatgcctatcatatagtaaaacccagcccatgacccctaacaggggccctctcagccctcctaatgacctccggcctagccatgt

SEQ ID NO: 58627 - DNA, 120 bp, Homo sapiens
  misc_feature: 1398 for SV(W|O) and mtDNA
gttctgctccgaggtcgccccaaccgaaatttttaatgcaggtttggtagtttaggacctgtgggtttgttaggtactgtttgcattaataaattaaagctccatagggtcttctcgtct

SEQ ID NO: 58628 - DNA, 120 bp, Homo sapiens
  misc_feature: 1398 for SV(W|O) and mtDNA
gtctcctcctccggcggggtcgaagaaggtggtgttgaggttgcggtctgttagtagtatagtgatgccagcagctaggactgggagagataggagaagtaggactgctgtgattaggac

SEQ ID NO: 58629 - DNA, 120 bp, Homo sapiens
  misc_feature: 1398 for SV(W|O) and mtDNA
ggttggccatgggtatgttgttaagaagaggaattgaacctctgactgtaaagttttaagttttatgcgattaccgggctctgccatcttaacaaaccctgttcttgggtgggtgtgggt

SEQ ID NO: 58630 - DNA, 120 bp, Homo sapiens
  misc_feature: 1398 for SV(W|O) and mtDNA
cacctatcccccattctcctcctatccctcaaccccgacatcattaccgggttttcctcttgtaaatatagtttaaccaaaacatcagattgtgaatctgacaacagaggcttacgaccc

SEQ ID NO: 58631 - DNA, 120 bp, Homo sapiens
  misc_feature: 1398 for SV(W|O) and mtDNA
gggtataaccaacattttcggggtatgggcccgatagcttatttagctgaccttactttaggatggggtgtgataggtggcacggagaattttggattctcagggatgggttcgattctc

SEQ ID NO: 58632 - DNA, 120 bp, Homo sapiens
  misc_feature: 1398 for SV(W|O) and mtDNA
cccaattggaccaatctatcaccctatagaagaactaatgttagtataagtaacatgaaaacattctcctccgcataagcctgcgtcagattaaaacactgaactgacaattaacagccc

SEQ ID NO: 58633 - DNA, 120 bp, Homo sapiens
  misc_feature: 1398 for SV(W|O) and mtDNA
ataataactagtatggggataaggggtgtaggtgtgccttgtggtaagaagtgggctagggcatttttaatcttagagcgaaagcctataatcactgcgcccgctcataaggggatggcc

SEQ ID NO: 58634 - DNA, 120 bp, Homo sapiens
  misc_feature: 1398 for SV(W|O) and mtDNA
ctttcgtagtctattttgtgtcaactggagttttttacaactcaggtgagttttagctttattggggagggggtgatctaaaacactctttacgccggcttctattgacttgggttaatc

SEQ ID NO: 58635 - DNA, 120 bp, Homo sapiens
  misc_feature: 1398 for SV(W|O) and mtDNA
atttcaactacaagaacaccaatgaccccaatacgcaaaactaaccccctaataaaattaattaaccactcattcatcgacctccccaccccatccaacatctccacatgatgaaacttc

SEQ ID NO: 58636 - DNA, 120 bp, Homo sapiens
  misc_feature: 1398 for SV(W|O) and mtDNA
aacttcgccttaattttaataatcaacaccctcctagccttactactaataattattacattttgactaccacaactcaacggctacatagaaaaatccaccccttacgagtgcggcttc

SEQ ID NO: 58637 - DNA, 120 bp, Homo sapiens
  misc_feature: 1398 for SV(W|O) and mtDNA
aacaagatattcgaaaaataggaggactactcaaaaccatacctctcacttcaacctccctcaccattggcagcctagcattagcaggaatacctttcctcacaggtttctactccaaag

SEQ ID NO: 58638 - DNA, 120 bp, Homo sapiens
  misc_feature: 1398 for SV(W|O) and mtDNA
attagaaggattatggatgcggttgcttgcgtgaggaaatacttgatggcagcttctgtggaacgagggtttatttttttggttagaactggaataaaagctagcatgtttatttctagg

SEQ ID NO: 58639 - DNA, 120 bp, Homo sapiens
  misc_feature: 1398 for SV(W|O) and mtDNA
aggttggccatgggtatgttgttaagaagaggaattgaacctctgactgtaaagttttaagttttatgcgattaccgggctctgccatcttaacaaaccctgttcttgggtgggtgtggg

SEQ ID NO: 58640 - DNA, 120 bp, Homo sapiens
  misc_feature: 1398 for SV(W|O) and mtDNA
catttacgggggaaggcgctttgtgaagtaggccttatttctcttgtcctttcgtacagggaggaatttgaagtagatagaaaccgacctggattactccggtctgaactcagatcacgt

SEQ ID NO: 58641 - DNA, 120 bp, Homo sapiens
  misc_feature: 1398 for SV(W|O) and mtDNA
cattattataataaacaccctcaccactacaatcttcctaggaacaacatatgacgcactctcccctgaactctacacaacatattttgtcaccaagaccctacttctaacctccctgtt

SEQ ID NO: 58642 - DNA, 120 bp, Homo sapiens
  misc_feature: 1398 for SV(W|O) and mtDNA
atagaaaccgtctgaactatcctgcccgccatcatcctagtcctcatcgccctcccatccctacgcatcctttacataacagacgaggtcaacgatccctcccttaccatcaaatcaatt

SEQ ID NO: 58643 - DNA, 120 bp, Homo sapiens
  misc_feature: 1398 for SV(W|O) and mtDNA
agcgggcgcagtgattataggctttcgctctaagattaaaaatgccctagcccacttcttaccacaaggcacacctacaccccttatccccatactagttattatcgaaaccatcagcct

SEQ ID NO: 58644 - DNA, 120 bp, Homo sapiens
  misc_feature: 1398 for SV(W|O) and mtDNA
actagcttacacaatagcttttatagtaaagatacctctttacggactccacttatgactccctaaagcccatgtcgaagcccccatcgctgggtcaatagtacttgccgcagtactctt

SEQ ID NO: 58645 - DNA, 120 bp, Homo sapiens
  misc_feature: 1397 for SV(W|O) and mtDNA
ttcctattcgcctacacaattctccgatccgtccctaacaaactaggaggcgtccttgccctattactatccatcctcatcctagcaataatccccatcctccatatatccaaacaacaa

SEQ ID NO: 58646 - DNA, 120 bp, Homo sapiens
  misc_feature: 1397 for SV(W|O) and mtDNA
ttctaccgtacaaccctaacataaccattcttaatttaactatttatattatcctaactactaccgcattcctactactcaacttaaactccagcaccacgaccctactactatctcgca

SEQ ID NO: 58647 - DNA, 120 bp, Homo sapiens
  misc_feature: 1397 for SV(W|O) and mtDNA
ttcgcctacacaattctccgatccgtccctaacaaactaggaggcgtccttgccctattactatccatcctcatcctagcaataatccccatcctccatatatccaaacaacaaagcata

SEQ ID NO: 58648 - DNA, 120 bp, Homo sapiens
  misc_feature: 1397 for SV(W|O) and mtDNA
agcgttcaagctcaacacccactacctaaaaaatcccaaacatataactgaactcctcatacccaattggaccaatctatcaccctatagaagaactaatgttagtataagtaacatgaa

SEQ ID NO: 58649 - DNA, 120 bp, Homo sapiens
  misc_feature: 1397 for SV(W|O) and mtDNA
taataaacaccctcaccactacaatcttcctaggaacaacatatgacgcactctcccctgaactctacacaacatattttgtcaccaagaccctacttctaacctccctgttcttatgaa

SEQ ID NO: 58650 - DNA, 120 bp, Homo sapiens
  misc_feature: 1397 for SV(W|O) and mtDNA
tatcatttacgggggaaggcgctttgtgaagtaggccttatttctcttgtcctttcgtacagggaggaatttgaagtagatagaaaccgacctggattactccggtctgaactcagatca

SEQ ID NO: 58651 - DNA, 120 bp, Homo sapiens
  misc_feature: 1397 for SV(W|O) and mtDNA
tctgctccgaggtcgccccaaccgaaatttttaatgcaggtttggtagtttaggacctgtgggtttgttaggtactgtttgcattaataaattaaagctccatagggtcttctcgtcttg

SEQ ID NO: 58652 - DNA, 120 bp, Homo sapiens
  misc_feature: 1397 for SV(W|O) and mtDNA
tctctttcttcttcccactcatcctaaccctactcctaatcacataacctattcccccgagcaatctcaattacaatatatacaccaacaaacaatgttcaaccagtaactactactaat

SEQ ID NO: 58653 - DNA, 120 bp, Homo sapiens
  misc_feature: 1397 for SV(W|O) and mtDNA
gaagaattattcgagtgctataggcgcttgtcagggaggtagcgatgagagtaatagatagggctcaggcgtttgtgtatgatatgtttgcggtttcgatgatgtggtctttggagtaga

SEQ ID NO: 58654 - DNA, 120 bp, Homo sapiens
  misc_feature: 1397 for SV(W|O) and mtDNA
tcctgatcaaatatcactctcctacttacaggactcaacatactagtcacagccctatactccctctacatatttaccacaacacaatggggctcactcacccaccacattaacaacata

SEQ ID NO: 58655 - DNA, 120 bp, Homo sapiens
  misc_feature: 1397 for SV(W|O) and mtDNA
gataggtggcacggagaattttggattctcagggatgggttcgattctcatagtcctagaaataagggggtttaagctcctattatttactctatcaaagtaactcttttatcagacata

SEQ ID NO: 58656 - DNA, 120 bp, Homo sapiens
  misc_feature: 1397 for SV(W|O) and mtDNA
agtcggtgtactcgtaggttcagtaccattggtggccaattgatttgatggtaagggagggatcgttgacctcgtctgttatgtaaaggatgcgtagggatgggagggcgatgaggacta

SEQ ID NO: 58657 - DNA, 120 bp, Homo sapiens
  misc_feature: 1397 for SV(W|O) and mtDNA
tagctgctggcatcactatactactaacagaccgcaacctcaacaccaccttcttcgaccccgccggaggaggagaccccattctataccaacacctattctgatttttcggtcaccctg

SEQ ID NO: 58658 - DNA, 120 bp, Homo sapiens
  misc_feature: 1397 for SV(W|O) and mtDNA
taagttttatgcgattaccgggctctgccatcttaacaaaccctgttcttgggtgggtgtgggtataatactaagttgagatgatatcatttacgggggaaggcgctttgtgaagtaggc

SEQ ID NO: 58659 - DNA, 120 bp, Homo sapiens
  misc_feature: 1397 for SV(W|O) and mtDNA
taagggggtttaagctcctattatttactctatcaaagtaactcttttatcagacatatttcttaggtttgagggggaatgctggagattgtaatgggtatggagacatatcatataagt

SEQ ID NO: 58660 - DNA, 120 bp, Homo sapiens
  misc_feature: 1397 for SV(W|O) and mtDNA
acctatcccccattctcctcctatccctcaaccccgacatcattaccgggttttcctcttgtaaatatagtttaaccaaaacatcagattgtgaatctgacaacagaggcttacgacccc

SEQ ID NO: 58661 - DNA, 120 bp, Homo sapiens
  misc_feature: 1397 for SV(W|O) and mtDNA
caaacagacctaaaatcgctcattgcatactcttcaatcagccacatagccctcgtagtaacagccattctcatccaaaccccctgaagcttcaccggcgcagtcattctcataatcgcc

SEQ ID NO: 58662 - DNA, 120 bp, Homo sapiens
  misc_feature: 1397 for SV(W|O) and mtDNA
aggtttggtcctagcctttctattagctcttagtaagattacacatgcaagcatccccgttccagtgagttcaccctctaaatcaccacgatcaaaagggacaagcatcaagcacgcagc

SEQ ID NO: 58663 - DNA, 120 bp, Homo sapiens
  misc_feature: 1397 for SV(W|O) and mtDNA
gctcattgcatactcttcaatcagccacatagccctcgtagtaacagccattctcatccaaaccccctgaagcttcaccggcgcagtcattctcataatcgcccacgggcttacatcctc

SEQ ID NO: 58664 - DNA, 120 bp, Homo sapiens
  misc_feature: 1397 for SV(W|O) and mtDNA
aggaatagccccctttcacttctgagtcccagaggttacccaaggcacccctctgacatccggcctgcttcttctcacatgacaaaaactagcccccatctcaatcatataccaaatctc

SEQ ID NO: 58665 - DNA, 120 bp, Homo sapiens
  misc_feature: 1397 for SV(W|O) and mtDNA
ctttcgtacagggaggaatttgaagtagatagaaaccgacctggattactccggtctgaactcagatcacgtaggactttaatcgttgaacaaacgaacctttaatagcggctgcaccat

SEQ ID NO: 58666 - DNA, 120 bp, Homo sapiens
  misc_feature: 1397 for SV(W|O) and mtDNA
cttcctaggaacaacatatgacgcactctcccctgaactctacacaacatattttgtcaccaagaccctacttctaacctccctgttcttatgaattcgaacagcatacccccgattccg

SEQ ID NO: 58667 - DNA, 120 bp, Homo sapiens
  misc_feature: 1397 for SV(W|O) and mtDNA
ctcttcaatcagccacatagccctcgtagtaacagccattctcatccaaaccccctgaagcttcaccggcgcagtcattctcataatcgcccacgggcttacatcctcattactattctg

SEQ ID NO: 58668 - DNA, 120 bp, Homo sapiens
  misc_feature: 1397 for SV(W|O) and mtDNA
aagcattggactgtaaatctaaagacaggggttaggcctctttttaccagctccgaggtgattttcatattgaattgcaaattcgaagaagcagcttcaaacctgccggggcttctcccg

SEQ ID NO: 58669 - DNA, 120 bp, Homo sapiens
  misc_feature: 1397 for SV(W|O) and mtDNA
agtatgtaggagttgaagattagtccgccgtagtcggtgtactcgtaggttcagtaccattggtggccaattgatttgatggtaagggagggatcgttgacctcgtctgttatgtaaagg

SEQ ID NO: 58670 - DNA, 120 bp, Homo sapiens
  misc_feature: 1397 for SV(W|O) and mtDNA
attcgagtgctataggcgcttgtcagggaggtagcgatgagagtaatagatagggctcaggcgtttgtgtatgatatgtttgcggtttcgatgatgtggtctttggagtagaaacctgtg

SEQ ID NO: 58671 - DNA, 120 bp, Homo sapiens
  misc_feature: 1397 for SV(W|O) and mtDNA
aaccattaaccttccctctacacttatcatcttcacaattctaattctactgactatcctagaaatcgctgtcgccttaatccaagcctacgttttcacacttctagtaagcctctacct

SEQ ID NO: 58672 - DNA, 120 bp, Homo sapiens
  misc_feature: 1397 for SV(W|O) and mtDNA
aggggccatcaatttcatcacaacaattatcaatataaaaccccctgccataacccaataccaaacgcccctcttcgtctgatccgtcctaatcacagcagtcctacttctcctatctct

SEQ ID NO: 58673 - DNA, 120 bp, Homo sapiens
  misc_feature: 1397 for SV(W|O) and mtDNA
acctaaatttctataagattattagtataaaaggggagataggtaggagtagcgtggtaagggcgatgagtgtggggaggaatggggtgggttttgtatgttcaaactgtcattttattt

SEQ ID NO: 58674 - DNA, 120 bp, Homo sapiens
  misc_feature: 1396 for SV(W|O) and mtDNA
ttttggtgcaactccaaataaaagtaataaccatgcacactactataaccaccctaaccctgacttccctaattccccccatccttaccaccctcgttaaccctaacaaaaaaaactcat

SEQ ID NO: 58675 - DNA, 120 bp, Homo sapiens
  misc_feature: 1396 for SV(W|O) and mtDNA
tttggtcctagcctttctattagctcttagtaagattacacatgcaagcatccccgttccagtgagttcaccctctaaatcaccacgatcaaaagggacaagcatcaagcacgcagcaat

SEQ ID NO: 58676 - DNA, 120 bp, Homo sapiens
  misc_feature: 1396 for SV(W|O) and mtDNA
tactatgggtgttaaattttttactctctctacaaggttttttcctagtgtccaaagagctgttcctctttggactaacagttaaatttacaaggggatttagagggttctgtgggcaaa

SEQ ID NO: 58677 - DNA, 120 bp, Homo sapiens
  misc_feature: 1396 for SV(W|O) and mtDNA
taagcgcaagtacccacgtaaagacgttaggtcaaggtgtagcccatgaggtggcaagaaatgggctacattttctaccccagaaaactacgatagcccttatgaaacttaagggtcgaa

SEQ ID NO: 58678 - DNA, 120 bp, Homo sapiens
  misc_feature: 1396 for SV(W|O) and mtDNA
tgttgtgagtgttaggaaaagggcatacaggactaggaagcagataaggaaaatgattatgagggcgtgatcatgaaaggtgataagctcttctatgataggggaagtagcgtcttgtag

SEQ ID NO: 58679 - DNA, 120 bp, Homo sapiens
  misc_feature: 1396 for SV(W|O) and mtDNA
tggcatcactatactactaacagaccgcaacctcaacaccaccttcttcgaccccgccggaggaggagaccccattctataccaacacctattctgatttttcggtcaccctgaagttta

SEQ ID NO: 58680 - DNA, 120 bp, Homo sapiens
  misc_feature: 1396 for SV(W|O) and mtDNA
tgcgctgcatgtgccattaagatatataggatttagcctataatttaactttgacaaagttatgaaatggtttttctaatacctttttgaaaaagtcatggaggccatggggttggcttg

SEQ ID NO: 58681 - DNA, 120 bp, Homo sapiens
  misc_feature: 1396 for SV(W|O) and mtDNA
ataattatgcctcatagggatagtacaaggaaggggtaggctatgtgttttgtcagggggttgagaatgagtgtgaggcgtattataccatagccgcctagttttaagagtactgcggca

SEQ ID NO: 58682 - DNA, 120 bp, Homo sapiens
  misc_feature: 1396 for SV(W|O) and mtDNA
cccgaatgatatttcctattcgcctacacaattctccgatccgtccctaacaaactaggaggcgtccttgccctattactatccatcctcatcctagcaataatccccatcctccatata

SEQ ID NO: 58683 - DNA, 120 bp, Homo sapiens
  misc_feature: 1396 for SV(W|O) and mtDNA
tagagggtgaactcactggaacggggatgcttgcatgtgtaatcttactaagagctaatagaaaggctaggaccaaacctatttgtttatggggtgatgtgagcccgtctaaacattttc

SEQ ID NO: 58684 - DNA, 120 bp, Homo sapiens
  misc_feature: 1396 for SV(W|O) and mtDNA
cgtaaagacgttaggtcaaggtgtagcccatgaggtggcaagaaatgggctacattttctaccccagaaaactacgatagcccttatgaaacttaagggtcgaaggtggatttagcagta

SEQ ID NO: 58685 - DNA, 120 bp, Homo sapiens
  misc_feature: 1396 for SV(W|O) and mtDNA
gggaagtatgtaggagttgaagattagtccgccgtagtcggtgtactcgtaggttcagtaccattggtggccaattgatttgatggtaagggagggatcgttgacctcgtctgttatgta

SEQ ID NO: 58686 - DNA, 120 bp, Homo sapiens
  misc_feature: 1396 for SV(W|O) and mtDNA
acacctatcccccattctcctcctatccctcaaccccgacatcattaccgggttttcctcttgtaaatatagtttaaccaaaacatcagattgtgaatctgacaacagaggcttacgacc

SEQ ID NO: 58687 - DNA, 120 bp, Homo sapiens
  misc_feature: 1396 for SV(W|O) and mtDNA
gaagcattggactgtaaatctaaagacaggggttaggcctctttttaccagctccgaggtgattttcatattgaattgcaaattcgaagaagcagcttcaaacctgccggggcttctccc

SEQ ID NO: 58688 - DNA, 120 bp, Homo sapiens
  misc_feature: 1396 for SV(W|O) and mtDNA
acaaacagacctaaaatcgctcattgcatactcttcaatcagccacatagccctcgtagtaacagccattctcatccaaaccccctgaagcttcaccggcgcagtcattctcataatcgc

SEQ ID NO: 58689 - DNA, 120 bp, Homo sapiens
  misc_feature: 1396 for SV(W|O) and mtDNA
gcccagctcggctcgaataaggaggcttagagctgtgcctaggactccagctcatgcgccgaataataggtatagtgttccaatgtctttgtggtttgtagagaatagtcaacggtcggc

SEQ ID NO: 58690 - DNA, 120 bp, Homo sapiens
  misc_feature: 1396 for SV(W|O) and mtDNA
ctggggttagtatagcttagttaaactttcgtttattgctaaaggttaatcactgctgtttcccgtgggggtgtggctaggctaagcgttttgagctgcattgctgcgtgcttgatgctt

SEQ ID NO: 58691 - DNA, 120 bp, Homo sapiens
  misc_feature: 1396 for SV(W|O) and mtDNA
ctagctgctggcatcactatactactaacagaccgcaacctcaacaccaccttcttcgaccccgccggaggaggagaccccattctataccaacacctattctgatttttcggtcaccct

SEQ ID NO: 58692 - DNA, 120 bp, Homo sapiens
  misc_feature: 1396 for SV(W|O) and mtDNA
cgctcattgcatactcttcaatcagccacatagccctcgtagtaacagccattctcatccaaaccccctgaagcttcaccggcgcagtcattctcataatcgcccacgggcttacatcct

SEQ ID NO: 58693 - DNA, 120 bp, Homo sapiens
  misc_feature: 1396 for SV(W|O) and mtDNA
acttcgccttaattttaataatcaacaccctcctagccttactactaataattattacattttgactaccacaactcaacggctacatagaaaaatccaccccttacgagtgcggcttcg

SEQ ID NO: 58694 - DNA, 120 bp, Homo sapiens
  misc_feature: 1396 for SV(W|O) and mtDNA
cctggggttagtatagcttagttaaactttcgtttattgctaaaggttaatcactgctgtttcccgtgggggtgtggctaggctaagcgttttgagctgcattgctgcgtgcttgatgct

SEQ ID NO: 58695 - DNA, 120 bp, Homo sapiens
  misc_feature: 1396 for SV(W|O) and mtDNA
ccgaggtcgccccaaccgaaatttttaatgcaggtttggtagtttaggacctgtgggtttgttaggtactgtttgcattaataaattaaagctccatagggtcttctcgtcttgctgtgt

SEQ ID NO: 58696 - DNA, 120 bp, Homo sapiens
  misc_feature: 1396 for SV(W|O) and mtDNA
ccactattaacctactgggagaactctctgtgctagtaaccacgttctcctgatcaaatatcactctcctacttacaggactcaacatactagtcacagccctatactccctctacatat

SEQ ID NO: 58697 - DNA, 120 bp, Homo sapiens
  misc_feature: 1396 for SV(W|O) and mtDNA
agaaaccgtctgaactatcctgcccgccatcatcctagtcctcatcgccctcccatccctacgcatcctttacataacagacgaggtcaacgatccctcccttaccatcaaatcaattgg

SEQ ID NO: 58698 - DNA, 120 bp, Homo sapiens
  misc_feature: 1396 for SV(W|O) and mtDNA
actttcgtagtctattttgtgtcaactggagttttttacaactcaggtgagttttagctttattggggagggggtgatctaaaacactctttacgccggcttctattgacttgggttaat

SEQ ID NO: 58699 - DNA, 120 bp, Homo sapiens
  misc_feature: 1395 for SV(W|O) and mtDNA
tttcgtagtctattttgtgtcaactggagttttttacaactcaggtgagttttagctttattggggagggggtgatctaaaacactctttacgccggcttctattgacttgggttaatcg

SEQ ID NO: 58700 - DNA, 120 bp, Homo sapiens
  misc_feature: 1395 for SV(W|O) and mtDNA
ttataggctttcgctctaagattaaaaatgccctagcccacttcttaccacaaggcacacctacaccccttatccccatactagttattatcgaaaccatcagcctactcattcaaccaa

SEQ ID NO: 58701 - DNA, 120 bp, Homo sapiens
  misc_feature: 1395 for SV(W|O) and mtDNA
ttgaagattagtccgccgtagtcggtgtactcgtaggttcagtaccattggtggccaattgatttgatggtaagggagggatcgttgacctcgtctgttatgtaaaggatgcgtagggat

SEQ ID NO: 58702 - DNA, 120 bp, Homo sapiens
  misc_feature: 1395 for SV(W|O) and mtDNA
ttcgatgatgtggtctttggagtagaaacctgtgaggaaaggtattcctgctaatgctaggctgccaatggtgagggaggttgaagtgagaggtatggttttgagtagtcctcctatttt

SEQ ID NO: 58703 - DNA, 120 bp, Homo sapiens
  misc_feature: 1395 for SV(W|O) and mtDNA
aataagggggtttaagctcctattatttactctatcaaagtaactcttttatcagacatatttcttaggtttgagggggaatgctggagattgtaatgggtatggagacatatcatataa

SEQ ID NO: 58704 - DNA, 120 bp, Homo sapiens
  misc_feature: 1395 for SV(W|O) and mtDNA
taaccggctttttgcccaaatgggccattatcgaagaattcacaaaaaacaatagcctcatcatccccaccatcatagccaccatcaccctccttaacctctacttctacctacgcctaa

SEQ ID NO: 58705 - DNA, 120 bp, Homo sapiens
  misc_feature: 1395 for SV(W|O) and mtDNA
tggtcctagcctttctattagctcttagtaagattacacatgcaagcatccccgttccagtgagttcaccctctaaatcaccacgatcaaaagggacaagcatcaagcacgcagcaatgc

SEQ ID NO: 58706 - DNA, 120 bp, Homo sapiens
  misc_feature: 1395 for SV(W|O) and mtDNA
atgaacaagatattcgaaaaataggaggactactcaaaaccatacctctcacttcaacctccctcaccattggcagcctagcattagcaggaatacctttcctcacaggtttctactcca

SEQ ID NO: 58707 - DNA, 120 bp, Homo sapiens
  misc_feature: 1395 for SV(W|O) and mtDNA
tggaacggggatgcttgcatgtgtaatcttactaagagctaatagaaaggctaggaccaaacctatttgtttatggggtgatgtgagcccgtctaaacattttcagtgtattgctttgag

SEQ ID NO: 58708 - DNA, 120 bp, Homo sapiens
  misc_feature: 1395 for SV(W|O) and mtDNA
catactcctcaattacccacataggatgaataatagcagttctaccgtacaaccctaacataaccattcttaatttaactatttatattatcctaactactaccgcattcctactactca

SEQ ID NO: 58709 - DNA, 120 bp, Homo sapiens
  misc_feature: 1395 for SV(W|O) and mtDNA
tgaggactaggatgatggcgggcaggatagttcagacggtttctatttcctgagcgtctgagatgttagtattagttagttttgttgtgagtgttaggaaaagggcatacaggactagga

SEQ ID NO: 58710 - DNA, 120 bp, Homo sapiens
  misc_feature: 1395 for SV(W|O) and mtDNA
tattcgagccgagctgggccagccaggcaaccttctaggtaacgaccacatctacaacgttatcgtcacagcccatgcatttgtaataatcttcttcatagtaatacccatcataatcgg

SEQ ID NO: 58711 - DNA, 120 bp, Homo sapiens
  misc_feature: 1395 for SV(W|O) and mtDNA
tataattatgcctcatagggatagtacaaggaaggggtaggctatgtgttttgtcagggggttgagaatgagtgtgaggcgtattataccatagccgcctagttttaagagtactgcggc

SEQ ID NO: 58712 - DNA, 120 bp, Homo sapiens
  misc_feature: 1395 for SV(W|O) and mtDNA
gtaggaattatatccttcttgctcatcagttgatgatacgcccgagcagatgccaacacagcagccattcaagcaatcctatacaaccgtatcggcgatatcggtttcatcctcgcctta

SEQ ID NO: 58713 - DNA, 120 bp, Homo sapiens
  misc_feature: 1395 for SV(W|O) and mtDNA
gtcttagctattgtgtgttcagatatgttaaagccactttcgtagtctattttgtgtcaactggagttttttacaactcaggtgagttttagctttattggggagggggtgatctaaaac

SEQ ID NO: 58714 - DNA, 120 bp, Homo sapiens
  misc_feature: 1395 for SV(W|O) and mtDNA
gtgtactcgtaggttcagtaccattggtggccaattgatttgatggtaagggagggatcgttgacctcgtctgttatgtaaaggatgcgtagggatgggagggcgatgaggactaggatg

SEQ ID NO: 58715 - DNA, 120 bp, Homo sapiens
  misc_feature: 1395 for SV(W|O) and mtDNA
ctgcccagtgacacatgtttaacggccgcggtaccctaaccgtgcaaaggtagcataatcacttgttccttaaatagggacctgtatgaatggctccacgagggttcagctgtctcttac

SEQ ID NO: 58716 - DNA, 120 bp, Homo sapiens
  misc_feature: 1395 for SV(W|O) and mtDNA
gggtacaatgaggagtaggaggttggccatgggtatgttgttaagaagaggaattgaacctctgactgtaaagttttaagttttatgcgattaccgggctctgccatcttaacaaaccct

SEQ ID NO: 58717 - DNA, 120 bp, Homo sapiens
  misc_feature: 1395 for SV(W|O) and mtDNA
caatatcaaccattaaccttccctctacacttatcatcttcacaattctaattctactgactatcctagaaatcgctgtcgccttaatccaagcctacgttttcacacttctagtaagcc

SEQ ID NO: 58718 - DNA, 120 bp, Homo sapiens
  misc_feature: 1395 for SV(W|O) and mtDNA
atagaaaaatccaccccttacgagtgcggcttcgaccctatatcccccgcccgcgtccctttctccataaaattcttcttagtagctattaccttcttattatttgatctagaaattgcc

SEQ ID NO: 58719 - DNA, 120 bp, Homo sapiens
  misc_feature: 1395 for SV(W|O) and mtDNA
attaattaaccactcattcatcgacctccccaccccatccaacatctccacatgatgaaacttcggctcactccttggcgcctgcctgattctccaaatcaccacaggactattcctagc

SEQ ID NO: 58720 - DNA, 120 bp, Homo sapiens
  misc_feature: 1395 for SV(W|O) and mtDNA
ctgctccgaggtcgccccaaccgaaatttttaatgcaggtttggtagtttaggacctgtgggtttgttaggtactgtttgcattaataaattaaagctccatagggtcttctcgtcttgc

SEQ ID NO: 58721 - DNA, 120 bp, Homo sapiens
  misc_feature: 1395 for SV(W|O) and mtDNA
gaaagcgttcaagctcaacacccactacctaaaaaatcccaaacatataactgaactcctcatacccaattggaccaatctatcaccctatagaagaactaatgttagtataagtaacat

SEQ ID NO: 58722 - DNA, 120 bp, Homo sapiens
  misc_feature: 1395 for SV(W|O) and mtDNA
ctgttactacgagggctatgtggctgattgaagagtatgcaatgagcgattttaggtctgtttgtcgtaggcagatggagcttgttataattatgcctcatagggatagtacaaggaagg

SEQ ID NO: 58723 - DNA, 120 bp, Homo sapiens
  misc_feature: 1395 for SV(W|O) and mtDNA
ctcttcacgggcaggtcaatttcactggttaaaagtaagagacagctgaaccctcgtggagccattcatacaggtccctatttaaggaacaagtgattatgctacctttgcacggttagg

SEQ ID NO: 58724 - DNA, 120 bp, Homo sapiens
  misc_feature: 1395 for SV(W|O) and mtDNA
ctacctgcacgacaacacataatgacccaccaatcacatgcctatcatatagtaaaacccagcccatgacccctaacaggggccctctcagccctcctaatgacctccggcctagccatg

SEQ ID NO: 58725 - DNA, 120 bp, Homo sapiens
  misc_feature: 1395 for SV(W|O) and mtDNA
aagaagcaggccggatgtcagaggggtgccttgggtaacctctgggactcagaagtgaaagggggctattcctagttttattgctatagccattatgattattaatgatgagtactgatt

SEQ ID NO: 58726 - DNA, 120 bp, Homo sapiens
  misc_feature: 1394 for SV(W|O) and mtDNA
ttttaagttttatgcgattaccgggctctgccatcttaacaaaccctgttcttgggtgggtgtgggtataatactaagttgagatgatatcatttacgggggaaggcgctttgtgaagta

SEQ ID NO: 58727 - DNA, 120 bp, Homo sapiens
  misc_feature: 1394 for SV(W|O) and mtDNA
tttgagtagtcctcctatttttcgaatatcttgttcattgttaaggttgtggatgatggacccggagcacataaatagtatggctttgaagaaggcgtgggtgcagatgtgcaggaatgc

SEQ ID NO: 58728 - DNA, 120 bp, Homo sapiens
  misc_feature: 1394 for SV(W|O) and mtDNA
tttcgtacagggaggaatttgaagtagatagaaaccgacctggattactccggtctgaactcagatcacgtaggactttaatcgttgaacaaacgaacctttaatagcggctgcaccatc

SEQ ID NO: 58729 - DNA, 120 bp, Homo sapiens
  misc_feature: 1394 for SV(W|O) and mtDNA
ttattcgagccgagctgggccagccaggcaaccttctaggtaacgaccacatctacaacgttatcgtcacagcccatgcatttgtaataatcttcttcatagtaatacccatcataatcg

SEQ ID NO: 58730 - DNA, 120 bp, Homo sapiens
  misc_feature: 1394 for SV(W|O) and mtDNA
ttagtagctattaccttcttattatttgatctagaaattgccctccttttacccctaccatgagccctacaaacaactaacctgccactaatagttatgtcatccctcttattaatcatc

SEQ ID NO: 58731 - DNA, 120 bp, Homo sapiens
  misc_feature: 1394 for SV(W|O) and mtDNA
cgttctcctgatcaaatatcactctcctacttacaggactcaacatactagtcacagccctatactccctctacatatttaccacaacacaatggggctcactcacccaccacattaaca

SEQ ID NO: 58732 - DNA, 120 bp, Homo sapiens
  misc_feature: 1394 for SV(W|O) and mtDNA
tgggttctgctccgaggtcgccccaaccgaaatttttaatgcaggtttggtagtttaggacctgtgggtttgttaggtactgtttgcattaataaattaaagctccatagggtcttctcg

SEQ ID NO: 58733 - DNA, 120 bp, Homo sapiens
  misc_feature: 1394 for SV(W|O) and mtDNA
tgctggcatcactatactactaacagaccgcaacctcaacaccaccttcttcgaccccgccggaggaggagaccccattctataccaacacctattctgatttttcggtcaccctgaagt

SEQ ID NO: 58734 - DNA, 120 bp, Homo sapiens
  misc_feature: 1394 for SV(W|O) and mtDNA
ccacgtaaagacgttaggtcaaggtgtagcccatgaggtggcaagaaatgggctacattttctaccccagaaaactacgatagcccttatgaaacttaagggtcgaaggtggatttagca

SEQ ID NO: 58735 - DNA, 120 bp, Homo sapiens
  misc_feature: 1394 for SV(W|O) and mtDNA
ctggaacggggatgcttgcatgtgtaatcttactaagagctaatagaaaggctaggaccaaacctatttgtttatggggtgatgtgagcccgtctaaacattttcagtgtattgctttga

SEQ ID NO: 58736 - DNA, 120 bp, Homo sapiens
  misc_feature: 1394 for SV(W|O) and mtDNA
atcaaccattaaccttccctctacacttatcatcttcacaattctaattctactgactatcctagaaatcgctgtcgccttaatccaagcctacgttttcacacttctagtaagcctcta

SEQ ID NO: 58737 - DNA, 120 bp, Homo sapiens
  misc_feature: 1394 for SV(W|O) and mtDNA
gtagtcggtgtactcgtaggttcagtaccattggtggccaattgatttgatggtaagggagggatcgttgacctcgtctgttatgtaaaggatgcgtagggatgggagggcgatgaggac

SEQ ID NO: 58738 - DNA, 120 bp, Homo sapiens
  misc_feature: 1394 for SV(W|O) and mtDNA
gtagcttacctcctcaaagcaatacactgaaaatgtttagacgggctcacatcaccccataaacaaataggtttggtcctagcctttctattagctcttagtaagattacacatgcaagc

SEQ ID NO: 58739 - DNA, 120 bp, Homo sapiens
  misc_feature: 1394 for SV(W|O) and mtDNA
gagcgggcgcagtgattataggctttcgctctaagattaaaaatgccctagcccacttcttaccacaaggcacacctacaccccttatccccatactagttattatcgaaaccatcagcc

SEQ ID NO: 58740 - DNA, 120 bp, Homo sapiens
  misc_feature: 1394 for SV(W|O) and mtDNA
ctttttcaaaaaggtattagaaaaaccatttcataactttgtcaaagttaaattataggctaaatcctatatatcttaatggcacatgcagcgcaagtaggtctacaagacgctacttcc

SEQ ID NO: 58741 - DNA, 120 bp, Homo sapiens
  misc_feature: 1394 for SV(W|O) and mtDNA
gctgttactacgagggctatgtggctgattgaagagtatgcaatgagcgattttaggtctgtttgtcgtaggcagatggagcttgttataattatgcctcatagggatagtacaaggaag

SEQ ID NO: 58742 - DNA, 120 bp, Homo sapiens
  misc_feature: 1394 for SV(W|O) and mtDNA
gcctctaatactggtgatgctagaggtgatgtttttggtaaacaggcggggtaagatttgccgagttccttttactttttttaacctttccttatgagcatgcctgtgttgggttgacag

SEQ ID NO: 58743 - DNA, 120 bp, Homo sapiens
  misc_feature: 1394 for SV(W|O) and mtDNA
gccgagctgggccagccaggcaaccttctaggtaacgaccacatctacaacgttatcgtcacagcccatgcatttgtaataatcttcttcatagtaatacccatcataatcggaggcttt

SEQ ID NO: 58744 - DNA, 120 bp, Homo sapiens
  misc_feature: 1394 for SV(W|O) and mtDNA
gccatcattctactatcaacattactaataagtggctcctttaacctctccacccttatcacaacacaagaacacctctgattactcctgccatcatgacccttggccataatatgattt

SEQ ID NO: 58745 - DNA, 120 bp, Homo sapiens
  misc_feature: 1394 for SV(W|O) and mtDNA
acccaaactgggattagataccccactatgcttagccctaaacctcaacagttaaatcaacaaaactgctcgccagaacactacgagccacagcttaaaactcaaaggacctggcggtgc

SEQ ID NO: 58746 - DNA, 120 bp, Homo sapiens
  misc_feature: 1394 for SV(W|O) and mtDNA
gattagtccgccgtagtcggtgtactcgtaggttcagtaccattggtggccaattgatttgatggtaagggagggatcgttgacctcgtctgttatgtaaaggatgcgtagggatgggag

SEQ ID NO: 58747 - DNA, 120 bp, Homo sapiens
  misc_feature: 1394 for SV(W|O) and mtDNA
gaagattagtccgccgtagtcggtgtactcgtaggttcagtaccattggtggccaattgatttgatggtaagggagggatcgttgacctcgtctgttatgtaaaggatgcgtagggatgg

SEQ ID NO: 58748 - DNA, 120 bp, Homo sapiens
  misc_feature: 1394 for SV(W|O) and mtDNA
acaatgaggagtaggaggttggccatgggtatgttgttaagaagaggaattgaacctctgactgtaaagttttaagttttatgcgattaccgggctctgccatcttaacaaaccctgttc

SEQ ID NO: 58749 - DNA, 120 bp, Homo sapiens
  misc_feature: 1394 for SV(W|O) and mtDNA
gaaatcacatggctaggccggaggtcattaggagggctgagagggcccctgttaggggtcatgggctgggttttactatatgataggcatgtgattggtgggtcattatgtgttgtcgtg

SEQ ID NO: 58750 - DNA, 120 bp, Homo sapiens
  misc_feature: 1394 for SV(W|O) and mtDNA
cgatgatgtggtctttggagtagaaacctgtgaggaaaggtattcctgctaatgctaggctgccaatggtgagggaggttgaagtgagaggtatggttttgagtagtcctcctatttttc

SEQ ID NO: 58751 - DNA, 120 bp, Homo sapiens
  misc_feature: 1394 for SV(W|O) and mtDNA
cttactttgtagccttcatcagggtttgctgaagatggcggtatataggctgagcaagaggtggtgaggttgatcggggtttatcgattacagaacaggctcctctagagggatatgaag

SEQ ID NO: 58752 - DNA, 120 bp, Homo sapiens
  misc_feature: 1394 for SV(W|O) and mtDNA
atgggcatgaaactgtggtttgctccacagatttcagagcattgaccgtagtatacccccggtcgtgtagcggtgaaagtggtttggtttagacgtccgggaattgcatctgtttttaag

SEQ ID NO: 58753 - DNA, 120 bp, Homo sapiens
  misc_feature: 1394 for SV(W|O) and mtDNA
ctctaatactggtgatgctagaggtgatgtttttggtaaacaggcggggtaagatttgccgagttccttttactttttttaacctttccttatgagcatgcctgtgttgggttgacagtg

SEQ ID NO: 58754 - DNA, 120 bp, Homo sapiens
  misc_feature: 1394 for SV(W|O) and mtDNA
actgagagtagagtgcttagttgaacagggccctgaagcgcgtacacaccgcccgtcaccctcctcaagtatacttcaaaggacatttaactaaaacccctacgcatttatatagaggag

SEQ ID NO: 58755 - DNA, 120 bp, Homo sapiens
  misc_feature: 1394 for SV(W|O) and mtDNA
ctagttttattgctatagccattatgattattaatgatgagtactgattggtagtattggttatggttcattgtccggagagtatattgttgaagaggatagctattagaaggattatgg

SEQ ID NO: 58756 - DNA, 120 bp, Homo sapiens
  misc_feature: 1394 for SV(W|O) and mtDNA
aattaattaaccactcattcatcgacctccccaccccatccaacatctccacatgatgaaacttcggctcactccttggcgcctgcctgattctccaaatcaccacaggactattcctag

SEQ ID NO: 58757 - DNA, 120 bp, Homo sapiens
  misc_feature: 1394 for SV(W|O) and mtDNA
acccacgtaaagacgttaggtcaaggtgtagcccatgaggtggcaagaaatgggctacattttctaccccagaaaactacgatagcccttatgaaacttaagggtcgaaggtggatttag

SEQ ID NO: 58758 - DNA, 120 bp, Homo sapiens
  misc_feature: 1394 for SV(W|O) and mtDNA
aagatggcagagcccggtaatcgcataaaacttaaaactttacagtcagaggttcaattcctcttcttaacaacatacccatggccaacctcctactcctcattgtacccattctaatcg

SEQ ID NO: 58759 - DNA, 120 bp, Homo sapiens
  misc_feature: 1394 for SV(W|O) and mtDNA
caccctagccatcattctactatcaacattactaataagtggctcctttaacctctccacccttatcacaacacaagaacacctctgattactcctgccatcatgacccttggccataat

SEQ ID NO: 58760 - DNA, 120 bp, Homo sapiens
  misc_feature: 1394 for SV(W|O) and mtDNA
atcactatactactaacagaccgcaacctcaacaccaccttcttcgaccccgccggaggaggagaccccattctataccaacacctattctgatttttcggtcaccctgaagtttatatt

SEQ ID NO: 58761 - DNA, 120 bp, Homo sapiens
  misc_feature: 1394 for SV(W|O) and mtDNA
aaagcacataccaaggccaccacacaccacctgtccaaaaaggccttcgatacgggataatcctatttattacctcagaagtttttttcttcgcaggatttttctgagccttttaccact

SEQ ID NO: 58762 - DNA, 120 bp, Homo sapiens
  misc_feature: 1393 for SV(W|O) and mtDNA
cgttcaagctcaacacccactacctaaaaaatcccaaacatataactgaactcctcatacccaattggaccaatctatcaccctatagaagaactaatgttagtataagtaacatgaaaa

SEQ ID NO: 58763 - DNA, 120 bp, Homo sapiens
  misc_feature: 1393 for SV(W|O) and mtDNA
aacaatagcctcatcatccccaccatcatagccaccatcaccctccttaacctctacttctacctacgcctaatctactccacctcaatcacactactccccatatctaacaacgtaaaa

SEQ ID NO: 58764 - DNA, 120 bp, Homo sapiens
  misc_feature: 1393 for SV(W|O) and mtDNA
tttacgggggaaggcgctttgtgaagtaggccttatttctcttgtcctttcgtacagggaggaatttgaagtagatagaaaccgacctggattactccggtctgaactcagatcacgtag

SEQ ID NO: 58765 - DNA, 120 bp, Homo sapiens
  misc_feature: 1393 for SV(W|O) and mtDNA
cactttcgtagtctattttgtgtcaactggagttttttacaactcaggtgagttttagctttattggggagggggtgatctaaaacactctttacgccggcttctattgacttgggttaa

SEQ ID NO: 58766 - DNA, 120 bp, Homo sapiens
  misc_feature: 1393 for SV(W|O) and mtDNA
taaccacgttctcctgatcaaatatcactctcctacttacaggactcaacatactagtcacagccctatactccctctacatatttaccacaacacaatggggctcactcacccaccaca

SEQ ID NO: 58767 - DNA, 120 bp, Homo sapiens
  misc_feature: 1393 for SV(W|O) and mtDNA
tgtagacctacttgcgctgcatgtgccattaagatatataggatttagcctataatttaactttgacaaagttatgaaatggtttttctaatacctttttgaaaaagtcatggaggccat

SEQ ID NO: 58768 - DNA, 120 bp, Homo sapiens
  misc_feature: 1393 for SV(W|O) and mtDNA
tggtttcgataataactagtatggggataaggggtgtaggtgtgccttgtggtaagaagtgggctagggcatttttaatcttagagcgaaagcctataatcactgcgcccgctcataagg

SEQ ID NO: 58769 - DNA, 120 bp, Homo sapiens
  misc_feature: 1393 for SV(W|O) and mtDNA
ctcattgcatactcttcaatcagccacatagccctcgtagtaacagccattctcatccaaaccccctgaagcttcaccggcgcagtcattctcataatcgcccacgggcttacatcctca

SEQ ID NO: 58770 - DNA, 120 bp, Homo sapiens
  misc_feature: 1393 for SV(W|O) and mtDNA
gtaagcgcaagtacccacgtaaagacgttaggtcaaggtgtagcccatgaggtggcaagaaatgggctacattttctaccccagaaaactacgatagcccttatgaaacttaagggtcga

SEQ ID NO: 58771 - DNA, 120 bp, Homo sapiens
  misc_feature: 1393 for SV(W|O) and mtDNA
gtatgtaggagttgaagattagtccgccgtagtcggtgtactcgtaggttcagtaccattggtggccaattgatttgatggtaagggagggatcgttgacctcgtctgttatgtaaagga

SEQ ID NO: 58772 - DNA, 120 bp, Homo sapiens
  misc_feature: 1393 for SV(W|O) and mtDNA
tcctcaaagcaatacactgaaaatgtttagacgggctcacatcaccccataaacaaataggtttggtcctagcctttctattagctcttagtaagattacacatgcaagcatccccgttc

SEQ ID NO: 58773 - DNA, 120 bp, Homo sapiens
  misc_feature: 1393 for SV(W|O) and mtDNA
gccacttattagtaatgttgatagtagaatgatggctagggtgacttcatatgagattgtttgggctactgctcgcagtgcgccgatcagggcgtagtttgagtttgatgctcaccctga

SEQ ID NO: 58774 - DNA, 120 bp, Homo sapiens
  misc_feature: 1393 for SV(W|O) and mtDNA
taatactggtgatgctagaggtgatgtttttggtaaacaggcggggtaagatttgccgagttccttttactttttttaacctttccttatgagcatgcctgtgttgggttgacagtgagg

SEQ ID NO: 58775 - DNA, 120 bp, Homo sapiens
  misc_feature: 1393 for SV(W|O) and mtDNA
taaatttgcccacagaaccctctaaatccccttgtaaatttaactgttagtccaaagaggaacagctctttggacactaggaaaaaaccttgtagagagagtaaaaaatttaacacccat

SEQ ID NO: 58776 - DNA, 120 bp, Homo sapiens
  misc_feature: 1393 for SV(W|O) and mtDNA
cctcgctaacctcgccttaccccccactattaacctactgggagaactctctgtgctagtaaccacgttctcctgatcaaatatcactctcctacttacaggactcaacatactagtcac

SEQ ID NO: 58777 - DNA, 120 bp, Homo sapiens
  misc_feature: 1393 for SV(W|O) and mtDNA
gtctgttatgtaaaggatgcgtagggatgggagggcgatgaggactaggatgatggcgggcaggatagttcagacggtttctatttcctgagcgtctgagatgttagtattagttagttt

SEQ ID NO: 58778 - DNA, 120 bp, Homo sapiens
  misc_feature: 1393 for SV(W|O) and mtDNA
gtaagatttgccgagttccttttactttttttaacctttccttatgagcatgcctgtgttgggttgacagtgagggtaataatgacttgttggttgattgtagatattgggctgttaatt

SEQ ID NO: 58779 - DNA, 120 bp, Homo sapiens
  misc_feature: 1393 for SV(W|O) and mtDNA
ggtttcgataataactagtatggggataaggggtgtaggtgtgccttgtggtaagaagtgggctagggcatttttaatcttagagcgaaagcctataatcactgcgcccgctcataaggg

SEQ ID NO: 58780 - DNA, 120 bp, Homo sapiens
  misc_feature: 1393 for SV(W|O) and mtDNA
caaccattaaccttccctctacacttatcatcttcacaattctaattctactgactatcctagaaatcgctgtcgccttaatccaagcctacgttttcacacttctagtaagcctctacc

SEQ ID NO: 58781 - DNA, 120 bp, Homo sapiens
  misc_feature: 1393 for SV(W|O) and mtDNA
gcaatatcaaccattaaccttccctctacacttatcatcttcacaattctaattctactgactatcctagaaatcgctgtcgccttaatccaagcctacgttttcacacttctagtaagc

SEQ ID NO: 58782 - DNA, 120 bp, Homo sapiens
  misc_feature: 1393 for SV(W|O) and mtDNA
gctggcatcactatactactaacagaccgcaacctcaacaccaccttcttcgaccccgccggaggaggagaccccattctataccaacacctattctgatttttcggtcaccctgaagtt

SEQ ID NO: 58783 - DNA, 120 bp, Homo sapiens
  misc_feature: 1393 for SV(W|O) and mtDNA
gagtagagtgcttagttgaacagggccctgaagcgcgtacacaccgcccgtcaccctcctcaagtatacttcaaaggacatttaactaaaacccctacgcatttatatagaggagacaag

SEQ ID NO: 58784 - DNA, 120 bp, Homo sapiens
  misc_feature: 1393 for SV(W|O) and mtDNA
caaacaatgttcaaccagtaactactactaatcaacgcccataatcatacaaagcccccgcaccaataggatcctcccgaatcaaccctgacccctctccttcataaattattcagcttc

SEQ ID NO: 58785 - DNA, 120 bp, Homo sapiens
  misc_feature: 1393 for SV(W|O) and mtDNA
gaaaacaccctcatgttcatacacctatcccccattctcctcctatccctcaaccccgacatcattaccgggttttcctcttgtaaatatagtttaaccaaaacatcagattgtgaatct

SEQ ID NO: 58786 - DNA, 120 bp, Homo sapiens
  misc_feature: 1393 for SV(W|O) and mtDNA
ctcctgatcaaatatcactctcctacttacaggactcaacatactagtcacagccctatactccctctacatatttaccacaacacaatggggctcactcacccaccacattaacaacat

SEQ ID NO: 58787 - DNA, 120 bp, Homo sapiens
  misc_feature: 1393 for SV(W|O) and mtDNA
agtcctacgtgatctgagttcagaccggagtaatccaggtcggtttctatctacttcaaattcctccctgtacgaaaggacaagagaaataaggcctacttcacaaagcgccttcccccg

SEQ ID NO: 58788 - DNA, 120 bp, Homo sapiens
  misc_feature: 1393 for SV(W|O) and mtDNA
aaacaccctcaccactacaatcttcctaggaacaacatatgacgcactctcccctgaactctacacaacatattttgtcaccaagaccctacttctaacctccctgttcttatgaattcg

SEQ ID NO: 58789 - DNA, 120 bp, Homo sapiens
  misc_feature: 1393 for SV(W|O) and mtDNA
ccgaatgatatttcctattcgcctacacaattctccgatccgtccctaacaaactaggaggcgtccttgccctattactatccatcctcatcctagcaataatccccatcctccatatat

SEQ ID NO: 58790 - DNA, 120 bp, Homo sapiens
  misc_feature: 1393 for SV(W|O) and mtDNA
aaaggtattcctgctaatgctaggctgccaatggtgagggaggttgaagtgagaggtatggttttgagtagtcctcctatttttcgaatatcttgttcattgttaaggttgtggatgatg

SEQ ID NO: 58791 - DNA, 120 bp, Homo sapiens
  misc_feature: 1393 for SV(W|O) and mtDNA
actatgggtgttaaattttttactctctctacaaggttttttcctagtgtccaaagagctgttcctctttggactaacagttaaatttacaaggggatttagagggttctgtgggcaaat

SEQ ID NO: 58792 - DNA, 120 bp, Homo sapiens
  misc_feature: 1393 for SV(W|O) and mtDNA
atttcacggaggatggtggtcaagggacccctatctgaggggggtcatccatggggacgagaagggatttgactgtaatgtgctatgtacggtaaatggctttatgtactatgtactgtt

SEQ ID NO: 58793 - DNA, 120 bp, Homo sapiens
  misc_feature: 1392 for SV(W|O) and mtDNA
atggcagagcccggtaatcgcataaaacttaaaactttacagtcagaggttcaattcctcttcttaacaacatacccatggccaacctcctactcctcattgtacccattctaatcgcaa

SEQ ID NO: 58794 - DNA, 120 bp, Homo sapiens
  misc_feature: 1392 for SV(W|O) and mtDNA
gaggactaggatgatggcgggcaggatagttcagacggtttctatttcctgagcgtctgagatgttagtattagttagttttgttgtgagtgttaggaaaagggcatacaggactaggaa

SEQ ID NO: 58795 - DNA, 120 bp, Homo sapiens
  misc_feature: 1392 for SV(W|O) and mtDNA
cgctgcatgtgccattaagatatataggatttagcctataatttaactttgacaaagttatgaaatggtttttctaatacctttttgaaaaagtcatggaggccatggggttggcttgaa

SEQ ID NO: 58796 - DNA, 120 bp, Homo sapiens
  misc_feature: 1392 for SV(W|O) and mtDNA
ttcaactacaagaacaccaatgaccccaatacgcaaaactaaccccctaataaaattaattaaccactcattcatcgacctccccaccccatccaacatctccacatgatgaaacttcgg

SEQ ID NO: 58797 - DNA, 120 bp, Homo sapiens
  misc_feature: 1392 for SV(W|O) and mtDNA
atatagtaaaacccagcccatgacccctaacaggggccctctcagccctcctaatgacctccggcctagccatgtgatttcacttccactccataacgctcctcatactaggcctactaa

SEQ ID NO: 58798 - DNA, 120 bp, Homo sapiens
  misc_feature: 1392 for SV(W|O) and mtDNA
ttactacgagggctatgtggctgattgaagagtatgcaatgagcgattttaggtctgtttgtcgtaggcagatggagcttgttataattatgcctcatagggatagtacaaggaaggggt

SEQ ID NO: 58799 - DNA, 120 bp, Homo sapiens
  misc_feature: 1392 for SV(W|O) and mtDNA
tgcatactcttcaatcagccacatagccctcgtagtaacagccattctcatccaaaccccctgaagcttcaccggcgcagtcattctcataatcgcccacgggcttacatcctcattact

SEQ ID NO: 58800 - DNA, 120 bp, Homo sapiens
  misc_feature: 1392 for SV(W|O) and mtDNA
tcttagcatactcctcaattacccacataggatgaataatagcagttctaccgtacaaccctaacataaccattcttaatttaactatttatattatcctaactactaccgcattcctac

SEQ ID NO: 58801 - DNA, 120 bp, Homo sapiens
  misc_feature: 1392 for SV(W|O) and mtDNA
tctaggaataatgggggaagtatgtaggagttgaagattagtccgccgtagtcggtgtactcgtaggttcagtaccattggtggccaattgatttgatggtaagggagggatcgttgacc

SEQ ID NO: 58802 - DNA, 120 bp, Homo sapiens
  misc_feature: 1392 for SV(W|O) and mtDNA
tcccggacgtctaaaccaaaccactttcaccgctacacgaccgggggtatactacggtcaatgctctgaaatctgtggagcaaaccacagtttcatgcccatcgtcctagaattaattcc

SEQ ID NO: 58803 - DNA, 120 bp, Homo sapiens
  misc_feature: 1392 for SV(W|O) and mtDNA
tcaactacaagaacaccaatgaccccaatacgcaaaactaaccccctaataaaattaattaaccactcattcatcgacctccccaccccatccaacatctccacatgatgaaacttcggc

SEQ ID NO: 58804 - DNA, 120 bp, Homo sapiens
  misc_feature: 1392 for SV(W|O) and mtDNA
tattcctgctaatgctaggctgccaatggtgagggaggttgaagtgagaggtatggttttgagtagtcctcctatttttcgaatatcttgttcattgttaaggttgtggatgatggaccc

SEQ ID NO: 58805 - DNA, 120 bp, Homo sapiens
  misc_feature: 1392 for SV(W|O) and mtDNA
accctagccatcattctactatcaacattactaataagtggctcctttaacctctccacccttatcacaacacaagaacacctctgattactcctgccatcatgacccttggccataata

SEQ ID NO: 58806 - DNA, 120 bp, Homo sapiens
  misc_feature: 1392 for SV(W|O) and mtDNA
acagacctaaaatcgctcattgcatactcttcaatcagccacatagccctcgtagtaacagccattctcatccaaaccccctgaagcttcaccggcgcagtcattctcataatcgcccac

SEQ ID NO: 58807 - DNA, 120 bp, Homo sapiens
  misc_feature: 1392 for SV(W|O) and mtDNA
gtgcctctaatactggtgatgctagaggtgatgtttttggtaaacaggcggggtaagatttgccgagttccttttactttttttaacctttccttatgagcatgcctgtgttgggttgac

SEQ ID NO: 58808 - DNA, 120 bp, Homo sapiens
  misc_feature: 1392 for SV(W|O) and mtDNA
gcctatactttatttgggtaaatggtttggctaaggttgtctggtagtaaggtggagtgggtttggggctaggtttagctcagagcggtcaagttaagttgaaatctcctaagtgtaagt

SEQ ID NO: 58809 - DNA, 120 bp, Homo sapiens
  misc_feature: 1392 for SV(W|O) and mtDNA
cgaatgatatttcctattcgcctacacaattctccgatccgtccctaacaaactaggaggcgtccttgccctattactatccatcctcatcctagcaataatccccatcctccatatatc

SEQ ID NO: 58810 - DNA, 120 bp, Homo sapiens
  misc_feature: 1392 for SV(W|O) and mtDNA
ctgctggcatcactatactactaacagaccgcaacctcaacaccaccttcttcgaccccgccggaggaggagaccccattctataccaacacctattctgatttttcggtcaccctgaag

SEQ ID NO: 58811 - DNA, 120 bp, Homo sapiens
  misc_feature: 1392 for SV(W|O) and mtDNA
ctaatactggtgatgctagaggtgatgtttttggtaaacaggcggggtaagatttgccgagttccttttactttttttaacctttccttatgagcatgcctgtgttgggttgacagtgag

SEQ ID NO: 58812 - DNA, 120 bp, Homo sapiens
  misc_feature: 1392 for SV(W|O) and mtDNA
aagcccatgtcgaagcccccatcgctgggtcaatagtacttgccgcagtactcttaaaactaggcggctatggtataatacgcctcacactcattctcaaccccctgacaaaacacatag

SEQ ID NO: 58813 - DNA, 120 bp, Homo sapiens
  misc_feature: 1392 for SV(W|O) and mtDNA
actacgagggctatgtggctgattgaagagtatgcaatgagcgattttaggtctgtttgtcgtaggcagatggagcttgttataattatgcctcatagggatagtacaaggaaggggtag

SEQ ID NO: 58814 - DNA, 120 bp, Homo sapiens
  misc_feature: 1392 for SV(W|O) and mtDNA
aaataggtttggtcctagcctttctattagctcttagtaagattacacatgcaagcatccccgttccagtgagttcaccctctaaatcaccacgatcaaaagggacaagcatcaagcacg

SEQ ID NO: 58815 - DNA, 120 bp, Homo sapiens
  misc_feature: 1392 for SV(W|O) and mtDNA
aatctaaagacaggggttaggcctctttttaccagctccgaggtgattttcatattgaattgcaaattcgaagaagcagcttcaaacctgccggggcttctcccgccttttttcccggcg

SEQ ID NO: 58816 - DNA, 120 bp, Homo sapiens
  misc_feature: 1392 for SV(W|O) and mtDNA
ccggagagtatattgttgaagaggatagctattagaaggattatggatgcggttgcttgcgtgaggaaatacttgatggcagcttctgtggaacgagggtttatttttttggttagaact

SEQ ID NO: 58817 - DNA, 120 bp, Homo sapiens
  misc_feature: 1392 for SV(W|O) and mtDNA
catcttaacaaaccctgttcttgggtgggtgtgggtataatactaagttgagatgatatcatttacgggggaaggcgctttgtgaagtaggccttatttctcttgtcctttcgtacaggg

SEQ ID NO: 58818 - DNA, 120 bp, Homo sapiens
  misc_feature: 1392 for SV(W|O) and mtDNA
attcgcctacacaattctccgatccgtccctaacaaactaggaggcgtccttgccctattactatccatcctcatcctagcaataatccccatcctccatatatccaaacaacaaagcat

SEQ ID NO: 58819 - DNA, 120 bp, Homo sapiens
  misc_feature: 1392 for SV(W|O) and mtDNA
aacaatgttcaaccagtaactactactaatcaacgcccataatcatacaaagcccccgcaccaataggatcctcccgaatcaaccctgacccctctccttcataaattattcagcttcct

SEQ ID NO: 58820 - DNA, 120 bp, Homo sapiens
  misc_feature: 1392 for SV(W|O) and mtDNA
aaacttcgccttaattttaataatcaacaccctcctagccttactactaataattattacattttgactaccacaactcaacggctacatagaaaaatccaccccttacgagtgcggctt

SEQ ID NO: 58821 - DNA, 120 bp, Homo sapiens
  misc_feature: 1391 for SV(W|O) and mtDNA
tttagagggtgaactcactggaacggggatgcttgcatgtgtaatcttactaagagctaatagaaaggctaggaccaaacctatttgtttatggggtgatgtgagcccgtctaaacattt

SEQ ID NO: 58822 - DNA, 120 bp, Homo sapiens
  misc_feature: 1391 for SV(W|O) and mtDNA
agtgacacatgtttaacggccgcggtaccctaaccgtgcaaaggtagcataatcacttgttccttaaatagggacctgtatgaatggctccacgagggttcagctgtctcttacttttaa

SEQ ID NO: 58823 - DNA, 120 bp, Homo sapiens
  misc_feature: 1391 for SV(W|O) and mtDNA
aatcacatggctaggccggaggtcattaggagggctgagagggcccctgttaggggtcatgggctgggttttactatatgataggcatgtgattggtgggtcattatgtgttgtcgtgca

SEQ ID NO: 58824 - DNA, 120 bp, Homo sapiens
  misc_feature: 1391 for SV(W|O) and mtDNA
tctaatactggtgatgctagaggtgatgtttttggtaaacaggcggggtaagatttgccgagttccttttactttttttaacctttccttatgagcatgcctgtgttgggttgacagtga

SEQ ID NO: 58825 - DNA, 120 bp, Homo sapiens
  misc_feature: 1391 for SV(W|O) and mtDNA
gcgctgcatgtgccattaagatatataggatttagcctataatttaactttgacaaagttatgaaatggtttttctaatacctttttgaaaaagtcatggaggccatggggttggcttga

SEQ ID NO: 58826 - DNA, 120 bp, Homo sapiens
  misc_feature: 1391 for SV(W|O) and mtDNA
tagtcggtgtactcgtaggttcagtaccattggtggccaattgatttgatggtaagggagggatcgttgacctcgtctgttatgtaaaggatgcgtagggatgggagggcgatgaggact

SEQ ID NO: 58827 - DNA, 120 bp, Homo sapiens
  misc_feature: 1391 for SV(W|O) and mtDNA
gcgggcgcagtgattataggctttcgctctaagattaaaaatgccctagcccacttcttaccacaaggcacacctacaccccttatccccatactagttattatcgaaaccatcagccta

SEQ ID NO: 58828 - DNA, 120 bp, Homo sapiens
  misc_feature: 1391 for SV(W|O) and mtDNA
tagaaaccgtctgaactatcctgcccgccatcatcctagtcctcatcgccctcccatccctacgcatcctttacataacagacgaggtcaacgatccctcccttaccatcaaatcaattg

SEQ ID NO: 58829 - DNA, 120 bp, Homo sapiens
  misc_feature: 1391 for SV(W|O) and mtDNA
tactcttcaatcagccacatagccctcgtagtaacagccattctcatccaaaccccctgaagcttcaccggcgcagtcattctcataatcgcccacgggcttacatcctcattactattc

SEQ ID NO: 58830 - DNA, 120 bp, Homo sapiens
  misc_feature: 1391 for SV(W|O) and mtDNA
gtatagaatggggtctcctcctccggcggggtcgaagaaggtggtgttgaggttgcggtctgttagtagtatagtgatgccagcagctaggactgggagagataggagaagtaggactgc

SEQ ID NO: 58831 - DNA, 120 bp, Homo sapiens
  misc_feature: 1391 for SV(W|O) and mtDNA
gtaggtagaagtagaggttaaggagggtgatggtggctatgatggtggggatgatgaggctattgttttttgtgaattcttcgataatggcccatttgggcaaaaagccggttagcgggg

SEQ ID NO: 58832 - DNA, 120 bp, Homo sapiens
  misc_feature: 1391 for SV(W|O) and mtDNA
gtagctattaccttcttattatttgatctagaaattgccctccttttacccctaccatgagccctacaaacaactaacctgccactaatagttatgtcatccctcttattaatcatcatc

SEQ ID NO: 58833 - DNA, 120 bp, Homo sapiens
  misc_feature: 1391 for SV(W|O) and mtDNA
aaagtcctacgtgatctgagttcagaccggagtaatccaggtcggtttctatctacttcaaattcctccctgtacgaaaggacaagagaaataaggcctacttcacaaagcgccttcccc

SEQ ID NO: 58834 - DNA, 120 bp, Homo sapiens
  misc_feature: 1391 for SV(W|O) and mtDNA
atagccccctttcacttctgagtcccagaggttacccaaggcacccctctgacatccggcctgcttcttctcacatgacaaaaactagcccccatctcaatcatataccaaatctctccc

SEQ ID NO: 58835 - DNA, 120 bp, Homo sapiens
  misc_feature: 1391 for SV(W|O) and mtDNA
ggcatgaaactgtggtttgctccacagatttcagagcattgaccgtagtatacccccggtcgtgtagcggtgaaagtggtttggtttagacgtccgggaattgcatctgtttttaagcct

SEQ ID NO: 58836 - DNA, 120 bp, Homo sapiens
  misc_feature: 1391 for SV(W|O) and mtDNA
acaaacattattataataaacaccctcaccactacaatcttcctaggaacaacatatgacgcactctcccctgaactctacacaacatattttgtcaccaagaccctacttctaacctcc

SEQ ID NO: 58837 - DNA, 120 bp, Homo sapiens
  misc_feature: 1391 for SV(W|O) and mtDNA
gaggttggccatgggtatgttgttaagaagaggaattgaacctctgactgtaaagttttaagttttatgcgattaccgggctctgccatcttaacaaaccctgttcttgggtgggtgtgg

SEQ ID NO: 58838 - DNA, 120 bp, Homo sapiens
  misc_feature: 1391 for SV(W|O) and mtDNA
acgatggtttttcatatcattggtcgtggttgtagtccgtgcgagaataatgatgtatgctttgtttctgttgagtgtgggtttagtaatggggtttgtggggttttcttctaagccttc

SEQ ID NO: 58839 - DNA, 120 bp, Homo sapiens
  misc_feature: 1391 for SV(W|O) and mtDNA
ctctagcctagccgtttactcaatcctctgatcagggtgagcatcaaactcaaactacgccctgatcggcgcactgcgagcagtagcccaaacaatctcatatgaagtcaccctagccat

SEQ ID NO: 58840 - DNA, 120 bp, Homo sapiens
  misc_feature: 1391 for SV(W|O) and mtDNA
catacacctatcccccattctcctcctatccctcaaccccgacatcattaccgggttttcctcttgtaaatatagtttaaccaaaacatcagattgtgaatctgacaacagaggcttacg

SEQ ID NO: 58841 - DNA, 120 bp, Homo sapiens
  misc_feature: 1391 for SV(W|O) and mtDNA
aaacctgtgaggaaaggtattcctgctaatgctaggctgccaatggtgagggaggttgaagtgagaggtatggttttgagtagtcctcctatttttcgaatatcttgttcattgttaagg

SEQ ID NO: 58842 - DNA, 120 bp, Homo sapiens
  misc_feature: 1391 for SV(W|O) and mtDNA
cctctaatactggtgatgctagaggtgatgtttttggtaaacaggcggggtaagatttgccgagttccttttactttttttaacctttccttatgagcatgcctgtgttgggttgacagt

SEQ ID NO: 58843 - DNA, 120 bp, Homo sapiens
  misc_feature: 1391 for SV(W|O) and mtDNA
ccacttatccagtgaaccactatcacgaaaaaaactctacctctctatactaatctccctacaaatctccttaattataacattcacagccacagaactaatcatattttatatcttctt

SEQ ID NO: 58844 - DNA, 120 bp, Homo sapiens
  misc_feature: 1391 for SV(W|O) and mtDNA
cattgcatactcttcaatcagccacatagccctcgtagtaacagccattctcatccaaaccccctgaagcttcaccggcgcagtcattctcataatcgcccacgggcttacatcctcatt

SEQ ID NO: 58845 - DNA, 120 bp, Homo sapiens
  misc_feature: 1391 for SV(W|O) and mtDNA
attcccggacgtctaaaccaaaccactttcaccgctacacgaccgggggtatactacggtcaatgctctgaaatctgtggagcaaaccacagtttcatgcccatcgtcctagaattaatt

SEQ ID NO: 58846 - DNA, 120 bp, Homo sapiens
  misc_feature: 1390 for SV(W|O) and mtDNA
ttggccatgggtatgttgttaagaagaggaattgaacctctgactgtaaagttttaagttttatgcgattaccgggctctgccatcttaacaaaccctgttcttgggtgggtgtgggtat

SEQ ID NO: 58847 - DNA, 120 bp, Homo sapiens
  misc_feature: 1390 for SV(W|O) and mtDNA
tgatatgaaaaaccatcgttgtatttcaactacaagaacaccaatgaccccaatacgcaaaactaaccccctaataaaattaattaaccactcattcatcgacctccccaccccatccaa

SEQ ID NO: 58848 - DNA, 120 bp, Homo sapiens
  misc_feature: 1390 for SV(W|O) and mtDNA
acaccctcaccactacaatcttcctaggaacaacatatgacgcactctcccctgaactctacacaacatattttgtcaccaagaccctacttctaacctccctgttcttatgaattcgaa

SEQ ID NO: 58849 - DNA, 120 bp, Homo sapiens
  misc_feature: 1390 for SV(W|O) and mtDNA
tggtgatttagagggtgaactcactggaacggggatgcttgcatgtgtaatcttactaagagctaatagaaaggctaggaccaaacctatttgtttatggggtgatgtgagcccgtctaa

SEQ ID NO: 58850 - DNA, 120 bp, Homo sapiens
  misc_feature: 1390 for SV(W|O) and mtDNA
ttaagttttatgcgattaccgggctctgccatcttaacaaaccctgttcttgggtgggtgtgggtataatactaagttgagatgatatcatttacgggggaaggcgctttgtgaagtagg

SEQ ID NO: 58851 - DNA, 120 bp, Homo sapiens
  misc_feature: 1390 for SV(W|O) and mtDNA
tggtttgctccacagatttcagagcattgaccgtagtatacccccggtcgtgtagcggtgaaagtggtttggtttagacgtccgggaattgcatctgtttttaagcctaatgtggggaca

SEQ ID NO: 58852 - DNA, 120 bp, Homo sapiens
  misc_feature: 1390 for SV(W|O) and mtDNA
tgcgagacgctggagccggagcaccctatgtcgcagtatctgtctttgattcctgcctcatcccattatttatcgcacctacgttcaatattacaggcgaacatacttactaaagtgtgt

SEQ ID NO: 58853 - DNA, 120 bp, Homo sapiens
  misc_feature: 1390 for SV(W|O) and mtDNA
ccctaaccgtgcaaaggtagcataatcacttgttccttaaatagggacctgtatgaatggctccacgagggttcagctgtctcttacttttaaccagtgaaattgacctgcccgtgaaga

SEQ ID NO: 58854 - DNA, 120 bp, Homo sapiens
  misc_feature: 1390 for SV(W|O) and mtDNA
tcctcatacccaattggaccaatctatcaccctatagaagaactaatgttagtataagtaacatgaaaacattctcctccgcataagcctgcgtcagattaaaacactgaactgacaatt

SEQ ID NO: 58855 - DNA, 120 bp, Homo sapiens
  misc_feature: 1390 for SV(W|O) and mtDNA
catcgttgtatttcaactacaagaacaccaatgaccccaatacgcaaaactaaccccctaataaaattaattaaccactcattcatcgacctccccaccccatccaacatctccacatga

SEQ ID NO: 58856 - DNA, 120 bp, Homo sapiens
  misc_feature: 1390 for SV(W|O) and mtDNA
tattcgagtgctataggcgcttgtcagggaggtagcgatgagagtaatagatagggctcaggcgtttgtgtatgatatgtttgcggtttcgatgatgtggtctttggagtagaaacctgt

SEQ ID NO: 58857 - DNA, 120 bp, Homo sapiens
  misc_feature: 1390 for SV(W|O) and mtDNA
taggggccatcaatttcatcacaacaattatcaatataaaaccccctgccataacccaataccaaacgcccctcttcgtctgatccgtcctaatcacagcagtcctacttctcctatctc

SEQ ID NO: 58858 - DNA, 120 bp, Homo sapiens
  misc_feature: 1390 for SV(W|O) and mtDNA
tactatcaacattactaataagtggctcctttaacctctccacccttatcacaacacaagaacacctctgattactcctgccatcatgacccttggccataatatgatttatctccacac

SEQ ID NO: 58859 - DNA, 120 bp, Homo sapiens
  misc_feature: 1390 for SV(W|O) and mtDNA
ccacagtttatgtagcttacctcctcaaagcaatacactgaaaatgtttagacgggctcacatcaccccataaacaaataggtttggtcctagcctttctattagctcttagtaagatta

SEQ ID NO: 58860 - DNA, 120 bp, Homo sapiens
  misc_feature: 1390 for SV(W|O) and mtDNA
gttggatggggtggggaggtcgatgaatgagtggttaattaattttattagggggttagttttgcgtattggggtcattggtgttcttgtagttgaaatacaacgatggtttttcatatc

SEQ ID NO: 58861 - DNA, 120 bp, Homo sapiens
  misc_feature: 1390 for SV(W|O) and mtDNA
ctaccgtacaaccctaacataaccattcttaatttaactatttatattatcctaactactaccgcattcctactactcaacttaaactccagcaccacgaccctactactatctcgcacc

SEQ ID NO: 58862 - DNA, 120 bp, Homo sapiens
  misc_feature: 1390 for SV(W|O) and mtDNA
atctccccttttatactaataatcttatagaaatttaggttaaatacagaccaagagccttcaaagccctcagtaagttgcaatacttaatttctgtaacagctaaggactgcaaaaccc

SEQ ID NO: 58863 - DNA, 120 bp, Homo sapiens
  misc_feature: 1390 for SV(W|O) and mtDNA
aatgaacaagatattcgaaaaataggaggactactcaaaaccatacctctcacttcaacctccctcaccattggcagcctagcattagcaggaatacctttcctcacaggtttctactcc

SEQ ID NO: 58864 - DNA, 120 bp, Homo sapiens
  misc_feature: 1390 for SV(W|O) and mtDNA
gataataactagtatggggataaggggtgtaggtgtgccttgtggtaagaagtgggctagggcatttttaatcttagagcgaaagcctataatcactgcgcccgctcataaggggatggc

SEQ ID NO: 58865 - DNA, 120 bp, Homo sapiens
  misc_feature: 1390 for SV(W|O) and mtDNA
aaatcacatggctaggccggaggtcattaggagggctgagagggcccctgttaggggtcatgggctgggttttactatatgataggcatgtgattggtgggtcattatgtgttgtcgtgc

SEQ ID NO: 58866 - DNA, 120 bp, Homo sapiens
  misc_feature: 1390 for SV(W|O) and mtDNA
catagaaaaatccaccccttacgagtgcggcttcgaccctatatcccccgcccgcgtccctttctccataaaattcttcttagtagctattaccttcttattatttgatctagaaattgc

SEQ ID NO: 58867 - DNA, 120 bp, Homo sapiens
  misc_feature: 1390 for SV(W|O) and mtDNA
gaggggtgccttgggtaacctctgggactcagaagtgaaagggggctattcctagttttattgctatagccattatgattattaatgatgagtactgattggtagtattggttatggttc

SEQ ID NO: 58868 - DNA, 120 bp, Homo sapiens
  misc_feature: 1390 for SV(W|O) and mtDNA
atgagcgggcgcagtgattataggctttcgctctaagattaaaaatgccctagcccacttcttaccacaaggcacacctacaccccttatccccatactagttattatcgaaaccatcag

SEQ ID NO: 58869 - DNA, 120 bp, Homo sapiens
  misc_feature: 1390 for SV(W|O) and mtDNA
ctacgagggctatgtggctgattgaagagtatgcaatgagcgattttaggtctgtttgtcgtaggcagatggagcttgttataattatgcctcatagggatagtacaaggaaggggtagg

SEQ ID NO: 58870 - DNA, 120 bp, Homo sapiens
  misc_feature: 1390 for SV(W|O) and mtDNA
accattaaccttccctctacacttatcatcttcacaattctaattctactgactatcctagaaatcgctgtcgccttaatccaagcctacgttttcacacttctagtaagcctctacctg

SEQ ID NO: 58871 - DNA, 120 bp, Homo sapiens
  misc_feature: 1390 for SV(W|O) and mtDNA
agccacttattagtaatgttgatagtagaatgatggctagggtgacttcatatgagattgtttgggctactgctcgcagtgcgccgatcagggcgtagtttgagtttgatgctcaccctg

SEQ ID NO: 58872 - DNA, 120 bp, Homo sapiens
  misc_feature: 1390 for SV(W|O) and mtDNA
acatagaaaaatccaccccttacgagtgcggcttcgaccctatatcccccgcccgcgtccctttctccataaaattcttcttagtagctattaccttcttattatttgatctagaaattg

SEQ ID NO: 58873 - DNA, 120 bp, Homo sapiens
  misc_feature: 1390 for SV(W|O) and mtDNA
agaagcaggccggatgtcagaggggtgccttgggtaacctctgggactcagaagtgaaagggggctattcctagttttattgctatagccattatgattattaatgatgagtactgattg

SEQ ID NO: 58874 - DNA, 120 bp, Homo sapiens
  misc_feature: 1390 for SV(W|O) and mtDNA
actggaacggggatgcttgcatgtgtaatcttactaagagctaatagaaaggctaggaccaaacctatttgtttatggggtgatgtgagcccgtctaaacattttcagtgtattgctttg

SEQ ID NO: 58875 - DNA, 120 bp, Homo sapiens
  misc_feature: 1390 for SV(W|O) and mtDNA
actatcaacattactaataagtggctcctttaacctctccacccttatcacaacacaagaacacctctgattactcctgccatcatgacccttggccataatatgatttatctccacact

SEQ ID NO: 58876 - DNA, 120 bp, Homo sapiens
  misc_feature: 1390 for SV(W|O) and mtDNA
acgtaaagacgttaggtcaaggtgtagcccatgaggtggcaagaaatgggctacattttctaccccagaaaactacgatagcccttatgaaacttaagggtcgaaggtggatttagcagt

SEQ ID NO: 58877 - DNA, 120 bp, Homo sapiens
  misc_feature: 1389 for SV(W|O) and mtDNA
tttggtttagacgtccgggaattgcatctgtttttaagcctaatgtggggacagctcatgagtgcaagacgtcttgtgatgtaattattatacgaatgggggcttcaatcgggagtacta

SEQ ID NO: 58878 - DNA, 120 bp, Homo sapiens
  misc_feature: 1389 for SV(W|O) and mtDNA
gcgttcaagctcaacacccactacctaaaaaatcccaaacatataactgaactcctcatacccaattggaccaatctatcaccctatagaagaactaatgttagtataagtaacatgaaa

SEQ ID NO: 58879 - DNA, 120 bp, Homo sapiens
  misc_feature: 1389 for SV(W|O) and mtDNA
ttcccggacgtctaaaccaaaccactttcaccgctacacgaccgggggtatactacggtcaatgctctgaaatctgtggagcaaaccacagtttcatgcccatcgtcctagaattaattc

SEQ ID NO: 58880 - DNA, 120 bp, Homo sapiens
  misc_feature: 1389 for SV(W|O) and mtDNA
agtgcttagttgaacagggccctgaagcgcgtacacaccgcccgtcaccctcctcaagtatacttcaaaggacatttaactaaaacccctacgcatttatatagaggagacaagtcgtaa

SEQ ID NO: 58881 - DNA, 120 bp, Homo sapiens
  misc_feature: 1389 for SV(W|O) and mtDNA
ttaccacgctactcctacctatctccccttttatactaataatcttatagaaatttaggttaaatacagaccaagagccttcaaagccctcagtaagttgcaatacttaatttctgtaac

SEQ ID NO: 58882 - DNA, 120 bp, Homo sapiens
  misc_feature: 1389 for SV(W|O) and mtDNA
taccacgctactcctacctatctccccttttatactaataatcttatagaaatttaggttaaatacagaccaagagccttcaaagccctcagtaagttgcaatacttaatttctgtaaca

SEQ ID NO: 58883 - DNA, 120 bp, Homo sapiens
  misc_feature: 1389 for SV(W|O) and mtDNA
tgtaaatgagtgaggcaggagtccgaggaggttagttgtggcaataaaaatgattaaggatactagtataagagatcaggttcgtcctttagtgttgtgtatggttatcatttgttttga

SEQ ID NO: 58884 - DNA, 120 bp, Homo sapiens
  misc_feature: 1389 for SV(W|O) and mtDNA
acaaataggtttggtcctagcctttctattagctcttagtaagattacacatgcaagcatccccgttccagtgagttcaccctctaaatcaccacgatcaaaagggacaagcatcaagca

SEQ ID NO: 58885 - DNA, 120 bp, Homo sapiens
  misc_feature: 1389 for SV(W|O) and mtDNA
agtgaactgtatccgacatctggttcctacttcagggtcataaagcctaaatagcccacacgttccccttaaataagacatcacgatggatcacaggtctatcaccctattaaccactca

SEQ ID NO: 58886 - DNA, 120 bp, Homo sapiens
  misc_feature: 1389 for SV(W|O) and mtDNA
gcatactcttcaatcagccacatagccctcgtagtaacagccattctcatccaaaccccctgaagcttcaccggcgcagtcattctcataatcgcccacgggcttacatcctcattacta

SEQ ID NO: 58887 - DNA, 120 bp, Homo sapiens
  misc_feature: 1389 for SV(W|O) and mtDNA
taaataaggggtcgtaagcctctgttgtcagattcacaatctgatgttttggttaaactatatttacaagaggaaaacccggtaatgatgtcggggttgagggataggaggagaatgggg

SEQ ID NO: 58888 - DNA, 120 bp, Homo sapiens
  misc_feature: 1389 for SV(W|O) and mtDNA
cagtgacacatgtttaacggccgcggtaccctaaccgtgcaaaggtagcataatcacttgttccttaaatagggacctgtatgaatggctccacgagggttcagctgtctcttactttta

SEQ ID NO: 58889 - DNA, 120 bp, Homo sapiens
  misc_feature: 1389 for SV(W|O) and mtDNA
gtttcgatgatgtggtctttggagtagaaacctgtgaggaaaggtattcctgctaatgctaggctgccaatggtgagggaggttgaagtgagaggtatggttttgagtagtcctcctatt

SEQ ID NO: 58890 - DNA, 120 bp, Homo sapiens
  misc_feature: 1389 for SV(W|O) and mtDNA
acgttctcctgatcaaatatcactctcctacttacaggactcaacatactagtcacagccctatactccctctacatatttaccacaacacaatggggctcactcacccaccacattaac

SEQ ID NO: 58891 - DNA, 120 bp, Homo sapiens
  misc_feature: 1389 for SV(W|O) and mtDNA
ggtgcgataaataatgggatgaggcaggaatcaaagacagatactgcgacatagggtgctccggctccagcgtctcgcaatgctatcgcgtgcataccccccagacgaaaataccaaatg

SEQ ID NO: 58892 - DNA, 120 bp, Homo sapiens
  misc_feature: 1389 for SV(W|O) and mtDNA
ggggccatcaatttcatcacaacaattatcaatataaaaccccctgccataacccaataccaaacgcccctcttcgtctgatccgtcctaatcacagcagtcctacttctcctatctctc

SEQ ID NO: 58893 - DNA, 120 bp, Homo sapiens
  misc_feature: 1389 for SV(W|O) and mtDNA
ataaacctagccatggccatccccttatgagcgggcgcagtgattataggctttcgctctaagattaaaaatgccctagcccacttcttaccacaaggcacacctacaccccttatcccc

SEQ ID NO: 58894 - DNA, 120 bp, Homo sapiens
  misc_feature: 1389 for SV(W|O) and mtDNA
gctaagacccaaactgggattagataccccactatgcttagccctaaacctcaacagttaaatcaacaaaactgctcgccagaacactacgagccacagcttaaaactcaaaggacctgg

SEQ ID NO: 58895 - DNA, 120 bp, Homo sapiens
  misc_feature: 1389 for SV(W|O) and mtDNA
gagggtgaactcactggaacggggatgcttgcatgtgtaatcttactaagagctaatagaaaggctaggaccaaacctatttgtttatggggtgatgtgagcccgtctaaacattttcag

SEQ ID NO: 58896 - DNA, 120 bp, Homo sapiens
  misc_feature: 1389 for SV(W|O) and mtDNA
aagggtataaccaacattttcggggtatgggcccgatagcttatttagctgaccttactttaggatggggtgtgataggtggcacggagaattttggattctcagggatgggttcgattc

SEQ ID NO: 58897 - DNA, 120 bp, Homo sapiens
  misc_feature: 1389 for SV(W|O) and mtDNA
accctaaccgtgcaaaggtagcataatcacttgttccttaaatagggacctgtatgaatggctccacgagggttcagctgtctcttacttttaaccagtgaaattgacctgcccgtgaag

SEQ ID NO: 58898 - DNA, 120 bp, Homo sapiens
  misc_feature: 1389 for SV(W|O) and mtDNA
cacgtaaagacgttaggtcaaggtgtagcccatgaggtggcaagaaatgggctacattttctaccccagaaaactacgatagcccttatgaaacttaagggtcgaaggtggatttagcag

SEQ ID NO: 58899 - DNA, 120 bp, Homo sapiens
  misc_feature: 1389 for SV(W|O) and mtDNA
acctcctcaaagcaatacactgaaaatgtttagacgggctcacatcaccccataaacaaataggtttggtcctagcctttctattagctcttagtaagattacacatgcaagcatccccg

SEQ ID NO: 58900 - DNA, 120 bp, Homo sapiens
  misc_feature: 1389 for SV(W|O) and mtDNA
cactattaacctactgggagaactctctgtgctagtaaccacgttctcctgatcaaatatcactctcctacttacaggactcaacatactagtcacagccctatactccctctacatatt

SEQ ID NO: 58901 - DNA, 120 bp, Homo sapiens
  misc_feature: 1389 for SV(W|O) and mtDNA
ataggtggcacggagaattttggattctcagggatgggttcgattctcatagtcctagaaataagggggtttaagctcctattatttactctatcaaagtaactcttttatcagacatat

SEQ ID NO: 58902 - DNA, 120 bp, Homo sapiens
  misc_feature: 1389 for SV(W|O) and mtDNA
acctcgccttaccccccactattaacctactgggagaactctctgtgctagtaaccacgttctcctgatcaaatatcactctcctacttacaggactcaacatactagtcacagccctat

SEQ ID NO: 58903 - DNA, 120 bp, Homo sapiens
  misc_feature: 1389 for SV(W|O) and mtDNA
acattattataataaacaccctcaccactacaatcttcctaggaacaacatatgacgcactctcccctgaactctacacaacatattttgtcaccaagaccctacttctaacctccctgt

SEQ ID NO: 58904 - DNA, 120 bp, Homo sapiens
  misc_feature: 1388 for SV(W|O) and mtDNA
tttcgatgatgtggtctttggagtagaaacctgtgaggaaaggtattcctgctaatgctaggctgccaatggtgagggaggttgaagtgagaggtatggttttgagtagtcctcctattt

SEQ ID NO: 58905 - DNA, 120 bp, Homo sapiens
  misc_feature: 1388 for SV(W|O) and mtDNA
aaatagaaaccgtctgaactatcctgcccgccatcatcctagtcctcatcgccctcccatccctacgcatcctttacataacagacgaggtcaacgatccctcccttaccatcaaatcaa

SEQ ID NO: 58906 - DNA, 120 bp, Homo sapiens
  misc_feature: 1388 for SV(W|O) and mtDNA
gttgtatttcaactacaagaacaccaatgaccccaatacgcaaaactaaccccctaataaaattaattaaccactcattcatcgacctccccaccccatccaacatctccacatgatgaa

SEQ ID NO: 58907 - DNA, 120 bp, Homo sapiens
  misc_feature: 1388 for SV(W|O) and mtDNA
gcttactttgtagccttcatcagggtttgctgaagatggcggtatataggctgagcaagaggtggtgaggttgatcggggtttatcgattacagaacaggctcctctagagggatatgaa

SEQ ID NO: 58908 - DNA, 120 bp, Homo sapiens
  misc_feature: 1388 for SV(W|O) and mtDNA
catttctctactcagaaacctgaaacatcggcattatcctcctgcttgcaactatagcaacagccttcataggctatgtcctcccgtgaggccaaatatcattctgaggggccacagtaa

SEQ ID NO: 58909 - DNA, 120 bp, Homo sapiens
  misc_feature: 1388 for SV(W|O) and mtDNA
tagctaaagtgaactgtatccgacatctggttcctacttcagggtcataaagcctaaatagcccacacgttccccttaaataagacatcacgatggatcacaggtctatcaccctattaa

SEQ ID NO: 58910 - DNA, 120 bp, Homo sapiens
  misc_feature: 1388 for SV(W|O) and mtDNA
tgtactcgtaggttcagtaccattggtggccaattgatttgatggtaagggagggatcgttgacctcgtctgttatgtaaaggatgcgtagggatgggagggcgatgaggactaggatga

SEQ ID NO: 58911 - DNA, 120 bp, Homo sapiens
  misc_feature: 1388 for SV(W|O) and mtDNA
agatttcagagcattgaccgtagtatacccccggtcgtgtagcggtgaaagtggtttggtttagacgtccgggaattgcatctgtttttaagcctaatgtggggacagctcatgagtgca

SEQ ID NO: 58912 - DNA, 120 bp, Homo sapiens
  misc_feature: 1388 for SV(W|O) and mtDNA
tcttagtagctattaccttcttattatttgatctagaaattgccctccttttacccctaccatgagccctacaaacaactaacctgccactaatagttatgtcatccctcttattaatca

SEQ ID NO: 58913 - DNA, 120 bp, Homo sapiens
  misc_feature: 1388 for SV(W|O) and mtDNA
tgactagcttacacaatagcttttatagtaaagatacctctttacggactccacttatgactccctaaagcccatgtcgaagcccccatcgctgggtcaatagtacttgccgcagtactc

SEQ ID NO: 58914 - DNA, 120 bp, Homo sapiens
  misc_feature: 1388 for SV(W|O) and mtDNA
tcctttcgtacagggaggaatttgaagtagatagaaaccgacctggattactccggtctgaactcagatcacgtaggactttaatcgttgaacaaacgaacctttaatagcggctgcacc

SEQ ID NO: 58915 - DNA, 120 bp, Homo sapiens
  misc_feature: 1388 for SV(W|O) and mtDNA
ccatgacccctaacaggggccctctcagccctcctaatgacctccggcctagccatgtgatttcacttccactccataacgctcctcatactaggcctactaaccaacacactaaccata

SEQ ID NO: 58916 - DNA, 120 bp, Homo sapiens
  misc_feature: 1388 for SV(W|O) and mtDNA
tataggctttcgctctaagattaaaaatgccctagcccacttcttaccacaaggcacacctacaccccttatccccatactagttattatcgaaaccatcagcctactcattcaaccaat

SEQ ID NO: 58917 - DNA, 120 bp, Homo sapiens
  misc_feature: 1388 for SV(W|O) and mtDNA
taggctttcgctctaagattaaaaatgccctagcccacttcttaccacaaggcacacctacaccccttatccccatactagttattatcgaaaccatcagcctactcattcaaccaatag

SEQ ID NO: 58918 - DNA, 120 bp, Homo sapiens
  misc_feature: 1388 for SV(W|O) and mtDNA
aaattaattaaccactcattcatcgacctccccaccccatccaacatctccacatgatgaaacttcggctcactccttggcgcctgcctgattctccaaatcaccacaggactattccta

SEQ ID NO: 58919 - DNA, 120 bp, Homo sapiens
  misc_feature: 1388 for SV(W|O) and mtDNA
tacatacttcccccattattcctagaaccaggcgacctgcgactccttgacgttgacaatcgagtagtactcccgattgaagcccccattcgtataataattacatcacaagacgtcttg

SEQ ID NO: 58920 - DNA, 120 bp, Homo sapiens
  misc_feature: 1388 for SV(W|O) and mtDNA
taatgggggaagtatgtaggagttgaagattagtccgccgtagtcggtgtactcgtaggttcagtaccattggtggccaattgatttgatggtaagggagggatcgttgacctcgtctgt

SEQ ID NO: 58921 - DNA, 120 bp, Homo sapiens
  misc_feature: 1388 for SV(W|O) and mtDNA
atttcctattcgcctacacaattctccgatccgtccctaacaaactaggaggcgtccttgccctattactatccatcctcatcctagcaataatccccatcctccatatatccaaacaac

SEQ ID NO: 58922 - DNA, 120 bp, Homo sapiens
  misc_feature: 1388 for SV(W|O) and mtDNA
gtaaccacgttctcctgatcaaatatcactctcctacttacaggactcaacatactagtcacagccctatactccctctacatatttaccacaacacaatggggctcactcacccaccac

SEQ ID NO: 58923 - DNA, 120 bp, Homo sapiens
  misc_feature: 1388 for SV(W|O) and mtDNA
gtggtctttggagtagaaacctgtgaggaaaggtattcctgctaatgctaggctgccaatggtgagggaggttgaagtgagaggtatggttttgagtagtcctcctatttttcgaatatc

SEQ ID NO: 58924 - DNA, 120 bp, Homo sapiens
  misc_feature: 1388 for SV(W|O) and mtDNA
gtcgccccaaccgaaatttttaatgcaggtttggtagtttaggacctgtgggtttgttaggtactgtttgcattaataaattaaagctccatagggtcttctcgtcttgctgtgttatgc

SEQ ID NO: 58925 - DNA, 120 bp, Homo sapiens
  misc_feature: 1388 for SV(W|O) and mtDNA
caaacattattataataaacaccctcaccactacaatcttcctaggaacaacatatgacgcactctcccctgaactctacacaacatattttgtcaccaagaccctacttctaacctccc

SEQ ID NO: 58926 - DNA, 120 bp, Homo sapiens
  misc_feature: 1388 for SV(W|O) and mtDNA
ggcctactatgggtgttaaattttttactctctctacaaggttttttcctagtgtccaaagagctgttcctctttggactaacagttaaatttacaaggggatttagagggttctgtggg

SEQ ID NO: 58927 - DNA, 120 bp, Homo sapiens
  misc_feature: 1388 for SV(W|O) and mtDNA
aaaccgtctgaactatcctgcccgccatcatcctagtcctcatcgccctcccatccctacgcatcctttacataacagacgaggtcaacgatccctcccttaccatcaaatcaattggcc

SEQ ID NO: 58928 - DNA, 120 bp, Homo sapiens
  misc_feature: 1388 for SV(W|O) and mtDNA
gctctaagattaaaaatgccctagcccacttcttaccacaaggcacacctacaccccttatccccatactagttattatcgaaaccatcagcctactcattcaaccaatagccctggccg

SEQ ID NO: 58929 - DNA, 120 bp, Homo sapiens
  misc_feature: 1388 for SV(W|O) and mtDNA
agaaaacaccctcatgttcatacacctatcccccattctcctcctatccctcaaccccgacatcattaccgggttttcctcttgtaaatatagtttaaccaaaacatcagattgtgaatc

SEQ ID NO: 58930 - DNA, 120 bp, Homo sapiens
  misc_feature: 1388 for SV(W|O) and mtDNA
cgacaaacagacctaaaatcgctcattgcatactcttcaatcagccacatagccctcgtagtaacagccattctcatccaaaccccctgaagcttcaccggcgcagtcattctcataatc

SEQ ID NO: 58931 - DNA, 120 bp, Homo sapiens
  misc_feature: 1388 for SV(W|O) and mtDNA
gaaaaatccaccccttacgagtgcggcttcgaccctatatcccccgcccgcgtccctttctccataaaattcttcttagtagctattaccttcttattatttgatctagaaattgccctc

SEQ ID NO: 58932 - DNA, 120 bp, Homo sapiens
  misc_feature: 1388 for SV(W|O) and mtDNA
actttttcaaaaaggtattagaaaaaccatttcataactttgtcaaagttaaattataggctaaatcctatatatcttaatggcacatgcagcgcaagtaggtctacaagacgctacttc

SEQ ID NO: 58933 - DNA, 120 bp, Homo sapiens
  misc_feature: 1388 for SV(W|O) and mtDNA
gaaactgtggtttgctccacagatttcagagcattgaccgtagtatacccccggtcgtgtagcggtgaaagtggtttggtttagacgtccgggaattgcatctgtttttaagcctaatgt

SEQ ID NO: 58934 - DNA, 120 bp, Homo sapiens
  misc_feature: 1388 for SV(W|O) and mtDNA
cttgcgcttactttgtagccttcatcagggtttgctgaagatggcggtatataggctgagcaagaggtggtgaggttgatcggggtttatcgattacagaacaggctcctctagagggat

SEQ ID NO: 58935 - DNA, 120 bp, Homo sapiens
  misc_feature: 1388 for SV(W|O) and mtDNA
ctatgggtgttaaattttttactctctctacaaggttttttcctagtgtccaaagagctgttcctctttggactaacagttaaatttacaaggggatttagagggttctgtgggcaaatt

SEQ ID NO: 58936 - DNA, 120 bp, Homo sapiens
  misc_feature: 1388 for SV(W|O) and mtDNA
cgtagtctattttgtgtcaactggagttttttacaactcaggtgagttttagctttattggggagggggtgatctaaaacactctttacgccggcttctattgacttgggttaatcgtgt

SEQ ID NO: 58937 - DNA, 120 bp, Homo sapiens
  misc_feature: 1388 for SV(W|O) and mtDNA
aatactggtgatgctagaggtgatgtttttggtaaacaggcggggtaagatttgccgagttccttttactttttttaacctttccttatgagcatgcctgtgttgggttgacagtgaggg

SEQ ID NO: 58938 - DNA, 120 bp, Homo sapiens
  misc_feature: 1388 for SV(W|O) and mtDNA
aaaacaccctcatgttcatacacctatcccccattctcctcctatccctcaaccccgacatcattaccgggttttcctcttgtaaatatagtttaaccaaaacatcagattgtgaatctg

SEQ ID NO: 58939 - DNA, 120 bp, Homo sapiens
  misc_feature: 1388 for SV(W|O) and mtDNA
cactcacagtcgcatcataatcctctctcaaggacttcaaactctactcccactaatagctttttgatgacttctagcaagcctcgctaacctcgccttaccccccactattaacctact

SEQ ID NO: 58940 - DNA, 120 bp, Homo sapiens
  misc_feature: 1388 for SV(W|O) and mtDNA
agccgagctgggccagccaggcaaccttctaggtaacgaccacatctacaacgttatcgtcacagcccatgcatttgtaataatcttcttcatagtaatacccatcataatcggaggctt

SEQ ID NO: 58941 - DNA, 120 bp, Homo sapiens
  misc_feature: 1388 for SV(W|O) and mtDNA
aagcaggccggatgtcagaggggtgccttgggtaacctctgggactcagaagtgaaagggggctattcctagttttattgctatagccattatgattattaatgatgagtactgattggt

SEQ ID NO: 58942 - DNA, 120 bp, Homo sapiens
  misc_feature: 1388 for SV(W|O) and mtDNA
aatgggggaagtatgtaggagttgaagattagtccgccgtagtcggtgtactcgtaggttcagtaccattggtggccaattgatttgatggtaagggagggatcgttgacctcgtctgtt

SEQ ID NO: 58943 - DNA, 120 bp, Homo sapiens
  misc_feature: 1387 for SV(W|O) and mtDNA
tcatccgcttccaccccctagcagaaaatagcccactaatccaaactctaacactatgcttaggcgctatcaccactctgttcgcagcagtctgcgcccttacacaaaatgacatcaaaa

SEQ ID NO: 58944 - DNA, 120 bp, Homo sapiens
  misc_feature: 1387 for SV(W|O) and mtDNA
tttgatcgtggtgatttagagggtgaactcactggaacggggatgcttgcatgtgtaatcttactaagagctaatagaaaggctaggaccaaacctatttgtttatggggtgatgtgagc

SEQ ID NO: 58945 - DNA, 120 bp, Homo sapiens
  misc_feature: 1387 for SV(W|O) and mtDNA
tttatttgggtaaatggtttggctaaggttgtctggtagtaaggtggagtgggtttggggctaggtttagctcagagcggtcaagttaagttgaaatctcctaagtgtaagttgggtgct

SEQ ID NO: 58946 - DNA, 120 bp, Homo sapiens
  misc_feature: 1387 for SV(W|O) and mtDNA
atgaggcaaccagccagaacgcctgaacgcaggcacatacttcctattctacaccctagtaggctcccttcccctactcatcgcactaatttacactcacaacaccctaggctcactaaa

SEQ ID NO: 58947 - DNA, 120 bp, Homo sapiens
  misc_feature: 1387 for SV(W|O) and mtDNA
ctactatgggtgttaaattttttactctctctacaaggttttttcctagtgtccaaagagctgttcctctttggactaacagttaaatttacaaggggatttagagggttctgtgggcaa

SEQ ID NO: 58948 - DNA, 120 bp, Homo sapiens
  misc_feature: 1387 for SV(W|O) and mtDNA
cgagaaaacaccctcatgttcatacacctatcccccattctcctcctatccctcaaccccgacatcattaccgggttttcctcttgtaaatatagtttaaccaaaacatcagattgtgaa

SEQ ID NO: 58949 - DNA, 120 bp, Homo sapiens
  misc_feature: 1387 for SV(W|O) and mtDNA
ctctctttcttcttcccactcatcctaaccctactcctaatcacataacctattcccccgagcaatctcaattacaatatatacaccaacaaacaatgttcaaccagtaactactactaa

SEQ ID NO: 58950 - DNA, 120 bp, Homo sapiens
  misc_feature: 1387 for SV(W|O) and mtDNA
catgaaactgtggtttgctccacagatttcagagcattgaccgtagtatacccccggtcgtgtagcggtgaaagtggtttggtttagacgtccgggaattgcatctgtttttaagcctaa

SEQ ID NO: 58951 - DNA, 120 bp, Homo sapiens
  misc_feature: 1387 for SV(W|O) and mtDNA
tgttggctcaggagtttgatagttcttgggcagtgagagtgagtagtagaatgtttagtgagcctagggtgttgtgagtgtaaattagtgcgatgagtaggggaagggagcctactaggg

SEQ ID NO: 58952 - DNA, 120 bp, Homo sapiens
  misc_feature: 1387 for SV(W|O) and mtDNA
acagtttatgtagcttacctcctcaaagcaatacactgaaaatgtttagacgggctcacatcaccccataaacaaataggtttggtcctagcctttctattagctcttagtaagattaca

SEQ ID NO: 58953 - DNA, 120 bp, Homo sapiens
  misc_feature: 1387 for SV(W|O) and mtDNA
tgcccagtgacacatgtttaacggccgcggtaccctaaccgtgcaaaggtagcataatcacttgttccttaaatagggacctgtatgaatggctccacgagggttcagctgtctcttact

SEQ ID NO: 58954 - DNA, 120 bp, Homo sapiens
  misc_feature: 1387 for SV(W|O) and mtDNA
cgttgtatttcaactacaagaacaccaatgaccccaatacgcaaaactaaccccctaataaaattaattaaccactcattcatcgacctccccaccccatccaacatctccacatgatga

SEQ ID NO: 58955 - DNA, 120 bp, Homo sapiens
  misc_feature: 1387 for SV(W|O) and mtDNA
caaatcaattggccaccaatggtactgaacctacgagtacaccgactacggcggactaatcttcaactcctacatacttcccccattattcctagaaccaggcgacctgcgactccttga

SEQ ID NO: 58956 - DNA, 120 bp, Homo sapiens
  misc_feature: 1387 for SV(W|O) and mtDNA
tagcctatgaaggctgttgctatagttgcaagcaggaggataatgccgatgtttcaggtttctgagtagagaaatgatccgtaatataggcctcgcccgatgtgtaggaagaggcagata

SEQ ID NO: 58957 - DNA, 120 bp, Homo sapiens
  misc_feature: 1387 for SV(W|O) and mtDNA
agttgttggctcaggagtttgatagttcttgggcagtgagagtgagtagtagaatgtttagtgagcctagggtgttgtgagtgtaaattagtgcgatgagtaggggaagggagcctacta

SEQ ID NO: 58958 - DNA, 120 bp, Homo sapiens
  misc_feature: 1387 for SV(W|O) and mtDNA
gcatgaaactgtggtttgctccacagatttcagagcattgaccgtagtatacccccggtcgtgtagcggtgaaagtggtttggtttagacgtccgggaattgcatctgtttttaagccta

SEQ ID NO: 58959 - DNA, 120 bp, Homo sapiens
  misc_feature: 1387 for SV(W|O) and mtDNA
ccactttcgtagtctattttgtgtcaactggagttttttacaactcaggtgagttttagctttattggggagggggtgatctaaaacactctttacgccggcttctattgacttgggtta

SEQ ID NO: 58960 - DNA, 120 bp, Homo sapiens
  misc_feature: 1387 for SV(W|O) and mtDNA
atcatttacgggggaaggcgctttgtgaagtaggccttatttctcttgtcctttcgtacagggaggaatttgaagtagatagaaaccgacctggattactccggtctgaactcagatcac

SEQ ID NO: 58961 - DNA, 120 bp, Homo sapiens
  misc_feature: 1387 for SV(W|O) and mtDNA
gggttctgctccgaggtcgccccaaccgaaatttttaatgcaggtttggtagtttaggacctgtgggtttgttaggtactgtttgcattaataaattaaagctccatagggtcttctcgt

SEQ ID NO: 58962 - DNA, 120 bp, Homo sapiens
  misc_feature: 1387 for SV(W|O) and mtDNA
gcccatgtcgaagcccccatcgctgggtcaatagtacttgccgcagtactcttaaaactaggcggctatggtataatacgcctcacactcattctcaaccccctgacaaaacacatagcc

SEQ ID NO: 58963 - DNA, 120 bp, Homo sapiens
  misc_feature: 1387 for SV(W|O) and mtDNA
gaggaggcctagtagtggggtgaggcttggattagcgtttagaagggctatttgttgtgggtctcatgagttggagtgtaggataaatcatgctaaggcgaggatgaaaccgatatcgcc

SEQ ID NO: 58964 - DNA, 120 bp, Homo sapiens
  misc_feature: 1387 for SV(W|O) and mtDNA
aggtagaagtagaggttaaggagggtgatggtggctatgatggtggggatgatgaggctattgttttttgtgaattcttcgataatggcccatttgggcaaaaagccggttagcgggggc

SEQ ID NO: 58965 - DNA, 120 bp, Homo sapiens
  misc_feature: 1387 for SV(W|O) and mtDNA
cagagcccggtaatcgcataaaacttaaaactttacagtcagaggttcaattcctcttcttaacaacatacccatggccaacctcctactcctcattgtacccattctaatcgcaatggc

SEQ ID NO: 58966 - DNA, 120 bp, Homo sapiens
  misc_feature: 1387 for SV(W|O) and mtDNA
ccctggggttagtatagcttagttaaactttcgtttattgctaaaggttaatcactgctgtttcccgtgggggtgtggctaggctaagcgttttgagctgcattgctgcgtgcttgatgc

SEQ ID NO: 58967 - DNA, 120 bp, Homo sapiens
  misc_feature: 1387 for SV(W|O) and mtDNA
gatgaggaatagtgtaaggagtatgggggtaattatggtgggccatacggtagtatttagttggggcatttcactgtaaagaggtgttggttctcttaatctttaacttaaaaggttaat

SEQ ID NO: 58968 - DNA, 120 bp, Homo sapiens
  misc_feature: 1387 for SV(W|O) and mtDNA
gatatcatttacgggggaaggcgctttgtgaagtaggccttatttctcttgtcctttcgtacagggaggaatttgaagtagatagaaaccgacctggattactccggtctgaactcagat

SEQ ID NO: 58969 - DNA, 120 bp, Homo sapiens
  misc_feature: 1387 for SV(W|O) and mtDNA
gagccgagctgggccagccaggcaaccttctaggtaacgaccacatctacaacgttatcgtcacagcccatgcatttgtaataatcttcttcatagtaatacccatcataatcggaggct

SEQ ID NO: 58970 - DNA, 120 bp, Homo sapiens
  misc_feature: 1387 for SV(W|O) and mtDNA
atttcagagcattgaccgtagtatacccccggtcgtgtagcggtgaaagtggtttggtttagacgtccgggaattgcatctgtttttaagcctaatgtggggacagctcatgagtgcaag

SEQ ID NO: 58971 - DNA, 120 bp, Homo sapiens
  misc_feature: 1387 for SV(W|O) and mtDNA
aagaaatgggctacattttctaccccagaaaactacgatagcccttatgaaacttaagggtcgaaggtggatttagcagtaaactgagagtagagtgcttagttgaacagggccctgaag

SEQ ID NO: 58972 - DNA, 120 bp, Homo sapiens
  misc_feature: 1387 for SV(W|O) and mtDNA
aggaggcctagtagtggggtgaggcttggattagcgtttagaagggctatttgttgtgggtctcatgagttggagtgtaggataaatcatgctaaggcgaggatgaaaccgatatcgccg

SEQ ID NO: 58973 - DNA, 120 bp, Homo sapiens
  misc_feature: 1386 for SV(W|O) and mtDNA
tttgttgtgagtgttaggaaaagggcatacaggactaggaagcagataaggaaaatgattatgagggcgtgatcatgaaaggtgataagctcttctatgataggggaagtagcgtcttgt

SEQ ID NO: 58974 - DNA, 120 bp, Homo sapiens
  misc_feature: 1386 for SV(W|O) and mtDNA
ttgtagacctacttgcgctgcatgtgccattaagatatataggatttagcctataatttaactttgacaaagttatgaaatggtttttctaatacctttttgaaaaagtcatggaggcca

SEQ ID NO: 58975 - DNA, 120 bp, Homo sapiens
  misc_feature: 1386 for SV(W|O) and mtDNA
ttggtcctagcctttctattagctcttagtaagattacacatgcaagcatccccgttccagtgagttcaccctctaaatcaccacgatcaaaagggacaagcatcaagcacgcagcaatg

SEQ ID NO: 58976 - DNA, 120 bp, Homo sapiens
  misc_feature: 1386 for SV(W|O) and mtDNA
ctcatacccaattggaccaatctatcaccctatagaagaactaatgttagtataagtaacatgaaaacattctcctccgcataagcctgcgtcagattaaaacactgaactgacaattaa

SEQ ID NO: 58977 - DNA, 120 bp, Homo sapiens
  misc_feature: 1386 for SV(W|O) and mtDNA
cacgttctcctgatcaaatatcactctcctacttacaggactcaacatactagtcacagccctatactccctctacatatttaccacaacacaatggggctcactcacccaccacattaa

SEQ ID NO: 58978 - DNA, 120 bp, Homo sapiens
  misc_feature: 1386 for SV(W|O) and mtDNA
gatgggcatgaaactgtggtttgctccacagatttcagagcattgaccgtagtatacccccggtcgtgtagcggtgaaagtggtttggtttagacgtccgggaattgcatctgtttttaa

SEQ ID NO: 58979 - DNA, 120 bp, Homo sapiens
  misc_feature: 1386 for SV(W|O) and mtDNA
taattaaccactcattcatcgacctccccaccccatccaacatctccacatgatgaaacttcggctcactccttggcgcctgcctgattctccaaatcaccacaggactattcctagcca

SEQ ID NO: 58980 - DNA, 120 bp, Homo sapiens
  misc_feature: 1386 for SV(W|O) and mtDNA
tggccatgggtatgttgttaagaagaggaattgaacctctgactgtaaagttttaagttttatgcgattaccgggctctgccatcttaacaaaccctgttcttgggtgggtgtgggtata

SEQ ID NO: 58981 - DNA, 120 bp, Homo sapiens
  misc_feature: 1386 for SV(W|O) and mtDNA
gatggcagagcccggtaatcgcataaaacttaaaactttacagtcagaggttcaattcctcttcttaacaacatacccatggccaacctcctactcctcattgtacccattctaatcgca

SEQ ID NO: 58982 - DNA, 120 bp, Homo sapiens
  misc_feature: 1386 for SV(W|O) and mtDNA
tcgtacagggaggaatttgaagtagatagaaaccgacctggattactccggtctgaactcagatcacgtaggactttaatcgttgaacaaacgaacctttaatagcggctgcaccatcgg

SEQ ID NO: 58983 - DNA, 120 bp, Homo sapiens
  misc_feature: 1386 for SV(W|O) and mtDNA
cggtgtactcgtaggttcagtaccattggtggccaattgatttgatggtaagggagggatcgttgacctcgtctgttatgtaaaggatgcgtagggatgggagggcgatgaggactagga

SEQ ID NO: 58984 - DNA, 120 bp, Homo sapiens
  misc_feature: 1386 for SV(W|O) and mtDNA
tcatacacctatcccccattctcctcctatccctcaaccccgacatcattaccgggttttcctcttgtaaatatagtttaaccaaaacatcagattgtgaatctgacaacagaggcttac

SEQ ID NO: 58985 - DNA, 120 bp, Homo sapiens
  misc_feature: 1386 for SV(W|O) and mtDNA
tattaacctactgggagaactctctgtgctagtaaccacgttctcctgatcaaatatcactctcctacttacaggactcaacatactagtcacagccctatactccctctacatatttac

SEQ ID NO: 58986 - DNA, 120 bp, Homo sapiens
  misc_feature: 1386 for SV(W|O) and mtDNA
tagaaaaatccaccccttacgagtgcggcttcgaccctatatcccccgcccgcgtccctttctccataaaattcttcttagtagctattaccttcttattatttgatctagaaattgccc

SEQ ID NO: 58987 - DNA, 120 bp, Homo sapiens
  misc_feature: 1386 for SV(W|O) and mtDNA
taagctatcgggcccataccccgaaaatgttggttatacccttcccgtactaattaatcccctggcccaacccgtcatctactctaccatctttgcaggcacactcatcacagcgctaag

SEQ ID NO: 58988 - DNA, 120 bp, Homo sapiens
  misc_feature: 1386 for SV(W|O) and mtDNA
ctgggccagccaggcaaccttctaggtaacgaccacatctacaacgttatcgtcacagcccatgcatttgtaataatcttcttcatagtaatacccatcataatcggaggctttggcaac

SEQ ID NO: 58989 - DNA, 120 bp, Homo sapiens
  misc_feature: 1386 for SV(W|O) and mtDNA
gttctaccgtacaaccctaacataaccattcttaatttaactatttatattatcctaactactaccgcattcctactactcaacttaaactccagcaccacgaccctactactatctcgc

SEQ ID NO: 58990 - DNA, 120 bp, Homo sapiens
  misc_feature: 1386 for SV(W|O) and mtDNA
ggtattcctgctaatgctaggctgccaatggtgagggaggttgaagtgagaggtatggttttgagtagtcctcctatttttcgaatatcttgttcattgttaaggttgtggatgatggac

SEQ ID NO: 58991 - DNA, 120 bp, Homo sapiens
  misc_feature: 1386 for SV(W|O) and mtDNA
cgggcgcagtgattataggctttcgctctaagattaaaaatgccctagcccacttcttaccacaaggcacacctacaccccttatccccatactagttattatcgaaaccatcagcctac

SEQ ID NO: 58992 - DNA, 120 bp, Homo sapiens
  misc_feature: 1386 for SV(W|O) and mtDNA
gggtcgaagccgcactcgtaaggggtggatttttctatgtagccgttgagttgtggtagtcaaaatgtaataattattagtagtaaggctaggagggtgttgattattaaaattaaggcg

SEQ ID NO: 58993 - DNA, 120 bp, Homo sapiens
  misc_feature: 1386 for SV(W|O) and mtDNA
acctctagcctagccgtttactcaatcctctgatcagggtgagcatcaaactcaaactacgccctgatcggcgcactgcgagcagtagcccaaacaatctcatatgaagtcaccctagcc

SEQ ID NO: 58994 - DNA, 120 bp, Homo sapiens
  misc_feature: 1386 for SV(W|O) and mtDNA
cttgtagacctacttgcgctgcatgtgccattaagatatataggatttagcctataatttaactttgacaaagttatgaaatggtttttctaatacctttttgaaaaagtcatggaggcc

SEQ ID NO: 58995 - DNA, 120 bp, Homo sapiens
  misc_feature: 1386 for SV(W|O) and mtDNA
aataggtttggtcctagcctttctattagctcttagtaagattacacatgcaagcatccccgttccagtgagttcaccctctaaatcaccacgatcaaaagggacaagcatcaagcacgc

SEQ ID NO: 58996 - DNA, 120 bp, Homo sapiens
  misc_feature: 1386 for SV(W|O) and mtDNA
gatcgtggtgatttagagggtgaactcactggaacggggatgcttgcatgtgtaatcttactaagagctaatagaaaggctaggaccaaacctatttgtttatggggtgatgtgagcccg

SEQ ID NO: 58997 - DNA, 120 bp, Homo sapiens
  misc_feature: 1386 for SV(W|O) and mtDNA
gacaaacagacctaaaatcgctcattgcatactcttcaatcagccacatagccctcgtagtaacagccattctcatccaaaccccctgaagcttcaccggcgcagtcattctcataatcg

SEQ ID NO: 58998 - DNA, 120 bp, Homo sapiens
  misc_feature: 1386 for SV(W|O) and mtDNA
aggcgtttaatggggtttagtagggtagggttattttcgttaatgttagtaagggtggggaagcgaggttgacctgttagggtgagaagaattattcgagtgctataggcgcttgtcagg

SEQ ID NO: 58999 - DNA, 120 bp, Homo sapiens
  misc_feature: 1386 for SV(W|O) and mtDNA
ccgagctgggccagccaggcaaccttctaggtaacgaccacatctacaacgttatcgtcacagcccatgcatttgtaataatcttcttcatagtaatacccatcataatcggaggctttg

SEQ ID NO: 59000 - DNA, 120 bp, Homo sapiens
  misc_feature: 1386 for SV(W|O) and mtDNA
actcgtaggttcagtaccattggtggccaattgatttgatggtaagggagggatcgttgacctcgtctgttatgtaaaggatgcgtagggatgggagggcgatgaggactaggatgatgg

SEQ ID NO: 59001 - DNA, 120 bp, Homo sapiens
  misc_feature: 1386 for SV(W|O) and mtDNA
aattaaccactcattcatcgacctccccaccccatccaacatctccacatgatgaaacttcggctcactccttggcgcctgcctgattctccaaatcaccacaggactattcctagccat

SEQ ID NO: 59002 - DNA, 120 bp, Homo sapiens
  misc_feature: 1386 for SV(W|O) and mtDNA
atggccatccccttatgagcgggcgcagtgattataggctttcgctctaagattaaaaatgccctagcccacttcttaccacaaggcacacctacaccccttatccccatactagttatt

SEQ ID NO: 59003 - DNA, 120 bp, Homo sapiens
  misc_feature: 1386 for SV(W|O) and mtDNA
agcccggtaatcgcataaaacttaaaactttacagtcagaggttcaattcctcttcttaacaacatacccatggccaacctcctactcctcattgtacccattctaatcgcaatggcatt

SEQ ID NO: 59004 - DNA, 120 bp, Homo sapiens
  misc_feature: 1386 for SV(W|O) and mtDNA
accacgttctcctgatcaaatatcactctcctacttacaggactcaacatactagtcacagccctatactccctctacatatttaccacaacacaatggggctcactcacccaccacatt

SEQ ID NO: 59005 - DNA, 120 bp, Homo sapiens
  misc_feature: 1385 for SV(W|O) and mtDNA
tcctattcgcctacacaattctccgatccgtccctaacaaactaggaggcgtccttgccctattactatccatcctcatcctagcaataatccccatcctccatatatccaaacaacaaa

SEQ ID NO: 59006 - DNA, 120 bp, Homo sapiens
  misc_feature: 1385 for SV(W|O) and mtDNA
tttgtgaagtaggccttatttctcttgtcctttcgtacagggaggaatttgaagtagatagaaaccgacctggattactccggtctgaactcagatcacgtaggactttaatcgttgaac

SEQ ID NO: 59007 - DNA, 120 bp, Homo sapiens
  misc_feature: 1385 for SV(W|O) and mtDNA
tttactgctaaatccaccttcgacccttaagtttcataagggctatcgtagttttctggggtagaaaatgtagcccatttcttgccacctcatgggctacaccttgacctaacgtcttta

SEQ ID NO: 59008 - DNA, 120 bp, Homo sapiens
  misc_feature: 1385 for SV(W|O) and mtDNA
ttcgtacagggaggaatttgaagtagatagaaaccgacctggattactccggtctgaactcagatcacgtaggactttaatcgttgaacaaacgaacctttaatagcggctgcaccatcg

SEQ ID NO: 59009 - DNA, 120 bp, Homo sapiens
  misc_feature: 1385 for SV(W|O) and mtDNA
ttcatacacctatcccccattctcctcctatccctcaaccccgacatcattaccgggttttcctcttgtaaatatagtttaaccaaaacatcagattgtgaatctgacaacagaggctta

SEQ ID NO: 59010 - DNA, 120 bp, Homo sapiens
  misc_feature: 1385 for SV(W|O) and mtDNA
ttaggggccatcaatttcatcacaacaattatcaatataaaaccccctgccataacccaataccaaacgcccctcttcgtctgatccgtcctaatcacagcagtcctacttctcctatct

SEQ ID NO: 59011 - DNA, 120 bp, Homo sapiens
  misc_feature: 1385 for SV(W|O) and mtDNA
gagacgctggagccggagcaccctatgtcgcagtatctgtctttgattcctgcctcatcccattatttatcgcacctacgttcaatattacaggcgaacatacttactaaagtgtgttaa

SEQ ID NO: 59012 - DNA, 120 bp, Homo sapiens
  misc_feature: 1385 for SV(W|O) and mtDNA
tgggtacttgcgcttactttgtagccttcatcagggtttgctgaagatggcggtatataggctgagcaagaggtggtgaggttgatcggggtttatcgattacagaacaggctcctctag

SEQ ID NO: 59013 - DNA, 120 bp, Homo sapiens
  misc_feature: 1385 for SV(W|O) and mtDNA
tgcaattcccggacgtctaaaccaaaccactttcaccgctacacgaccgggggtatactacggtcaatgctctgaaatctgtggagcaaaccacagtttcatgcccatcgtcctagaatt

SEQ ID NO: 59014 - DNA, 120 bp, Homo sapiens
  misc_feature: 1385 for SV(W|O) and mtDNA
tcgccttaattttaataatcaacaccctcctagccttactactaataattattacattttgactaccacaactcaacggctacatagaaaaatccaccccttacgagtgcggcttcgacc

SEQ ID NO: 59015 - DNA, 120 bp, Homo sapiens
  misc_feature: 1385 for SV(W|O) and mtDNA
tccggagagtatattgttgaagaggatagctattagaaggattatggatgcggttgcttgcgtgaggaaatacttgatggcagcttctgtggaacgagggtttatttttttggttagaac

SEQ ID NO: 59016 - DNA, 120 bp, Homo sapiens
  misc_feature: 1385 for SV(W|O) and mtDNA
tcactatactactaacagaccgcaacctcaacaccaccttcttcgaccccgccggaggaggagaccccattctataccaacacctattctgatttttcggtcaccctgaagtttatattc

SEQ ID NO: 59017 - DNA, 120 bp, Homo sapiens
  misc_feature: 1385 for SV(W|O) and mtDNA
tcaaatcaattggccaccaatggtactgaacctacgagtacaccgactacggcggactaatcttcaactcctacatacttcccccattattcctagaaccaggcgacctgcgactccttg

SEQ ID NO: 59018 - DNA, 120 bp, Homo sapiens
  misc_feature: 1385 for SV(W|O) and mtDNA
taggtagaagtagaggttaaggagggtgatggtggctatgatggtggggatgatgaggctattgttttttgtgaattcttcgataatggcccatttgggcaaaaagccggttagcggggg

SEQ ID NO: 59019 - DNA, 120 bp, Homo sapiens
  misc_feature: 1385 for SV(W|O) and mtDNA
gtcctacgtgatctgagttcagaccggagtaatccaggtcggtttctatctacttcaaattcctccctgtacgaaaggacaagagaaataaggcctacttcacaaagcgccttcccccgt

SEQ ID NO: 59020 - DNA, 120 bp, Homo sapiens
  misc_feature: 1385 for SV(W|O) and mtDNA
gtaaatgagtgaggcaggagtccgaggaggttagttgtggcaataaaaatgattaaggatactagtataagagatcaggttcgtcctttagtgttgtgtatggttatcatttgttttgag

SEQ ID NO: 59021 - DNA, 120 bp, Homo sapiens
  misc_feature: 1385 for SV(W|O) and mtDNA
gggccatcaatttcatcacaacaattatcaatataaaaccccctgccataacccaataccaaacgcccctcttcgtctgatccgtcctaatcacagcagtcctacttctcctatctctcc

SEQ ID NO: 59022 - DNA, 120 bp, Homo sapiens
  misc_feature: 1385 for SV(W|O) and mtDNA
acccaattggaccaatctatcaccctatagaagaactaatgttagtataagtaacatgaaaacattctcctccgcataagcctgcgtcagattaaaacactgaactgacaattaacagcc

SEQ ID NO: 59023 - DNA, 120 bp, Homo sapiens
  misc_feature: 1385 for SV(W|O) and mtDNA
ggcagagcccggtaatcgcataaaacttaaaactttacagtcagaggttcaattcctcttcttaacaacatacccatggccaacctcctactcctcattgtacccattctaatcgcaatg

SEQ ID NO: 59024 - DNA, 120 bp, Homo sapiens
  misc_feature: 1385 for SV(W|O) and mtDNA
ggaatagccccctttcacttctgagtcccagaggttacccaaggcacccctctgacatccggcctgcttcttctcacatgacaaaaactagcccccatctcaatcatataccaaatctct

SEQ ID NO: 59025 - DNA, 120 bp, Homo sapiens
  misc_feature: 1385 for SV(W|O) and mtDNA
aagggctatttgttgtgggtctcatgagttggagtgtaggataaatcatgctaaggcgaggatgaaaccgatatcgccgatacggttgtataggattgcttgaatggctgctgtgttggc

SEQ ID NO: 59026 - DNA, 120 bp, Homo sapiens
  misc_feature: 1385 for SV(W|O) and mtDNA
ctctttcttcttcccactcatcctaaccctactcctaatcacataacctattcccccgagcaatctcaattacaatatatacaccaacaaacaatgttcaaccagtaactactactaatc

SEQ ID NO: 59027 - DNA, 120 bp, Homo sapiens
  misc_feature: 1385 for SV(W|O) and mtDNA
atggtttcgataataactagtatggggataaggggtgtaggtgtgccttgtggtaagaagtgggctagggcatttttaatcttagagcgaaagcctataatcactgcgcccgctcataag

SEQ ID NO: 59028 - DNA, 120 bp, Homo sapiens
  misc_feature: 1385 for SV(W|O) and mtDNA
ctccacagatttcagagcattgaccgtagtatacccccggtcgtgtagcggtgaaagtggtttggtttagacgtccgggaattgcatctgtttttaagcctaatgtggggacagctcatg

SEQ ID NO: 59029 - DNA, 120 bp, Homo sapiens
  misc_feature: 1385 for SV(W|O) and mtDNA
cctcttcacgggcaggtcaatttcactggttaaaagtaagagacagctgaaccctcgtggagccattcatacaggtccctatttaaggaacaagtgattatgctacctttgcacggttag

SEQ ID NO: 59030 - DNA, 120 bp, Homo sapiens
  misc_feature: 1385 for SV(W|O) and mtDNA
cgtggtgatttagagggtgaactcactggaacggggatgcttgcatgtgtaatcttactaagagctaatagaaaggctaggaccaaacctatttgtttatggggtgatgtgagcccgtct

SEQ ID NO: 59031 - DNA, 120 bp, Homo sapiens
  misc_feature: 1385 for SV(W|O) and mtDNA
agaggagcctgttctgtaatcgataaaccccgatcaacctcaccacctcttgctcagcctatataccgccatcttcagcaaaccctgatgaaggctacaaagtaagcgcaagtacccacg

SEQ ID NO: 59032 - DNA, 120 bp, Homo sapiens
  misc_feature: 1385 for SV(W|O) and mtDNA
agttctaccgtacaaccctaacataaccattcttaatttaactatttatattatcctaactactaccgcattcctactactcaacttaaactccagcaccacgaccctactactatctcg

SEQ ID NO: 59033 - DNA, 120 bp, Homo sapiens
  misc_feature: 1385 for SV(W|O) and mtDNA
ccctagccatcattctactatcaacattactaataagtggctcctttaacctctccacccttatcacaacacaagaacacctctgattactcctgccatcatgacccttggccataatat

SEQ ID NO: 59034 - DNA, 120 bp, Homo sapiens
  misc_feature: 1385 for SV(W|O) and mtDNA
atgaggaatagtgtaaggagtatgggggtaattatggtgggccatacggtagtatttagttggggcatttcactgtaaagaggtgttggttctcttaatctttaacttaaaaggttaatg

SEQ ID NO: 59035 - DNA, 120 bp, Homo sapiens
  misc_feature: 1385 for SV(W|O) and mtDNA
agtaataaccatgcacactactataaccaccctaaccctgacttccctaattccccccatccttaccaccctcgttaaccctaacaaaaaaaactcatacccccattatgtaaaatccat

SEQ ID NO: 59036 - DNA, 120 bp, Homo sapiens
  misc_feature: 1385 for SV(W|O) and mtDNA
agcttacctcctcaaagcaatacactgaaaatgtttagacgggctcacatcaccccataaacaaataggtttggtcctagcctttctattagctcttagtaagattacacatgcaagcat

SEQ ID NO: 59037 - DNA, 120 bp, Homo sapiens
  misc_feature: 1385 for SV(W|O) and mtDNA
agaaaaatccaccccttacgagtgcggcttcgaccctatatcccccgcccgcgtccctttctccataaaattcttcttagtagctattaccttcttattatttgatctagaaattgccct

SEQ ID NO: 59038 - DNA, 120 bp, Homo sapiens
  misc_feature: 1385 for SV(W|O) and mtDNA
agaaggattatggatgcggttgcttgcgtgaggaaatacttgatggcagcttctgtggaacgagggtttatttttttggttagaactggaataaaagctagcatgtttatttctaggcct

SEQ ID NO: 59039 - DNA, 120 bp, Homo sapiens
  misc_feature: 1385 for SV(W|O) and mtDNA
aaaatccaccccttacgagtgcggcttcgaccctatatcccccgcccgcgtccctttctccataaaattcttcttagtagctattaccttcttattatttgatctagaaattgccctcct

SEQ ID NO: 59040 - DNA, 120 bp, Homo sapiens
  misc_feature: 1384 for SV(W|O) and mtDNA
gaacaagatattcgaaaaataggaggactactcaaaaccatacctctcacttcaacctccctcaccattggcagcctagcattagcaggaatacctttcctcacaggtttctactccaaa

SEQ ID NO: 59041 - DNA, 120 bp, Homo sapiens
  misc_feature: 1384 for SV(W|O) and mtDNA
ttgttgtgagtgttaggaaaagggcatacaggactaggaagcagataaggaaaatgattatgagggcgtgatcatgaaaggtgataagctcttctatgataggggaagtagcgtcttgta

SEQ ID NO: 59042 - DNA, 120 bp, Homo sapiens
  misc_feature: 1384 for SV(W|O) and mtDNA
gggtgctttgtgttaagctacactctggttcgtccaagtgcactttccagtacacttaccatgttacgacttgtctcctctatataaatgcgtaggggttttagttaaatgtcctttgaa

SEQ ID NO: 59043 - DNA, 120 bp, Homo sapiens
  misc_feature: 1384 for SV(W|O) and mtDNA
agaaagcacataccaaggccaccacacaccacctgtccaaaaaggccttcgatacgggataatcctatttattacctcagaagtttttttcttcgcaggatttttctgagccttttacca

SEQ ID NO: 59044 - DNA, 120 bp, Homo sapiens
  misc_feature: 1384 for SV(W|O) and mtDNA
tggcagagcccggtaatcgcataaaacttaaaactttacagtcagaggttcaattcctcttcttaacaacatacccatggccaacctcctactcctcattgtacccattctaatcgcaat

SEQ ID NO: 59045 - DNA, 120 bp, Homo sapiens
  misc_feature: 1384 for SV(W|O) and mtDNA
tgatcgtggtgatttagagggtgaactcactggaacggggatgcttgcatgtgtaatcttactaagagctaatagaaaggctaggaccaaacctatttgtttatggggtgatgtgagccc

SEQ ID NO: 59046 - DNA, 120 bp, Homo sapiens
  misc_feature: 1384 for SV(W|O) and mtDNA
atacacctatcccccattctcctcctatccctcaaccccgacatcattaccgggttttcctcttgtaaatatagtttaaccaaaacatcagattgtgaatctgacaacagaggcttacga

SEQ ID NO: 59047 - DNA, 120 bp, Homo sapiens
  misc_feature: 1384 for SV(W|O) and mtDNA
aggtattcctgctaatgctaggctgccaatggtgagggaggttgaagtgagaggtatggttttgagtagtcctcctatttttcgaatatcttgttcattgttaaggttgtggatgatgga

SEQ ID NO: 59048 - DNA, 120 bp, Homo sapiens
  misc_feature: 1384 for SV(W|O) and mtDNA
tcactggaacggggatgcttgcatgtgtaatcttactaagagctaatagaaaggctaggaccaaacctatttgtttatggggtgatgtgagcccgtctaaacattttcagtgtattgctt

SEQ ID NO: 59049 - DNA, 120 bp, Homo sapiens
  misc_feature: 1384 for SV(W|O) and mtDNA
tagccccctttcacttctgagtcccagaggttacccaaggcacccctctgacatccggcctgcttcttctcacatgacaaaaactagcccccatctcaatcatataccaaatctctccct

SEQ ID NO: 59050 - DNA, 120 bp, Homo sapiens
  misc_feature: 1384 for SV(W|O) and mtDNA
taaatgagtgaggcaggagtccgaggaggttagttgtggcaataaaaatgattaaggatactagtataagagatcaggttcgtcctttagtgttgtgtatggttatcatttgttttgagg

SEQ ID NO: 59051 - DNA, 120 bp, Homo sapiens
  misc_feature: 1384 for SV(W|O) and mtDNA
ctttatttgggtaaatggtttggctaaggttgtctggtagtaaggtggagtgggtttggggctaggtttagctcagagcggtcaagttaagttgaaatctcctaagtgtaagttgggtgc

SEQ ID NO: 59052 - DNA, 120 bp, Homo sapiens
  misc_feature: 1384 for SV(W|O) and mtDNA
cttaggggccatcaatttcatcacaacaattatcaatataaaaccccctgccataacccaataccaaacgcccctcttcgtctgatccgtcctaatcacagcagtcctacttctcctatc

SEQ ID NO: 59053 - DNA, 120 bp, Homo sapiens
  misc_feature: 1384 for SV(W|O) and mtDNA
caatgaacaagatattcgaaaaataggaggactactcaaaaccatacctctcacttcaacctccctcaccattggcagcctagcattagcaggaatacctttcctcacaggtttctactc

SEQ ID NO: 59054 - DNA, 120 bp, Homo sapiens
  misc_feature: 1384 for SV(W|O) and mtDNA
gaaaggtattcctgctaatgctaggctgccaatggtgagggaggttgaagtgagaggtatggttttgagtagtcctcctatttttcgaatatcttgttcattgttaaggttgtggatgat

SEQ ID NO: 59055 - DNA, 120 bp, Homo sapiens
  misc_feature: 1384 for SV(W|O) and mtDNA
catggccatccccttatgagcgggcgcagtgattataggctttcgctctaagattaaaaatgccctagcccacttcttaccacaaggcacacctacaccccttatccccatactagttat

SEQ ID NO: 59056 - DNA, 120 bp, Homo sapiens
  misc_feature: 1384 for SV(W|O) and mtDNA
aggttagttgtggcaataaaaatgattaaggatactagtataagagatcaggttcgtcctttagtgttgtgtatggttatcatttgttttgaggttagtttgattagtcattgttgggtg

SEQ ID NO: 59057 - DNA, 120 bp, Homo sapiens
  misc_feature: 1384 for SV(W|O) and mtDNA
acgacaaacagacctaaaatcgctcattgcatactcttcaatcagccacatagccctcgtagtaacagccattctcatccaaaccccctgaagcttcaccggcgcagtcattctcataat

SEQ ID NO: 59058 - DNA, 120 bp, Homo sapiens
  misc_feature: 1384 for SV(W|O) and mtDNA
atatcatctcaacttagtattatacccacacccacccaagaacagggtttgttaagatggcagagcccggtaatcgcataaaacttaaaactttacagtcagaggttcaattcctcttct

SEQ ID NO: 59059 - DNA, 120 bp, Homo sapiens
  misc_feature: 1383 for SV(W|O) and mtDNA
gctgggccagccaggcaaccttctaggtaacgaccacatctacaacgttatcgtcacagcccatgcatttgtaataatcttcttcatagtaatacccatcataatcggaggctttggcaa

SEQ ID NO: 59060 - DNA, 120 bp, Homo sapiens
  misc_feature: 1383 for SV(W|O) and mtDNA
ttcccctaataatcggtgcccccgatatggcgtttccccgcataaacaacataagcttctgactcttacctccctctctcctactcctgctcgcatctgctatagtggaggccggagcag

SEQ ID NO: 59061 - DNA, 120 bp, Homo sapiens
  misc_feature: 1383 for SV(W|O) and mtDNA
ttacgggggaaggcgctttgtgaagtaggccttatttctcttgtcctttcgtacagggaggaatttgaagtagatagaaaccgacctggattactccggtctgaactcagatcacgtagg

SEQ ID NO: 59062 - DNA, 120 bp, Homo sapiens
  misc_feature: 1383 for SV(W|O) and mtDNA
ctaaagtgaactgtatccgacatctggttcctacttcagggtcataaagcctaaatagcccacacgttccccttaaataagacatcacgatggatcacaggtctatcaccctattaacca

SEQ ID NO: 59063 - DNA, 120 bp, Homo sapiens
  misc_feature: 1383 for SV(W|O) and mtDNA
acaccgactacggcggactaatcttcaactcctacatacttcccccattattcctagaaccaggcgacctgcgactccttgacgttgacaatcgagtagtactcccgattgaagccccca

SEQ ID NO: 59064 - DNA, 120 bp, Homo sapiens
  misc_feature: 1383 for SV(W|O) and mtDNA
cctactatgggtgttaaattttttactctctctacaaggttttttcctagtgtccaaagagctgttcctctttggactaacagttaaatttacaaggggatttagagggttctgtgggca

SEQ ID NO: 59065 - DNA, 120 bp, Homo sapiens
  misc_feature: 1383 for SV(W|O) and mtDNA
atcttcaactcctacatacttcccccattattcctagaaccaggcgacctgcgactccttgacgttgacaatcgagtagtactcccgattgaagcccccattcgtataataattacatca

SEQ ID NO: 59066 - DNA, 120 bp, Homo sapiens
  misc_feature: 1383 for SV(W|O) and mtDNA
aacaccctcaccactacaatcttcctaggaacaacatatgacgcactctcccctgaactctacacaacatattttgtcaccaagaccctacttctaacctccctgttcttatgaattcga

SEQ ID NO: 59067 - DNA, 120 bp, Homo sapiens
  misc_feature: 1383 for SV(W|O) and mtDNA
taggtggcacggagaattttggattctcagggatgggttcgattctcatagtcctagaaataagggggtttaagctcctattatttactctatcaaagtaactcttttatcagacatatt

SEQ ID NO: 59068 - DNA, 120 bp, Homo sapiens
  misc_feature: 1383 for SV(W|O) and mtDNA
tagccatcattctactatcaacattactaataagtggctcctttaacctctccacccttatcacaacacaagaacacctctgattactcctgccatcatgacccttggccataatatgat

SEQ ID NO: 59069 - DNA, 120 bp, Homo sapiens
  misc_feature: 1383 for SV(W|O) and mtDNA
cacagtttatgtagcttacctcctcaaagcaatacactgaaaatgtttagacgggctcacatcaccccataaacaaataggtttggtcctagcctttctattagctcttagtaagattac

SEQ ID NO: 59070 - DNA, 120 bp, Homo sapiens
  misc_feature: 1383 for SV(W|O) and mtDNA
aagttttatgcgattaccgggctctgccatcttaacaaaccctgttcttgggtgggtgtgggtataatactaagttgagatgatatcatttacgggggaaggcgctttgtgaagtaggcc

SEQ ID NO: 59071 - DNA, 120 bp, Homo sapiens
  misc_feature: 1383 for SV(W|O) and mtDNA
gcgaacagagtggtgatagcgcctaagcatagtgttagagtttggattagtgggctattttctgctagggggtggaagcggatgagtaagaagattcctgctacaactatagtgcttgag

SEQ ID NO: 59072 - DNA, 120 bp, Homo sapiens
  misc_feature: 1383 for SV(W|O) and mtDNA
gagggctatgtggctgattgaagagtatgcaatgagcgattttaggtctgtttgtcgtaggcagatggagcttgttataattatgcctcatagggatagtacaaggaaggggtaggctat

SEQ ID NO: 59073 - DNA, 120 bp, Homo sapiens
  misc_feature: 1383 for SV(W|O) and mtDNA
aaacaaataggtttggtcctagcctttctattagctcttagtaagattacacatgcaagcatccccgttccagtgagttcaccctctaaatcaccacgatcaaaagggacaagcatcaag

SEQ ID NO: 59074 - DNA, 120 bp, Homo sapiens
  misc_feature: 1383 for SV(W|O) and mtDNA
cgataataactagtatggggataaggggtgtaggtgtgccttgtggtaagaagtgggctagggcatttttaatcttagagcgaaagcctataatcactgcgcccgctcataaggggatgg

SEQ ID NO: 59075 - DNA, 120 bp, Homo sapiens
  misc_feature: 1383 for SV(W|O) and mtDNA
cctcctcaaagcaatacactgaaaatgtttagacgggctcacatcaccccataaacaaataggtttggtcctagcctttctattagctcttagtaagattacacatgcaagcatccccgt

SEQ ID NO: 59076 - DNA, 120 bp, Homo sapiens
  misc_feature: 1383 for SV(W|O) and mtDNA
ccagtgacacatgtttaacggccgcggtaccctaaccgtgcaaaggtagcataatcacttgttccttaaatagggacctgtatgaatggctccacgagggttcagctgtctcttactttt

SEQ ID NO: 59077 - DNA, 120 bp, Homo sapiens
  misc_feature: 1383 for SV(W|O) and mtDNA
agttttatgcgattaccgggctctgccatcttaacaaaccctgttcttgggtgggtgtgggtataatactaagttgagatgatatcatttacgggggaaggcgctttgtgaagtaggcct

SEQ ID NO: 59078 - DNA, 120 bp, Homo sapiens
  misc_feature: 1383 for SV(W|O) and mtDNA
acctgtgaggaaaggtattcctgctaatgctaggctgccaatggtgagggaggttgaagtgagaggtatggttttgagtagtcctcctatttttcgaatatcttgttcattgttaaggtt

SEQ ID NO: 59079 - DNA, 120 bp, Homo sapiens
  misc_feature: 1383 for SV(W|O) and mtDNA
aagatttgccgagttccttttactttttttaacctttccttatgagcatgcctgtgttgggttgacagtgagggtaataatgacttgttggttgattgtagatattgggctgttaattgt

SEQ ID NO: 59080 - DNA, 120 bp, Homo sapiens
  misc_feature: 1382 for SV(W|O) and mtDNA
cctatctccccttttatactaataatcttatagaaatttaggttaaatacagaccaagagccttcaaagccctcagtaagttgcaatacttaatttctgtaacagctaaggactgcaaaa

SEQ ID NO: 59081 - DNA, 120 bp, Homo sapiens
  misc_feature: 1382 for SV(W|O) and mtDNA
ttttgatcgtggtgatttagagggtgaactcactggaacggggatgcttgcatgtgtaatcttactaagagctaatagaaaggctaggaccaaacctatttgtttatggggtgatgtgag

SEQ ID NO: 59082 - DNA, 120 bp, Homo sapiens
  misc_feature: 1382 for SV(W|O) and mtDNA
tttctcggtaaataaggggtcgtaagcctctgttgtcagattcacaatctgatgttttggttaaactatatttacaagaggaaaacccggtaatgatgtcggggttgagggataggagga

SEQ ID NO: 59083 - DNA, 120 bp, Homo sapiens
  misc_feature: 1382 for SV(W|O) and mtDNA
tttcacggaggatggtggtcaagggacccctatctgaggggggtcatccatggggacgagaagggatttgactgtaatgtgctatgtacggtaaatggctttatgtactatgtactgtta

SEQ ID NO: 59084 - DNA, 120 bp, Homo sapiens
  misc_feature: 1382 for SV(W|O) and mtDNA
aaacaatagcctcatcatccccaccatcatagccaccatcaccctccttaacctctacttctacctacgcctaatctactccacctcaatcacactactccccatatctaacaacgtaaa

SEQ ID NO: 59085 - DNA, 120 bp, Homo sapiens
  misc_feature: 1382 for SV(W|O) and mtDNA
ttgatcgtggtgatttagagggtgaactcactggaacggggatgcttgcatgtgtaatcttactaagagctaatagaaaggctaggaccaaacctatttgtttatggggtgatgtgagcc

SEQ ID NO: 59086 - DNA, 120 bp, Homo sapiens
  misc_feature: 1382 for SV(W|O) and mtDNA
ttctataagattattagtataaaaggggagataggtaggagtagcgtggtaagggcgatgagtgtggggaggaatggggtgggttttgtatgttcaaactgtcattttatttttacgttg

SEQ ID NO: 59087 - DNA, 120 bp, Homo sapiens
  misc_feature: 1382 for SV(W|O) and mtDNA
ttattttcgttaatgttagtaagggtggggaagcgaggttgacctgttagggtgagaagaattattcgagtgctataggcgcttgtcagggaggtagcgatgagagtaatagatagggct

SEQ ID NO: 59088 - DNA, 120 bp, Homo sapiens
  misc_feature: 1382 for SV(W|O) and mtDNA
tcctacgtgatctgagttcagaccggagtaatccaggtcggtttctatctacttcaaattcctccctgtacgaaaggacaagagaaataaggcctacttcacaaagcgccttcccccgta

SEQ ID NO: 59089 - DNA, 120 bp, Homo sapiens
  misc_feature: 1382 for SV(W|O) and mtDNA
acttgcgcttactttgtagccttcatcagggtttgctgaagatggcggtatataggctgagcaagaggtggtgaggttgatcggggtttatcgattacagaacaggctcctctagaggga

SEQ ID NO: 59090 - DNA, 120 bp, Homo sapiens
  misc_feature: 1382 for SV(W|O) and mtDNA
agctgctggcatcactatactactaacagaccgcaacctcaacaccaccttcttcgaccccgccggaggaggagaccccattctataccaacacctattctgatttttcggtcaccctga

SEQ ID NO: 59091 - DNA, 120 bp, Homo sapiens
  misc_feature: 1382 for SV(W|O) and mtDNA
tatcatctcaacttagtattatacccacacccacccaagaacagggtttgttaagatggcagagcccggtaatcgcataaaacttaaaactttacagtcagaggttcaattcctcttctt

SEQ ID NO: 59092 - DNA, 120 bp, Homo sapiens
  misc_feature: 1382 for SV(W|O) and mtDNA
tagaaggattatggatgcggttgcttgcgtgaggaaatacttgatggcagcttctgtggaacgagggtttatttttttggttagaactggaataaaagctagcatgtttatttctaggcc

SEQ ID NO: 59093 - DNA, 120 bp, Homo sapiens
  misc_feature: 1382 for SV(W|O) and mtDNA
gttttaagttttatgcgattaccgggctctgccatcttaacaaaccctgttcttgggtgggtgtgggtataatactaagttgagatgatatcatttacgggggaaggcgctttgtgaagt

SEQ ID NO: 59094 - DNA, 120 bp, Homo sapiens
  misc_feature: 1382 for SV(W|O) and mtDNA
gtattcctgctaatgctaggctgccaatggtgagggaggttgaagtgagaggtatggttttgagtagtcctcctatttttcgaatatcttgttcattgttaaggttgtggatgatggacc

SEQ ID NO: 59095 - DNA, 120 bp, Homo sapiens
  misc_feature: 1382 for SV(W|O) and mtDNA
gtacttgcgcttactttgtagccttcatcagggtttgctgaagatggcggtatataggctgagcaagaggtggtgaggttgatcggggtttatcgattacagaacaggctcctctagagg

SEQ ID NO: 59096 - DNA, 120 bp, Homo sapiens
  misc_feature: 1382 for SV(W|O) and mtDNA
gcttacctcctcaaagcaatacactgaaaatgtttagacgggctcacatcaccccataaacaaataggtttggtcctagcctttctattagctcttagtaagattacacatgcaagcatc

SEQ ID NO: 59097 - DNA, 120 bp, Homo sapiens
  misc_feature: 1382 for SV(W|O) and mtDNA
cttcataggctatgtcctcccgtgaggccaaatatcattctgaggggccacagtaattacaaacttactatccgccatcccatacattgggacagacctagttcaatgaatctgaggagg

SEQ ID NO: 59098 - DNA, 120 bp, Homo sapiens
  misc_feature: 1382 for SV(W|O) and mtDNA
ctcactggaacggggatgcttgcatgtgtaatcttactaagagctaatagaaaggctaggaccaaacctatttgtttatggggtgatgtgagcccgtctaaacattttcagtgtattgct

SEQ ID NO: 59099 - DNA, 120 bp, Homo sapiens
  misc_feature: 1382 for SV(W|O) and mtDNA
agtaagcgcaagtacccacgtaaagacgttaggtcaaggtgtagcccatgaggtggcaagaaatgggctacattttctaccccagaaaactacgatagcccttatgaaacttaagggtcg

SEQ ID NO: 59100 - DNA, 120 bp, Homo sapiens
  misc_feature: 1382 for SV(W|O) and mtDNA
cctagccatggccatccccttatgagcgggcgcagtgattataggctttcgctctaagattaaaaatgccctagcccacttcttaccacaaggcacacctacaccccttatccccatact

SEQ ID NO: 59101 - DNA, 120 bp, Homo sapiens
  misc_feature: 1382 for SV(W|O) and mtDNA
atctaaagacaggggttaggcctctttttaccagctccgaggtgattttcatattgaattgcaaattcgaagaagcagcttcaaacctgccggggcttctcccgccttttttcccggcgg

SEQ ID NO: 59102 - DNA, 120 bp, Homo sapiens
  misc_feature: 1382 for SV(W|O) and mtDNA
ccgatgaggcaaccagccagaacgcctgaacgcaggcacatacttcctattctacaccctagtaggctcccttcccctactcatcgcactaatttacactcacaacaccctaggctcact

SEQ ID NO: 59103 - DNA, 120 bp, Homo sapiens
  misc_feature: 1382 for SV(W|O) and mtDNA
catgacccctaacaggggccctctcagccctcctaatgacctccggcctagccatgtgatttcacttccactccataacgctcctcatactaggcctactaaccaacacactaaccatat

SEQ ID NO: 59104 - DNA, 120 bp, Homo sapiens
  misc_feature: 1382 for SV(W|O) and mtDNA
agaacagggtttgttaagatggcagagcccggtaatcgcataaaacttaaaactttacagtcagaggttcaattcctcttcttaacaacatacccatggccaacctcctactcctcattg

SEQ ID NO: 59105 - DNA, 120 bp, Homo sapiens
  misc_feature: 1382 for SV(W|O) and mtDNA
aagtacccacgtaaagacgttaggtcaaggtgtagcccatgaggtggcaagaaatgggctacattttctaccccagaaaactacgatagcccttatgaaacttaagggtcgaaggtggat

SEQ ID NO: 59106 - DNA, 120 bp, Homo sapiens
  misc_feature: 1382 for SV(W|O) and mtDNA
aaggagtcgcaggtcgcctggttctaggaataatgggggaagtatgtaggagttgaagattagtccgccgtagtcggtgtactcgtaggttcagtaccattggtggccaattgatttgat

SEQ ID NO: 59107 - DNA, 120 bp, Homo sapiens
  misc_feature: 1381 for SV(W|O) and mtDNA
tttaagttttatgcgattaccgggctctgccatcttaacaaaccctgttcttgggtgggtgtgggtataatactaagttgagatgatatcatttacgggggaaggcgctttgtgaagtag

SEQ ID NO: 59108 - DNA, 120 bp, Homo sapiens
  misc_feature: 1381 for SV(W|O) and mtDNA
taattatgcctcatagggatagtacaaggaaggggtaggctatgtgttttgtcagggggttgagaatgagtgtgaggcgtattataccatagccgcctagttttaagagtactgcggcaa

SEQ ID NO: 59109 - DNA, 120 bp, Homo sapiens
  misc_feature: 1381 for SV(W|O) and mtDNA
ttctaggaataatgggggaagtatgtaggagttgaagattagtccgccgtagtcggtgtactcgtaggttcagtaccattggtggccaattgatttgatggtaagggagggatcgttgac

SEQ ID NO: 59110 - DNA, 120 bp, Homo sapiens
  misc_feature: 1381 for SV(W|O) and mtDNA
ttagacgtccgggaattgcatctgtttttaagcctaatgtggggacagctcatgagtgcaagacgtcttgtgatgtaattattatacgaatgggggcttcaatcgggagtactactcgat

SEQ ID NO: 59111 - DNA, 120 bp, Homo sapiens
  misc_feature: 1381 for SV(W|O) and mtDNA
tgtatttcaactacaagaacaccaatgaccccaatacgcaaaactaaccccctaataaaattaattaaccactcattcatcgacctccccaccccatccaacatctccacatgatgaaac

SEQ ID NO: 59112 - DNA, 120 bp, Homo sapiens
  misc_feature: 1381 for SV(W|O) and mtDNA
tattcgcctacacaattctccgatccgtccctaacaaactaggaggcgtccttgccctattactatccatcctcatcctagcaataatccccatcctccatatatccaaacaacaaagca

SEQ ID NO: 59113 - DNA, 120 bp, Homo sapiens
  misc_feature: 1381 for SV(W|O) and mtDNA
tatctccccttttatactaataatcttatagaaatttaggttaaatacagaccaagagccttcaaagccctcagtaagttgcaatacttaatttctgtaacagctaaggactgcaaaacc

SEQ ID NO: 59114 - DNA, 120 bp, Homo sapiens
  misc_feature: 1381 for SV(W|O) and mtDNA
ctatcaacattactaataagtggctcctttaacctctccacccttatcacaacacaagaacacctctgattactcctgccatcatgacccttggccataatatgatttatctccacacta

SEQ ID NO: 59115 - DNA, 120 bp, Homo sapiens
  misc_feature: 1381 for SV(W|O) and mtDNA
tagacgtccgggaattgcatctgtttttaagcctaatgtggggacagctcatgagtgcaagacgtcttgtgatgtaattattatacgaatgggggcttcaatcgggagtactactcgatt

SEQ ID NO: 59116 - DNA, 120 bp, Homo sapiens
  misc_feature: 1381 for SV(W|O) and mtDNA
gcctcttcacgggcaggtcaatttcactggttaaaagtaagagacagctgaaccctcgtggagccattcatacaggtccctatttaaggaacaagtgattatgctacctttgcacggtta

SEQ ID NO: 59117 - DNA, 120 bp, Homo sapiens
  misc_feature: 1381 for SV(W|O) and mtDNA
ctatctccccttttatactaataatcttatagaaatttaggttaaatacagaccaagagccttcaaagccctcagtaagttgcaatacttaatttctgtaacagctaaggactgcaaaac

SEQ ID NO: 59118 - DNA, 120 bp, Homo sapiens
  misc_feature: 1381 for SV(W|O) and mtDNA
gttcatacacctatcccccattctcctcctatccctcaaccccgacatcattaccgggttttcctcttgtaaatatagtttaaccaaaacatcagattgtgaatctgacaacagaggctt

SEQ ID NO: 59119 - DNA, 120 bp, Homo sapiens
  misc_feature: 1381 for SV(W|O) and mtDNA
gtgatgctagaggtgatgtttttggtaaacaggcggggtaagatttgccgagttccttttactttttttaacctttccttatgagcatgcctgtgttgggttgacagtgagggtaataat

SEQ ID NO: 59120 - DNA, 120 bp, Homo sapiens
  misc_feature: 1381 for SV(W|O) and mtDNA
gtagagtgcttagttgaacagggccctgaagcgcgtacacaccgcccgtcaccctcctcaagtatacttcaaaggacatttaactaaaacccctacgcatttatatagaggagacaagtc

SEQ ID NO: 59121 - DNA, 120 bp, Homo sapiens
  misc_feature: 1381 for SV(W|O) and mtDNA
gtacaatgaggagtaggaggttggccatgggtatgttgttaagaagaggaattgaacctctgactgtaaagttttaagttttatgcgattaccgggctctgccatcttaacaaaccctgt

SEQ ID NO: 59122 - DNA, 120 bp, Homo sapiens
  misc_feature: 1381 for SV(W|O) and mtDNA
aacaaataggtttggtcctagcctttctattagctcttagtaagattacacatgcaagcatccccgttccagtgagttcaccctctaaatcaccacgatcaaaagggacaagcatcaagc

SEQ ID NO: 59123 - DNA, 120 bp, Homo sapiens
  misc_feature: 1381 for SV(W|O) and mtDNA
gctccacagatttcagagcattgaccgtagtatacccccggtcgtgtagcggtgaaagtggtttggtttagacgtccgggaattgcatctgtttttaagcctaatgtggggacagctcat

SEQ ID NO: 59124 - DNA, 120 bp, Homo sapiens
  misc_feature: 1381 for SV(W|O) and mtDNA
cacatcaagcccgaatgatatttcctattcgcctacacaattctccgatccgtccctaacaaactaggaggcgtccttgccctattactatccatcctcatcctagcaataatccccatc

SEQ ID NO: 59125 - DNA, 120 bp, Homo sapiens
  misc_feature: 1381 for SV(W|O) and mtDNA
ctcctcatacccaattggaccaatctatcaccctatagaagaactaatgttagtataagtaacatgaaaacattctcctccgcataagcctgcgtcagattaaaacactgaactgacaat

SEQ ID NO: 59126 - DNA, 120 bp, Homo sapiens
  misc_feature: 1381 for SV(W|O) and mtDNA
cggactaatcttcaactcctacatacttcccccattattcctagaaccaggcgacctgcgactccttgacgttgacaatcgagtagtactcccgattgaagcccccattcgtataataat

SEQ ID NO: 59127 - DNA, 120 bp, Homo sapiens
  misc_feature: 1381 for SV(W|O) and mtDNA
cctagccatcattctactatcaacattactaataagtggctcctttaacctctccacccttatcacaacacaagaacacctctgattactcctgccatcatgacccttggccataatatg

SEQ ID NO: 59128 - DNA, 120 bp, Homo sapiens
  misc_feature: 1381 for SV(W|O) and mtDNA
cctaaaatcgctcattgcatactcttcaatcagccacatagccctcgtagtaacagccattctcatccaaaccccctgaagcttcaccggcgcagtcattctcataatcgcccacgggct

SEQ ID NO: 59129 - DNA, 120 bp, Homo sapiens
  misc_feature: 1381 for SV(W|O) and mtDNA
catctgtaggctcattcatttctctaacagcagtaatattaataattttcatgatttgagaagccttcgcttcaaagcgaaaagtcctaatagtagaagaaccctccataaacctggagt

SEQ ID NO: 59130 - DNA, 120 bp, Homo sapiens
  misc_feature: 1381 for SV(W|O) and mtDNA
atgcaattcccggacgtctaaaccaaaccactttcaccgctacacgaccgggggtatactacggtcaatgctctgaaatctgtggagcaaaccacagtttcatgcccatcgtcctagaat

SEQ ID NO: 59131 - DNA, 120 bp, Homo sapiens
  misc_feature: 1381 for SV(W|O) and mtDNA
aacctacgagtacaccgactacggcggactaatcttcaactcctacatacttcccccattattcctagaaccaggcgacctgcgactccttgacgttgacaatcgagtagtactcccgat

SEQ ID NO: 59132 - DNA, 120 bp, Homo sapiens
  misc_feature: 1381 for SV(W|O) and mtDNA
aacctgtgaggaaaggtattcctgctaatgctaggctgccaatggtgagggaggttgaagtgagaggtatggttttgagtagtcctcctatttttcgaatatcttgttcattgttaaggt

SEQ ID NO: 59133 - DNA, 120 bp, Homo sapiens
  misc_feature: 1380 for SV(W|O) and mtDNA
tttgctccacagatttcagagcattgaccgtagtatacccccggtcgtgtagcggtgaaagtggtttggtttagacgtccgggaattgcatctgtttttaagcctaatgtggggacagct

SEQ ID NO: 59134 - DNA, 120 bp, Homo sapiens
  misc_feature: 1380 for SV(W|O) and mtDNA
gctgctggcatcactatactactaacagaccgcaacctcaacaccaccttcttcgaccccgccggaggaggagaccccattctataccaacacctattctgatttttcggtcaccctgaa

SEQ ID NO: 59135 - DNA, 120 bp, Homo sapiens
  misc_feature: 1380 for SV(W|O) and mtDNA
ttagaaggattatggatgcggttgcttgcgtgaggaaatacttgatggcagcttctgtggaacgagggtttatttttttggttagaactggaataaaagctagcatgtttatttctaggc

SEQ ID NO: 59136 - DNA, 120 bp, Homo sapiens
  misc_feature: 1380 for SV(W|O) and mtDNA
tcttcaatcagccacatagccctcgtagtaacagccattctcatccaaaccccctgaagcttcaccggcgcagtcattctcataatcgcccacgggcttacatcctcattactattctgc

SEQ ID NO: 59137 - DNA, 120 bp, Homo sapiens
  misc_feature: 1380 for SV(W|O) and mtDNA
attcgagccgagctgggccagccaggcaaccttctaggtaacgaccacatctacaacgttatcgtcacagcccatgcatttgtaataatcttcttcatagtaatacccatcataatcgga

SEQ ID NO: 59138 - DNA, 120 bp, Homo sapiens
  misc_feature: 1380 for SV(W|O) and mtDNA
cgcttactttgtagccttcatcagggtttgctgaagatggcggtatataggctgagcaagaggtggtgaggttgatcggggtttatcgattacagaacaggctcctctagagggatatga

SEQ ID NO: 59139 - DNA, 120 bp, Homo sapiens
  misc_feature: 1380 for SV(W|O) and mtDNA
aaacaccctcatgttcatacacctatcccccattctcctcctatccctcaaccccgacatcattaccgggttttcctcttgtaaatatagtttaaccaaaacatcagattgtgaatctga

SEQ ID NO: 59140 - DNA, 120 bp, Homo sapiens
  misc_feature: 1380 for SV(W|O) and mtDNA
ggtttttcatatcattggtcgtggttgtagtccgtgcgagaataatgatgtatgctttgtttctgttgagtgtgggtttagtaatggggtttgtggggttttcttctaagccttctccta

SEQ ID NO: 59141 - DNA, 120 bp, Homo sapiens
  misc_feature: 1380 for SV(W|O) and mtDNA
acaatgttcaaccagtaactactactaatcaacgcccataatcatacaaagcccccgcaccaataggatcctcccgaatcaaccctgacccctctccttcataaattattcagcttccta

SEQ ID NO: 59142 - DNA, 120 bp, Homo sapiens
  misc_feature: 1380 for SV(W|O) and mtDNA
tagccatggccatccccttatgagcgggcgcagtgattataggctttcgctctaagattaaaaatgccctagcccacttcttaccacaaggcacacctacaccccttatccccatactag

SEQ ID NO: 59143 - DNA, 120 bp, Homo sapiens
  misc_feature: 1380 for SV(W|O) and mtDNA
tacccacgtaaagacgttaggtcaaggtgtagcccatgaggtggcaagaaatgggctacattttctaccccagaaaactacgatagcccttatgaaacttaagggtcgaaggtggattta

SEQ ID NO: 59144 - DNA, 120 bp, Homo sapiens
  misc_feature: 1380 for SV(W|O) and mtDNA
cgagacgctggagccggagcaccctatgtcgcagtatctgtctttgattcctgcctcatcccattatttatcgcacctacgttcaatattacaggcgaacatacttactaaagtgtgtta

SEQ ID NO: 59145 - DNA, 120 bp, Homo sapiens
  misc_feature: 1380 for SV(W|O) and mtDNA
cccgatgaggcaaccagccagaacgcctgaacgcaggcacatacttcctattctacaccctagtaggctcccttcccctactcatcgcactaatttacactcacaacaccctaggctcac

SEQ ID NO: 59146 - DNA, 120 bp, Homo sapiens
  misc_feature: 1380 for SV(W|O) and mtDNA
aaaaatccaccccttacgagtgcggcttcgaccctatatcccccgcccgcgtccctttctccataaaattcttcttagtagctattaccttcttattatttgatctagaaattgccctcc

SEQ ID NO: 59147 - DNA, 120 bp, Homo sapiens
  misc_feature: 1380 for SV(W|O) and mtDNA
ggaataatgggggaagtatgtaggagttgaagattagtccgccgtagtcggtgtactcgtaggttcagtaccattggtggccaattgatttgatggtaagggagggatcgttgacctcgt

SEQ ID NO: 59148 - DNA, 120 bp, Homo sapiens
  misc_feature: 1380 for SV(W|O) and mtDNA
gcccggtaatcgcataaaacttaaaactttacagtcagaggttcaattcctcttcttaacaacatacccatggccaacctcctactcctcattgtacccattctaatcgcaatggcattc

SEQ ID NO: 59149 - DNA, 120 bp, Homo sapiens
  misc_feature: 1380 for SV(W|O) and mtDNA
gaaagtggtttggtttagacgtccgggaattgcatctgtttttaagcctaatgtggggacagctcatgagtgcaagacgtcttgtgatgtaattattatacgaatgggggcttcaatcgg

SEQ ID NO: 59150 - DNA, 120 bp, Homo sapiens
  misc_feature: 1380 for SV(W|O) and mtDNA
ctggcatcactatactactaacagaccgcaacctcaacaccaccttcttcgaccccgccggaggaggagaccccattctataccaacacctattctgatttttcggtcaccctgaagttt

SEQ ID NO: 59151 - DNA, 120 bp, Homo sapiens
  misc_feature: 1380 for SV(W|O) and mtDNA
ctcacagtcgcatcataatcctctctcaaggacttcaaactctactcccactaatagctttttgatgacttctagcaagcctcgctaacctcgccttaccccccactattaacctactgg

SEQ ID NO: 59152 - DNA, 120 bp, Homo sapiens
  misc_feature: 1380 for SV(W|O) and mtDNA
aggaataatgggggaagtatgtaggagttgaagattagtccgccgtagtcggtgtactcgtaggttcagtaccattggtggccaattgatttgatggtaagggagggatcgttgacctcg

SEQ ID NO: 59153 - DNA, 120 bp, Homo sapiens
  misc_feature: 1380 for SV(W|O) and mtDNA
cctgtgaggaaaggtattcctgctaatgctaggctgccaatggtgagggaggttgaagtgagaggtatggttttgagtagtcctcctatttttcgaatatcttgttcattgttaaggttg

SEQ ID NO: 59154 - DNA, 120 bp, Homo sapiens
  misc_feature: 1380 for SV(W|O) and mtDNA
agtagagtgcttagttgaacagggccctgaagcgcgtacacaccgcccgtcaccctcctcaagtatacttcaaaggacatttaactaaaacccctacgcatttatatagaggagacaagt

SEQ ID NO: 59155 - DNA, 120 bp, Homo sapiens
  misc_feature: 1380 for SV(W|O) and mtDNA
aaaattaattaaccactcattcatcgacctccccaccccatccaacatctccacatgatgaaacttcggctcactccttggcgcctgcctgattctccaaatcaccacaggactattcct

SEQ ID NO: 59156 - DNA, 120 bp, Homo sapiens
  misc_feature: 1380 for SV(W|O) and mtDNA
aagcctcgctaacctcgccttaccccccactattaacctactgggagaactctctgtgctagtaaccacgttctcctgatcaaatatcactctcctacttacaggactcaacatactagt

SEQ ID NO: 59157 - DNA, 120 bp, Homo sapiens
  misc_feature: 1379 for SV(W|O) and mtDNA
ttttgttgtgagtgttaggaaaagggcatacaggactaggaagcagataaggaaaatgattatgagggcgtgatcatgaaaggtgataagctcttctatgataggggaagtagcgtcttg

SEQ ID NO: 59158 - DNA, 120 bp, Homo sapiens
  misc_feature: 1379 for SV(W|O) and mtDNA
tttcaactacaagaacaccaatgaccccaatacgcaaaactaaccccctaataaaattaattaaccactcattcatcgacctccccaccccatccaacatctccacatgatgaaacttcg

SEQ ID NO: 59159 - DNA, 120 bp, Homo sapiens
  misc_feature: 1379 for SV(W|O) and mtDNA
attcttcatagccgaatacacaaacattattataataaacaccctcaccactacaatcttcctaggaacaacatatgacgcactctcccctgaactctacacaacatattttgtcaccaa

SEQ ID NO: 59160 - DNA, 120 bp, Homo sapiens
  misc_feature: 1379 for SV(W|O) and mtDNA
gatttcagagcattgaccgtagtatacccccggtcgtgtagcggtgaaagtggtttggtttagacgtccgggaattgcatctgtttttaagcctaatgtggggacagctcatgagtgcaa

SEQ ID NO: 59161 - DNA, 120 bp, Homo sapiens
  misc_feature: 1379 for SV(W|O) and mtDNA
gcccatgacccctaacaggggccctctcagccctcctaatgacctccggcctagccatgtgatttcacttccactccataacgctcctcatactaggcctactaaccaacacactaacca

SEQ ID NO: 59162 - DNA, 120 bp, Homo sapiens
  misc_feature: 1379 for SV(W|O) and mtDNA
aacaacatatgacgcactctcccctgaactctacacaacatattttgtcaccaagaccctacttctaacctccctgttcttatgaattcgaacagcatacccccgattccgctacgacca

SEQ ID NO: 59163 - DNA, 120 bp, Homo sapiens
  misc_feature: 1379 for SV(W|O) and mtDNA
agagcccggtaatcgcataaaacttaaaactttacagtcagaggttcaattcctcttcttaacaacatacccatggccaacctcctactcctcattgtacccattctaatcgcaatggca

SEQ ID NO: 59164 - DNA, 120 bp, Homo sapiens
  misc_feature: 1379 for SV(W|O) and mtDNA
gatgatatcatttacgggggaaggcgctttgtgaagtaggccttatttctcttgtcctttcgtacagggaggaatttgaagtagatagaaaccgacctggattactccggtctgaactca

SEQ ID NO: 59165 - DNA, 120 bp, Homo sapiens
  misc_feature: 1379 for SV(W|O) and mtDNA
aacgtaagccttctcctcactctctcaatcttatccatcatagcaggcagttgaggtggattaaaccaaacccagctacgcaaaatcttagcatactcctcaattacccacataggatga

SEQ ID NO: 59166 - DNA, 120 bp, Homo sapiens
  misc_feature: 1379 for SV(W|O) and mtDNA
ccatgggtatgttgttaagaagaggaattgaacctctgactgtaaagttttaagttttatgcgattaccgggctctgccatcttaacaaaccctgttcttgggtgggtgtgggtataata

SEQ ID NO: 59167 - DNA, 120 bp, Homo sapiens
  misc_feature: 1379 for SV(W|O) and mtDNA
tatcccccattctcctcctatccctcaaccccgacatcattaccgggttttcctcttgtaaatatagtttaaccaaaacatcagattgtgaatctgacaacagaggcttacgacccctta

SEQ ID NO: 59168 - DNA, 120 bp, Homo sapiens
  misc_feature: 1379 for SV(W|O) and mtDNA
taggtttggtcctagcctttctattagctcttagtaagattacacatgcaagcatccccgttccagtgagttcaccctctaaatcaccacgatcaaaagggacaagcatcaagcacgcag

SEQ ID NO: 59169 - DNA, 120 bp, Homo sapiens
  misc_feature: 1379 for SV(W|O) and mtDNA
gtggtgatttagagggtgaactcactggaacggggatgcttgcatgtgtaatcttactaagagctaatagaaaggctaggaccaaacctatttgtttatggggtgatgtgagcccgtcta

SEQ ID NO: 59170 - DNA, 120 bp, Homo sapiens
  misc_feature: 1379 for SV(W|O) and mtDNA
taaagttttaagttttatgcgattaccgggctctgccatcttaacaaaccctgttcttgggtgggtgtgggtataatactaagttgagatgatatcatttacgggggaaggcgctttgtg

SEQ ID NO: 59171 - DNA, 120 bp, Homo sapiens
  misc_feature: 1379 for SV(W|O) and mtDNA
gtatttcaactacaagaacaccaatgaccccaatacgcaaaactaaccccctaataaaattaattaaccactcattcatcgacctccccaccccatccaacatctccacatgatgaaact

SEQ ID NO: 59172 - DNA, 120 bp, Homo sapiens
  misc_feature: 1379 for SV(W|O) and mtDNA
ggagcctccgtagacctaaccatcttctccttacacctagcaggtgtctcctctatcttaggggccatcaatttcatcacaacaattatcaatataaaaccccctgccataacccaatac

SEQ ID NO: 59173 - DNA, 120 bp, Homo sapiens
  misc_feature: 1379 for SV(W|O) and mtDNA
gcggtggctggcacgaaattgaccaaccctggggttagtatagcttagttaaactttcgtttattgctaaaggttaatcactgctgtttcccgtgggggtgtggctaggctaagcgtttt

SEQ ID NO: 59174 - DNA, 120 bp, Homo sapiens
  misc_feature: 1379 for SV(W|O) and mtDNA
gcagagcccggtaatcgcataaaacttaaaactttacagtcagaggttcaattcctcttcttaacaacatacccatggccaacctcctactcctcattgtacccattctaatcgcaatgg

SEQ ID NO: 59175 - DNA, 120 bp, Homo sapiens
  misc_feature: 1379 for SV(W|O) and mtDNA
agcctcgctaacctcgccttaccccccactattaacctactgggagaactctctgtgctagtaaccacgttctcctgatcaaatatcactctcctacttacaggactcaacatactagtc

SEQ ID NO: 59176 - DNA, 120 bp, Homo sapiens
  misc_feature: 1379 for SV(W|O) and mtDNA
agactgctgcgaacagagtggtgatagcgcctaagcatagtgttagagtttggattagtgggctattttctgctagggggtggaagcggatgagtaagaagattcctgctacaactatag

SEQ ID NO: 59177 - DNA, 120 bp, Homo sapiens
  misc_feature: 1379 for SV(W|O) and mtDNA
agcgcaagtacccacgtaaagacgttaggtcaaggtgtagcccatgaggtggcaagaaatgggctacattttctaccccagaaaactacgatagcccttatgaaacttaagggtcgaagg

SEQ ID NO: 59178 - DNA, 120 bp, Homo sapiens
  misc_feature: 1379 for SV(W|O) and mtDNA
cctagttttattgctatagccattatgattattaatgatgagtactgattggtagtattggttatggttcattgtccggagagtatattgttgaagaggatagctattagaaggattatg

SEQ ID NO: 59179 - DNA, 120 bp, Homo sapiens
  misc_feature: 1379 for SV(W|O) and mtDNA
cccccattctcctcctatccctcaaccccgacatcattaccgggttttcctcttgtaaatatagtttaaccaaaacatcagattgtgaatctgacaacagaggcttacgaccccttattt

SEQ ID NO: 59180 - DNA, 120 bp, Homo sapiens
  misc_feature: 1379 for SV(W|O) and mtDNA
catcaagcccgaatgatatttcctattcgcctacacaattctccgatccgtccctaacaaactaggaggcgtccttgccctattactatccatcctcatcctagcaataatccccatcct

SEQ ID NO: 59181 - DNA, 120 bp, Homo sapiens
  misc_feature: 1379 for SV(W|O) and mtDNA
agggctatgtggctgattgaagagtatgcaatgagcgattttaggtctgtttgtcgtaggcagatggagcttgttataattatgcctcatagggatagtacaaggaaggggtaggctatg

SEQ ID NO: 59182 - DNA, 120 bp, Homo sapiens
  misc_feature: 1379 for SV(W|O) and mtDNA
cactatactactaacagaccgcaacctcaacaccaccttcttcgaccccgccggaggaggagaccccattctataccaacacctattctgatttttcggtcaccctgaagtttatattct

SEQ ID NO: 59183 - DNA, 120 bp, Homo sapiens
  misc_feature: 1379 for SV(W|O) and mtDNA
aaatccaccccttacgagtgcggcttcgaccctatatcccccgcccgcgtccctttctccataaaattcttcttagtagctattaccttcttattatttgatctagaaattgccctcctt

SEQ ID NO: 59184 - DNA, 120 bp, Homo sapiens
  misc_feature: 1378 for SV(W|O) and mtDNA
tttggtgcaactccaaataaaagtaataaccatgcacactactataaccaccctaaccctgacttccctaattccccccatccttaccaccctcgttaaccctaacaaaaaaaactcata

SEQ ID NO: 59185 - DNA, 120 bp, Homo sapiens
  misc_feature: 1378 for SV(W|O) and mtDNA
ttataattatgcctcatagggatagtacaaggaaggggtaggctatgtgttttgtcagggggttgagaatgagtgtgaggcgtattataccatagccgcctagttttaagagtactgcgg

SEQ ID NO: 59186 - DNA, 120 bp, Homo sapiens
  misc_feature: 1378 for SV(W|O) and mtDNA
ttagtccgccgtagtcggtgtactcgtaggttcagtaccattggtggccaattgatttgatggtaagggagggatcgttgacctcgtctgttatgtaaaggatgcgtagggatgggaggg

SEQ ID NO: 59187 - DNA, 120 bp, Homo sapiens
  misc_feature: 1378 for SV(W|O) and mtDNA
ataagctatcgggcccataccccgaaaatgttggttatacccttcccgtactaattaatcccctggcccaacccgtcatctactctaccatctttgcaggcacactcatcacagcgctaa

SEQ ID NO: 59188 - DNA, 120 bp, Homo sapiens
  misc_feature: 1378 for SV(W|O) and mtDNA
tgcgaacagagtggtgatagcgcctaagcatagtgttagagtttggattagtgggctattttctgctagggggtggaagcggatgagtaagaagattcctgctacaactatagtgcttga

SEQ ID NO: 59189 - DNA, 120 bp, Homo sapiens
  misc_feature: 1378 for SV(W|O) and mtDNA
gaaatagaaaccgtctgaactatcctgcccgccatcatcctagtcctcatcgccctcccatccctacgcatcctttacataacagacgaggtcaacgatccctcccttaccatcaaatca

SEQ ID NO: 59190 - DNA, 120 bp, Homo sapiens
  misc_feature: 1378 for SV(W|O) and mtDNA
gccccctttcacttctgagtcccagaggttacccaaggcacccctctgacatccggcctgcttcttctcacatgacaaaaactagcccccatctcaatcatataccaaatctctccctca

SEQ ID NO: 59191 - DNA, 120 bp, Homo sapiens
  misc_feature: 1378 for SV(W|O) and mtDNA
acccgatgaggcaaccagccagaacgcctgaacgcaggcacatacttcctattctacaccctagtaggctcccttcccctactcatcgcactaatttacactcacaacaccctaggctca

SEQ ID NO: 59192 - DNA, 120 bp, Homo sapiens
  misc_feature: 1378 for SV(W|O) and mtDNA
cgtagtcggtgtactcgtaggttcagtaccattggtggccaattgatttgatggtaagggagggatcgttgacctcgtctgttatgtaaaggatgcgtagggatgggagggcgatgagga

SEQ ID NO: 59193 - DNA, 120 bp, Homo sapiens
  misc_feature: 1378 for SV(W|O) and mtDNA
cttttgatcgtggtgatttagagggtgaactcactggaacggggatgcttgcatgtgtaatcttactaagagctaatagaaaggctaggaccaaacctatttgtttatggggtgatgtga

SEQ ID NO: 59194 - DNA, 120 bp, Homo sapiens
  misc_feature: 1378 for SV(W|O) and mtDNA
aaataagggggtttaagctcctattatttactctatcaaagtaactcttttatcagacatatttcttaggtttgagggggaatgctggagattgtaatgggtatggagacatatcatata

SEQ ID NO: 59195 - DNA, 120 bp, Homo sapiens
  misc_feature: 1378 for SV(W|O) and mtDNA
gcatcactatactactaacagaccgcaacctcaacaccaccttcttcgaccccgccggaggaggagaccccattctataccaacacctattctgatttttcggtcaccctgaagtttata

SEQ ID NO: 59196 - DNA, 120 bp, Homo sapiens
  misc_feature: 1378 for SV(W|O) and mtDNA
ctagccatggccatccccttatgagcgggcgcagtgattataggctttcgctctaagattaaaaatgccctagcccacttcttaccacaaggcacacctacaccccttatccccatacta

SEQ ID NO: 59197 - DNA, 120 bp, Homo sapiens
  misc_feature: 1378 for SV(W|O) and mtDNA
taatcgcataaaacttaaaactttacagtcagaggttcaattcctcttcttaacaacatacccatggccaacctcctactcctcattgtacccattctaatcgcaatggcattcctaatg

SEQ ID NO: 59198 - DNA, 120 bp, Homo sapiens
  misc_feature: 1378 for SV(W|O) and mtDNA
gttttgttgtgagtgttaggaaaagggcatacaggactaggaagcagataaggaaaatgattatgagggcgtgatcatgaaaggtgataagctcttctatgataggggaagtagcgtctt

SEQ ID NO: 59199 - DNA, 120 bp, Homo sapiens
  misc_feature: 1378 for SV(W|O) and mtDNA
gtgcttagttgaacagggccctgaagcgcgtacacaccgcccgtcaccctcctcaagtatacttcaaaggacatttaactaaaacccctacgcatttatatagaggagacaagtcgtaac

SEQ ID NO: 59200 - DNA, 120 bp, Homo sapiens
  misc_feature: 1378 for SV(W|O) and mtDNA
gtgacacatgtttaacggccgcggtaccctaaccgtgcaaaggtagcataatcacttgttccttaaatagggacctgtatgaatggctccacgagggttcagctgtctcttacttttaac

SEQ ID NO: 59201 - DNA, 120 bp, Homo sapiens
  misc_feature: 1378 for SV(W|O) and mtDNA
cttagctattgtgtgttcagatatgttaaagccactttcgtagtctattttgtgtcaactggagttttttacaactcaggtgagttttagctttattggggagggggtgatctaaaacac

SEQ ID NO: 59202 - DNA, 120 bp, Homo sapiens
  misc_feature: 1378 for SV(W|O) and mtDNA
gaaagcacataccaaggccaccacacaccacctgtccaaaaaggccttcgatacgggataatcctatttattacctcagaagtttttttcttcgcaggatttttctgagccttttaccac

SEQ ID NO: 59203 - DNA, 120 bp, Homo sapiens
  misc_feature: 1378 for SV(W|O) and mtDNA
gtcttgtagacctacttgcgctgcatgtgccattaagatatataggatttagcctataatttaactttgacaaagttatgaaatggtttttctaatacctttttgaaaaagtcatggagg

SEQ ID NO: 59204 - DNA, 120 bp, Homo sapiens
  misc_feature: 1378 for SV(W|O) and mtDNA
aggctttcgctctaagattaaaaatgccctagcccacttcttaccacaaggcacacctacaccccttatccccatactagttattatcgaaaccatcagcctactcattcaaccaatagc

SEQ ID NO: 59205 - DNA, 120 bp, Homo sapiens
  misc_feature: 1378 for SV(W|O) and mtDNA
gaaaccgtctgaactatcctgcccgccatcatcctagtcctcatcgccctcccatccctacgcatcctttacataacagacgaggtcaacgatccctcccttaccatcaaatcaattggc

SEQ ID NO: 59206 - DNA, 120 bp, Homo sapiens
  misc_feature: 1378 for SV(W|O) and mtDNA
cccatgtcgaagcccccatcgctgggtcaatagtacttgccgcagtactcttaaaactaggcggctatggtataatacgcctcacactcattctcaaccccctgacaaaacacatagcct

SEQ ID NO: 59207 - DNA, 120 bp, Homo sapiens
  misc_feature: 1378 for SV(W|O) and mtDNA
aagggttgtagtagcccgtaggggcctacaacgttggggcctttgcgtagttgtatatagcctagaatttttcgttcggtaagcattaggaatgccattgcgattagaatgggtacaatg

SEQ ID NO: 59208 - DNA, 120 bp, Homo sapiens
  misc_feature: 1378 for SV(W|O) and mtDNA
actcacagtcgcatcataatcctctctcaaggacttcaaactctactcccactaatagctttttgatgacttctagcaagcctcgctaacctcgccttaccccccactattaacctactg

SEQ ID NO: 59209 - DNA, 120 bp, Homo sapiens
  misc_feature: 1378 for SV(W|O) and mtDNA
actattaacctactgggagaactctctgtgctagtaaccacgttctcctgatcaaatatcactctcctacttacaggactcaacatactagtcacagccctatactccctctacatattt

SEQ ID NO: 59210 - DNA, 120 bp, Homo sapiens
  misc_feature: 1377 for SV(W|O) and mtDNA
ttcttagtagctattaccttcttattatttgatctagaaattgccctccttttacccctaccatgagccctacaaacaactaacctgccactaatagttatgtcatccctcttattaatc

SEQ ID NO: 59211 - DNA, 120 bp, Homo sapiens
  misc_feature: 1377 for SV(W|O) and mtDNA
ttcattcattgcccccacaatcctaggcctacccgccgcagtactgatcattctatttccccctctattgatccccacctccaaatatctcatcaacaaccgactaatcaccacccaaca

SEQ ID NO: 59212 - DNA, 120 bp, Homo sapiens
  misc_feature: 1377 for SV(W|O) and mtDNA
taccctaaccgtgcaaaggtagcataatcacttgttccttaaatagggacctgtatgaatggctccacgagggttcagctgtctcttacttttaaccagtgaaattgacctgcccgtgaa

SEQ ID NO: 59213 - DNA, 120 bp, Homo sapiens
  misc_feature: 1377 for SV(W|O) and mtDNA
tcgcctatactttatttgggtaaatggtttggctaaggttgtctggtagtaaggtggagtgggtttggggctaggtttagctcagagcggtcaagttaagttgaaatctcctaagtgtaa

SEQ ID NO: 59214 - DNA, 120 bp, Homo sapiens
  misc_feature: 1377 for SV(W|O) and mtDNA
tgttcatacacctatcccccattctcctcctatccctcaaccccgacatcattaccgggttttcctcttgtaaatatagtttaaccaaaacatcagattgtgaatctgacaacagaggct

SEQ ID NO: 59215 - DNA, 120 bp, Homo sapiens
  misc_feature: 1377 for SV(W|O) and mtDNA
ctaaccggctttttgcccaaatgggccattatcgaagaattcacaaaaaacaatagcctcatcatccccaccatcatagccaccatcaccctccttaacctctacttctacctacgccta

SEQ ID NO: 59216 - DNA, 120 bp, Homo sapiens
  misc_feature: 1377 for SV(W|O) and mtDNA
cggtaatcgcataaaacttaaaactttacagtcagaggttcaattcctcttcttaacaacatacccatggccaacctcctactcctcattgtacccattctaatcgcaatggcattccta

SEQ ID NO: 59217 - DNA, 120 bp, Homo sapiens
  misc_feature: 1377 for SV(W|O) and mtDNA
agctaaagtgaactgtatccgacatctggttcctacttcagggtcataaagcctaaatagcccacacgttccccttaaataagacatcacgatggatcacaggtctatcaccctattaac

SEQ ID NO: 59218 - DNA, 120 bp, Homo sapiens
  misc_feature: 1377 for SV(W|O) and mtDNA
ggctttcgctctaagattaaaaatgccctagcccacttcttaccacaaggcacacctacaccccttatccccatactagttattatcgaaaccatcagcctactcattcaaccaatagcc

SEQ ID NO: 59219 - DNA, 120 bp, Homo sapiens
  misc_feature: 1377 for SV(W|O) and mtDNA
gagcccggtaatcgcataaaacttaaaactttacagtcagaggttcaattcctcttcttaacaacatacccatggccaacctcctactcctcattgtacccattctaatcgcaatggcat

SEQ ID NO: 59220 - DNA, 120 bp, Homo sapiens
  misc_feature: 1377 for SV(W|O) and mtDNA
ctataagattattagtataaaaggggagataggtaggagtagcgtggtaagggcgatgagtgtggggaggaatggggtgggttttgtatgttcaaactgtcattttatttttacgttgtt

SEQ ID NO: 59221 - DNA, 120 bp, Homo sapiens
  misc_feature: 1377 for SV(W|O) and mtDNA
accctggggttagtatagcttagttaaactttcgtttattgctaaaggttaatcactgctgtttcccgtgggggtgtggctaggctaagcgttttgagctgcattgctgcgtgcttgatg

SEQ ID NO: 59222 - DNA, 120 bp, Homo sapiens
  misc_feature: 1377 for SV(W|O) and mtDNA
atccccaccatcatagccaccatcaccctccttaacctctacttctacctacgcctaatctactccacctcaatcacactactccccatatctaacaacgtaaaaataaaatgacagttt

SEQ ID NO: 59223 - DNA, 120 bp, Homo sapiens
  misc_feature: 1376 for SV(W|O) and mtDNA
tttgaggttagtttgattagtcattgttgggtggtgattagtcggttgttgatgagatatttggaggtggggatcaatagagggggaaatagaatgatcagtactgcggcgggtaggcct

SEQ ID NO: 59224 - DNA, 120 bp, Homo sapiens
  misc_feature: 1376 for SV(W|O) and mtDNA
aatcgcaatggcattcctaatgcttaccgaacgaaaaattctaggctatatacaactacgcaaaggccccaacgttgtaggcccctacgggctactacaacccttcgctgacgccataaa

SEQ ID NO: 59225 - DNA, 120 bp, Homo sapiens
  misc_feature: 1376 for SV(W|O) and mtDNA
ttgttggctcaggagtttgatagttcttgggcagtgagagtgagtagtagaatgtttagtgagcctagggtgttgtgagtgtaaattagtgcgatgagtaggggaagggagcctactagg

SEQ ID NO: 59226 - DNA, 120 bp, Homo sapiens
  misc_feature: 1376 for SV(W|O) and mtDNA
tgaacaagatattcgaaaaataggaggactactcaaaaccatacctctcacttcaacctccctcaccattggcagcctagcattagcaggaatacctttcctcacaggtttctactccaa

SEQ ID NO: 59227 - DNA, 120 bp, Homo sapiens
  misc_feature: 1376 for SV(W|O) and mtDNA
gtttggtcctagcctttctattagctcttagtaagattacacatgcaagcatccccgttccagtgagttcaccctctaaatcaccacgatcaaaagggacaagcatcaagcacgcagcaa

SEQ ID NO: 59228 - DNA, 120 bp, Homo sapiens
  misc_feature: 1376 for SV(W|O) and mtDNA
ctttgtgaagtaggccttatttctcttgtcctttcgtacagggaggaatttgaagtagatagaaaccgacctggattactccggtctgaactcagatcacgtaggactttaatcgttgaa

SEQ ID NO: 59229 - DNA, 120 bp, Homo sapiens
  misc_feature: 1376 for SV(W|O) and mtDNA
gctagtaaccacgttctcctgatcaaatatcactctcctacttacaggactcaacatactagtcacagccctatactccctctacatatttaccacaacacaatggggctcactcaccca

SEQ ID NO: 59230 - DNA, 120 bp, Homo sapiens
  misc_feature: 1376 for SV(W|O) and mtDNA
taaacctagccatggccatccccttatgagcgggcgcagtgattataggctttcgctctaagattaaaaatgccctagcccacttcttaccacaaggcacacctacaccccttatcccca

SEQ ID NO: 59231 - DNA, 120 bp, Homo sapiens
  misc_feature: 1376 for SV(W|O) and mtDNA
agctgggccagccaggcaaccttctaggtaacgaccacatctacaacgttatcgtcacagcccatgcatttgtaataatcttcttcatagtaatacccatcataatcggaggctttggca

SEQ ID NO: 59232 - DNA, 120 bp, Homo sapiens
  misc_feature: 1376 for SV(W|O) and mtDNA
tgaggaatagtgtaaggagtatgggggtaattatggtgggccatacggtagtatttagttggggcatttcactgtaaagaggtgttggttctcttaatctttaacttaaaaggttaatgc

SEQ ID NO: 59233 - DNA, 120 bp, Homo sapiens
  misc_feature: 1376 for SV(W|O) and mtDNA
agagggtgaactcactggaacggggatgcttgcatgtgtaatcttactaagagctaatagaaaggctaggaccaaacctatttgtttatggggtgatgtgagcccgtctaaacattttca

SEQ ID NO: 59234 - DNA, 120 bp, Homo sapiens
  misc_feature: 1376 for SV(W|O) and mtDNA
tcgttgtatttcaactacaagaacaccaatgaccccaatacgcaaaactaaccccctaataaaattaattaaccactcattcatcgacctccccaccccatccaacatctccacatgatg

SEQ ID NO: 59235 - DNA, 120 bp, Homo sapiens
  misc_feature: 1376 for SV(W|O) and mtDNA
tattttcgttaatgttagtaagggtggggaagcgaggttgacctgttagggtgagaagaattattcgagtgctataggcgcttgtcagggaggtagcgatgagagtaatagatagggctc

SEQ ID NO: 59236 - DNA, 120 bp, Homo sapiens
  misc_feature: 1376 for SV(W|O) and mtDNA
cgatgaggcaaccagccagaacgcctgaacgcaggcacatacttcctattctacaccctagtaggctcccttcccctactcatcgcactaatttacactcacaacaccctaggctcacta

SEQ ID NO: 59237 - DNA, 120 bp, Homo sapiens
  misc_feature: 1376 for SV(W|O) and mtDNA
cctcatacccaattggaccaatctatcaccctatagaagaactaatgttagtataagtaacatgaaaacattctcctccgcataagcctgcgtcagattaaaacactgaactgacaatta

SEQ ID NO: 59238 - DNA, 120 bp, Homo sapiens
  misc_feature: 1376 for SV(W|O) and mtDNA
gtgaactgtatccgacatctggttcctacttcagggtcataaagcctaaatagcccacacgttccccttaaataagacatcacgatggatcacaggtctatcaccctattaaccactcac

SEQ ID NO: 59239 - DNA, 120 bp, Homo sapiens
  misc_feature: 1376 for SV(W|O) and mtDNA
gggctatgtggctgattgaagagtatgcaatgagcgattttaggtctgtttgtcgtaggcagatggagcttgttataattatgcctcatagggatagtacaaggaaggggtaggctatgt

SEQ ID NO: 59240 - DNA, 120 bp, Homo sapiens
  misc_feature: 1376 for SV(W|O) and mtDNA
agtgcttgaattatttggtttcggttgttttctattagactatggtgagctcaggtgattgatactcctgatgcgagtaatacggatgtgtttaggagtgggacttctaggggatttagc

SEQ ID NO: 59241 - DNA, 120 bp, Homo sapiens
  misc_feature: 1376 for SV(W|O) and mtDNA
agatggcagagcccggtaatcgcataaaacttaaaactttacagtcagaggttcaattcctcttcttaacaacatacccatggccaacctcctactcctcattgtacccattctaatcgc

SEQ ID NO: 59242 - DNA, 120 bp, Homo sapiens
  misc_feature: 1376 for SV(W|O) and mtDNA
agatgatatcatttacgggggaaggcgctttgtgaagtaggccttatttctcttgtcctttcgtacagggaggaatttgaagtagatagaaaccgacctggattactccggtctgaactc

SEQ ID NO: 59243 - DNA, 120 bp, Homo sapiens
  misc_feature: 1376 for SV(W|O) and mtDNA
gactgctgcgaacagagtggtgatagcgcctaagcatagtgttagagtttggattagtgggctattttctgctagggggtggaagcggatgagtaagaagattcctgctacaactatagt

SEQ ID NO: 59244 - DNA, 120 bp, Homo sapiens
  misc_feature: 1376 for SV(W|O) and mtDNA
gaagggtataaccaacattttcggggtatgggcccgatagcttatttagctgaccttactttaggatggggtgtgataggtggcacggagaattttggattctcagggatgggttcgatt

SEQ ID NO: 59245 - DNA, 120 bp, Homo sapiens
  misc_feature: 1376 for SV(W|O) and mtDNA
ccctgttcttgggtgggtgtgggtataatactaagttgagatgatatcatttacgggggaaggcgctttgtgaagtaggccttatttctcttgtcctttcgtacagggaggaatttgaag

SEQ ID NO: 59246 - DNA, 120 bp, Homo sapiens
  misc_feature: 1376 for SV(W|O) and mtDNA
cagccttcataggctatgtcctcccgtgaggccaaatatcattctgaggggccacagtaattacaaacttactatccgccatcccatacattgggacagacctagttcaatgaatctgag

SEQ ID NO: 59247 - DNA, 120 bp, Homo sapiens
  misc_feature: 1376 for SV(W|O) and mtDNA
ccgggggtatactacggtcaatgctctgaaatctgtggagcaaaccacagtttcatgcccatcgtcctagaattaattcccctaaaaatctttgaaatagggcccgtatttaccctatag

SEQ ID NO: 59248 - DNA, 120 bp, Homo sapiens
  misc_feature: 1376 for SV(W|O) and mtDNA
ccttttgatcgtggtgatttagagggtgaactcactggaacggggatgcttgcatgtgtaatcttactaagagctaatagaaaggctaggaccaaacctatttgtttatggggtgatgtg

SEQ ID NO: 59249 - DNA, 120 bp, Homo sapiens
  misc_feature: 1376 for SV(W|O) and mtDNA
catgatttatcctacactccaactcatgagacccacaacaaatagcccttctaaacgctaatccaagcctcaccccactactaggcctcctcctagcagcagcaggcaaatcagcccaat

SEQ ID NO: 59250 - DNA, 120 bp, Homo sapiens
  misc_feature: 1376 for SV(W|O) and mtDNA
agcaaactcaaactacgaacgcactcacagtcgcatcataatcctctctcaaggacttcaaactctactcccactaatagctttttgatgacttctagcaagcctcgctaacctcgcctt

SEQ ID NO: 59251 - DNA, 120 bp, Homo sapiens
  misc_feature: 1376 for SV(W|O) and mtDNA
aatccaccccttacgagtgcggcttcgaccctatatcccccgcccgcgtccctttctccataaaattcttcttagtagctattaccttcttattatttgatctagaaattgccctccttt

SEQ ID NO: 59252 - DNA, 120 bp, Homo sapiens
  misc_feature: 1375 for SV(W|O) and mtDNA
tttctataagattattagtataaaaggggagataggtaggagtagcgtggtaagggcgatgagtgtggggaggaatggggtgggttttgtatgttcaaactgtcattttatttttacgtt

SEQ ID NO: 59253 - DNA, 120 bp, Homo sapiens
  misc_feature: 1375 for SV(W|O) and mtDNA
ttcttcatagccgaatacacaaacattattataataaacaccctcaccactacaatcttcctaggaacaacatatgacgcactctcccctgaactctacacaacatattttgtcaccaag

SEQ ID NO: 59254 - DNA, 120 bp, Homo sapiens
  misc_feature: 1375 for SV(W|O) and mtDNA
tgtctcctctatcttaggggccatcaatttcatcacaacaattatcaatataaaaccccctgccataacccaataccaaacgcccctcttcgtctgatccgtcctaatcacagcagtcct

SEQ ID NO: 59255 - DNA, 120 bp, Homo sapiens
  misc_feature: 1375 for SV(W|O) and mtDNA
tgagatgatatcatttacgggggaaggcgctttgtgaagtaggccttatttctcttgtcctttcgtacagggaggaatttgaagtagatagaaaccgacctggattactccggtctgaac

SEQ ID NO: 59256 - DNA, 120 bp, Homo sapiens
  misc_feature: 1375 for SV(W|O) and mtDNA
agggttgtagtagcccgtaggggcctacaacgttggggcctttgcgtagttgtatatagcctagaatttttcgttcggtaagcattaggaatgccattgcgattagaatgggtacaatga

SEQ ID NO: 59257 - DNA, 120 bp, Homo sapiens
  misc_feature: 1375 for SV(W|O) and mtDNA
ggaaaggtattcctgctaatgctaggctgccaatggtgagggaggttgaagtgagaggtatggttttgagtagtcctcctatttttcgaatatcttgttcattgttaaggttgtggatga

SEQ ID NO: 59258 - DNA, 120 bp, Homo sapiens
  misc_feature: 1375 for SV(W|O) and mtDNA
tcatacccaattggaccaatctatcaccctatagaagaactaatgttagtataagtaacatgaaaacattctcctccgcataagcctgcgtcagattaaaacactgaactgacaattaac

SEQ ID NO: 59259 - DNA, 120 bp, Homo sapiens
  misc_feature: 1375 for SV(W|O) and mtDNA
tatactactaacagaccgcaacctcaacaccaccttcttcgaccccgccggaggaggagaccccattctataccaacacctattctgatttttcggtcaccctgaagtttatattcttat

SEQ ID NO: 59260 - DNA, 120 bp, Homo sapiens
  misc_feature: 1375 for SV(W|O) and mtDNA
ctactaacagaccgcaacctcaacaccaccttcttcgaccccgccggaggaggagaccccattctataccaacacctattctgatttttcggtcaccctgaagtttatattcttatccta

SEQ ID NO: 59261 - DNA, 120 bp, Homo sapiens
  misc_feature: 1375 for SV(W|O) and mtDNA
gtgggtacttgcgcttactttgtagccttcatcagggtttgctgaagatggcggtatataggctgagcaagaggtggtgaggttgatcggggtttatcgattacagaacaggctcctcta

SEQ ID NO: 59262 - DNA, 120 bp, Homo sapiens
  misc_feature: 1375 for SV(W|O) and mtDNA
tactggtgatgctagaggtgatgtttttggtaaacaggcggggtaagatttgccgagttccttttactttttttaacctttccttatgagcatgcctgtgttgggttgacagtgagggta

SEQ ID NO: 59263 - DNA, 120 bp, Homo sapiens
  misc_feature: 1375 for SV(W|O) and mtDNA
tacccaattggaccaatctatcaccctatagaagaactaatgttagtataagtaacatgaaaacattctcctccgcataagcctgcgtcagattaaaacactgaactgacaattaacagc

SEQ ID NO: 59264 - DNA, 120 bp, Homo sapiens
  misc_feature: 1375 for SV(W|O) and mtDNA
cgcataaaacttaaaactttacagtcagaggttcaattcctcttcttaacaacatacccatggccaacctcctactcctcattgtacccattctaatcgcaatggcattcctaatgctta

SEQ ID NO: 59265 - DNA, 120 bp, Homo sapiens
  misc_feature: 1375 for SV(W|O) and mtDNA
gtaaataaggggtcgtaagcctctgttgtcagattcacaatctgatgttttggttaaactatatttacaagaggaaaacccggtaatgatgtcggggttgagggataggaggagaatggg

SEQ ID NO: 59266 - DNA, 120 bp, Homo sapiens
  misc_feature: 1375 for SV(W|O) and mtDNA
ggcatcactatactactaacagaccgcaacctcaacaccaccttcttcgaccccgccggaggaggagaccccattctataccaacacctattctgatttttcggtcaccctgaagtttat

SEQ ID NO: 59267 - DNA, 120 bp, Homo sapiens
  misc_feature: 1375 for SV(W|O) and mtDNA
ctattcgcctacacaattctccgatccgtccctaacaaactaggaggcgtccttgccctattactatccatcctcatcctagcaataatccccatcctccatatatccaaacaacaaagc

SEQ ID NO: 59268 - DNA, 120 bp, Homo sapiens
  misc_feature: 1375 for SV(W|O) and mtDNA
gcctactatgggtgttaaattttttactctctctacaaggttttttcctagtgtccaaagagctgttcctctttggactaacagttaaatttacaaggggatttagagggttctgtgggc

SEQ ID NO: 59269 - DNA, 120 bp, Homo sapiens
  misc_feature: 1375 for SV(W|O) and mtDNA
gagccacttattagtaatgttgatagtagaatgatggctagggtgacttcatatgagattgtttgggctactgctcgcagtgcgccgatcagggcgtagtttgagtttgatgctcaccct

SEQ ID NO: 59270 - DNA, 120 bp, Homo sapiens
  misc_feature: 1375 for SV(W|O) and mtDNA
caccacattaacaacataaaaccctcattcacacgagaaaacaccctcatgttcatacacctatcccccattctcctcctatccctcaaccccgacatcattaccgggttttcctcttgt

SEQ ID NO: 59271 - DNA, 120 bp, Homo sapiens
  misc_feature: 1375 for SV(W|O) and mtDNA
aaccctggggttagtatagcttagttaaactttcgtttattgctaaaggttaatcactgctgtttcccgtgggggtgtggctaggctaagcgttttgagctgcattgctgcgtgcttgat

SEQ ID NO: 59272 - DNA, 120 bp, Homo sapiens
  misc_feature: 1375 for SV(W|O) and mtDNA
acgcactcacagtcgcatcataatcctctctcaaggacttcaaactctactcccactaatagctttttgatgacttctagcaagcctcgctaacctcgccttaccccccactattaacct

SEQ ID NO: 59273 - DNA, 120 bp, Homo sapiens
  misc_feature: 1374 for SV(W|O) and mtDNA
gatgaggcaaccagccagaacgcctgaacgcaggcacatacttcctattctacaccctagtaggctcccttcccctactcatcgcactaatttacactcacaacaccctaggctcactaa

SEQ ID NO: 59274 - DNA, 120 bp, Homo sapiens
  misc_feature: 1374 for SV(W|O) and mtDNA
ttagctattgtgtgttcagatatgttaaagccactttcgtagtctattttgtgtcaactggagttttttacaactcaggtgagttttagctttattggggagggggtgatctaaaacact

SEQ ID NO: 59275 - DNA, 120 bp, Homo sapiens
  misc_feature: 1374 for SV(W|O) and mtDNA
ttagcattaaccttttaagttaaagattaagagaaccaacacctctttacagtgaaatgccccaactaaatactaccgtatggcccaccataattacccccatactccttacactattcc

SEQ ID NO: 59276 - DNA, 120 bp, Homo sapiens
  misc_feature: 1374 for SV(W|O) and mtDNA
aatacacaaacattattataataaacaccctcaccactacaatcttcctaggaacaacatatgacgcactctcccctgaactctacacaacatattttgtcaccaagaccctacttctaa

SEQ ID NO: 59277 - DNA, 120 bp, Homo sapiens
  misc_feature: 1374 for SV(W|O) and mtDNA
gtaaagacgttaggtcaaggtgtagcccatgaggtggcaagaaatgggctacattttctaccccagaaaactacgatagcccttatgaaacttaagggtcgaaggtggatttagcagtaa

SEQ ID NO: 59278 - DNA, 120 bp, Homo sapiens
  misc_feature: 1374 for SV(W|O) and mtDNA
tgtgtaagggcgcagactgctgcgaacagagtggtgatagcgcctaagcatagtgttagagtttggattagtgggctattttctgctagggggtggaagcggatgagtaagaagattcct

SEQ ID NO: 59279 - DNA, 120 bp, Homo sapiens
  misc_feature: 1374 for SV(W|O) and mtDNA
aagtaataaccatgcacactactataaccaccctaaccctgacttccctaattccccccatccttaccaccctcgttaaccctaacaaaaaaaactcatacccccattatgtaaaatcca

SEQ ID NO: 59280 - DNA, 120 bp, Homo sapiens
  misc_feature: 1374 for SV(W|O) and mtDNA
tgccaggcgtttaatggggtttagtagggtagggttattttcgttaatgttagtaagggtggggaagcgaggttgacctgttagggtgagaagaattattcgagtgctataggcgcttgt

SEQ ID NO: 59281 - DNA, 120 bp, Homo sapiens
  misc_feature: 1374 for SV(W|O) and mtDNA
tcttgtagacctacttgcgctgcatgtgccattaagatatataggatttagcctataatttaactttgacaaagttatgaaatggtttttctaatacctttttgaaaaagtcatggaggc

SEQ ID NO: 59282 - DNA, 120 bp, Homo sapiens
  misc_feature: 1374 for SV(W|O) and mtDNA
caagtacccacgtaaagacgttaggtcaaggtgtagcccatgaggtggcaagaaatgggctacattttctaccccagaaaactacgatagcccttatgaaacttaagggtcgaaggtgga

SEQ ID NO: 59283 - DNA, 120 bp, Homo sapiens
  misc_feature: 1374 for SV(W|O) and mtDNA
tcattgcatactcttcaatcagccacatagccctcgtagtaacagccattctcatccaaaccccctgaagcttcaccggcgcagtcattctcataatcgcccacgggcttacatcctcat

SEQ ID NO: 59284 - DNA, 120 bp, Homo sapiens
  misc_feature: 1374 for SV(W|O) and mtDNA
tatcaacattactaataagtggctcctttaacctctccacccttatcacaacacaagaacacctctgattactcctgccatcatgacccttggccataatatgatttatctccacactag

SEQ ID NO: 59285 - DNA, 120 bp, Homo sapiens
  misc_feature: 1374 for SV(W|O) and mtDNA
cgcactcacagtcgcatcataatcctctctcaaggacttcaaactctactcccactaatagctttttgatgacttctagcaagcctcgctaacctcgccttaccccccactattaaccta

SEQ ID NO: 59286 - DNA, 120 bp, Homo sapiens
  misc_feature: 1374 for SV(W|O) and mtDNA
taaagtcctacgtgatctgagttcagaccggagtaatccaggtcggtttctatctacttcaaattcctccctgtacgaaaggacaagagaaataaggcctacttcacaaagcgccttccc

SEQ ID NO: 59287 - DNA, 120 bp, Homo sapiens
  misc_feature: 1374 for SV(W|O) and mtDNA
gtagagtttgaagtccttgagagaggattatgatgcgactgtgagtgcgttcgtagtttgagtttgctaggcagaatagtaatgaggatgtaagcccgtgggcgattatgagaatgactg

SEQ ID NO: 59288 - DNA, 120 bp, Homo sapiens
  misc_feature: 1374 for SV(W|O) and mtDNA
gaacaacatatgacgcactctcccctgaactctacacaacatattttgtcaccaagaccctacttctaacctccctgttcttatgaattcgaacagcatacccccgattccgctacgacc

SEQ ID NO: 59289 - DNA, 120 bp, Homo sapiens
  misc_feature: 1374 for SV(W|O) and mtDNA
caacaaacaatgttcaaccagtaactactactaatcaacgcccataatcatacaaagcccccgcaccaataggatcctcccgaatcaaccctgacccctctccttcataaattattcagc

SEQ ID NO: 59290 - DNA, 120 bp, Homo sapiens
  misc_feature: 1374 for SV(W|O) and mtDNA
gccggatgtcagaggggtgccttgggtaacctctgggactcagaagtgaaagggggctattcctagttttattgctatagccattatgattattaatgatgagtactgattggtagtatt

SEQ ID NO: 59291 - DNA, 120 bp, Homo sapiens
  misc_feature: 1374 for SV(W|O) and mtDNA
agccccctttcacttctgagtcccagaggttacccaaggcacccctctgacatccggcctgcttcttctcacatgacaaaaactagcccccatctcaatcatataccaaatctctccctc

SEQ ID NO: 59292 - DNA, 120 bp, Homo sapiens
  misc_feature: 1374 for SV(W|O) and mtDNA
gactttttcaaaaaggtattagaaaaaccatttcataactttgtcaaagttaaattataggctaaatcctatatatcttaatggcacatgcagcgcaagtaggtctacaagacgctactt

SEQ ID NO: 59293 - DNA, 120 bp, Homo sapiens
  misc_feature: 1374 for SV(W|O) and mtDNA
gaagggctatttgttgtgggtctcatgagttggagtgtaggataaatcatgctaaggcgaggatgaaaccgatatcgccgatacggttgtataggattgcttgaatggctgctgtgttgg

SEQ ID NO: 59294 - DNA, 120 bp, Homo sapiens
  misc_feature: 1374 for SV(W|O) and mtDNA
gaaataagggggtttaagctcctattatttactctatcaaagtaactcttttatcagacatatttcttaggtttgagggggaatgctggagattgtaatgggtatggagacatatcatat

SEQ ID NO: 59295 - DNA, 120 bp, Homo sapiens
  misc_feature: 1374 for SV(W|O) and mtDNA
cctattcgcctacacaattctccgatccgtccctaacaaactaggaggcgtccttgccctattactatccatcctcatcctagcaataatccccatcctccatatatccaaacaacaaag

SEQ ID NO: 59296 - DNA, 120 bp, Homo sapiens
  misc_feature: 1374 for SV(W|O) and mtDNA
cgtaggtagaagtagaggttaaggagggtgatggtggctatgatggtggggatgatgaggctattgttttttgtgaattcttcgataatggcccatttgggcaaaaagccggttagcggg

SEQ ID NO: 59297 - DNA, 120 bp, Homo sapiens
  misc_feature: 1374 for SV(W|O) and mtDNA
ataaaacttaaaactttacagtcagaggttcaattcctcttcttaacaacatacccatggccaacctcctactcctcattgtacccattctaatcgcaatggcattcctaatgcttaccg

SEQ ID NO: 59298 - DNA, 120 bp, Homo sapiens
  misc_feature: 1374 for SV(W|O) and mtDNA
ccggtaatcgcataaaacttaaaactttacagtcagaggttcaattcctcttcttaacaacatacccatggccaacctcctactcctcattgtacccattctaatcgcaatggcattcct

SEQ ID NO: 59299 - DNA, 120 bp, Homo sapiens
  misc_feature: 1374 for SV(W|O) and mtDNA
ccggatgtcagaggggtgccttgggtaacctctgggactcagaagtgaaagggggctattcctagttttattgctatagccattatgattattaatgatgagtactgattggtagtattg

SEQ ID NO: 59300 - DNA, 120 bp, Homo sapiens
  misc_feature: 1374 for SV(W|O) and mtDNA
atactggtgatgctagaggtgatgtttttggtaaacaggcggggtaagatttgccgagttccttttactttttttaacctttccttatgagcatgcctgtgttgggttgacagtgagggt

SEQ ID NO: 59301 - DNA, 120 bp, Homo sapiens
  misc_feature: 1373 for SV(W|O) and mtDNA
tcattcattgcccccacaatcctaggcctacccgccgcagtactgatcattctatttccccctctattgatccccacctccaaatatctcatcaacaaccgactaatcaccacccaacaa

SEQ ID NO: 59302 - DNA, 120 bp, Homo sapiens
  misc_feature: 1373 for SV(W|O) and mtDNA
ttgctccacagatttcagagcattgaccgtagtatacccccggtcgtgtagcggtgaaagtggtttggtttagacgtccgggaattgcatctgtttttaagcctaatgtggggacagctc

SEQ ID NO: 59303 - DNA, 120 bp, Homo sapiens
  misc_feature: 1373 for SV(W|O) and mtDNA
tcaccctagccatcattctactatcaacattactaataagtggctcctttaacctctccacccttatcacaacacaagaacacctctgattactcctgccatcatgacccttggccataa

SEQ ID NO: 59304 - DNA, 120 bp, Homo sapiens
  misc_feature: 1373 for SV(W|O) and mtDNA
tgcgcttactttgtagccttcatcagggtttgctgaagatggcggtatataggctgagcaagaggtggtgaggttgatcggggtttatcgattacagaacaggctcctctagagggatat

SEQ ID NO: 59305 - DNA, 120 bp, Homo sapiens
  misc_feature: 1373 for SV(W|O) and mtDNA
ggctatgtcctcccgtgaggccaaatatcattctgaggggccacagtaattacaaacttactatccgccatcccatacattgggacagacctagttcaatgaatctgaggaggctactca

SEQ ID NO: 59306 - DNA, 120 bp, Homo sapiens
  misc_feature: 1373 for SV(W|O) and mtDNA
agaaataagggggtttaagctcctattatttactctatcaaagtaactcttttatcagacatatttcttaggtttgagggggaatgctggagattgtaatgggtatggagacatatcata

SEQ ID NO: 59307 - DNA, 120 bp, Homo sapiens
  misc_feature: 1373 for SV(W|O) and mtDNA
tagagtttgaagtccttgagagaggattatgatgcgactgtgagtgcgttcgtagtttgagtttgctaggcagaatagtaatgaggatgtaagcccgtgggcgattatgagaatgactgc

SEQ ID NO: 59308 - DNA, 120 bp, Homo sapiens
  misc_feature: 1373 for SV(W|O) and mtDNA
tacaccgactacggcggactaatcttcaactcctacatacttcccccattattcctagaaccaggcgacctgcgactccttgacgttgacaatcgagtagtactcccgattgaagccccc

SEQ ID NO: 59309 - DNA, 120 bp, Homo sapiens
  misc_feature: 1373 for SV(W|O) and mtDNA
cctagctgctggcatcactatactactaacagaccgcaacctcaacaccaccttcttcgaccccgccggaggaggagaccccattctataccaacacctattctgatttttcggtcaccc

SEQ ID NO: 59310 - DNA, 120 bp, Homo sapiens
  misc_feature: 1373 for SV(W|O) and mtDNA
gagctgggccagccaggcaaccttctaggtaacgaccacatctacaacgttatcgtcacagcccatgcatttgtaataatcttcttcatagtaatacccatcataatcggaggctttggc

SEQ ID NO: 59311 - DNA, 120 bp, Homo sapiens
  misc_feature: 1372 for SV(W|O) and mtDNA
ttgcgcttactttgtagccttcatcagggtttgctgaagatggcggtatataggctgagcaagaggtggtgaggttgatcggggtttatcgattacagaacaggctcctctagagggata

SEQ ID NO: 59312 - DNA, 120 bp, Homo sapiens
  misc_feature: 1372 for SV(W|O) and mtDNA
ttctcggtaaataaggggtcgtaagcctctgttgtcagattcacaatctgatgttttggttaaactatatttacaagaggaaaacccggtaatgatgtcggggttgagggataggaggag

SEQ ID NO: 59313 - DNA, 120 bp, Homo sapiens
  misc_feature: 1372 for SV(W|O) and mtDNA
caagaaatgggctacattttctaccccagaaaactacgatagcccttatgaaacttaagggtcgaaggtggatttagcagtaaactgagagtagagtgcttagttgaacagggccctgaa

SEQ ID NO: 59314 - DNA, 120 bp, Homo sapiens
  misc_feature: 1372 for SV(W|O) and mtDNA
tactcatccgcttccaccccctagcagaaaatagcccactaatccaaactctaacactatgcttaggcgctatcaccactctgttcgcagcagtctgcgcccttacacaaaatgacatca

SEQ ID NO: 59315 - DNA, 120 bp, Homo sapiens
  misc_feature: 1372 for SV(W|O) and mtDNA
tgatgctagaggtgatgtttttggtaaacaggcggggtaagatttgccgagttccttttactttttttaacctttccttatgagcatgcctgtgttgggttgacagtgagggtaataatg

SEQ ID NO: 59316 - DNA, 120 bp, Homo sapiens
  misc_feature: 1372 for SV(W|O) and mtDNA
gcctcgctaacctcgccttaccccccactattaacctactgggagaactctctgtgctagtaaccacgttctcctgatcaaatatcactctcctacttacaggactcaacatactagtca

SEQ ID NO: 59317 - DNA, 120 bp, Homo sapiens
  misc_feature: 1372 for SV(W|O) and mtDNA
tcgctctaagattaaaaatgccctagcccacttcttaccacaaggcacacctacaccccttatccccatactagttattatcgaaaccatcagcctactcattcaaccaatagccctggc

SEQ ID NO: 59318 - DNA, 120 bp, Homo sapiens
  misc_feature: 1372 for SV(W|O) and mtDNA
tcacagtcgcatcataatcctctctcaaggacttcaaactctactcccactaatagctttttgatgacttctagcaagcctcgctaacctcgccttaccccccactattaacctactggg

SEQ ID NO: 59319 - DNA, 120 bp, Homo sapiens
  misc_feature: 1372 for SV(W|O) and mtDNA
agcaggccggatgtcagaggggtgccttgggtaacctctgggactcagaagtgaaagggggctattcctagttttattgctatagccattatgattattaatgatgagtactgattggta

SEQ ID NO: 59320 - DNA, 120 bp, Homo sapiens
  misc_feature: 1372 for SV(W|O) and mtDNA
gtagctaaagtgaactgtatccgacatctggttcctacttcagggtcataaagcctaaatagcccacacgttccccttaaataagacatcacgatggatcacaggtctatcaccctatta

SEQ ID NO: 59321 - DNA, 120 bp, Homo sapiens
  misc_feature: 1372 for SV(W|O) and mtDNA
cgatgggcatgaaactgtggtttgctccacagatttcagagcattgaccgtagtatacccccggtcgtgtagcggtgaaagtggtttggtttagacgtccgggaattgcatctgttttta

SEQ ID NO: 59322 - DNA, 120 bp, Homo sapiens
  misc_feature: 1372 for SV(W|O) and mtDNA
ggtagctaaagtgaactgtatccgacatctggttcctacttcagggtcataaagcctaaatagcccacacgttccccttaaataagacatcacgatggatcacaggtctatcaccctatt

SEQ ID NO: 59323 - DNA, 120 bp, Homo sapiens
  misc_feature: 1372 for SV(W|O) and mtDNA
ggtaagatttgccgagttccttttactttttttaacctttccttatgagcatgcctgtgttgggttgacagtgagggtaataatgacttgttggttgattgtagatattgggctgttaat

SEQ ID NO: 59324 - DNA, 120 bp, Homo sapiens
  misc_feature: 1372 for SV(W|O) and mtDNA
ggtaaataaggggtcgtaagcctctgttgtcagattcacaatctgatgttttggttaaactatatttacaagaggaaaacccggtaatgatgtcggggttgagggataggaggagaatgg

SEQ ID NO: 59325 - DNA, 120 bp, Homo sapiens
  misc_feature: 1372 for SV(W|O) and mtDNA
attctaatcgcaatggcattcctaatgcttaccgaacgaaaaattctaggctatatacaactacgcaaaggccccaacgttgtaggcccctacgggctactacaacccttcgctgacgcc

SEQ ID NO: 59326 - DNA, 120 bp, Homo sapiens
  misc_feature: 1372 for SV(W|O) and mtDNA
gcgagacgctggagccggagcaccctatgtcgcagtatctgtctttgattcctgcctcatcccattatttatcgcacctacgttcaatattacaggcgaacatacttactaaagtgtgtt

SEQ ID NO: 59327 - DNA, 120 bp, Homo sapiens
  misc_feature: 1372 for SV(W|O) and mtDNA
gcctcctatttattctagccacctctagcctagccgtttactcaatcctctgatcagggtgagcatcaaactcaaactacgccctgatcggcgcactgcgagcagtagcccaaacaatct

SEQ ID NO: 59328 - DNA, 120 bp, Homo sapiens
  misc_feature: 1372 for SV(W|O) and mtDNA
cgagccgagctgggccagccaggcaaccttctaggtaacgaccacatctacaacgttatcgtcacagcccatgcatttgtaataatcttcttcatagtaatacccatcataatcggaggc

SEQ ID NO: 59329 - DNA, 120 bp, Homo sapiens
  misc_feature: 1372 for SV(W|O) and mtDNA
gcccagtgacacatgtttaacggccgcggtaccctaaccgtgcaaaggtagcataatcacttgttccttaaatagggacctgtatgaatggctccacgagggttcagctgtctcttactt

SEQ ID NO: 59330 - DNA, 120 bp, Homo sapiens
  misc_feature: 1372 for SV(W|O) and mtDNA
gccatgggtatgttgttaagaagaggaattgaacctctgactgtaaagttttaagttttatgcgattaccgggctctgccatcttaacaaaccctgttcttgggtgggtgtgggtataat

SEQ ID NO: 59331 - DNA, 120 bp, Homo sapiens
  misc_feature: 1372 for SV(W|O) and mtDNA
ctgtgaggaaaggtattcctgctaatgctaggctgccaatggtgagggaggttgaagtgagaggtatggttttgagtagtcctcctatttttcgaatatcttgttcattgttaaggttgt

SEQ ID NO: 59332 - DNA, 120 bp, Homo sapiens
  misc_feature: 1372 for SV(W|O) and mtDNA
caactacaagaacaccaatgaccccaatacgcaaaactaaccccctaataaaattaattaaccactcattcatcgacctccccaccccatccaacatctccacatgatgaaacttcggct

SEQ ID NO: 59333 - DNA, 120 bp, Homo sapiens
  misc_feature: 1372 for SV(W|O) and mtDNA
aaacctagccatggccatccccttatgagcgggcgcagtgattataggctttcgctctaagattaaaaatgccctagcccacttcttaccacaaggcacacctacaccccttatccccat

SEQ ID NO: 59334 - DNA, 120 bp, Homo sapiens
  misc_feature: 1372 for SV(W|O) and mtDNA
atcccccattctcctcctatccctcaaccccgacatcattaccgggttttcctcttgtaaatatagtttaaccaaaacatcagattgtgaatctgacaacagaggcttacgaccccttat

SEQ ID NO: 59335 - DNA, 120 bp, Homo sapiens
  misc_feature: 1372 for SV(W|O) and mtDNA
aggtggcacggagaattttggattctcagggatgggttcgattctcatagtcctagaaataagggggtttaagctcctattatttactctatcaaagtaactcttttatcagacatattt

SEQ ID NO: 59336 - DNA, 120 bp, Homo sapiens
  misc_feature: 1372 for SV(W|O) and mtDNA
agccatggccatccccttatgagcgggcgcagtgattataggctttcgctctaagattaaaaatgccctagcccacttcttaccacaaggcacacctacaccccttatccccatactagt

SEQ ID NO: 59337 - DNA, 120 bp, Homo sapiens
  misc_feature: 1372 for SV(W|O) and mtDNA
acaaacaatgttcaaccagtaactactactaatcaacgcccataatcatacaaagcccccgcaccaataggatcctcccgaatcaaccctgacccctctccttcataaattattcagctt

SEQ ID NO: 59338 - DNA, 120 bp, Homo sapiens
  misc_feature: 1371 for SV(W|O) and mtDNA
ttgtgtaagggcgcagactgctgcgaacagagtggtgatagcgcctaagcatagtgttagagtttggattagtgggctattttctgctagggggtggaagcggatgagtaagaagattcc

SEQ ID NO: 59339 - DNA, 120 bp, Homo sapiens
  misc_feature: 1371 for SV(W|O) and mtDNA
taatcgcaatggcattcctaatgcttaccgaacgaaaaattctaggctatatacaactacgcaaaggccccaacgttgtaggcccctacgggctactacaacccttcgctgacgccataa

SEQ ID NO: 59340 - DNA, 120 bp, Homo sapiens
  misc_feature: 1371 for SV(W|O) and mtDNA
ggtaatcgcataaaacttaaaactttacagtcagaggttcaattcctcttcttaacaacatacccatggccaacctcctactcctcattgtacccattctaatcgcaatggcattcctaa

SEQ ID NO: 59341 - DNA, 120 bp, Homo sapiens
  misc_feature: 1371 for SV(W|O) and mtDNA
actggtgatgctagaggtgatgtttttggtaaacaggcggggtaagatttgccgagttccttttactttttttaacctttccttatgagcatgcctgtgttgggttgacagtgagggtaa

SEQ ID NO: 59342 - DNA, 120 bp, Homo sapiens
  misc_feature: 1371 for SV(W|O) and mtDNA
caattcccggacgtctaaaccaaaccactttcaccgctacacgaccgggggtatactacggtcaatgctctgaaatctgtggagcaaaccacagtttcatgcccatcgtcctagaattaa

SEQ ID NO: 59343 - DNA, 120 bp, Homo sapiens
  misc_feature: 1371 for SV(W|O) and mtDNA
tgtgaggaaaggtattcctgctaatgctaggctgccaatggtgagggaggttgaagtgagaggtatggttttgagtagtcctcctatttttcgaatatcttgttcattgttaaggttgtg

SEQ ID NO: 59344 - DNA, 120 bp, Homo sapiens
  misc_feature: 1371 for SV(W|O) and mtDNA
aactcctcatacccaattggaccaatctatcaccctatagaagaactaatgttagtataagtaacatgaaaacattctcctccgcataagcctgcgtcagattaaaacactgaactgaca

SEQ ID NO: 59345 - DNA, 120 bp, Homo sapiens
  misc_feature: 1371 for SV(W|O) and mtDNA
aggaacaacatatgacgcactctcccctgaactctacacaacatattttgtcaccaagaccctacttctaacctccctgttcttatgaattcgaacagcatacccccgattccgctacga

SEQ ID NO: 59346 - DNA, 120 bp, Homo sapiens
  misc_feature: 1371 for SV(W|O) and mtDNA
tcgagccgagctgggccagccaggcaaccttctaggtaacgaccacatctacaacgttatcgtcacagcccatgcatttgtaataatcttcttcatagtaatacccatcataatcggagg

SEQ ID NO: 59347 - DNA, 120 bp, Homo sapiens
  misc_feature: 1371 for SV(W|O) and mtDNA
tcccccattctcctcctatccctcaaccccgacatcattaccgggttttcctcttgtaaatatagtttaaccaaaacatcagattgtgaatctgacaacagaggcttacgaccccttatt

SEQ ID NO: 59348 - DNA, 120 bp, Homo sapiens
  misc_feature: 1371 for SV(W|O) and mtDNA
atcatctcaacttagtattatacccacacccacccaagaacagggtttgttaagatggcagagcccggtaatcgcataaaacttaaaactttacagtcagaggttcaattcctcttctta

SEQ ID NO: 59349 - DNA, 120 bp, Homo sapiens
  misc_feature: 1371 for SV(W|O) and mtDNA
gttgttggctcaggagtttgatagttcttgggcagtgagagtgagtagtagaatgtttagtgagcctagggtgttgtgagtgtaaattagtgcgatgagtaggggaagggagcctactag

SEQ ID NO: 59350 - DNA, 120 bp, Homo sapiens
  misc_feature: 1371 for SV(W|O) and mtDNA
actaatcttcaactcctacatacttcccccattattcctagaaccaggcgacctgcgactccttgacgttgacaatcgagtagtactcccgattgaagcccccattcgtataataattac

SEQ ID NO: 59351 - DNA, 120 bp, Homo sapiens
  misc_feature: 1371 for SV(W|O) and mtDNA
gcataaaacttaaaactttacagtcagaggttcaattcctcttcttaacaacatacccatggccaacctcctactcctcattgtacccattctaatcgcaatggcattcctaatgcttac

SEQ ID NO: 59352 - DNA, 120 bp, Homo sapiens
  misc_feature: 1371 for SV(W|O) and mtDNA
ggtacttgcgcttactttgtagccttcatcagggtttgctgaagatggcggtatataggctgagcaagaggtggtgaggttgatcggggtttatcgattacagaacaggctcctctagag

SEQ ID NO: 59353 - DNA, 120 bp, Homo sapiens
  misc_feature: 1371 for SV(W|O) and mtDNA
attaacctactgggagaactctctgtgctagtaaccacgttctcctgatcaaatatcactctcctacttacaggactcaacatactagtcacagccctatactccctctacatatttacc

SEQ ID NO: 59354 - DNA, 120 bp, Homo sapiens
  misc_feature: 1371 for SV(W|O) and mtDNA
ggctatgtggctgattgaagagtatgcaatgagcgattttaggtctgtttgtcgtaggcagatggagcttgttataattatgcctcatagggatagtacaaggaaggggtaggctatgtg

SEQ ID NO: 59355 - DNA, 120 bp, Homo sapiens
  misc_feature: 1371 for SV(W|O) and mtDNA
ggccaccaatggtactgaacctacgagtacaccgactacggcggactaatcttcaactcctacatacttcccccattattcctagaaccaggcgacctgcgactccttgacgttgacaat

SEQ ID NO: 59356 - DNA, 120 bp, Homo sapiens
  misc_feature: 1371 for SV(W|O) and mtDNA
cccggtaatcgcataaaacttaaaactttacagtcagaggttcaattcctcttcttaacaacatacccatggccaacctcctactcctcattgtacccattctaatcgcaatggcattcc

SEQ ID NO: 59357 - DNA, 120 bp, Homo sapiens
  misc_feature: 1371 for SV(W|O) and mtDNA
gctgcgaacagagtggtgatagcgcctaagcatagtgttagagtttggattagtgggctattttctgctagggggtggaagcggatgagtaagaagattcctgctacaactatagtgctt

SEQ ID NO: 59358 - DNA, 120 bp, Homo sapiens
  misc_feature: 1371 for SV(W|O) and mtDNA
agtggtgagggtgtttattataataatgtttgtgtattcggctatgaagaatagggcgaaggggcctgcggcgtattcgatgttgaagcctgagactagttcggactccccttcggcaag

SEQ ID NO: 59359 - DNA, 120 bp, Homo sapiens
  misc_feature: 1371 for SV(W|O) and mtDNA
cttcttagtagctattaccttcttattatttgatctagaaattgccctccttttacccctaccatgagccctacaaacaactaacctgccactaatagttatgtcatccctcttattaat

SEQ ID NO: 59360 - DNA, 120 bp, Homo sapiens
  misc_feature: 1371 for SV(W|O) and mtDNA
atgatatcatttacgggggaaggcgctttgtgaagtaggccttatttctcttgtcctttcgtacagggaggaatttgaagtagatagaaaccgacctggattactccggtctgaactcag

SEQ ID NO: 59361 - DNA, 120 bp, Homo sapiens
  misc_feature: 1371 for SV(W|O) and mtDNA
cgtctgttatgtaaaggatgcgtagggatgggagggcgatgaggactaggatgatggcgggcaggatagttcagacggtttctatttcctgagcgtctgagatgttagtattagttagtt

SEQ ID NO: 59362 - DNA, 120 bp, Homo sapiens
  misc_feature: 1371 for SV(W|O) and mtDNA
aaagccactttcgtagtctattttgtgtcaactggagttttttacaactcaggtgagttttagctttattggggagggggtgatctaaaacactctttacgccggcttctattgacttgg

SEQ ID NO: 59363 - DNA, 120 bp, Homo sapiens
  misc_feature: 1371 for SV(W|O) and mtDNA
agaagggctatttgttgtgggtctcatgagttggagtgtaggataaatcatgctaaggcgaggatgaaaccgatatcgccgatacggttgtataggattgcttgaatggctgctgtgttg

SEQ ID NO: 59364 - DNA, 120 bp, Homo sapiens
  misc_feature: 1371 for SV(W|O) and mtDNA
aggaaatagaaaccgtctgaactatcctgcccgccatcatcctagtcctcatcgccctcccatccctacgcatcctttacataacagacgaggtcaacgatccctcccttaccatcaaat

SEQ ID NO: 59365 - DNA, 120 bp, Homo sapiens
  misc_feature: 1371 for SV(W|O) and mtDNA
agcatactcctcaattacccacataggatgaataatagcagttctaccgtacaaccctaacataaccattcttaatttaactatttatattatcctaactactaccgcattcctactact

SEQ ID NO: 59366 - DNA, 120 bp, Homo sapiens
  misc_feature: 1370 for SV(W|O) and mtDNA
atcgcaatggcattcctaatgcttaccgaacgaaaaattctaggctatatacaactacgcaaaggccccaacgttgtaggcccctacgggctactacaacccttcgctgacgccataaaa

SEQ ID NO: 59367 - DNA, 120 bp, Homo sapiens
  misc_feature: 1370 for SV(W|O) and mtDNA
actcctcatacccaattggaccaatctatcaccctatagaagaactaatgttagtataagtaacatgaaaacattctcctccgcataagcctgcgtcagattaaaacactgaactgacaa

SEQ ID NO: 59368 - DNA, 120 bp, Homo sapiens
  misc_feature: 1370 for SV(W|O) and mtDNA
ttggctcaggagtttgatagttcttgggcagtgagagtgagtagtagaatgtttagtgagcctagggtgttgtgagtgtaaattagtgcgatgagtaggggaagggagcctactagggtg

SEQ ID NO: 59369 - DNA, 120 bp, Homo sapiens
  misc_feature: 1370 for SV(W|O) and mtDNA
taactgaactcctcatacccaattggaccaatctatcaccctatagaagaactaatgttagtataagtaacatgaaaacattctcctccgcataagcctgcgtcagattaaaacactgaa

SEQ ID NO: 59370 - DNA, 120 bp, Homo sapiens
  misc_feature: 1370 for SV(W|O) and mtDNA
atctcaacttagtattatacccacacccacccaagaacagggtttgttaagatggcagagcccggtaatcgcataaaacttaaaactttacagtcagaggttcaattcctcttcttaaca

SEQ ID NO: 59371 - DNA, 120 bp, Homo sapiens
  misc_feature: 1370 for SV(W|O) and mtDNA
tgatatcatttacgggggaaggcgctttgtgaagtaggccttatttctcttgtcctttcgtacagggaggaatttgaagtagatagaaaccgacctggattactccggtctgaactcaga

SEQ ID NO: 59372 - DNA, 120 bp, Homo sapiens
  misc_feature: 1370 for SV(W|O) and mtDNA
tgactttttcaaaaaggtattagaaaaaccatttcataactttgtcaaagttaaattataggctaaatcctatatatcttaatggcacatgcagcgcaagtaggtctacaagacgctact

SEQ ID NO: 59373 - DNA, 120 bp, Homo sapiens
  misc_feature: 1370 for SV(W|O) and mtDNA
gatttgccgagttccttttactttttttaacctttccttatgagcatgcctgtgttgggttgacagtgagggtaataatgacttgttggttgattgtagatattgggctgttaattgtca

SEQ ID NO: 59374 - DNA, 120 bp, Homo sapiens
  misc_feature: 1370 for SV(W|O) and mtDNA
tgaactgtatccgacatctggttcctacttcagggtcataaagcctaaatagcccacacgttccccttaaataagacatcacgatggatcacaggtctatcaccctattaaccactcacg

SEQ ID NO: 59375 - DNA, 120 bp, Homo sapiens
  misc_feature: 1370 for SV(W|O) and mtDNA
tattctagccacctctagcctagccgtttactcaatcctctgatcagggtgagcatcaaactcaaactacgccctgatcggcgcactgcgagcagtagcccaaacaatctcatatgaagt

SEQ ID NO: 59376 - DNA, 120 bp, Homo sapiens
  misc_feature: 1370 for SV(W|O) and mtDNA
ctaataaaattaattaaccactcattcatcgacctccccaccccatccaacatctccacatgatgaaacttcggctcactccttggcgcctgcctgattctccaaatcaccacaggacta

SEQ ID NO: 59377 - DNA, 120 bp, Homo sapiens
  misc_feature: 1370 for SV(W|O) and mtDNA
tagagtgcttagttgaacagggccctgaagcgcgtacacaccgcccgtcaccctcctcaagtatacttcaaaggacatttaactaaaacccctacgcatttatatagaggagacaagtcg

SEQ ID NO: 59378 - DNA, 120 bp, Homo sapiens
  misc_feature: 1370 for SV(W|O) and mtDNA
gtggtgagggtgtttattataataatgtttgtgtattcggctatgaagaatagggcgaaggggcctgcggcgtattcgatgttgaagcctgagactagttcggactccccttcggcaagg

SEQ ID NO: 59379 - DNA, 120 bp, Homo sapiens
  misc_feature: 1370 for SV(W|O) and mtDNA
gtgcgataaataatgggatgaggcaggaatcaaagacagatactgcgacatagggtgctccggctccagcgtctcgcaatgctatcgcgtgcataccccccagacgaaaataccaaatgc

SEQ ID NO: 59380 - DNA, 120 bp, Homo sapiens
  misc_feature: 1370 for SV(W|O) and mtDNA
gcactcacagtcgcatcataatcctctctcaaggacttcaaactctactcccactaatagctttttgatgacttctagcaagcctcgctaacctcgccttaccccccactattaacctac

SEQ ID NO: 59381 - DNA, 120 bp, Homo sapiens
  misc_feature: 1370 for SV(W|O) and mtDNA
ggtttcgatgatgtggtctttggagtagaaacctgtgaggaaaggtattcctgctaatgctaggctgccaatggtgagggaggttgaagtgagaggtatggttttgagtagtcctcctat

SEQ ID NO: 59382 - DNA, 120 bp, Homo sapiens
  misc_feature: 1370 for SV(W|O) and mtDNA
cacctctagcctagccgtttactcaatcctctgatcagggtgagcatcaaactcaaactacgccctgatcggcgcactgcgagcagtagcccaaacaatctcatatgaagtcaccctagc

SEQ ID NO: 59383 - DNA, 120 bp, Homo sapiens
  misc_feature: 1370 for SV(W|O) and mtDNA
aatcgcataaaacttaaaactttacagtcagaggttcaattcctcttcttaacaacatacccatggccaacctcctactcctcattgtacccattctaatcgcaatggcattcctaatgc

SEQ ID NO: 59384 - DNA, 120 bp, Homo sapiens
  misc_feature: 1370 for SV(W|O) and mtDNA
aatactaagttgagatgatatcatttacgggggaaggcgctttgtgaagtaggccttatttctcttgtcctttcgtacagggaggaatttgaagtagatagaaaccgacctggattactc

SEQ ID NO: 59385 - DNA, 120 bp, Homo sapiens
  misc_feature: 1370 for SV(W|O) and mtDNA
cacaaacattattataataaacaccctcaccactacaatcttcctaggaacaacatatgacgcactctcccctgaactctacacaacatattttgtcaccaagaccctacttctaacctc

SEQ ID NO: 59386 - DNA, 120 bp, Homo sapiens
  misc_feature: 1370 for SV(W|O) and mtDNA
caggcgtttaatggggtttagtagggtagggttattttcgttaatgttagtaagggtggggaagcgaggttgacctgttagggtgagaagaattattcgagtgctataggcgcttgtcag

SEQ ID NO: 59387 - DNA, 120 bp, Homo sapiens
  misc_feature: 1370 for SV(W|O) and mtDNA
aagccactttcgtagtctattttgtgtcaactggagttttttacaactcaggtgagttttagctttattggggagggggtgatctaaaacactctttacgccggcttctattgacttggg

SEQ ID NO: 59388 - DNA, 120 bp, Homo sapiens
  misc_feature: 1369 for SV(W|O) and mtDNA
tttagacgtccgggaattgcatctgtttttaagcctaatgtggggacagctcatgagtgcaagacgtcttgtgatgtaattattatacgaatgggggcttcaatcgggagtactactcga

SEQ ID NO: 59389 - DNA, 120 bp, Homo sapiens
  misc_feature: 1369 for SV(W|O) and mtDNA
ttgtgaagtaggccttatttctcttgtcctttcgtacagggaggaatttgaagtagatagaaaccgacctggattactccggtctgaactcagatcacgtaggactttaatcgttgaaca

SEQ ID NO: 59390 - DNA, 120 bp, Homo sapiens
  misc_feature: 1369 for SV(W|O) and mtDNA
gcatgatttatcctacactccaactcatgagacccacaacaaatagcccttctaaacgctaatccaagcctcaccccactactaggcctcctcctagcagcagcaggcaaatcagcccaa

SEQ ID NO: 59391 - DNA, 120 bp, Homo sapiens
  misc_feature: 1369 for SV(W|O) and mtDNA
ttctagccacctctagcctagccgtttactcaatcctctgatcagggtgagcatcaaactcaaactacgccctgatcggcgcactgcgagcagtagcccaaacaatctcatatgaagtca

SEQ ID NO: 59392 - DNA, 120 bp, Homo sapiens
  misc_feature: 1369 for SV(W|O) and mtDNA
aaaacttaaaactttacagtcagaggttcaattcctcttcttaacaacatacccatggccaacctcctactcctcattgtacccattctaatcgcaatggcattcctaatgcttaccgaa

SEQ ID NO: 59393 - DNA, 120 bp, Homo sapiens
  misc_feature: 1369 for SV(W|O) and mtDNA
ttcagagcattgaccgtagtatacccccggtcgtgtagcggtgaaagtggtttggtttagacgtccgggaattgcatctgtttttaagcctaatgtggggacagctcatgagtgcaagac

SEQ ID NO: 59394 - DNA, 120 bp, Homo sapiens
  misc_feature: 1369 for SV(W|O) and mtDNA
ttcaatcagccacatagccctcgtagtaacagccattctcatccaaaccccctgaagcttcaccggcgcagtcattctcataatcgcccacgggcttacatcctcattactattctgcct

SEQ ID NO: 59395 - DNA, 120 bp, Homo sapiens
  misc_feature: 1369 for SV(W|O) and mtDNA
ggccatgggtatgttgttaagaagaggaattgaacctctgactgtaaagttttaagttttatgcgattaccgggctctgccatcttaacaaaccctgttcttgggtgggtgtgggtataa

SEQ ID NO: 59396 - DNA, 120 bp, Homo sapiens
  misc_feature: 1369 for SV(W|O) and mtDNA
tgttcgcttcattcattgcccccacaatcctaggcctacccgccgcagtactgatcattctatttccccctctattgatccccacctccaaatatctcatcaacaaccgactaatcacca

SEQ ID NO: 59397 - DNA, 120 bp, Homo sapiens
  misc_feature: 1369 for SV(W|O) and mtDNA
tggttctaggaataatgggggaagtatgtaggagttgaagattagtccgccgtagtcggtgtactcgtaggttcagtaccattggtggccaattgatttgatggtaagggagggatcgtt

SEQ ID NO: 59398 - DNA, 120 bp, Homo sapiens
  misc_feature: 1369 for SV(W|O) and mtDNA
tgaaatcacatggctaggccggaggtcattaggagggctgagagggcccctgttaggggtcatgggctgggttttactatatgataggcatgtgattggtgggtcattatgtgttgtcgt

SEQ ID NO: 59399 - DNA, 120 bp, Homo sapiens
  misc_feature: 1369 for SV(W|O) and mtDNA
catcaccccataaacaaataggtttggtcctagcctttctattagctcttagtaagattacacatgcaagcatccccgttccagtgagttcaccctctaaatcaccacgatcaaaaggga

SEQ ID NO: 59400 - DNA, 120 bp, Homo sapiens
  misc_feature: 1369 for SV(W|O) and mtDNA
tcatccccaccatcatagccaccatcaccctccttaacctctacttctacctacgcctaatctactccacctcaatcacactactccccatatctaacaacgtaaaaataaaatgacagt

SEQ ID NO: 59401 - DNA, 120 bp, Homo sapiens
  misc_feature: 1369 for SV(W|O) and mtDNA
tataagattattagtataaaaggggagataggtaggagtagcgtggtaagggcgatgagtgtggggaggaatggggtgggttttgtatgttcaaactgtcattttatttttacgttgtta

SEQ ID NO: 59402 - DNA, 120 bp, Homo sapiens
  misc_feature: 1369 for SV(W|O) and mtDNA
catgactttttcaaaaaggtattagaaaaaccatttcataactttgtcaaagttaaattataggctaaatcctatatatcttaatggcacatgcagcgcaagtaggtctacaagacgcta

SEQ ID NO: 59403 - DNA, 120 bp, Homo sapiens
  misc_feature: 1369 for SV(W|O) and mtDNA
tagcattaaccttttaagttaaagattaagagaaccaacacctctttacagtgaaatgccccaactaaatactaccgtatggcccaccataattacccccatactccttacactattcct

SEQ ID NO: 59404 - DNA, 120 bp, Homo sapiens
  misc_feature: 1369 for SV(W|O) and mtDNA
tagaaataagggggtttaagctcctattatttactctatcaaagtaactcttttatcagacatatttcttaggtttgagggggaatgctggagattgtaatgggtatggagacatatcat

SEQ ID NO: 59405 - DNA, 120 bp, Homo sapiens
  misc_feature: 1369 for SV(W|O) and mtDNA
tactcgtaggttcagtaccattggtggccaattgatttgatggtaagggagggatcgttgacctcgtctgttatgtaaaggatgcgtagggatgggagggcgatgaggactaggatgatg

SEQ ID NO: 59406 - DNA, 120 bp, Homo sapiens
  misc_feature: 1369 for SV(W|O) and mtDNA
catgggtatgttgttaagaagaggaattgaacctctgactgtaaagttttaagttttatgcgattaccgggctctgccatcttaacaaaccctgttcttgggtgggtgtgggtataatac

SEQ ID NO: 59407 - DNA, 120 bp, Homo sapiens
  misc_feature: 1369 for SV(W|O) and mtDNA
cataaaacttaaaactttacagtcagaggttcaattcctcttcttaacaacatacccatggccaacctcctactcctcattgtacccattctaatcgcaatggcattcctaatgcttacc

SEQ ID NO: 59408 - DNA, 120 bp, Homo sapiens
  misc_feature: 1369 for SV(W|O) and mtDNA
gagaaagcacataccaaggccaccacacaccacctgtccaaaaaggccttcgatacgggataatcctatttattacctcagaagtttttttcttcgcaggatttttctgagccttttacc

SEQ ID NO: 59409 - DNA, 120 bp, Homo sapiens
  misc_feature: 1369 for SV(W|O) and mtDNA
ccccacatcaagcccgaatgatatttcctattcgcctacacaattctccgatccgtccctaacaaactaggaggcgtccttgccctattactatccatcctcatcctagcaataatcccc

SEQ ID NO: 59410 - DNA, 120 bp, Homo sapiens
  misc_feature: 1369 for SV(W|O) and mtDNA
gcgcttactttgtagccttcatcagggtttgctgaagatggcggtatataggctgagcaagaggtggtgaggttgatcggggtttatcgattacagaacaggctcctctagagggatatg

SEQ ID NO: 59411 - DNA, 120 bp, Homo sapiens
  misc_feature: 1369 for SV(W|O) and mtDNA
gccatggccatccccttatgagcgggcgcagtgattataggctttcgctctaagattaaaaatgccctagcccacttcttaccacaaggcacacctacaccccttatccccatactagtt

SEQ ID NO: 59412 - DNA, 120 bp, Homo sapiens
  misc_feature: 1369 for SV(W|O) and mtDNA
attctagccacctctagcctagccgtttactcaatcctctgatcagggtgagcatcaaactcaaactacgccctgatcggcgcactgcgagcagtagcccaaacaatctcatatgaagtc

SEQ ID NO: 59413 - DNA, 120 bp, Homo sapiens
  misc_feature: 1369 for SV(W|O) and mtDNA
ctttctcggtaaataaggggtcgtaagcctctgttgtcagattcacaatctgatgttttggttaaactatatttacaagaggaaaacccggtaatgatgtcggggttgagggataggagg

SEQ ID NO: 59414 - DNA, 120 bp, Homo sapiens
  misc_feature: 1369 for SV(W|O) and mtDNA
ctgcgaacagagtggtgatagcgcctaagcatagtgttagagtttggattagtgggctattttctgctagggggtggaagcggatgagtaagaagattcctgctacaactatagtgcttg

SEQ ID NO: 59415 - DNA, 120 bp, Homo sapiens
  misc_feature: 1369 for SV(W|O) and mtDNA
agacctaaaatcgctcattgcatactcttcaatcagccacatagccctcgtagtaacagccattctcatccaaaccccctgaagcttcaccggcgcagtcattctcataatcgcccacgg

SEQ ID NO: 59416 - DNA, 120 bp, Homo sapiens
  misc_feature: 1369 for SV(W|O) and mtDNA
cccttttgatcgtggtgatttagagggtgaactcactggaacggggatgcttgcatgtgtaatcttactaagagctaatagaaaggctaggaccaaacctatttgtttatggggtgatgt

SEQ ID NO: 59417 - DNA, 120 bp, Homo sapiens
  misc_feature: 1369 for SV(W|O) and mtDNA
atccgacatctggttcctacttcagggtcataaagcctaaatagcccacacgttccccttaaataagacatcacgatggatcacaggtctatcaccctattaaccactcacgggagctct

SEQ ID NO: 59418 - DNA, 120 bp, Homo sapiens
  misc_feature: 1368 for SV(W|O) and mtDNA
tttcagagcattgaccgtagtatacccccggtcgtgtagcggtgaaagtggtttggtttagacgtccgggaattgcatctgtttttaagcctaatgtggggacagctcatgagtgcaaga

SEQ ID NO: 59419 - DNA, 120 bp, Homo sapiens
  misc_feature: 1368 for SV(W|O) and mtDNA
tctcaacttagtattatacccacacccacccaagaacagggtttgttaagatggcagagcccggtaatcgcataaaacttaaaactttacagtcagaggttcaattcctcttcttaacaa

SEQ ID NO: 59420 - DNA, 120 bp, Homo sapiens
  misc_feature: 1368 for SV(W|O) and mtDNA
ttcgctctaagattaaaaatgccctagcccacttcttaccacaaggcacacctacaccccttatccccatactagttattatcgaaaccatcagcctactcattcaaccaatagccctgg

SEQ ID NO: 59421 - DNA, 120 bp, Homo sapiens
  misc_feature: 1368 for SV(W|O) and mtDNA
tgtatccgacatctggttcctacttcagggtcataaagcctaaatagcccacacgttccccttaaataagacatcacgatggatcacaggtctatcaccctattaaccactcacgggagc

SEQ ID NO: 59422 - DNA, 120 bp, Homo sapiens
  misc_feature: 1368 for SV(W|O) and mtDNA
tggtgatgctagaggtgatgtttttggtaaacaggcggggtaagatttgccgagttccttttactttttttaacctttccttatgagcatgcctgtgttgggttgacagtgagggtaata

SEQ ID NO: 59423 - DNA, 120 bp, Homo sapiens
  misc_feature: 1368 for SV(W|O) and mtDNA
tggtgagggtgtttattataataatgtttgtgtattcggctatgaagaatagggcgaaggggcctgcggcgtattcgatgttgaagcctgagactagttcggactccccttcggcaaggt

SEQ ID NO: 59424 - DNA, 120 bp, Homo sapiens
  misc_feature: 1368 for SV(W|O) and mtDNA
attttcgttaatgttagtaagggtggggaagcgaggttgacctgttagggtgagaagaattattcgagtgctataggcgcttgtcagggaggtagcgatgagagtaatagatagggctca

SEQ ID NO: 59425 - DNA, 120 bp, Homo sapiens
  misc_feature: 1368 for SV(W|O) and mtDNA
ctgctaggaggaggcctagtagtggggtgaggcttggattagcgtttagaagggctatttgttgtgggtctcatgagttggagtgtaggataaatcatgctaaggcgaggatgaaaccga

SEQ ID NO: 59426 - DNA, 120 bp, Homo sapiens
  misc_feature: 1368 for SV(W|O) and mtDNA
ctagccatcattctactatcaacattactaataagtggctcctttaacctctccacccttatcacaacacaagaacacctctgattactcctgccatcatgacccttggccataatatga

SEQ ID NO: 59427 - DNA, 120 bp, Homo sapiens
  misc_feature: 1368 for SV(W|O) and mtDNA
tcaaccattaaccttccctctacacttatcatcttcacaattctaattctactgactatcctagaaatcgctgtcgccttaatccaagcctacgttttcacacttctagtaagcctctac

SEQ ID NO: 59428 - DNA, 120 bp, Homo sapiens
  misc_feature: 1368 for SV(W|O) and mtDNA
tatcaaagtaactcttttatcagacatatttcttaggtttgagggggaatgctggagattgtaatgggtatggagacatatcatataagtaatgctagggtgagtggtaggaagtttttt

SEQ ID NO: 59429 - DNA, 120 bp, Homo sapiens
  misc_feature: 1368 for SV(W|O) and mtDNA
gagtgcttagttgaacagggccctgaagcgcgtacacaccgcccgtcaccctcctcaagtatacttcaaaggacatttaactaaaacccctacgcatttatatagaggagacaagtcgta

SEQ ID NO: 59430 - DNA, 120 bp, Homo sapiens
  misc_feature: 1368 for SV(W|O) and mtDNA
ccatggccatccccttatgagcgggcgcagtgattataggctttcgctctaagattaaaaatgccctagcccacttcttaccacaaggcacacctacaccccttatccccatactagtta

SEQ ID NO: 59431 - DNA, 120 bp, Homo sapiens
  misc_feature: 1368 for SV(W|O) and mtDNA
gcagtgcttgaattatttggtttcggttgttttctattagactatggtgagctcaggtgattgatactcctgatgcgagtaatacggatgtgtttaggagtgggacttctaggggattta

SEQ ID NO: 59432 - DNA, 120 bp, Homo sapiens
  misc_feature: 1368 for SV(W|O) and mtDNA
gtttactgctaaatccaccttcgacccttaagtttcataagggctatcgtagttttctggggtagaaaatgtagcccatttcttgccacctcatgggctacaccttgacctaacgtcttt

SEQ ID NO: 59433 - DNA, 120 bp, Homo sapiens
  misc_feature: 1368 for SV(W|O) and mtDNA
gttggctcaggagtttgatagttcttgggcagtgagagtgagtagtagaatgtttagtgagcctagggtgttgtgagtgtaaattagtgcgatgagtaggggaagggagcctactagggt

SEQ ID NO: 59434 - DNA, 120 bp, Homo sapiens
  misc_feature: 1368 for SV(W|O) and mtDNA
cctagcaggtgtctcctctatcttaggggccatcaatttcatcacaacaattatcaatataaaaccccctgccataacccaataccaaacgcccctcttcgtctgatccgtcctaatcac

SEQ ID NO: 59435 - DNA, 120 bp, Homo sapiens
  misc_feature: 1368 for SV(W|O) and mtDNA
aacgcactcacagtcgcatcataatcctctctcaaggacttcaaactctactcccactaatagctttttgatgacttctagcaagcctcgctaacctcgccttaccccccactattaacc

SEQ ID NO: 59436 - DNA, 120 bp, Homo sapiens
  misc_feature: 1368 for SV(W|O) and mtDNA
gaagtagaggttaaggagggtgatggtggctatgatggtggggatgatgaggctattgttttttgtgaattcttcgataatggcccatttgggcaaaaagccggttagcgggggcaggcc

SEQ ID NO: 59437 - DNA, 120 bp, Homo sapiens
  misc_feature: 1368 for SV(W|O) and mtDNA
atactaagttgagatgatatcatttacgggggaaggcgctttgtgaagtaggccttatttctcttgtcctttcgtacagggaggaatttgaagtagatagaaaccgacctggattactcc

SEQ ID NO: 59438 - DNA, 120 bp, Homo sapiens
  misc_feature: 1368 for SV(W|O) and mtDNA
gctatgtcctcccgtgaggccaaatatcattctgaggggccacagtaattacaaacttactatccgccatcccatacattgggacagacctagttcaatgaatctgaggaggctactcag

SEQ ID NO: 59439 - DNA, 120 bp, Homo sapiens
  misc_feature: 1368 for SV(W|O) and mtDNA
gaggttagttgtggcaataaaaatgattaaggatactagtataagagatcaggttcgtcctttagtgttgtgtatggttatcatttgttttgaggttagtttgattagtcattgttgggt

SEQ ID NO: 59440 - DNA, 120 bp, Homo sapiens
  misc_feature: 1368 for SV(W|O) and mtDNA
ctttcgctctaagattaaaaatgccctagcccacttcttaccacaaggcacacctacaccccttatccccatactagttattatcgaaaccatcagcctactcattcaaccaatagccct

SEQ ID NO: 59441 - DNA, 120 bp, Homo sapiens
  misc_feature: 1368 for SV(W|O) and mtDNA
agaatttttcgttcggtaagcattaggaatgccattgcgattagaatgggtacaatgaggagtaggaggttggccatgggtatgttgttaagaagaggaattgaacctctgactgtaaag

SEQ ID NO: 59442 - DNA, 120 bp, Homo sapiens
  misc_feature: 1368 for SV(W|O) and mtDNA
aggactaggatgatggcgggcaggatagttcagacggtttctatttcctgagcgtctgagatgttagtattagttagttttgttgtgagtgttaggaaaagggcatacaggactaggaag

SEQ ID NO: 59443 - DNA, 120 bp, Homo sapiens
  misc_feature: 1368 for SV(W|O) and mtDNA
ctaagttgagatgatatcatttacgggggaaggcgctttgtgaagtaggccttatttctcttgtcctttcgtacagggaggaatttgaagtagatagaaaccgacctggattactccggt

SEQ ID NO: 59444 - DNA, 120 bp, Homo sapiens
  misc_feature: 1368 for SV(W|O) and mtDNA
cagacctaaaatcgctcattgcatactcttcaatcagccacatagccctcgtagtaacagccattctcatccaaaccccctgaagcttcaccggcgcagtcattctcataatcgcccacg

SEQ ID NO: 59445 - DNA, 120 bp, Homo sapiens
  misc_feature: 1368 for SV(W|O) and mtDNA
aacaaacaatgttcaaccagtaactactactaatcaacgcccataatcatacaaagcccccgcaccaataggatcctcccgaatcaaccctgacccctctccttcataaattattcagct

SEQ ID NO: 59446 - DNA, 120 bp, Homo sapiens
  misc_feature: 1368 for SV(W|O) and mtDNA
agagtgcttagttgaacagggccctgaagcgcgtacacaccgcccgtcaccctcctcaagtatacttcaaaggacatttaactaaaacccctacgcatttatatagaggagacaagtcgt

SEQ ID NO: 59447 - DNA, 120 bp, Homo sapiens
  misc_feature: 1368 for SV(W|O) and mtDNA
aatgagtgaggcaggagtccgaggaggttagttgtggcaataaaaatgattaaggatactagtataagagatcaggttcgtcctttagtgttgtgtatggttatcatttgttttgaggtt

SEQ ID NO: 59448 - DNA, 120 bp, Homo sapiens
  misc_feature: 1367 for SV(W|O) and mtDNA
ctcatccgcttccaccccctagcagaaaatagcccactaatccaaactctaacactatgcttaggcgctatcaccactctgttcgcagcagtctgcgcccttacacaaaatgacatcaaa

SEQ ID NO: 59449 - DNA, 120 bp, Homo sapiens
  misc_feature: 1367 for SV(W|O) and mtDNA
gatggtttcgataataactagtatggggataaggggtgtaggtgtgccttgtggtaagaagtgggctagggcatttttaatcttagagcgaaagcctataatcactgcgcccgctcataa

SEQ ID NO: 59450 - DNA, 120 bp, Homo sapiens
  misc_feature: 1367 for SV(W|O) and mtDNA
tgttataattatgcctcatagggatagtacaaggaaggggtaggctatgtgttttgtcagggggttgagaatgagtgtgaggcgtattataccatagccgcctagttttaagagtactgc

SEQ ID NO: 59451 - DNA, 120 bp, Homo sapiens
  misc_feature: 1367 for SV(W|O) and mtDNA
tgcttagttgaacagggccctgaagcgcgtacacaccgcccgtcaccctcctcaagtatacttcaaaggacatttaactaaaacccctacgcatttatatagaggagacaagtcgtaaca

SEQ ID NO: 59452 - DNA, 120 bp, Homo sapiens
  misc_feature: 1367 for SV(W|O) and mtDNA
tgctgcgaacagagtggtgatagcgcctaagcatagtgttagagtttggattagtgggctattttctgctagggggtggaagcggatgagtaagaagattcctgctacaactatagtgct

SEQ ID NO: 59453 - DNA, 120 bp, Homo sapiens
  misc_feature: 1367 for SV(W|O) and mtDNA
gggtacttgcgcttactttgtagccttcatcagggtttgctgaagatggcggtatataggctgagcaagaggtggtgaggttgatcggggtttatcgattacagaacaggctcctctaga

SEQ ID NO: 59454 - DNA, 120 bp, Homo sapiens
  misc_feature: 1367 for SV(W|O) and mtDNA
taaaacttaaaactttacagtcagaggttcaattcctcttcttaacaacatacccatggccaacctcctactcctcattgtacccattctaatcgcaatggcattcctaatgcttaccga

SEQ ID NO: 59455 - DNA, 120 bp, Homo sapiens
  misc_feature: 1367 for SV(W|O) and mtDNA
tcctaggaacaacatatgacgcactctcccctgaactctacacaacatattttgtcaccaagaccctacttctaacctccctgttcttatgaattcgaacagcatacccccgattccgct

SEQ ID NO: 59456 - DNA, 120 bp, Homo sapiens
  misc_feature: 1367 for SV(W|O) and mtDNA
aataagctatcgggcccataccccgaaaatgttggttatacccttcccgtactaattaatcccctggcccaacccgtcatctactctaccatctttgcaggcacactcatcacagcgcta

SEQ ID NO: 59457 - DNA, 120 bp, Homo sapiens
  misc_feature: 1367 for SV(W|O) and mtDNA
aggccggatgtcagaggggtgccttgggtaacctctgggactcagaagtgaaagggggctattcctagttttattgctatagccattatgattattaatgatgagtactgattggtagta

SEQ ID NO: 59458 - DNA, 120 bp, Homo sapiens
  misc_feature: 1367 for SV(W|O) and mtDNA
taagttgagatgatatcatttacgggggaaggcgctttgtgaagtaggccttatttctcttgtcctttcgtacagggaggaatttgaagtagatagaaaccgacctggattactccggtc

SEQ ID NO: 59459 - DNA, 120 bp, Homo sapiens
  misc_feature: 1367 for SV(W|O) and mtDNA
gttattttcgttaatgttagtaagggtggggaagcgaggttgacctgttagggtgagaagaattattcgagtgctataggcgcttgtcagggaggtagcgatgagagtaatagatagggc

SEQ ID NO: 59460 - DNA, 120 bp, Homo sapiens
  misc_feature: 1367 for SV(W|O) and mtDNA
gtacccacgtaaagacgttaggtcaaggtgtagcccatgaggtggcaagaaatgggctacattttctaccccagaaaactacgatagcccttatgaaacttaagggtcgaaggtggattt

SEQ ID NO: 59461 - DNA, 120 bp, Homo sapiens
  misc_feature: 1367 for SV(W|O) and mtDNA
ggagccacttattagtaatgttgatagtagaatgatggctagggtgacttcatatgagattgtttgggctactgctcgcagtgcgccgatcagggcgtagtttgagtttgatgctcaccc

SEQ ID NO: 59462 - DNA, 120 bp, Homo sapiens
  misc_feature: 1367 for SV(W|O) and mtDNA
acatcaagcccgaatgatatttcctattcgcctacacaattctccgatccgtccctaacaaactaggaggcgtccttgccctattactatccatcctcatcctagcaataatccccatcc

SEQ ID NO: 59463 - DNA, 120 bp, Homo sapiens
  misc_feature: 1367 for SV(W|O) and mtDNA
gcgtaggtagaagtagaggttaaggagggtgatggtggctatgatggtggggatgatgaggctattgttttttgtgaattcttcgataatggcccatttgggcaaaaagccggttagcgg

SEQ ID NO: 59464 - DNA, 120 bp, Homo sapiens
  misc_feature: 1367 for SV(W|O) and mtDNA
atactaatctccctacaaatctccttaattataacattcacagccacagaactaatcatattttatatcttcttcgaaaccacacttatccccaccttggctatcatcacccgatgaggc

SEQ ID NO: 59465 - DNA, 120 bp, Homo sapiens
  misc_feature: 1367 for SV(W|O) and mtDNA
gccactttcgtagtctattttgtgtcaactggagttttttacaactcaggtgagttttagctttattggggagggggtgatctaaaacactctttacgccggcttctattgacttgggtt

SEQ ID NO: 59466 - DNA, 120 bp, Homo sapiens
  misc_feature: 1367 for SV(W|O) and mtDNA
atactactaacagaccgcaacctcaacaccaccttcttcgaccccgccggaggaggagaccccattctataccaacacctattctgatttttcggtcaccctgaagtttatattcttatc

SEQ ID NO: 59467 - DNA, 120 bp, Homo sapiens
  misc_feature: 1367 for SV(W|O) and mtDNA
cttagcattaaccttttaagttaaagattaagagaaccaacacctctttacagtgaaatgccccaactaaatactaccgtatggcccaccataattacccccatactccttacactattc

SEQ ID NO: 59468 - DNA, 120 bp, Homo sapiens
  misc_feature: 1367 for SV(W|O) and mtDNA
gaaacctgtgaggaaaggtattcctgctaatgctaggctgccaatggtgagggaggttgaagtgagaggtatggttttgagtagtcctcctatttttcgaatatcttgttcattgttaag

SEQ ID NO: 59469 - DNA, 120 bp, Homo sapiens
  misc_feature: 1367 for SV(W|O) and mtDNA
agttttaagttttatgcgattaccgggctctgccatcttaacaaaccctgttcttgggtgggtgtgggtataatactaagttgagatgatatcatttacgggggaaggcgctttgtgaag

SEQ ID NO: 59470 - DNA, 120 bp, Homo sapiens
  misc_feature: 1367 for SV(W|O) and mtDNA
cgcctatactttatttgggtaaatggtttggctaaggttgtctggtagtaaggtggagtgggtttggggctaggtttagctcagagcggtcaagttaagttgaaatctcctaagtgtaag

SEQ ID NO: 59471 - DNA, 120 bp, Homo sapiens
  misc_feature: 1367 for SV(W|O) and mtDNA
ctatcaaagtaactcttttatcagacatatttcttaggtttgagggggaatgctggagattgtaatgggtatggagacatatcatataagtaatgctagggtgagtggtaggaagttttt

SEQ ID NO: 59472 - DNA, 120 bp, Homo sapiens
  misc_feature: 1367 for SV(W|O) and mtDNA
ccacatcaagcccgaatgatatttcctattcgcctacacaattctccgatccgtccctaacaaactaggaggcgtccttgccctattactatccatcctcatcctagcaataatccccat

SEQ ID NO: 59473 - DNA, 120 bp, Homo sapiens
  misc_feature: 1367 for SV(W|O) and mtDNA
attactgtggcccctcagaatgatatttggcctcacgggaggacatagcctatgaaggctgttgctatagttgcaagcaggaggataatgccgatgtttcaggtttctgagtagagaaat

SEQ ID NO: 59474 - DNA, 120 bp, Homo sapiens
  misc_feature: 1367 for SV(W|O) and mtDNA
atttctataagattattagtataaaaggggagataggtaggagtagcgtggtaagggcgatgagtgtggggaggaatggggtgggttttgtatgttcaaactgtcattttatttttacgt

SEQ ID NO: 59475 - DNA, 120 bp, Homo sapiens
  misc_feature: 1367 for SV(W|O) and mtDNA
attatgcctcatagggatagtacaaggaaggggtaggctatgtgttttgtcagggggttgagaatgagtgtgaggcgtattataccatagccgcctagttttaagagtactgcggcaagt

SEQ ID NO: 59476 - DNA, 120 bp, Homo sapiens
  misc_feature: 1367 for SV(W|O) and mtDNA
atgggtatgttgttaagaagaggaattgaacctctgactgtaaagttttaagttttatgcgattaccgggctctgccatcttaacaaaccctgttcttgggtgggtgtgggtataatact

SEQ ID NO: 59477 - DNA, 120 bp, Homo sapiens
  misc_feature: 1367 for SV(W|O) and mtDNA
agtttactgctaaatccaccttcgacccttaagtttcataagggctatcgtagttttctggggtagaaaatgtagcccatttcttgccacctcatgggctacaccttgacctaacgtctt

SEQ ID NO: 59478 - DNA, 120 bp, Homo sapiens
  misc_feature: 1367 for SV(W|O) and mtDNA
agtacccacgtaaagacgttaggtcaaggtgtagcccatgaggtggcaagaaatgggctacattttctaccccagaaaactacgatagcccttatgaaacttaagggtcgaaggtggatt

SEQ ID NO: 59479 - DNA, 120 bp, Homo sapiens
  misc_feature: 1366 for SV(W|O) and mtDNA
ttcgagccgagctgggccagccaggcaaccttctaggtaacgaccacatctacaacgttatcgtcacagcccatgcatttgtaataatcttcttcatagtaatacccatcataatcggag

SEQ ID NO: 59480 - DNA, 120 bp, Homo sapiens
  misc_feature: 1366 for SV(W|O) and mtDNA
tcttcttagtagctattaccttcttattatttgatctagaaattgccctccttttacccctaccatgagccctacaaacaactaacctgccactaatagttatgtcatccctcttattaa

SEQ ID NO: 59481 - DNA, 120 bp, Homo sapiens
  misc_feature: 1366 for SV(W|O) and mtDNA
tgtcctttcgtacagggaggaatttgaagtagatagaaaccgacctggattactccggtctgaactcagatcacgtaggactttaatcgttgaacaaacgaacctttaatagcggctgca

SEQ ID NO: 59482 - DNA, 120 bp, Homo sapiens
  misc_feature: 1366 for SV(W|O) and mtDNA
ctaatcttcaactcctacatacttcccccattattcctagaaccaggcgacctgcgactccttgacgttgacaatcgagtagtactcccgattgaagcccccattcgtataataattaca

SEQ ID NO: 59483 - DNA, 120 bp, Homo sapiens
  misc_feature: 1366 for SV(W|O) and mtDNA
tgaagagttttatggcgtcagcgaagggttgtagtagcccgtaggggcctacaacgttggggcctttgcgtagttgtatatagcctagaatttttcgttcggtaagcattaggaatgcca

SEQ ID NO: 59484 - DNA, 120 bp, Homo sapiens
  misc_feature: 1366 for SV(W|O) and mtDNA
tgatggtttcgataataactagtatggggataaggggtgtaggtgtgccttgtggtaagaagtgggctagggcatttttaatcttagagcgaaagcctataatcactgcgcccgctcata

SEQ ID NO: 59485 - DNA, 120 bp, Homo sapiens
  misc_feature: 1366 for SV(W|O) and mtDNA
aagaggaattgaacctctgactgtaaagttttaagttttatgcgattaccgggctctgccatcttaacaaaccctgttcttgggtgggtgtgggtataatactaagttgagatgatatca

SEQ ID NO: 59486 - DNA, 120 bp, Homo sapiens
  misc_feature: 1366 for SV(W|O) and mtDNA
tcttaacaaaccctgttcttgggtgggtgtgggtataatactaagttgagatgatatcatttacgggggaaggcgctttgtgaagtaggccttatttctcttgtcctttcgtacagggag

SEQ ID NO: 59487 - DNA, 120 bp, Homo sapiens
  misc_feature: 1366 for SV(W|O) and mtDNA
tcggcgatatcggtttcatcctcgccttagcatgatttatcctacactccaactcatgagacccacaacaaatagcccttctaaacgctaatccaagcctcaccccactactaggcctcc

SEQ ID NO: 59488 - DNA, 120 bp, Homo sapiens
  misc_feature: 1366 for SV(W|O) and mtDNA
tcgcataaaacttaaaactttacagtcagaggttcaattcctcttcttaacaacatacccatggccaacctcctactcctcattgtacccattctaatcgcaatggcattcctaatgctt

SEQ ID NO: 59489 - DNA, 120 bp, Homo sapiens
  misc_feature: 1366 for SV(W|O) and mtDNA
gatgctagaggtgatgtttttggtaaacaggcggggtaagatttgccgagttccttttactttttttaacctttccttatgagcatgcctgtgttgggttgacagtgagggtaataatga

SEQ ID NO: 59490 - DNA, 120 bp, Homo sapiens
  misc_feature: 1366 for SV(W|O) and mtDNA
acgagaaaacaccctcatgttcatacacctatcccccattctcctcctatccctcaaccccgacatcattaccgggttttcctcttgtaaatatagtttaaccaaaacatcagattgtga

SEQ ID NO: 59491 - DNA, 120 bp, Homo sapiens
  misc_feature: 1366 for SV(W|O) and mtDNA
tcaatcagccacatagccctcgtagtaacagccattctcatccaaaccccctgaagcttcaccggcgcagtcattctcataatcgcccacgggcttacatcctcattactattctgccta

SEQ ID NO: 59492 - DNA, 120 bp, Homo sapiens
  misc_feature: 1366 for SV(W|O) and mtDNA
ggtggctggcacgaaattgaccaaccctggggttagtatagcttagttaaactttcgtttattgctaaaggttaatcactgctgtttcccgtgggggtgtggctaggctaagcgttttga

SEQ ID NO: 59493 - DNA, 120 bp, Homo sapiens
  misc_feature: 1366 for SV(W|O) and mtDNA
tattcctagttttattgctatagccattatgattattaatgatgagtactgattggtagtattggttatggttcattgtccggagagtatattgttgaagaggatagctattagaaggat

SEQ ID NO: 59494 - DNA, 120 bp, Homo sapiens
  misc_feature: 1366 for SV(W|O) and mtDNA
aacctagccatggccatccccttatgagcgggcgcagtgattataggctttcgctctaagattaaaaatgccctagcccacttcttaccacaaggcacacctacaccccttatccccata

SEQ ID NO: 59495 - DNA, 120 bp, Homo sapiens
  misc_feature: 1366 for SV(W|O) and mtDNA
tagaagtagaggttaaggagggtgatggtggctatgatggtggggatgatgaggctattgttttttgtgaattcttcgataatggcccatttgggcaaaaagccggttagcgggggcagg

SEQ ID NO: 59496 - DNA, 120 bp, Homo sapiens
  misc_feature: 1366 for SV(W|O) and mtDNA
taaagccactttcgtagtctattttgtgtcaactggagttttttacaactcaggtgagttttagctttattggggagggggtgatctaaaacactctttacgccggcttctattgacttg

SEQ ID NO: 59497 - DNA, 120 bp, Homo sapiens
  misc_feature: 1366 for SV(W|O) and mtDNA
gtcctttcgtacagggaggaatttgaagtagatagaaaccgacctggattactccggtctgaactcagatcacgtaggactttaatcgttgaacaaacgaacctttaatagcggctgcac

SEQ ID NO: 59498 - DNA, 120 bp, Homo sapiens
  misc_feature: 1366 for SV(W|O) and mtDNA
gtaataaccatgcacactactataaccaccctaaccctgacttccctaattccccccatccttaccaccctcgttaaccctaacaaaaaaaactcatacccccattatgtaaaatccatt

SEQ ID NO: 59499 - DNA, 120 bp, Homo sapiens
  misc_feature: 1366 for SV(W|O) and mtDNA
ggtgctttgtgttaagctacactctggttcgtccaagtgcactttccagtacacttaccatgttacgacttgtctcctctatataaatgcgtaggggttttagttaaatgtcctttgaag

SEQ ID NO: 59500 - DNA, 120 bp, Homo sapiens
  misc_feature: 1366 for SV(W|O) and mtDNA
ggtacaatgaggagtaggaggttggccatgggtatgttgttaagaagaggaattgaacctctgactgtaaagttttaagttttatgcgattaccgggctctgccatcttaacaaaccctg

SEQ ID NO: 59501 - DNA, 120 bp, Homo sapiens
  misc_feature: 1366 for SV(W|O) and mtDNA
ggccggatgtcagaggggtgccttgggtaacctctgggactcagaagtgaaagggggctattcctagttttattgctatagccattatgattattaatgatgagtactgattggtagtat

SEQ ID NO: 59502 - DNA, 120 bp, Homo sapiens
  misc_feature: 1366 for SV(W|O) and mtDNA
cttcaatcagccacatagccctcgtagtaacagccattctcatccaaaccccctgaagcttcaccggcgcagtcattctcataatcgcccacgggcttacatcctcattactattctgcc

SEQ ID NO: 59503 - DNA, 120 bp, Homo sapiens
  misc_feature: 1366 for SV(W|O) and mtDNA
cagcttctgtggaacgagggtttatttttttggttagaactggaataaaagctagcatgtttatttctaggcctactcaggtaaaaaatcagtgcgagcttagcgctgtgatgagtgtgc

SEQ ID NO: 59504 - DNA, 120 bp, Homo sapiens
  misc_feature: 1366 for SV(W|O) and mtDNA
aagcacataccaaggccaccacacaccacctgtccaaaaaggccttcgatacgggataatcctatttattacctcagaagtttttttcttcgcaggatttttctgagccttttaccactc

SEQ ID NO: 59505 - DNA, 120 bp, Homo sapiens
  misc_feature: 1366 for SV(W|O) and mtDNA
cttagttgaacagggccctgaagcgcgtacacaccgcccgtcaccctcctcaagtatacttcaaaggacatttaactaaaacccctacgcatttatatagaggagacaagtcgtaacatg

SEQ ID NO: 59506 - DNA, 120 bp, Homo sapiens
  misc_feature: 1366 for SV(W|O) and mtDNA
cttaacaaaccctgttcttgggtgggtgtgggtataatactaagttgagatgatatcatttacgggggaaggcgctttgtgaagtaggccttatttctcttgtcctttcgtacagggagg

SEQ ID NO: 59507 - DNA, 120 bp, Homo sapiens
  misc_feature: 1366 for SV(W|O) and mtDNA
cccagtgacacatgtttaacggccgcggtaccctaaccgtgcaaaggtagcataatcacttgttccttaaatagggacctgtatgaatggctccacgagggttcagctgtctcttacttt

SEQ ID NO: 59508 - DNA, 120 bp, Homo sapiens
  misc_feature: 1366 for SV(W|O) and mtDNA
catccccaccatcatagccaccatcaccctccttaacctctacttctacctacgcctaatctactccacctcaatcacactactccccatatctaacaacgtaaaaataaaatgacagtt

SEQ ID NO: 59509 - DNA, 120 bp, Homo sapiens
  misc_feature: 1366 for SV(W|O) and mtDNA
aggtgtctcctctatcttaggggccatcaatttcatcacaacaattatcaatataaaaccccctgccataacccaataccaaacgcccctcttcgtctgatccgtcctaatcacagcagt

SEQ ID NO: 59510 - DNA, 120 bp, Homo sapiens
  misc_feature: 1365 for SV(W|O) and mtDNA
gatgcaattcccggacgtctaaaccaaaccactttcaccgctacacgaccgggggtatactacggtcaatgctctgaaatctgtggagcaaaccacagtttcatgcccatcgtcctagaa

SEQ ID NO: 59511 - DNA, 120 bp, Homo sapiens
  misc_feature: 1365 for SV(W|O) and mtDNA
tcattgttgggtggtgattagtcggttgttgatgagatatttggaggtggggatcaatagagggggaaatagaatgatcagtactgcggcgggtaggcctaggattgtgggggcaatgaa

SEQ ID NO: 59512 - DNA, 120 bp, Homo sapiens
  misc_feature: 1365 for SV(W|O) and mtDNA
ttagttgaacagggccctgaagcgcgtacacaccgcccgtcaccctcctcaagtatacttcaaaggacatttaactaaaacccctacgcatttatatagaggagacaagtcgtaacatgg

SEQ ID NO: 59513 - DNA, 120 bp, Homo sapiens
  misc_feature: 1365 for SV(W|O) and mtDNA
tattcttcatagccgaatacacaaacattattataataaacaccctcaccactacaatcttcctaggaacaacatatgacgcactctcccctgaactctacacaacatattttgtcacca

SEQ ID NO: 59514 - DNA, 120 bp, Homo sapiens
  misc_feature: 1365 for SV(W|O) and mtDNA
gggggtatactacggtcaatgctctgaaatctgtggagcaaaccacagtttcatgcccatcgtcctagaattaattcccctaaaaatctttgaaatagggcccgtatttaccctatagca

SEQ ID NO: 59515 - DNA, 120 bp, Homo sapiens
  misc_feature: 1365 for SV(W|O) and mtDNA
tgaggcaaccagccagaacgcctgaacgcaggcacatacttcctattctacaccctagtaggctcccttcccctactcatcgcactaatttacactcacaacaccctaggctcactaaac

SEQ ID NO: 59516 - DNA, 120 bp, Homo sapiens
  misc_feature: 1365 for SV(W|O) and mtDNA
tcctctctttcttcttcccactcatcctaaccctactcctaatcacataacctattcccccgagcaatctcaattacaatatatacaccaacaaacaatgttcaaccagtaactactact

SEQ ID NO: 59517 - DNA, 120 bp, Homo sapiens
  misc_feature: 1365 for SV(W|O) and mtDNA
tcataggctatgtcctcccgtgaggccaaatatcattctgaggggccacagtaattacaaacttactatccgccatcccatacattgggacagacctagttcaatgaatctgaggaggct

SEQ ID NO: 59518 - DNA, 120 bp, Homo sapiens
  misc_feature: 1365 for SV(W|O) and mtDNA
cttcctctctttcttcttcccactcatcctaaccctactcctaatcacataacctattcccccgagcaatctcaattacaatatatacaccaacaaacaatgttcaaccagtaactacta

SEQ ID NO: 59519 - DNA, 120 bp, Homo sapiens
  misc_feature: 1365 for SV(W|O) and mtDNA
tagggtgacttcatatgagattgtttgggctactgctcgcagtgcgccgatcagggcgtagtttgagtttgatgctcaccctgatcagaggattgagtaaacggctaggctagaggtggc

SEQ ID NO: 59520 - DNA, 120 bp, Homo sapiens
  misc_feature: 1365 for SV(W|O) and mtDNA
cctaggaacaacatatgacgcactctcccctgaactctacacaacatattttgtcaccaagaccctacttctaacctccctgttcttatgaattcgaacagcatacccccgattccgcta

SEQ ID NO: 59521 - DNA, 120 bp, Homo sapiens
  misc_feature: 1365 for SV(W|O) and mtDNA
cataggctatgtcctcccgtgaggccaaatatcattctgaggggccacagtaattacaaacttactatccgccatcccatacattgggacagacctagttcaatgaatctgaggaggcta

SEQ ID NO: 59522 - DNA, 120 bp, Homo sapiens
  misc_feature: 1365 for SV(W|O) and mtDNA
taatcttcaactcctacatacttcccccattattcctagaaccaggcgacctgcgactccttgacgttgacaatcgagtagtactcccgattgaagcccccattcgtataataattacat

SEQ ID NO: 59523 - DNA, 120 bp, Homo sapiens
  misc_feature: 1365 for SV(W|O) and mtDNA
taataaaattaattaaccactcattcatcgacctccccaccccatccaacatctccacatgatgaaacttcggctcactccttggcgcctgcctgattctccaaatcaccacaggactat

SEQ ID NO: 59524 - DNA, 120 bp, Homo sapiens
  misc_feature: 1365 for SV(W|O) and mtDNA
ggaacaacatatgacgcactctcccctgaactctacacaacatattttgtcaccaagaccctacttctaacctccctgttcttatgaattcgaacagcatacccccgattccgctacgac

SEQ ID NO: 59525 - DNA, 120 bp, Homo sapiens
  misc_feature: 1365 for SV(W|O) and mtDNA
gctgctaggaggaggcctagtagtggggtgaggcttggattagcgtttagaagggctatttgttgtgggtctcatgagttggagtgtaggataaatcatgctaaggcgaggatgaaaccg

SEQ ID NO: 59526 - DNA, 120 bp, Homo sapiens
  misc_feature: 1365 for SV(W|O) and mtDNA
atcgctcattgcatactcttcaatcagccacatagccctcgtagtaacagccattctcatccaaaccccctgaagcttcaccggcgcagtcattctcataatcgcccacgggcttacatc

SEQ ID NO: 59527 - DNA, 120 bp, Homo sapiens
  misc_feature: 1365 for SV(W|O) and mtDNA
gaagaggaattgaacctctgactgtaaagttttaagttttatgcgattaccgggctctgccatcttaacaaaccctgttcttgggtgggtgtgggtataatactaagttgagatgatatc

SEQ ID NO: 59528 - DNA, 120 bp, Homo sapiens
  misc_feature: 1365 for SV(W|O) and mtDNA
aattatgcctcatagggatagtacaaggaaggggtaggctatgtgttttgtcagggggttgagaatgagtgtgaggcgtattataccatagccgcctagttttaagagtactgcggcaag

SEQ ID NO: 59529 - DNA, 120 bp, Homo sapiens
  misc_feature: 1365 for SV(W|O) and mtDNA
ctggtgatgctagaggtgatgtttttggtaaacaggcggggtaagatttgccgagttccttttactttttttaacctttccttatgagcatgcctgtgttgggttgacagtgagggtaat

SEQ ID NO: 59530 - DNA, 120 bp, Homo sapiens
  misc_feature: 1365 for SV(W|O) and mtDNA
ctcccagtaggttaatagtggggggtaaggcgaggttagcgaggcttgctagaagtcatcaaaaagctattagtgggagtagagtttgaagtccttgagagaggattatgatgcgactgt

SEQ ID NO: 59531 - DNA, 120 bp, Homo sapiens
  misc_feature: 1365 for SV(W|O) and mtDNA
ctcagtttactgctaaatccaccttcgacccttaagtttcataagggctatcgtagttttctggggtagaaaatgtagcccatttcttgccacctcatgggctacaccttgacctaacgt

SEQ ID NO: 59532 - DNA, 120 bp, Homo sapiens
  misc_feature: 1365 for SV(W|O) and mtDNA
ctatttattctagccacctctagcctagccgtttactcaatcctctgatcagggtgagcatcaaactcaaactacgccctgatcggcgcactgcgagcagtagcccaaacaatctcatat

SEQ ID NO: 59533 - DNA, 120 bp, Homo sapiens
  misc_feature: 1365 for SV(W|O) and mtDNA
ctatgtcctcccgtgaggccaaatatcattctgaggggccacagtaattacaaacttactatccgccatcccatacattgggacagacctagttcaatgaatctgaggaggctactcagt

SEQ ID NO: 59534 - DNA, 120 bp, Homo sapiens
  misc_feature: 1365 for SV(W|O) and mtDNA
aagaggggcgtttggtattgggttatggcagggggttttatattgataattgttgtgatgaaattgatggcccctaagatagaggagacacctgctaggtgtaaggagaagatggttagg

SEQ ID NO: 59535 - DNA, 120 bp, Homo sapiens
  misc_feature: 1365 for SV(W|O) and mtDNA
ccatgactttttcaaaaaggtattagaaaaaccatttcataactttgtcaaagttaaattataggctaaatcctatatatcttaatggcacatgcagcgcaagtaggtctacaagacgct

SEQ ID NO: 59536 - DNA, 120 bp, Homo sapiens
  misc_feature: 1365 for SV(W|O) and mtDNA
ccatcttctccttacacctagcaggtgtctcctctatcttaggggccatcaatttcatcacaacaattatcaatataaaaccccctgccataacccaataccaaacgcccctcttcgtct

SEQ ID NO: 59537 - DNA, 120 bp, Homo sapiens
  misc_feature: 1365 for SV(W|O) and mtDNA
cattcattgcccccacaatcctaggcctacccgccgcagtactgatcattctatttccccctctattgatccccacctccaaatatctcatcaacaaccgactaatcaccacccaacaat

SEQ ID NO: 59538 - DNA, 120 bp, Homo sapiens
  misc_feature: 1365 for SV(W|O) and mtDNA
aaataagctatcgggcccataccccgaaaatgttggttatacccttcccgtactaattaatcccctggcccaacccgtcatctactctaccatctttgcaggcacactcatcacagcgct

SEQ ID NO: 59539 - DNA, 120 bp, Homo sapiens
  misc_feature: 1365 for SV(W|O) and mtDNA
agccactttcgtagtctattttgtgtcaactggagttttttacaactcaggtgagttttagctttattggggagggggtgatctaaaacactctttacgccggcttctattgacttgggt

SEQ ID NO: 59540 - DNA, 120 bp, Homo sapiens
  misc_feature: 1364 for SV(W|O) and mtDNA
ttttgtgtaagggcgcagactgctgcgaacagagtggtgatagcgcctaagcatagtgttagagtttggattagtgggctattttctgctagggggtggaagcggatgagtaagaagatt

SEQ ID NO: 59541 - DNA, 120 bp, Homo sapiens
  misc_feature: 1364 for SV(W|O) and mtDNA
gtgaagtaggccttatttctcttgtcctttcgtacagggaggaatttgaagtagatagaaaccgacctggattactccggtctgaactcagatcacgtaggactttaatcgttgaacaaa

SEQ ID NO: 59542 - DNA, 120 bp, Homo sapiens
  misc_feature: 1364 for SV(W|O) and mtDNA
actcatccgcttccaccccctagcagaaaatagcccactaatccaaactctaacactatgcttaggcgctatcaccactctgttcgcagcagtctgcgcccttacacaaaatgacatcaa

SEQ ID NO: 59543 - DNA, 120 bp, Homo sapiens
  misc_feature: 1364 for SV(W|O) and mtDNA
tcatctcaacttagtattatacccacacccacccaagaacagggtttgttaagatggcagagcccggtaatcgcataaaacttaaaactttacagtcagaggttcaattcctcttcttaa

SEQ ID NO: 59544 - DNA, 120 bp, Homo sapiens
  misc_feature: 1364 for SV(W|O) and mtDNA
tggtatagaatggggtctcctcctccggcggggtcgaagaaggtggtgttgaggttgcggtctgttagtagtatagtgatgccagcagctaggactgggagagataggagaagtaggact

SEQ ID NO: 59545 - DNA, 120 bp, Homo sapiens
  misc_feature: 1364 for SV(W|O) and mtDNA
cccacatcaagcccgaatgatatttcctattcgcctacacaattctccgatccgtccctaacaaactaggaggcgtccttgccctattactatccatcctcatcctagcaataatcccca

SEQ ID NO: 59546 - DNA, 120 bp, Homo sapiens
  misc_feature: 1364 for SV(W|O) and mtDNA
tctcagtttactgctaaatccaccttcgacccttaagtttcataagggctatcgtagttttctggggtagaaaatgtagcccatttcttgccacctcatgggctacaccttgacctaacg

SEQ ID NO: 59547 - DNA, 120 bp, Homo sapiens
  misc_feature: 1364 for SV(W|O) and mtDNA
tccccaccatcatagccaccatcaccctccttaacctctacttctacctacgcctaatctactccacctcaatcacactactccccatatctaacaacgtaaaaataaaatgacagtttg

SEQ ID NO: 59548 - DNA, 120 bp, Homo sapiens
  misc_feature: 1364 for SV(W|O) and mtDNA
cacagtcgcatcataatcctctctcaaggacttcaaactctactcccactaatagctttttgatgacttctagcaagcctcgctaacctcgccttaccccccactattaacctactggga

SEQ ID NO: 59549 - DNA, 120 bp, Homo sapiens
  misc_feature: 1364 for SV(W|O) and mtDNA
aaagtaactcttttatcagacatatttcttaggtttgagggggaatgctggagattgtaatgggtatggagacatatcatataagtaatgctagggtgagtggtaggaagttttttcata

SEQ ID NO: 59550 - DNA, 120 bp, Homo sapiens
  misc_feature: 1364 for SV(W|O) and mtDNA
ggggtagctaaagtgaactgtatccgacatctggttcctacttcagggtcataaagcctaaatagcccacacgttccccttaaataagacatcacgatggatcacaggtctatcacccta

SEQ ID NO: 59551 - DNA, 120 bp, Homo sapiens
  misc_feature: 1364 for SV(W|O) and mtDNA
cgagggctatgtggctgattgaagagtatgcaatgagcgattttaggtctgtttgtcgtaggcagatggagcttgttataattatgcctcatagggatagtacaaggaaggggtaggcta

SEQ ID NO: 59552 - DNA, 120 bp, Homo sapiens
  misc_feature: 1364 for SV(W|O) and mtDNA
tactactaacagaccgcaacctcaacaccaccttcttcgaccccgccggaggaggagaccccattctataccaacacctattctgatttttcggtcaccctgaagtttatattcttatcc

SEQ ID NO: 59553 - DNA, 120 bp, Homo sapiens
  misc_feature: 1364 for SV(W|O) and mtDNA
ctatactactaacagaccgcaacctcaacaccaccttcttcgaccccgccggaggaggagaccccattctataccaacacctattctgatttttcggtcaccctgaagtttatattctta

SEQ ID NO: 59554 - DNA, 120 bp, Homo sapiens
  misc_feature: 1364 for SV(W|O) and mtDNA
ctcaacttagtattatacccacacccacccaagaacagggtttgttaagatggcagagcccggtaatcgcataaaacttaaaactttacagtcagaggttcaattcctcttcttaacaac

SEQ ID NO: 59555 - DNA, 120 bp, Homo sapiens
  misc_feature: 1364 for SV(W|O) and mtDNA
ccccctttcacttctgagtcccagaggttacccaaggcacccctctgacatccggcctgcttcttctcacatgacaaaaactagcccccatctcaatcatataccaaatctctccctcac

SEQ ID NO: 59556 - DNA, 120 bp, Homo sapiens
  misc_feature: 1364 for SV(W|O) and mtDNA
gtactcgtaggttcagtaccattggtggccaattgatttgatggtaagggagggatcgttgacctcgtctgttatgtaaaggatgcgtagggatgggagggcgatgaggactaggatgat

SEQ ID NO: 59557 - DNA, 120 bp, Homo sapiens
  misc_feature: 1364 for SV(W|O) and mtDNA
ggcgtaggtagaagtagaggttaaggagggtgatggtggctatgatggtggggatgatgaggctattgttttttgtgaattcttcgataatggcccatttgggcaaaaagccggttagcg

SEQ ID NO: 59558 - DNA, 120 bp, Homo sapiens
  misc_feature: 1364 for SV(W|O) and mtDNA
ggcctcctatttattctagccacctctagcctagccgtttactcaatcctctgatcagggtgagcatcaaactcaaactacgccctgatcggcgcactgcgagcagtagcccaaacaatc

SEQ ID NO: 59559 - DNA, 120 bp, Homo sapiens
  misc_feature: 1364 for SV(W|O) and mtDNA
atgttcatacacctatcccccattctcctcctatccctcaaccccgacatcattaccgggttttcctcttgtaaatatagtttaaccaaaacatcagattgtgaatctgacaacagaggc

SEQ ID NO: 59560 - DNA, 120 bp, Homo sapiens
  misc_feature: 1364 for SV(W|O) and mtDNA
acctaaaatcgctcattgcatactcttcaatcagccacatagccctcgtagtaacagccattctcatccaaaccccctgaagcttcaccggcgcagtcattctcataatcgcccacgggc

SEQ ID NO: 59561 - DNA, 120 bp, Homo sapiens
  misc_feature: 1364 for SV(W|O) and mtDNA
gcacgaaattgaccaaccctggggttagtatagcttagttaaactttcgtttattgctaaaggttaatcactgctgtttcccgtgggggtgtggctaggctaagcgttttgagctgcatt

SEQ ID NO: 59562 - DNA, 120 bp, Homo sapiens
  misc_feature: 1364 for SV(W|O) and mtDNA
gaggaatagtgtaaggagtatgggggtaattatggtgggccatacggtagtatttagttggggcatttcactgtaaagaggtgttggttctcttaatctttaacttaaaaggttaatgct

SEQ ID NO: 59563 - DNA, 120 bp, Homo sapiens
  misc_feature: 1364 for SV(W|O) and mtDNA
gacgatgggcatgaaactgtggtttgctccacagatttcagagcattgaccgtagtatacccccggtcgtgtagcggtgaaagtggtttggtttagacgtccgggaattgcatctgtttt

SEQ ID NO: 59564 - DNA, 120 bp, Homo sapiens
  misc_feature: 1364 for SV(W|O) and mtDNA
ctaggaggaggcctagtagtggggtgaggcttggattagcgtttagaagggctatttgttgtgggtctcatgagttggagtgtaggataaatcatgctaaggcgaggatgaaaccgatat

SEQ ID NO: 59565 - DNA, 120 bp, Homo sapiens
  misc_feature: 1364 for SV(W|O) and mtDNA
ctaaaatcgctcattgcatactcttcaatcagccacatagccctcgtagtaacagccattctcatccaaaccccctgaagcttcaccggcgcagtcattctcataatcgcccacgggctt

SEQ ID NO: 59566 - DNA, 120 bp, Homo sapiens
  misc_feature: 1364 for SV(W|O) and mtDNA
catgagacccacaacaaatagcccttctaaacgctaatccaagcctcaccccactactaggcctcctcctagcagcagcaggcaaatcagcccaattaggtctccacccctgactcccct

SEQ ID NO: 59567 - DNA, 120 bp, Homo sapiens
  misc_feature: 1364 for SV(W|O) and mtDNA
caaagtaactcttttatcagacatatttcttaggtttgagggggaatgctggagattgtaatgggtatggagacatatcatataagtaatgctagggtgagtggtaggaagttttttcat

SEQ ID NO: 59568 - DNA, 120 bp, Homo sapiens
  misc_feature: 1364 for SV(W|O) and mtDNA
agacgctggagccggagcaccctatgtcgcagtatctgtctttgattcctgcctcatcccattatttatcgcacctacgttcaatattacaggcgaacatacttactaaagtgtgttaat

SEQ ID NO: 59569 - DNA, 120 bp, Homo sapiens
  misc_feature: 1364 for SV(W|O) and mtDNA
aggggcgtttggtattgggttatggcagggggttttatattgataattgttgtgatgaaattgatggcccctaagatagaggagacacctgctaggtgtaaggagaagatggttaggtct

SEQ ID NO: 59570 - DNA, 120 bp, Homo sapiens
  misc_feature: 1363 for SV(W|O) and mtDNA
tgtgaagtaggccttatttctcttgtcctttcgtacagggaggaatttgaagtagatagaaaccgacctggattactccggtctgaactcagatcacgtaggactttaatcgttgaacaa

SEQ ID NO: 59571 - DNA, 120 bp, Homo sapiens
  misc_feature: 1363 for SV(W|O) and mtDNA
ttcttcttagtagctattaccttcttattatttgatctagaaattgccctccttttacccctaccatgagccctacaaacaactaacctgccactaatagttatgtcatccctcttatta

SEQ ID NO: 59572 - DNA, 120 bp, Homo sapiens
  misc_feature: 1363 for SV(W|O) and mtDNA
ttcataggctatgtcctcccgtgaggccaaatatcattctgaggggccacagtaattacaaacttactatccgccatcccatacattgggacagacctagttcaatgaatctgaggaggc

SEQ ID NO: 59573 - DNA, 120 bp, Homo sapiens
  misc_feature: 1363 for SV(W|O) and mtDNA
aagttttaagttttatgcgattaccgggctctgccatcttaacaaaccctgttcttgggtgggtgtgggtataatactaagttgagatgatatcatttacgggggaaggcgctttgtgaa

SEQ ID NO: 59574 - DNA, 120 bp, Homo sapiens
  misc_feature: 1363 for SV(W|O) and mtDNA
tggctggcacgaaattgaccaaccctggggttagtatagcttagttaaactttcgtttattgctaaaggttaatcactgctgtttcccgtgggggtgtggctaggctaagcgttttgagc

SEQ ID NO: 59575 - DNA, 120 bp, Homo sapiens
  misc_feature: 1363 for SV(W|O) and mtDNA
tgctgctaggaggaggcctagtagtggggtgaggcttggattagcgtttagaagggctatttgttgtgggtctcatgagttggagtgtaggataaatcatgctaaggcgaggatgaaacc

SEQ ID NO: 59576 - DNA, 120 bp, Homo sapiens
  misc_feature: 1363 for SV(W|O) and mtDNA
tgctaggaggaggcctagtagtggggtgaggcttggattagcgtttagaagggctatttgttgtgggtctcatgagttggagtgtaggataaatcatgctaaggcgaggatgaaaccgat

SEQ ID NO: 59577 - DNA, 120 bp, Homo sapiens
  misc_feature: 1363 for SV(W|O) and mtDNA
tctcccagtaggttaatagtggggggtaaggcgaggttagcgaggcttgctagaagtcatcaaaaagctattagtgggagtagagtttgaagtccttgagagaggattatgatgcgactg

SEQ ID NO: 59578 - DNA, 120 bp, Homo sapiens
  misc_feature: 1363 for SV(W|O) and mtDNA
taagattattagtataaaaggggagataggtaggagtagcgtggtaagggcgatgagtgtggggaggaatggggtgggttttgtatgttcaaactgtcattttatttttacgttgttaga

SEQ ID NO: 59579 - DNA, 120 bp, Homo sapiens
  misc_feature: 1363 for SV(W|O) and mtDNA
atcttaacaaaccctgttcttgggtgggtgtgggtataatactaagttgagatgatatcatttacgggggaaggcgctttgtgaagtaggccttatttctcttgtcctttcgtacaggga

SEQ ID NO: 59580 - DNA, 120 bp, Homo sapiens
  misc_feature: 1363 for SV(W|O) and mtDNA
tcccctaataatcggtgcccccgatatggcgtttccccgcataaacaacataagcttctgactcttacctccctctctcctactcctgctcgcatctgctatagtggaggccggagcagg

SEQ ID NO: 59581 - DNA, 120 bp, Homo sapiens
  misc_feature: 1363 for SV(W|O) and mtDNA
aaagttttaagttttatgcgattaccgggctctgccatcttaacaaaccctgttcttgggtgggtgtgggtataatactaagttgagatgatatcatttacgggggaaggcgctttgtga

SEQ ID NO: 59582 - DNA, 120 bp, Homo sapiens
  misc_feature: 1363 for SV(W|O) and mtDNA
gctaggaggaggcctagtagtggggtgaggcttggattagcgtttagaagggctatttgttgtgggtctcatgagttggagtgtaggataaatcatgctaaggcgaggatgaaaccgata

SEQ ID NO: 59583 - DNA, 120 bp, Homo sapiens
  misc_feature: 1363 for SV(W|O) and mtDNA
ccctttcacttctgagtcccagaggttacccaaggcacccctctgacatccggcctgcttcttctcacatgacaaaaactagcccccatctcaatcatataccaaatctctccctcacta

SEQ ID NO: 59584 - DNA, 120 bp, Homo sapiens
  misc_feature: 1363 for SV(W|O) and mtDNA
tagggtagggttattttcgttaatgttagtaagggtggggaagcgaggttgacctgttagggtgagaagaattattcgagtgctataggcgcttgtcagggaggtagcgatgagagtaat

SEQ ID NO: 59585 - DNA, 120 bp, Homo sapiens
  misc_feature: 1363 for SV(W|O) and mtDNA
gcaaactcaaactacgaacgcactcacagtcgcatcataatcctctctcaaggacttcaaactctactcccactaatagctttttgatgacttctagcaagcctcgctaacctcgcctta

SEQ ID NO: 59586 - DNA, 120 bp, Homo sapiens
  misc_feature: 1363 for SV(W|O) and mtDNA
gttcaagctcaacacccactacctaaaaaatcccaaacatataactgaactcctcatacccaattggaccaatctatcaccctatagaagaactaatgttagtataagtaacatgaaaac

SEQ ID NO: 59587 - DNA, 120 bp, Homo sapiens
  misc_feature: 1363 for SV(W|O) and mtDNA
gttataattatgcctcatagggatagtacaaggaaggggtaggctatgtgttttgtcagggggttgagaatgagtgtgaggcgtattataccatagccgcctagttttaagagtactgcg

SEQ ID NO: 59588 - DNA, 120 bp, Homo sapiens
  misc_feature: 1363 for SV(W|O) and mtDNA
ctctcagtttactgctaaatccaccttcgacccttaagtttcataagggctatcgtagttttctggggtagaaaatgtagcccatttcttgccacctcatgggctacaccttgacctaac

SEQ ID NO: 59589 - DNA, 120 bp, Homo sapiens
  misc_feature: 1363 for SV(W|O) and mtDNA
aaatcaattggccaccaatggtactgaacctacgagtacaccgactacggcggactaatcttcaactcctacatacttcccccattattcctagaaccaggcgacctgcgactccttgac

SEQ ID NO: 59590 - DNA, 120 bp, Homo sapiens
  misc_feature: 1363 for SV(W|O) and mtDNA
ggacgatgggcatgaaactgtggtttgctccacagatttcagagcattgaccgtagtatacccccggtcgtgtagcggtgaaagtggtttggtttagacgtccgggaattgcatctgttt

SEQ ID NO: 59591 - DNA, 120 bp, Homo sapiens
  misc_feature: 1363 for SV(W|O) and mtDNA
cgggggtatactacggtcaatgctctgaaatctgtggagcaaaccacagtttcatgcccatcgtcctagaattaattcccctaaaaatctttgaaatagggcccgtatttaccctatagc

SEQ ID NO: 59592 - DNA, 120 bp, Homo sapiens
  misc_feature: 1363 for SV(W|O) and mtDNA
agatttgccgagttccttttactttttttaacctttccttatgagcatgcctgtgttgggttgacagtgagggtaataatgacttgttggttgattgtagatattgggctgttaattgtc

SEQ ID NO: 59593 - DNA, 120 bp, Homo sapiens
  misc_feature: 1363 for SV(W|O) and mtDNA
gaagagttttatggcgtcagcgaagggttgtagtagcccgtaggggcctacaacgttggggcctttgcgtagttgtatatagcctagaatttttcgttcggtaagcattaggaatgccat

SEQ ID NO: 59594 - DNA, 120 bp, Homo sapiens
  misc_feature: 1363 for SV(W|O) and mtDNA
ataagattattagtataaaaggggagataggtaggagtagcgtggtaagggcgatgagtgtggggaggaatggggtgggttttgtatgttcaaactgtcattttatttttacgttgttag

SEQ ID NO: 59595 - DNA, 120 bp, Homo sapiens
  misc_feature: 1363 for SV(W|O) and mtDNA
aggacgatgggcatgaaactgtggtttgctccacagatttcagagcattgaccgtagtatacccccggtcgtgtagcggtgaaagtggtttggtttagacgtccgggaattgcatctgtt

SEQ ID NO: 59596 - DNA, 120 bp, Homo sapiens
  misc_feature: 1363 for SV(W|O) and mtDNA
acaccaacaaacaatgttcaaccagtaactactactaatcaacgcccataatcatacaaagcccccgcaccaataggatcctcccgaatcaaccctgacccctctccttcataaattatt

SEQ ID NO: 59597 - DNA, 120 bp, Homo sapiens
  misc_feature: 1362 for SV(W|O) and mtDNA
tttcttcttcccactcatcctaaccctactcctaatcacataacctattcccccgagcaatctcaattacaatatatacaccaacaaacaatgttcaaccagtaactactactaatcaac

SEQ ID NO: 59598 - DNA, 120 bp, Homo sapiens
  misc_feature: 1362 for SV(W|O) and mtDNA
ttgcggtttcgatgatgtggtctttggagtagaaacctgtgaggaaaggtattcctgctaatgctaggctgccaatggtgagggaggttgaagtgagaggtatggttttgagtagtcctc

SEQ ID NO: 59599 - DNA, 120 bp, Homo sapiens
  misc_feature: 1362 for SV(W|O) and mtDNA
tggtttagacgtccgggaattgcatctgtttttaagcctaatgtggggacagctcatgagtgcaagacgtcttgtgatgtaattattatacgaatgggggcttcaatcgggagtactact

SEQ ID NO: 59600 - DNA, 120 bp, Homo sapiens
  misc_feature: 1362 for SV(W|O) and mtDNA
tggcagcttctgtggaacgagggtttatttttttggttagaactggaataaaagctagcatgtttatttctaggcctactcaggtaaaaaatcagtgcgagcttagcgctgtgatgagtg

SEQ ID NO: 59601 - DNA, 120 bp, Homo sapiens
  misc_feature: 1362 for SV(W|O) and mtDNA
ctgtgctagtaaccacgttctcctgatcaaatatcactctcctacttacaggactcaacatactagtcacagccctatactccctctacatatttaccacaacacaatggggctcactca

SEQ ID NO: 59602 - DNA, 120 bp, Homo sapiens
  misc_feature: 1362 for SV(W|O) and mtDNA
tctgttcgcttcattcattgcccccacaatcctaggcctacccgccgcagtactgatcattctatttccccctctattgatccccacctccaaatatctcatcaacaaccgactaatcac

SEQ ID NO: 59603 - DNA, 120 bp, Homo sapiens
  misc_feature: 1362 for SV(W|O) and mtDNA
tcgctcattgcatactcttcaatcagccacatagccctcgtagtaacagccattctcatccaaaccccctgaagcttcaccggcgcagtcattctcataatcgcccacgggcttacatcc

SEQ ID NO: 59604 - DNA, 120 bp, Homo sapiens
  misc_feature: 1362 for SV(W|O) and mtDNA
gttctaggaataatgggggaagtatgtaggagttgaagattagtccgccgtagtcggtgtactcgtaggttcagtaccattggtggccaattgatttgatggtaagggagggatcgttga

SEQ ID NO: 59605 - DNA, 120 bp, Homo sapiens
  misc_feature: 1362 for SV(W|O) and mtDNA
tatactaatctccctacaaatctccttaattataacattcacagccacagaactaatcatattttatatcttcttcgaaaccacacttatccccaccttggctatcatcacccgatgagg

SEQ ID NO: 59606 - DNA, 120 bp, Homo sapiens
  misc_feature: 1362 for SV(W|O) and mtDNA
tagtccgccgtagtcggtgtactcgtaggttcagtaccattggtggccaattgatttgatggtaagggagggatcgttgacctcgtctgttatgtaaaggatgcgtagggatgggagggc

SEQ ID NO: 59607 - DNA, 120 bp, Homo sapiens
  misc_feature: 1362 for SV(W|O) and mtDNA
catatagtaaaacccagcccatgacccctaacaggggccctctcagccctcctaatgacctccggcctagccatgtgatttcacttccactccataacgctcctcatactaggcctacta

SEQ ID NO: 59608 - DNA, 120 bp, Homo sapiens
  misc_feature: 1362 for SV(W|O) and mtDNA
taatactaagttgagatgatatcatttacgggggaaggcgctttgtgaagtaggccttatttctcttgtcctttcgtacagggaggaatttgaagtagatagaaaccgacctggattact

SEQ ID NO: 59609 - DNA, 120 bp, Homo sapiens
  misc_feature: 1362 for SV(W|O) and mtDNA
gtttgctccacagatttcagagcattgaccgtagtatacccccggtcgtgtagcggtgaaagtggtttggtttagacgtccgggaattgcatctgtttttaagcctaatgtggggacagc

SEQ ID NO: 59610 - DNA, 120 bp, Homo sapiens
  misc_feature: 1362 for SV(W|O) and mtDNA
acctagccatggccatccccttatgagcgggcgcagtgattataggctttcgctctaagattaaaaatgccctagcccacttcttaccacaaggcacacctacaccccttatccccatac

SEQ ID NO: 59611 - DNA, 120 bp, Homo sapiens
  misc_feature: 1362 for SV(W|O) and mtDNA
ggtgtctcctctatcttaggggccatcaatttcatcacaacaattatcaatataaaaccccctgccataacccaataccaaacgcccctcttcgtctgatccgtcctaatcacagcagtc

SEQ ID NO: 59612 - DNA, 120 bp, Homo sapiens
  misc_feature: 1362 for SV(W|O) and mtDNA
atcaacattactaataagtggctcctttaacctctccacccttatcacaacacaagaacacctctgattactcctgccatcatgacccttggccataatatgatttatctccacactagc

SEQ ID NO: 59613 - DNA, 120 bp, Homo sapiens
  misc_feature: 1362 for SV(W|O) and mtDNA
gattaaagtcctacgtgatctgagttcagaccggagtaatccaggtcggtttctatctacttcaaattcctccctgtacgaaaggacaagagaaataaggcctacttcacaaagcgcctt

SEQ ID NO: 59614 - DNA, 120 bp, Homo sapiens
  misc_feature: 1362 for SV(W|O) and mtDNA
atcggcgatatcggtttcatcctcgccttagcatgatttatcctacactccaactcatgagacccacaacaaatagcccttctaaacgctaatccaagcctcaccccactactaggcctc

SEQ ID NO: 59615 - DNA, 120 bp, Homo sapiens
  misc_feature: 1362 for SV(W|O) and mtDNA
gaagggttgtagtagcccgtaggggcctacaacgttggggcctttgcgtagttgtatatagcctagaatttttcgttcggtaagcattaggaatgccattgcgattagaatgggtacaat

SEQ ID NO: 59616 - DNA, 120 bp, Homo sapiens
  misc_feature: 1362 for SV(W|O) and mtDNA
atacccaattggaccaatctatcaccctatagaagaactaatgttagtataagtaacatgaaaacattctcctccgcataagcctgcgtcagattaaaacactgaactgacaattaacag

SEQ ID NO: 59617 - DNA, 120 bp, Homo sapiens
  misc_feature: 1362 for SV(W|O) and mtDNA
ccaacaaacaatgttcaaccagtaactactactaatcaacgcccataatcatacaaagcccccgcaccaataggatcctcccgaatcaaccctgacccctctccttcataaattattcag

SEQ ID NO: 59618 - DNA, 120 bp, Homo sapiens
  misc_feature: 1362 for SV(W|O) and mtDNA
cgtcttgtagacctacttgcgctgcatgtgccattaagatatataggatttagcctataatttaactttgacaaagttatgaaatggtttttctaatacctttttgaaaaagtcatggag

SEQ ID NO: 59619 - DNA, 120 bp, Homo sapiens
  misc_feature: 1362 for SV(W|O) and mtDNA
catgttcatacacctatcccccattctcctcctatccctcaaccccgacatcattaccgggttttcctcttgtaaatatagtttaaccaaaacatcagattgtgaatctgacaacagagg

SEQ ID NO: 59620 - DNA, 120 bp, Homo sapiens
  misc_feature: 1362 for SV(W|O) and mtDNA
aactgtatccgacatctggttcctacttcagggtcataaagcctaaatagcccacacgttccccttaaataagacatcacgatggatcacaggtctatcaccctattaaccactcacggg

SEQ ID NO: 59621 - DNA, 120 bp, Homo sapiens
  misc_feature: 1362 for SV(W|O) and mtDNA
cccctttcacttctgagtcccagaggttacccaaggcacccctctgacatccggcctgcttcttctcacatgacaaaaactagcccccatctcaatcatataccaaatctctccctcact

SEQ ID NO: 59622 - DNA, 120 bp, Homo sapiens
  misc_feature: 1362 for SV(W|O) and mtDNA
cagtttactgctaaatccaccttcgacccttaagtttcataagggctatcgtagttttctggggtagaaaatgtagcccatttcttgccacctcatgggctacaccttgacctaacgtct

SEQ ID NO: 59623 - DNA, 120 bp, Homo sapiens
  misc_feature: 1362 for SV(W|O) and mtDNA
actgctgcgaacagagtggtgatagcgcctaagcatagtgttagagtttggattagtgggctattttctgctagggggtggaagcggatgagtaagaagattcctgctacaactatagtg

SEQ ID NO: 59624 - DNA, 120 bp, Homo sapiens
  misc_feature: 1362 for SV(W|O) and mtDNA
agaggaattgaacctctgactgtaaagttttaagttttatgcgattaccgggctctgccatcttaacaaaccctgttcttgggtgggtgtgggtataatactaagttgagatgatatcat

SEQ ID NO: 59625 - DNA, 120 bp, Homo sapiens
  misc_feature: 1362 for SV(W|O) and mtDNA
atccaccccttacgagtgcggcttcgaccctatatcccccgcccgcgtccctttctccataaaattcttcttagtagctattaccttcttattatttgatctagaaattgccctcctttt

SEQ ID NO: 59626 - DNA, 120 bp, Homo sapiens
  misc_feature: 1362 for SV(W|O) and mtDNA
agttttgttgtgagtgttaggaaaagggcatacaggactaggaagcagataaggaaaatgattatgagggcgtgatcatgaaaggtgataagctcttctatgataggggaagtagcgtct

SEQ ID NO: 59627 - DNA, 120 bp, Homo sapiens
  misc_feature: 1362 for SV(W|O) and mtDNA
agggtgacttcatatgagattgtttgggctactgctcgcagtgcgccgatcagggcgtagtttgagtttgatgctcaccctgatcagaggattgagtaaacggctaggctagaggtggct

SEQ ID NO: 59628 - DNA, 120 bp, Homo sapiens
  misc_feature: 1361 for SV(W|O) and mtDNA
caggaaatagaaaccgtctgaactatcctgcccgccatcatcctagtcctcatcgccctcccatccctacgcatcctttacataacagacgaggtcaacgatccctcccttaccatcaaa

SEQ ID NO: 59629 - DNA, 120 bp, Homo sapiens
  misc_feature: 1361 for SV(W|O) and mtDNA
ttctaatcgcaatggcattcctaatgcttaccgaacgaaaaattctaggctatatacaactacgcaaaggccccaacgttgtaggcccctacgggctactacaacccttcgctgacgcca

SEQ ID NO: 59630 - DNA, 120 bp, Homo sapiens
  misc_feature: 1361 for SV(W|O) and mtDNA
ttcgagtgctataggcgcttgtcagggaggtagcgatgagagtaatagatagggctcaggcgtttgtgtatgatatgtttgcggtttcgatgatgtggtctttggagtagaaacctgtga

SEQ ID NO: 59631 - DNA, 120 bp, Homo sapiens
  misc_feature: 1361 for SV(W|O) and mtDNA
ctagcaggtgtctcctctatcttaggggccatcaatttcatcacaacaattatcaatataaaaccccctgccataacccaataccaaacgcccctcttcgtctgatccgtcctaatcaca

SEQ ID NO: 59632 - DNA, 120 bp, Homo sapiens
  misc_feature: 1361 for SV(W|O) and mtDNA
agggcgcagactgctgcgaacagagtggtgatagcgcctaagcatagtgttagagtttggattagtgggctattttctgctagggggtggaagcggatgagtaagaagattcctgctaca

SEQ ID NO: 59633 - DNA, 120 bp, Homo sapiens
  misc_feature: 1361 for SV(W|O) and mtDNA
tggtgaagagttttatggcgtcagcgaagggttgtagtagcccgtaggggcctacaacgttggggcctttgcgtagttgtatatagcctagaatttttcgttcggtaagcattaggaatg

SEQ ID NO: 59634 - DNA, 120 bp, Homo sapiens
  misc_feature: 1361 for SV(W|O) and mtDNA
ctcctatttattctagccacctctagcctagccgtttactcaatcctctgatcagggtgagcatcaaactcaaactacgccctgatcggcgcactgcgagcagtagcccaaacaatctca

SEQ ID NO: 59635 - DNA, 120 bp, Homo sapiens
  misc_feature: 1361 for SV(W|O) and mtDNA
tgaacctacgagtacaccgactacggcggactaatcttcaactcctacatacttcccccattattcctagaaccaggcgacctgcgactccttgacgttgacaatcgagtagtactcccg

SEQ ID NO: 59636 - DNA, 120 bp, Homo sapiens
  misc_feature: 1361 for SV(W|O) and mtDNA
tctatactaatctccctacaaatctccttaattataacattcacagccacagaactaatcatattttatatcttcttcgaaaccacacttatccccaccttggctatcatcacccgatga

SEQ ID NO: 59637 - DNA, 120 bp, Homo sapiens
  misc_feature: 1361 for SV(W|O) and mtDNA
tcaattggccaccaatggtactgaacctacgagtacaccgactacggcggactaatcttcaactcctacatacttcccccattattcctagaaccaggcgacctgcgactccttgacgtt

SEQ ID NO: 59638 - DNA, 120 bp, Homo sapiens
  misc_feature: 1361 for SV(W|O) and mtDNA
tattagttagttttgttgtgagtgttaggaaaagggcatacaggactaggaagcagataaggaaaatgattatgagggcgtgatcatgaaaggtgataagctcttctatgataggggaag

SEQ ID NO: 59639 - DNA, 120 bp, Homo sapiens
  misc_feature: 1361 for SV(W|O) and mtDNA
ctaatcgcaatggcattcctaatgcttaccgaacgaaaaattctaggctatatacaactacgcaaaggccccaacgttgtaggcccctacgggctactacaacccttcgctgacgccata

SEQ ID NO: 59640 - DNA, 120 bp, Homo sapiens
  misc_feature: 1361 for SV(W|O) and mtDNA
cctctctttcttcttcccactcatcctaaccctactcctaatcacataacctattcccccgagcaatctcaattacaatatatacaccaacaaacaatgttcaaccagtaactactacta

SEQ ID NO: 59641 - DNA, 120 bp, Homo sapiens
  misc_feature: 1361 for SV(W|O) and mtDNA
tagctattgtgtgttcagatatgttaaagccactttcgtagtctattttgtgtcaactggagttttttacaactcaggtgagttttagctttattggggagggggtgatctaaaacactc

SEQ ID NO: 59642 - DNA, 120 bp, Homo sapiens
  misc_feature: 1361 for SV(W|O) and mtDNA
taagggcgcagactgctgcgaacagagtggtgatagcgcctaagcatagtgttagagtttggattagtgggctattttctgctagggggtggaagcggatgagtaagaagattcctgcta

SEQ ID NO: 59643 - DNA, 120 bp, Homo sapiens
  misc_feature: 1361 for SV(W|O) and mtDNA
tagaaacctgtgaggaaaggtattcctgctaatgctaggctgccaatggtgagggaggttgaagtgagaggtatggttttgagtagtcctcctatttttcgaatatcttgttcattgtta

SEQ ID NO: 59644 - DNA, 120 bp, Homo sapiens
  misc_feature: 1361 for SV(W|O) and mtDNA
gcaattcccggacgtctaaaccaaaccactttcaccgctacacgaccgggggtatactacggtcaatgctctgaaatctgtggagcaaaccacagtttcatgcccatcgtcctagaatta

SEQ ID NO: 59645 - DNA, 120 bp, Homo sapiens
  misc_feature: 1361 for SV(W|O) and mtDNA
actgaacctacgagtacaccgactacggcggactaatcttcaactcctacatacttcccccattattcctagaaccaggcgacctgcgactccttgacgttgacaatcgagtagtactcc

SEQ ID NO: 59646 - DNA, 120 bp, Homo sapiens
  misc_feature: 1361 for SV(W|O) and mtDNA
acatacttcccccattattcctagaaccaggcgacctgcgactccttgacgttgacaatcgagtagtactcccgattgaagcccccattcgtataataattacatcacaagacgtcttgc

SEQ ID NO: 59647 - DNA, 120 bp, Homo sapiens
  misc_feature: 1361 for SV(W|O) and mtDNA
aatcttcaactcctacatacttcccccattattcctagaaccaggcgacctgcgactccttgacgttgacaatcgagtagtactcccgattgaagcccccattcgtataataattacatc

SEQ ID NO: 59648 - DNA, 120 bp, Homo sapiens
  misc_feature: 1361 for SV(W|O) and mtDNA
ctaggacgatgggcatgaaactgtggtttgctccacagatttcagagcattgaccgtagtatacccccggtcgtgtagcggtgaaagtggtttggtttagacgtccgggaattgcatctg

SEQ ID NO: 59649 - DNA, 120 bp, Homo sapiens
  misc_feature: 1361 for SV(W|O) and mtDNA
ccgtagtcggtgtactcgtaggttcagtaccattggtggccaattgatttgatggtaagggagggatcgttgacctcgtctgttatgtaaaggatgcgtagggatgggagggcgatgagg

SEQ ID NO: 59650 - DNA, 120 bp, Homo sapiens
  misc_feature: 1361 for SV(W|O) and mtDNA
acactactataaccaccctaaccctgacttccctaattccccccatccttaccaccctcgttaaccctaacaaaaaaaactcatacccccattatgtaaaatccattgtcgcatccacct

SEQ ID NO: 59651 - DNA, 120 bp, Homo sapiens
  misc_feature: 1360 for SV(W|O) and mtDNA
acctatctccccttttatactaataatcttatagaaatttaggttaaatacagaccaagagccttcaaagccctcagtaagttgcaatacttaatttctgtaacagctaaggactgcaaa

SEQ ID NO: 59652 - DNA, 120 bp, Homo sapiens
  misc_feature: 1360 for SV(W|O) and mtDNA
ttaaaactttacagtcagaggttcaattcctcttcttaacaacatacccatggccaacctcctactcctcattgtacccattctaatcgcaatggcattcctaatgcttaccgaacgaaa

SEQ ID NO: 59653 - DNA, 120 bp, Homo sapiens
  misc_feature: 1360 for SV(W|O) and mtDNA
ttcctaggaacaacatatgacgcactctcccctgaactctacacaacatattttgtcaccaagaccctacttctaacctccctgttcttatgaattcgaacagcatacccccgattccgc

SEQ ID NO: 59654 - DNA, 120 bp, Homo sapiens
  misc_feature: 1360 for SV(W|O) and mtDNA
ttaaagccactttcgtagtctattttgtgtcaactggagttttttacaactcaggtgagttttagctttattggggagggggtgatctaaaacactctttacgccggcttctattgactt

SEQ ID NO: 59655 - DNA, 120 bp, Homo sapiens
  misc_feature: 1360 for SV(W|O) and mtDNA
aacctactgggagaactctctgtgctagtaaccacgttctcctgatcaaatatcactctcctacttacaggactcaacatactagtcacagccctatactccctctacatatttaccaca

SEQ ID NO: 59656 - DNA, 120 bp, Homo sapiens
  misc_feature: 1360 for SV(W|O) and mtDNA
tggctcaggagtttgatagttcttgggcagtgagagtgagtagtagaatgtttagtgagcctagggtgttgtgagtgtaaattagtgcgatgagtaggggaagggagcctactagggtgt

SEQ ID NO: 59657 - DNA, 120 bp, Homo sapiens
  misc_feature: 1360 for SV(W|O) and mtDNA
ggtagaagtagaggttaaggagggtgatggtggctatgatggtggggatgatgaggctattgttttttgtgaattcttcgataatggcccatttgggcaaaaagccggttagcgggggca

SEQ ID NO: 59658 - DNA, 120 bp, Homo sapiens
  misc_feature: 1360 for SV(W|O) and mtDNA
tctttcttcttcccactcatcctaaccctactcctaatcacataacctattcccccgagcaatctcaattacaatatatacaccaacaaacaatgttcaaccagtaactactactaatca

SEQ ID NO: 59659 - DNA, 120 bp, Homo sapiens
  misc_feature: 1360 for SV(W|O) and mtDNA
ctattcctagttttattgctatagccattatgattattaatgatgagtactgattggtagtattggttatggttcattgtccggagagtatattgttgaagaggatagctattagaagga

SEQ ID NO: 59660 - DNA, 120 bp, Homo sapiens
  misc_feature: 1360 for SV(W|O) and mtDNA
tcagtttactgctaaatccaccttcgacccttaagtttcataagggctatcgtagttttctggggtagaaaatgtagcccatttcttgccacctcatgggctacaccttgacctaacgtc

SEQ ID NO: 59661 - DNA, 120 bp, Homo sapiens
  misc_feature: 1360 for SV(W|O) and mtDNA
tactctcagtttactgctaaatccaccttcgacccttaagtttcataagggctatcgtagttttctggggtagaaaatgtagcccatttcttgccacctcatgggctacaccttgaccta

SEQ ID NO: 59662 - DNA, 120 bp, Homo sapiens
  misc_feature: 1360 for SV(W|O) and mtDNA
taaaattaattaaccactcattcatcgacctccccaccccatccaacatctccacatgatgaaacttcggctcactccttggcgcctgcctgattctccaaatcaccacaggactattcc

SEQ ID NO: 59663 - DNA, 120 bp, Homo sapiens
  misc_feature: 1360 for SV(W|O) and mtDNA
gtgtaagggcgcagactgctgcgaacagagtggtgatagcgcctaagcatagtgttagagtttggattagtgggctattttctgctagggggtggaagcggatgagtaagaagattcctg

SEQ ID NO: 59664 - DNA, 120 bp, Homo sapiens
  misc_feature: 1360 for SV(W|O) and mtDNA
gctaaagtgaactgtatccgacatctggttcctacttcagggtcataaagcctaaatagcccacacgttccccttaaataagacatcacgatggatcacaggtctatcaccctattaacc

SEQ ID NO: 59665 - DNA, 120 bp, Homo sapiens
  misc_feature: 1360 for SV(W|O) and mtDNA
ctgttcgcttcattcattgcccccacaatcctaggcctacccgccgcagtactgatcattctatttccccctctattgatccccacctccaaatatctcatcaacaaccgactaatcacc

SEQ ID NO: 59666 - DNA, 120 bp, Homo sapiens
  misc_feature: 1360 for SV(W|O) and mtDNA
ctgaacctacgagtacaccgactacggcggactaatcttcaactcctacatacttcccccattattcctagaaccaggcgacctgcgactccttgacgttgacaatcgagtagtactccc

SEQ ID NO: 59667 - DNA, 120 bp, Homo sapiens
  misc_feature: 1360 for SV(W|O) and mtDNA
ggcacgaaattgaccaaccctggggttagtatagcttagttaaactttcgtttattgctaaaggttaatcactgctgtttcccgtgggggtgtggctaggctaagcgttttgagctgcat

SEQ ID NO: 59668 - DNA, 120 bp, Homo sapiens
  misc_feature: 1360 for SV(W|O) and mtDNA
ggaagggtataaccaacattttcggggtatgggcccgatagcttatttagctgaccttactttaggatggggtgtgataggtggcacggagaattttggattctcagggatgggttcgat

SEQ ID NO: 59669 - DNA, 120 bp, Homo sapiens
  misc_feature: 1360 for SV(W|O) and mtDNA
ctatgaaaaaacttcctaccactcaccctagcattacttatatgatatgtctccatacccattacaatctccagcattccccctcaaacctaagaaatatgtctgataaaagagttactt

SEQ ID NO: 59670 - DNA, 120 bp, Homo sapiens
  misc_feature: 1360 for SV(W|O) and mtDNA
ccacctctagcctagccgtttactcaatcctctgatcagggtgagcatcaaactcaaactacgccctgatcggcgcactgcgagcagtagcccaaacaatctcatatgaagtcaccctag

SEQ ID NO: 59671 - DNA, 120 bp, Homo sapiens
  misc_feature: 1360 for SV(W|O) and mtDNA
cggtggctggcacgaaattgaccaaccctggggttagtatagcttagttaaactttcgtttattgctaaaggttaatcactgctgtttcccgtgggggtgtggctaggctaagcgttttg

SEQ ID NO: 59672 - DNA, 120 bp, Homo sapiens
  misc_feature: 1360 for SV(W|O) and mtDNA
cgagctgggccagccaggcaaccttctaggtaacgaccacatctacaacgttatcgtcacagcccatgcatttgtaataatcttcttcatagtaatacccatcataatcggaggctttgg

SEQ ID NO: 59673 - DNA, 120 bp, Homo sapiens
  misc_feature: 1360 for SV(W|O) and mtDNA
cctgttcttgggtgggtgtgggtataatactaagttgagatgatatcatttacgggggaaggcgctttgtgaagtaggccttatttctcttgtcctttcgtacagggaggaatttgaagt

SEQ ID NO: 59674 - DNA, 120 bp, Homo sapiens
  misc_feature: 1360 for SV(W|O) and mtDNA
aggaaaggtattcctgctaatgctaggctgccaatggtgagggaggttgaagtgagaggtatggttttgagtagtcctcctatttttcgaatatcttgttcattgttaaggttgtggatg

SEQ ID NO: 59675 - DNA, 120 bp, Homo sapiens
  misc_feature: 1360 for SV(W|O) and mtDNA
aaatgagtgaggcaggagtccgaggaggttagttgtggcaataaaaatgattaaggatactagtataagagatcaggttcgtcctttagtgttgtgtatggttatcatttgttttgaggt

SEQ ID NO: 59676 - DNA, 120 bp, Homo sapiens
  misc_feature: 1360 for SV(W|O) and mtDNA
aagagttttatggcgtcagcgaagggttgtagtagcccgtaggggcctacaacgttggggcctttgcgtagttgtatatagcctagaatttttcgttcggtaagcattaggaatgccatt

SEQ ID NO: 59677 - DNA, 120 bp, Homo sapiens
  misc_feature: 1359 for SV(W|O) and mtDNA
ttggtgcaactccaaataaaagtaataaccatgcacactactataaccaccctaaccctgacttccctaattccccccatccttaccaccctcgttaaccctaacaaaaaaaactcatac

SEQ ID NO: 59678 - DNA, 120 bp, Homo sapiens
  misc_feature: 1359 for SV(W|O) and mtDNA
ttgaggttagtttgattagtcattgttgggtggtgattagtcggttgttgatgagatatttggaggtggggatcaatagagggggaaatagaatgatcagtactgcggcgggtaggccta

SEQ ID NO: 59679 - DNA, 120 bp, Homo sapiens
  misc_feature: 1359 for SV(W|O) and mtDNA
catacccaattggaccaatctatcaccctatagaagaactaatgttagtataagtaacatgaaaacattctcctccgcataagcctgcgtcagattaaaacactgaactgacaattaaca

SEQ ID NO: 59680 - DNA, 120 bp, Homo sapiens
  misc_feature: 1359 for SV(W|O) and mtDNA
agcatgatttatcctacactccaactcatgagacccacaacaaatagcccttctaaacgctaatccaagcctcaccccactactaggcctcctcctagcagcagcaggcaaatcagccca

SEQ ID NO: 59681 - DNA, 120 bp, Homo sapiens
  misc_feature: 1359 for SV(W|O) and mtDNA
tgcggtttcgatgatgtggtctttggagtagaaacctgtgaggaaaggtattcctgctaatgctaggctgccaatggtgagggaggttgaagtgagaggtatggttttgagtagtcctcc

SEQ ID NO: 59682 - DNA, 120 bp, Homo sapiens
  misc_feature: 1359 for SV(W|O) and mtDNA
tcttcatagccgaatacacaaacattattataataaacaccctcaccactacaatcttcctaggaacaacatatgacgcactctcccctgaactctacacaacatattttgtcaccaaga

SEQ ID NO: 59683 - DNA, 120 bp, Homo sapiens
  misc_feature: 1359 for SV(W|O) and mtDNA
tcgtctgttatgtaaaggatgcgtagggatgggagggcgatgaggactaggatgatggcgggcaggatagttcagacggtttctatttcctgagcgtctgagatgttagtattagttagt

SEQ ID NO: 59684 - DNA, 120 bp, Homo sapiens
  misc_feature: 1359 for SV(W|O) and mtDNA
ccatgtcgaagcccccatcgctgggtcaatagtacttgccgcagtactcttaaaactaggcggctatggtataatacgcctcacactcattctcaaccccctgacaaaacacatagccta

SEQ ID NO: 59685 - DNA, 120 bp, Homo sapiens
  misc_feature: 1359 for SV(W|O) and mtDNA
taggctatgtcctcccgtgaggccaaatatcattctgaggggccacagtaattacaaacttactatccgccatcccatacattgggacagacctagttcaatgaatctgaggaggctact

SEQ ID NO: 59686 - DNA, 120 bp, Homo sapiens
  misc_feature: 1359 for SV(W|O) and mtDNA
cggtttcgatgatgtggtctttggagtagaaacctgtgaggaaaggtattcctgctaatgctaggctgccaatggtgagggaggttgaagtgagaggtatggttttgagtagtcctccta

SEQ ID NO: 59687 - DNA, 120 bp, Homo sapiens
  misc_feature: 1359 for SV(W|O) and mtDNA
ggctcaggagtttgatagttcttgggcagtgagagtgagtagtagaatgtttagtgagcctagggtgttgtgagtgtaaattagtgcgatgagtaggggaagggagcctactagggtgta

SEQ ID NO: 59688 - DNA, 120 bp, Homo sapiens
  misc_feature: 1359 for SV(W|O) and mtDNA
gtttgaagtccttgagagaggattatgatgcgactgtgagtgcgttcgtagtttgagtttgctaggcagaatagtaatgaggatgtaagcccgtgggcgattatgagaatgactgcgccg

SEQ ID NO: 59689 - DNA, 120 bp, Homo sapiens
  misc_feature: 1359 for SV(W|O) and mtDNA
gtggctggcacgaaattgaccaaccctggggttagtatagcttagttaaactttcgtttattgctaaaggttaatcactgctgtttcccgtgggggtgtggctaggctaagcgttttgag

SEQ ID NO: 59690 - DNA, 120 bp, Homo sapiens
  misc_feature: 1359 for SV(W|O) and mtDNA
gtgctagtaaccacgttctcctgatcaaatatcactctcctacttacaggactcaacatactagtcacagccctatactccctctacatatttaccacaacacaatggggctcactcacc

SEQ ID NO: 59691 - DNA, 120 bp, Homo sapiens
  misc_feature: 1359 for SV(W|O) and mtDNA
ctaggaacaacatatgacgcactctcccctgaactctacacaacatattttgtcaccaagaccctacttctaacctccctgttcttatgaattcgaacagcatacccccgattccgctac

SEQ ID NO: 59692 - DNA, 120 bp, Homo sapiens
  misc_feature: 1359 for SV(W|O) and mtDNA
gtagaagtagaggttaaggagggtgatggtggctatgatggtggggatgatgaggctattgttttttgtgaattcttcgataatggcccatttgggcaaaaagccggttagcgggggcag

SEQ ID NO: 59693 - DNA, 120 bp, Homo sapiens
  misc_feature: 1359 for SV(W|O) and mtDNA
agaagtagaggttaaggagggtgatggtggctatgatggtggggatgatgaggctattgttttttgtgaattcttcgataatggcccatttgggcaaaaagccggttagcgggggcaggc

SEQ ID NO: 59694 - DNA, 120 bp, Homo sapiens
  misc_feature: 1359 for SV(W|O) and mtDNA
gcaacagccttcataggctatgtcctcccgtgaggccaaatatcattctgaggggccacagtaattacaaacttactatccgccatcccatacattgggacagacctagttcaatgaatc

SEQ ID NO: 59695 - DNA, 120 bp, Homo sapiens
  misc_feature: 1359 for SV(W|O) and mtDNA
agagtttgaagtccttgagagaggattatgatgcgactgtgagtgcgttcgtagtttgagtttgctaggcagaatagtaatgaggatgtaagcccgtgggcgattatgagaatgactgcg

SEQ ID NO: 59696 - DNA, 120 bp, Homo sapiens
  misc_feature: 1359 for SV(W|O) and mtDNA
ccctctcagccctcctaatgacctccggcctagccatgtgatttcacttccactccataacgctcctcatactaggcctactaaccaacacactaaccatataccaatgatggcgcgatg

SEQ ID NO: 59697 - DNA, 120 bp, Homo sapiens
  misc_feature: 1359 for SV(W|O) and mtDNA
aggtgatgtttttggtaaacaggcggggtaagatttgccgagttccttttactttttttaacctttccttatgagcatgcctgtgttgggttgacagtgagggtaataatgacttgttgg

SEQ ID NO: 59698 - DNA, 120 bp, Homo sapiens
  misc_feature: 1359 for SV(W|O) and mtDNA
aaacgtaagccttctcctcactctctcaatcttatccatcatagcaggcagttgaggtggattaaaccaaacccagctacgcaaaatcttagcatactcctcaattacccacataggatg

SEQ ID NO: 59699 - DNA, 120 bp, Homo sapiens
  misc_feature: 1359 for SV(W|O) and mtDNA
cacgagaaaacaccctcatgttcatacacctatcccccattctcctcctatccctcaaccccgacatcattaccgggttttcctcttgtaaatatagtttaaccaaaacatcagattgtg

SEQ ID NO: 59700 - DNA, 120 bp, Homo sapiens
  misc_feature: 1359 for SV(W|O) and mtDNA
caattggccaccaatggtactgaacctacgagtacaccgactacggcggactaatcttcaactcctacatacttcccccattattcctagaaccaggcgacctgcgactccttgacgttg

SEQ ID NO: 59701 - DNA, 120 bp, Homo sapiens
  misc_feature: 1359 for SV(W|O) and mtDNA
atcgcataaaacttaaaactttacagtcagaggttcaattcctcttcttaacaacatacccatggccaacctcctactcctcattgtacccattctaatcgcaatggcattcctaatgct

SEQ ID NO: 59702 - DNA, 120 bp, Homo sapiens
  misc_feature: 1359 for SV(W|O) and mtDNA
atatgaagtcaccctagccatcattctactatcaacattactaataagtggctcctttaacctctccacccttatcacaacacaagaacacctctgattactcctgccatcatgaccctt

SEQ ID NO: 59703 - DNA, 120 bp, Homo sapiens
  misc_feature: 1359 for SV(W|O) and mtDNA
aacttagcattaaccttttaagttaaagattaagagaaccaacacctctttacagtgaaatgccccaactaaatactaccgtatggcccaccataattacccccatactccttacactat

SEQ ID NO: 59704 - DNA, 120 bp, Homo sapiens
  misc_feature: 1359 for SV(W|O) and mtDNA
actactaacagaccgcaacctcaacaccaccttcttcgaccccgccggaggaggagaccccattctataccaacacctattctgatttttcggtcaccctgaagtttatattcttatcct

SEQ ID NO: 59705 - DNA, 120 bp, Homo sapiens
  misc_feature: 1359 for SV(W|O) and mtDNA
acttagcattaaccttttaagttaaagattaagagaaccaacacctctttacagtgaaatgccccaactaaatactaccgtatggcccaccataattacccccatactccttacactatt

SEQ ID NO: 59706 - DNA, 120 bp, Homo sapiens
  misc_feature: 1359 for SV(W|O) and mtDNA
acctacgagtacaccgactacggcggactaatcttcaactcctacatacttcccccattattcctagaaccaggcgacctgcgactccttgacgttgacaatcgagtagtactcccgatt

SEQ ID NO: 59707 - DNA, 120 bp, Homo sapiens
  misc_feature: 1358 for SV(W|O) and mtDNA
ttatgcctcatagggatagtacaaggaaggggtaggctatgtgttttgtcagggggttgagaatgagtgtgaggcgtattataccatagccgcctagttttaagagtactgcggcaagta

SEQ ID NO: 59708 - DNA, 120 bp, Homo sapiens
  misc_feature: 1358 for SV(W|O) and mtDNA
gggtaagatttgccgagttccttttactttttttaacctttccttatgagcatgcctgtgttgggttgacagtgagggtaataatgacttgttggttgattgtagatattgggctgttaa

SEQ ID NO: 59709 - DNA, 120 bp, Homo sapiens
  misc_feature: 1358 for SV(W|O) and mtDNA
agaaacctgtgaggaaaggtattcctgctaatgctaggctgccaatggtgagggaggttgaagtgagaggtatggttttgagtagtcctcctatttttcgaatatcttgttcattgttaa

SEQ ID NO: 59710 - DNA, 120 bp, Homo sapiens
  misc_feature: 1358 for SV(W|O) and mtDNA
tccccacatcaagcccgaatgatatttcctattcgcctacacaattctccgatccgtccctaacaaactaggaggcgtccttgccctattactatccatcctcatcctagcaataatccc

SEQ ID NO: 59711 - DNA, 120 bp, Homo sapiens
  misc_feature: 1358 for SV(W|O) and mtDNA
gtcaccctagccatcattctactatcaacattactaataagtggctcctttaacctctccacccttatcacaacacaagaacacctctgattactcctgccatcatgacccttggccata

SEQ ID NO: 59712 - DNA, 120 bp, Homo sapiens
  misc_feature: 1358 for SV(W|O) and mtDNA
cagactgctgcgaacagagtggtgatagcgcctaagcatagtgttagagtttggattagtgggctattttctgctagggggtggaagcggatgagtaagaagattcctgctacaactata

SEQ ID NO: 59713 - DNA, 120 bp, Homo sapiens
  misc_feature: 1358 for SV(W|O) and mtDNA
tagcatgatttatcctacactccaactcatgagacccacaacaaatagcccttctaaacgctaatccaagcctcaccccactactaggcctcctcctagcagcagcaggcaaatcagccc

SEQ ID NO: 59714 - DNA, 120 bp, Homo sapiens
  misc_feature: 1358 for SV(W|O) and mtDNA
gtttggtttagacgtccgggaattgcatctgtttttaagcctaatgtggggacagctcatgagtgcaagacgtcttgtgatgtaattattatacgaatgggggcttcaatcgggagtact

SEQ ID NO: 59715 - DNA, 120 bp, Homo sapiens
  misc_feature: 1358 for SV(W|O) and mtDNA
gtttagacgtccgggaattgcatctgtttttaagcctaatgtggggacagctcatgagtgcaagacgtcttgtgatgtaattattatacgaatgggggcttcaatcgggagtactactcg

SEQ ID NO: 59716 - DNA, 120 bp, Homo sapiens
  misc_feature: 1358 for SV(W|O) and mtDNA
gttcgcttcattcattgcccccacaatcctaggcctacccgccgcagtactgatcattctatttccccctctattgatccccacctccaaatatctcatcaacaaccgactaatcaccac

SEQ ID NO: 59717 - DNA, 120 bp, Homo sapiens
  misc_feature: 1358 for SV(W|O) and mtDNA
gtgaaatcacatggctaggccggaggtcattaggagggctgagagggcccctgttaggggtcatgggctgggttttactatatgataggcatgtgattggtgggtcattatgtgttgtcg

SEQ ID NO: 59718 - DNA, 120 bp, Homo sapiens
  misc_feature: 1358 for SV(W|O) and mtDNA
atgactttttcaaaaaggtattagaaaaaccatttcataactttgtcaaagttaaattataggctaaatcctatatatcttaatggcacatgcagcgcaagtaggtctacaagacgctac

SEQ ID NO: 59719 - DNA, 120 bp, Homo sapiens
  misc_feature: 1358 for SV(W|O) and mtDNA
ggtttgctccacagatttcagagcattgaccgtagtatacccccggtcgtgtagcggtgaaagtggtttggtttagacgtccgggaattgcatctgtttttaagcctaatgtggggacag

SEQ ID NO: 59720 - DNA, 120 bp, Homo sapiens
  misc_feature: 1358 for SV(W|O) and mtDNA
gggtagctaaagtgaactgtatccgacatctggttcctacttcagggtcataaagcctaaatagcccacacgttccccttaaataagacatcacgatggatcacaggtctatcaccctat

SEQ ID NO: 59721 - DNA, 120 bp, Homo sapiens
  misc_feature: 1358 for SV(W|O) and mtDNA
gctttcgctctaagattaaaaatgccctagcccacttcttaccacaaggcacacctacaccccttatccccatactagttattatcgaaaccatcagcctactcattcaaccaatagccc

SEQ ID NO: 59722 - DNA, 120 bp, Homo sapiens
  misc_feature: 1358 for SV(W|O) and mtDNA
cgctctaagattaaaaatgccctagcccacttcttaccacaaggcacacctacaccccttatccccatactagttattatcgaaaccatcagcctactcattcaaccaatagccctggcc

SEQ ID NO: 59723 - DNA, 120 bp, Homo sapiens
  misc_feature: 1358 for SV(W|O) and mtDNA
aaagtaataaccatgcacactactataaccaccctaaccctgacttccctaattccccccatccttaccaccctcgttaaccctaacaaaaaaaactcatacccccattatgtaaaatcc

SEQ ID NO: 59724 - DNA, 120 bp, Homo sapiens
  misc_feature: 1358 for SV(W|O) and mtDNA
cctcctatttattctagccacctctagcctagccgtttactcaatcctctgatcagggtgagcatcaaactcaaactacgccctgatcggcgcactgcgagcagtagcccaaacaatctc

SEQ ID NO: 59725 - DNA, 120 bp, Homo sapiens
  misc_feature: 1358 for SV(W|O) and mtDNA
cagtgcttgaattatttggtttcggttgttttctattagactatggtgagctcaggtgattgatactcctgatgcgagtaatacggatgtgtttaggagtgggacttctaggggatttag

SEQ ID NO: 59726 - DNA, 120 bp, Homo sapiens
  misc_feature: 1358 for SV(W|O) and mtDNA
aggagtcgcaggtcgcctggttctaggaataatgggggaagtatgtaggagttgaagattagtccgccgtagtcggtgtactcgtaggttcagtaccattggtggccaattgatttgatg

SEQ ID NO: 59727 - DNA, 120 bp, Homo sapiens
  misc_feature: 1358 for SV(W|O) and mtDNA
agctattgtgtgttcagatatgttaaagccactttcgtagtctattttgtgtcaactggagttttttacaactcaggtgagttttagctttattggggagggggtgatctaaaacactct

SEQ ID NO: 59728 - DNA, 120 bp, Homo sapiens
  misc_feature: 1357 for SV(W|O) and mtDNA
ttgtcctttcgtacagggaggaatttgaagtagatagaaaccgacctggattactccggtctgaactcagatcacgtaggactttaatcgttgaacaaacgaacctttaatagcggctgc

SEQ ID NO: 59729 - DNA, 120 bp, Homo sapiens
  misc_feature: 1357 for SV(W|O) and mtDNA
tagtggtgagggtgtttattataataatgtttgtgtattcggctatgaagaatagggcgaaggggcctgcggcgtattcgatgttgaagcctgagactagttcggactccccttcggcaa

SEQ ID NO: 59730 - DNA, 120 bp, Homo sapiens
  misc_feature: 1357 for SV(W|O) and mtDNA
ggtgatgctagaggtgatgtttttggtaaacaggcggggtaagatttgccgagttccttttactttttttaacctttccttatgagcatgcctgtgttgggttgacagtgagggtaataa

SEQ ID NO: 59731 - DNA, 120 bp, Homo sapiens
  misc_feature: 1357 for SV(W|O) and mtDNA
ttaacaaaccctgttcttgggtgggtgtgggtataatactaagttgagatgatatcatttacgggggaaggcgctttgtgaagtaggccttatttctcttgtcctttcgtacagggagga

SEQ ID NO: 59732 - DNA, 120 bp, Homo sapiens
  misc_feature: 1357 for SV(W|O) and mtDNA
tggcacggagaattttggattctcagggatgggttcgattctcatagtcctagaaataagggggtttaagctcctattatttactctatcaaagtaactcttttatcagacatatttctt

SEQ ID NO: 59733 - DNA, 120 bp, Homo sapiens
  misc_feature: 1357 for SV(W|O) and mtDNA
tggcacgaaattgaccaaccctggggttagtatagcttagttaaactttcgtttattgctaaaggttaatcactgctgtttcccgtgggggtgtggctaggctaagcgttttgagctgca

SEQ ID NO: 59734 - DNA, 120 bp, Homo sapiens
  misc_feature: 1357 for SV(W|O) and mtDNA
tgctccacagatttcagagcattgaccgtagtatacccccggtcgtgtagcggtgaaagtggtttggtttagacgtccgggaattgcatctgtttttaagcctaatgtggggacagctca

SEQ ID NO: 59735 - DNA, 120 bp, Homo sapiens
  misc_feature: 1357 for SV(W|O) and mtDNA
aaaggagccacttattagtaatgttgatagtagaatgatggctagggtgacttcatatgagattgtttgggctactgctcgcagtgcgccgatcagggcgtagtttgagtttgatgctca

SEQ ID NO: 59736 - DNA, 120 bp, Homo sapiens
  misc_feature: 1357 for SV(W|O) and mtDNA
ctaatactaacatctcagacgctcaggaaatagaaaccgtctgaactatcctgcccgccatcatcctagtcctcatcgccctcccatccctacgcatcctttacataacagacgaggtca

SEQ ID NO: 59737 - DNA, 120 bp, Homo sapiens
  misc_feature: 1357 for SV(W|O) and mtDNA
tctgtgctagtaaccacgttctcctgatcaaatatcactctcctacttacaggactcaacatactagtcacagccctatactccctctacatatttaccacaacacaatggggctcactc

SEQ ID NO: 59738 - DNA, 120 bp, Homo sapiens
  misc_feature: 1357 for SV(W|O) and mtDNA
tctataagattattagtataaaaggggagataggtaggagtagcgtggtaagggcgatgagtgtggggaggaatggggtgggttttgtatgttcaaactgtcattttatttttacgttgt

SEQ ID NO: 59739 - DNA, 120 bp, Homo sapiens
  misc_feature: 1357 for SV(W|O) and mtDNA
tcctagttttattgctatagccattatgattattaatgatgagtactgattggtagtattggttatggttcattgtccggagagtatattgttgaagaggatagctattagaaggattat

SEQ ID NO: 59740 - DNA, 120 bp, Homo sapiens
  misc_feature: 1357 for SV(W|O) and mtDNA
tagcatactcctcaattacccacataggatgaataatagcagttctaccgtacaaccctaacataaccattcttaatttaactatttatattatcctaactactaccgcattcctactac

SEQ ID NO: 59741 - DNA, 120 bp, Homo sapiens
  misc_feature: 1357 for SV(W|O) and mtDNA
atacacaaacattattataataaacaccctcaccactacaatcttcctaggaacaacatatgacgcactctcccctgaactctacacaacatattttgtcaccaagaccctacttctaac

SEQ ID NO: 59742 - DNA, 120 bp, Homo sapiens
  misc_feature: 1357 for SV(W|O) and mtDNA
catctcaacttagtattatacccacacccacccaagaacagggtttgttaagatggcagagcccggtaatcgcataaaacttaaaactttacagtcagaggttcaattcctcttcttaac

SEQ ID NO: 59743 - DNA, 120 bp, Homo sapiens
  misc_feature: 1357 for SV(W|O) and mtDNA
ggttctaggaataatgggggaagtatgtaggagttgaagattagtccgccgtagtcggtgtactcgtaggttcagtaccattggtggccaattgatttgatggtaagggagggatcgttg

SEQ ID NO: 59744 - DNA, 120 bp, Homo sapiens
  misc_feature: 1357 for SV(W|O) and mtDNA
ctagccacctctagcctagccgtttactcaatcctctgatcagggtgagcatcaaactcaaactacgccctgatcggcgcactgcgagcagtagcccaaacaatctcatatgaagtcacc

SEQ ID NO: 59745 - DNA, 120 bp, Homo sapiens
  misc_feature: 1357 for SV(W|O) and mtDNA
cattctaatcgcaatggcattcctaatgcttaccgaacgaaaaattctaggctatatacaactacgcaaaggccccaacgttgtaggcccctacgggctactacaacccttcgctgacgc

SEQ ID NO: 59746 - DNA, 120 bp, Homo sapiens
  misc_feature: 1357 for SV(W|O) and mtDNA
ctgctgcgaacagagtggtgatagcgcctaagcatagtgttagagtttggattagtgggctattttctgctagggggtggaagcggatgagtaagaagattcctgctacaactatagtgc

SEQ ID NO: 59747 - DNA, 120 bp, Homo sapiens
  misc_feature: 1357 for SV(W|O) and mtDNA
gaggtgatgtttttggtaaacaggcggggtaagatttgccgagttccttttactttttttaacctttccttatgagcatgcctgtgttgggttgacagtgagggtaataatgacttgttg

SEQ ID NO: 59748 - DNA, 120 bp, Homo sapiens
  misc_feature: 1357 for SV(W|O) and mtDNA
agtagaggttaaggagggtgatggtggctatgatggtggggatgatgaggctattgttttttgtgaattcttcgataatggcccatttgggcaaaaagccggttagcgggggcaggcctc

SEQ ID NO: 59749 - DNA, 120 bp, Homo sapiens
  misc_feature: 1357 for SV(W|O) and mtDNA
gagatgatatcatttacgggggaaggcgctttgtgaagtaggccttatttctcttgtcctttcgtacagggaggaatttgaagtagatagaaaccgacctggattactccggtctgaact

SEQ ID NO: 59750 - DNA, 120 bp, Homo sapiens
  misc_feature: 1357 for SV(W|O) and mtDNA
gaactgtatccgacatctggttcctacttcagggtcataaagcctaaatagcccacacgttccccttaaataagacatcacgatggatcacaggtctatcaccctattaaccactcacgg

SEQ ID NO: 59751 - DNA, 120 bp, Homo sapiens
  misc_feature: 1357 for SV(W|O) and mtDNA
ctatactaatctccctacaaatctccttaattataacattcacagccacagaactaatcatattttatatcttcttcgaaaccacacttatccccaccttggctatcatcacccgatgag

SEQ ID NO: 59752 - DNA, 120 bp, Homo sapiens
  misc_feature: 1357 for SV(W|O) and mtDNA
acttcctctctttcttcttcccactcatcctaaccctactcctaatcacataacctattcccccgagcaatctcaattacaatatatacaccaacaaacaatgttcaaccagtaactact

SEQ ID NO: 59753 - DNA, 120 bp, Homo sapiens
  misc_feature: 1356 for SV(W|O) and mtDNA
ttggtttagacgtccgggaattgcatctgtttttaagcctaatgtggggacagctcatgagtgcaagacgtcttgtgatgtaattattatacgaatgggggcttcaatcgggagtactac

SEQ ID NO: 59754 - DNA, 120 bp, Homo sapiens
  misc_feature: 1356 for SV(W|O) and mtDNA
taatactaacatctcagacgctcaggaaatagaaaccgtctgaactatcctgcccgccatcatcctagtcctcatcgccctcccatccctacgcatcctttacataacagacgaggtcaa

SEQ ID NO: 59755 - DNA, 120 bp, Homo sapiens
  misc_feature: 1356 for SV(W|O) and mtDNA
tgttggtatagaatggggtctcctcctccggcggggtcgaagaaggtggtgttgaggttgcggtctgttagtagtatagtgatgccagcagctaggactgggagagataggagaagtagg

SEQ ID NO: 59756 - DNA, 120 bp, Homo sapiens
  misc_feature: 1356 for SV(W|O) and mtDNA
ccccaccatcatagccaccatcaccctccttaacctctacttctacctacgcctaatctactccacctcaatcacactactccccatatctaacaacgtaaaaataaaatgacagtttga

SEQ ID NO: 59757 - DNA, 120 bp, Homo sapiens
  misc_feature: 1356 for SV(W|O) and mtDNA
cctatttattctagccacctctagcctagccgtttactcaatcctctgatcagggtgagcatcaaactcaaactacgccctgatcggcgcactgcgagcagtagcccaaacaatctcata

SEQ ID NO: 59758 - DNA, 120 bp, Homo sapiens
  misc_feature: 1356 for SV(W|O) and mtDNA
ggggcgtttggtattgggttatggcagggggttttatattgataattgttgtgatgaaattgatggcccctaagatagaggagacacctgctaggtgtaaggagaagatggttaggtcta

SEQ ID NO: 59759 - DNA, 120 bp, Homo sapiens
  misc_feature: 1356 for SV(W|O) and mtDNA
tacttcctctctttcttcttcccactcatcctaaccctactcctaatcacataacctattcccccgagcaatctcaattacaatatatacaccaacaaacaatgttcaaccagtaactac

SEQ ID NO: 59760 - DNA, 120 bp, Homo sapiens
  misc_feature: 1356 for SV(W|O) and mtDNA
ctgctgctaggaggaggcctagtagtggggtgaggcttggattagcgtttagaagggctatttgttgtgggtctcatgagttggagtgtaggataaatcatgctaaggcgaggatgaaac

SEQ ID NO: 59761 - DNA, 120 bp, Homo sapiens
  misc_feature: 1356 for SV(W|O) and mtDNA
cttcattcattgcccccacaatcctaggcctacccgccgcagtactgatcattctatttccccctctattgatccccacctccaaatatctcatcaacaaccgactaatcaccacccaac

SEQ ID NO: 59762 - DNA, 120 bp, Homo sapiens
  misc_feature: 1356 for SV(W|O) and mtDNA
gggcgtttggtattgggttatggcagggggttttatattgataattgttgtgatgaaattgatggcccctaagatagaggagacacctgctaggtgtaaggagaagatggttaggtctac

SEQ ID NO: 59763 - DNA, 120 bp, Homo sapiens
  misc_feature: 1356 for SV(W|O) and mtDNA
ggccctgttcaactaagcactctactctcagtttactgctaaatccaccttcgacccttaagtttcataagggctatcgtagttttctggggtagaaaatgtagcccatttcttgccacc

SEQ ID NO: 59764 - DNA, 120 bp, Homo sapiens
  misc_feature: 1356 for SV(W|O) and mtDNA
ggtatagaatggggtctcctcctccggcggggtcgaagaaggtggtgttgaggttgcggtctgttagtagtatagtgatgccagcagctaggactgggagagataggagaagtaggactg

SEQ ID NO: 59765 - DNA, 120 bp, Homo sapiens
  misc_feature: 1356 for SV(W|O) and mtDNA
gggttattttcgttaatgttagtaagggtggggaagcgaggttgacctgttagggtgagaagaattattcgagtgctataggcgcttgtcagggaggtagcgatgagagtaatagatagg

SEQ ID NO: 59766 - DNA, 120 bp, Homo sapiens
  misc_feature: 1356 for SV(W|O) and mtDNA
ccttctaaacgctaatccaagcctcaccccactactaggcctcctcctagcagcagcaggcaaatcagcccaattaggtctccacccctgactcccctcagccatagaaggccccacccc

SEQ ID NO: 59767 - DNA, 120 bp, Homo sapiens
  misc_feature: 1356 for SV(W|O) and mtDNA
gcttagttgaacagggccctgaagcgcgtacacaccgcccgtcaccctcctcaagtatacttcaaaggacatttaactaaaacccctacgcatttatatagaggagacaagtcgtaacat

SEQ ID NO: 59768 - DNA, 120 bp, Homo sapiens
  misc_feature: 1356 for SV(W|O) and mtDNA
agagcattgaccgtagtatacccccggtcgtgtagcggtgaaagtggtttggtttagacgtccgggaattgcatctgtttttaagcctaatgtggggacagctcatgagtgcaagacgtc

SEQ ID NO: 59769 - DNA, 120 bp, Homo sapiens
  misc_feature: 1356 for SV(W|O) and mtDNA
caccaacaaacaatgttcaaccagtaactactactaatcaacgcccataatcatacaaagcccccgcaccaataggatcctcccgaatcaaccctgacccctctccttcataaattattc

SEQ ID NO: 59770 - DNA, 120 bp, Homo sapiens
  misc_feature: 1356 for SV(W|O) and mtDNA
caatcagccacatagccctcgtagtaacagccattctcatccaaaccccctgaagcttcaccggcgcagtcattctcataatcgcccacgggcttacatcctcattactattctgcctag

SEQ ID NO: 59771 - DNA, 120 bp, Homo sapiens
  misc_feature: 1356 for SV(W|O) and mtDNA
acaatgaacaagatattcgaaaaataggaggactactcaaaaccatacctctcacttcaacctccctcaccattggcagcctagcattagcaggaatacctttcctcacaggtttctact

SEQ ID NO: 59772 - DNA, 120 bp, Homo sapiens
  misc_feature: 1356 for SV(W|O) and mtDNA
acgagggctatgtggctgattgaagagtatgcaatgagcgattttaggtctgtttgtcgtaggcagatggagcttgttataattatgcctcatagggatagtacaaggaaggggtaggct

SEQ ID NO: 59773 - DNA, 120 bp, Homo sapiens
  misc_feature: 1356 for SV(W|O) and mtDNA
acgatgggcatgaaactgtggtttgctccacagatttcagagcattgaccgtagtatacccccggtcgtgtagcggtgaaagtggtttggtttagacgtccgggaattgcatctgttttt

SEQ ID NO: 59774 - DNA, 120 bp, Homo sapiens
  misc_feature: 1356 for SV(W|O) and mtDNA
aagaacagggtttgttaagatggcagagcccggtaatcgcataaaacttaaaactttacagtcagaggttcaattcctcttcttaacaacatacccatggccaacctcctactcctcatt

SEQ ID NO: 59775 - DNA, 120 bp, Homo sapiens
  misc_feature: 1355 for SV(W|O) and mtDNA
atgcggttgcttgcgtgaggaaatacttgatggcagcttctgtggaacgagggtttatttttttggttagaactggaataaaagctagcatgtttatttctaggcctactcaggtaaaaa

SEQ ID NO: 59776 - DNA, 120 bp, Homo sapiens
  misc_feature: 1355 for SV(W|O) and mtDNA
tttggtgaagagttttatggcgtcagcgaagggttgtagtagcccgtaggggcctacaacgttggggcctttgcgtagttgtatatagcctagaatttttcgttcggtaagcattaggaa

SEQ ID NO: 59777 - DNA, 120 bp, Homo sapiens
  misc_feature: 1355 for SV(W|O) and mtDNA
ttgagatgatatcatttacgggggaaggcgctttgtgaagtaggccttatttctcttgtcctttcgtacagggaggaatttgaagtagatagaaaccgacctggattactccggtctgaa

SEQ ID NO: 59778 - DNA, 120 bp, Homo sapiens
  misc_feature: 1355 for SV(W|O) and mtDNA
cgctggagccggagcaccctatgtcgcagtatctgtctttgattcctgcctcatcccattatttatcgcacctacgttcaatattacaggcgaacatacttactaaagtgtgttaattaa

SEQ ID NO: 59779 - DNA, 120 bp, Homo sapiens
  misc_feature: 1355 for SV(W|O) and mtDNA
tgtgctagtaaccacgttctcctgatcaaatatcactctcctacttacaggactcaacatactagtcacagccctatactccctctacatatttaccacaacacaatggggctcactcac

SEQ ID NO: 59780 - DNA, 120 bp, Homo sapiens
  misc_feature: 1355 for SV(W|O) and mtDNA
tctaggacgatgggcatgaaactgtggtttgctccacagatttcagagcattgaccgtagtatacccccggtcgtgtagcggtgaaagtggtttggtttagacgtccgggaattgcatct

SEQ ID NO: 59781 - DNA, 120 bp, Homo sapiens
  misc_feature: 1355 for SV(W|O) and mtDNA
tcctatttattctagccacctctagcctagccgtttactcaatcctctgatcagggtgagcatcaaactcaaactacgccctgatcggcgcactgcgagcagtagcccaaacaatctcat

SEQ ID NO: 59782 - DNA, 120 bp, Homo sapiens
  misc_feature: 1355 for SV(W|O) and mtDNA
gagagctcccgtgagtggttaatagggtgatagacctgtgatccatcgtgatgtcttatttaaggggaacgtgtgggctatttaggctttatgaccctgaagtaggaaccagatgtcgga

SEQ ID NO: 59783 - DNA, 120 bp, Homo sapiens
  misc_feature: 1355 for SV(W|O) and mtDNA
tccatgactttttcaaaaaggtattagaaaaaccatttcataactttgtcaaagttaaattataggctaaatcctatatatcttaatggcacatgcagcgcaagtaggtctacaagacgc

SEQ ID NO: 59784 - DNA, 120 bp, Homo sapiens
  misc_feature: 1355 for SV(W|O) and mtDNA
tcatcctcgccttagcatgatttatcctacactccaactcatgagacccacaacaaatagcccttctaaacgctaatccaagcctcaccccactactaggcctcctcctagcagcagcag

SEQ ID NO: 59785 - DNA, 120 bp, Homo sapiens
  misc_feature: 1355 for SV(W|O) and mtDNA
acagccttcataggctatgtcctcccgtgaggccaaatatcattctgaggggccacagtaattacaaacttactatccgccatcccatacattgggacagacctagttcaatgaatctga

SEQ ID NO: 59786 - DNA, 120 bp, Homo sapiens
  misc_feature: 1355 for SV(W|O) and mtDNA
tcaactaagcactctactctcagtttactgctaaatccaccttcgacccttaagtttcataagggctatcgtagttttctggggtagaaaatgtagcccatttcttgccacctcatgggc

SEQ ID NO: 59787 - DNA, 120 bp, Homo sapiens
  misc_feature: 1355 for SV(W|O) and mtDNA
tatgtcctcccgtgaggccaaatatcattctgaggggccacagtaattacaaacttactatccgccatcccatacattgggacagacctagttcaatgaatctgaggaggctactcagta

SEQ ID NO: 59788 - DNA, 120 bp, Homo sapiens
  misc_feature: 1355 for SV(W|O) and mtDNA
tatccgacatctggttcctacttcagggtcataaagcctaaatagcccacacgttccccttaaataagacatcacgatggatcacaggtctatcaccctattaaccactcacgggagctc

SEQ ID NO: 59789 - DNA, 120 bp, Homo sapiens
  misc_feature: 1355 for SV(W|O) and mtDNA
tatacaccaacaaacaatgttcaaccagtaactactactaatcaacgcccataatcatacaaagcccccgcaccaataggatcctcccgaatcaaccctgacccctctccttcataaatt

SEQ ID NO: 59790 - DNA, 120 bp, Homo sapiens
  misc_feature: 1355 for SV(W|O) and mtDNA
taacttagcattaaccttttaagttaaagattaagagaaccaacacctctttacagtgaaatgccccaactaaatactaccgtatggcccaccataattacccccatactccttacacta

SEQ ID NO: 59791 - DNA, 120 bp, Homo sapiens
  misc_feature: 1355 for SV(W|O) and mtDNA
agttgaacagggccctgaagcgcgtacacaccgcccgtcaccctcctcaagtatacttcaaaggacatttaactaaaacccctacgcatttatatagaggagacaagtcgtaacatggta

SEQ ID NO: 59792 - DNA, 120 bp, Homo sapiens
  misc_feature: 1355 for SV(W|O) and mtDNA
taactaatactaacatctcagacgctcaggaaatagaaaccgtctgaactatcctgcccgccatcatcctagtcctcatcgccctcccatccctacgcatcctttacataacagacgagg

SEQ ID NO: 59793 - DNA, 120 bp, Homo sapiens
  misc_feature: 1355 for SV(W|O) and mtDNA
cgagaaagcacataccaaggccaccacacaccacctgtccaaaaaggccttcgatacgggataatcctatttattacctcagaagtttttttcttcgcaggatttttctgagccttttac

SEQ ID NO: 59794 - DNA, 120 bp, Homo sapiens
  misc_feature: 1355 for SV(W|O) and mtDNA
ggtgagggtgtttattataataatgtttgtgtattcggctatgaagaatagggcgaaggggcctgcggcgtattcgatgttgaagcctgagactagttcggactccccttcggcaaggtc

SEQ ID NO: 59795 - DNA, 120 bp, Homo sapiens
  misc_feature: 1355 for SV(W|O) and mtDNA
agtttgaagtccttgagagaggattatgatgcgactgtgagtgcgttcgtagtttgagtttgctaggcagaatagtaatgaggatgtaagcccgtgggcgattatgagaatgactgcgcc

SEQ ID NO: 59796 - DNA, 120 bp, Homo sapiens
  misc_feature: 1355 for SV(W|O) and mtDNA
ggactaggatgatggcgggcaggatagttcagacggtttctatttcctgagcgtctgagatgttagtattagttagttttgttgtgagtgttaggaaaagggcatacaggactaggaagc

SEQ ID NO: 59797 - DNA, 120 bp, Homo sapiens
  misc_feature: 1355 for SV(W|O) and mtDNA
gcagactgctgcgaacagagtggtgatagcgcctaagcatagtgttagagtttggattagtgggctattttctgctagggggtggaagcggatgagtaagaagattcctgctacaactat

SEQ ID NO: 59798 - DNA, 120 bp, Homo sapiens
  misc_feature: 1355 for SV(W|O) and mtDNA
gcaagtacccacgtaaagacgttaggtcaaggtgtagcccatgaggtggcaagaaatgggctacattttctaccccagaaaactacgatagcccttatgaaacttaagggtcgaaggtgg

SEQ ID NO: 59799 - DNA, 120 bp, Homo sapiens
  misc_feature: 1355 for SV(W|O) and mtDNA
gacctaaaatcgctcattgcatactcttcaatcagccacatagccctcgtagtaacagccattctcatccaaaccccctgaagcttcaccggcgcagtcattctcataatcgcccacggg

SEQ ID NO: 59800 - DNA, 120 bp, Homo sapiens
  misc_feature: 1355 for SV(W|O) and mtDNA
agggtgtttattataataatgtttgtgtattcggctatgaagaatagggcgaaggggcctgcggcgtattcgatgttgaagcctgagactagttcggactccccttcggcaaggtcgaag

SEQ ID NO: 59801 - DNA, 120 bp, Homo sapiens
  misc_feature: 1355 for SV(W|O) and mtDNA
ctggttctaggaataatgggggaagtatgtaggagttgaagattagtccgccgtagtcggtgtactcgtaggttcagtaccattggtggccaattgatttgatggtaagggagggatcgt

SEQ ID NO: 59802 - DNA, 120 bp, Homo sapiens
  misc_feature: 1355 for SV(W|O) and mtDNA
ctactcctacctatctccccttttatactaataatcttatagaaatttaggttaaatacagaccaagagccttcaaagccctcagtaagttgcaatacttaatttctgtaacagctaagg

SEQ ID NO: 59803 - DNA, 120 bp, Homo sapiens
  misc_feature: 1355 for SV(W|O) and mtDNA
agtcaccctagccatcattctactatcaacattactaataagtggctcctttaacctctccacccttatcacaacacaagaacacctctgattactcctgccatcatgacccttggccat

SEQ ID NO: 59804 - DNA, 120 bp, Homo sapiens
  misc_feature: 1355 for SV(W|O) and mtDNA
atggcagcttctgtggaacgagggtttatttttttggttagaactggaataaaagctagcatgtttatttctaggcctactcaggtaaaaaatcagtgcgagcttagcgctgtgatgagt

SEQ ID NO: 59805 - DNA, 120 bp, Homo sapiens
  misc_feature: 1354 for SV(W|O) and mtDNA
taaaactttacagtcagaggttcaattcctcttcttaacaacatacccatggccaacctcctactcctcattgtacccattctaatcgcaatggcattcctaatgcttaccgaacgaaaa

SEQ ID NO: 59806 - DNA, 120 bp, Homo sapiens
  misc_feature: 1354 for SV(W|O) and mtDNA
tttgtgtaagggcgcagactgctgcgaacagagtggtgatagcgcctaagcatagtgttagagtttggattagtgggctattttctgctagggggtggaagcggatgagtaagaagattc

SEQ ID NO: 59807 - DNA, 120 bp, Homo sapiens
  misc_feature: 1354 for SV(W|O) and mtDNA
tggccaccaatggtactgaacctacgagtacaccgactacggcggactaatcttcaactcctacatacttcccccattattcctagaaccaggcgacctgcgactccttgacgttgacaa

SEQ ID NO: 59808 - DNA, 120 bp, Homo sapiens
  misc_feature: 1354 for SV(W|O) and mtDNA
ttggtatagaatggggtctcctcctccggcggggtcgaagaaggtggtgttgaggttgcggtctgttagtagtatagtgatgccagcagctaggactgggagagataggagaagtaggac

SEQ ID NO: 59809 - DNA, 120 bp, Homo sapiens
  misc_feature: 1354 for SV(W|O) and mtDNA
accctgttcttgggtgggtgtgggtataatactaagttgagatgatatcatttacgggggaaggcgctttgtgaagtaggccttatttctcttgtcctttcgtacagggaggaatttgaa

SEQ ID NO: 59810 - DNA, 120 bp, Homo sapiens
  misc_feature: 1354 for SV(W|O) and mtDNA
cctttcacttctgagtcccagaggttacccaaggcacccctctgacatccggcctgcttcttctcacatgacaaaaactagcccccatctcaatcatataccaaatctctccctcactaa

SEQ ID NO: 59811 - DNA, 120 bp, Homo sapiens
  misc_feature: 1354 for SV(W|O) and mtDNA
tgctttgtgttaagctacactctggttcgtccaagtgcactttccagtacacttaccatgttacgacttgtctcctctatataaatgcgtaggggttttagttaaatgtcctttgaagta

SEQ ID NO: 59812 - DNA, 120 bp, Homo sapiens
  misc_feature: 1354 for SV(W|O) and mtDNA
tgctagtaaccacgttctcctgatcaaatatcactctcctacttacaggactcaacatactagtcacagccctatactccctctacatatttaccacaacacaatggggctcactcaccc

SEQ ID NO: 59813 - DNA, 120 bp, Homo sapiens
  misc_feature: 1354 for SV(W|O) and mtDNA
actgtatccgacatctggttcctacttcagggtcataaagcctaaatagcccacacgttccccttaaataagacatcacgatggatcacaggtctatcaccctattaaccactcacggga

SEQ ID NO: 59814 - DNA, 120 bp, Homo sapiens
  misc_feature: 1354 for SV(W|O) and mtDNA
gctttgtgaagtaggccttatttctcttgtcctttcgtacagggaggaatttgaagtagatagaaaccgacctggattactccggtctgaactcagatcacgtaggactttaatcgttga

SEQ ID NO: 59815 - DNA, 120 bp, Homo sapiens
  misc_feature: 1354 for SV(W|O) and mtDNA
tattgtgtgttcagatatgttaaagccactttcgtagtctattttgtgtcaactggagttttttacaactcaggtgagttttagctttattggggagggggtgatctaaaacactcttta

SEQ ID NO: 59816 - DNA, 120 bp, Homo sapiens
  misc_feature: 1354 for SV(W|O) and mtDNA
taggaggaggcctagtagtggggtgaggcttggattagcgtttagaagggctatttgttgtgggtctcatgagttggagtgtaggataaatcatgctaaggcgaggatgaaaccgatatc

SEQ ID NO: 59817 - DNA, 120 bp, Homo sapiens
  misc_feature: 1354 for SV(W|O) and mtDNA
taggaacaacatatgacgcactctcccctgaactctacacaacatattttgtcaccaagaccctacttctaacctccctgttcttatgaattcgaacagcatacccccgattccgctacg

SEQ ID NO: 59818 - DNA, 120 bp, Homo sapiens
  misc_feature: 1354 for SV(W|O) and mtDNA
aaacttaaaactttacagtcagaggttcaattcctcttcttaacaacatacccatggccaacctcctactcctcattgtacccattctaatcgcaatggcattcctaatgcttaccgaac

SEQ ID NO: 59819 - DNA, 120 bp, Homo sapiens
  misc_feature: 1354 for SV(W|O) and mtDNA
gaacgcactcacagtcgcatcataatcctctctcaaggacttcaaactctactcccactaatagctttttgatgacttctagcaagcctcgctaacctcgccttaccccccactattaac

SEQ ID NO: 59820 - DNA, 120 bp, Homo sapiens
  misc_feature: 1354 for SV(W|O) and mtDNA
gtgaggaaaggtattcctgctaatgctaggctgccaatggtgagggaggttgaagtgagaggtatggttttgagtagtcctcctatttttcgaatatcttgttcattgttaaggttgtgg

SEQ ID NO: 59821 - DNA, 120 bp, Homo sapiens
  misc_feature: 1354 for SV(W|O) and mtDNA
caatgttcaaccagtaactactactaatcaacgcccataatcatacaaagcccccgcaccaataggatcctcccgaatcaaccctgacccctctccttcataaattattcagcttcctac

SEQ ID NO: 59822 - DNA, 120 bp, Homo sapiens
  misc_feature: 1354 for SV(W|O) and mtDNA
attttgtcaccaagaccctacttctaacctccctgttcttatgaattcgaacagcatacccccgattccgctacgaccaactcatacacctcctatgaaaaaacttcctaccactcaccc

SEQ ID NO: 59823 - DNA, 120 bp, Homo sapiens
  misc_feature: 1354 for SV(W|O) and mtDNA
gcggtttcgatgatgtggtctttggagtagaaacctgtgaggaaaggtattcctgctaatgctaggctgccaatggtgagggaggttgaagtgagaggtatggttttgagtagtcctcct

SEQ ID NO: 59824 - DNA, 120 bp, Homo sapiens
  misc_feature: 1354 for SV(W|O) and mtDNA
gcaggccggatgtcagaggggtgccttgggtaacctctgggactcagaagtgaaagggggctattcctagttttattgctatagccattatgattattaatgatgagtactgattggtag

SEQ ID NO: 59825 - DNA, 120 bp, Homo sapiens
  misc_feature: 1354 for SV(W|O) and mtDNA
gacgctggagccggagcaccctatgtcgcagtatctgtctttgattcctgcctcatcccattatttatcgcacctacgttcaatattacaggcgaacatacttactaaagtgtgttaatt

SEQ ID NO: 59826 - DNA, 120 bp, Homo sapiens
  misc_feature: 1354 for SV(W|O) and mtDNA
gaagtaggccttatttctcttgtcctttcgtacagggaggaatttgaagtagatagaaaccgacctggattactccggtctgaactcagatcacgtaggactttaatcgttgaacaaacg

SEQ ID NO: 59827 - DNA, 120 bp, Homo sapiens
  misc_feature: 1354 for SV(W|O) and mtDNA
attaaagtcctacgtgatctgagttcagaccggagtaatccaggtcggtttctatctacttcaaattcctccctgtacgaaaggacaagagaaataaggcctacttcacaaagcgccttc

SEQ ID NO: 59828 - DNA, 120 bp, Homo sapiens
  misc_feature: 1354 for SV(W|O) and mtDNA
accacgctactcctacctatctccccttttatactaataatcttatagaaatttaggttaaatacagaccaagagccttcaaagccctcagtaagttgcaatacttaatttctgtaacag

SEQ ID NO: 59829 - DNA, 120 bp, Homo sapiens
  misc_feature: 1354 for SV(W|O) and mtDNA
caggtgtctcctctatcttaggggccatcaatttcatcacaacaattatcaatataaaaccccctgccataacccaataccaaacgcccctcttcgtctgatccgtcctaatcacagcag

SEQ ID NO: 59830 - DNA, 120 bp, Homo sapiens
  misc_feature: 1354 for SV(W|O) and mtDNA
ctctatactaatctccctacaaatctccttaattataacattcacagccacagaactaatcatattttatatcttcttcgaaaccacacttatccccaccttggctatcatcacccgatg

SEQ ID NO: 59831 - DNA, 120 bp, Homo sapiens
  misc_feature: 1354 for SV(W|O) and mtDNA
caagcctcgctaacctcgccttaccccccactattaacctactgggagaactctctgtgctagtaaccacgttctcctgatcaaatatcactctcctacttacaggactcaacatactag

SEQ ID NO: 59832 - DNA, 120 bp, Homo sapiens
  misc_feature: 1354 for SV(W|O) and mtDNA
actaagttgagatgatatcatttacgggggaaggcgctttgtgaagtaggccttatttctcttgtcctttcgtacagggaggaatttgaagtagatagaaaccgacctggattactccgg

SEQ ID NO: 59833 - DNA, 120 bp, Homo sapiens
  misc_feature: 1354 for SV(W|O) and mtDNA
cccatgacccctaacaggggccctctcagccctcctaatgacctccggcctagccatgtgatttcacttccactccataacgctcctcatactaggcctactaaccaacacactaaccat

SEQ ID NO: 59834 - DNA, 120 bp, Homo sapiens
  misc_feature: 1354 for SV(W|O) and mtDNA
atgaggagtaggaggttggccatgggtatgttgttaagaagaggaattgaacctctgactgtaaagttttaagttttatgcgattaccgggctctgccatcttaacaaaccctgttcttg

SEQ ID NO: 59835 - DNA, 120 bp, Homo sapiens
  misc_feature: 1354 for SV(W|O) and mtDNA
attcctagttttattgctatagccattatgattattaatgatgagtactgattggtagtattggttatggttcattgtccggagagtatattgttgaagaggatagctattagaaggatt

SEQ ID NO: 59836 - DNA, 120 bp, Homo sapiens
  misc_feature: 1354 for SV(W|O) and mtDNA
aggaggttggccatgggtatgttgttaagaagaggaattgaacctctgactgtaaagttttaagttttatgcgattaccgggctctgccatcttaacaaaccctgttcttgggtgggtgt

SEQ ID NO: 59837 - DNA, 120 bp, Homo sapiens
  misc_feature: 1354 for SV(W|O) and mtDNA
aagcacgcagcaatgcagctcaaaacgcttagcctagccacacccccacgggaaacagcagtgattaacctttagcaataaacgaaagtttaactaagctatactaaccccagggttggt

SEQ ID NO: 59838 - DNA, 120 bp, Homo sapiens
  misc_feature: 1353 for SV(W|O) and mtDNA
gggcgcagactgctgcgaacagagtggtgatagcgcctaagcatagtgttagagtttggattagtgggctattttctgctagggggtggaagcggatgagtaagaagattcctgctacaa

SEQ ID NO: 59839 - DNA, 120 bp, Homo sapiens
  misc_feature: 1353 for SV(W|O) and mtDNA
agtaggccttatttctcttgtcctttcgtacagggaggaatttgaagtagatagaaaccgacctggattactccggtctgaactcagatcacgtaggactttaatcgttgaacaaacgaa

SEQ ID NO: 59840 - DNA, 120 bp, Homo sapiens
  misc_feature: 1353 for SV(W|O) and mtDNA
ttactcatccgcttccaccccctagcagaaaatagcccactaatccaaactctaacactatgcttaggcgctatcaccactctgttcgcagcagtctgcgcccttacacaaaatgacatc

SEQ ID NO: 59841 - DNA, 120 bp, Homo sapiens
  misc_feature: 1353 for SV(W|O) and mtDNA
ttaaagtcctacgtgatctgagttcagaccggagtaatccaggtcggtttctatctacttcaaattcctccctgtacgaaaggacaagagaaataaggcctacttcacaaagcgccttcc

SEQ ID NO: 59842 - DNA, 120 bp, Homo sapiens
  misc_feature: 1353 for SV(W|O) and mtDNA
tgaggttagtttgattagtcattgttgggtggtgattagtcggttgttgatgagatatttggaggtggggatcaatagagggggaaatagaatgatcagtactgcggcgggtaggcctag

SEQ ID NO: 59843 - DNA, 120 bp, Homo sapiens
  misc_feature: 1353 for SV(W|O) and mtDNA
tctagccacctctagcctagccgtttactcaatcctctgatcagggtgagcatcaaactcaaactacgccctgatcggcgcactgcgagcagtagcccaaacaatctcatatgaagtcac

SEQ ID NO: 59844 - DNA, 120 bp, Homo sapiens
  misc_feature: 1353 for SV(W|O) and mtDNA
tctaatcgcaatggcattcctaatgcttaccgaacgaaaaattctaggctatatacaactacgcaaaggccccaacgttgtaggcccctacgggctactacaacccttcgctgacgccat

SEQ ID NO: 59845 - DNA, 120 bp, Homo sapiens
  misc_feature: 1353 for SV(W|O) and mtDNA
tcgcttcattcattgcccccacaatcctaggcctacccgccgcagtactgatcattctatttccccctctattgatccccacctccaaatatctcatcaacaaccgactaatcaccaccc

SEQ ID NO: 59846 - DNA, 120 bp, Homo sapiens
  misc_feature: 1353 for SV(W|O) and mtDNA
gttggtatagaatggggtctcctcctccggcggggtcgaagaaggtggtgttgaggttgcggtctgttagtagtatagtgatgccagcagctaggactgggagagataggagaagtagga

SEQ ID NO: 59847 - DNA, 120 bp, Homo sapiens
  misc_feature: 1353 for SV(W|O) and mtDNA
gttgagatgatatcatttacgggggaaggcgctttgtgaagtaggccttatttctcttgtcctttcgtacagggaggaatttgaagtagatagaaaccgacctggattactccggtctga

SEQ ID NO: 59848 - DNA, 120 bp, Homo sapiens
  misc_feature: 1353 for SV(W|O) and mtDNA
tacgagggctatgtggctgattgaagagtatgcaatgagcgattttaggtctgtttgtcgtaggcagatggagcttgttataattatgcctcatagggatagtacaaggaaggggtaggc

SEQ ID NO: 59849 - DNA, 120 bp, Homo sapiens
  misc_feature: 1353 for SV(W|O) and mtDNA
taaaatcgctcattgcatactcttcaatcagccacatagccctcgtagtaacagccattctcatccaaaccccctgaagcttcaccggcgcagtcattctcataatcgcccacgggctta

SEQ ID NO: 59850 - DNA, 120 bp, Homo sapiens
  misc_feature: 1353 for SV(W|O) and mtDNA
gtttttggtaaacaggcggggtaagatttgccgagttccttttactttttttaacctttccttatgagcatgcctgtgttgggttgacagtgagggtaataatgacttgttggttgattg

SEQ ID NO: 59851 - DNA, 120 bp, Homo sapiens
  misc_feature: 1353 for SV(W|O) and mtDNA
gttaaagccactttcgtagtctattttgtgtcaactggagttttttacaactcaggtgagttttagctttattggggagggggtgatctaaaacactctttacgccggcttctattgact

SEQ ID NO: 59852 - DNA, 120 bp, Homo sapiens
  misc_feature: 1353 for SV(W|O) and mtDNA
gtatccgacatctggttcctacttcagggtcataaagcctaaatagcccacacgttccccttaaataagacatcacgatggatcacaggtctatcaccctattaaccactcacgggagct

SEQ ID NO: 59853 - DNA, 120 bp, Homo sapiens
  misc_feature: 1353 for SV(W|O) and mtDNA
ggtggcacggagaattttggattctcagggatgggttcgattctcatagtcctagaaataagggggtttaagctcctattatttactctatcaaagtaactcttttatcagacatatttc

SEQ ID NO: 59854 - DNA, 120 bp, Homo sapiens
  misc_feature: 1353 for SV(W|O) and mtDNA
ctattcttcatagccgaatacacaaacattattataataaacaccctcaccactacaatcttcctaggaacaacatatgacgcactctcccctgaactctacacaacatattttgtcacc

SEQ ID NO: 59855 - DNA, 120 bp, Homo sapiens
  misc_feature: 1353 for SV(W|O) and mtDNA
ggctggcacgaaattgaccaaccctggggttagtatagcttagttaaactttcgtttattgctaaaggttaatcactgctgtttcccgtgggggtgtggctaggctaagcgttttgagct

SEQ ID NO: 59856 - DNA, 120 bp, Homo sapiens
  misc_feature: 1353 for SV(W|O) and mtDNA
aggcgtaggtagaagtagaggttaaggagggtgatggtggctatgatggtggggatgatgaggctattgttttttgtgaattcttcgataatggcccatttgggcaaaaagccggttagc

SEQ ID NO: 59857 - DNA, 120 bp, Homo sapiens
  misc_feature: 1353 for SV(W|O) and mtDNA
ctgtatccgacatctggttcctacttcagggtcataaagcctaaatagcccacacgttccccttaaataagacatcacgatggatcacaggtctatcaccctattaaccactcacgggag

SEQ ID NO: 59858 - DNA, 120 bp, Homo sapiens
  misc_feature: 1353 for SV(W|O) and mtDNA
ccctgctaagggagggtagactgttcaacctgttcctgctccggcctccactatagcagatgcgagcaggagtaggagagagggaggtaagagtcagaagcttatgttgtttatgcgggg

SEQ ID NO: 59859 - DNA, 120 bp, Homo sapiens
  misc_feature: 1353 for SV(W|O) and mtDNA
cattgttgggtggtgattagtcggttgttgatgagatatttggaggtggggatcaatagagggggaaatagaatgatcagtactgcggcgggtaggcctaggattgtgggggcaatgaat

SEQ ID NO: 59860 - DNA, 120 bp, Homo sapiens
  misc_feature: 1353 for SV(W|O) and mtDNA
aatcgctcattgcatactcttcaatcagccacatagccctcgtagtaacagccattctcatccaaaccccctgaagcttcaccggcgcagtcattctcataatcgcccacgggcttacat

SEQ ID NO: 59861 - DNA, 120 bp, Homo sapiens
  misc_feature: 1353 for SV(W|O) and mtDNA
atgatttatcctacactccaactcatgagacccacaacaaatagcccttctaaacgctaatccaagcctcaccccactactaggcctcctcctagcagcagcaggcaaatcagcccaatt

SEQ ID NO: 59862 - DNA, 120 bp, Homo sapiens
  misc_feature: 1353 for SV(W|O) and mtDNA
actgaactcctcatacccaattggaccaatctatcaccctatagaagaactaatgttagtataagtaacatgaaaacattctcctccgcataagcctgcgtcagattaaaacactgaact

SEQ ID NO: 59863 - DNA, 120 bp, Homo sapiens
  misc_feature: 1353 for SV(W|O) and mtDNA
aagtagaggttaaggagggtgatggtggctatgatggtggggatgatgaggctattgttttttgtgaattcttcgataatggcccatttgggcaaaaagccggttagcgggggcaggcct

SEQ ID NO: 59864 - DNA, 120 bp, Homo sapiens
  misc_feature: 1353 for SV(W|O) and mtDNA
agaggtgatgtttttggtaaacaggcggggtaagatttgccgagttccttttactttttttaacctttccttatgagcatgcctgtgttgggttgacagtgagggtaataatgacttgtt

SEQ ID NO: 59865 - DNA, 120 bp, Homo sapiens
  misc_feature: 1353 for SV(W|O) and mtDNA
actatactactaacagaccgcaacctcaacaccaccttcttcgaccccgccggaggaggagaccccattctataccaacacctattctgatttttcggtcaccctgaagtttatattctt

SEQ ID NO: 59866 - DNA, 120 bp, Homo sapiens
  misc_feature: 1352 for SV(W|O) and mtDNA
tttgcggtttcgatgatgtggtctttggagtagaaacctgtgaggaaaggtattcctgctaatgctaggctgccaatggtgagggaggttgaagtgagaggtatggttttgagtagtcct

SEQ ID NO: 59867 - DNA, 120 bp, Homo sapiens
  misc_feature: 1352 for SV(W|O) and mtDNA
ctcggtaaataaggggtcgtaagcctctgttgtcagattcacaatctgatgttttggttaaactatatttacaagaggaaaacccggtaatgatgtcggggttgagggataggaggagaa

SEQ ID NO: 59868 - DNA, 120 bp, Homo sapiens
  misc_feature: 1352 for SV(W|O) and mtDNA
ttccctgctaagggagggtagactgttcaacctgttcctgctccggcctccactatagcagatgcgagcaggagtaggagagagggaggtaagagtcagaagcttatgttgtttatgcgg

SEQ ID NO: 59869 - DNA, 120 bp, Homo sapiens
  misc_feature: 1352 for SV(W|O) and mtDNA
aaataaaagtaataaccatgcacactactataaccaccctaaccctgacttccctaattccccccatccttaccaccctcgttaaccctaacaaaaaaaactcatacccccattatgtaa

SEQ ID NO: 59870 - DNA, 120 bp, Homo sapiens
  misc_feature: 1352 for SV(W|O) and mtDNA
aagtcaccctagccatcattctactatcaacattactaataagtggctcctttaacctctccacccttatcacaacacaagaacacctctgattactcctgccatcatgacccttggcca

SEQ ID NO: 59871 - DNA, 120 bp, Homo sapiens
  misc_feature: 1352 for SV(W|O) and mtDNA
tgatggcagcttctgtggaacgagggtttatttttttggttagaactggaataaaagctagcatgtttatttctaggcctactcaggtaaaaaatcagtgcgagcttagcgctgtgatga

SEQ ID NO: 59872 - DNA, 120 bp, Homo sapiens
  misc_feature: 1352 for SV(W|O) and mtDNA
ctagaaataagggggtttaagctcctattatttactctatcaaagtaactcttttatcagacatatttcttaggtttgagggggaatgctggagattgtaatgggtatggagacatatca

SEQ ID NO: 59873 - DNA, 120 bp, Homo sapiens
  misc_feature: 1352 for SV(W|O) and mtDNA
ccaggcgtttaatggggtttagtagggtagggttattttcgttaatgttagtaagggtggggaagcgaggttgacctgttagggtgagaagaattattcgagtgctataggcgcttgtca

SEQ ID NO: 59874 - DNA, 120 bp, Homo sapiens
  misc_feature: 1352 for SV(W|O) and mtDNA
tgaagtaggccttatttctcttgtcctttcgtacagggaggaatttgaagtagatagaaaccgacctggattactccggtctgaactcagatcacgtaggactttaatcgttgaacaaac

SEQ ID NO: 59875 - DNA, 120 bp, Homo sapiens
  misc_feature: 1352 for SV(W|O) and mtDNA
caaccctggggttagtatagcttagttaaactttcgtttattgctaaaggttaatcactgctgtttcccgtgggggtgtggctaggctaagcgttttgagctgcattgctgcgtgcttga

SEQ ID NO: 59876 - DNA, 120 bp, Homo sapiens
  misc_feature: 1352 for SV(W|O) and mtDNA
taggacgatgggcatgaaactgtggtttgctccacagatttcagagcattgaccgtagtatacccccggtcgtgtagcggtgaaagtggtttggtttagacgtccgggaattgcatctgt

SEQ ID NO: 59877 - DNA, 120 bp, Homo sapiens
  misc_feature: 1352 for SV(W|O) and mtDNA
agtagggtagggttattttcgttaatgttagtaagggtggggaagcgaggttgacctgttagggtgagaagaattattcgagtgctataggcgcttgtcagggaggtagcgatgagagta

SEQ ID NO: 59878 - DNA, 120 bp, Homo sapiens
  misc_feature: 1352 for SV(W|O) and mtDNA
tactaagttgagatgatatcatttacgggggaaggcgctttgtgaagtaggccttatttctcttgtcctttcgtacagggaggaatttgaagtagatagaaaccgacctggattactccg

SEQ ID NO: 59879 - DNA, 120 bp, Homo sapiens
  misc_feature: 1352 for SV(W|O) and mtDNA
aactgaactcctcatacccaattggaccaatctatcaccctatagaagaactaatgttagtataagtaacatgaaaacattctcctccgcataagcctgcgtcagattaaaacactgaac

SEQ ID NO: 59880 - DNA, 120 bp, Homo sapiens
  misc_feature: 1352 for SV(W|O) and mtDNA
gtgaagagttttatggcgtcagcgaagggttgtagtagcccgtaggggcctacaacgttggggcctttgcgtagttgtatatagcctagaatttttcgttcggtaagcattaggaatgcc

SEQ ID NO: 59881 - DNA, 120 bp, Homo sapiens
  misc_feature: 1352 for SV(W|O) and mtDNA
ggttattttcgttaatgttagtaagggtggggaagcgaggttgacctgttagggtgagaagaattattcgagtgctataggcgcttgtcagggaggtagcgatgagagtaatagataggg

SEQ ID NO: 59882 - DNA, 120 bp, Homo sapiens
  misc_feature: 1352 for SV(W|O) and mtDNA
ggtaccctaaccgtgcaaaggtagcataatcacttgttccttaaatagggacctgtatgaatggctccacgagggttcagctgtctcttacttttaaccagtgaaattgacctgcccgtg

SEQ ID NO: 59883 - DNA, 120 bp, Homo sapiens
  misc_feature: 1352 for SV(W|O) and mtDNA
ggaaatagaaaccgtctgaactatcctgcccgccatcatcctagtcctcatcgccctcccatccctacgcatcctttacataacagacgaggtcaacgatccctcccttaccatcaaatc

SEQ ID NO: 59884 - DNA, 120 bp, Homo sapiens
  misc_feature: 1352 for SV(W|O) and mtDNA
gctggagccggagcaccctatgtcgcagtatctgtctttgattcctgcctcatcccattatttatcgcacctacgttcaatattacaggcgaacatacttactaaagtgtgttaattaat

SEQ ID NO: 59885 - DNA, 120 bp, Homo sapiens
  misc_feature: 1352 for SV(W|O) and mtDNA
gccgaatacacaaacattattataataaacaccctcaccactacaatcttcctaggaacaacatatgacgcactctcccctgaactctacacaacatattttgtcaccaagaccctactt

SEQ ID NO: 59886 - DNA, 120 bp, Homo sapiens
  misc_feature: 1352 for SV(W|O) and mtDNA
gacgaagaggggcgtttggtattgggttatggcagggggttttatattgataattgttgtgatgaaattgatggcccctaagatagaggagacacctgctaggtgtaaggagaagatggt

SEQ ID NO: 59887 - DNA, 120 bp, Homo sapiens
  misc_feature: 1352 for SV(W|O) and mtDNA
agtgaaatcacatggctaggccggaggtcattaggagggctgagagggcccctgttaggggtcatgggctgggttttactatatgataggcatgtgattggtgggtcattatgtgttgtc

SEQ ID NO: 59888 - DNA, 120 bp, Homo sapiens
  misc_feature: 1352 for SV(W|O) and mtDNA
ataaaattaattaaccactcattcatcgacctccccaccccatccaacatctccacatgatgaaacttcggctcactccttggcgcctgcctgattctccaaatcaccacaggactattc

SEQ ID NO: 59889 - DNA, 120 bp, Homo sapiens
  misc_feature: 1352 for SV(W|O) and mtDNA
gaagaggggcgtttggtattgggttatggcagggggttttatattgataattgttgtgatgaaattgatggcccctaagatagaggagacacctgctaggtgtaaggagaagatggttag

SEQ ID NO: 59890 - DNA, 120 bp, Homo sapiens
  misc_feature: 1352 for SV(W|O) and mtDNA
cttgtcctttcgtacagggaggaatttgaagtagatagaaaccgacctggattactccggtctgaactcagatcacgtaggactttaatcgttgaacaaacgaacctttaatagcggctg

SEQ ID NO: 59891 - DNA, 120 bp, Homo sapiens
  misc_feature: 1352 for SV(W|O) and mtDNA
aatcaattggccaccaatggtactgaacctacgagtacaccgactacggcggactaatcttcaactcctacatacttcccccattattcctagaaccaggcgacctgcgactccttgacg

SEQ ID NO: 59892 - DNA, 120 bp, Homo sapiens
  misc_feature: 1352 for SV(W|O) and mtDNA
agtccgccgtagtcggtgtactcgtaggttcagtaccattggtggccaattgatttgatggtaagggagggatcgttgacctcgtctgttatgtaaaggatgcgtagggatgggagggcg

SEQ ID NO: 59893 - DNA, 120 bp, Homo sapiens
  misc_feature: 1352 for SV(W|O) and mtDNA
attttgtgtaagggcgcagactgctgcgaacagagtggtgatagcgcctaagcatagtgttagagtttggattagtgggctattttctgctagggggtggaagcggatgagtaagaagat

SEQ ID NO: 59894 - DNA, 120 bp, Homo sapiens
  misc_feature: 1352 for SV(W|O) and mtDNA
attagttagttttgttgtgagtgttaggaaaagggcatacaggactaggaagcagataaggaaaatgattatgagggcgtgatcatgaaaggtgataagctcttctatgataggggaagt

SEQ ID NO: 59895 - DNA, 120 bp, Homo sapiens
  misc_feature: 1352 for SV(W|O) and mtDNA
aggcaaccagccagaacgcctgaacgcaggcacatacttcctattctacaccctagtaggctcccttcccctactcatcgcactaatttacactcacaacaccctaggctcactaaacat

SEQ ID NO: 59896 - DNA, 120 bp, Homo sapiens
  misc_feature: 1352 for SV(W|O) and mtDNA
agccgaatacacaaacattattataataaacaccctcaccactacaatcttcctaggaacaacatatgacgcactctcccctgaactctacacaacatattttgtcaccaagaccctact

SEQ ID NO: 59897 - DNA, 120 bp, Homo sapiens
  misc_feature: 1352 for SV(W|O) and mtDNA
aagtgaaatcacatggctaggccggaggtcattaggagggctgagagggcccctgttaggggtcatgggctgggttttactatatgataggcatgtgattggtgggtcattatgtgttgt

SEQ ID NO: 59898 - DNA, 120 bp, Homo sapiens
  misc_feature: 1351 for SV(W|O) and mtDNA
tgcggttgcttgcgtgaggaaatacttgatggcagcttctgtggaacgagggtttatttttttggttagaactggaataaaagctagcatgtttatttctaggcctactcaggtaaaaaa

SEQ ID NO: 59899 - DNA, 120 bp, Homo sapiens
  misc_feature: 1351 for SV(W|O) and mtDNA
tttcgctctaagattaaaaatgccctagcccacttcttaccacaaggcacacctacaccccttatccccatactagttattatcgaaaccatcagcctactcattcaaccaatagccctg

SEQ ID NO: 59900 - DNA, 120 bp, Homo sapiens
  misc_feature: 1351 for SV(W|O) and mtDNA
ttgtagggctcatggtaggggtaaaaggagggcaatttctagatcaaataataagaaggtaatagctactaagaagaattttatggagaaagggacgcgggcgggggatatagggtcgaa

SEQ ID NO: 59901 - DNA, 120 bp, Homo sapiens
  misc_feature: 1351 for SV(W|O) and mtDNA
ctttcttcttcccactcatcctaaccctactcctaatcacataacctattcccccgagcaatctcaattacaatatatacaccaacaaacaatgttcaaccagtaactactactaatcaa

SEQ ID NO: 59902 - DNA, 120 bp, Homo sapiens
  misc_feature: 1351 for SV(W|O) and mtDNA
cttaaaactttacagtcagaggttcaattcctcttcttaacaacatacccatggccaacctcctactcctcattgtacccattctaatcgcaatggcattcctaatgcttaccgaacgaa

SEQ ID NO: 59903 - DNA, 120 bp, Homo sapiens
  misc_feature: 1351 for SV(W|O) and mtDNA
ttcctagttttattgctatagccattatgattattaatgatgagtactgattggtagtattggttatggttcattgtccggagagtatattgttgaagaggatagctattagaaggatta

SEQ ID NO: 59904 - DNA, 120 bp, Homo sapiens
  misc_feature: 1351 for SV(W|O) and mtDNA
tcctcgccttagcatgatttatcctacactccaactcatgagacccacaacaaatagcccttctaaacgctaatccaagcctcaccccactactaggcctcctcctagcagcagcaggca

SEQ ID NO: 59905 - DNA, 120 bp, Homo sapiens
  misc_feature: 1351 for SV(W|O) and mtDNA
tgatgtttttggtaaacaggcggggtaagatttgccgagttccttttactttttttaacctttccttatgagcatgcctgtgttgggttgacagtgagggtaataatgacttgttggttg

SEQ ID NO: 59906 - DNA, 120 bp, Homo sapiens
  misc_feature: 1351 for SV(W|O) and mtDNA
gattatggatgcggttgcttgcgtgaggaaatacttgatggcagcttctgtggaacgagggtttatttttttggttagaactggaataaaagctagcatgtttatttctaggcctactca

SEQ ID NO: 59907 - DNA, 120 bp, Homo sapiens
  misc_feature: 1351 for SV(W|O) and mtDNA
tgaggaaaggtattcctgctaatgctaggctgccaatggtgagggaggttgaagtgagaggtatggttttgagtagtcctcctatttttcgaatatcttgttcattgttaaggttgtgga

SEQ ID NO: 59908 - DNA, 120 bp, Homo sapiens
  misc_feature: 1351 for SV(W|O) and mtDNA
tgaaagtggtttggtttagacgtccgggaattgcatctgtttttaagcctaatgtggggacagctcatgagtgcaagacgtcttgtgatgtaattattatacgaatgggggcttcaatcg

SEQ ID NO: 59909 - DNA, 120 bp, Homo sapiens
  misc_feature: 1351 for SV(W|O) and mtDNA
tctcggtaaataaggggtcgtaagcctctgttgtcagattcacaatctgatgttttggttaaactatatttacaagaggaaaacccggtaatgatgtcggggttgagggataggaggaga

SEQ ID NO: 59910 - DNA, 120 bp, Homo sapiens
  misc_feature: 1351 for SV(W|O) and mtDNA
agggtagggttattttcgttaatgttagtaagggtggggaagcgaggttgacctgttagggtgagaagaattattcgagtgctataggcgcttgtcagggaggtagcgatgagagtaata

SEQ ID NO: 59911 - DNA, 120 bp, Homo sapiens
  misc_feature: 1351 for SV(W|O) and mtDNA
tacacaaacattattataataaacaccctcaccactacaatcttcctaggaacaacatatgacgcactctcccctgaactctacacaacatattttgtcaccaagaccctacttctaacc

SEQ ID NO: 59912 - DNA, 120 bp, Homo sapiens
  misc_feature: 1351 for SV(W|O) and mtDNA
cctatcatagaagagcttatcacctttcatgatcacgccctcataatcattttccttatctgcttcctagtcctgtatgcccttttcctaacactcacaacaaaactaactaatactaac

SEQ ID NO: 59913 - DNA, 120 bp, Homo sapiens
  misc_feature: 1351 for SV(W|O) and mtDNA
ggtttagacgtccgggaattgcatctgtttttaagcctaatgtggggacagctcatgagtgcaagacgtcttgtgatgtaattattatacgaatgggggcttcaatcgggagtactactc

SEQ ID NO: 59914 - DNA, 120 bp, Homo sapiens
  misc_feature: 1351 for SV(W|O) and mtDNA
gggtagggttattttcgttaatgttagtaagggtggggaagcgaggttgacctgttagggtgagaagaattattcgagtgctataggcgcttgtcagggaggtagcgatgagagtaatag

SEQ ID NO: 59915 - DNA, 120 bp, Homo sapiens
  misc_feature: 1351 for SV(W|O) and mtDNA
atgcacactactataaccaccctaaccctgacttccctaattccccccatccttaccaccctcgttaaccctaacaaaaaaaactcatacccccattatgtaaaatccattgtcgcatcc

SEQ ID NO: 59916 - DNA, 120 bp, Homo sapiens
  misc_feature: 1351 for SV(W|O) and mtDNA
ggagagctcccgtgagtggttaatagggtgatagacctgtgatccatcgtgatgtcttatttaaggggaacgtgtgggctatttaggctttatgaccctgaagtaggaaccagatgtcgg

SEQ ID NO: 59917 - DNA, 120 bp, Homo sapiens
  misc_feature: 1351 for SV(W|O) and mtDNA
gcatactcctcaattacccacataggatgaataatagcagttctaccgtacaaccctaacataaccattcttaatttaactatttatattatcctaactactaccgcattcctactactc

SEQ ID NO: 59918 - DNA, 120 bp, Homo sapiens
  misc_feature: 1351 for SV(W|O) and mtDNA
cggtaaataaggggtcgtaagcctctgttgtcagattcacaatctgatgttttggttaaactatatttacaagaggaaaacccggtaatgatgtcggggttgagggataggaggagaatg

SEQ ID NO: 59919 - DNA, 120 bp, Homo sapiens
  misc_feature: 1351 for SV(W|O) and mtDNA
catcttctccttacacctagcaggtgtctcctctatcttaggggccatcaatttcatcacaacaattatcaatataaaaccccctgccataacccaataccaaacgcccctcttcgtctg

SEQ ID NO: 59920 - DNA, 120 bp, Homo sapiens
  misc_feature: 1351 for SV(W|O) and mtDNA
caggccggatgtcagaggggtgccttgggtaacctctgggactcagaagtgaaagggggctattcctagttttattgctatagccattatgattattaatgatgagtactgattggtagt

SEQ ID NO: 59921 - DNA, 120 bp, Homo sapiens
  misc_feature: 1351 for SV(W|O) and mtDNA
caactaagcactctactctcagtttactgctaaatccaccttcgacccttaagtttcataagggctatcgtagttttctggggtagaaaatgtagcccatttcttgccacctcatgggct

SEQ ID NO: 59922 - DNA, 120 bp, Homo sapiens
  misc_feature: 1350 for SV(W|O) and mtDNA
tttttggtaaacaggcggggtaagatttgccgagttccttttactttttttaacctttccttatgagcatgcctgtgttgggttgacagtgagggtaataatgacttgttggttgattgt

SEQ ID NO: 59923 - DNA, 120 bp, Homo sapiens
  misc_feature: 1350 for SV(W|O) and mtDNA
aaaactttacagtcagaggttcaattcctcttcttaacaacatacccatggccaacctcctactcctcattgtacccattctaatcgcaatggcattcctaatgcttaccgaacgaaaaa

SEQ ID NO: 59924 - DNA, 120 bp, Homo sapiens
  misc_feature: 1350 for SV(W|O) and mtDNA
tttgtagggctcatggtaggggtaaaaggagggcaatttctagatcaaataataagaaggtaatagctactaagaagaattttatggagaaagggacgcgggcgggggatatagggtcga

SEQ ID NO: 59925 - DNA, 120 bp, Homo sapiens
  misc_feature: 1350 for SV(W|O) and mtDNA
ttcaagctcaacacccactacctaaaaaatcccaaacatataactgaactcctcatacccaattggaccaatctatcaccctatagaagaactaatgttagtataagtaacatgaaaaca

SEQ ID NO: 59926 - DNA, 120 bp, Homo sapiens
  misc_feature: 1350 for SV(W|O) and mtDNA
aaaatctgttcgcttcattcattgcccccacaatcctaggcctacccgccgcagtactgatcattctatttccccctctattgatccccacctccaaatatctcatcaacaaccgactaa

SEQ ID NO: 59927 - DNA, 120 bp, Homo sapiens
  misc_feature: 1350 for SV(W|O) and mtDNA
ccctatcatagaagagcttatcacctttcatgatcacgccctcataatcattttccttatctgcttcctagtcctgtatgcccttttcctaacactcacaacaaaactaactaatactaa

SEQ ID NO: 59928 - DNA, 120 bp, Homo sapiens
  misc_feature: 1350 for SV(W|O) and mtDNA
ttacttcctctctttcttcttcccactcatcctaaccctactcctaatcacataacctattcccccgagcaatctcaattacaatatatacaccaacaaacaatgttcaaccagtaacta

SEQ ID NO: 59929 - DNA, 120 bp, Homo sapiens
  misc_feature: 1350 for SV(W|O) and mtDNA
gcaagcctcgctaacctcgccttaccccccactattaacctactgggagaactctctgtgctagtaaccacgttctcctgatcaaatatcactctcctacttacaggactcaacatacta

SEQ ID NO: 59930 - DNA, 120 bp, Homo sapiens
  misc_feature: 1350 for SV(W|O) and mtDNA
gaaggattatggatgcggttgcttgcgtgaggaaatacttgatggcagcttctgtggaacgagggtttatttttttggttagaactggaataaaagctagcatgtttatttctaggccta

SEQ ID NO: 59931 - DNA, 120 bp, Homo sapiens
  misc_feature: 1350 for SV(W|O) and mtDNA
taaacgtaagccttctcctcactctctcaatcttatccatcatagcaggcagttgaggtggattaaaccaaacccagctacgcaaaatcttagcatactcctcaattacccacataggat

SEQ ID NO: 59932 - DNA, 120 bp, Homo sapiens
  misc_feature: 1350 for SV(W|O) and mtDNA
gttgtttgtagggctcatggtaggggtaaaaggagggcaatttctagatcaaataataagaaggtaatagctactaagaagaattttatggagaaagggacgcgggcgggggatataggg

SEQ ID NO: 59933 - DNA, 120 bp, Homo sapiens
  misc_feature: 1350 for SV(W|O) and mtDNA
gtgtctcctctatcttaggggccatcaatttcatcacaacaattatcaatataaaaccccctgccataacccaataccaaacgcccctcttcgtctgatccgtcctaatcacagcagtcc

SEQ ID NO: 59934 - DNA, 120 bp, Homo sapiens
  misc_feature: 1350 for SV(W|O) and mtDNA
ggtgaagagttttatggcgtcagcgaagggttgtagtagcccgtaggggcctacaacgttggggcctttgcgtagttgtatatagcctagaatttttcgttcggtaagcattaggaatgc

SEQ ID NO: 59935 - DNA, 120 bp, Homo sapiens
  misc_feature: 1350 for SV(W|O) and mtDNA
gagcctccgtagacctaaccatcttctccttacacctagcaggtgtctcctctatcttaggggccatcaatttcatcacaacaattatcaatataaaaccccctgccataacccaatacc

SEQ ID NO: 59936 - DNA, 120 bp, Homo sapiens
  misc_feature: 1350 for SV(W|O) and mtDNA
gggcttcaatcgggagtactactcgattgtcaacgtcaaggagtcgcaggtcgcctggttctaggaataatgggggaagtatgtaggagttgaagattagtccgccgtagtcggtgtact

SEQ ID NO: 59937 - DNA, 120 bp, Homo sapiens
  misc_feature: 1350 for SV(W|O) and mtDNA
aatctgttcgcttcattcattgcccccacaatcctaggcctacccgccgcagtactgatcattctatttccccctctattgatccccacctccaaatatctcatcaacaaccgactaatc

SEQ ID NO: 59938 - DNA, 120 bp, Homo sapiens
  misc_feature: 1350 for SV(W|O) and mtDNA
cacttatccagtgaaccactatcacgaaaaaaactctacctctctatactaatctccctacaaatctccttaattataacattcacagccacagaactaatcatattttatatcttcttc

SEQ ID NO: 59939 - DNA, 120 bp, Homo sapiens
  misc_feature: 1350 for SV(W|O) and mtDNA
atcaaagtaactcttttatcagacatatttcttaggtttgagggggaatgctggagattgtaatgggtatggagacatatcatataagtaatgctagggtgagtggtaggaagttttttc

SEQ ID NO: 59940 - DNA, 120 bp, Homo sapiens
  misc_feature: 1350 for SV(W|O) and mtDNA
agggttattttcgttaatgttagtaagggtggggaagcgaggttgacctgttagggtgagaagaattattcgagtgctataggcgcttgtcagggaggtagcgatgagagtaatagatag

SEQ ID NO: 59941 - DNA, 120 bp, Homo sapiens
  misc_feature: 1350 for SV(W|O) and mtDNA
cacgctactcctacctatctccccttttatactaataatcttatagaaatttaggttaaatacagaccaagagccttcaaagccctcagtaagttgcaatacttaatttctgtaacagct

SEQ ID NO: 59942 - DNA, 120 bp, Homo sapiens
  misc_feature: 1350 for SV(W|O) and mtDNA
cacgaaattgaccaaccctggggttagtatagcttagttaaactttcgtttattgctaaaggttaatcactgctgtttcccgtgggggtgtggctaggctaagcgttttgagctgcattg

SEQ ID NO: 59943 - DNA, 120 bp, Homo sapiens
  misc_feature: 1349 for SV(W|O) and mtDNA
ttttgtcaccaagaccctacttctaacctccctgttcttatgaattcgaacagcatacccccgattccgctacgaccaactcatacacctcctatgaaaaaacttcctaccactcaccct

SEQ ID NO: 59944 - DNA, 120 bp, Homo sapiens
  misc_feature: 1349 for SV(W|O) and mtDNA
taacaaaccctgttcttgggtgggtgtgggtataatactaagttgagatgatatcatttacgggggaaggcgctttgtgaagtaggccttatttctcttgtcctttcgtacagggaggaa

SEQ ID NO: 59945 - DNA, 120 bp, Homo sapiens
  misc_feature: 1349 for SV(W|O) and mtDNA
tgttcttgggtgggtgtgggtataatactaagttgagatgatatcatttacgggggaaggcgctttgtgaagtaggccttatttctcttgtcctttcgtacagggaggaatttgaagtag

SEQ ID NO: 59946 - DNA, 120 bp, Homo sapiens
  misc_feature: 1349 for SV(W|O) and mtDNA
tcaacattactaataagtggctcctttaacctctccacccttatcacaacacaagaacacctctgattactcctgccatcatgacccttggccataatatgatttatctccacactagca

SEQ ID NO: 59947 - DNA, 120 bp, Homo sapiens
  misc_feature: 1349 for SV(W|O) and mtDNA
tcaaagtaactcttttatcagacatatttcttaggtttgagggggaatgctggagattgtaatgggtatggagacatatcatataagtaatgctagggtgagtggtaggaagttttttca

SEQ ID NO: 59948 - DNA, 120 bp, Homo sapiens
  misc_feature: 1349 for SV(W|O) and mtDNA
aagtaggccttatttctcttgtcctttcgtacagggaggaatttgaagtagatagaaaccgacctggattactccggtctgaactcagatcacgtaggactttaatcgttgaacaaacga

SEQ ID NO: 59949 - DNA, 120 bp, Homo sapiens
  misc_feature: 1349 for SV(W|O) and mtDNA
gcaagaaatgggctacattttctaccccagaaaactacgatagcccttatgaaacttaagggtcgaaggtggatttagcagtaaactgagagtagagtgcttagttgaacagggccctga

SEQ ID NO: 59950 - DNA, 120 bp, Homo sapiens
  misc_feature: 1349 for SV(W|O) and mtDNA
gatgtttttggtaaacaggcggggtaagatttgccgagttccttttactttttttaacctttccttatgagcatgcctgtgttgggttgacagtgagggtaataatgacttgttggttga

SEQ ID NO: 59951 - DNA, 120 bp, Homo sapiens
  misc_feature: 1349 for SV(W|O) and mtDNA
gtctcctctatcttaggggccatcaatttcatcacaacaattatcaatataaaaccccctgccataacccaataccaaacgcccctcttcgtctgatccgtcctaatcacagcagtccta

SEQ ID NO: 59952 - DNA, 120 bp, Homo sapiens
  misc_feature: 1349 for SV(W|O) and mtDNA
ctgttcttgggtgggtgtgggtataatactaagttgagatgatatcatttacgggggaaggcgctttgtgaagtaggccttatttctcttgtcctttcgtacagggaggaatttgaagta

SEQ ID NO: 59953 - DNA, 120 bp, Homo sapiens
  misc_feature: 1349 for SV(W|O) and mtDNA
caaataaaagtaataaccatgcacactactataaccaccctaaccctgacttccctaattccccccatccttaccaccctcgttaaccctaacaaaaaaaactcatacccccattatgta

SEQ ID NO: 59954 - DNA, 120 bp, Homo sapiens
  misc_feature: 1349 for SV(W|O) and mtDNA
tacaccaacaaacaatgttcaaccagtaactactactaatcaacgcccataatcatacaaagcccccgcaccaataggatcctcccgaatcaaccctgacccctctccttcataaattat

SEQ ID NO: 59955 - DNA, 120 bp, Homo sapiens
  misc_feature: 1349 for SV(W|O) and mtDNA
atacaccaacaaacaatgttcaaccagtaactactactaatcaacgcccataatcatacaaagcccccgcaccaataggatcctcccgaatcaaccctgacccctctccttcataaatta

SEQ ID NO: 59956 - DNA, 120 bp, Homo sapiens
  misc_feature: 1349 for SV(W|O) and mtDNA
ggcacggagaattttggattctcagggatgggttcgattctcatagtcctagaaataagggggtttaagctcctattatttactctatcaaagtaactcttttatcagacatatttctta

SEQ ID NO: 59957 - DNA, 120 bp, Homo sapiens
  misc_feature: 1349 for SV(W|O) and mtDNA
gtggtttggtttagacgtccgggaattgcatctgtttttaagcctaatgtggggacagctcatgagtgcaagacgtcttgtgatgtaattattatacgaatgggggcttcaatcgggagt

SEQ ID NO: 59958 - DNA, 120 bp, Homo sapiens
  misc_feature: 1349 for SV(W|O) and mtDNA
ggggcttcaatcgggagtactactcgattgtcaacgtcaaggagtcgcaggtcgcctggttctaggaataatgggggaagtatgtaggagttgaagattagtccgccgtagtcggtgtac

SEQ ID NO: 59959 - DNA, 120 bp, Homo sapiens
  misc_feature: 1349 for SV(W|O) and mtDNA
ggcagcttctgtggaacgagggtttatttttttggttagaactggaataaaagctagcatgtttatttctaggcctactcaggtaaaaaatcagtgcgagcttagcgctgtgatgagtgt

SEQ ID NO: 59960 - DNA, 120 bp, Homo sapiens
  misc_feature: 1349 for SV(W|O) and mtDNA
ccacgctactcctacctatctccccttttatactaataatcttatagaaatttaggttaaatacagaccaagagccttcaaagccctcagtaagttgcaatacttaatttctgtaacagc

SEQ ID NO: 59961 - DNA, 120 bp, Homo sapiens
  misc_feature: 1349 for SV(W|O) and mtDNA
gcagcttctgtggaacgagggtttatttttttggttagaactggaataaaagctagcatgtttatttctaggcctactcaggtaaaaaatcagtgcgagcttagcgctgtgatgagtgtg

SEQ ID NO: 59962 - DNA, 120 bp, Homo sapiens
  misc_feature: 1349 for SV(W|O) and mtDNA
catgcacactactataaccaccctaaccctgacttccctaattccccccatccttaccaccctcgttaaccctaacaaaaaaaactcatacccccattatgtaaaatccattgtcgcatc

SEQ ID NO: 59963 - DNA, 120 bp, Homo sapiens
  misc_feature: 1349 for SV(W|O) and mtDNA
aggctatgtcctcccgtgaggccaaatatcattctgaggggccacagtaattacaaacttactatccgccatcccatacattgggacagacctagttcaatgaatctgaggaggctactc

SEQ ID NO: 59964 - DNA, 120 bp, Homo sapiens
  misc_feature: 1349 for SV(W|O) and mtDNA
gaggggagtcaggggtggagacctaattgggctgatttgcctgctgctgctaggaggaggcctagtagtggggtgaggcttggattagcgtttagaagggctatttgttgtgggtctcat

SEQ ID NO: 59965 - DNA, 120 bp, Homo sapiens
  misc_feature: 1349 for SV(W|O) and mtDNA
catctcagacgctcaggaaatagaaaccgtctgaactatcctgcccgccatcatcctagtcctcatcgccctcccatccctacgcatcctttacataacagacgaggtcaacgatccctc

SEQ ID NO: 59966 - DNA, 120 bp, Homo sapiens
  misc_feature: 1349 for SV(W|O) and mtDNA
gaggaaaggtattcctgctaatgctaggctgccaatggtgagggaggttgaagtgagaggtatggttttgagtagtcctcctatttttcgaatatcttgttcattgttaaggttgtggat

SEQ ID NO: 59967 - DNA, 120 bp, Homo sapiens
  misc_feature: 1349 for SV(W|O) and mtDNA
agcacgcagcaatgcagctcaaaacgcttagcctagccacacccccacgggaaacagcagtgattaacctttagcaataaacgaaagtttaactaagctatactaaccccagggttggtc

SEQ ID NO: 59968 - DNA, 120 bp, Homo sapiens
  misc_feature: 1349 for SV(W|O) and mtDNA
ctgtaaagttttaagttttatgcgattaccgggctctgccatcttaacaaaccctgttcttgggtgggtgtgggtataatactaagttgagatgatatcatttacgggggaaggcgcttt

SEQ ID NO: 59969 - DNA, 120 bp, Homo sapiens
  misc_feature: 1349 for SV(W|O) and mtDNA
ctaactaatactaacatctcagacgctcaggaaatagaaaccgtctgaactatcctgcccgccatcatcctagtcctcatcgccctcccatccctacgcatcctttacataacagacgag

SEQ ID NO: 59970 - DNA, 120 bp, Homo sapiens
  misc_feature: 1349 for SV(W|O) and mtDNA
cctctcagccctcctaatgacctccggcctagccatgtgatttcacttccactccataacgctcctcatactaggcctactaaccaacacactaaccatataccaatgatggcgcgatgt

SEQ ID NO: 59971 - DNA, 120 bp, Homo sapiens
  misc_feature: 1349 for SV(W|O) and mtDNA
agttgagatgatatcatttacgggggaaggcgctttgtgaagtaggccttatttctcttgtcctttcgtacagggaggaatttgaagtagatagaaaccgacctggattactccggtctg

SEQ ID NO: 59972 - DNA, 120 bp, Homo sapiens
  misc_feature: 1349 for SV(W|O) and mtDNA
aaatctgttcgcttcattcattgcccccacaatcctaggcctacccgccgcagtactgatcattctatttccccctctattgatccccacctccaaatatctcatcaacaaccgactaat

SEQ ID NO: 59973 - DNA, 120 bp, Homo sapiens
  misc_feature: 1349 for SV(W|O) and mtDNA
aaatacttgatggcagcttctgtggaacgagggtttatttttttggttagaactggaataaaagctagcatgtttatttctaggcctactcaggtaaaaaatcagtgcgagcttagcgct

SEQ ID NO: 59974 - DNA, 120 bp, Homo sapiens
  misc_feature: 1349 for SV(W|O) and mtDNA
acaatctgatgttttggttaaactatatttacaagaggaaaacccggtaatgatgtcggggttgagggataggaggagaatgggggataggtgtatgaacatgagggtgttttctcgtgt

SEQ ID NO: 59975 - DNA, 120 bp, Homo sapiens
  misc_feature: 1348 for SV(W|O) and mtDNA
ctttcacttctgagtcccagaggttacccaaggcacccctctgacatccggcctgcttcttctcacatgacaaaaactagcccccatctcaatcatataccaaatctctccctcactaaa

SEQ ID NO: 59976 - DNA, 120 bp, Homo sapiens
  misc_feature: 1348 for SV(W|O) and mtDNA
gtagggtagggttattttcgttaatgttagtaagggtggggaagcgaggttgacctgttagggtgagaagaattattcgagtgctataggcgcttgtcagggaggtagcgatgagagtaa

SEQ ID NO: 59977 - DNA, 120 bp, Homo sapiens
  misc_feature: 1348 for SV(W|O) and mtDNA
tctcagccctcctaatgacctccggcctagccatgtgatttcacttccactccataacgctcctcatactaggcctactaaccaacacactaaccatataccaatgatggcgcgatgtaa

SEQ ID NO: 59978 - DNA, 120 bp, Homo sapiens
  misc_feature: 1348 for SV(W|O) and mtDNA
tgttgtggtaaatatgtagagggagtatagggctgtgactagtatgttgagtcctgtaagtaggagagtgatatttgatcaggagaacgtggttactagcacagagagttctcccagtag

SEQ ID NO: 59979 - DNA, 120 bp, Homo sapiens
  misc_feature: 1348 for SV(W|O) and mtDNA
aaaaatcagaataggtgttggtatagaatggggtctcctcctccggcggggtcgaagaaggtggtgttgaggttgcggtctgttagtagtatagtgatgccagcagctaggactgggaga

SEQ ID NO: 59980 - DNA, 120 bp, Homo sapiens
  misc_feature: 1348 for SV(W|O) and mtDNA
tcaatagtacttgccgcagtactcttaaaactaggcggctatggtataatacgcctcacactcattctcaaccccctgacaaaacacatagcctaccccttccttgtactatccctatga

SEQ ID NO: 59981 - DNA, 120 bp, Homo sapiens
  misc_feature: 1348 for SV(W|O) and mtDNA
tatgaagtcaccctagccatcattctactatcaacattactaataagtggctcctttaacctctccacccttatcacaacacaagaacacctctgattactcctgccatcatgacccttg

SEQ ID NO: 59982 - DNA, 120 bp, Homo sapiens
  misc_feature: 1348 for SV(W|O) and mtDNA
agaggttaaggagggtgatggtggctatgatggtggggatgatgaggctattgttttttgtgaattcttcgataatggcccatttgggcaaaaagccggttagcgggggcaggcctccta

SEQ ID NO: 59983 - DNA, 120 bp, Homo sapiens
  misc_feature: 1348 for SV(W|O) and mtDNA
tagccacctctagcctagccgtttactcaatcctctgatcagggtgagcatcaaactcaaactacgccctgatcggcgcactgcgagcagtagcccaaacaatctcatatgaagtcaccc

SEQ ID NO: 59984 - DNA, 120 bp, Homo sapiens
  misc_feature: 1348 for SV(W|O) and mtDNA
gtgttgtggtaaatatgtagagggagtatagggctgtgactagtatgttgagtcctgtaagtaggagagtgatatttgatcaggagaacgtggttactagcacagagagttctcccagta

SEQ ID NO: 59985 - DNA, 120 bp, Homo sapiens
  misc_feature: 1348 for SV(W|O) and mtDNA
accacattaacaacataaaaccctcattcacacgagaaaacaccctcatgttcatacacctatcccccattctcctcctatccctcaaccccgacatcattaccgggttttcctcttgta

SEQ ID NO: 59986 - DNA, 120 bp, Homo sapiens
  misc_feature: 1348 for SV(W|O) and mtDNA
ggaattgaacctctgactgtaaagttttaagttttatgcgattaccgggctctgccatcttaacaaaccctgttcttgggtgggtgtgggtataatactaagttgagatgatatcattta

SEQ ID NO: 59987 - DNA, 120 bp, Homo sapiens
  misc_feature: 1348 for SV(W|O) and mtDNA
gtgagggtgtttattataataatgtttgtgtattcggctatgaagaatagggcgaaggggcctgcggcgtattcgatgttgaagcctgagactagttcggactccccttcggcaaggtcg

SEQ ID NO: 59988 - DNA, 120 bp, Homo sapiens
  misc_feature: 1348 for SV(W|O) and mtDNA
cacactactataaccaccctaaccctgacttccctaattccccccatccttaccaccctcgttaaccctaacaaaaaaaactcatacccccattatgtaaaatccattgtcgcatccacc

SEQ ID NO: 59989 - DNA, 120 bp, Homo sapiens
  misc_feature: 1348 for SV(W|O) and mtDNA
aggagccacttattagtaatgttgatagtagaatgatggctagggtgacttcatatgagattgtttgggctactgctcgcagtgcgccgatcagggcgtagtttgagtttgatgctcacc

SEQ ID NO: 59990 - DNA, 120 bp, Homo sapiens
  misc_feature: 1348 for SV(W|O) and mtDNA
cttactcatccgcttccaccccctagcagaaaatagcccactaatccaaactctaacactatgcttaggcgctatcaccactctgttcgcagcagtctgcgcccttacacaaaatgacat

SEQ ID NO: 59991 - DNA, 120 bp, Homo sapiens
  misc_feature: 1348 for SV(W|O) and mtDNA
cgcaagtacccacgtaaagacgttaggtcaaggtgtagcccatgaggtggcaagaaatgggctacattttctaccccagaaaactacgatagcccttatgaaacttaagggtcgaaggtg

SEQ ID NO: 59992 - DNA, 120 bp, Homo sapiens
  misc_feature: 1348 for SV(W|O) and mtDNA
caatctgatgttttggttaaactatatttacaagaggaaaacccggtaatgatgtcggggttgagggataggaggagaatgggggataggtgtatgaacatgagggtgttttctcgtgtg

SEQ ID NO: 59993 - DNA, 120 bp, Homo sapiens
  misc_feature: 1348 for SV(W|O) and mtDNA
agcaacagccttcataggctatgtcctcccgtgaggccaaatatcattctgaggggccacagtaattacaaacttactatccgccatcccatacattgggacagacctagttcaatgaat

SEQ ID NO: 59994 - DNA, 120 bp, Homo sapiens
  misc_feature: 1348 for SV(W|O) and mtDNA
aagttgagatgatatcatttacgggggaaggcgctttgtgaagtaggccttatttctcttgtcctttcgtacagggaggaatttgaagtagatagaaaccgacctggattactccggtct

SEQ ID NO: 59995 - DNA, 120 bp, Homo sapiens
  misc_feature: 1347 for SV(W|O) and mtDNA
ctcgccttagcatgatttatcctacactccaactcatgagacccacaacaaatagcccttctaaacgctaatccaagcctcaccccactactaggcctcctcctagcagcagcaggcaaa

SEQ ID NO: 59996 - DNA, 120 bp, Homo sapiens
  misc_feature: 1347 for SV(W|O) and mtDNA
tttattctagccacctctagcctagccgtttactcaatcctctgatcagggtgagcatcaaactcaaactacgccctgatcggcgcactgcgagcagtagcccaaacaatctcatatgaa

SEQ ID NO: 59997 - DNA, 120 bp, Homo sapiens
  misc_feature: 1347 for SV(W|O) and mtDNA
ttcgcttcattcattgcccccacaatcctaggcctacccgccgcagtactgatcattctatttccccctctattgatccccacctccaaatatctcatcaacaaccgactaatcaccacc

SEQ ID NO: 59998 - DNA, 120 bp, Homo sapiens
  misc_feature: 1347 for SV(W|O) and mtDNA
ttcatcctcgccttagcatgatttatcctacactccaactcatgagacccacaacaaatagcccttctaaacgctaatccaagcctcaccccactactaggcctcctcctagcagcagca

SEQ ID NO: 59999 - DNA, 120 bp, Homo sapiens
  misc_feature: 1347 for SV(W|O) and mtDNA
gaggcaaccagccagaacgcctgaacgcaggcacatacttcctattctacaccctagtaggctcccttcccctactcatcgcactaatttacactcacaacaccctaggctcactaaaca

SEQ ID NO: 60000 - DNA, 120 bp, Homo sapiens
  misc_feature: 1347 for SV(W|O) and mtDNA
tgcgtgaggaaatacttgatggcagcttctgtggaacgagggtttatttttttggttagaactggaataaaagctagcatgtttatttctaggcctactcaggtaaaaaatcagtgcgag

SEQ ID NO: 60001 - DNA, 120 bp, Homo sapiens
  misc_feature: 1347 for SV(W|O) and mtDNA
ggttgcttgcgtgaggaaatacttgatggcagcttctgtggaacgagggtttatttttttggttagaactggaataaaagctagcatgtttatttctaggcctactcaggtaaaaaatca

SEQ ID NO: 60002 - DNA, 120 bp, Homo sapiens
  misc_feature: 1347 for SV(W|O) and mtDNA
tgaggagtaggaggttggccatgggtatgttgttaagaagaggaattgaacctctgactgtaaagttttaagttttatgcgattaccgggctctgccatcttaacaaaccctgttcttgg

SEQ ID NO: 60003 - DNA, 120 bp, Homo sapiens
  misc_feature: 1347 for SV(W|O) and mtDNA
tgacacatgtttaacggccgcggtaccctaaccgtgcaaaggtagcataatcacttgttccttaaatagggacctgtatgaatggctccacgagggttcagctgtctcttacttttaacc

SEQ ID NO: 60004 - DNA, 120 bp, Homo sapiens
  misc_feature: 1347 for SV(W|O) and mtDNA
tccctgctaagggagggtagactgttcaacctgttcctgctccggcctccactatagcagatgcgagcaggagtaggagagagggaggtaagagtcagaagcttatgttgtttatgcggg

SEQ ID NO: 60005 - DNA, 120 bp, Homo sapiens
  misc_feature: 1347 for SV(W|O) and mtDNA
gtaccctaaccgtgcaaaggtagcataatcacttgttccttaaatagggacctgtatgaatggctccacgagggttcagctgtctcttacttttaaccagtgaaattgacctgcccgtga

SEQ ID NO: 60006 - DNA, 120 bp, Homo sapiens
  misc_feature: 1347 for SV(W|O) and mtDNA
gggggtgctatagggtaaatacgggccctatttcaaagatttttaggggaattaattctaggacgatgggcatgaaactgtggtttgctccacagatttcagagcattgaccgtagtata

SEQ ID NO: 60007 - DNA, 120 bp, Homo sapiens
  misc_feature: 1347 for SV(W|O) and mtDNA
ggcggggtaagatttgccgagttccttttactttttttaacctttccttatgagcatgcctgtgttgggttgacagtgagggtaataatgacttgttggttgattgtagatattgggctg

SEQ ID NO: 60008 - DNA, 120 bp, Homo sapiens
  misc_feature: 1347 for SV(W|O) and mtDNA
gcgcaagtacccacgtaaagacgttaggtcaaggtgtagcccatgaggtggcaagaaatgggctacattttctaccccagaaaactacgatagcccttatgaaacttaagggtcgaaggt

SEQ ID NO: 60009 - DNA, 120 bp, Homo sapiens
  misc_feature: 1347 for SV(W|O) and mtDNA
gccaggcgtttaatggggtttagtagggtagggttattttcgttaatgttagtaagggtggggaagcgaggttgacctgttagggtgagaagaattattcgagtgctataggcgcttgtc

SEQ ID NO: 60010 - DNA, 120 bp, Homo sapiens
  misc_feature: 1347 for SV(W|O) and mtDNA
aggcgctttgtgaagtaggccttatttctcttgtcctttcgtacagggaggaatttgaagtagatagaaaccgacctggattactccggtctgaactcagatcacgtaggactttaatcg

SEQ ID NO: 60011 - DNA, 120 bp, Homo sapiens
  misc_feature: 1347 for SV(W|O) and mtDNA
agtaggaggttggccatgggtatgttgttaagaagaggaattgaacctctgactgtaaagttttaagttttatgcgattaccgggctctgccatcttaacaaaccctgttcttgggtggg

SEQ ID NO: 60012 - DNA, 120 bp, Homo sapiens
  misc_feature: 1346 for SV(W|O) and mtDNA
cagccacatagccctcgtagtaacagccattctcatccaaaccccctgaagcttcaccggcgcagtcattctcataatcgcccacgggcttacatcctcattactattctgcctagcaaa

SEQ ID NO: 60013 - DNA, 120 bp, Homo sapiens
  misc_feature: 1346 for SV(W|O) and mtDNA
gctgctgctaggaggaggcctagtagtggggtgaggcttggattagcgtttagaagggctatttgttgtgggtctcatgagttggagtgtaggataaatcatgctaaggcgaggatgaaa

SEQ ID NO: 60014 - DNA, 120 bp, Homo sapiens
  misc_feature: 1346 for SV(W|O) and mtDNA
tttaatccacctcaactgcctgctatgatggataagattgagagagtgaggagaaggcttacgtttagtgagggagagatttggtatatgattgagatgggggctagtttttgtcatgtg

SEQ ID NO: 60015 - DNA, 120 bp, Homo sapiens
  misc_feature: 1346 for SV(W|O) and mtDNA
ttgcgtgaggaaatacttgatggcagcttctgtggaacgagggtttatttttttggttagaactggaataaaagctagcatgtttatttctaggcctactcaggtaaaaaatcagtgcga

SEQ ID NO: 60016 - DNA, 120 bp, Homo sapiens
  misc_feature: 1346 for SV(W|O) and mtDNA
tcaggaaatagaaaccgtctgaactatcctgcccgccatcatcctagtcctcatcgccctcccatccctacgcatcctttacataacagacgaggtcaacgatccctcccttaccatcaa

SEQ ID NO: 60017 - DNA, 120 bp, Homo sapiens
  misc_feature: 1346 for SV(W|O) and mtDNA
tgtaaagttttaagttttatgcgattaccgggctctgccatcttaacaaaccctgttcttgggtgggtgtgggtataatactaagttgagatgatatcatttacgggggaaggcgctttg

SEQ ID NO: 60018 - DNA, 120 bp, Homo sapiens
  misc_feature: 1346 for SV(W|O) and mtDNA
tgaactcctcatacccaattggaccaatctatcaccctatagaagaactaatgttagtataagtaacatgaaaacattctcctccgcataagcctgcgtcagattaaaacactgaactga

SEQ ID NO: 60019 - DNA, 120 bp, Homo sapiens
  misc_feature: 1346 for SV(W|O) and mtDNA
tctcagacgctcaggaaatagaaaccgtctgaactatcctgcccgccatcatcctagtcctcatcgccctcccatccctacgcatcctttacataacagacgaggtcaacgatccctccc

SEQ ID NO: 60020 - DNA, 120 bp, Homo sapiens
  misc_feature: 1346 for SV(W|O) and mtDNA
tactcctacctatctccccttttatactaataatcttatagaaatttaggttaaatacagaccaagagccttcaaagccctcagtaagttgcaatacttaatttctgtaacagctaagga

SEQ ID NO: 60021 - DNA, 120 bp, Homo sapiens
  misc_feature: 1346 for SV(W|O) and mtDNA
tagttgaacagggccctgaagcgcgtacacaccgcccgtcaccctcctcaagtatacttcaaaggacatttaactaaaacccctacgcatttatatagaggagacaagtcgtaacatggt

SEQ ID NO: 60022 - DNA, 120 bp, Homo sapiens
  misc_feature: 1346 for SV(W|O) and mtDNA
taggaggttggccatgggtatgttgttaagaagaggaattgaacctctgactgtaaagttttaagttttatgcgattaccgggctctgccatcttaacaaaccctgttcttgggtgggtg

SEQ ID NO: 60023 - DNA, 120 bp, Homo sapiens
  misc_feature: 1346 for SV(W|O) and mtDNA
tagaagggctatttgttgtgggtctcatgagttggagtgtaggataaatcatgctaaggcgaggatgaaaccgatatcgccgatacggttgtataggattgcttgaatggctgctgtgtt

SEQ ID NO: 60024 - DNA, 120 bp, Homo sapiens
  misc_feature: 1346 for SV(W|O) and mtDNA
ctctcagccctcctaatgacctccggcctagccatgtgatttcacttccactccataacgctcctcatactaggcctactaaccaacacactaaccatataccaatgatggcgcgatgta

SEQ ID NO: 60025 - DNA, 120 bp, Homo sapiens
  misc_feature: 1346 for SV(W|O) and mtDNA
acgctggagccggagcaccctatgtcgcagtatctgtctttgattcctgcctcatcccattatttatcgcacctacgttcaatattacaggcgaacatacttactaaagtgtgttaatta

SEQ ID NO: 60026 - DNA, 120 bp, Homo sapiens
  misc_feature: 1346 for SV(W|O) and mtDNA
ggggtaagatttgccgagttccttttactttttttaacctttccttatgagcatgcctgtgttgggttgacagtgagggtaataatgacttgttggttgattgtagatattgggctgtta

SEQ ID NO: 60027 - DNA, 120 bp, Homo sapiens
  misc_feature: 1346 for SV(W|O) and mtDNA
taaataagctatcgggcccataccccgaaaatgttggttatacccttcccgtactaattaatcccctggcccaacccgtcatctactctaccatctttgcaggcacactcatcacagcgc

SEQ ID NO: 60028 - DNA, 120 bp, Homo sapiens
  misc_feature: 1346 for SV(W|O) and mtDNA
taaaagtaataaccatgcacactactataaccaccctaaccctgacttccctaattccccccatccttaccaccctcgttaaccctaacaaaaaaaactcatacccccattatgtaaaat

SEQ ID NO: 60029 - DNA, 120 bp, Homo sapiens
  misc_feature: 1346 for SV(W|O) and mtDNA
gttgtggtaaatatgtagagggagtatagggctgtgactagtatgttgagtcctgtaagtaggagagtgatatttgatcaggagaacgtggttactagcacagagagttctcccagtagg

SEQ ID NO: 60030 - DNA, 120 bp, Homo sapiens
  misc_feature: 1346 for SV(W|O) and mtDNA
gtgctttgtgttaagctacactctggttcgtccaagtgcactttccagtacacttaccatgttacgacttgtctcctctatataaatgcgtaggggttttagttaaatgtcctttgaagt

SEQ ID NO: 60031 - DNA, 120 bp, Homo sapiens
  misc_feature: 1346 for SV(W|O) and mtDNA
aaggagccacttattagtaatgttgatagtagaatgatggctagggtgacttcatatgagattgtttgggctactgctcgcagtgcgccgatcagggcgtagtttgagtttgatgctcac

SEQ ID NO: 60032 - DNA, 120 bp, Homo sapiens
  misc_feature: 1346 for SV(W|O) and mtDNA
gaactcctcatacccaattggaccaatctatcaccctatagaagaactaatgttagtataagtaacatgaaaacattctcctccgcataagcctgcgtcagattaaaacactgaactgac

SEQ ID NO: 60033 - DNA, 120 bp, Homo sapiens
  misc_feature: 1346 for SV(W|O) and mtDNA
gtaaagttttaagttttatgcgattaccgggctctgccatcttaacaaaccctgttcttgggtgggtgtgggtataatactaagttgagatgatatcatttacgggggaaggcgctttgt

SEQ ID NO: 60034 - DNA, 120 bp, Homo sapiens
  misc_feature: 1346 for SV(W|O) and mtDNA
ggcaaccagccagaacgcctgaacgcaggcacatacttcctattctacaccctagtaggctcccttcccctactcatcgcactaatttacactcacaacaccctaggctcactaaacatt

SEQ ID NO: 60035 - DNA, 120 bp, Homo sapiens
  misc_feature: 1346 for SV(W|O) and mtDNA
gcggttgcttgcgtgaggaaatacttgatggcagcttctgtggaacgagggtttatttttttggttagaactggaataaaagctagcatgtttatttctaggcctactcaggtaaaaaat

SEQ ID NO: 60036 - DNA, 120 bp, Homo sapiens
  misc_feature: 1346 for SV(W|O) and mtDNA
gccgtagtcggtgtactcgtaggttcagtaccattggtggccaattgatttgatggtaagggagggatcgttgacctcgtctgttatgtaaaggatgcgtagggatgggagggcgatgag

SEQ ID NO: 60037 - DNA, 120 bp, Homo sapiens
  misc_feature: 1346 for SV(W|O) and mtDNA
gaggttagtttgattagtcattgttgggtggtgattagtcggttgttgatgagatatttggaggtggggatcaatagagggggaaatagaatgatcagtactgcggcgggtaggcctagg

SEQ ID NO: 60038 - DNA, 120 bp, Homo sapiens
  misc_feature: 1346 for SV(W|O) and mtDNA
gaggagtaggaggttggccatgggtatgttgttaagaagaggaattgaacctctgactgtaaagttttaagttttatgcgattaccgggctctgccatcttaacaaaccctgttcttggg

SEQ ID NO: 60039 - DNA, 120 bp, Homo sapiens
  misc_feature: 1346 for SV(W|O) and mtDNA
gaagtgaaatcacatggctaggccggaggtcattaggagggctgagagggcccctgttaggggtcatgggctgggttttactatatgataggcatgtgattggtgggtcattatgtgttg

SEQ ID NO: 60040 - DNA, 120 bp, Homo sapiens
  misc_feature: 1346 for SV(W|O) and mtDNA
ctggagccggagcaccctatgtcgcagtatctgtctttgattcctgcctcatcccattatttatcgcacctacgttcaatattacaggcgaacatacttactaaagtgtgttaattaatt

SEQ ID NO: 60041 - DNA, 120 bp, Homo sapiens
  misc_feature: 1346 for SV(W|O) and mtDNA
cgaacagagtggtgatagcgcctaagcatagtgttagagtttggattagtgggctattttctgctagggggtggaagcggatgagtaagaagattcctgctacaactatagtgcttgagt

SEQ ID NO: 60042 - DNA, 120 bp, Homo sapiens
  misc_feature: 1346 for SV(W|O) and mtDNA
cctttctccataaaattcttcttagtagctattaccttcttattatttgatctagaaattgccctccttttacccctaccatgagccctacaaacaactaacctgccactaatagttatg

SEQ ID NO: 60043 - DNA, 120 bp, Homo sapiens
  misc_feature: 1346 for SV(W|O) and mtDNA
ccgcgtccctttctccataaaattcttcttagtagctattaccttcttattatttgatctagaaattgccctccttttacccctaccatgagccctacaaacaactaacctgccactaat

SEQ ID NO: 60044 - DNA, 120 bp, Homo sapiens
  misc_feature: 1346 for SV(W|O) and mtDNA
cagagcattgaccgtagtatacccccggtcgtgtagcggtgaaagtggtttggtttagacgtccgggaattgcatctgtttttaagcctaatgtggggacagctcatgagtgcaagacgt

SEQ ID NO: 60045 - DNA, 120 bp, Homo sapiens
  misc_feature: 1346 for SV(W|O) and mtDNA
atcaattggccaccaatggtactgaacctacgagtacaccgactacggcggactaatcttcaactcctacatacttcccccattattcctagaaccaggcgacctgcgactccttgacgt

SEQ ID NO: 60046 - DNA, 120 bp, Homo sapiens
  misc_feature: 1346 for SV(W|O) and mtDNA
aggattatggatgcggttgcttgcgtgaggaaatacttgatggcagcttctgtggaacgagggtttatttttttggttagaactggaataaaagctagcatgtttatttctaggcctact

SEQ ID NO: 60047 - DNA, 120 bp, Homo sapiens
  misc_feature: 1346 for SV(W|O) and mtDNA
aggcggggtaagatttgccgagttccttttactttttttaacctttccttatgagcatgcctgtgttgggttgacagtgagggtaataatgacttgttggttgattgtagatattgggct

SEQ ID NO: 60048 - DNA, 120 bp, Homo sapiens
  misc_feature: 1346 for SV(W|O) and mtDNA
aataaaattaattaaccactcattcatcgacctccccaccccatccaacatctccacatgatgaaacttcggctcactccttggcgcctgcctgattctccaaatcaccacaggactatt

SEQ ID NO: 60049 - DNA, 120 bp, Homo sapiens
  misc_feature: 1345 for SV(W|O) and mtDNA
tttaggggctctttggtgaagagttttatggcgtcagcgaagggttgtagtagcccgtaggggcctacaacgttggggcctttgcgtagttgtatatagcctagaatttttcgttcggta

SEQ ID NO: 60050 - DNA, 120 bp, Homo sapiens
  misc_feature: 1345 for SV(W|O) and mtDNA
ttgtggtaaatatgtagagggagtatagggctgtgactagtatgttgagtcctgtaagtaggagagtgatatttgatcaggagaacgtggttactagcacagagagttctcccagtaggt

SEQ ID NO: 60051 - DNA, 120 bp, Homo sapiens
  misc_feature: 1345 for SV(W|O) and mtDNA
ttggtgaagagttttatggcgtcagcgaagggttgtagtagcccgtaggggcctacaacgttggggcctttgcgtagttgtatatagcctagaatttttcgttcggtaagcattaggaat

SEQ ID NO: 60052 - DNA, 120 bp, Homo sapiens
  misc_feature: 1345 for SV(W|O) and mtDNA
ttattctagccacctctagcctagccgtttactcaatcctctgatcagggtgagcatcaaactcaaactacgccctgatcggcgcactgcgagcagtagcccaaacaatctcatatgaag

SEQ ID NO: 60053 - DNA, 120 bp, Homo sapiens
  misc_feature: 1345 for SV(W|O) and mtDNA
ctaagcactctactctcagtttactgctaaatccaccttcgacccttaagtttcataagggctatcgtagttttctggggtagaaaatgtagcccatttcttgccacctcatgggctaca

SEQ ID NO: 60054 - DNA, 120 bp, Homo sapiens
  misc_feature: 1345 for SV(W|O) and mtDNA
acctagcaggtgtctcctctatcttaggggccatcaatttcatcacaacaattatcaatataaaaccccctgccataacccaataccaaacgcccctcttcgtctgatccgtcctaatca

SEQ ID NO: 60055 - DNA, 120 bp, Homo sapiens
  misc_feature: 1345 for SV(W|O) and mtDNA
accaacaaacaatgttcaaccagtaactactactaatcaacgcccataatcatacaaagcccccgcaccaataggatcctcccgaatcaaccctgacccctctccttcataaattattca

SEQ ID NO: 60056 - DNA, 120 bp, Homo sapiens
  misc_feature: 1345 for SV(W|O) and mtDNA
tgaacagggccctgaagcgcgtacacaccgcccgtcaccctcctcaagtatacttcaaaggacatttaactaaaacccctacgcatttatatagaggagacaagtcgtaacatggtaagt

SEQ ID NO: 60057 - DNA, 120 bp, Homo sapiens
  misc_feature: 1345 for SV(W|O) and mtDNA
tcttctccttacacctagcaggtgtctcctctatcttaggggccatcaatttcatcacaacaattatcaatataaaaccccctgccataacccaataccaaacgcccctcttcgtctgat

SEQ ID NO: 60058 - DNA, 120 bp, Homo sapiens
  misc_feature: 1345 for SV(W|O) and mtDNA
gaacctacgagtacaccgactacggcggactaatcttcaactcctacatacttcccccattattcctagaaccaggcgacctgcgactccttgacgttgacaatcgagtagtactcccga

SEQ ID NO: 60059 - DNA, 120 bp, Homo sapiens
  misc_feature: 1345 for SV(W|O) and mtDNA
cccctaataatcggtgcccccgatatggcgtttccccgcataaacaacataagcttctgactcttacctccctctctcctactcctgctcgcatctgctatagtggaggccggagcagga

SEQ ID NO: 60060 - DNA, 120 bp, Homo sapiens
  misc_feature: 1345 for SV(W|O) and mtDNA
tcctagctgctggcatcactatactactaacagaccgcaacctcaacaccaccttcttcgaccccgccggaggaggagaccccattctataccaacacctattctgatttttcggtcacc

SEQ ID NO: 60061 - DNA, 120 bp, Homo sapiens
  misc_feature: 1345 for SV(W|O) and mtDNA
tccgccgtagtcggtgtactcgtaggttcagtaccattggtggccaattgatttgatggtaagggagggatcgttgacctcgtctgttatgtaaaggatgcgtagggatgggagggcgat

SEQ ID NO: 60062 - DNA, 120 bp, Homo sapiens
  misc_feature: 1345 for SV(W|O) and mtDNA
tcatatagtaaaacccagcccatgacccctaacaggggccctctcagccctcctaatgacctccggcctagccatgtgatttcacttccactccataacgctcctcatactaggcctact

SEQ ID NO: 60063 - DNA, 120 bp, Homo sapiens
  misc_feature: 1345 for SV(W|O) and mtDNA
ataactgaactcctcatacccaattggaccaatctatcaccctatagaagaactaatgttagtataagtaacatgaaaacattctcctccgcataagcctgcgtcagattaaaacactga

SEQ ID NO: 60064 - DNA, 120 bp, Homo sapiens
  misc_feature: 1345 for SV(W|O) and mtDNA
tcactaaacgtaagccttctcctcactctctcaatcttatccatcatagcaggcagttgaggtggattaaaccaaacccagctacgcaaaatcttagcatactcctcaattacccacata

SEQ ID NO: 60065 - DNA, 120 bp, Homo sapiens
  misc_feature: 1345 for SV(W|O) and mtDNA
tattttgtcaccaagaccctacttctaacctccctgttcttatgaattcgaacagcatacccccgattccgctacgaccaactcatacacctcctatgaaaaaacttcctaccactcacc

SEQ ID NO: 60066 - DNA, 120 bp, Homo sapiens
  misc_feature: 1345 for SV(W|O) and mtDNA
tatttattctagccacctctagcctagccgtttactcaatcctctgatcagggtgagcatcaaactcaaactacgccctgatcggcgcactgcgagcagtagcccaaacaatctcatatg

SEQ ID NO: 60067 - DNA, 120 bp, Homo sapiens
  misc_feature: 1345 for SV(W|O) and mtDNA
tagggttattttcgttaatgttagtaagggtggggaagcgaggttgacctgttagggtgagaagaattattcgagtgctataggcgcttgtcagggaggtagcgatgagagtaatagata

SEQ ID NO: 60068 - DNA, 120 bp, Homo sapiens
  misc_feature: 1345 for SV(W|O) and mtDNA
agattattagtataaaaggggagataggtaggagtagcgtggtaagggcgatgagtgtggggaggaatggggtgggttttgtatgttcaaactgtcattttatttttacgttgttagata

SEQ ID NO: 60069 - DNA, 120 bp, Homo sapiens
  misc_feature: 1345 for SV(W|O) and mtDNA
gttgcttgcgtgaggaaatacttgatggcagcttctgtggaacgagggtttatttttttggttagaactggaataaaagctagcatgtttatttctaggcctactcaggtaaaaaatcag

SEQ ID NO: 60070 - DNA, 120 bp, Homo sapiens
  misc_feature: 1345 for SV(W|O) and mtDNA
atgctagaggtgatgtttttggtaaacaggcggggtaagatttgccgagttccttttactttttttaacctttccttatgagcatgcctgtgttgggttgacagtgagggtaataatgac

SEQ ID NO: 60071 - DNA, 120 bp, Homo sapiens
  misc_feature: 1345 for SV(W|O) and mtDNA
ctctactctcagtttactgctaaatccaccttcgacccttaagtttcataagggctatcgtagttttctggggtagaaaatgtagcccatttcttgccacctcatgggctacaccttgac

SEQ ID NO: 60072 - DNA, 120 bp, Homo sapiens
  misc_feature: 1345 for SV(W|O) and mtDNA
agcacataccaaggccaccacacaccacctgtccaaaaaggccttcgatacgggataatcctatttattacctcagaagtttttttcttcgcaggatttttctgagccttttaccactcc

SEQ ID NO: 60073 - DNA, 120 bp, Homo sapiens
  misc_feature: 1345 for SV(W|O) and mtDNA
gcgtgaggaaatacttgatggcagcttctgtggaacgagggtttatttttttggttagaactggaataaaagctagcatgtttatttctaggcctactcaggtaaaaaatcagtgcgagc

SEQ ID NO: 60074 - DNA, 120 bp, Homo sapiens
  misc_feature: 1345 for SV(W|O) and mtDNA
aaaagtaataaccatgcacactactataaccaccctaaccctgacttccctaattccccccatccttaccaccctcgttaaccctaacaaaaaaaactcatacccccattatgtaaaatc

SEQ ID NO: 60075 - DNA, 120 bp, Homo sapiens
  misc_feature: 1345 for SV(W|O) and mtDNA
gattgtagtggtgagggtgtttattataataatgtttgtgtattcggctatgaagaatagggcgaaggggcctgcggcgtattcgatgttgaagcctgagactagttcggactccccttc

SEQ ID NO: 60076 - DNA, 120 bp, Homo sapiens
  misc_feature: 1345 for SV(W|O) and mtDNA
ataaccatgcacactactataaccaccctaaccctgacttccctaattccccccatccttaccaccctcgttaaccctaacaaaaaaaactcatacccccattatgtaaaatccattgtc

SEQ ID NO: 60077 - DNA, 120 bp, Homo sapiens
  misc_feature: 1345 for SV(W|O) and mtDNA
gaatttttcgttcggtaagcattaggaatgccattgcgattagaatgggtacaatgaggagtaggaggttggccatgggtatgttgttaagaagaggaattgaacctctgactgtaaagt

SEQ ID NO: 60078 - DNA, 120 bp, Homo sapiens
  misc_feature: 1345 for SV(W|O) and mtDNA
ccgaatacacaaacattattataataaacaccctcaccactacaatcttcctaggaacaacatatgacgcactctcccctgaactctacacaacatattttgtcaccaagaccctacttc

SEQ ID NO: 60079 - DNA, 120 bp, Homo sapiens
  misc_feature: 1345 for SV(W|O) and mtDNA
ctgccaggcgtttaatggggtttagtagggtagggttattttcgttaatgttagtaagggtggggaagcgaggttgacctgttagggtgagaagaattattcgagtgctataggcgcttg

SEQ ID NO: 60080 - DNA, 120 bp, Homo sapiens
  misc_feature: 1345 for SV(W|O) and mtDNA
ctctgactgtaaagttttaagttttatgcgattaccgggctctgccatcttaacaaaccctgttcttgggtgggtgtgggtataatactaagttgagatgatatcatttacgggggaagg

SEQ ID NO: 60081 - DNA, 120 bp, Homo sapiens
  misc_feature: 1345 for SV(W|O) and mtDNA
aggaggaggcctagtagtggggtgaggcttggattagcgtttagaagggctatttgttgtgggtctcatgagttggagtgtaggataaatcatgctaaggcgaggatgaaaccgatatcg

SEQ ID NO: 60082 - DNA, 120 bp, Homo sapiens
  misc_feature: 1345 for SV(W|O) and mtDNA
ccctttctccataaaattcttcttagtagctattaccttcttattatttgatctagaaattgccctccttttacccctaccatgagccctacaaacaactaacctgccactaatagttat

SEQ ID NO: 60083 - DNA, 120 bp, Homo sapiens
  misc_feature: 1345 for SV(W|O) and mtDNA
ccaaccctggggttagtatagcttagttaaactttcgtttattgctaaaggttaatcactgctgtttcccgtgggggtgtggctaggctaagcgttttgagctgcattgctgcgtgcttg

SEQ ID NO: 60084 - DNA, 120 bp, Homo sapiens
  misc_feature: 1345 for SV(W|O) and mtDNA
catagccgaatacacaaacattattataataaacaccctcaccactacaatcttcctaggaacaacatatgacgcactctcccctgaactctacacaacatattttgtcaccaagaccct

SEQ ID NO: 60085 - DNA, 120 bp, Homo sapiens
  misc_feature: 1345 for SV(W|O) and mtDNA
acacaaacattattataataaacaccctcaccactacaatcttcctaggaacaacatatgacgcactctcccctgaactctacacaacatattttgtcaccaagaccctacttctaacct

SEQ ID NO: 60086 - DNA, 120 bp, Homo sapiens
  misc_feature: 1344 for SV(W|O) and mtDNA
ttcctctctttcttcttcccactcatcctaaccctactcctaatcacataacctattcccccgagcaatctcaattacaatatatacaccaacaaacaatgttcaaccagtaactactac

SEQ ID NO: 60087 - DNA, 120 bp, Homo sapiens
  misc_feature: 1344 for SV(W|O) and mtDNA
ttaatccacctcaactgcctgctatgatggataagattgagagagtgaggagaaggcttacgtttagtgagggagagatttggtatatgattgagatgggggctagtttttgtcatgtga

SEQ ID NO: 60088 - DNA, 120 bp, Homo sapiens
  misc_feature: 1344 for SV(W|O) and mtDNA
tgcttgcgtgaggaaatacttgatggcagcttctgtggaacgagggtttatttttttggttagaactggaataaaagctagcatgtttatttctaggcctactcaggtaaaaaatcagtg

SEQ ID NO: 60089 - DNA, 120 bp, Homo sapiens
  misc_feature: 1344 for SV(W|O) and mtDNA
tgctagaggtgatgtttttggtaaacaggcggggtaagatttgccgagttccttttactttttttaacctttccttatgagcatgcctgtgttgggttgacagtgagggtaataatgact

SEQ ID NO: 60090 - DNA, 120 bp, Homo sapiens
  misc_feature: 1344 for SV(W|O) and mtDNA
tcatgagacccacaacaaatagcccttctaaacgctaatccaagcctcaccccactactaggcctcctcctagcagcagcaggcaaatcagcccaattaggtctccacccctgactcccc

SEQ ID NO: 60091 - DNA, 120 bp, Homo sapiens
  misc_feature: 1344 for SV(W|O) and mtDNA
gtaatgtgctatgtacggtaaatggctttatgtactatgtactgttaagggtgggtaggtttgttggtatcctagtgggtgaggggtggctttggagttgcagttgatgtgtgatagttg

SEQ ID NO: 60092 - DNA, 120 bp, Homo sapiens
  misc_feature: 1344 for SV(W|O) and mtDNA
aaactcaaactacgaacgcactcacagtcgcatcataatcctctctcaaggacttcaaactctactcccactaatagctttttgatgacttctagcaagcctcgctaacctcgccttacc

SEQ ID NO: 60093 - DNA, 120 bp, Homo sapiens
  misc_feature: 1344 for SV(W|O) and mtDNA
ggaggaggcctagtagtggggtgaggcttggattagcgtttagaagggctatttgttgtgggtctcatgagttggagtgtaggataaatcatgctaaggcgaggatgaaaccgatatcgc

SEQ ID NO: 60094 - DNA, 120 bp, Homo sapiens
  misc_feature: 1344 for SV(W|O) and mtDNA
cttagcatgatttatcctacactccaactcatgagacccacaacaaatagcccttctaaacgctaatccaagcctcaccccactactaggcctcctcctagcagcagcaggcaaatcagc

SEQ ID NO: 60095 - DNA, 120 bp, Homo sapiens
  misc_feature: 1344 for SV(W|O) and mtDNA
ctggcacgaaattgaccaaccctggggttagtatagcttagttaaactttcgtttattgctaaaggttaatcactgctgtttcccgtgggggtgtggctaggctaagcgttttgagctgc

SEQ ID NO: 60096 - DNA, 120 bp, Homo sapiens
  misc_feature: 1344 for SV(W|O) and mtDNA
agggtagactgttcaacctgttcctgctccggcctccactatagcagatgcgagcaggagtaggagagagggaggtaagagtcagaagcttatgttgtttatgcggggaaacgccatatc

SEQ ID NO: 60097 - DNA, 120 bp, Homo sapiens
  misc_feature: 1344 for SV(W|O) and mtDNA
gaacagggccctgaagcgcgtacacaccgcccgtcaccctcctcaagtatacttcaaaggacatttaactaaaacccctacgcatttatatagaggagacaagtcgtaacatggtaagtg

SEQ ID NO: 60098 - DNA, 120 bp, Homo sapiens
  misc_feature: 1344 for SV(W|O) and mtDNA
cctggttctaggaataatgggggaagtatgtaggagttgaagattagtccgccgtagtcggtgtactcgtaggttcagtaccattggtggccaattgatttgatggtaagggagggatcg

SEQ ID NO: 60099 - DNA, 120 bp, Homo sapiens
  misc_feature: 1344 for SV(W|O) and mtDNA
catcctcgccttagcatgatttatcctacactccaactcatgagacccacaacaaatagcccttctaaacgctaatccaagcctcaccccactactaggcctcctcctagcagcagcagg

SEQ ID NO: 60100 - DNA, 120 bp, Homo sapiens
  misc_feature: 1344 for SV(W|O) and mtDNA
caatggcattcctaatgcttaccgaacgaaaaattctaggctatatacaactacgcaaaggccccaacgttgtaggcccctacgggctactacaacccttcgctgacgccataaaactct

SEQ ID NO: 60101 - DNA, 120 bp, Homo sapiens
  misc_feature: 1343 for SV(W|O) and mtDNA
cctcgccttagcatgatttatcctacactccaactcatgagacccacaacaaatagcccttctaaacgctaatccaagcctcaccccactactaggcctcctcctagcagcagcaggcaa

SEQ ID NO: 60102 - DNA, 120 bp, Homo sapiens
  misc_feature: 1343 for SV(W|O) and mtDNA
cggtgaaagtggtttggtttagacgtccgggaattgcatctgtttttaagcctaatgtggggacagctcatgagtgcaagacgtcttgtgatgtaattattatacgaatgggggcttcaa

SEQ ID NO: 60103 - DNA, 120 bp, Homo sapiens
  misc_feature: 1343 for SV(W|O) and mtDNA
ttaacctactgggagaactctctgtgctagtaaccacgttctcctgatcaaatatcactctcctacttacaggactcaacatactagtcacagccctatactccctctacatatttacca

SEQ ID NO: 60104 - DNA, 120 bp, Homo sapiens
  misc_feature: 1343 for SV(W|O) and mtDNA
tctctatactaatctccctacaaatctccttaattataacattcacagccacagaactaatcatattttatatcttcttcgaaaccacacttatccccaccttggctatcatcacccgat

SEQ ID NO: 60105 - DNA, 120 bp, Homo sapiens
  misc_feature: 1343 for SV(W|O) and mtDNA
tccctttctccataaaattcttcttagtagctattaccttcttattatttgatctagaaattgccctccttttacccctaccatgagccctacaaacaactaacctgccactaatagtta

SEQ ID NO: 60106 - DNA, 120 bp, Homo sapiens
  misc_feature: 1343 for SV(W|O) and mtDNA
ggcgcagactgctgcgaacagagtggtgatagcgcctaagcatagtgttagagtttggattagtgggctattttctgctagggggtggaagcggatgagtaagaagattcctgctacaac

SEQ ID NO: 60107 - DNA, 120 bp, Homo sapiens
  misc_feature: 1343 for SV(W|O) and mtDNA
ctcagccctcctaatgacctccggcctagccatgtgatttcacttccactccataacgctcctcatactaggcctactaaccaacacactaaccatataccaatgatggcgcgatgtaac

SEQ ID NO: 60108 - DNA, 120 bp, Homo sapiens
  misc_feature: 1343 for SV(W|O) and mtDNA
ataggctatgtcctcccgtgaggccaaatatcattctgaggggccacagtaattacaaacttactatccgccatcccatacattgggacagacctagttcaatgaatctgaggaggctac

SEQ ID NO: 60109 - DNA, 120 bp, Homo sapiens
  misc_feature: 1343 for SV(W|O) and mtDNA
ggtgatgtttttggtaaacaggcggggtaagatttgccgagttccttttactttttttaacctttccttatgagcatgcctgtgttgggttgacagtgagggtaataatgacttgttggt

SEQ ID NO: 60110 - DNA, 120 bp, Homo sapiens
  misc_feature: 1343 for SV(W|O) and mtDNA
ggtgaaagtggtttggtttagacgtccgggaattgcatctgtttttaagcctaatgtggggacagctcatgagtgcaagacgtcttgtgatgtaattattatacgaatgggggcttcaat

SEQ ID NO: 60111 - DNA, 120 bp, Homo sapiens
  misc_feature: 1343 for SV(W|O) and mtDNA
ggcgtttggtattgggttatggcagggggttttatattgataattgttgtgatgaaattgatggcccctaagatagaggagacacctgctaggtgtaaggagaagatggttaggtctacg

SEQ ID NO: 60112 - DNA, 120 bp, Homo sapiens
  misc_feature: 1343 for SV(W|O) and mtDNA
gctgggtcaatagtacttgccgcagtactcttaaaactaggcggctatggtataatacgcctcacactcattctcaaccccctgacaaaacacatagcctaccccttccttgtactatcc

SEQ ID NO: 60113 - DNA, 120 bp, Homo sapiens
  misc_feature: 1343 for SV(W|O) and mtDNA
atcctcgccttagcatgatttatcctacactccaactcatgagacccacaacaaatagcccttctaaacgctaatccaagcctcaccccactactaggcctcctcctagcagcagcaggc

SEQ ID NO: 60114 - DNA, 120 bp, Homo sapiens
  misc_feature: 1343 for SV(W|O) and mtDNA
gagcattgaccgtagtatacccccggtcgtgtagcggtgaaagtggtttggtttagacgtccgggaattgcatctgtttttaagcctaatgtggggacagctcatgagtgcaagacgtct

SEQ ID NO: 60115 - DNA, 120 bp, Homo sapiens
  misc_feature: 1343 for SV(W|O) and mtDNA
cgaatacacaaacattattataataaacaccctcaccactacaatcttcctaggaacaacatatgacgcactctcccctgaactctacacaacatattttgtcaccaagaccctacttct

SEQ ID NO: 60116 - DNA, 120 bp, Homo sapiens
  misc_feature: 1343 for SV(W|O) and mtDNA
attcttcttagtagctattaccttcttattatttgatctagaaattgccctccttttacccctaccatgagccctacaaacaactaacctgccactaatagttatgtcatccctcttatt

SEQ ID NO: 60117 - DNA, 120 bp, Homo sapiens
  misc_feature: 1343 for SV(W|O) and mtDNA
atgtttttggtaaacaggcggggtaagatttgccgagttccttttactttttttaacctttccttatgagcatgcctgtgttgggttgacagtgagggtaataatgacttgttggttgat

SEQ ID NO: 60118 - DNA, 120 bp, Homo sapiens
  misc_feature: 1343 for SV(W|O) and mtDNA
atataactgaactcctcatacccaattggaccaatctatcaccctatagaagaactaatgttagtataagtaacatgaaaacattctcctccgcataagcctgcgtcagattaaaacact

SEQ ID NO: 60119 - DNA, 120 bp, Homo sapiens
  misc_feature: 1343 for SV(W|O) and mtDNA
agccccattgtgttgtggtaaatatgtagagggagtatagggctgtgactagtatgttgagtcctgtaagtaggagagtgatatttgatcaggagaacgtggttactagcacagagagtt

SEQ ID NO: 60120 - DNA, 120 bp, Homo sapiens
  misc_feature: 1342 for SV(W|O) and mtDNA
cccctcaaacctaagaaatatgtctgataaaagagttactttgatagagtaaataataggagcttaaacccccttatttctaggactatgagaatcgaacccatccctgagaatccaaaa

SEQ ID NO: 60121 - DNA, 120 bp, Homo sapiens
  misc_feature: 1342 for SV(W|O) and mtDNA
tttgtcaccaagaccctacttctaacctccctgttcttatgaattcgaacagcatacccccgattccgctacgaccaactcatacacctcctatgaaaaaacttcctaccactcacccta

SEQ ID NO: 60122 - DNA, 120 bp, Homo sapiens
  misc_feature: 1342 for SV(W|O) and mtDNA
aataaaagtaataaccatgcacactactataaccaccctaaccctgacttccctaattccccccatccttaccaccctcgttaaccctaacaaaaaaaactcatacccccattatgtaaa

SEQ ID NO: 60123 - DNA, 120 bp, Homo sapiens
  misc_feature: 1342 for SV(W|O) and mtDNA
ttgcttgcgtgaggaaatacttgatggcagcttctgtggaacgagggtttatttttttggttagaactggaataaaagctagcatgtttatttctaggcctactcaggtaaaaaatcagt

SEQ ID NO: 60124 - DNA, 120 bp, Homo sapiens
  misc_feature: 1342 for SV(W|O) and mtDNA
ttcacttctgagtcccagaggttacccaaggcacccctctgacatccggcctgcttcttctcacatgacaaaaactagcccccatctcaatcatataccaaatctctccctcactaaacg

SEQ ID NO: 60125 - DNA, 120 bp, Homo sapiens
  misc_feature: 1342 for SV(W|O) and mtDNA
tggtttggtttagacgtccgggaattgcatctgtttttaagcctaatgtggggacagctcatgagtgcaagacgtcttgtgatgtaattattatacgaatgggggcttcaatcgggagta

SEQ ID NO: 60126 - DNA, 120 bp, Homo sapiens
  misc_feature: 1342 for SV(W|O) and mtDNA
tgagggtgtttattataataatgtttgtgtattcggctatgaagaatagggcgaaggggcctgcggcgtattcgatgttgaagcctgagactagttcggactccccttcggcaaggtcga

SEQ ID NO: 60127 - DNA, 120 bp, Homo sapiens
  misc_feature: 1342 for SV(W|O) and mtDNA
cctgctaagggagggtagactgttcaacctgttcctgctccggcctccactatagcagatgcgagcaggagtaggagagagggaggtaagagtcagaagcttatgttgtttatgcgggga

SEQ ID NO: 60128 - DNA, 120 bp, Homo sapiens
  misc_feature: 1342 for SV(W|O) and mtDNA
tataatactaagttgagatgatatcatttacgggggaaggcgctttgtgaagtaggccttatttctcttgtcctttcgtacagggaggaatttgaagtagatagaaaccgacctggatta

SEQ ID NO: 60129 - DNA, 120 bp, Homo sapiens
  misc_feature: 1342 for SV(W|O) and mtDNA
atagccgaatacacaaacattattataataaacaccctcaccactacaatcttcctaggaacaacatatgacgcactctcccctgaactctacacaacatattttgtcaccaagacccta

SEQ ID NO: 60130 - DNA, 120 bp, Homo sapiens
  misc_feature: 1342 for SV(W|O) and mtDNA
taggggctctttggtgaagagttttatggcgtcagcgaagggttgtagtagcccgtaggggcctacaacgttggggcctttgcgtagttgtatatagcctagaatttttcgttcggtaag

SEQ ID NO: 60131 - DNA, 120 bp, Homo sapiens
  misc_feature: 1342 for SV(W|O) and mtDNA
gaatacacaaacattattataataaacaccctcaccactacaatcttcctaggaacaacatatgacgcactctcccctgaactctacacaacatattttgtcaccaagaccctacttcta

SEQ ID NO: 60132 - DNA, 120 bp, Homo sapiens
  misc_feature: 1342 for SV(W|O) and mtDNA
tacttgatggcagcttctgtggaacgagggtttatttttttggttagaactggaataaaagctagcatgtttatttctaggcctactcaggtaaaaaatcagtgcgagcttagcgctgtg

SEQ ID NO: 60133 - DNA, 120 bp, Homo sapiens
  misc_feature: 1342 for SV(W|O) and mtDNA
gtaggaggttggccatgggtatgttgttaagaagaggaattgaacctctgactgtaaagttttaagttttatgcgattaccgggctctgccatcttaacaaaccctgttcttgggtgggt

SEQ ID NO: 60134 - DNA, 120 bp, Homo sapiens
  misc_feature: 1342 for SV(W|O) and mtDNA
ggtttaatccacctcaactgcctgctatgatggataagattgagagagtgaggagaaggcttacgtttagtgagggagagatttggtatatgattgagatgggggctagtttttgtcatg

SEQ ID NO: 60135 - DNA, 120 bp, Homo sapiens
  misc_feature: 1342 for SV(W|O) and mtDNA
cccttctaaacgctaatccaagcctcaccccactactaggcctcctcctagcagcagcaggcaaatcagcccaattaggtctccacccctgactcccctcagccatagaaggccccaccc

SEQ ID NO: 60136 - DNA, 120 bp, Homo sapiens
  misc_feature: 1342 for SV(W|O) and mtDNA
ggaagtgaaatcacatggctaggccggaggtcattaggagggctgagagggcccctgttaggggtcatgggctgggttttactatatgataggcatgtgattggtgggtcattatgtgtt

SEQ ID NO: 60137 - DNA, 120 bp, Homo sapiens
  misc_feature: 1342 for SV(W|O) and mtDNA
aggggctctttggtgaagagttttatggcgtcagcgaagggttgtagtagcccgtaggggcctacaacgttggggcctttgcgtagttgtatatagcctagaatttttcgttcggtaagc

SEQ ID NO: 60138 - DNA, 120 bp, Homo sapiens
  misc_feature: 1342 for SV(W|O) and mtDNA
gctggcacgaaattgaccaaccctggggttagtatagcttagttaaactttcgtttattgctaaaggttaatcactgctgtttcccgtgggggtgtggctaggctaagcgttttgagctg

SEQ ID NO: 60139 - DNA, 120 bp, Homo sapiens
  misc_feature: 1342 for SV(W|O) and mtDNA
aatcagccacatagccctcgtagtaacagccattctcatccaaaccccctgaagcttcaccggcgcagtcattctcataatcgcccacgggcttacatcctcattactattctgcctagc

SEQ ID NO: 60140 - DNA, 120 bp, Homo sapiens
  misc_feature: 1342 for SV(W|O) and mtDNA
gcgataaataatgggatgaggcaggaatcaaagacagatactgcgacatagggtgctccggctccagcgtctcgcaatgctatcgcgtgcataccccccagacgaaaataccaaatgcat

SEQ ID NO: 60141 - DNA, 120 bp, Homo sapiens
  misc_feature: 1342 for SV(W|O) and mtDNA
gccctctcagccctcctaatgacctccggcctagccatgtgatttcacttccactccataacgctcctcatactaggcctactaaccaacacactaaccatataccaatgatggcgcgat

SEQ ID NO: 60142 - DNA, 120 bp, Homo sapiens
  misc_feature: 1342 for SV(W|O) and mtDNA
cctctatcttaggggccatcaatttcatcacaacaattatcaatataaaaccccctgccataacccaataccaaacgcccctcttcgtctgatccgtcctaatcacagcagtcctacttc

SEQ ID NO: 60143 - DNA, 120 bp, Homo sapiens
  misc_feature: 1342 for SV(W|O) and mtDNA
cctctgactgtaaagttttaagttttatgcgattaccgggctctgccatcttaacaaaccctgttcttgggtgggtgtgggtataatactaagttgagatgatatcatttacgggggaag

SEQ ID NO: 60144 - DNA, 120 bp, Homo sapiens
  misc_feature: 1342 for SV(W|O) and mtDNA
acattactaataagtggctcctttaacctctccacccttatcacaacacaagaacacctctgattactcctgccatcatgacccttggccataatatgatttatctccacactagcagag

SEQ ID NO: 60145 - DNA, 120 bp, Homo sapiens
  misc_feature: 1342 for SV(W|O) and mtDNA
cactaaacgtaagccttctcctcactctctcaatcttatccatcatagcaggcagttgaggtggattaaaccaaacccagctacgcaaaatcttagcatactcctcaattacccacatag

SEQ ID NO: 60146 - DNA, 120 bp, Homo sapiens
  misc_feature: 1342 for SV(W|O) and mtDNA
caaaccctgttcttgggtgggtgtgggtataatactaagttgagatgatatcatttacgggggaaggcgctttgtgaagtaggccttatttctcttgtcctttcgtacagggaggaattt

SEQ ID NO: 60147 - DNA, 120 bp, Homo sapiens
  misc_feature: 1342 for SV(W|O) and mtDNA
atatacaccaacaaacaatgttcaaccagtaactactactaatcaacgcccataatcatacaaagcccccgcaccaataggatcctcccgaatcaaccctgacccctctccttcataaat

SEQ ID NO: 60148 - DNA, 120 bp, Homo sapiens
  misc_feature: 1341 for SV(W|O) and mtDNA
tttttgttatgatgtctgtgtggaaagcggctgtgcagacattcaattgttattattatgtcctacaagcattaattaattaacacactttagtaagtatgttcgcctgtaatattgaac

SEQ ID NO: 60149 - DNA, 120 bp, Homo sapiens
  misc_feature: 1341 for SV(W|O) and mtDNA
tcagccacatagccctcgtagtaacagccattctcatccaaaccccctgaagcttcaccggcgcagtcattctcataatcgcccacgggcttacatcctcattactattctgcctagcaa

SEQ ID NO: 60150 - DNA, 120 bp, Homo sapiens
  misc_feature: 1341 for SV(W|O) and mtDNA
ttgatggcagcttctgtggaacgagggtttatttttttggttagaactggaataaaagctagcatgtttatttctaggcctactcaggtaaaaaatcagtgcgagcttagcgctgtgatg

SEQ ID NO: 60151 - DNA, 120 bp, Homo sapiens
  misc_feature: 1341 for SV(W|O) and mtDNA
gagggtgtttattataataatgtttgtgtattcggctatgaagaatagggcgaaggggcctgcggcgtattcgatgttgaagcctgagactagttcggactccccttcggcaaggtcgaa

SEQ ID NO: 60152 - DNA, 120 bp, Homo sapiens
  misc_feature: 1341 for SV(W|O) and mtDNA
ttcccctatcatagaagagcttatcacctttcatgatcacgccctcataatcattttccttatctgcttcctagtcctgtatgcccttttcctaacactcacaacaaaactaactaatac

SEQ ID NO: 60153 - DNA, 120 bp, Homo sapiens
  misc_feature: 1341 for SV(W|O) and mtDNA
ttcatagccgaatacacaaacattattataataaacaccctcaccactacaatcttcctaggaacaacatatgacgcactctcccctgaactctacacaacatattttgtcaccaagacc

SEQ ID NO: 60154 - DNA, 120 bp, Homo sapiens
  misc_feature: 1341 for SV(W|O) and mtDNA
actctcagtttactgctaaatccaccttcgacccttaagtttcataagggctatcgtagttttctggggtagaaaatgtagcccatttcttgccacctcatgggctacaccttgacctaa

SEQ ID NO: 60155 - DNA, 120 bp, Homo sapiens
  misc_feature: 1341 for SV(W|O) and mtDNA
tgtgttgtggtaaatatgtagagggagtatagggctgtgactagtatgttgagtcctgtaagtaggagagtgatatttgatcaggagaacgtggttactagcacagagagttctcccagt

SEQ ID NO: 60156 - DNA, 120 bp, Homo sapiens
  misc_feature: 1341 for SV(W|O) and mtDNA
tgcacactactataaccaccctaaccctgacttccctaattccccccatccttaccaccctcgttaaccctaacaaaaaaaactcatacccccattatgtaaaatccattgtcgcatcca

SEQ ID NO: 60157 - DNA, 120 bp, Homo sapiens
  misc_feature: 1341 for SV(W|O) and mtDNA
atctgttcgcttcattcattgcccccacaatcctaggcctacccgccgcagtactgatcattctatttccccctctattgatccccacctccaaatatctcatcaacaaccgactaatca

SEQ ID NO: 60158 - DNA, 120 bp, Homo sapiens
  misc_feature: 1341 for SV(W|O) and mtDNA
tcttgtcctttcgtacagggaggaatttgaagtagatagaaaccgacctggattactccggtctgaactcagatcacgtaggactttaatcgttgaacaaacgaacctttaatagcggct

SEQ ID NO: 60159 - DNA, 120 bp, Homo sapiens
  misc_feature: 1341 for SV(W|O) and mtDNA
acttaaaactttacagtcagaggttcaattcctcttcttaacaacatacccatggccaacctcctactcctcattgtacccattctaatcgcaatggcattcctaatgcttaccgaacga

SEQ ID NO: 60160 - DNA, 120 bp, Homo sapiens
  misc_feature: 1341 for SV(W|O) and mtDNA
atttattctagccacctctagcctagccgtttactcaatcctctgatcagggtgagcatcaaactcaaactacgccctgatcggcgcactgcgagcagtagcccaaacaatctcatatga

SEQ ID NO: 60161 - DNA, 120 bp, Homo sapiens
  misc_feature: 1341 for SV(W|O) and mtDNA
atcttctccttacacctagcaggtgtctcctctatcttaggggccatcaatttcatcacaacaattatcaatataaaaccccctgccataacccaataccaaacgcccctcttcgtctga

SEQ ID NO: 60162 - DNA, 120 bp, Homo sapiens
  misc_feature: 1341 for SV(W|O) and mtDNA
aaccctgttcttgggtgggtgtgggtataatactaagttgagatgatatcatttacgggggaaggcgctttgtgaagtaggccttatttctcttgtcctttcgtacagggaggaatttga

SEQ ID NO: 60163 - DNA, 120 bp, Homo sapiens
  misc_feature: 1341 for SV(W|O) and mtDNA
gtttggtattgggttatggcagggggttttatattgataattgttgtgatgaaattgatggcccctaagatagaggagacacctgctaggtgtaaggagaagatggttaggtctacggag

SEQ ID NO: 60164 - DNA, 120 bp, Homo sapiens
  misc_feature: 1341 for SV(W|O) and mtDNA
gtggcacggagaattttggattctcagggatgggttcgattctcatagtcctagaaataagggggtttaagctcctattatttactctatcaaagtaactcttttatcagacatatttct

SEQ ID NO: 60165 - DNA, 120 bp, Homo sapiens
  misc_feature: 1341 for SV(W|O) and mtDNA
cttcatagccgaatacacaaacattattataataaacaccctcaccactacaatcttcctaggaacaacatatgacgcactctcccctgaactctacacaacatattttgtcaccaagac

SEQ ID NO: 60166 - DNA, 120 bp, Homo sapiens
  misc_feature: 1341 for SV(W|O) and mtDNA
gtataatactaagttgagatgatatcatttacgggggaaggcgctttgtgaagtaggccttatttctcttgtcctttcgtacagggaggaatttgaagtagatagaaaccgacctggatt

SEQ ID NO: 60167 - DNA, 120 bp, Homo sapiens
  misc_feature: 1341 for SV(W|O) and mtDNA
aaaatcgctcattgcatactcttcaatcagccacatagccctcgtagtaacagccattctcatccaaaccccctgaagcttcaccggcgcagtcattctcataatcgcccacgggcttac

SEQ ID NO: 60168 - DNA, 120 bp, Homo sapiens
  misc_feature: 1341 for SV(W|O) and mtDNA
gaagtcaccctagccatcattctactatcaacattactaataagtggctcctttaacctctccacccttatcacaacacaagaacacctctgattactcctgccatcatgacccttggcc

SEQ ID NO: 60169 - DNA, 120 bp, Homo sapiens
  misc_feature: 1341 for SV(W|O) and mtDNA
ggaggttggccatgggtatgttgttaagaagaggaattgaacctctgactgtaaagttttaagttttatgcgattaccgggctctgccatcttaacaaaccctgttcttgggtgggtgtg

SEQ ID NO: 60170 - DNA, 120 bp, Homo sapiens
  misc_feature: 1341 for SV(W|O) and mtDNA
gcttgcgtgaggaaatacttgatggcagcttctgtggaacgagggtttatttttttggttagaactggaataaaagctagcatgtttatttctaggcctactcaggtaaaaaatcagtgc

SEQ ID NO: 60171 - DNA, 120 bp, Homo sapiens
  misc_feature: 1341 for SV(W|O) and mtDNA
gctcaggagtttgatagttcttgggcagtgagagtgagtagtagaatgtttagtgagcctagggtgttgtgagtgtaaattagtgcgatgagtaggggaagggagcctactagggtgtag

SEQ ID NO: 60172 - DNA, 120 bp, Homo sapiens
  misc_feature: 1341 for SV(W|O) and mtDNA
gctatgtggctgattgaagagtatgcaatgagcgattttaggtctgtttgtcgtaggcagatggagcttgttataattatgcctcatagggatagtacaaggaaggggtaggctatgtgt

SEQ ID NO: 60173 - DNA, 120 bp, Homo sapiens
  misc_feature: 1341 for SV(W|O) and mtDNA
gcgtttggtattgggttatggcagggggttttatattgataattgttgtgatgaaattgatggcccctaagatagaggagacacctgctaggtgtaaggagaagatggttaggtctacgg

SEQ ID NO: 60174 - DNA, 120 bp, Homo sapiens
  misc_feature: 1341 for SV(W|O) and mtDNA
gagtttgaagtccttgagagaggattatgatgcgactgtgagtgcgttcgtagtttgagtttgctaggcagaatagtaatgaggatgtaagcccgtgggcgattatgagaatgactgcgc

SEQ ID NO: 60175 - DNA, 120 bp, Homo sapiens
  misc_feature: 1341 for SV(W|O) and mtDNA
agtcattgttgggtggtgattagtcggttgttgatgagatatttggaggtggggatcaatagagggggaaatagaatgatcagtactgcggcgggtaggcctaggattgtgggggcaatg

SEQ ID NO: 60176 - DNA, 120 bp, Homo sapiens
  misc_feature: 1341 for SV(W|O) and mtDNA
caacagccttcataggctatgtcctcccgtgaggccaaatatcattctgaggggccacagtaattacaaacttactatccgccatcccatacattgggacagacctagttcaatgaatct

SEQ ID NO: 60177 - DNA, 120 bp, Homo sapiens
  misc_feature: 1341 for SV(W|O) and mtDNA
aaaccctgttcttgggtgggtgtgggtataatactaagttgagatgatatcatttacgggggaaggcgctttgtgaagtaggccttatttctcttgtcctttcgtacagggaggaatttg

SEQ ID NO: 60178 - DNA, 120 bp, Homo sapiens
  misc_feature: 1341 for SV(W|O) and mtDNA
aggccttatttctcttgtcctttcgtacagggaggaatttgaagtagatagaaaccgacctggattactccggtctgaactcagatcacgtaggactttaatcgttgaacaaacgaacct

SEQ ID NO: 60179 - DNA, 120 bp, Homo sapiens
  misc_feature: 1341 for SV(W|O) and mtDNA
acatctcagacgctcaggaaatagaaaccgtctgaactatcctgcccgccatcatcctagtcctcatcgccctcccatccctacgcatcctttacataacagacgaggtcaacgatccct

SEQ ID NO: 60180 - DNA, 120 bp, Homo sapiens
  misc_feature: 1340 for SV(W|O) and mtDNA
aatgttcaaccagtaactactactaatcaacgcccataatcatacaaagcccccgcaccaataggatcctcccgaatcaaccctgacccctctccttcataaattattcagcttcctaca

SEQ ID NO: 60181 - DNA, 120 bp, Homo sapiens
  misc_feature: 1340 for SV(W|O) and mtDNA
cgcttcattcattgcccccacaatcctaggcctacccgccgcagtactgatcattctatttccccctctattgatccccacctccaaatatctcatcaacaaccgactaatcaccaccca

SEQ ID NO: 60182 - DNA, 120 bp, Homo sapiens
  misc_feature: 1340 for SV(W|O) and mtDNA
tggagagctcccgtgagtggttaatagggtgatagacctgtgatccatcgtgatgtcttatttaaggggaacgtgtgggctatttaggctttatgaccctgaagtaggaaccagatgtcg

SEQ ID NO: 60183 - DNA, 120 bp, Homo sapiens
  misc_feature: 1340 for SV(W|O) and mtDNA
ctcaggaaatagaaaccgtctgaactatcctgcccgccatcatcctagtcctcatcgccctcccatccctacgcatcctttacataacagacgaggtcaacgatccctcccttaccatca

SEQ ID NO: 60184 - DNA, 120 bp, Homo sapiens
  misc_feature: 1340 for SV(W|O) and mtDNA
tgaggggagtcaggggtggagacctaattgggctgatttgcctgctgctgctaggaggaggcctagtagtggggtgaggcttggattagcgtttagaagggctatttgttgtgggtctca

SEQ ID NO: 60185 - DNA, 120 bp, Homo sapiens
  misc_feature: 1340 for SV(W|O) and mtDNA
tctctgtgctagtaaccacgttctcctgatcaaatatcactctcctacttacaggactcaacatactagtcacagccctatactccctctacatatttaccacaacacaatggggctcac

SEQ ID NO: 60186 - DNA, 120 bp, Homo sapiens
  misc_feature: 1340 for SV(W|O) and mtDNA
tcggtaaataaggggtcgtaagcctctgttgtcagattcacaatctgatgttttggttaaactatatttacaagaggaaaacccggtaatgatgtcggggttgagggataggaggagaat

SEQ ID NO: 60187 - DNA, 120 bp, Homo sapiens
  misc_feature: 1340 for SV(W|O) and mtDNA
gggaagggtataaccaacattttcggggtatgggcccgatagcttatttagctgaccttactttaggatggggtgtgataggtggcacggagaattttggattctcagggatgggttcga

SEQ ID NO: 60188 - DNA, 120 bp, Homo sapiens
  misc_feature: 1340 for SV(W|O) and mtDNA
tcacttctgagtcccagaggttacccaaggcacccctctgacatccggcctgcttcttctcacatgacaaaaactagcccccatctcaatcatataccaaatctctccctcactaaacgt

SEQ ID NO: 60189 - DNA, 120 bp, Homo sapiens
  misc_feature: 1340 for SV(W|O) and mtDNA
tatcatatagtaaaacccagcccatgacccctaacaggggccctctcagccctcctaatgacctccggcctagccatgtgatttcacttccactccataacgctcctcatactaggccta

SEQ ID NO: 60190 - DNA, 120 bp, Homo sapiens
  misc_feature: 1340 for SV(W|O) and mtDNA
tacgaacgcactcacagtcgcatcataatcctctctcaaggacttcaaactctactcccactaatagctttttgatgacttctagcaagcctcgctaacctcgccttaccccccactatt

SEQ ID NO: 60191 - DNA, 120 bp, Homo sapiens
  misc_feature: 1340 for SV(W|O) and mtDNA
atgagtgaggcaggagtccgaggaggttagttgtggcaataaaaatgattaaggatactagtataagagatcaggttcgtcctttagtgttgtgtatggttatcatttgttttgaggtta

SEQ ID NO: 60192 - DNA, 120 bp, Homo sapiens
  misc_feature: 1340 for SV(W|O) and mtDNA
ggggtatactacggtcaatgctctgaaatctgtggagcaaaccacagtttcatgcccatcgtcctagaattaattcccctaaaaatctttgaaatagggcccgtatttaccctatagcac

SEQ ID NO: 60193 - DNA, 120 bp, Homo sapiens
  misc_feature: 1340 for SV(W|O) and mtDNA
cctattcttcatagccgaatacacaaacattattataataaacaccctcaccactacaatcttcctaggaacaacatatgacgcactctcccctgaactctacacaacatattttgtcac

SEQ ID NO: 60194 - DNA, 120 bp, Homo sapiens
  misc_feature: 1340 for SV(W|O) and mtDNA
gtccctttctccataaaattcttcttagtagctattaccttcttattatttgatctagaaattgccctccttttacccctaccatgagccctacaaacaactaacctgccactaatagtt

SEQ ID NO: 60195 - DNA, 120 bp, Homo sapiens
  misc_feature: 1340 for SV(W|O) and mtDNA
aaggattatggatgcggttgcttgcgtgaggaaatacttgatggcagcttctgtggaacgagggtttatttttttggttagaactggaataaaagctagcatgtttatttctaggcctac

SEQ ID NO: 60196 - DNA, 120 bp, Homo sapiens
  misc_feature: 1340 for SV(W|O) and mtDNA
ggctgccaggcgtttaatggggtttagtagggtagggttattttcgttaatgttagtaagggtggggaagcgaggttgacctgttagggtgagaagaattattcgagtgctataggcgct

SEQ ID NO: 60197 - DNA, 120 bp, Homo sapiens
  misc_feature: 1340 for SV(W|O) and mtDNA
gctgaggggagtcaggggtggagacctaattgggctgatttgcctgctgctgctaggaggaggcctagtagtggggtgaggcttggattagcgtttagaagggctatttgttgtgggtct

SEQ ID NO: 60198 - DNA, 120 bp, Homo sapiens
  misc_feature: 1340 for SV(W|O) and mtDNA
gctattgtgtgttcagatatgttaaagccactttcgtagtctattttgtgtcaactggagttttttacaactcaggtgagttttagctttattggggagggggtgatctaaaacactctt

SEQ ID NO: 60199 - DNA, 120 bp, Homo sapiens
  misc_feature: 1340 for SV(W|O) and mtDNA
actaatactaacatctcagacgctcaggaaatagaaaccgtctgaactatcctgcccgccatcatcctagtcctcatcgccctcccatccctacgcatcctttacataacagacgaggtc

SEQ ID NO: 60200 - DNA, 120 bp, Homo sapiens
  misc_feature: 1340 for SV(W|O) and mtDNA
gaaaaatcagaataggtgttggtatagaatggggtctcctcctccggcggggtcgaagaaggtggtgttgaggttgcggtctgttagtagtatagtgatgccagcagctaggactgggag

SEQ ID NO: 60201 - DNA, 120 bp, Homo sapiens
  misc_feature: 1340 for SV(W|O) and mtDNA
ctgaactcctcatacccaattggaccaatctatcaccctatagaagaactaatgttagtataagtaacatgaaaacattctcctccgcataagcctgcgtcagattaaaacactgaactg

SEQ ID NO: 60202 - DNA, 120 bp, Homo sapiens
  misc_feature: 1340 for SV(W|O) and mtDNA
ctatcatatagtaaaacccagcccatgacccctaacaggggccctctcagccctcctaatgacctccggcctagccatgtgatttcacttccactccataacgctcctcatactaggcct

SEQ ID NO: 60203 - DNA, 120 bp, Homo sapiens
  misc_feature: 1340 for SV(W|O) and mtDNA
actgtaatgtgctatgtacggtaaatggctttatgtactatgtactgttaagggtgggtaggtttgttggtatcctagtgggtgaggggtggctttggagttgcagttgatgtgtgatag

SEQ ID NO: 60204 - DNA, 120 bp, Homo sapiens
  misc_feature: 1340 for SV(W|O) and mtDNA
agagtaatagatagggctcaggcgtttgtgtatgatatgtttgcggtttcgatgatgtggtctttggagtagaaacctgtgaggaaaggtattcctgctaatgctaggctgccaatggtg

SEQ ID NO: 60205 - DNA, 120 bp, Homo sapiens
  misc_feature: 1339 for SV(W|O) and mtDNA
ttttttgttatgatgtctgtgtggaaagcggctgtgcagacattcaattgttattattatgtcctacaagcattaattaattaacacactttagtaagtatgttcgcctgtaatattgaa

SEQ ID NO: 60206 - DNA, 120 bp, Homo sapiens
  misc_feature: 1339 for SV(W|O) and mtDNA
ttgtgttgtggtaaatatgtagagggagtatagggctgtgactagtatgttgagtcctgtaagtaggagagtgatatttgatcaggagaacgtggttactagcacagagagttctcccag

SEQ ID NO: 60207 - DNA, 120 bp, Homo sapiens
  misc_feature: 1339 for SV(W|O) and mtDNA
ttattagtataaaaggggagataggtaggagtagcgtggtaagggcgatgagtgtggggaggaatggggtgggttttgtatgttcaaactgtcattttatttttacgttgttagatatgg

SEQ ID NO: 60208 - DNA, 120 bp, Homo sapiens
  misc_feature: 1339 for SV(W|O) and mtDNA
cgaacgcactcacagtcgcatcataatcctctctcaaggacttcaaactctactcccactaatagctttttgatgacttctagcaagcctcgctaacctcgccttaccccccactattaa

SEQ ID NO: 60209 - DNA, 120 bp, Homo sapiens
  misc_feature: 1339 for SV(W|O) and mtDNA
attgtgttgtggtaaatatgtagagggagtatagggctgtgactagtatgttgagtcctgtaagtaggagagtgatatttgatcaggagaacgtggttactagcacagagagttctccca

SEQ ID NO: 60210 - DNA, 120 bp, Homo sapiens
  misc_feature: 1339 for SV(W|O) and mtDNA
tggcaagaaatgggctacattttctaccccagaaaactacgatagcccttatgaaacttaagggtcgaaggtggatttagcagtaaactgagagtagagtgcttagttgaacagggccct

SEQ ID NO: 60211 - DNA, 120 bp, Homo sapiens
  misc_feature: 1339 for SV(W|O) and mtDNA
tgcaactccaaataaaagtaataaccatgcacactactataaccaccctaaccctgacttccctaattccccccatccttaccaccctcgttaaccctaacaaaaaaaactcataccccc

SEQ ID NO: 60212 - DNA, 120 bp, Homo sapiens
  misc_feature: 1339 for SV(W|O) and mtDNA
tcttaggggccatcaatttcatcacaacaattatcaatataaaaccccctgccataacccaataccaaacgcccctcttcgtctgatccgtcctaatcacagcagtcctacttctcctat

SEQ ID NO: 60213 - DNA, 120 bp, Homo sapiens
  misc_feature: 1339 for SV(W|O) and mtDNA
tctgactgtaaagttttaagttttatgcgattaccgggctctgccatcttaacaaaccctgttcttgggtgggtgtgggtataatactaagttgagatgatatcatttacgggggaaggc

SEQ ID NO: 60214 - DNA, 120 bp, Homo sapiens
  misc_feature: 1339 for SV(W|O) and mtDNA
tcgagtgctataggcgcttgtcagggaggtagcgatgagagtaatagatagggctcaggcgtttgtgtatgatatgtttgcggtttcgatgatgtggtctttggagtagaaacctgtgag

SEQ ID NO: 60215 - DNA, 120 bp, Homo sapiens
  misc_feature: 1339 for SV(W|O) and mtDNA
tatgcctcatagggatagtacaaggaaggggtaggctatgtgttttgtcagggggttgagaatgagtgtgaggcgtattataccatagccgcctagttttaagagtactgcggcaagtac

SEQ ID NO: 60216 - DNA, 120 bp, Homo sapiens
  misc_feature: 1339 for SV(W|O) and mtDNA
taggccttatttctcttgtcctttcgtacagggaggaatttgaagtagatagaaaccgacctggattactccggtctgaactcagatcacgtaggactttaatcgttgaacaaacgaacc

SEQ ID NO: 60217 - DNA, 120 bp, Homo sapiens
  misc_feature: 1339 for SV(W|O) and mtDNA
atcttaggggccatcaatttcatcacaacaattatcaatataaaaccccctgccataacccaataccaaacgcccctcttcgtctgatccgtcctaatcacagcagtcctacttctccta

SEQ ID NO: 60218 - DNA, 120 bp, Homo sapiens
  misc_feature: 1339 for SV(W|O) and mtDNA
gatggtggtcaagggacccctatctgaggggggtcatccatggggacgagaagggatttgactgtaatgtgctatgtacggtaaatggctttatgtactatgtactgttaagggtgggta

SEQ ID NO: 60219 - DNA, 120 bp, Homo sapiens
  misc_feature: 1339 for SV(W|O) and mtDNA
taacctactgggagaactctctgtgctagtaaccacgttctcctgatcaaatatcactctcctacttacaggactcaacatactagtcacagccctatactccctctacatatttaccac

SEQ ID NO: 60220 - DNA, 120 bp, Homo sapiens
  misc_feature: 1339 for SV(W|O) and mtDNA
taaccatgcacactactataaccaccctaaccctgacttccctaattccccccatccttaccaccctcgttaaccctaacaaaaaaaactcatacccccattatgtaaaatccattgtcg

SEQ ID NO: 60221 - DNA, 120 bp, Homo sapiens
  misc_feature: 1339 for SV(W|O) and mtDNA
gtacccattctaatcgcaatggcattcctaatgcttaccgaacgaaaaattctaggctatatacaactacgcaaaggccccaacgttgtaggcccctacgggctactacaacccttcgct

SEQ ID NO: 60222 - DNA, 120 bp, Homo sapiens
  misc_feature: 1339 for SV(W|O) and mtDNA
ggcgctttgtgaagtaggccttatttctcttgtcctttcgtacagggaggaatttgaagtagatagaaaccgacctggattactccggtctgaactcagatcacgtaggactttaatcgt

SEQ ID NO: 60223 - DNA, 120 bp, Homo sapiens
  misc_feature: 1339 for SV(W|O) and mtDNA
gctgccaggcgtttaatggggtttagtagggtagggttattttcgttaatgttagtaagggtggggaagcgaggttgacctgttagggtgagaagaattattcgagtgctataggcgctt

SEQ ID NO: 60224 - DNA, 120 bp, Homo sapiens
  misc_feature: 1339 for SV(W|O) and mtDNA
gccccattgtgttgtggtaaatatgtagagggagtatagggctgtgactagtatgttgagtcctgtaagtaggagagtgatatttgatcaggagaacgtggttactagcacagagagttc

SEQ ID NO: 60225 - DNA, 120 bp, Homo sapiens
  misc_feature: 1339 for SV(W|O) and mtDNA
cttgatggcagcttctgtggaacgagggtttatttttttggttagaactggaataaaagctagcatgtttatttctaggcctactcaggtaaaaaatcagtgcgagcttagcgctgtgat

SEQ ID NO: 60226 - DNA, 120 bp, Homo sapiens
  misc_feature: 1339 for SV(W|O) and mtDNA
ctctgtgctagtaaccacgttctcctgatcaaatatcactctcctacttacaggactcaacatactagtcacagccctatactccctctacatatttaccacaacacaatggggctcact

SEQ ID NO: 60227 - DNA, 120 bp, Homo sapiens
  misc_feature: 1339 for SV(W|O) and mtDNA
ctcctctatcttaggggccatcaatttcatcacaacaattatcaatataaaaccccctgccataacccaataccaaacgcccctcttcgtctgatccgtcctaatcacagcagtcctact

SEQ ID NO: 60228 - DNA, 120 bp, Homo sapiens
  misc_feature: 1339 for SV(W|O) and mtDNA
ccctcaaacctaagaaatatgtctgataaaagagttactttgatagagtaaataataggagcttaaacccccttatttctaggactatgagaatcgaacccatccctgagaatccaaaat

SEQ ID NO: 60229 - DNA, 120 bp, Homo sapiens
  misc_feature: 1339 for SV(W|O) and mtDNA
agccggagcaccctatgtcgcagtatctgtctttgattcctgcctcatcccattatttatcgcacctacgttcaatattacaggcgaacatacttactaaagtgtgttaattaattaatg

SEQ ID NO: 60230 - DNA, 120 bp, Homo sapiens
  misc_feature: 1339 for SV(W|O) and mtDNA
agtaagtttgtaattactgtggcccctcagaatgatatttggcctcacgggaggacatagcctatgaaggctgttgctatagttgcaagcaggaggataatgccgatgtttcaggtttct

SEQ ID NO: 60231 - DNA, 120 bp, Homo sapiens
  misc_feature: 1338 for SV(W|O) and mtDNA
cccgcgtccctttctccataaaattcttcttagtagctattaccttcttattatttgatctagaaattgccctccttttacccctaccatgagccctacaaacaactaacctgccactaa

SEQ ID NO: 60232 - DNA, 120 bp, Homo sapiens
  misc_feature: 1338 for SV(W|O) and mtDNA
tcttactcatccgcttccaccccctagcagaaaatagcccactaatccaaactctaacactatgcttaggcgctatcaccactctgttcgcagcagtctgcgcccttacacaaaatgaca

SEQ ID NO: 60233 - DNA, 120 bp, Homo sapiens
  misc_feature: 1338 for SV(W|O) and mtDNA
tggtgcaactccaaataaaagtaataaccatgcacactactataaccaccctaaccctgacttccctaattccccccatccttaccaccctcgttaaccctaacaaaaaaaactcatacc

SEQ ID NO: 60234 - DNA, 120 bp, Homo sapiens
  misc_feature: 1338 for SV(W|O) and mtDNA
atcagccacatagccctcgtagtaacagccattctcatccaaaccccctgaagcttcaccggcgcagtcattctcataatcgcccacgggcttacatcctcattactattctgcctagca

SEQ ID NO: 60235 - DNA, 120 bp, Homo sapiens
  misc_feature: 1338 for SV(W|O) and mtDNA
tcctctatcttaggggccatcaatttcatcacaacaattatcaatataaaaccccctgccataacccaataccaaacgcccctcttcgtctgatccgtcctaatcacagcagtcctactt

SEQ ID NO: 60236 - DNA, 120 bp, Homo sapiens
  misc_feature: 1338 for SV(W|O) and mtDNA
tccaccccttacgagtgcggcttcgaccctatatcccccgcccgcgtccctttctccataaaattcttcttagtagctattaccttcttattatttgatctagaaattgccctcctttta

SEQ ID NO: 60237 - DNA, 120 bp, Homo sapiens
  misc_feature: 1338 for SV(W|O) and mtDNA
taaaaaatcccaaacatataactgaactcctcatacccaattggaccaatctatcaccctatagaagaactaatgttagtataagtaacatgaaaacattctcctccgcataagcctgcg

SEQ ID NO: 60238 - DNA, 120 bp, Homo sapiens
  misc_feature: 1338 for SV(W|O) and mtDNA
ggccttatttctcttgtcctttcgtacagggaggaatttgaagtagatagaaaccgacctggattactccggtctgaactcagatcacgtaggactttaatcgttgaacaaacgaacctt

SEQ ID NO: 60239 - DNA, 120 bp, Homo sapiens
  misc_feature: 1338 for SV(W|O) and mtDNA
gcctggttctaggaataatgggggaagtatgtaggagttgaagattagtccgccgtagtcggtgtactcgtaggttcagtaccattggtggccaattgatttgatggtaagggagggatc

SEQ ID NO: 60240 - DNA, 120 bp, Homo sapiens
  misc_feature: 1338 for SV(W|O) and mtDNA
cttctccttacacctagcaggtgtctcctctatcttaggggccatcaatttcatcacaacaattatcaatataaaaccccctgccataacccaataccaaacgcccctcttcgtctgatc

SEQ ID NO: 60241 - DNA, 120 bp, Homo sapiens
  misc_feature: 1338 for SV(W|O) and mtDNA
gagagtaatagatagggctcaggcgtttgtgtatgatatgtttgcggtttcgatgatgtggtctttggagtagaaacctgtgaggaaaggtattcctgctaatgctaggctgccaatggt

SEQ ID NO: 60242 - DNA, 120 bp, Homo sapiens
  misc_feature: 1338 for SV(W|O) and mtDNA
ctttctccataaaattcttcttagtagctattaccttcttattatttgatctagaaattgccctccttttacccctaccatgagccctacaaacaactaacctgccactaatagttatgt

SEQ ID NO: 60243 - DNA, 120 bp, Homo sapiens
  misc_feature: 1338 for SV(W|O) and mtDNA
cttgcgtgaggaaatacttgatggcagcttctgtggaacgagggtttatttttttggttagaactggaataaaagctagcatgtttatttctaggcctactcaggtaaaaaatcagtgcg

SEQ ID NO: 60244 - DNA, 120 bp, Homo sapiens
  misc_feature: 1338 for SV(W|O) and mtDNA
ctcactaaacgtaagccttctcctcactctctcaatcttatccatcatagcaggcagttgaggtggattaaaccaaacccagctacgcaaaatcttagcatactcctcaattacccacat

SEQ ID NO: 60245 - DNA, 120 bp, Homo sapiens
  misc_feature: 1338 for SV(W|O) and mtDNA
cggtaccctaaccgtgcaaaggtagcataatcacttgttccttaaatagggacctgtatgaatggctccacgagggttcagctgtctcttacttttaaccagtgaaattgacctgcccgt

SEQ ID NO: 60246 - DNA, 120 bp, Homo sapiens
  misc_feature: 1338 for SV(W|O) and mtDNA
catatgaagtcaccctagccatcattctactatcaacattactaataagtggctcctttaacctctccacccttatcacaacacaagaacacctctgattactcctgccatcatgaccct

SEQ ID NO: 60247 - DNA, 120 bp, Homo sapiens
  misc_feature: 1338 for SV(W|O) and mtDNA
agcattgaccgtagtatacccccggtcgtgtagcggtgaaagtggtttggtttagacgtccgggaattgcatctgtttttaagcctaatgtggggacagctcatgagtgcaagacgtctt

SEQ ID NO: 60248 - DNA, 120 bp, Homo sapiens
  misc_feature: 1338 for SV(W|O) and mtDNA
aatttttcgttcggtaagcattaggaatgccattgcgattagaatgggtacaatgaggagtaggaggttggccatgggtatgttgttaagaagaggaattgaacctctgactgtaaagtt

SEQ ID NO: 60249 - DNA, 120 bp, Homo sapiens
  misc_feature: 1337 for SV(W|O) and mtDNA
gatgcggttgcttgcgtgaggaaatacttgatggcagcttctgtggaacgagggtttatttttttggttagaactggaataaaagctagcatgtttatttctaggcctactcaggtaaaa

SEQ ID NO: 60250 - DNA, 120 bp, Homo sapiens
  misc_feature: 1337 for SV(W|O) and mtDNA
ataaaagtaataaccatgcacactactataaccaccctaaccctgacttccctaattccccccatccttaccaccctcgttaaccctaacaaaaaaaactcatacccccattatgtaaaa

SEQ ID NO: 60251 - DNA, 120 bp, Homo sapiens
  misc_feature: 1337 for SV(W|O) and mtDNA
tttcacttctgagtcccagaggttacccaaggcacccctctgacatccggcctgcttcttctcacatgacaaaaactagcccccatctcaatcatataccaaatctctccctcactaaac

SEQ ID NO: 60252 - DNA, 120 bp, Homo sapiens
  misc_feature: 1337 for SV(W|O) and mtDNA
ttggccaccaatggtactgaacctacgagtacaccgactacggcggactaatcttcaactcctacatacttcccccattattcctagaaccaggcgacctgcgactccttgacgttgaca

SEQ ID NO: 60253 - DNA, 120 bp, Homo sapiens
  misc_feature: 1337 for SV(W|O) and mtDNA
ttgaacagggccctgaagcgcgtacacaccgcccgtcaccctcctcaagtatacttcaaaggacatttaactaaaacccctacgcatttatatagaggagacaagtcgtaacatggtaag

SEQ ID NO: 60254 - DNA, 120 bp, Homo sapiens
  misc_feature: 1337 for SV(W|O) and mtDNA
taattactgtggcccctcagaatgatatttggcctcacgggaggacatagcctatgaaggctgttgctatagttgcaagcaggaggataatgccgatgtttcaggtttctgagtagagaa

SEQ ID NO: 60255 - DNA, 120 bp, Homo sapiens
  misc_feature: 1337 for SV(W|O) and mtDNA
atatatacaccaacaaacaatgttcaaccagtaactactactaatcaacgcccataatcatacaaagcccccgcaccaataggatcctcccgaatcaaccctgacccctctccttcataa

SEQ ID NO: 60256 - DNA, 120 bp, Homo sapiens
  misc_feature: 1337 for SV(W|O) and mtDNA
ttaggggctctttggtgaagagttttatggcgtcagcgaagggttgtagtagcccgtaggggcctacaacgttggggcctttgcgtagttgtatatagcctagaatttttcgttcggtaa

SEQ ID NO: 60257 - DNA, 120 bp, Homo sapiens
  misc_feature: 1337 for SV(W|O) and mtDNA
gttgaacagggccctgaagcgcgtacacaccgcccgtcaccctcctcaagtatacttcaaaggacatttaactaaaacccctacgcatttatatagaggagacaagtcgtaacatggtaa

SEQ ID NO: 60258 - DNA, 120 bp, Homo sapiens
  misc_feature: 1337 for SV(W|O) and mtDNA
tgttaaagccactttcgtagtctattttgtgtcaactggagttttttacaactcaggtgagttttagctttattggggagggggtgatctaaaacactctttacgccggcttctattgac

SEQ ID NO: 60259 - DNA, 120 bp, Homo sapiens
  misc_feature: 1337 for SV(W|O) and mtDNA
tggggtgaggcttggattagcgtttagaagggctatttgttgtgggtctcatgagttggagtgtaggataaatcatgctaaggcgaggatgaaaccgatatcgccgatacggttgtatag

SEQ ID NO: 60260 - DNA, 120 bp, Homo sapiens
  misc_feature: 1337 for SV(W|O) and mtDNA
gtagtggtgagggtgtttattataataatgtttgtgtattcggctatgaagaatagggcgaaggggcctgcggcgtattcgatgttgaagcctgagactagttcggactccccttcggca

SEQ ID NO: 60261 - DNA, 120 bp, Homo sapiens
  misc_feature: 1337 for SV(W|O) and mtDNA
tgatttatcctacactccaactcatgagacccacaacaaatagcccttctaaacgctaatccaagcctcaccccactactaggcctcctcctagcagcagcaggcaaatcagcccaatta

SEQ ID NO: 60262 - DNA, 120 bp, Homo sapiens
  misc_feature: 1337 for SV(W|O) and mtDNA
ggccctctcagccctcctaatgacctccggcctagccatgtgatttcacttccactccataacgctcctcatactaggcctactaaccaacacactaaccatataccaatgatggcgcga

SEQ ID NO: 60263 - DNA, 120 bp, Homo sapiens
  misc_feature: 1337 for SV(W|O) and mtDNA
ctaaacgtaagccttctcctcactctctcaatcttatccatcatagcaggcagttgaggtggattaaaccaaacccagctacgcaaaatcttagcatactcctcaattacccacatagga

SEQ ID NO: 60264 - DNA, 120 bp, Homo sapiens
  misc_feature: 1337 for SV(W|O) and mtDNA
cgccgtagtcggtgtactcgtaggttcagtaccattggtggccaattgatttgatggtaagggagggatcgttgacctcgtctgttatgtaaaggatgcgtagggatgggagggcgatga

SEQ ID NO: 60265 - DNA, 120 bp, Homo sapiens
  misc_feature: 1337 for SV(W|O) and mtDNA
tcagagcattgaccgtagtatacccccggtcgtgtagcggtgaaagtggtttggtttagacgtccgggaattgcatctgtttttaagcctaatgtggggacagctcatgagtgcaagacg

SEQ ID NO: 60266 - DNA, 120 bp, Homo sapiens
  misc_feature: 1337 for SV(W|O) and mtDNA
cccctatcatagaagagcttatcacctttcatgatcacgccctcataatcattttccttatctgcttcctagtcctgtatgcccttttcctaacactcacaacaaaactaactaatacta

SEQ ID NO: 60267 - DNA, 120 bp, Homo sapiens
  misc_feature: 1337 for SV(W|O) and mtDNA
acgctactcctacctatctccccttttatactaataatcttatagaaatttaggttaaatacagaccaagagccttcaaagccctcagtaagttgcaatacttaatttctgtaacagcta

SEQ ID NO: 60268 - DNA, 120 bp, Homo sapiens
  misc_feature: 1337 for SV(W|O) and mtDNA
tagccgaatacacaaacattattataataaacaccctcaccactacaatcttcctaggaacaacatatgacgcactctcccctgaactctacacaacatattttgtcaccaagaccctac

SEQ ID NO: 60269 - DNA, 120 bp, Homo sapiens
  misc_feature: 1337 for SV(W|O) and mtDNA
cacttctgagtcccagaggttacccaaggcacccctctgacatccggcctgcttcttctcacatgacaaaaactagcccccatctcaatcatataccaaatctctccctcactaaacgta

SEQ ID NO: 60270 - DNA, 120 bp, Homo sapiens
  misc_feature: 1337 for SV(W|O) and mtDNA
gcacactactataaccaccctaaccctgacttccctaattccccccatccttaccaccctcgttaaccctaacaaaaaaaactcatacccccattatgtaaaatccattgtcgcatccac

SEQ ID NO: 60271 - DNA, 120 bp, Homo sapiens
  misc_feature: 1337 for SV(W|O) and mtDNA
gtgaaagtggtttggtttagacgtccgggaattgcatctgtttttaagcctaatgtggggacagctcatgagtgcaagacgtcttgtgatgtaattattatacgaatgggggcttcaatc

SEQ ID NO: 60272 - DNA, 120 bp, Homo sapiens
  misc_feature: 1337 for SV(W|O) and mtDNA
gtagggttattttcgttaatgttagtaagggtggggaagcgaggttgacctgttagggtgagaagaattattcgagtgctataggcgcttgtcagggaggtagcgatgagagtaatagat

SEQ ID NO: 60273 - DNA, 120 bp, Homo sapiens
  misc_feature: 1337 for SV(W|O) and mtDNA
gtagaaacctgtgaggaaaggtattcctgctaatgctaggctgccaatggtgagggaggttgaagtgagaggtatggttttgagtagtcctcctatttttcgaatatcttgttcattgtt

SEQ ID NO: 60274 - DNA, 120 bp, Homo sapiens
  misc_feature: 1337 for SV(W|O) and mtDNA
ataatactaagttgagatgatatcatttacgggggaaggcgctttgtgaagtaggccttatttctcttgtcctttcgtacagggaggaatttgaagtagatagaaaccgacctggattac

SEQ ID NO: 60275 - DNA, 120 bp, Homo sapiens
  misc_feature: 1337 for SV(W|O) and mtDNA
gcggtaccctaaccgtgcaaaggtagcataatcacttgttccttaaatagggacctgtatgaatggctccacgagggttcagctgtctcttacttttaaccagtgaaattgacctgcccg

SEQ ID NO: 60276 - DNA, 120 bp, Homo sapiens
  misc_feature: 1337 for SV(W|O) and mtDNA
aaccatgcacactactataaccaccctaaccctgacttccctaattccccccatccttaccaccctcgttaaccctaacaaaaaaaactcatacccccattatgtaaaatccattgtcgc

SEQ ID NO: 60277 - DNA, 120 bp, Homo sapiens
  misc_feature: 1337 for SV(W|O) and mtDNA
cctagaaataagggggtttaagctcctattatttactctatcaaagtaactcttttatcagacatatttcttaggtttgagggggaatgctggagattgtaatgggtatggagacatatc

SEQ ID NO: 60278 - DNA, 120 bp, Homo sapiens
  misc_feature: 1337 for SV(W|O) and mtDNA
attatggatgcggttgcttgcgtgaggaaatacttgatggcagcttctgtggaacgagggtttatttttttggttagaactggaataaaagctagcatgtttatttctaggcctactcag

SEQ ID NO: 60279 - DNA, 120 bp, Homo sapiens
  misc_feature: 1337 for SV(W|O) and mtDNA
aaaatcagaataggtgttggtatagaatggggtctcctcctccggcggggtcgaagaaggtggtgttgaggttgcggtctgttagtagtatagtgatgccagcagctaggactgggagag

SEQ ID NO: 60280 - DNA, 120 bp, Homo sapiens
  misc_feature: 1337 for SV(W|O) and mtDNA
ccatgcacactactataaccaccctaaccctgacttccctaattccccccatccttaccaccctcgttaaccctaacaaaaaaaactcatacccccattatgtaaaatccattgtcgcat

SEQ ID NO: 60281 - DNA, 120 bp, Homo sapiens
  misc_feature: 1337 for SV(W|O) and mtDNA
aacaaaccctgttcttgggtgggtgtgggtataatactaagttgagatgatatcatttacgggggaaggcgctttgtgaagtaggccttatttctcttgtcctttcgtacagggaggaat

SEQ ID NO: 60282 - DNA, 120 bp, Homo sapiens
  misc_feature: 1336 for SV(W|O) and mtDNA
ttttaggggctctttggtgaagagttttatggcgtcagcgaagggttgtagtagcccgtaggggcctacaacgttggggcctttgcgtagttgtatatagcctagaatttttcgttcggt

SEQ ID NO: 60283 - DNA, 120 bp, Homo sapiens
  misc_feature: 1336 for SV(W|O) and mtDNA
agcaccacgaccctactactatctcgcacctgaaacaagctaacatgactaacacccttaattccatccaccctcctctccctaggaggcctgcccccgctaaccggctttttgcccaaa

SEQ ID NO: 60284 - DNA, 120 bp, Homo sapiens
  misc_feature: 1336 for SV(W|O) and mtDNA
tttgactgtaatgtgctatgtacggtaaatggctttatgtactatgtactgttaagggtgggtaggtttgttggtatcctagtgggtgaggggtggctttggagttgcagttgatgtgtg

SEQ ID NO: 60285 - DNA, 120 bp, Homo sapiens
  misc_feature: 1336 for SV(W|O) and mtDNA
tttacttcctctctttcttcttcccactcatcctaaccctactcctaatcacataacctattcccccgagcaatctcaattacaatatatacaccaacaaacaatgttcaaccagtaact

SEQ ID NO: 60286 - DNA, 120 bp, Homo sapiens
  misc_feature: 1336 for SV(W|O) and mtDNA
cccaccatcatagccaccatcaccctccttaacctctacttctacctacgcctaatctactccacctcaatcacactactccccatatctaacaacgtaaaaataaaatgacagtttgaa

SEQ ID NO: 60287 - DNA, 120 bp, Homo sapiens
  misc_feature: 1336 for SV(W|O) and mtDNA
tgtttttggtaaacaggcggggtaagatttgccgagttccttttactttttttaacctttccttatgagcatgcctgtgttgggttgacagtgagggtaataatgacttgttggttgatt

SEQ ID NO: 60288 - DNA, 120 bp, Homo sapiens
  misc_feature: 1336 for SV(W|O) and mtDNA
aaaattctaggctatatacaactacgcaaaggccccaacgttgtaggcccctacgggctactacaacccttcgctgacgccataaaactcttcaccaaagagcccctaaaacccgccaca

SEQ ID NO: 60289 - DNA, 120 bp, Homo sapiens
  misc_feature: 1336 for SV(W|O) and mtDNA
tggagccggagcaccctatgtcgcagtatctgtctttgattcctgcctcatcccattatttatcgcacctacgttcaatattacaggcgaacatacttactaaagtgtgttaattaatta

SEQ ID NO: 60290 - DNA, 120 bp, Homo sapiens
  misc_feature: 1336 for SV(W|O) and mtDNA
ctacctatctccccttttatactaataatcttatagaaatttaggttaaatacagaccaagagccttcaaagccctcagtaagttgcaatacttaatttctgtaacagctaaggactgca

SEQ ID NO: 60291 - DNA, 120 bp, Homo sapiens
  misc_feature: 1336 for SV(W|O) and mtDNA
cattttgtgtaagggcgcagactgctgcgaacagagtggtgatagcgcctaagcatagtgttagagtttggattagtgggctattttctgctagggggtggaagcggatgagtaagaaga

SEQ ID NO: 60292 - DNA, 120 bp, Homo sapiens
  misc_feature: 1336 for SV(W|O) and mtDNA
tatcttaggggccatcaatttcatcacaacaattatcaatataaaaccccctgccataacccaataccaaacgcccctcttcgtctgatccgtcctaatcacagcagtcctacttctcct

SEQ ID NO: 60293 - DNA, 120 bp, Homo sapiens
  misc_feature: 1336 for SV(W|O) and mtDNA
tagtagggtagggttattttcgttaatgttagtaagggtggggaagcgaggttgacctgttagggtgagaagaattattcgagtgctataggcgcttgtcagggaggtagcgatgagagt

SEQ ID NO: 60294 - DNA, 120 bp, Homo sapiens
  misc_feature: 1336 for SV(W|O) and mtDNA
taataaccatgcacactactataaccaccctaaccctgacttccctaattccccccatccttaccaccctcgttaaccctaacaaaaaaaactcatacccccattatgtaaaatccattg

SEQ ID NO: 60295 - DNA, 120 bp, Homo sapiens
  misc_feature: 1336 for SV(W|O) and mtDNA
catgtcgaagcccccatcgctgggtcaatagtacttgccgcagtactcttaaaactaggcggctatggtataatacgcctcacactcattctcaaccccctgacaaaacacatagcctac

SEQ ID NO: 60296 - DNA, 120 bp, Homo sapiens
  misc_feature: 1336 for SV(W|O) and mtDNA
caaactcaaactacgaacgcactcacagtcgcatcataatcctctctcaaggacttcaaactctactcccactaatagctttttgatgacttctagcaagcctcgctaacctcgccttac

SEQ ID NO: 60297 - DNA, 120 bp, Homo sapiens
  misc_feature: 1336 for SV(W|O) and mtDNA
cgcggtaccctaaccgtgcaaaggtagcataatcacttgttccttaaatagggacctgtatgaatggctccacgagggttcagctgtctcttacttttaaccagtgaaattgacctgccc

SEQ ID NO: 60298 - DNA, 120 bp, Homo sapiens
  misc_feature: 1336 for SV(W|O) and mtDNA
aacatctcagacgctcaggaaatagaaaccgtctgaactatcctgcccgccatcatcctagtcctcatcgccctcccatccctacgcatcctttacataacagacgaggtcaacgatccc

SEQ ID NO: 60299 - DNA, 120 bp, Homo sapiens
  misc_feature: 1336 for SV(W|O) and mtDNA
ctgggtcaatagtacttgccgcagtactcttaaaactaggcggctatggtataatacgcctcacactcattctcaaccccctgacaaaacacatagcctaccccttccttgtactatccc

SEQ ID NO: 60300 - DNA, 120 bp, Homo sapiens
  misc_feature: 1336 for SV(W|O) and mtDNA
aaattgaccaaccctggggttagtatagcttagttaaactttcgtttattgctaaaggttaatcactgctgtttcccgtgggggtgtggctaggctaagcgttttgagctgcattgctgc

SEQ ID NO: 60301 - DNA, 120 bp, Homo sapiens
  misc_feature: 1336 for SV(W|O) and mtDNA
gcaatggcattcctaatgcttaccgaacgaaaaattctaggctatatacaactacgcaaaggccccaacgttgtaggcccctacgggctactacaacccttcgctgacgccataaaactc

SEQ ID NO: 60302 - DNA, 120 bp, Homo sapiens
  misc_feature: 1336 for SV(W|O) and mtDNA
gatggcagcttctgtggaacgagggtttatttttttggttagaactggaataaaagctagcatgtttatttctaggcctactcaggtaaaaaatcagtgcgagcttagcgctgtgatgag

SEQ ID NO: 60303 - DNA, 120 bp, Homo sapiens
  misc_feature: 1336 for SV(W|O) and mtDNA
gagggtagactgttcaacctgttcctgctccggcctccactatagcagatgcgagcaggagtaggagagagggaggtaagagtcagaagcttatgttgtttatgcggggaaacgccatat

SEQ ID NO: 60304 - DNA, 120 bp, Homo sapiens
  misc_feature: 1336 for SV(W|O) and mtDNA
ccttagcatgatttatcctacactccaactcatgagacccacaacaaatagcccttctaaacgctaatccaagcctcaccccactactaggcctcctcctagcagcagcaggcaaatcag

SEQ ID NO: 60305 - DNA, 120 bp, Homo sapiens
  misc_feature: 1336 for SV(W|O) and mtDNA
caatagtacttgccgcagtactcttaaaactaggcggctatggtataatacgcctcacactcattctcaaccccctgacaaaacacatagcctaccccttccttgtactatccctatgag

SEQ ID NO: 60306 - DNA, 120 bp, Homo sapiens
  misc_feature: 1336 for SV(W|O) and mtDNA
cgaaaatctgttcgcttcattcattgcccccacaatcctaggcctacccgccgcagtactgatcattctatttccccctctattgatccccacctccaaatatctcatcaacaaccgact

SEQ ID NO: 60307 - DNA, 120 bp, Homo sapiens
  misc_feature: 1336 for SV(W|O) and mtDNA
cctgctatgatggataagattgagagagtgaggagaaggcttacgtttagtgagggagagatttggtatatgattgagatgggggctagtttttgtcatgtgagaagaagcaggccggat

SEQ ID NO: 60308 - DNA, 120 bp, Homo sapiens
  misc_feature: 1336 for SV(W|O) and mtDNA
atttttcgttcggtaagcattaggaatgccattgcgattagaatgggtacaatgaggagtaggaggttggccatgggtatgttgttaagaagaggaattgaacctctgactgtaaagttt

SEQ ID NO: 60309 - DNA, 120 bp, Homo sapiens
  misc_feature: 1336 for SV(W|O) and mtDNA
aagattattagtataaaaggggagataggtaggagtagcgtggtaagggcgatgagtgtggggaggaatggggtgggttttgtatgttcaaactgtcattttatttttacgttgttagat

SEQ ID NO: 60310 - DNA, 120 bp, Homo sapiens
  misc_feature: 1336 for SV(W|O) and mtDNA
aggaattgaacctctgactgtaaagttttaagttttatgcgattaccgggctctgccatcttaacaaaccctgttcttgggtgggtgtgggtataatactaagttgagatgatatcattt

SEQ ID NO: 60311 - DNA, 120 bp, Homo sapiens
  misc_feature: 1336 for SV(W|O) and mtDNA
aataaccatgcacactactataaccaccctaaccctgacttccctaattccccccatccttaccaccctcgttaaccctaacaaaaaaaactcatacccccattatgtaaaatccattgt

SEQ ID NO: 60312 - DNA, 120 bp, Homo sapiens
  misc_feature: 1335 for SV(W|O) and mtDNA
gcttcattcattgcccccacaatcctaggcctacccgccgcagtactgatcattctatttccccctctattgatccccacctccaaatatctcatcaacaaccgactaatcaccacccaa

SEQ ID NO: 60313 - DNA, 120 bp, Homo sapiens
  misc_feature: 1335 for SV(W|O) and mtDNA
ttgggggtagctaaagtgaactgtatccgacatctggttcctacttcagggtcataaagcctaaatagcccacacgttccccttaaataagacatcacgatggatcacaggtctatcacc

SEQ ID NO: 60314 - DNA, 120 bp, Homo sapiens
  misc_feature: 1335 for SV(W|O) and mtDNA
cacctcaactgcctgctatgatggataagattgagagagtgaggagaaggcttacgtttagtgagggagagatttggtatatgattgagatgggggctagtttttgtcatgtgagaagaa

SEQ ID NO: 60315 - DNA, 120 bp, Homo sapiens
  misc_feature: 1335 for SV(W|O) and mtDNA
tcaggagtttgatagttcttgggcagtgagagtgagtagtagaatgtttagtgagcctagggtgttgtgagtgtaaattagtgcgatgagtaggggaagggagcctactagggtgtagaa

SEQ ID NO: 60316 - DNA, 120 bp, Homo sapiens
  misc_feature: 1335 for SV(W|O) and mtDNA
ttagcatgatttatcctacactccaactcatgagacccacaacaaatagcccttctaaacgctaatccaagcctcaccccactactaggcctcctcctagcagcagcaggcaaatcagcc

SEQ ID NO: 60317 - DNA, 120 bp, Homo sapiens
  misc_feature: 1335 for SV(W|O) and mtDNA
gcgaagggttgtagtagcccgtaggggcctacaacgttggggcctttgcgtagttgtatatagcctagaatttttcgttcggtaagcattaggaatgccattgcgattagaatgggtaca

SEQ ID NO: 60318 - DNA, 120 bp, Homo sapiens
  misc_feature: 1335 for SV(W|O) and mtDNA
tgtaatgtgctatgtacggtaaatggctttatgtactatgtactgttaagggtgggtaggtttgttggtatcctagtgggtgaggggtggctttggagttgcagttgatgtgtgatagtt

SEQ ID NO: 60319 - DNA, 120 bp, Homo sapiens
  misc_feature: 1335 for SV(W|O) and mtDNA
tgaagcgcgtacacaccgcccgtcaccctcctcaagtatacttcaaaggacatttaactaaaacccctacgcatttatatagaggagacaagtcgtaacatggtaagtgtactggaaagt

SEQ ID NO: 60320 - DNA, 120 bp, Homo sapiens
  misc_feature: 1335 for SV(W|O) and mtDNA
tctctccctcactaaacgtaagccttctcctcactctctcaatcttatccatcatagcaggcagttgaggtggattaaaccaaacccagctacgcaaaatcttagcatactcctcaatta

SEQ ID NO: 60321 - DNA, 120 bp, Homo sapiens
  misc_feature: 1335 for SV(W|O) and mtDNA
aatctgatgttttggttaaactatatttacaagaggaaaacccggtaatgatgtcggggttgagggataggaggagaatgggggataggtgtatgaacatgagggtgttttctcgtgtga

SEQ ID NO: 60322 - DNA, 120 bp, Homo sapiens
  misc_feature: 1335 for SV(W|O) and mtDNA
attttttgttatgatgtctgtgtggaaagcggctgtgcagacattcaattgttattattatgtcctacaagcattaattaattaacacactttagtaagtatgttcgcctgtaatattga

SEQ ID NO: 60323 - DNA, 120 bp, Homo sapiens
  misc_feature: 1335 for SV(W|O) and mtDNA
tataactgaactcctcatacccaattggaccaatctatcaccctatagaagaactaatgttagtataagtaacatgaaaacattctcctccgcataagcctgcgtcagattaaaacactg

SEQ ID NO: 60324 - DNA, 120 bp, Homo sapiens
  misc_feature: 1335 for SV(W|O) and mtDNA
tagttttgttgtgagtgttaggaaaagggcatacaggactaggaagcagataaggaaaatgattatgagggcgtgatcatgaaaggtgataagctcttctatgataggggaagtagcgtc

SEQ ID NO: 60325 - DNA, 120 bp, Homo sapiens
  misc_feature: 1335 for SV(W|O) and mtDNA
aactaagcactctactctcagtttactgctaaatccaccttcgacccttaagtttcataagggctatcgtagttttctggggtagaaaatgtagcccatttcttgccacctcatgggcta

SEQ ID NO: 60326 - DNA, 120 bp, Homo sapiens
  misc_feature: 1335 for SV(W|O) and mtDNA
taaactttaatagtgtaggaagctgaataatttatgaaggagaggggtcagggttgattcgggaggatcctattggtgcgggggctttgtatgattatgggcgttgattagtagtagtta

SEQ ID NO: 60327 - DNA, 120 bp, Homo sapiens
  misc_feature: 1335 for SV(W|O) and mtDNA
aatactaacatctcagacgctcaggaaatagaaaccgtctgaactatcctgcccgccatcatcctagtcctcatcgccctcccatccctacgcatcctttacataacagacgaggtcaac

SEQ ID NO: 60328 - DNA, 120 bp, Homo sapiens
  misc_feature: 1335 for SV(W|O) and mtDNA
gtgggagtagttccctgctaagggagggtagactgttcaacctgttcctgctccggcctccactatagcagatgcgagcaggagtaggagagagggaggtaagagtcagaagcttatgtt

SEQ ID NO: 60329 - DNA, 120 bp, Homo sapiens
  misc_feature: 1335 for SV(W|O) and mtDNA
aagggcgcagactgctgcgaacagagtggtgatagcgcctaagcatagtgttagagtttggattagtgggctattttctgctagggggtggaagcggatgagtaagaagattcctgctac

SEQ ID NO: 60330 - DNA, 120 bp, Homo sapiens
  misc_feature: 1335 for SV(W|O) and mtDNA
gctattcctagttttattgctatagccattatgattattaatgatgagtactgattggtagtattggttatggttcattgtccggagagtatattgttgaagaggatagctattagaagg

SEQ ID NO: 60331 - DNA, 120 bp, Homo sapiens
  misc_feature: 1335 for SV(W|O) and mtDNA
gcaccacgaccctactactatctcgcacctgaaacaagctaacatgactaacacccttaattccatccaccctcctctccctaggaggcctgcccccgctaaccggctttttgcccaaat

SEQ ID NO: 60332 - DNA, 120 bp, Homo sapiens
  misc_feature: 1335 for SV(W|O) and mtDNA
cacctagcaggtgtctcctctatcttaggggccatcaatttcatcacaacaattatcaatataaaaccccctgccataacccaataccaaacgcccctcttcgtctgatccgtcctaatc

SEQ ID NO: 60333 - DNA, 120 bp, Homo sapiens
  misc_feature: 1335 for SV(W|O) and mtDNA
gaggttaaggagggtgatggtggctatgatggtggggatgatgaggctattgttttttgtgaattcttcgataatggcccatttgggcaaaaagccggttagcgggggcaggcctcctag

SEQ ID NO: 60334 - DNA, 120 bp, Homo sapiens
  misc_feature: 1335 for SV(W|O) and mtDNA
atggagagctcccgtgagtggttaatagggtgatagacctgtgatccatcgtgatgtcttatttaaggggaacgtgtgggctatttaggctttatgaccctgaagtaggaaccagatgtc

SEQ ID NO: 60335 - DNA, 120 bp, Homo sapiens
  misc_feature: 1335 for SV(W|O) and mtDNA
ctgaagcgcgtacacaccgcccgtcaccctcctcaagtatacttcaaaggacatttaactaaaacccctacgcatttatatagaggagacaagtcgtaacatggtaagtgtactggaaag

SEQ ID NO: 60336 - DNA, 120 bp, Homo sapiens
  misc_feature: 1335 for SV(W|O) and mtDNA
acacatgtttaacggccgcggtaccctaaccgtgcaaaggtagcataatcacttgttccttaaatagggacctgtatgaatggctccacgagggttcagctgtctcttacttttaaccag

SEQ ID NO: 60337 - DNA, 120 bp, Homo sapiens
  misc_feature: 1335 for SV(W|O) and mtDNA
caacattactaataagtggctcctttaacctctccacccttatcacaacacaagaacacctctgattactcctgccatcatgacccttggccataatatgatttatctccacactagcag

SEQ ID NO: 60338 - DNA, 120 bp, Homo sapiens
  misc_feature: 1335 for SV(W|O) and mtDNA
aacagggccctgaagcgcgtacacaccgcccgtcaccctcctcaagtatacttcaaaggacatttaactaaaacccctacgcatttatatagaggagacaagtcgtaacatggtaagtgt

SEQ ID NO: 60339 - DNA, 120 bp, Homo sapiens
  misc_feature: 1334 for SV(W|O) and mtDNA
ttttggtaaacaggcggggtaagatttgccgagttccttttactttttttaacctttccttatgagcatgcctgtgttgggttgacagtgagggtaataatgacttgttggttgattgta

SEQ ID NO: 60340 - DNA, 120 bp, Homo sapiens
  misc_feature: 1334 for SV(W|O) and mtDNA
ttgtttgtagggctcatggtaggggtaaaaggagggcaatttctagatcaaataataagaaggtaatagctactaagaagaattttatggagaaagggacgcgggcgggggatatagggt

SEQ ID NO: 60341 - DNA, 120 bp, Homo sapiens
  misc_feature: 1334 for SV(W|O) and mtDNA
ttgggtgggtgtgggtataatactaagttgagatgatatcatttacgggggaaggcgctttgtgaagtaggccttatttctcttgtcctttcgtacagggaggaatttgaagtagataga

SEQ ID NO: 60342 - DNA, 120 bp, Homo sapiens
  misc_feature: 1334 for SV(W|O) and mtDNA
agcctccgtagacctaaccatcttctccttacacctagcaggtgtctcctctatcttaggggccatcaatttcatcacaacaattatcaatataaaaccccctgccataacccaatacca

SEQ ID NO: 60343 - DNA, 120 bp, Homo sapiens
  misc_feature: 1334 for SV(W|O) and mtDNA
gccttagcatgatttatcctacactccaactcatgagacccacaacaaatagcccttctaaacgctaatccaagcctcaccccactactaggcctcctcctagcagcagcaggcaaatca

SEQ ID NO: 60344 - DNA, 120 bp, Homo sapiens
  misc_feature: 1334 for SV(W|O) and mtDNA
tgagtgaggcaggagtccgaggaggttagttgtggcaataaaaatgattaaggatactagtataagagatcaggttcgtcctttagtgttgtgtatggttatcatttgttttgaggttag

SEQ ID NO: 60345 - DNA, 120 bp, Homo sapiens
  misc_feature: 1334 for SV(W|O) and mtDNA
ctctctgtgctagtaaccacgttctcctgatcaaatatcactctcctacttacaggactcaacatactagtcacagccctatactccctctacatatttaccacaacacaatggggctca

SEQ ID NO: 60346 - DNA, 120 bp, Homo sapiens
  misc_feature: 1334 for SV(W|O) and mtDNA
tgagagtaatagatagggctcaggcgtttgtgtatgatatgtttgcggtttcgatgatgtggtctttggagtagaaacctgtgaggaaaggtattcctgctaatgctaggctgccaatgg

SEQ ID NO: 60347 - DNA, 120 bp, Homo sapiens
  misc_feature: 1334 for SV(W|O) and mtDNA
cattactaataagtggctcctttaacctctccacccttatcacaacacaagaacacctctgattactcctgccatcatgacccttggccataatatgatttatctccacactagcagaga

SEQ ID NO: 60348 - DNA, 120 bp, Homo sapiens
  misc_feature: 1334 for SV(W|O) and mtDNA
ggtagggttattttcgttaatgttagtaagggtggggaagcgaggttgacctgttagggtgagaagaattattcgagtgctataggcgcttgtcagggaggtagcgatgagagtaataga

SEQ ID NO: 60349 - DNA, 120 bp, Homo sapiens
  misc_feature: 1334 for SV(W|O) and mtDNA
tcgccttagcatgatttatcctacactccaactcatgagacccacaacaaatagcccttctaaacgctaatccaagcctcaccccactactaggcctcctcctagcagcagcaggcaaat

SEQ ID NO: 60350 - DNA, 120 bp, Homo sapiens
  misc_feature: 1334 for SV(W|O) and mtDNA
tcatagccgaatacacaaacattattataataaacaccctcaccactacaatcttcctaggaacaacatatgacgcactctcccctgaactctacacaacatattttgtcaccaagaccc

SEQ ID NO: 60351 - DNA, 120 bp, Homo sapiens
  misc_feature: 1334 for SV(W|O) and mtDNA
acgaacgcactcacagtcgcatcataatcctctctcaaggacttcaaactctactcccactaatagctttttgatgacttctagcaagcctcgctaacctcgccttaccccccactatta

SEQ ID NO: 60352 - DNA, 120 bp, Homo sapiens
  misc_feature: 1334 for SV(W|O) and mtDNA
agccacatagccctcgtagtaacagccattctcatccaaaccccctgaagcttcaccggcgcagtcattctcataatcgcccacgggcttacatcctcattactattctgcctagcaaac

SEQ ID NO: 60353 - DNA, 120 bp, Homo sapiens
  misc_feature: 1334 for SV(W|O) and mtDNA
gtttaatccacctcaactgcctgctatgatggataagattgagagagtgaggagaaggcttacgtttagtgagggagagatttggtatatgattgagatgggggctagtttttgtcatgt

SEQ ID NO: 60354 - DNA, 120 bp, Homo sapiens
  misc_feature: 1334 for SV(W|O) and mtDNA
atgaacgaaaatctgttcgcttcattcattgcccccacaatcctaggcctacccgccgcagtactgatcattctatttccccctctattgatccccacctccaaatatctcatcaacaac

SEQ ID NO: 60355 - DNA, 120 bp, Homo sapiens
  misc_feature: 1334 for SV(W|O) and mtDNA
actaagcactctactctcagtttactgctaaatccaccttcgacccttaagtttcataagggctatcgtagttttctggggtagaaaatgtagcccatttcttgccacctcatgggctac

SEQ ID NO: 60356 - DNA, 120 bp, Homo sapiens
  misc_feature: 1334 for SV(W|O) and mtDNA
gtaagggcgcagactgctgcgaacagagtggtgatagcgcctaagcatagtgttagagtttggattagtgggctattttctgctagggggtggaagcggatgagtaagaagattcctgct

SEQ ID NO: 60357 - DNA, 120 bp, Homo sapiens
  misc_feature: 1334 for SV(W|O) and mtDNA
gggtgggagtagttccctgctaagggagggtagactgttcaacctgttcctgctccggcctccactatagcagatgcgagcaggagtaggagagagggaggtaagagtcagaagcttatg

SEQ ID NO: 60358 - DNA, 120 bp, Homo sapiens
  misc_feature: 1334 for SV(W|O) and mtDNA
gggggtagctaaagtgaactgtatccgacatctggttcctacttcagggtcataaagcctaaatagcccacacgttccccttaaataagacatcacgatggatcacaggtctatcaccct

SEQ ID NO: 60359 - DNA, 120 bp, Homo sapiens
  misc_feature: 1334 for SV(W|O) and mtDNA
ggcttcaatcgggagtactactcgattgtcaacgtcaaggagtcgcaggtcgcctggttctaggaataatgggggaagtatgtaggagttgaagattagtccgccgtagtcggtgtactc

SEQ ID NO: 60360 - DNA, 120 bp, Homo sapiens
  misc_feature: 1334 for SV(W|O) and mtDNA
cctatcatatagtaaaacccagcccatgacccctaacaggggccctctcagccctcctaatgacctccggcctagccatgtgatttcacttccactccataacgctcctcatactaggcc

SEQ ID NO: 60361 - DNA, 120 bp, Homo sapiens
  misc_feature: 1334 for SV(W|O) and mtDNA
atacttcaaaggacatttaactaaaacccctacgcatttatatagaggagacaagtcgtaacatggtaagtgtactggaaagtgcacttggacgaaccagagtgtagcttaacacaaagc

SEQ ID NO: 60362 - DNA, 120 bp, Homo sapiens
  misc_feature: 1334 for SV(W|O) and mtDNA
gaggggtcagggttgattcgggaggatcctattggtgcgggggctttgtatgattatgggcgttgattagtagtagttactggttgaacattgtttgttggtgtatatattgtaattgag

SEQ ID NO: 60363 - DNA, 120 bp, Homo sapiens
  misc_feature: 1334 for SV(W|O) and mtDNA
gaggaattgaacctctgactgtaaagttttaagttttatgcgattaccgggctctgccatcttaacaaaccctgttcttgggtgggtgtgggtataatactaagttgagatgatatcatt

SEQ ID NO: 60364 - DNA, 120 bp, Homo sapiens
  misc_feature: 1334 for SV(W|O) and mtDNA
ctattgtgtgttcagatatgttaaagccactttcgtagtctattttgtgtcaactggagttttttacaactcaggtgagttttagctttattggggagggggtgatctaaaacactcttt

SEQ ID NO: 60365 - DNA, 120 bp, Homo sapiens
  misc_feature: 1334 for SV(W|O) and mtDNA
ccattctaatcgcaatggcattcctaatgcttaccgaacgaaaaattctaggctatatacaactacgcaaaggccccaacgttgtaggcccctacgggctactacaacccttcgctgacg

SEQ ID NO: 60366 - DNA, 120 bp, Homo sapiens
  misc_feature: 1334 for SV(W|O) and mtDNA
ccgccgtagtcggtgtactcgtaggttcagtaccattggtggccaattgatttgatggtaagggagggatcgttgacctcgtctgttatgtaaaggatgcgtagggatgggagggcgatg

SEQ ID NO: 60367 - DNA, 120 bp, Homo sapiens
  misc_feature: 1334 for SV(W|O) and mtDNA
ccccattgtgttgtggtaaatatgtagagggagtatagggctgtgactagtatgttgagtcctgtaagtaggagagtgatatttgatcaggagaacgtggttactagcacagagagttct

SEQ ID NO: 60368 - DNA, 120 bp, Homo sapiens
  misc_feature: 1334 for SV(W|O) and mtDNA
atttgactgtaatgtgctatgtacggtaaatggctttatgtactatgtactgttaagggtgggtaggtttgttggtatcctagtgggtgaggggtggctttggagttgcagttgatgtgt

SEQ ID NO: 60369 - DNA, 120 bp, Homo sapiens
  misc_feature: 1334 for SV(W|O) and mtDNA
atacttgatggcagcttctgtggaacgagggtttatttttttggttagaactggaataaaagctagcatgtttatttctaggcctactcaggtaaaaaatcagtgcgagcttagcgctgt

SEQ ID NO: 60370 - DNA, 120 bp, Homo sapiens
  misc_feature: 1334 for SV(W|O) and mtDNA
acgaagaggggcgtttggtattgggttatggcagggggttttatattgataattgttgtgatgaaattgatggcccctaagatagaggagacacctgctaggtgtaaggagaagatggtt

SEQ ID NO: 60371 - DNA, 120 bp, Homo sapiens
  misc_feature: 1333 for SV(W|O) and mtDNA
tatatacaccaacaaacaatgttcaaccagtaactactactaatcaacgcccataatcatacaaagcccccgcaccaataggatcctcccgaatcaaccctgacccctctccttcataaa

SEQ ID NO: 60372 - DNA, 120 bp, Homo sapiens
  misc_feature: 1333 for SV(W|O) and mtDNA
tgttcaactaagcactctactctcagtttactgctaaatccaccttcgacccttaagtttcataagggctatcgtagttttctggggtagaaaatgtagcccatttcttgccacctcatg

SEQ ID NO: 60373 - DNA, 120 bp, Homo sapiens
  misc_feature: 1333 for SV(W|O) and mtDNA
aaatcgctcattgcatactcttcaatcagccacatagccctcgtagtaacagccattctcatccaaaccccctgaagcttcaccggcgcagtcattctcataatcgcccacgggcttaca

SEQ ID NO: 60374 - DNA, 120 bp, Homo sapiens
  misc_feature: 1333 for SV(W|O) and mtDNA
tgggggtagctaaagtgaactgtatccgacatctggttcctacttcagggtcataaagcctaaatagcccacacgttccccttaaataagacatcacgatggatcacaggtctatcaccc

SEQ ID NO: 60375 - DNA, 120 bp, Homo sapiens
  misc_feature: 1333 for SV(W|O) and mtDNA
gcacataccaaggccaccacacaccacctgtccaaaaaggccttcgatacgggataatcctatttattacctcagaagtttttttcttcgcaggatttttctgagccttttaccactcca

SEQ ID NO: 60376 - DNA, 120 bp, Homo sapiens
  misc_feature: 1333 for SV(W|O) and mtDNA
tgatagacctgtgatccatcgtgatgtcttatttaaggggaacgtgtgggctatttaggctttatgaccctgaagtaggaaccagatgtcggatacagttcactttagctacccccaagt

SEQ ID NO: 60377 - DNA, 120 bp, Homo sapiens
  misc_feature: 1333 for SV(W|O) and mtDNA
tgaggaaatacttgatggcagcttctgtggaacgagggtttatttttttggttagaactggaataaaagctagcatgtttatttctaggcctactcaggtaaaaaatcagtgcgagctta

SEQ ID NO: 60378 - DNA, 120 bp, Homo sapiens
  misc_feature: 1333 for SV(W|O) and mtDNA
tgactcttacctccctctctcctactcctgctcgcatctgctatagtggaggccggagcaggaacaggttgaacagtctaccctcccttagcagggaactactcccaccctggagcctcc

SEQ ID NO: 60379 - DNA, 120 bp, Homo sapiens
  misc_feature: 1333 for SV(W|O) and mtDNA
tcctacctatctccccttttatactaataatcttatagaaatttaggttaaatacagaccaagagccttcaaagccctcagtaagttgcaatacttaatttctgtaacagctaaggactg

SEQ ID NO: 60380 - DNA, 120 bp, Homo sapiens
  misc_feature: 1333 for SV(W|O) and mtDNA
tcccctatcatagaagagcttatcacctttcatgatcacgccctcataatcattttccttatctgcttcctagtcctgtatgcccttttcctaacactcacaacaaaactaactaatact

SEQ ID NO: 60381 - DNA, 120 bp, Homo sapiens
  misc_feature: 1333 for SV(W|O) and mtDNA
cgcgtccctttctccataaaattcttcttagtagctattaccttcttattatttgatctagaaattgccctccttttacccctaccatgagccctacaaacaactaacctgccactaata

SEQ ID NO: 60382 - DNA, 120 bp, Homo sapiens
  misc_feature: 1333 for SV(W|O) and mtDNA
tagtcattgttgggtggtgattagtcggttgttgatgagatatttggaggtggggatcaatagagggggaaatagaatgatcagtactgcggcgggtaggcctaggattgtgggggcaat

SEQ ID NO: 60383 - DNA, 120 bp, Homo sapiens
  misc_feature: 1333 for SV(W|O) and mtDNA
tactaacagaccgcaacctcaacaccaccttcttcgaccccgccggaggaggagaccccattctataccaacacctattctgatttttcggtcaccctgaagtttatattcttatcctac

SEQ ID NO: 60384 - DNA, 120 bp, Homo sapiens
  misc_feature: 1333 for SV(W|O) and mtDNA
taagtaggagagtgatatttgatcaggagaacgtggttactagcacagagagttctcccagtaggttaatagtggggggtaaggcgaggttagcgaggcttgctagaagtcatcaaaaag

SEQ ID NO: 60385 - DNA, 120 bp, Homo sapiens
  misc_feature: 1333 for SV(W|O) and mtDNA
taagcactctactctcagtttactgctaaatccaccttcgacccttaagtttcataagggctatcgtagttttctggggtagaaaatgtagcccatttcttgccacctcatgggctacac

SEQ ID NO: 60386 - DNA, 120 bp, Homo sapiens
  misc_feature: 1333 for SV(W|O) and mtDNA
gttttaatctgacgcaggcttatgcggaggagaatgttttcatgttacttatactaacattagttcttctatagggtgatagattggtccaattgggtatgaggagttcagttatatgtt

SEQ ID NO: 60387 - DNA, 120 bp, Homo sapiens
  misc_feature: 1333 for SV(W|O) and mtDNA
ctttacttcctctctttcttcttcccactcatcctaaccctactcctaatcacataacctattcccccgagcaatctcaattacaatatatacaccaacaaacaatgttcaaccagtaac

SEQ ID NO: 60388 - DNA, 120 bp, Homo sapiens
  misc_feature: 1333 for SV(W|O) and mtDNA
actaacagaccgcaacctcaacaccaccttcttcgaccccgccggaggaggagaccccattctataccaacacctattctgatttttcggtcaccctgaagtttatattcttatcctacc

SEQ ID NO: 60389 - DNA, 120 bp, Homo sapiens
  misc_feature: 1333 for SV(W|O) and mtDNA
ggatggtggtcaagggacccctatctgaggggggtcatccatggggacgagaagggatttgactgtaatgtgctatgtacggtaaatggctttatgtactatgtactgttaagggtgggt

SEQ ID NO: 60390 - DNA, 120 bp, Homo sapiens
  misc_feature: 1333 for SV(W|O) and mtDNA
agcaggtgtctcctctatcttaggggccatcaatttcatcacaacaattatcaatataaaaccccctgccataacccaataccaaacgcccctcttcgtctgatccgtcctaatcacagc

SEQ ID NO: 60391 - DNA, 120 bp, Homo sapiens
  misc_feature: 1333 for SV(W|O) and mtDNA
gaaattgaccaaccctggggttagtatagcttagttaaactttcgtttattgctaaaggttaatcactgctgtttcccgtgggggtgtggctaggctaagcgttttgagctgcattgctg

SEQ ID NO: 60392 - DNA, 120 bp, Homo sapiens
  misc_feature: 1333 for SV(W|O) and mtDNA
ctcagacgctcaggaaatagaaaccgtctgaactatcctgcccgccatcatcctagtcctcatcgccctcccatccctacgcatcctttacataacagacgaggtcaacgatccctccct

SEQ ID NO: 60393 - DNA, 120 bp, Homo sapiens
  misc_feature: 1333 for SV(W|O) and mtDNA
cgcaatggcattcctaatgcttaccgaacgaaaaattctaggctatatacaactacgcaaaggccccaacgttgtaggcccctacgggctactacaacccttcgctgacgccataaaact

SEQ ID NO: 60394 - DNA, 120 bp, Homo sapiens
  misc_feature: 1333 for SV(W|O) and mtDNA
caactccaaataaaagtaataaccatgcacactactataaccaccctaaccctgacttccctaattccccccatccttaccaccctcgttaaccctaacaaaaaaaactcatacccccat

SEQ ID NO: 60395 - DNA, 120 bp, Homo sapiens
  misc_feature: 1333 for SV(W|O) and mtDNA
aagattgtagtggtgagggtgtttattataataatgtttgtgtattcggctatgaagaatagggcgaaggggcctgcggcgtattcgatgttgaagcctgagactagttcggactcccct

SEQ ID NO: 60396 - DNA, 120 bp, Homo sapiens
  misc_feature: 1332 for SV(W|O) and mtDNA
tacctatctccccttttatactaataatcttatagaaatttaggttaaatacagaccaagagccttcaaagccctcagtaagttgcaatacttaatttctgtaacagctaaggactgcaa

SEQ ID NO: 60397 - DNA, 120 bp, Homo sapiens
  misc_feature: 1332 for SV(W|O) and mtDNA
ctatcatagaagagcttatcacctttcatgatcacgccctcataatcattttccttatctgcttcctagtcctgtatgcccttttcctaacactcacaacaaaactaactaatactaaca

SEQ ID NO: 60398 - DNA, 120 bp, Homo sapiens
  misc_feature: 1332 for SV(W|O) and mtDNA
tgtaagggcgcagactgctgcgaacagagtggtgatagcgcctaagcatagtgttagagtttggattagtgggctattttctgctagggggtggaagcggatgagtaagaagattcctgc

SEQ ID NO: 60399 - DNA, 120 bp, Homo sapiens
  misc_feature: 1332 for SV(W|O) and mtDNA
tgggagtagttccctgctaagggagggtagactgttcaacctgttcctgctccggcctccactatagcagatgcgagcaggagtaggagagagggaggtaagagtcagaagcttatgttg

SEQ ID NO: 60400 - DNA, 120 bp, Homo sapiens
  misc_feature: 1332 for SV(W|O) and mtDNA
accatgcacactactataaccaccctaaccctgacttccctaattccccccatccttaccaccctcgttaaccctaacaaaaaaaactcatacccccattatgtaaaatccattgtcgca

SEQ ID NO: 60401 - DNA, 120 bp, Homo sapiens
  misc_feature: 1332 for SV(W|O) and mtDNA
tgcatggagagctcccgtgagtggttaatagggtgatagacctgtgatccatcgtgatgtcttatttaaggggaacgtgtgggctatttaggctttatgaccctgaagtaggaaccagat

SEQ ID NO: 60402 - DNA, 120 bp, Homo sapiens
  misc_feature: 1332 for SV(W|O) and mtDNA
tgaagtcaccctagccatcattctactatcaacattactaataagtggctcctttaacctctccacccttatcacaacacaagaacacctctgattactcctgccatcatgacccttggc

SEQ ID NO: 60403 - DNA, 120 bp, Homo sapiens
  misc_feature: 1332 for SV(W|O) and mtDNA
tctatcttaggggccatcaatttcatcacaacaattatcaatataaaaccccctgccataacccaataccaaacgcccctcttcgtctgatccgtcctaatcacagcagtcctacttctc

SEQ ID NO: 60404 - DNA, 120 bp, Homo sapiens
  misc_feature: 1332 for SV(W|O) and mtDNA
tcgcaatggcattcctaatgcttaccgaacgaaaaattctaggctatatacaactacgcaaaggccccaacgttgtaggcccctacgggctactacaacccttcgctgacgccataaaac

SEQ ID NO: 60405 - DNA, 120 bp, Homo sapiens
  misc_feature: 1332 for SV(W|O) and mtDNA
cgtttggtattgggttatggcagggggttttatattgataattgttgtgatgaaattgatggcccctaagatagaggagacacctgctaggtgtaaggagaagatggttaggtctacgga

SEQ ID NO: 60406 - DNA, 120 bp, Homo sapiens
  misc_feature: 1332 for SV(W|O) and mtDNA
gtcattgttgggtggtgattagtcggttgttgatgagatatttggaggtggggatcaatagagggggaaatagaatgatcagtactgcggcgggtaggcctaggattgtgggggcaatga

SEQ ID NO: 60407 - DNA, 120 bp, Homo sapiens
  misc_feature: 1332 for SV(W|O) and mtDNA
tagtggcaggttagttgtttgtagggctcatggtaggggtaaaaggagggcaatttctagatcaaataataagaaggtaatagctactaagaagaattttatggagaaagggacgcgggc

SEQ ID NO: 60408 - DNA, 120 bp, Homo sapiens
  misc_feature: 1332 for SV(W|O) and mtDNA
gaaaatctgttcgcttcattcattgcccccacaatcctaggcctacccgccgcagtactgatcattctatttccccctctattgatccccacctccaaatatctcatcaacaaccgacta

SEQ ID NO: 60409 - DNA, 120 bp, Homo sapiens
  misc_feature: 1332 for SV(W|O) and mtDNA
gagggggtgctatagggtaaatacgggccctatttcaaagatttttaggggaattaattctaggacgatgggcatgaaactgtggtttgctccacagatttcagagcattgaccgtagta

SEQ ID NO: 60410 - DNA, 120 bp, Homo sapiens
  misc_feature: 1332 for SV(W|O) and mtDNA
gttagttttgttgtgagtgttaggaaaagggcatacaggactaggaagcagataaggaaaatgattatgagggcgtgatcatgaaaggtgataagctcttctatgataggggaagtagcg

SEQ ID NO: 60411 - DNA, 120 bp, Homo sapiens
  misc_feature: 1332 for SV(W|O) and mtDNA
gtgaggaaatacttgatggcagcttctgtggaacgagggtttatttttttggttagaactggaataaaagctagcatgtttatttctaggcctactcaggtaaaaaatcagtgcgagctt

SEQ ID NO: 60412 - DNA, 120 bp, Homo sapiens
  misc_feature: 1332 for SV(W|O) and mtDNA
atcatatagtaaaacccagcccatgacccctaacaggggccctctcagccctcctaatgacctccggcctagccatgtgatttcacttccactccataacgctcctcatactaggcctac

SEQ ID NO: 60413 - DNA, 120 bp, Homo sapiens
  misc_feature: 1332 for SV(W|O) and mtDNA
ggtgcaactccaaataaaagtaataaccatgcacactactataaccaccctaaccctgacttccctaattccccccatccttaccaccctcgttaaccctaacaaaaaaaactcataccc

SEQ ID NO: 60414 - DNA, 120 bp, Homo sapiens
  misc_feature: 1332 for SV(W|O) and mtDNA
ggattatggatgcggttgcttgcgtgaggaaatacttgatggcagcttctgtggaacgagggtttatttttttggttagaactggaataaaagctagcatgtttatttctaggcctactc

SEQ ID NO: 60415 - DNA, 120 bp, Homo sapiens
  misc_feature: 1332 for SV(W|O) and mtDNA
caggcggggtaagatttgccgagttccttttactttttttaacctttccttatgagcatgcctgtgttgggttgacagtgagggtaataatgacttgttggttgattgtagatattgggc

SEQ ID NO: 60416 - DNA, 120 bp, Homo sapiens
  misc_feature: 1332 for SV(W|O) and mtDNA
cggttgcttgcgtgaggaaatacttgatggcagcttctgtggaacgagggtttatttttttggttagaactggaataaaagctagcatgtttatttctaggcctactcaggtaaaaaatc

SEQ ID NO: 60417 - DNA, 120 bp, Homo sapiens
  misc_feature: 1332 for SV(W|O) and mtDNA
aaattgttttaggtaatagcttttctagtcaggttaggtctaggaggagtaggggcaggttttggctcgtaagaaggcctagataggggattgtgcggtgtgtgatgctagggtagaatc

SEQ ID NO: 60418 - DNA, 120 bp, Homo sapiens
  misc_feature: 1332 for SV(W|O) and mtDNA
gattattagtataaaaggggagataggtaggagtagcgtggtaagggcgatgagtgtggggaggaatggggtgggttttgtatgttcaaactgtcattttatttttacgttgttagatat

SEQ ID NO: 60419 - DNA, 120 bp, Homo sapiens
  misc_feature: 1332 for SV(W|O) and mtDNA
gagtgaggcaggagtccgaggaggttagttgtggcaataaaaatgattaaggatactagtataagagatcaggttcgtcctttagtgttgtgtatggttatcatttgttttgaggttagt

SEQ ID NO: 60420 - DNA, 120 bp, Homo sapiens
  misc_feature: 1332 for SV(W|O) and mtDNA
gaaattttttgttatgatgtctgtgtggaaagcggctgtgcagacattcaattgttattattatgtcctacaagcattaattaattaacacactttagtaagtatgttcgcctgtaatat

SEQ ID NO: 60421 - DNA, 120 bp, Homo sapiens
  misc_feature: 1332 for SV(W|O) and mtDNA
cctctctatactaatctccctacaaatctccttaattataacattcacagccacagaactaatcatattttatatcttcttcgaaaccacacttatccccaccttggctatcatcacccg

SEQ ID NO: 60422 - DNA, 120 bp, Homo sapiens
  misc_feature: 1332 for SV(W|O) and mtDNA
cgctttgtgaagtaggccttatttctcttgtcctttcgtacagggaggaatttgaagtagatagaaaccgacctggattactccggtctgaactcagatcacgtaggactttaatcgttg

SEQ ID NO: 60423 - DNA, 120 bp, Homo sapiens
  misc_feature: 1332 for SV(W|O) and mtDNA
cctacgagtacaccgactacggcggactaatcttcaactcctacatacttcccccattattcctagaaccaggcgacctgcgactccttgacgttgacaatcgagtagtactcccgattg

SEQ ID NO: 60424 - DNA, 120 bp, Homo sapiens
  misc_feature: 1332 for SV(W|O) and mtDNA
atggctgaggggagtcaggggtggagacctaattgggctgatttgcctgctgctgctaggaggaggcctagtagtggggtgaggcttggattagcgtttagaagggctatttgttgtggg

SEQ ID NO: 60425 - DNA, 120 bp, Homo sapiens
  misc_feature: 1332 for SV(W|O) and mtDNA
atgaagtcaccctagccatcattctactatcaacattactaataagtggctcctttaacctctccacccttatcacaacacaagaacacctctgattactcctgccatcatgacccttgg

SEQ ID NO: 60426 - DNA, 120 bp, Homo sapiens
  misc_feature: 1332 for SV(W|O) and mtDNA
caccacgaccctactactatctcgcacctgaaacaagctaacatgactaacacccttaattccatccaccctcctctccctaggaggcctgcccccgctaaccggctttttgcccaaatg

SEQ ID NO: 60427 - DNA, 120 bp, Homo sapiens
  misc_feature: 1332 for SV(W|O) and mtDNA
aacagccttcataggctatgtcctcccgtgaggccaaatatcattctgaggggccacagtaattacaaacttactatccgccatcccatacattgggacagacctagttcaatgaatctg

SEQ ID NO: 60428 - DNA, 120 bp, Homo sapiens
  misc_feature: 1332 for SV(W|O) and mtDNA
aaattttttgttatgatgtctgtgtggaaagcggctgtgcagacattcaattgttattattatgtcctacaagcattaattaattaacacactttagtaagtatgttcgcctgtaatatt

SEQ ID NO: 60429 - DNA, 120 bp, Homo sapiens
  misc_feature: 1331 for SV(W|O) and mtDNA
accagtaactactactaatcaacgcccataatcatacaaagcccccgcaccaataggatcctcccgaatcaaccctgacccctctccttcataaattattcagcttcctacactattaaa

SEQ ID NO: 60430 - DNA, 120 bp, Homo sapiens
  misc_feature: 1331 for SV(W|O) and mtDNA
ttagtcattgttgggtggtgattagtcggttgttgatgagatatttggaggtggggatcaatagagggggaaatagaatgatcagtactgcggcgggtaggcctaggattgtgggggcaa

SEQ ID NO: 60431 - DNA, 120 bp, Homo sapiens
  misc_feature: 1331 for SV(W|O) and mtDNA
acttctgagtcccagaggttacccaaggcacccctctgacatccggcctgcttcttctcacatgacaaaaactagcccccatctcaatcatataccaaatctctccctcactaaacgtaa

SEQ ID NO: 60432 - DNA, 120 bp, Homo sapiens
  misc_feature: 1331 for SV(W|O) and mtDNA
gacacatgtttaacggccgcggtaccctaaccgtgcaaaggtagcataatcacttgttccttaaatagggacctgtatgaatggctccacgagggttcagctgtctcttacttttaacca

SEQ ID NO: 60433 - DNA, 120 bp, Homo sapiens
  misc_feature: 1331 for SV(W|O) and mtDNA
tctcttgtcctttcgtacagggaggaatttgaagtagatagaaaccgacctggattactccggtctgaactcagatcacgtaggactttaatcgttgaacaaacgaacctttaatagcgg

SEQ ID NO: 60434 - DNA, 120 bp, Homo sapiens
  misc_feature: 1331 for SV(W|O) and mtDNA
aaatcagaataggtgttggtatagaatggggtctcctcctccggcggggtcgaagaaggtggtgttgaggttgcggtctgttagtagtatagtgatgccagcagctaggactgggagaga

SEQ ID NO: 60435 - DNA, 120 bp, Homo sapiens
  misc_feature: 1331 for SV(W|O) and mtDNA
tctcctctatcttaggggccatcaatttcatcacaacaattatcaatataaaaccccctgccataacccaataccaaacgcccctcttcgtctgatccgtcctaatcacagcagtcctac

SEQ ID NO: 60436 - DNA, 120 bp, Homo sapiens
  misc_feature: 1331 for SV(W|O) and mtDNA
tctactctcagtttactgctaaatccaccttcgacccttaagtttcataagggctatcgtagttttctggggtagaaaatgtagcccatttcttgccacctcatgggctacaccttgacc

SEQ ID NO: 60437 - DNA, 120 bp, Homo sapiens
  misc_feature: 1331 for SV(W|O) and mtDNA
gggtataatactaagttgagatgatatcatttacgggggaaggcgctttgtgaagtaggccttatttctcttgtcctttcgtacagggaggaatttgaagtagatagaaaccgacctgga

SEQ ID NO: 60438 - DNA, 120 bp, Homo sapiens
  misc_feature: 1331 for SV(W|O) and mtDNA
tccaaataaaagtaataaccatgcacactactataaccaccctaaccctgacttccctaattccccccatccttaccaccctcgttaaccctaacaaaaaaaactcatacccccattatg

SEQ ID NO: 60439 - DNA, 120 bp, Homo sapiens
  misc_feature: 1331 for SV(W|O) and mtDNA
tatcatagaagagcttatcacctttcatgatcacgccctcataatcattttccttatctgcttcctagtcctgtatgcccttttcctaacactcacaacaaaactaactaatactaacat

SEQ ID NO: 60440 - DNA, 120 bp, Homo sapiens
  misc_feature: 1331 for SV(W|O) and mtDNA
tagtggggtgaggcttggattagcgtttagaagggctatttgttgtgggtctcatgagttggagtgtaggataaatcatgctaaggcgaggatgaaaccgatatcgccgatacggttgta

SEQ ID NO: 60441 - DNA, 120 bp, Homo sapiens
  misc_feature: 1331 for SV(W|O) and mtDNA
tagtaagtttgtaattactgtggcccctcagaatgatatttggcctcacgggaggacatagcctatgaaggctgttgctatagttgcaagcaggaggataatgccgatgtttcaggtttc

SEQ ID NO: 60442 - DNA, 120 bp, Homo sapiens
  misc_feature: 1331 for SV(W|O) and mtDNA
ctgttcaactaagcactctactctcagtttactgctaaatccaccttcgacccttaagtttcataagggctatcgtagttttctggggtagaaaatgtagcccatttcttgccacctcat

SEQ ID NO: 60443 - DNA, 120 bp, Homo sapiens
  misc_feature: 1331 for SV(W|O) and mtDNA
ctatgtggctgattgaagagtatgcaatgagcgattttaggtctgtttgtcgtaggcagatggagcttgttataattatgcctcatagggatagtacaaggaaggggtaggctatgtgtt

SEQ ID NO: 60444 - DNA, 120 bp, Homo sapiens
  misc_feature: 1331 for SV(W|O) and mtDNA
cgtgaggaaatacttgatggcagcttctgtggaacgagggtttatttttttggttagaactggaataaaagctagcatgtttatttctaggcctactcaggtaaaaaatcagtgcgagct

SEQ ID NO: 60445 - DNA, 120 bp, Homo sapiens
  misc_feature: 1331 for SV(W|O) and mtDNA
ccaaataaaagtaataaccatgcacactactataaccaccctaaccctgacttccctaattccccccatccttaccaccctcgttaaccctaacaaaaaaaactcatacccccattatgt

SEQ ID NO: 60446 - DNA, 120 bp, Homo sapiens
  misc_feature: 1331 for SV(W|O) and mtDNA
aggttagttgtttgtagggctcatggtaggggtaaaaggagggcaatttctagatcaaataataagaaggtaatagctactaagaagaattttatggagaaagggacgcgggcgggggat

SEQ ID NO: 60447 - DNA, 120 bp, Homo sapiens
  misc_feature: 1331 for SV(W|O) and mtDNA
agtggggtgaggcttggattagcgtttagaagggctatttgttgtgggtctcatgagttggagtgtaggataaatcatgctaaggcgaggatgaaaccgatatcgccgatacggttgtat

SEQ ID NO: 60448 - DNA, 120 bp, Homo sapiens
  misc_feature: 1331 for SV(W|O) and mtDNA
agctcaacacccactacctaaaaaatcccaaacatataactgaactcctcatacccaattggaccaatctatcaccctatagaagaactaatgttagtataagtaacatgaaaacattct

SEQ ID NO: 60449 - DNA, 120 bp, Homo sapiens
  misc_feature: 1330 for SV(W|O) and mtDNA
ccccctcaaacctaagaaatatgtctgataaaagagttactttgatagagtaaataataggagcttaaacccccttatttctaggactatgagaatcgaacccatccctgagaatccaaa

SEQ ID NO: 60450 - DNA, 120 bp, Homo sapiens
  misc_feature: 1330 for SV(W|O) and mtDNA
ttcttcttcccactcatcctaaccctactcctaatcacataacctattcccccgagcaatctcaattacaatatatacaccaacaaacaatgttcaaccagtaactactactaatcaacg

SEQ ID NO: 60451 - DNA, 120 bp, Homo sapiens
  misc_feature: 1330 for SV(W|O) and mtDNA
ttcttatgaattcgaacagcatacccccgattccgctacgaccaactcatacacctcctatgaaaaaacttcctaccactcaccctagcattacttatatgatatgtctccatacccatt

SEQ ID NO: 60452 - DNA, 120 bp, Homo sapiens
  misc_feature: 1330 for SV(W|O) and mtDNA
ttcaactaagcactctactctcagtttactgctaaatccaccttcgacccttaagtttcataagggctatcgtagttttctggggtagaaaatgtagcccatttcttgccacctcatggg

SEQ ID NO: 60453 - DNA, 120 bp, Homo sapiens
  misc_feature: 1330 for SV(W|O) and mtDNA
tgtttgtagggctcatggtaggggtaaaaggagggcaatttctagatcaaataataagaaggtaatagctactaagaagaattttatggagaaagggacgcgggcgggggatatagggtc

SEQ ID NO: 60454 - DNA, 120 bp, Homo sapiens
  misc_feature: 1330 for SV(W|O) and mtDNA
cctcactaaacgtaagccttctcctcactctctcaatcttatccatcatagcaggcagttgaggtggattaaaccaaacccagctacgcaaaatcttagcatactcctcaattacccaca

SEQ ID NO: 60455 - DNA, 120 bp, Homo sapiens
  misc_feature: 1330 for SV(W|O) and mtDNA
tggtttaatccacctcaactgcctgctatgatggataagattgagagagtgaggagaaggcttacgtttagtgagggagagatttggtatatgattgagatgggggctagtttttgtcat

SEQ ID NO: 60456 - DNA, 120 bp, Homo sapiens
  misc_feature: 1330 for SV(W|O) and mtDNA
tgggtcaatagtacttgccgcagtactcttaaaactaggcggctatggtataatacgcctcacactcattctcaaccccctgacaaaacacatagcctaccccttccttgtactatccct

SEQ ID NO: 60457 - DNA, 120 bp, Homo sapiens
  misc_feature: 1330 for SV(W|O) and mtDNA
tcttatgaattcgaacagcatacccccgattccgctacgaccaactcatacacctcctatgaaaaaacttcctaccactcaccctagcattacttatatgatatgtctccatacccatta

SEQ ID NO: 60458 - DNA, 120 bp, Homo sapiens
  misc_feature: 1330 for SV(W|O) and mtDNA
ctcaggagtttgatagttcttgggcagtgagagtgagtagtagaatgtttagtgagcctagggtgttgtgagtgtaaattagtgcgatgagtaggggaagggagcctactagggtgtaga

SEQ ID NO: 60459 - DNA, 120 bp, Homo sapiens
  misc_feature: 1330 for SV(W|O) and mtDNA
gtccgccgtagtcggtgtactcgtaggttcagtaccattggtggccaattgatttgatggtaagggagggatcgttgacctcgtctgttatgtaaaggatgcgtagggatgggagggcga

SEQ ID NO: 60460 - DNA, 120 bp, Homo sapiens
  misc_feature: 1330 for SV(W|O) and mtDNA
ggtataatactaagttgagatgatatcatttacgggggaaggcgctttgtgaagtaggccttatttctcttgtcctttcgtacagggaggaatttgaagtagatagaaaccgacctggat

SEQ ID NO: 60461 - DNA, 120 bp, Homo sapiens
  misc_feature: 1330 for SV(W|O) and mtDNA
atctcagacgctcaggaaatagaaaccgtctgaactatcctgcccgccatcatcctagtcctcatcgccctcccatccctacgcatcctttacataacagacgaggtcaacgatccctcc

SEQ ID NO: 60462 - DNA, 120 bp, Homo sapiens
  misc_feature: 1330 for SV(W|O) and mtDNA
ctatcttaggggccatcaatttcatcacaacaattatcaatataaaaccccctgccataacccaataccaaacgcccctcttcgtctgatccgtcctaatcacagcagtcctacttctcc

SEQ ID NO: 60463 - DNA, 120 bp, Homo sapiens
  misc_feature: 1330 for SV(W|O) and mtDNA
gcgcagactgctgcgaacagagtggtgatagcgcctaagcatagtgttagagtttggattagtgggctattttctgctagggggtggaagcggatgagtaagaagattcctgctacaact

SEQ ID NO: 60464 - DNA, 120 bp, Homo sapiens
  misc_feature: 1330 for SV(W|O) and mtDNA
gaggaaatacttgatggcagcttctgtggaacgagggtttatttttttggttagaactggaataaaagctagcatgtttatttctaggcctactcaggtaaaaaatcagtgcgagcttag

SEQ ID NO: 60465 - DNA, 120 bp, Homo sapiens
  misc_feature: 1330 for SV(W|O) and mtDNA
aagctcaacacccactacctaaaaaatcccaaacatataactgaactcctcatacccaattggaccaatctatcaccctatagaagaactaatgttagtataagtaacatgaaaacattc

SEQ ID NO: 60466 - DNA, 120 bp, Homo sapiens
  misc_feature: 1330 for SV(W|O) and mtDNA
ctactctcagtttactgctaaatccaccttcgacccttaagtttcataagggctatcgtagttttctggggtagaaaatgtagcccatttcttgccacctcatgggctacaccttgacct

SEQ ID NO: 60467 - DNA, 120 bp, Homo sapiens
  misc_feature: 1330 for SV(W|O) and mtDNA
aattgaccaaccctggggttagtatagcttagttaaactttcgtttattgctaaaggttaatcactgctgtttcccgtgggggtgtggctaggctaagcgttttgagctgcattgctgcg

SEQ ID NO: 60468 - DNA, 120 bp, Homo sapiens
  misc_feature: 1330 for SV(W|O) and mtDNA
cagtaactactactaatcaacgcccataatcatacaaagcccccgcaccaataggatcctcccgaatcaaccctgacccctctccttcataaattattcagcttcctacactattaaagt

SEQ ID NO: 60469 - DNA, 120 bp, Homo sapiens
  misc_feature: 1330 for SV(W|O) and mtDNA
atgcctcatagggatagtacaaggaaggggtaggctatgtgttttgtcagggggttgagaatgagtgtgaggcgtattataccatagccgcctagttttaagagtactgcggcaagtact

SEQ ID NO: 60470 - DNA, 120 bp, Homo sapiens
  misc_feature: 1330 for SV(W|O) and mtDNA
agggggtgctatagggtaaatacgggccctatttcaaagatttttaggggaattaattctaggacgatgggcatgaaactgtggtttgctccacagatttcagagcattgaccgtagtat

SEQ ID NO: 60471 - DNA, 120 bp, Homo sapiens
  misc_feature: 1330 for SV(W|O) and mtDNA
aattcttcttagtagctattaccttcttattatttgatctagaaattgccctccttttacccctaccatgagccctacaaacaactaacctgccactaatagttatgtcatccctcttat

SEQ ID NO: 60472 - DNA, 120 bp, Homo sapiens
  misc_feature: 1329 for SV(W|O) and mtDNA
ttggtattgggttatggcagggggttttatattgataattgttgtgatgaaattgatggcccctaagatagaggagacacctgctaggtgtaaggagaagatggttaggtctacggaggc

SEQ ID NO: 60473 - DNA, 120 bp, Homo sapiens
  misc_feature: 1329 for SV(W|O) and mtDNA
ccctaataatcggtgcccccgatatggcgtttccccgcataaacaacataagcttctgactcttacctccctctctcctactcctgctcgcatctgctatagtggaggccggagcaggaa

SEQ ID NO: 60474 - DNA, 120 bp, Homo sapiens
  misc_feature: 1329 for SV(W|O) and mtDNA
ttcaaccagtaactactactaatcaacgcccataatcatacaaagcccccgcaccaataggatcctcccgaatcaaccctgacccctctccttcataaattattcagcttcctacactat

SEQ ID NO: 60475 - DNA, 120 bp, Homo sapiens
  misc_feature: 1329 for SV(W|O) and mtDNA
aaccagtaactactactaatcaacgcccataatcatacaaagcccccgcaccaataggatcctcccgaatcaaccctgacccctctccttcataaattattcagcttcctacactattaa

SEQ ID NO: 60476 - DNA, 120 bp, Homo sapiens
  misc_feature: 1329 for SV(W|O) and mtDNA
ggggctctttggtgaagagttttatggcgtcagcgaagggttgtagtagcccgtaggggcctacaacgttggggcctttgcgtagttgtatatagcctagaatttttcgttcggtaagca

SEQ ID NO: 60477 - DNA, 120 bp, Homo sapiens
  misc_feature: 1329 for SV(W|O) and mtDNA
tgcctcatagggatagtacaaggaaggggtaggctatgtgttttgtcagggggttgagaatgagtgtgaggcgtattataccatagccgcctagttttaagagtactgcggcaagtacta

SEQ ID NO: 60478 - DNA, 120 bp, Homo sapiens
  misc_feature: 1329 for SV(W|O) and mtDNA
tactaacatctcagacgctcaggaaatagaaaccgtctgaactatcctgcccgccatcatcctagtcctcatcgccctcccatccctacgcatcctttacataacagacgaggtcaacga

SEQ ID NO: 60479 - DNA, 120 bp, Homo sapiens
  misc_feature: 1329 for SV(W|O) and mtDNA
caggtcgcctggttctaggaataatgggggaagtatgtaggagttgaagattagtccgccgtagtcggtgtactcgtaggttcagtaccattggtggccaattgatttgatggtaaggga

SEQ ID NO: 60480 - DNA, 120 bp, Homo sapiens
  misc_feature: 1329 for SV(W|O) and mtDNA
ctacgagtacaccgactacggcggactaatcttcaactcctacatacttcccccattattcctagaaccaggcgacctgcgactccttgacgttgacaatcgagtagtactcccgattga

SEQ ID NO: 60481 - DNA, 120 bp, Homo sapiens
  misc_feature: 1329 for SV(W|O) and mtDNA
gtggggtgaggcttggattagcgtttagaagggctatttgttgtgggtctcatgagttggagtgtaggataaatcatgctaaggcgaggatgaaaccgatatcgccgatacggttgtata

SEQ ID NO: 60482 - DNA, 120 bp, Homo sapiens
  misc_feature: 1329 for SV(W|O) and mtDNA
tacctctctatactaatctccctacaaatctccttaattataacattcacagccacagaactaatcatattttatatcttcttcgaaaccacacttatccccaccttggctatcatcacc

SEQ ID NO: 60483 - DNA, 120 bp, Homo sapiens
  misc_feature: 1329 for SV(W|O) and mtDNA
cgaagaggggcgtttggtattgggttatggcagggggttttatattgataattgttgtgatgaaattgatggcccctaagatagaggagacacctgctaggtgtaaggagaagatggtta

SEQ ID NO: 60484 - DNA, 120 bp, Homo sapiens
  misc_feature: 1329 for SV(W|O) and mtDNA
gtaggccttatttctcttgtcctttcgtacagggaggaatttgaagtagatagaaaccgacctggattactccggtctgaactcagatcacgtaggactttaatcgttgaacaaacgaac

SEQ ID NO: 60485 - DNA, 120 bp, Homo sapiens
  misc_feature: 1329 for SV(W|O) and mtDNA
gtgttggtatagaatggggtctcctcctccggcggggtcgaagaaggtggtgttgaggttgcggtctgttagtagtatagtgatgccagcagctaggactgggagagataggagaagtag

SEQ ID NO: 60486 - DNA, 120 bp, Homo sapiens
  misc_feature: 1329 for SV(W|O) and mtDNA
aaaaattctaggctatatacaactacgcaaaggccccaacgttgtaggcccctacgggctactacaacccttcgctgacgccataaaactcttcaccaaagagcccctaaaacccgccac

SEQ ID NO: 60487 - DNA, 120 bp, Homo sapiens
  misc_feature: 1329 for SV(W|O) and mtDNA
ctacctctctatactaatctccctacaaatctccttaattataacattcacagccacagaactaatcatattttatatcttcttcgaaaccacacttatccccaccttggctatcatcac

SEQ ID NO: 60488 - DNA, 120 bp, Homo sapiens
  misc_feature: 1329 for SV(W|O) and mtDNA
gtcgcctggttctaggaataatgggggaagtatgtaggagttgaagattagtccgccgtagtcggtgtactcgtaggttcagtaccattggtggccaattgatttgatggtaagggaggg

SEQ ID NO: 60489 - DNA, 120 bp, Homo sapiens
  misc_feature: 1329 for SV(W|O) and mtDNA
cagggccctgaagcgcgtacacaccgcccgtcaccctcctcaagtatacttcaaaggacatttaactaaaacccctacgcatttatatagaggagacaagtcgtaacatggtaagtgtac

SEQ ID NO: 60490 - DNA, 120 bp, Homo sapiens
  misc_feature: 1329 for SV(W|O) and mtDNA
ggctgaggggagtcaggggtggagacctaattgggctgatttgcctgctgctgctaggaggaggcctagtagtggggtgaggcttggattagcgtttagaagggctatttgttgtgggtc

SEQ ID NO: 60491 - DNA, 120 bp, Homo sapiens
  misc_feature: 1329 for SV(W|O) and mtDNA
ctcttgtcctttcgtacagggaggaatttgaagtagatagaaaccgacctggattactccggtctgaactcagatcacgtaggactttaatcgttgaacaaacgaacctttaatagcggc

SEQ ID NO: 60492 - DNA, 120 bp, Homo sapiens
  misc_feature: 1329 for SV(W|O) and mtDNA
gatttatcctacactccaactcatgagacccacaacaaatagcccttctaaacgctaatccaagcctcaccccactactaggcctcctcctagcagcagcaggcaaatcagcccaattag

SEQ ID NO: 60493 - DNA, 120 bp, Homo sapiens
  misc_feature: 1329 for SV(W|O) and mtDNA
ccctgttcaactaagcactctactctcagtttactgctaaatccaccttcgacccttaagtttcataagggctatcgtagttttctggggtagaaaatgtagcccatttcttgccacctc

SEQ ID NO: 60494 - DNA, 120 bp, Homo sapiens
  misc_feature: 1329 for SV(W|O) and mtDNA
ctctatcttaggggccatcaatttcatcacaacaattatcaatataaaaccccctgccataacccaataccaaacgcccctcttcgtctgatccgtcctaatcacagcagtcctacttct

SEQ ID NO: 60495 - DNA, 120 bp, Homo sapiens
  misc_feature: 1329 for SV(W|O) and mtDNA
cgcctggttctaggaataatgggggaagtatgtaggagttgaagattagtccgccgtagtcggtgtactcgtaggttcagtaccattggtggccaattgatttgatggtaagggagggat

SEQ ID NO: 60496 - DNA, 120 bp, Homo sapiens
  misc_feature: 1329 for SV(W|O) and mtDNA
cgaaattgaccaaccctggggttagtatagcttagttaaactttcgtttattgctaaaggttaatcactgctgtttcccgtgggggtgtggctaggctaagcgttttgagctgcattgct

SEQ ID NO: 60497 - DNA, 120 bp, Homo sapiens
  misc_feature: 1329 for SV(W|O) and mtDNA
atgagagtaatagatagggctcaggcgtttgtgtatgatatgtttgcggtttcgatgatgtggtctttggagtagaaacctgtgaggaaaggtattcctgctaatgctaggctgccaatg

SEQ ID NO: 60498 - DNA, 120 bp, Homo sapiens
  misc_feature: 1329 for SV(W|O) and mtDNA
aatacttgatggcagcttctgtggaacgagggtttatttttttggttagaactggaataaaagctagcatgtttatttctaggcctactcaggtaaaaaatcagtgcgagcttagcgctg

SEQ ID NO: 60499 - DNA, 120 bp, Homo sapiens
  misc_feature: 1328 for SV(W|O) and mtDNA
ttttgttatgatgtctgtgtggaaagcggctgtgcagacattcaattgttattattatgtcctacaagcattaattaattaacacactttagtaagtatgttcgcctgtaatattgaacg

SEQ ID NO: 60500 - DNA, 120 bp, Homo sapiens
  misc_feature: 1328 for SV(W|O) and mtDNA
ggatgcggttgcttgcgtgaggaaatacttgatggcagcttctgtggaacgagggtttatttttttggttagaactggaataaaagctagcatgtttatttctaggcctactcaggtaaa

SEQ ID NO: 60501 - DNA, 120 bp, Homo sapiens
  misc_feature: 1328 for SV(W|O) and mtDNA
aatgaacgaaaatctgttcgcttcattcattgcccccacaatcctaggcctacccgccgcagtactgatcattctatttccccctctattgatccccacctccaaatatctcatcaacaa

SEQ ID NO: 60502 - DNA, 120 bp, Homo sapiens
  misc_feature: 1328 for SV(W|O) and mtDNA
cgaagggttgtagtagcccgtaggggcctacaacgttggggcctttgcgtagttgtatatagcctagaatttttcgttcggtaagcattaggaatgccattgcgattagaatgggtacaa

SEQ ID NO: 60503 - DNA, 120 bp, Homo sapiens
  misc_feature: 1328 for SV(W|O) and mtDNA
gggctattcctagttttattgctatagccattatgattattaatgatgagtactgattggtagtattggttatggttcattgtccggagagtatattgttgaagaggatagctattagaa

SEQ ID NO: 60504 - DNA, 120 bp, Homo sapiens
  misc_feature: 1328 for SV(W|O) and mtDNA
ttagaagggctatttgttgtgggtctcatgagttggagtgtaggataaatcatgctaaggcgaggatgaaaccgatatcgccgatacggttgtataggattgcttgaatggctgctgtgt

SEQ ID NO: 60505 - DNA, 120 bp, Homo sapiens
  misc_feature: 1328 for SV(W|O) and mtDNA
tgttcctaggaagattgtagtggtgagggtgtttattataataatgtttgtgtattcggctatgaagaatagggcgaaggggcctgcggcgtattcgatgttgaagcctgagactagttc

SEQ ID NO: 60506 - DNA, 120 bp, Homo sapiens
  misc_feature: 1328 for SV(W|O) and mtDNA
tgtgatccatcgtgatgtcttatttaaggggaacgtgtgggctatttaggctttatgaccctgaagtaggaaccagatgtcggatacagttcactttagctacccccaagtgttatgggc

SEQ ID NO: 60507 - DNA, 120 bp, Homo sapiens
  misc_feature: 1328 for SV(W|O) and mtDNA
cttctaaacgctaatccaagcctcaccccactactaggcctcctcctagcagcagcaggcaaatcagcccaattaggtctccacccctgactcccctcagccatagaaggccccacccca

SEQ ID NO: 60508 - DNA, 120 bp, Homo sapiens
  misc_feature: 1328 for SV(W|O) and mtDNA
tgggggtaattatggtgggccatacggtagtatttagttggggcatttcactgtaaagaggtgttggttctcttaatctttaacttaaaaggttaatgctaagttagctttacagtgggc

SEQ ID NO: 60509 - DNA, 120 bp, Homo sapiens
  misc_feature: 1328 for SV(W|O) and mtDNA
gcaggtgtctcctctatcttaggggccatcaatttcatcacaacaattatcaatataaaaccccctgccataacccaataccaaacgcccctcttcgtctgatccgtcctaatcacagca

SEQ ID NO: 60510 - DNA, 120 bp, Homo sapiens
  misc_feature: 1328 for SV(W|O) and mtDNA
tgcgataaataatgggatgaggcaggaatcaaagacagatactgcgacatagggtgctccggctccagcgtctcgcaatgctatcgcgtgcataccccccagacgaaaataccaaatgca

SEQ ID NO: 60511 - DNA, 120 bp, Homo sapiens
  misc_feature: 1328 for SV(W|O) and mtDNA
aacattactaataagtggctcctttaacctctccacccttatcacaacacaagaacacctctgattactcctgccatcatgacccttggccataatatgatttatctccacactagcaga

SEQ ID NO: 60512 - DNA, 120 bp, Homo sapiens
  misc_feature: 1328 for SV(W|O) and mtDNA
tcctagaaataagggggtttaagctcctattatttactctatcaaagtaactcttttatcagacatatttcttaggtttgagggggaatgctggagattgtaatgggtatggagacatat

SEQ ID NO: 60513 - DNA, 120 bp, Homo sapiens
  misc_feature: 1328 for SV(W|O) and mtDNA
tacccattctaatcgcaatggcattcctaatgcttaccgaacgaaaaattctaggctatatacaactacgcaaaggccccaacgttgtaggcccctacgggctactacaacccttcgctg

SEQ ID NO: 60514 - DNA, 120 bp, Homo sapiens
  misc_feature: 1328 for SV(W|O) and mtDNA
gttccctgctaagggagggtagactgttcaacctgttcctgctccggcctccactatagcagatgcgagcaggagtaggagagagggaggtaagagtcagaagcttatgttgtttatgcg

SEQ ID NO: 60515 - DNA, 120 bp, Homo sapiens
  misc_feature: 1328 for SV(W|O) and mtDNA
gtgcaactccaaataaaagtaataaccatgcacactactataaccaccctaaccctgacttccctaattccccccatccttaccaccctcgttaaccctaacaaaaaaaactcatacccc

SEQ ID NO: 60516 - DNA, 120 bp, Homo sapiens
  misc_feature: 1328 for SV(W|O) and mtDNA
cccattctaatcgcaatggcattcctaatgcttaccgaacgaaaaattctaggctatatacaactacgcaaaggccccaacgttgtaggcccctacgggctactacaacccttcgctgac

SEQ ID NO: 60517 - DNA, 120 bp, Homo sapiens
  misc_feature: 1328 for SV(W|O) and mtDNA
ggggtgctatagggtaaatacgggccctatttcaaagatttttaggggaattaattctaggacgatgggcatgaaactgtggtttgctccacagatttcagagcattgaccgtagtatac

SEQ ID NO: 60518 - DNA, 120 bp, Homo sapiens
  misc_feature: 1328 for SV(W|O) and mtDNA
aagcactctactctcagtttactgctaaatccaccttcgacccttaagtttcataagggctatcgtagttttctggggtagaaaatgtagcccatttcttgccacctcatgggctacacc

SEQ ID NO: 60519 - DNA, 120 bp, Homo sapiens
  misc_feature: 1328 for SV(W|O) and mtDNA
caccccttacgagtgcggcttcgaccctatatcccccgcccgcgtccctttctccataaaattcttcttagtagctattaccttcttattatttgatctagaaattgccctccttttacc

SEQ ID NO: 60520 - DNA, 120 bp, Homo sapiens
  misc_feature: 1328 for SV(W|O) and mtDNA
cgatatggcgtttccccgcataaacaacataagcttctgactcttacctccctctctcctactcctgctcgcatctgctatagtggaggccggagcaggaacaggttgaacagtctaccc

SEQ ID NO: 60521 - DNA, 120 bp, Homo sapiens
  misc_feature: 1328 for SV(W|O) and mtDNA
ggggtcagggttgattcgggaggatcctattggtgcgggggctttgtatgattatgggcgttgattagtagtagttactggttgaacattgtttgttggtgtatatattgtaattgagat

SEQ ID NO: 60522 - DNA, 120 bp, Homo sapiens
  misc_feature: 1328 for SV(W|O) and mtDNA
acataccaaggccaccacacaccacctgtccaaaaaggccttcgatacgggataatcctatttattacctcagaagtttttttcttcgcaggatttttctgagccttttaccactccagc

SEQ ID NO: 60523 - DNA, 120 bp, Homo sapiens
  misc_feature: 1328 for SV(W|O) and mtDNA
cctacctatctccccttttatactaataatcttatagaaatttaggttaaatacagaccaagagccttcaaagccctcagtaagttgcaatacttaatttctgtaacagctaaggactgc

SEQ ID NO: 60524 - DNA, 120 bp, Homo sapiens
  misc_feature: 1328 for SV(W|O) and mtDNA
gcaggtcgcctggttctaggaataatgggggaagtatgtaggagttgaagattagtccgccgtagtcggtgtactcgtaggttcagtaccattggtggccaattgatttgatggtaaggg

SEQ ID NO: 60525 - DNA, 120 bp, Homo sapiens
  misc_feature: 1328 for SV(W|O) and mtDNA
gcacggagaattttggattctcagggatgggttcgattctcatagtcctagaaataagggggtttaagctcctattatttactctatcaaagtaactcttttatcagacatatttcttag

SEQ ID NO: 60526 - DNA, 120 bp, Homo sapiens
  misc_feature: 1328 for SV(W|O) and mtDNA
gatttgactgtaatgtgctatgtacggtaaatggctttatgtactatgtactgttaagggtgggtaggtttgttggtatcctagtgggtgaggggtggctttggagttgcagttgatgtg

SEQ ID NO: 60527 - DNA, 120 bp, Homo sapiens
  misc_feature: 1328 for SV(W|O) and mtDNA
ctacgaacgcactcacagtcgcatcataatcctctctcaaggacttcaaactctactcccactaatagctttttgatgacttctagcaagcctcgctaacctcgccttaccccccactat

SEQ ID NO: 60528 - DNA, 120 bp, Homo sapiens
  misc_feature: 1328 for SV(W|O) and mtDNA
aacttaaaactttacagtcagaggttcaattcctcttcttaacaacatacccatggccaacctcctactcctcattgtacccattctaatcgcaatggcattcctaatgcttaccgaacg

SEQ ID NO: 60529 - DNA, 120 bp, Homo sapiens
  misc_feature: 1328 for SV(W|O) and mtDNA
cggggtaagatttgccgagttccttttactttttttaacctttccttatgagcatgcctgtgttgggttgacagtgagggtaataatgacttgttggttgattgtagatattgggctgtt

SEQ ID NO: 60530 - DNA, 120 bp, Homo sapiens
  misc_feature: 1328 for SV(W|O) and mtDNA
attgtagtggtgagggtgtttattataataatgtttgtgtattcggctatgaagaatagggcgaaggggcctgcggcgtattcgatgttgaagcctgagactagttcggactccccttcg

SEQ ID NO: 60531 - DNA, 120 bp, Homo sapiens
  misc_feature: 1328 for SV(W|O) and mtDNA
aactaatactaacatctcagacgctcaggaaatagaaaccgtctgaactatcctgcccgccatcatcctagtcctcatcgccctcccatccctacgcatcctttacataacagacgaggt

SEQ ID NO: 60532 - DNA, 120 bp, Homo sapiens
  misc_feature: 1327 for SV(W|O) and mtDNA
tttggtattgggttatggcagggggttttatattgataattgttgtgatgaaattgatggcccctaagatagaggagacacctgctaggtgtaaggagaagatggttaggtctacggagg

SEQ ID NO: 60533 - DNA, 120 bp, Homo sapiens
  misc_feature: 1327 for SV(W|O) and mtDNA
aattactgtggcccctcagaatgatatttggcctcacgggaggacatagcctatgaaggctgttgctatagttgcaagcaggaggataatgccgatgtttcaggtttctgagtagagaaa

SEQ ID NO: 60534 - DNA, 120 bp, Homo sapiens
  misc_feature: 1327 for SV(W|O) and mtDNA
aactagtctcaggcttcaacatcgaatacgccgcaggccccttcgccctattcttcatagccgaatacacaaacattattataataaacaccctcaccactacaatcttcctaggaacaa

SEQ ID NO: 60535 - DNA, 120 bp, Homo sapiens
  misc_feature: 1327 for SV(W|O) and mtDNA
cctgtaagtaggagagtgatatttgatcaggagaacgtggttactagcacagagagttctcccagtaggttaatagtggggggtaaggcgaggttagcgaggcttgctagaagtcatcaa

SEQ ID NO: 60536 - DNA, 120 bp, Homo sapiens
  misc_feature: 1327 for SV(W|O) and mtDNA
ttcaatcgggagtactactcgattgtcaacgtcaaggagtcgcaggtcgcctggttctaggaataatgggggaagtatgtaggagttgaagattagtccgccgtagtcggtgtactcgta

SEQ ID NO: 60537 - DNA, 120 bp, Homo sapiens
  misc_feature: 1327 for SV(W|O) and mtDNA
cgctactcctacctatctccccttttatactaataatcttatagaaatttaggttaaatacagaccaagagccttcaaagccctcagtaagttgcaatacttaatttctgtaacagctaa

SEQ ID NO: 60538 - DNA, 120 bp, Homo sapiens
  misc_feature: 1327 for SV(W|O) and mtDNA
tgtagtggtgagggtgtttattataataatgtttgtgtattcggctatgaagaatagggcgaaggggcctgcggcgtattcgatgttgaagcctgagactagttcggactccccttcggc

SEQ ID NO: 60539 - DNA, 120 bp, Homo sapiens
  misc_feature: 1327 for SV(W|O) and mtDNA
tgactgtaatgtgctatgtacggtaaatggctttatgtactatgtactgttaagggtgggtaggtttgttggtatcctagtgggtgaggggtggctttggagttgcagttgatgtgtgat

SEQ ID NO: 60540 - DNA, 120 bp, Homo sapiens
  misc_feature: 1327 for SV(W|O) and mtDNA
ctaggatgatggcgggcaggatagttcagacggtttctatttcctgagcgtctgagatgttagtattagttagttttgttgtgagtgttaggaaaagggcatacaggactaggaagcaga

SEQ ID NO: 60541 - DNA, 120 bp, Homo sapiens
  misc_feature: 1327 for SV(W|O) and mtDNA
ctttggtgaagagttttatggcgtcagcgaagggttgtagtagcccgtaggggcctacaacgttggggcctttgcgtagttgtatatagcctagaatttttcgttcggtaagcattagga

SEQ ID NO: 60542 - DNA, 120 bp, Homo sapiens
  misc_feature: 1327 for SV(W|O) and mtDNA
ggttagttgtttgtagggctcatggtaggggtaaaaggagggcaatttctagatcaaataataagaaggtaatagctactaagaagaattttatggagaaagggacgcgggcgggggata

SEQ ID NO: 60543 - DNA, 120 bp, Homo sapiens
  misc_feature: 1327 for SV(W|O) and mtDNA
tagtctcaggcttcaacatcgaatacgccgcaggccccttcgccctattcttcatagccgaatacacaaacattattataataaacaccctcaccactacaatcttcctaggaacaacat

SEQ ID NO: 60544 - DNA, 120 bp, Homo sapiens
  misc_feature: 1327 for SV(W|O) and mtDNA
acagggccctgaagcgcgtacacaccgcccgtcaccctcctcaagtatacttcaaaggacatttaactaaaacccctacgcatttatatagaggagacaagtcgtaacatggtaagtgta

SEQ ID NO: 60545 - DNA, 120 bp, Homo sapiens
  misc_feature: 1327 for SV(W|O) and mtDNA
taatccacctcaactgcctgctatgatggataagattgagagagtgaggagaaggcttacgtttagtgagggagagatttggtatatgattgagatgggggctagtttttgtcatgtgag

SEQ ID NO: 60546 - DNA, 120 bp, Homo sapiens
  misc_feature: 1327 for SV(W|O) and mtDNA
ccttatttctcttgtcctttcgtacagggaggaatttgaagtagatagaaaccgacctggattactccggtctgaactcagatcacgtaggactttaatcgttgaacaaacgaaccttta

SEQ ID NO: 60547 - DNA, 120 bp, Homo sapiens
  misc_feature: 1327 for SV(W|O) and mtDNA
taaaggagccacttattagtaatgttgatagtagaatgatggctagggtgacttcatatgagattgtttgggctactgctcgcagtgcgccgatcagggcgtagtttgagtttgatgctc

SEQ ID NO: 60548 - DNA, 120 bp, Homo sapiens
  misc_feature: 1327 for SV(W|O) and mtDNA
gaaatacttgatggcagcttctgtggaacgagggtttatttttttggttagaactggaataaaagctagcatgtttatttctaggcctactcaggtaaaaaatcagtgcgagcttagcgc

SEQ ID NO: 60549 - DNA, 120 bp, Homo sapiens
  misc_feature: 1327 for SV(W|O) and mtDNA
cgccttagcatgatttatcctacactccaactcatgagacccacaacaaatagcccttctaaacgctaatccaagcctcaccccactactaggcctcctcctagcagcagcaggcaaatc

SEQ ID NO: 60550 - DNA, 120 bp, Homo sapiens
  misc_feature: 1327 for SV(W|O) and mtDNA
gagccccattgtgttgtggtaaatatgtagagggagtatagggctgtgactagtatgttgagtcctgtaagtaggagagtgatatttgatcaggagaacgtggttactagcacagagagt

SEQ ID NO: 60551 - DNA, 120 bp, Homo sapiens
  misc_feature: 1327 for SV(W|O) and mtDNA
cttcgccctattcttcatagccgaatacacaaacattattataataaacaccctcaccactacaatcttcctaggaacaacatatgacgcactctcccctgaactctacacaacatattt

SEQ ID NO: 60552 - DNA, 120 bp, Homo sapiens
  misc_feature: 1327 for SV(W|O) and mtDNA
ctgtaatgtgctatgtacggtaaatggctttatgtactatgtactgttaagggtgggtaggtttgttggtatcctagtgggtgaggggtggctttggagttgcagttgatgtgtgatagt

SEQ ID NO: 60553 - DNA, 120 bp, Homo sapiens
  misc_feature: 1327 for SV(W|O) and mtDNA
aaactagcccccatctcaatcatataccaaatctctccctcactaaacgtaagccttctcctcactctctcaatcttatccatcatagcaggcagttgaggtggattaaaccaaacccag

SEQ ID NO: 60554 - DNA, 120 bp, Homo sapiens
  misc_feature: 1327 for SV(W|O) and mtDNA
atttatcctacactccaactcatgagacccacaacaaatagcccttctaaacgctaatccaagcctcaccccactactaggcctcctcctagcagcagcaggcaaatcagcccaattagg

SEQ ID NO: 60555 - DNA, 120 bp, Homo sapiens
  misc_feature: 1327 for SV(W|O) and mtDNA
atagtaagtttgtaattactgtggcccctcagaatgatatttggcctcacgggaggacatagcctatgaaggctgttgctatagttgcaagcaggaggataatgccgatgtttcaggttt

SEQ ID NO: 60556 - DNA, 120 bp, Homo sapiens
  misc_feature: 1327 for SV(W|O) and mtDNA
agggtgggagtagttccctgctaagggagggtagactgttcaacctgttcctgctccggcctccactatagcagatgcgagcaggagtaggagagagggaggtaagagtcagaagcttat

SEQ ID NO: 60557 - DNA, 120 bp, Homo sapiens
  misc_feature: 1327 for SV(W|O) and mtDNA
agattgtagtggtgagggtgtttattataataatgtttgtgtattcggctatgaagaatagggcgaaggggcctgcggcgtattcgatgttgaagcctgagactagttcggactcccctt

SEQ ID NO: 60558 - DNA, 120 bp, Homo sapiens
  misc_feature: 1326 for SV(W|O) and mtDNA
ttgtagtggtgagggtgtttattataataatgtttgtgtattcggctatgaagaatagggcgaaggggcctgcggcgtattcgatgttgaagcctgagactagttcggactccccttcgg

SEQ ID NO: 60559 - DNA, 120 bp, Homo sapiens
  misc_feature: 1326 for SV(W|O) and mtDNA
ttcttactcatccgcttccaccccctagcagaaaatagcccactaatccaaactctaacactatgcttaggcgctatcaccactctgttcgcagcagtctgcgcccttacacaaaatgac

SEQ ID NO: 60560 - DNA, 120 bp, Homo sapiens
  misc_feature: 1326 for SV(W|O) and mtDNA
atccacctcaactgcctgctatgatggataagattgagagagtgaggagaaggcttacgtttagtgagggagagatttggtatatgattgagatgggggctagtttttgtcatgtgagaa

SEQ ID NO: 60561 - DNA, 120 bp, Homo sapiens
  misc_feature: 1326 for SV(W|O) and mtDNA
ctgctaagggagggtagactgttcaacctgttcctgctccggcctccactatagcagatgcgagcaggagtaggagagagggaggtaagagtcagaagcttatgttgtttatgcggggaa

SEQ ID NO: 60562 - DNA, 120 bp, Homo sapiens
  misc_feature: 1326 for SV(W|O) and mtDNA
atctgatgttttggttaaactatatttacaagaggaaaacccggtaatgatgtcggggttgagggataggaggagaatgggggataggtgtatgaacatgagggtgttttctcgtgtgaa

SEQ ID NO: 60563 - DNA, 120 bp, Homo sapiens
  misc_feature: 1326 for SV(W|O) and mtDNA
gcaactccaaataaaagtaataaccatgcacactactataaccaccctaaccctgacttccctaattccccccatccttaccaccctcgttaaccctaacaaaaaaaactcataccccca

SEQ ID NO: 60564 - DNA, 120 bp, Homo sapiens
  misc_feature: 1326 for SV(W|O) and mtDNA
cctgttcaactaagcactctactctcagtttactgctaaatccaccttcgacccttaagtttcataagggctatcgtagttttctggggtagaaaatgtagcccatttcttgccacctca

SEQ ID NO: 60565 - DNA, 120 bp, Homo sapiens
  misc_feature: 1326 for SV(W|O) and mtDNA
tcttgggtgggtgtgggtataatactaagttgagatgatatcatttacgggggaaggcgctttgtgaagtaggccttatttctcttgtcctttcgtacagggaggaatttgaagtagata

SEQ ID NO: 60566 - DNA, 120 bp, Homo sapiens
  misc_feature: 1326 for SV(W|O) and mtDNA
aggggtcagggttgattcgggaggatcctattggtgcgggggctttgtatgattatgggcgttgattagtagtagttactggttgaacattgtttgttggtgtatatattgtaattgaga

SEQ ID NO: 60567 - DNA, 120 bp, Homo sapiens
  misc_feature: 1326 for SV(W|O) and mtDNA
ctctctatactaatctccctacaaatctccttaattataacattcacagccacagaactaatcatattttatatcttcttcgaaaccacacttatccccaccttggctatcatcacccga

SEQ ID NO: 60568 - DNA, 120 bp, Homo sapiens
  misc_feature: 1326 for SV(W|O) and mtDNA
tcgctgggtcaatagtacttgccgcagtactcttaaaactaggcggctatggtataatacgcctcacactcattctcaaccccctgacaaaacacatagcctaccccttccttgtactat

SEQ ID NO: 60569 - DNA, 120 bp, Homo sapiens
  misc_feature: 1326 for SV(W|O) and mtDNA
tccacctcaactgcctgctatgatggataagattgagagagtgaggagaaggcttacgtttagtgagggagagatttggtatatgattgagatgggggctagtttttgtcatgtgagaag

SEQ ID NO: 60570 - DNA, 120 bp, Homo sapiens
  misc_feature: 1326 for SV(W|O) and mtDNA
agaggggtcagggttgattcgggaggatcctattggtgcgggggctttgtatgattatgggcgttgattagtagtagttactggttgaacattgtttgttggtgtatatattgtaattga

SEQ ID NO: 60571 - DNA, 120 bp, Homo sapiens
  misc_feature: 1326 for SV(W|O) and mtDNA
agtctcaggcttcaacatcgaatacgccgcaggccccttcgccctattcttcatagccgaatacacaaacattattataataaacaccctcaccactacaatcttcctaggaacaacata

SEQ ID NO: 60572 - DNA, 120 bp, Homo sapiens
  misc_feature: 1326 for SV(W|O) and mtDNA
tatacttcaaaggacatttaactaaaacccctacgcatttatatagaggagacaagtcgtaacatggtaagtgtactggaaagtgcacttggacgaaccagagtgtagcttaacacaaag

SEQ ID NO: 60573 - DNA, 120 bp, Homo sapiens
  misc_feature: 1326 for SV(W|O) and mtDNA
gtggcaagaaatgggctacattttctaccccagaaaactacgatagcccttatgaaacttaagggtcgaaggtggatttagcagtaaactgagagtagagtgcttagttgaacagggccc

SEQ ID NO: 60574 - DNA, 120 bp, Homo sapiens
  misc_feature: 1326 for SV(W|O) and mtDNA
ggtttggtttagacgtccgggaattgcatctgtttttaagcctaatgtggggacagctcatgagtgcaagacgtcttgtgatgtaattattatacgaatgggggcttcaatcgggagtac

SEQ ID NO: 60575 - DNA, 120 bp, Homo sapiens
  misc_feature: 1326 for SV(W|O) and mtDNA
gggtgctatagggtaaatacgggccctatttcaaagatttttaggggaattaattctaggacgatgggcatgaaactgtggtttgctccacagatttcagagcattgaccgtagtatacc

SEQ ID NO: 60576 - DNA, 120 bp, Homo sapiens
  misc_feature: 1326 for SV(W|O) and mtDNA
ggggtgaggcttggattagcgtttagaagggctatttgttgtgggtctcatgagttggagtgtaggataaatcatgctaaggcgaggatgaaaccgatatcgccgatacggttgtatagg

SEQ ID NO: 60577 - DNA, 120 bp, Homo sapiens
  misc_feature: 1326 for SV(W|O) and mtDNA
gaagattgtagtggtgagggtgtttattataataatgtttgtgtattcggctatgaagaatagggcgaaggggcctgcggcgtattcgatgttgaagcctgagactagttcggactcccc

SEQ ID NO: 60578 - DNA, 120 bp, Homo sapiens
  misc_feature: 1326 for SV(W|O) and mtDNA
gcttcaatcgggagtactactcgattgtcaacgtcaaggagtcgcaggtcgcctggttctaggaataatgggggaagtatgtaggagttgaagattagtccgccgtagtcggtgtactcg

SEQ ID NO: 60579 - DNA, 120 bp, Homo sapiens
  misc_feature: 1326 for SV(W|O) and mtDNA
ctaaaaaatcccaaacatataactgaactcctcatacccaattggaccaatctatcaccctatagaagaactaatgttagtataagtaacatgaaaacattctcctccgcataagcctgc

SEQ ID NO: 60580 - DNA, 120 bp, Homo sapiens
  misc_feature: 1326 for SV(W|O) and mtDNA
acgaaattgaccaaccctggggttagtatagcttagttaaactttcgtttattgctaaaggttaatcactgctgtttcccgtgggggtgtggctaggctaagcgttttgagctgcattgc

SEQ ID NO: 60581 - DNA, 120 bp, Homo sapiens
  misc_feature: 1326 for SV(W|O) and mtDNA
aggtcgcctggttctaggaataatgggggaagtatgtaggagttgaagattagtccgccgtagtcggtgtactcgtaggttcagtaccattggtggccaattgatttgatggtaagggag

SEQ ID NO: 60582 - DNA, 120 bp, Homo sapiens
  misc_feature: 1326 for SV(W|O) and mtDNA
ctaaataagctatcgggcccataccccgaaaatgttggttatacccttcccgtactaattaatcccctggcccaacccgtcatctactctaccatctttgcaggcacactcatcacagcg

SEQ ID NO: 60583 - DNA, 120 bp, Homo sapiens
  misc_feature: 1326 for SV(W|O) and mtDNA
agttgtttgtagggctcatggtaggggtaaaaggagggcaatttctagatcaaataataagaaggtaatagctactaagaagaattttatggagaaagggacgcgggcgggggatatagg

SEQ ID NO: 60584 - DNA, 120 bp, Homo sapiens
  misc_feature: 1326 for SV(W|O) and mtDNA
atgggggtaattatggtgggccatacggtagtatttagttggggcatttcactgtaaagaggtgttggttctcttaatctttaacttaaaaggttaatgctaagttagctttacagtggg

SEQ ID NO: 60585 - DNA, 120 bp, Homo sapiens
  misc_feature: 1326 for SV(W|O) and mtDNA
acacctagcaggtgtctcctctatcttaggggccatcaatttcatcacaacaattatcaatataaaaccccctgccataacccaataccaaacgcccctcttcgtctgatccgtcctaat

SEQ ID NO: 60586 - DNA, 120 bp, Homo sapiens
  misc_feature: 1326 for SV(W|O) and mtDNA
agcaagcctcgctaacctcgccttaccccccactattaacctactgggagaactctctgtgctagtaaccacgttctcctgatcaaatatcactctcctacttacaggactcaacatact

SEQ ID NO: 60587 - DNA, 120 bp, Homo sapiens
  misc_feature: 1325 for SV(W|O) and mtDNA
ttttaatctgacgcaggcttatgcggaggagaatgttttcatgttacttatactaacattagttcttctatagggtgatagattggtccaattgggtatgaggagttcagttatatgttt

SEQ ID NO: 60588 - DNA, 120 bp, Homo sapiens
  misc_feature: 1325 for SV(W|O) and mtDNA
ttggtttaatccacctcaactgcctgctatgatggataagattgagagagtgaggagaaggcttacgtttagtgagggagagatttggtatatgattgagatgggggctagtttttgtca

SEQ ID NO: 60589 - DNA, 120 bp, Homo sapiens
  misc_feature: 1325 for SV(W|O) and mtDNA
tgtgttcagatatgttaaagccactttcgtagtctattttgtgtcaactggagttttttacaactcaggtgagttttagctttattggggagggggtgatctaaaacactctttacgccg

SEQ ID NO: 60590 - DNA, 120 bp, Homo sapiens
  misc_feature: 1325 for SV(W|O) and mtDNA
tgcctgctatgatggataagattgagagagtgaggagaaggcttacgtttagtgagggagagatttggtatatgattgagatgggggctagtttttgtcatgtgagaagaagcaggccgg

SEQ ID NO: 60591 - DNA, 120 bp, Homo sapiens
  misc_feature: 1325 for SV(W|O) and mtDNA
attagtcattgttgggtggtgattagtcggttgttgatgagatatttggaggtggggatcaatagagggggaaatagaatgatcagtactgcggcgggtaggcctaggattgtgggggca

SEQ ID NO: 60592 - DNA, 120 bp, Homo sapiens
  misc_feature: 1325 for SV(W|O) and mtDNA
tctttggtgaagagttttatggcgtcagcgaagggttgtagtagcccgtaggggcctacaacgttggggcctttgcgtagttgtatatagcctagaatttttcgttcggtaagcattagg

SEQ ID NO: 60593 - DNA, 120 bp, Homo sapiens
  misc_feature: 1325 for SV(W|O) and mtDNA
tctgatgttttggttaaactatatttacaagaggaaaacccggtaatgatgtcggggttgagggataggaggagaatgggggataggtgtatgaacatgagggtgttttctcgtgtgaat

SEQ ID NO: 60594 - DNA, 120 bp, Homo sapiens
  misc_feature: 1325 for SV(W|O) and mtDNA
cttcttactcatccgcttccaccccctagcagaaaatagcccactaatccaaactctaacactatgcttaggcgctatcaccactctgttcgcagcagtctgcgcccttacacaaaatga

SEQ ID NO: 60595 - DNA, 120 bp, Homo sapiens
  misc_feature: 1325 for SV(W|O) and mtDNA
ggtttagtagggtagggttattttcgttaatgttagtaagggtggggaagcgaggttgacctgttagggtgagaagaattattcgagtgctataggcgcttgtcagggaggtagcgatga

SEQ ID NO: 60596 - DNA, 120 bp, Homo sapiens
  misc_feature: 1325 for SV(W|O) and mtDNA
actctactctcagtttactgctaaatccaccttcgacccttaagtttcataagggctatcgtagttttctggggtagaaaatgtagcccatttcttgccacctcatgggctacaccttga

SEQ ID NO: 60597 - DNA, 120 bp, Homo sapiens
  misc_feature: 1325 for SV(W|O) and mtDNA
gactgtaatgtgctatgtacggtaaatggctttatgtactatgtactgttaagggtgggtaggtttgttggtatcctagtgggtgaggggtggctttggagttgcagttgatgtgtgata

SEQ ID NO: 60598 - DNA, 120 bp, Homo sapiens
  misc_feature: 1325 for SV(W|O) and mtDNA
tacacaacatattttgtcaccaagaccctacttctaacctccctgttcttatgaattcgaacagcatacccccgattccgctacgaccaactcatacacctcctatgaaaaaacttccta

SEQ ID NO: 60599 - DNA, 120 bp, Homo sapiens
  misc_feature: 1325 for SV(W|O) and mtDNA
gggtatactacggtcaatgctctgaaatctgtggagcaaaccacagtttcatgcccatcgtcctagaattaattcccctaaaaatctttgaaatagggcccgtatttaccctatagcacc

SEQ ID NO: 60600 - DNA, 120 bp, Homo sapiens
  misc_feature: 1325 for SV(W|O) and mtDNA
gggtcagggttgattcgggaggatcctattggtgcgggggctttgtatgattatgggcgttgattagtagtagttactggttgaacattgtttgttggtgtatatattgtaattgagatt

SEQ ID NO: 60601 - DNA, 120 bp, Homo sapiens
  misc_feature: 1325 for SV(W|O) and mtDNA
ggcaagaaatgggctacattttctaccccagaaaactacgatagcccttatgaaacttaagggtcgaaggtggatttagcagtaaactgagagtagagtgcttagttgaacagggccctg

SEQ ID NO: 60602 - DNA, 120 bp, Homo sapiens
  misc_feature: 1325 for SV(W|O) and mtDNA
ggagtcgcaggtcgcctggttctaggaataatgggggaagtatgtaggagttgaagattagtccgccgtagtcggtgtactcgtaggttcagtaccattggtggccaattgatttgatgg

SEQ ID NO: 60603 - DNA, 120 bp, Homo sapiens
  misc_feature: 1325 for SV(W|O) and mtDNA
gccttatttctcttgtcctttcgtacagggaggaatttgaagtagatagaaaccgacctggattactccggtctgaactcagatcacgtaggactttaatcgttgaacaaacgaaccttt

SEQ ID NO: 60604 - DNA, 120 bp, Homo sapiens
  misc_feature: 1325 for SV(W|O) and mtDNA
gagtaggaggttggccatgggtatgttgttaagaagaggaattgaacctctgactgtaaagttttaagttttatgcgattaccgggctctgccatcttaacaaaccctgttcttgggtgg

SEQ ID NO: 60605 - DNA, 120 bp, Homo sapiens
  misc_feature: 1325 for SV(W|O) and mtDNA
ccagtaactactactaatcaacgcccataatcatacaaagcccccgcaccaataggatcctcccgaatcaaccctgacccctctccttcataaattattcagcttcctacactattaaag

SEQ ID NO: 60606 - DNA, 120 bp, Homo sapiens
  misc_feature: 1325 for SV(W|O) and mtDNA
actaggatgatggcgggcaggatagttcagacggtttctatttcctgagcgtctgagatgttagtattagttagttttgttgtgagtgttaggaaaagggcatacaggactaggaagcag

SEQ ID NO: 60607 - DNA, 120 bp, Homo sapiens
  misc_feature: 1325 for SV(W|O) and mtDNA
cctaaaaaatcccaaacatataactgaactcctcatacccaattggaccaatctatcaccctatagaagaactaatgttagtataagtaacatgaaaacattctcctccgcataagcctg

SEQ ID NO: 60608 - DNA, 120 bp, Homo sapiens
  misc_feature: 1325 for SV(W|O) and mtDNA
ccgaaaaatcagaataggtgttggtatagaatggggtctcctcctccggcggggtcgaagaaggtggtgttgaggttgcggtctgttagtagtatagtgatgccagcagctaggactggg

SEQ ID NO: 60609 - DNA, 120 bp, Homo sapiens
  misc_feature: 1325 for SV(W|O) and mtDNA
catggagagctcccgtgagtggttaatagggtgatagacctgtgatccatcgtgatgtcttatttaaggggaacgtgtgggctatttaggctttatgaccctgaagtaggaaccagatgt

SEQ ID NO: 60610 - DNA, 120 bp, Homo sapiens
  misc_feature: 1325 for SV(W|O) and mtDNA
attattagtataaaaggggagataggtaggagtagcgtggtaagggcgatgagtgtggggaggaatggggtgggttttgtatgttcaaactgtcattttatttttacgttgttagatatg

SEQ ID NO: 60611 - DNA, 120 bp, Homo sapiens
  misc_feature: 1325 for SV(W|O) and mtDNA
aattttttgttatgatgtctgtgtggaaagcggctgtgcagacattcaattgttattattatgtcctacaagcattaattaattaacacactttagtaagtatgttcgcctgtaatattg

SEQ ID NO: 60612 - DNA, 120 bp, Homo sapiens
  misc_feature: 1325 for SV(W|O) and mtDNA
agtaactactactaatcaacgcccataatcatacaaagcccccgcaccaataggatcctcccgaatcaaccctgacccctctccttcataaattattcagcttcctacactattaaagtt

SEQ ID NO: 60613 - DNA, 120 bp, Homo sapiens
  misc_feature: 1325 for SV(W|O) and mtDNA
agaggggcgtttggtattgggttatggcagggggttttatattgataattgttgtgatgaaattgatggcccctaagatagaggagacacctgctaggtgtaaggagaagatggttaggt

SEQ ID NO: 60614 - DNA, 120 bp, Homo sapiens
  misc_feature: 1324 for SV(W|O) and mtDNA
ttagtagggtagggttattttcgttaatgttagtaagggtggggaagcgaggttgacctgttagggtgagaagaattattcgagtgctataggcgcttgtcagggaggtagcgatgagag

SEQ ID NO: 60615 - DNA, 120 bp, Homo sapiens
  misc_feature: 1324 for SV(W|O) and mtDNA
tggctgaggggagtcaggggtggagacctaattgggctgatttgcctgctgctgctaggaggaggcctagtagtggggtgaggcttggattagcgtttagaagggctatttgttgtgggt

SEQ ID NO: 60616 - DNA, 120 bp, Homo sapiens
  misc_feature: 1324 for SV(W|O) and mtDNA
ccctattcttcatagccgaatacacaaacattattataataaacaccctcaccactacaatcttcctaggaacaacatatgacgcactctcccctgaactctacacaacatattttgtca

SEQ ID NO: 60617 - DNA, 120 bp, Homo sapiens
  misc_feature: 1324 for SV(W|O) and mtDNA
tcgcctggttctaggaataatgggggaagtatgtaggagttgaagattagtccgccgtagtcggtgtactcgtaggttcagtaccattggtggccaattgatttgatggtaagggaggga

SEQ ID NO: 60618 - DNA, 120 bp, Homo sapiens
  misc_feature: 1324 for SV(W|O) and mtDNA
atgttaaagccactttcgtagtctattttgtgtcaactggagttttttacaactcaggtgagttttagctttattggggagggggtgatctaaaacactctttacgccggcttctattga

SEQ ID NO: 60619 - DNA, 120 bp, Homo sapiens
  misc_feature: 1324 for SV(W|O) and mtDNA
cttatgaattcgaacagcatacccccgattccgctacgaccaactcatacacctcctatgaaaaaacttcctaccactcaccctagcattacttatatgatatgtctccatacccattac

SEQ ID NO: 60620 - DNA, 120 bp, Homo sapiens
  misc_feature: 1324 for SV(W|O) and mtDNA
ctccctcactaaacgtaagccttctcctcactctctcaatcttatccatcatagcaggcagttgaggtggattaaaccaaacccagctacgcaaaatcttagcatactcctcaattaccc

SEQ ID NO: 60621 - DNA, 120 bp, Homo sapiens
  misc_feature: 1324 for SV(W|O) and mtDNA
cattgtgttgtggtaaatatgtagagggagtatagggctgtgactagtatgttgagtcctgtaagtaggagagtgatatttgatcaggagaacgtggttactagcacagagagttctccc

SEQ ID NO: 60622 - DNA, 120 bp, Homo sapiens
  misc_feature: 1324 for SV(W|O) and mtDNA
gctactcctacctatctccccttttatactaataatcttatagaaatttaggttaaatacagaccaagagccttcaaagccctcagtaagttgcaatacttaatttctgtaacagctaag

SEQ ID NO: 60623 - DNA, 120 bp, Homo sapiens
  misc_feature: 1324 for SV(W|O) and mtDNA
gccctgttcaactaagcactctactctcagtttactgctaaatccaccttcgacccttaagtttcataagggctatcgtagttttctggggtagaaaatgtagcccatttcttgccacct

SEQ ID NO: 60624 - DNA, 120 bp, Homo sapiens
  misc_feature: 1324 for SV(W|O) and mtDNA
ctcctacctatctccccttttatactaataatcttatagaaatttaggttaaatacagaccaagagccttcaaagccctcagtaagttgcaatacttaatttctgtaacagctaaggact

SEQ ID NO: 60625 - DNA, 120 bp, Homo sapiens
  misc_feature: 1324 for SV(W|O) and mtDNA
cgggaagggtataaccaacattttcggggtatgggcccgatagcttatttagctgaccttactttaggatggggtgtgataggtggcacggagaattttggattctcagggatgggttcg

SEQ ID NO: 60626 - DNA, 120 bp, Homo sapiens
  misc_feature: 1324 for SV(W|O) and mtDNA
catgcatttggtattttcgtctggggggtatgcacgcgatagcattgcgagacgctggagccggagcaccctatgtcgcagtatctgtctttgattcctgcctcatcccattatttatcg

SEQ ID NO: 60627 - DNA, 120 bp, Homo sapiens
  misc_feature: 1324 for SV(W|O) and mtDNA
ccatttgggcaaaaagccggttagcgggggcaggcctcctagggagaggagggtggatggaattaagggtgttagtcatgttagcttgtttcaggtgcgagatagtagtagggtcgtggt

SEQ ID NO: 60628 - DNA, 120 bp, Homo sapiens
  misc_feature: 1324 for SV(W|O) and mtDNA
actgtaaagttttaagttttatgcgattaccgggctctgccatcttaacaaaccctgttcttgggtgggtgtgggtataatactaagttgagatgatatcatttacgggggaaggcgctt

SEQ ID NO: 60629 - DNA, 120 bp, Homo sapiens
  misc_feature: 1323 for SV(W|O) and mtDNA
tttgaagtccttgagagaggattatgatgcgactgtgagtgcgttcgtagtttgagtttgctaggcagaatagtaatgaggatgtaagcccgtgggcgattatgagaatgactgcgccgg

SEQ ID NO: 60630 - DNA, 120 bp, Homo sapiens
  misc_feature: 1323 for SV(W|O) and mtDNA
ttctccttacacctagcaggtgtctcctctatcttaggggccatcaatttcatcacaacaattatcaatataaaaccccctgccataacccaataccaaacgcccctcttcgtctgatcc

SEQ ID NO: 60631 - DNA, 120 bp, Homo sapiens
  misc_feature: 1323 for SV(W|O) and mtDNA
ttcgccctattcttcatagccgaatacacaaacattattataataaacaccctcaccactacaatcttcctaggaacaacatatgacgcactctcccctgaactctacacaacatatttt

SEQ ID NO: 60632 - DNA, 120 bp, Homo sapiens
  misc_feature: 1323 for SV(W|O) and mtDNA
ttcattgaactaggtctgtcccaatgtatgggatggcggatagtaagtttgtaattactgtggcccctcagaatgatatttggcctcacgggaggacatagcctatgaaggctgttgcta

SEQ ID NO: 60633 - DNA, 120 bp, Homo sapiens
  misc_feature: 1323 for SV(W|O) and mtDNA
cagctaaataagctatcgggcccataccccgaaaatgttggttatacccttcccgtactaattaatcccctggcccaacccgtcatctactctaccatctttgcaggcacactcatcaca

SEQ ID NO: 60634 - DNA, 120 bp, Homo sapiens
  misc_feature: 1323 for SV(W|O) and mtDNA
ctcaactgcctgctatgatggataagattgagagagtgaggagaaggcttacgtttagtgagggagagatttggtatatgattgagatgggggctagtttttgtcatgtgagaagaagca

SEQ ID NO: 60635 - DNA, 120 bp, Homo sapiens
  misc_feature: 1323 for SV(W|O) and mtDNA
tcttcttcccactcatcctaaccctactcctaatcacataacctattcccccgagcaatctcaattacaatatatacaccaacaaacaatgttcaaccagtaactactactaatcaacgc

SEQ ID NO: 60636 - DNA, 120 bp, Homo sapiens
  misc_feature: 1323 for SV(W|O) and mtDNA
gcctgctatgatggataagattgagagagtgaggagaaggcttacgtttagtgagggagagatttggtatatgattgagatgggggctagtttttgtcatgtgagaagaagcaggccgga

SEQ ID NO: 60637 - DNA, 120 bp, Homo sapiens
  misc_feature: 1323 for SV(W|O) and mtDNA
ggagggtagactgttcaacctgttcctgctccggcctccactatagcagatgcgagcaggagtaggagagagggaggtaagagtcagaagcttatgttgtttatgcggggaaacgccata

SEQ ID NO: 60638 - DNA, 120 bp, Homo sapiens
  misc_feature: 1323 for SV(W|O) and mtDNA
tagaggttaaggagggtgatggtggctatgatggtggggatgatgaggctattgttttttgtgaattcttcgataatggcccatttgggcaaaaagccggttagcgggggcaggcctcct

SEQ ID NO: 60639 - DNA, 120 bp, Homo sapiens
  misc_feature: 1323 for SV(W|O) and mtDNA
gtttgtagggctcatggtaggggtaaaaggagggcaatttctagatcaaataataagaaggtaatagctactaagaagaattttatggagaaagggacgcgggcgggggatatagggtcg

SEQ ID NO: 60640 - DNA, 120 bp, Homo sapiens
  misc_feature: 1323 for SV(W|O) and mtDNA
gtgatgtttttggtaaacaggcggggtaagatttgccgagttccttttactttttttaacctttccttatgagcatgcctgtgttgggttgacagtgagggtaataatgacttgttggtt

SEQ ID NO: 60641 - DNA, 120 bp, Homo sapiens
  misc_feature: 1323 for SV(W|O) and mtDNA
cttgggggtagctaaagtgaactgtatccgacatctggttcctacttcagggtcataaagcctaaatagcccacacgttccccttaaataagacatcacgatggatcacaggtctatcac

SEQ ID NO: 60642 - DNA, 120 bp, Homo sapiens
  misc_feature: 1323 for SV(W|O) and mtDNA
acgaaaatctgttcgcttcattcattgcccccacaatcctaggcctacccgccgcagtactgatcattctatttccccctctattgatccccacctccaaatatctcatcaacaaccgac

SEQ ID NO: 60643 - DNA, 120 bp, Homo sapiens
  misc_feature: 1323 for SV(W|O) and mtDNA
gtcaatagtacttgccgcagtactcttaaaactaggcggctatggtataatacgcctcacactcattctcaaccccctgacaaaacacatagcctaccccttccttgtactatccctatg

SEQ ID NO: 60644 - DNA, 120 bp, Homo sapiens
  misc_feature: 1323 for SV(W|O) and mtDNA
ggctattcctagttttattgctatagccattatgattattaatgatgagtactgattggtagtattggttatggttcattgtccggagagtatattgttgaagaggatagctattagaag

SEQ ID NO: 60645 - DNA, 120 bp, Homo sapiens
  misc_feature: 1323 for SV(W|O) and mtDNA
actgcctgctatgatggataagattgagagagtgaggagaaggcttacgtttagtgagggagagatttggtatatgattgagatgggggctagtttttgtcatgtgagaagaagcaggcc

SEQ ID NO: 60646 - DNA, 120 bp, Homo sapiens
  misc_feature: 1323 for SV(W|O) and mtDNA
ggaggttagttgtggcaataaaaatgattaaggatactagtataagagatcaggttcgtcctttagtgttgtgtatggttatcatttgttttgaggttagtttgattagtcattgttggg

SEQ ID NO: 60647 - DNA, 120 bp, Homo sapiens
  misc_feature: 1323 for SV(W|O) and mtDNA
gctcaggaaatagaaaccgtctgaactatcctgcccgccatcatcctagtcctcatcgccctcccatccctacgcatcctttacataacagacgaggtcaacgatccctcccttaccatc

SEQ ID NO: 60648 - DNA, 120 bp, Homo sapiens
  misc_feature: 1323 for SV(W|O) and mtDNA
aggaaatacttgatggcagcttctgtggaacgagggtttatttttttggttagaactggaataaaagctagcatgtttatttctaggcctactcaggtaaaaaatcagtgcgagcttagc

SEQ ID NO: 60649 - DNA, 120 bp, Homo sapiens
  misc_feature: 1323 for SV(W|O) and mtDNA
gcggggtaagatttgccgagttccttttactttttttaacctttccttatgagcatgcctgtgttgggttgacagtgagggtaataatgacttgttggttgattgtagatattgggctgt

SEQ ID NO: 60650 - DNA, 120 bp, Homo sapiens
  misc_feature: 1323 for SV(W|O) and mtDNA
gcgctttgtgaagtaggccttatttctcttgtcctttcgtacagggaggaatttgaagtagatagaaaccgacctggattactccggtctgaactcagatcacgtaggactttaatcgtt

SEQ ID NO: 60651 - DNA, 120 bp, Homo sapiens
  misc_feature: 1323 for SV(W|O) and mtDNA
gcctcatagggatagtacaaggaaggggtaggctatgtgttttgtcagggggttgagaatgagtgtgaggcgtattataccatagccgcctagttttaagagtactgcggcaagtactat

SEQ ID NO: 60652 - DNA, 120 bp, Homo sapiens
  misc_feature: 1323 for SV(W|O) and mtDNA
gagccggagcaccctatgtcgcagtatctgtctttgattcctgcctcatcccattatttatcgcacctacgttcaatattacaggcgaacatacttactaaagtgtgttaattaattaat

SEQ ID NO: 60653 - DNA, 120 bp, Homo sapiens
  misc_feature: 1323 for SV(W|O) and mtDNA
cgtccctttctccataaaattcttcttagtagctattaccttcttattatttgatctagaaattgccctccttttacccctaccatgagccctacaaacaactaacctgccactaatagt

SEQ ID NO: 60654 - DNA, 120 bp, Homo sapiens
  misc_feature: 1323 for SV(W|O) and mtDNA
cacggagaattttggattctcagggatgggttcgattctcatagtcctagaaataagggggtttaagctcctattatttactctatcaaagtaactcttttatcagacatatttcttagg

SEQ ID NO: 60655 - DNA, 120 bp, Homo sapiens
  misc_feature: 1323 for SV(W|O) and mtDNA
cccactacctaaaaaatcccaaacatataactgaactcctcatacccaattggaccaatctatcaccctatagaagaactaatgttagtataagtaacatgaaaacattctcctccgcat

SEQ ID NO: 60656 - DNA, 120 bp, Homo sapiens
  misc_feature: 1323 for SV(W|O) and mtDNA
aatcagaataggtgttggtatagaatggggtctcctcctccggcggggtcgaagaaggtggtgttgaggttgcggtctgttagtagtatagtgatgccagcagctaggactgggagagat

SEQ ID NO: 60657 - DNA, 120 bp, Homo sapiens
  misc_feature: 1323 for SV(W|O) and mtDNA
agtgaggcaggagtccgaggaggttagttgtggcaataaaaatgattaaggatactagtataagagatcaggttcgtcctttagtgttgtgtatggttatcatttgttttgaggttagtt

SEQ ID NO: 60658 - DNA, 120 bp, Homo sapiens
  misc_feature: 1323 for SV(W|O) and mtDNA
agggccctgaagcgcgtacacaccgcccgtcaccctcctcaagtatacttcaaaggacatttaactaaaacccctacgcatttatatagaggagacaagtcgtaacatggtaagtgtact

SEQ ID NO: 60659 - DNA, 120 bp, Homo sapiens
  misc_feature: 1322 for SV(W|O) and mtDNA
tgggtgggtgtgggtataatactaagttgagatgatatcatttacgggggaaggcgctttgtgaagtaggccttatttctcttgtcctttcgtacagggaggaatttgaagtagatagaa

SEQ ID NO: 60660 - DNA, 120 bp, Homo sapiens
  misc_feature: 1322 for SV(W|O) and mtDNA
acctctgactgtaaagttttaagttttatgcgattaccgggctctgccatcttaacaaaccctgttcttgggtgggtgtgggtataatactaagttgagatgatatcatttacgggggaa

SEQ ID NO: 60661 - DNA, 120 bp, Homo sapiens
  misc_feature: 1322 for SV(W|O) and mtDNA
ttagttttgttgtgagtgttaggaaaagggcatacaggactaggaagcagataaggaaaatgattatgagggcgtgatcatgaaaggtgataagctcttctatgataggggaagtagcgt

SEQ ID NO: 60662 - DNA, 120 bp, Homo sapiens
  misc_feature: 1322 for SV(W|O) and mtDNA
tgttcaaccagtaactactactaatcaacgcccataatcatacaaagcccccgcaccaataggatcctcccgaatcaaccctgacccctctccttcataaattattcagcttcctacact

SEQ ID NO: 60663 - DNA, 120 bp, Homo sapiens
  misc_feature: 1322 for SV(W|O) and mtDNA
tgggtataatactaagttgagatgatatcatttacgggggaaggcgctttgtgaagtaggccttatttctcttgtcctttcgtacagggaggaatttgaagtagatagaaaccgacctgg

SEQ ID NO: 60664 - DNA, 120 bp, Homo sapiens
  misc_feature: 1322 for SV(W|O) and mtDNA
attcaagcaatcctatacaaccgtatcggcgatatcggtttcatcctcgccttagcatgatttatcctacactccaactcatgagacccacaacaaatagcccttctaaacgctaatcca

SEQ ID NO: 60665 - DNA, 120 bp, Homo sapiens
  misc_feature: 1322 for SV(W|O) and mtDNA
tgattagtcattgttgggtggtgattagtcggttgttgatgagatatttggaggtggggatcaatagagggggaaatagaatgatcagtactgcggcgggtaggcctaggattgtggggg

SEQ ID NO: 60666 - DNA, 120 bp, Homo sapiens
  misc_feature: 1322 for SV(W|O) and mtDNA
acttgatggcagcttctgtggaacgagggtttatttttttggttagaactggaataaaagctagcatgtttatttctaggcctactcaggtaaaaaatcagtgcgagcttagcgctgtga

SEQ ID NO: 60667 - DNA, 120 bp, Homo sapiens
  misc_feature: 1322 for SV(W|O) and mtDNA
tatgtggctgattgaagagtatgcaatgagcgattttaggtctgtttgtcgtaggcagatggagcttgttataattatgcctcatagggatagtacaaggaaggggtaggctatgtgttt

SEQ ID NO: 60668 - DNA, 120 bp, Homo sapiens
  misc_feature: 1322 for SV(W|O) and mtDNA
tagttagttttgttgtgagtgttaggaaaagggcatacaggactaggaagcagataaggaaaatgattatgagggcgtgatcatgaaaggtgataagctcttctatgataggggaagtag

SEQ ID NO: 60669 - DNA, 120 bp, Homo sapiens
  misc_feature: 1322 for SV(W|O) and mtDNA
tagggctcatggtaggggtaaaaggagggcaatttctagatcaaataataagaaggtaatagctactaagaagaattttatggagaaagggacgcgggcgggggatatagggtcgaagcc

SEQ ID NO: 60670 - DNA, 120 bp, Homo sapiens
  misc_feature: 1322 for SV(W|O) and mtDNA
tagcaggtgtctcctctatcttaggggccatcaatttcatcacaacaattatcaatataaaaccccctgccataacccaataccaaacgcccctcttcgtctgatccgtcctaatcacag

SEQ ID NO: 60671 - DNA, 120 bp, Homo sapiens
  misc_feature: 1322 for SV(W|O) and mtDNA
gtatgttgagtcctgtaagtaggagagtgatatttgatcaggagaacgtggttactagcacagagagttctcccagtaggttaatagtggggggtaaggcgaggttagcgaggcttgcta

SEQ ID NO: 60672 - DNA, 120 bp, Homo sapiens
  misc_feature: 1322 for SV(W|O) and mtDNA
gttagttgtttgtagggctcatggtaggggtaaaaggagggcaatttctagatcaaataataagaaggtaatagctactaagaagaattttatggagaaagggacgcgggcgggggatat

SEQ ID NO: 60673 - DNA, 120 bp, Homo sapiens
  misc_feature: 1322 for SV(W|O) and mtDNA
cctgttcttatgaattcgaacagcatacccccgattccgctacgaccaactcatacacctcctatgaaaaaacttcctaccactcaccctagcattacttatatgatatgtctccatacc

SEQ ID NO: 60674 - DNA, 120 bp, Homo sapiens
  misc_feature: 1322 for SV(W|O) and mtDNA
cctcaactgcctgctatgatggataagattgagagagtgaggagaaggcttacgtttagtgagggagagatttggtatatgattgagatgggggctagtttttgtcatgtgagaagaagc

SEQ ID NO: 60675 - DNA, 120 bp, Homo sapiens
  misc_feature: 1322 for SV(W|O) and mtDNA
ctaacatctcagacgctcaggaaatagaaaccgtctgaactatcctgcccgccatcatcctagtcctcatcgccctcccatccctacgcatcctttacataacagacgaggtcaacgatc

SEQ ID NO: 60676 - DNA, 120 bp, Homo sapiens
  misc_feature: 1322 for SV(W|O) and mtDNA
aacgaaaaattctaggctatatacaactacgcaaaggccccaacgttgtaggcccctacgggctactacaacccttcgctgacgccataaaactcttcaccaaagagcccctaaaacccg

SEQ ID NO: 60677 - DNA, 120 bp, Homo sapiens
  misc_feature: 1322 for SV(W|O) and mtDNA
cctgctacaactatagtgcttgagtggagtagggctgagactggggtggggccttctatggctgaggggagtcaggggtggagacctaattgggctgatttgcctgctgctgctaggagg

SEQ ID NO: 60678 - DNA, 120 bp, Homo sapiens
  misc_feature: 1322 for SV(W|O) and mtDNA
aggagggtgatggtggctatgatggtggggatgatgaggctattgttttttgtgaattcttcgataatggcccatttgggcaaaaagccggttagcgggggcaggcctcctagggagagg

SEQ ID NO: 60679 - DNA, 120 bp, Homo sapiens
  misc_feature: 1322 for SV(W|O) and mtDNA
actaaacgtaagccttctcctcactctctcaatcttatccatcatagcaggcagttgaggtggattaaaccaaacccagctacgcaaaatcttagcatactcctcaattacccacatagg

SEQ ID NO: 60680 - DNA, 120 bp, Homo sapiens
  misc_feature: 1322 for SV(W|O) and mtDNA
aggaggttagttgtggcaataaaaatgattaaggatactagtataagagatcaggttcgtcctttagtgttgtgtatggttatcatttgttttgaggttagtttgattagtcattgttgg

SEQ ID NO: 60681 - DNA, 120 bp, Homo sapiens
  misc_feature: 1322 for SV(W|O) and mtDNA
aggtgttggtatagaatggggtctcctcctccggcggggtcgaagaaggtggtgttgaggttgcggtctgttagtagtatagtgatgccagcagctaggactgggagagataggagaagt

SEQ ID NO: 60682 - DNA, 120 bp, Homo sapiens
  misc_feature: 1322 for SV(W|O) and mtDNA
actcttacctccctctctcctactcctgctcgcatctgctatagtggaggccggagcaggaacaggttgaacagtctaccctcccttagcagggaactactcccaccctggagcctccgt

SEQ ID NO: 60683 - DNA, 120 bp, Homo sapiens
  misc_feature: 1321 for SV(W|O) and mtDNA
catagccctcgtagtaacagccattctcatccaaaccccctgaagcttcaccggcgcagtcattctcataatcgcccacgggcttacatcctcattactattctgcctagcaaactcaaa

SEQ ID NO: 60684 - DNA, 120 bp, Homo sapiens
  misc_feature: 1321 for SV(W|O) and mtDNA
ttgactgtaatgtgctatgtacggtaaatggctttatgtactatgtactgttaagggtgggtaggtttgttggtatcctagtgggtgaggggtggctttggagttgcagttgatgtgtga

SEQ ID NO: 60685 - DNA, 120 bp, Homo sapiens
  misc_feature: 1321 for SV(W|O) and mtDNA
ttctcttgtcctttcgtacagggaggaatttgaagtagatagaaaccgacctggattactccggtctgaactcagatcacgtaggactttaatcgttgaacaaacgaacctttaatagcg

SEQ ID NO: 60686 - DNA, 120 bp, Homo sapiens
  misc_feature: 1321 for SV(W|O) and mtDNA
tgtagggctcatggtaggggtaaaaggagggcaatttctagatcaaataataagaaggtaatagctactaagaagaattttatggagaaagggacgcgggcgggggatatagggtcgaag

SEQ ID NO: 60687 - DNA, 120 bp, Homo sapiens
  misc_feature: 1321 for SV(W|O) and mtDNA
gaaaaattctaggctatatacaactacgcaaaggccccaacgttgtaggcccctacgggctactacaacccttcgctgacgccataaaactcttcaccaaagagcccctaaaacccgcca

SEQ ID NO: 60688 - DNA, 120 bp, Homo sapiens
  misc_feature: 1321 for SV(W|O) and mtDNA
gactaggatgatggcgggcaggatagttcagacggtttctatttcctgagcgtctgagatgttagtattagttagttttgttgtgagtgttaggaaaagggcatacaggactaggaagca

SEQ ID NO: 60689 - DNA, 120 bp, Homo sapiens
  misc_feature: 1321 for SV(W|O) and mtDNA
tagaggtgatgtttttggtaaacaggcggggtaagatttgccgagttccttttactttttttaacctttccttatgagcatgcctgtgttgggttgacagtgagggtaataatgacttgt

SEQ ID NO: 60690 - DNA, 120 bp, Homo sapiens
  misc_feature: 1321 for SV(W|O) and mtDNA
ggtgttggtatagaatggggtctcctcctccggcggggtcgaagaaggtggtgttgaggttgcggtctgttagtagtatagtgatgccagcagctaggactgggagagataggagaagta

SEQ ID NO: 60691 - DNA, 120 bp, Homo sapiens
  misc_feature: 1321 for SV(W|O) and mtDNA
ctcttacctccctctctcctactcctgctcgcatctgctatagtggaggccggagcaggaacaggttgaacagtctaccctcccttagcagggaactactcccaccctggagcctccgta

SEQ ID NO: 60692 - DNA, 120 bp, Homo sapiens
  misc_feature: 1321 for SV(W|O) and mtDNA
actccaaataaaagtaataaccatgcacactactataaccaccctaaccctgacttccctaattccccccatccttaccaccctcgttaaccctaacaaaaaaaactcatacccccatta

SEQ ID NO: 60693 - DNA, 120 bp, Homo sapiens
  misc_feature: 1321 for SV(W|O) and mtDNA
cacaacatattttgtcaccaagaccctacttctaacctccctgttcttatgaattcgaacagcatacccccgattccgctacgaccaactcatacacctcctatgaaaaaacttcctacc

SEQ ID NO: 60694 - DNA, 120 bp, Homo sapiens
  misc_feature: 1321 for SV(W|O) and mtDNA
gggctctttggtgaagagttttatggcgtcagcgaagggttgtagtagcccgtaggggcctacaacgttggggcctttgcgtagttgtatatagcctagaatttttcgttcggtaagcat

SEQ ID NO: 60695 - DNA, 120 bp, Homo sapiens
  misc_feature: 1321 for SV(W|O) and mtDNA
ctagaggtgatgtttttggtaaacaggcggggtaagatttgccgagttccttttactttttttaacctttccttatgagcatgcctgtgttgggttgacagtgagggtaataatgacttg

SEQ ID NO: 60696 - DNA, 120 bp, Homo sapiens
  misc_feature: 1321 for SV(W|O) and mtDNA
ctaacttagcattaaccttttaagttaaagattaagagaaccaacacctctttacagtgaaatgccccaactaaatactaccgtatggcccaccataattacccccatactccttacact

SEQ ID NO: 60697 - DNA, 120 bp, Homo sapiens
  misc_feature: 1321 for SV(W|O) and mtDNA
aaaaaatcccaaacatataactgaactcctcatacccaattggaccaatctatcaccctatagaagaactaatgttagtataagtaacatgaaaacattctcctccgcataagcctgcgt

SEQ ID NO: 60698 - DNA, 120 bp, Homo sapiens
  misc_feature: 1321 for SV(W|O) and mtDNA
acaaaccctgttcttgggtgggtgtgggtataatactaagttgagatgatatcatttacgggggaaggcgctttgtgaagtaggccttatttctcttgtcctttcgtacagggaggaatt

SEQ ID NO: 60699 - DNA, 120 bp, Homo sapiens
  misc_feature: 1321 for SV(W|O) and mtDNA
aactccaaataaaagtaataaccatgcacactactataaccaccctaaccctgacttccctaattccccccatccttaccaccctcgttaaccctaacaaaaaaaactcatacccccatt

SEQ ID NO: 60700 - DNA, 120 bp, Homo sapiens
  misc_feature: 1320 for SV(W|O) and mtDNA
tttagtagggtagggttattttcgttaatgttagtaagggtggggaagcgaggttgacctgttagggtgagaagaattattcgagtgctataggcgcttgtcagggaggtagcgatgaga

SEQ ID NO: 60701 - DNA, 120 bp, Homo sapiens
  misc_feature: 1320 for SV(W|O) and mtDNA
ttagttagttttgttgtgagtgttaggaaaagggcatacaggactaggaagcagataaggaaaatgattatgagggcgtgatcatgaaaggtgataagctcttctatgataggggaagta

SEQ ID NO: 60702 - DNA, 120 bp, Homo sapiens
  misc_feature: 1320 for SV(W|O) and mtDNA
aacctctgactgtaaagttttaagttttatgcgattaccgggctctgccatcttaacaaaccctgttcttgggtgggtgtgggtataatactaagttgagatgatatcatttacggggga

SEQ ID NO: 60703 - DNA, 120 bp, Homo sapiens
  misc_feature: 1320 for SV(W|O) and mtDNA
caggttagttgtttgtagggctcatggtaggggtaaaaggagggcaatttctagatcaaataataagaaggtaatagctactaagaagaattttatggagaaagggacgcgggcggggga

SEQ ID NO: 60704 - DNA, 120 bp, Homo sapiens
  misc_feature: 1320 for SV(W|O) and mtDNA
acccattctaatcgcaatggcattcctaatgcttaccgaacgaaaaattctaggctatatacaactacgcaaaggccccaacgttgtaggcccctacgggctactacaacccttcgctga

SEQ ID NO: 60705 - DNA, 120 bp, Homo sapiens
  misc_feature: 1320 for SV(W|O) and mtDNA
aattggccaccaatggtactgaacctacgagtacaccgactacggcggactaatcttcaactcctacatacttcccccattattcctagaaccaggcgacctgcgactccttgacgttga

SEQ ID NO: 60706 - DNA, 120 bp, Homo sapiens
  misc_feature: 1320 for SV(W|O) and mtDNA
ccactacctaaaaaatcccaaacatataactgaactcctcatacccaattggaccaatctatcaccctatagaagaactaatgttagtataagtaacatgaaaacattctcctccgcata

SEQ ID NO: 60707 - DNA, 120 bp, Homo sapiens
  misc_feature: 1320 for SV(W|O) and mtDNA
actagtctcaggcttcaacatcgaatacgccgcaggccccttcgccctattcttcatagccgaatacacaaacattattataataaacaccctcaccactacaatcttcctaggaacaac

SEQ ID NO: 60708 - DNA, 120 bp, Homo sapiens
  misc_feature: 1320 for SV(W|O) and mtDNA
gtggcaggttagttgtttgtagggctcatggtaggggtaaaaggagggcaatttctagatcaaataataagaaggtaatagctactaagaagaattttatggagaaagggacgcgggcgg

SEQ ID NO: 60709 - DNA, 120 bp, Homo sapiens
  misc_feature: 1320 for SV(W|O) and mtDNA
gggggtaattatggtgggccatacggtagtatttagttggggcatttcactgtaaagaggtgttggttctcttaatctttaacttaaaaggttaatgctaagttagctttacagtgggct

SEQ ID NO: 60710 - DNA, 120 bp, Homo sapiens
  misc_feature: 1320 for SV(W|O) and mtDNA
gctgggtttggtttaatccacctcaactgcctgctatgatggataagattgagagagtgaggagaaggcttacgtttagtgagggagagatttggtatatgattgagatgggggctagtt

SEQ ID NO: 60711 - DNA, 120 bp, Homo sapiens
  misc_feature: 1320 for SV(W|O) and mtDNA
gatgagagtaatagatagggctcaggcgtttgtgtatgatatgtttgcggtttcgatgatgtggtctttggagtagaaacctgtgaggaaaggtattcctgctaatgctaggctgccaat

SEQ ID NO: 60712 - DNA, 120 bp, Homo sapiens
  misc_feature: 1320 for SV(W|O) and mtDNA
ccacatagccctcgtagtaacagccattctcatccaaaccccctgaagcttcaccggcgcagtcattctcataatcgcccacgggcttacatcctcattactattctgcctagcaaactc

SEQ ID NO: 60713 - DNA, 120 bp, Homo sapiens
  misc_feature: 1320 for SV(W|O) and mtDNA
ctgcctgctatgatggataagattgagagagtgaggagaaggcttacgtttagtgagggagagatttggtatatgattgagatgggggctagtttttgtcatgtgagaagaagcaggccg

SEQ ID NO: 60714 - DNA, 120 bp, Homo sapiens
  misc_feature: 1320 for SV(W|O) and mtDNA
aagtttgtaattactgtggcccctcagaatgatatttggcctcacgggaggacatagcctatgaaggctgttgctatagttgcaagcaggaggataatgccgatgtttcaggtttctgag

SEQ ID NO: 60715 - DNA, 120 bp, Homo sapiens
  misc_feature: 1320 for SV(W|O) and mtDNA
cctcatagggatagtacaaggaaggggtaggctatgtgttttgtcagggggttgagaatgagtgtgaggcgtattataccatagccgcctagttttaagagtactgcggcaagtactatt

SEQ ID NO: 60716 - DNA, 120 bp, Homo sapiens
  misc_feature: 1320 for SV(W|O) and mtDNA
attgaccaaccctggggttagtatagcttagttaaactttcgtttattgctaaaggttaatcactgctgtttcccgtgggggtgtggctaggctaagcgttttgagctgcattgctgcgt

SEQ ID NO: 60717 - DNA, 120 bp, Homo sapiens
  misc_feature: 1320 for SV(W|O) and mtDNA
agctgggtttggtttaatccacctcaactgcctgctatgatggataagattgagagagtgaggagaaggcttacgtttagtgagggagagatttggtatatgattgagatgggggctagt

SEQ ID NO: 60718 - DNA, 120 bp, Homo sapiens
  misc_feature: 1319 for SV(W|O) and mtDNA
gtaagtaggagagtgatatttgatcaggagaacgtggttactagcacagagagttctcccagtaggttaatagtggggggtaaggcgaggttagcgaggcttgctagaagtcatcaaaaa

SEQ ID NO: 60719 - DNA, 120 bp, Homo sapiens
  misc_feature: 1319 for SV(W|O) and mtDNA
tgtaagtaggagagtgatatttgatcaggagaacgtggttactagcacagagagttctcccagtaggttaatagtggggggtaaggcgaggttagcgaggcttgctagaagtcatcaaaa

SEQ ID NO: 60720 - DNA, 120 bp, Homo sapiens
  misc_feature: 1319 for SV(W|O) and mtDNA
tttctcttgtcctttcgtacagggaggaatttgaagtagatagaaaccgacctggattactccggtctgaactcagatcacgtaggactttaatcgttgaacaaacgaacctttaatagc

SEQ ID NO: 60721 - DNA, 120 bp, Homo sapiens
  misc_feature: 1319 for SV(W|O) and mtDNA
ttgaagtccttgagagaggattatgatgcgactgtgagtgcgttcgtagtttgagtttgctaggcagaatagtaatgaggatgtaagcccgtgggcgattatgagaatgactgcgccggt

SEQ ID NO: 60722 - DNA, 120 bp, Homo sapiens
  misc_feature: 1319 for SV(W|O) and mtDNA
ttcttgggtgggtgtgggtataatactaagttgagatgatatcatttacgggggaaggcgctttgtgaagtaggccttatttctcttgtcctttcgtacagggaggaatttgaagtagat

SEQ ID NO: 60723 - DNA, 120 bp, Homo sapiens
  misc_feature: 1319 for SV(W|O) and mtDNA
ttatggatgcggttgcttgcgtgaggaaatacttgatggcagcttctgtggaacgagggtttatttttttggttagaactggaataaaagctagcatgtttatttctaggcctactcagg

SEQ ID NO: 60724 - DNA, 120 bp, Homo sapiens
  misc_feature: 1319 for SV(W|O) and mtDNA
ttagttgtttgtagggctcatggtaggggtaaaaggagggcaatttctagatcaaataataagaaggtaatagctactaagaagaattttatggagaaagggacgcgggcgggggatata

SEQ ID NO: 60725 - DNA, 120 bp, Homo sapiens
  misc_feature: 1319 for SV(W|O) and mtDNA
tgtgtgttcagatatgttaaagccactttcgtagtctattttgtgtcaactggagttttttacaactcaggtgagttttagctttattggggagggggtgatctaaaacactctttacgc

SEQ ID NO: 60726 - DNA, 120 bp, Homo sapiens
  misc_feature: 1319 for SV(W|O) and mtDNA
aatccacctcaactgcctgctatgatggataagattgagagagtgaggagaaggcttacgtttagtgagggagagatttggtatatgattgagatgggggctagtttttgtcatgtgaga

SEQ ID NO: 60727 - DNA, 120 bp, Homo sapiens
  misc_feature: 1319 for SV(W|O) and mtDNA
tatgttgagtcctgtaagtaggagagtgatatttgatcaggagaacgtggttactagcacagagagttctcccagtaggttaatagtggggggtaaggcgaggttagcgaggcttgctag

SEQ ID NO: 60728 - DNA, 120 bp, Homo sapiens
  misc_feature: 1319 for SV(W|O) and mtDNA
ccactgtaaagctaacttagcattaaccttttaagttaaagattaagagaaccaacacctctttacagtgaaatgccccaactaaatactaccgtatggcccaccataattacccccata

SEQ ID NO: 60729 - DNA, 120 bp, Homo sapiens
  misc_feature: 1319 for SV(W|O) and mtDNA
tagttgtttgtagggctcatggtaggggtaaaaggagggcaatttctagatcaaataataagaaggtaatagctactaagaagaattttatggagaaagggacgcgggcgggggatatag

SEQ ID NO: 60730 - DNA, 120 bp, Homo sapiens
  misc_feature: 1319 for SV(W|O) and mtDNA
atcgctgggtcaatagtacttgccgcagtactcttaaaactaggcggctatggtataatacgcctcacactcattctcaaccccctgacaaaacacatagcctaccccttccttgtacta

SEQ ID NO: 60731 - DNA, 120 bp, Homo sapiens
  misc_feature: 1319 for SV(W|O) and mtDNA
taacatctcagacgctcaggaaatagaaaccgtctgaactatcctgcccgccatcatcctagtcctcatcgccctcccatccctacgcatcctttacataacagacgaggtcaacgatcc

SEQ ID NO: 60732 - DNA, 120 bp, Homo sapiens
  misc_feature: 1319 for SV(W|O) and mtDNA
atgttcaaccagtaactactactaatcaacgcccataatcatacaaagcccccgcaccaataggatcctcccgaatcaaccctgacccctctccttcataaattattcagcttcctacac

SEQ ID NO: 60733 - DNA, 120 bp, Homo sapiens
  misc_feature: 1319 for SV(W|O) and mtDNA
gtgatccatcgtgatgtcttatttaaggggaacgtgtgggctatttaggctttatgaccctgaagtaggaaccagatgtcggatacagttcactttagctacccccaagtgttatgggcc

SEQ ID NO: 60734 - DNA, 120 bp, Homo sapiens
  misc_feature: 1319 for SV(W|O) and mtDNA
aggaagattgtagtggtgagggtgtttattataataatgtttgtgtattcggctatgaagaatagggcgaaggggcctgcggcgtattcgatgttgaagcctgagactagttcggactcc

SEQ ID NO: 60735 - DNA, 120 bp, Homo sapiens
  misc_feature: 1319 for SV(W|O) and mtDNA
ggagaggggtcagggttgattcgggaggatcctattggtgcgggggctttgtatgattatgggcgttgattagtagtagttactggttgaacattgtttgttggtgtatatattgtaatt

SEQ ID NO: 60736 - DNA, 120 bp, Homo sapiens
  misc_feature: 1319 for SV(W|O) and mtDNA
ggaaatacttgatggcagcttctgtggaacgagggtttatttttttggttagaactggaataaaagctagcatgtttatttctaggcctactcaggtaaaaaatcagtgcgagcttagcg

SEQ ID NO: 60737 - DNA, 120 bp, Homo sapiens
  misc_feature: 1319 for SV(W|O) and mtDNA
aactgcctgctatgatggataagattgagagagtgaggagaaggcttacgtttagtgagggagagatttggtatatgattgagatgggggctagtttttgtcatgtgagaagaagcaggc

SEQ ID NO: 60738 - DNA, 120 bp, Homo sapiens
  misc_feature: 1319 for SV(W|O) and mtDNA
gcatggagagctcccgtgagtggttaatagggtgatagacctgtgatccatcgtgatgtcttatttaaggggaacgtgtgggctatttaggctttatgaccctgaagtaggaaccagatg

SEQ ID NO: 60739 - DNA, 120 bp, Homo sapiens
  misc_feature: 1319 for SV(W|O) and mtDNA
gaggggcgtttggtattgggttatggcagggggttttatattgataattgttgtgatgaaattgatggcccctaagatagaggagacacctgctaggtgtaaggagaagatggttaggtc

SEQ ID NO: 60740 - DNA, 120 bp, Homo sapiens
  misc_feature: 1319 for SV(W|O) and mtDNA
cccattgtgttgtggtaaatatgtagagggagtatagggctgtgactagtatgttgagtcctgtaagtaggagagtgatatttgatcaggagaacgtggttactagcacagagagttctc

SEQ ID NO: 60741 - DNA, 120 bp, Homo sapiens
  misc_feature: 1319 for SV(W|O) and mtDNA
acctcaactgcctgctatgatggataagattgagagagtgaggagaaggcttacgtttagtgagggagagatttggtatatgattgagatgggggctagtttttgtcatgtgagaagaag

SEQ ID NO: 60742 - DNA, 120 bp, Homo sapiens
  misc_feature: 1319 for SV(W|O) and mtDNA
atggtggtcaagggacccctatctgaggggggtcatccatggggacgagaagggatttgactgtaatgtgctatgtacggtaaatggctttatgtactatgtactgttaagggtgggtag

SEQ ID NO: 60743 - DNA, 120 bp, Homo sapiens
  misc_feature: 1319 for SV(W|O) and mtDNA
cgctcaggaaatagaaaccgtctgaactatcctgcccgccatcatcctagtcctcatcgccctcccatccctacgcatcctttacataacagacgaggtcaacgatccctcccttaccat

SEQ ID NO: 60744 - DNA, 120 bp, Homo sapiens
  misc_feature: 1319 for SV(W|O) and mtDNA
cctgtgatccatcgtgatgtcttatttaaggggaacgtgtgggctatttaggctttatgaccctgaagtaggaaccagatgtcggatacagttcactttagctacccccaagtgttatgg

SEQ ID NO: 60745 - DNA, 120 bp, Homo sapiens
  misc_feature: 1319 for SV(W|O) and mtDNA
cacatgtttaacggccgcggtaccctaaccgtgcaaaggtagcataatcacttgttccttaaatagggacctgtatgaatggctccacgagggttcagctgtctcttacttttaaccagt

SEQ ID NO: 60746 - DNA, 120 bp, Homo sapiens
  misc_feature: 1319 for SV(W|O) and mtDNA
caagctcaacacccactacctaaaaaatcccaaacatataactgaactcctcatacccaattggaccaatctatcaccctatagaagaactaatgttagtataagtaacatgaaaacatt

SEQ ID NO: 60747 - DNA, 120 bp, Homo sapiens
  misc_feature: 1319 for SV(W|O) and mtDNA
agcactctactctcagtttactgctaaatccaccttcgacccttaagtttcataagggctatcgtagttttctggggtagaaaatgtagcccatttcttgccacctcatgggctacacct

SEQ ID NO: 60748 - DNA, 120 bp, Homo sapiens
  misc_feature: 1318 for SV(W|O) and mtDNA
tttggtaaacaggcggggtaagatttgccgagttccttttactttttttaacctttccttatgagcatgcctgtgttgggttgacagtgagggtaataatgacttgttggttgattgtag

SEQ ID NO: 60749 - DNA, 120 bp, Homo sapiens
  misc_feature: 1318 for SV(W|O) and mtDNA
ctgtaagtaggagagtgatatttgatcaggagaacgtggttactagcacagagagttctcccagtaggttaatagtggggggtaaggcgaggttagcgaggcttgctagaagtcatcaaa

SEQ ID NO: 60750 - DNA, 120 bp, Homo sapiens
  misc_feature: 1318 for SV(W|O) and mtDNA
ttgaacattgtttgttggtgtatatattgtaattgagattgctcgggggaataggttatgtgattaggagtagggttaggatgagtgggaagaagaaagagaggaagtaaagtttaatta

SEQ ID NO: 60751 - DNA, 120 bp, Homo sapiens
  misc_feature: 1318 for SV(W|O) and mtDNA
ctagtctcaggcttcaacatcgaatacgccgcaggccccttcgccctattcttcatagccgaatacacaaacattattataataaacaccctcaccactacaatcttcctaggaacaaca

SEQ ID NO: 60752 - DNA, 120 bp, Homo sapiens
  misc_feature: 1318 for SV(W|O) and mtDNA
ccacctcaactgcctgctatgatggataagattgagagagtgaggagaaggcttacgtttagtgagggagagatttggtatatgattgagatgggggctagtttttgtcatgtgagaaga

SEQ ID NO: 60753 - DNA, 120 bp, Homo sapiens
  misc_feature: 1318 for SV(W|O) and mtDNA
tcaagctcaacacccactacctaaaaaatcccaaacatataactgaactcctcatacccaattggaccaatctatcaccctatagaagaactaatgttagtataagtaacatgaaaacat

SEQ ID NO: 60754 - DNA, 120 bp, Homo sapiens
  misc_feature: 1318 for SV(W|O) and mtDNA
taggggtcccttgaccaccatcctccgtgaaatcaatatcccgcacaagagtgctactctcctcgctccgggcccataacacttgggggtagctaaagtgaactgtatccgacatctggt

SEQ ID NO: 60755 - DNA, 120 bp, Homo sapiens
  misc_feature: 1318 for SV(W|O) and mtDNA
gggtcaatagtacttgccgcagtactcttaaaactaggcggctatggtataatacgcctcacactcattctcaaccccctgacaaaacacatagcctaccccttccttgtactatcccta

SEQ ID NO: 60756 - DNA, 120 bp, Homo sapiens
  misc_feature: 1318 for SV(W|O) and mtDNA
tagctgggtttggtttaatccacctcaactgcctgctatgatggataagattgagagagtgaggagaaggcttacgtttagtgagggagagatttggtatatgattgagatgggggctag

SEQ ID NO: 60757 - DNA, 120 bp, Homo sapiens
  misc_feature: 1318 for SV(W|O) and mtDNA
caaccagtaactactactaatcaacgcccataatcatacaaagcccccgcaccaataggatcctcccgaatcaaccctgacccctctccttcataaattattcagcttcctacactatta

SEQ ID NO: 60758 - DNA, 120 bp, Homo sapiens
  misc_feature: 1318 for SV(W|O) and mtDNA
attactaataagtggctcctttaacctctccacccttatcacaacacaagaacacctctgattactcctgccatcatgacccttggccataatatgatttatctccacactagcagagac

SEQ ID NO: 60759 - DNA, 120 bp, Homo sapiens
  misc_feature: 1318 for SV(W|O) and mtDNA
attggccaccaatggtactgaacctacgagtacaccgactacggcggactaatcttcaactcctacatacttcccccattattcctagaaccaggcgacctgcgactccttgacgttgac

SEQ ID NO: 60760 - DNA, 120 bp, Homo sapiens
  misc_feature: 1318 for SV(W|O) and mtDNA
ggtgggagtagttccctgctaagggagggtagactgttcaacctgttcctgctccggcctccactatagcagatgcgagcaggagtaggagagagggaggtaagagtcagaagcttatgt

SEQ ID NO: 60761 - DNA, 120 bp, Homo sapiens
  misc_feature: 1318 for SV(W|O) and mtDNA
atgtcgaagcccccatcgctgggtcaatagtacttgccgcagtactcttaaaactaggcggctatggtataatacgcctcacactcattctcaaccccctgacaaaacacatagcctacc

SEQ ID NO: 60762 - DNA, 120 bp, Homo sapiens
  misc_feature: 1318 for SV(W|O) and mtDNA
atcatagaagagcttatcacctttcatgatcacgccctcataatcattttccttatctgcttcctagtcctgtatgcccttttcctaacactcacaacaaaactaactaatactaacatc

SEQ ID NO: 60763 - DNA, 120 bp, Homo sapiens
  misc_feature: 1318 for SV(W|O) and mtDNA
aattctaggctatatacaactacgcaaaggccccaacgttgtaggcccctacgggctactacaacccttcgctgacgccataaaactcttcaccaaagagcccctaaaacccgccacatc

SEQ ID NO: 60764 - DNA, 120 bp, Homo sapiens
  misc_feature: 1318 for SV(W|O) and mtDNA
ctgtgtggaaagcggctgtgcagacattcaattgttattattatgtcctacaagcattaattaattaacacactttagtaagtatgttcgcctgtaatattgaacgtaggtgcgataaat

SEQ ID NO: 60765 - DNA, 120 bp, Homo sapiens
  misc_feature: 1318 for SV(W|O) and mtDNA
cgccctattcttcatagccgaatacacaaacattattataataaacaccctcaccactacaatcttcctaggaacaacatatgacgcactctcccctgaactctacacaacatattttgt

SEQ ID NO: 60766 - DNA, 120 bp, Homo sapiens
  misc_feature: 1318 for SV(W|O) and mtDNA
agtggcaggttagttgtttgtagggctcatggtaggggtaaaaggagggcaatttctagatcaaataataagaaggtaatagctactaagaagaattttatggagaaagggacgcgggcg

SEQ ID NO: 60767 - DNA, 120 bp, Homo sapiens
  misc_feature: 1318 for SV(W|O) and mtDNA
atgtggctgattgaagagtatgcaatgagcgattttaggtctgtttgtcgtaggcagatggagcttgttataattatgcctcatagggatagtacaaggaaggggtaggctatgtgtttt

SEQ ID NO: 60768 - DNA, 120 bp, Homo sapiens
  misc_feature: 1318 for SV(W|O) and mtDNA
actaacatctcagacgctcaggaaatagaaaccgtctgaactatcctgcccgccatcatcctagtcctcatcgccctcccatccctacgcatcctttacataacagacgaggtcaacgat

SEQ ID NO: 60769 - DNA, 120 bp, Homo sapiens
  misc_feature: 1317 for SV(W|O) and mtDNA
tgtcgaagcccccatcgctgggtcaatagtacttgccgcagtactcttaaaactaggcggctatggtataatacgcctcacactcattctcaaccccctgacaaaacacatagcctaccc

SEQ ID NO: 60770 - DNA, 120 bp, Homo sapiens
  misc_feature: 1317 for SV(W|O) and mtDNA
acaacatattttgtcaccaagaccctacttctaacctccctgttcttatgaattcgaacagcatacccccgattccgctacgaccaactcatacacctcctatgaaaaaacttcctacca

SEQ ID NO: 60771 - DNA, 120 bp, Homo sapiens
  misc_feature: 1317 for SV(W|O) and mtDNA
atgatggataagattgagagagtgaggagaaggcttacgtttagtgagggagagatttggtatatgattgagatgggggctagtttttgtcatgtgagaagaagcaggccggatgtcaga

SEQ ID NO: 60772 - DNA, 120 bp, Homo sapiens
  misc_feature: 1317 for SV(W|O) and mtDNA
agtttgatagttcttgggcagtgagagtgagtagtagaatgtttagtgagcctagggtgttgtgagtgtaaattagtgcgatgagtaggggaagggagcctactagggtgtagaatagga

SEQ ID NO: 60773 - DNA, 120 bp, Homo sapiens
  misc_feature: 1317 for SV(W|O) and mtDNA
aatctgacgcaggcttatgcggaggagaatgttttcatgttacttatactaacattagttcttctatagggtgatagattggtccaattgggtatgaggagttcagttatatgtttggga

SEQ ID NO: 60774 - DNA, 120 bp, Homo sapiens
  misc_feature: 1317 for SV(W|O) and mtDNA
aatatatacaccaacaaacaatgttcaaccagtaactactactaatcaacgcccataatcatacaaagcccccgcaccaataggatcctcccgaatcaaccctgacccctctccttcata

SEQ ID NO: 60775 - DNA, 120 bp, Homo sapiens
  misc_feature: 1317 for SV(W|O) and mtDNA
catgcctatcatatagtaaaacccagcccatgacccctaacaggggccctctcagccctcctaatgacctccggcctagccatgtgatttcacttccactccataacgctcctcatacta

SEQ ID NO: 60776 - DNA, 120 bp, Homo sapiens
  misc_feature: 1317 for SV(W|O) and mtDNA
taggaagattgtagtggtgagggtgtttattataataatgtttgtgtattcggctatgaagaatagggcgaaggggcctgcggcgtattcgatgttgaagcctgagactagttcggactc

SEQ ID NO: 60777 - DNA, 120 bp, Homo sapiens
  misc_feature: 1317 for SV(W|O) and mtDNA
tacctaaaaaatcccaaacatataactgaactcctcatacccaattggaccaatctatcaccctatagaagaactaatgttagtataagtaacatgaaaacattctcctccgcataagcc

SEQ ID NO: 60778 - DNA, 120 bp, Homo sapiens
  misc_feature: 1317 for SV(W|O) and mtDNA
catataactgaactcctcatacccaattggaccaatctatcaccctatagaagaactaatgttagtataagtaacatgaaaacattctcctccgcataagcctgcgtcagattaaaacac

SEQ ID NO: 60779 - DNA, 120 bp, Homo sapiens
  misc_feature: 1317 for SV(W|O) and mtDNA
gctaacttagcattaaccttttaagttaaagattaagagaaccaacacctctttacagtgaaatgccccaactaaatactaccgtatggcccaccataattacccccatactccttacac

SEQ ID NO: 60780 - DNA, 120 bp, Homo sapiens
  misc_feature: 1317 for SV(W|O) and mtDNA
gtcctagctgctggcatcactatactactaacagaccgcaacctcaacaccaccttcttcgaccccgccggaggaggagaccccattctataccaacacctattctgatttttcggtcac

SEQ ID NO: 60781 - DNA, 120 bp, Homo sapiens
  misc_feature: 1317 for SV(W|O) and mtDNA
aaactttaatagtgtaggaagctgaataatttatgaaggagaggggtcagggttgattcgggaggatcctattggtgcgggggctttgtatgattatgggcgttgattagtagtagttac

SEQ ID NO: 60782 - DNA, 120 bp, Homo sapiens
  misc_feature: 1317 for SV(W|O) and mtDNA
ggtcaatagtacttgccgcagtactcttaaaactaggcggctatggtataatacgcctcacactcattctcaaccccctgacaaaacacatagcctaccccttccttgtactatccctat

SEQ ID NO: 60783 - DNA, 120 bp, Homo sapiens
  misc_feature: 1317 for SV(W|O) and mtDNA
ccgatatggcgtttccccgcataaacaacataagcttctgactcttacctccctctctcctactcctgctcgcatctgctatagtggaggccggagcaggaacaggttgaacagtctacc

SEQ ID NO: 60784 - DNA, 120 bp, Homo sapiens
  misc_feature: 1317 for SV(W|O) and mtDNA
acctctctatactaatctccctacaaatctccttaattataacattcacagccacagaactaatcatattttatatcttcttcgaaaccacacttatccccaccttggctatcatcaccc

SEQ ID NO: 60785 - DNA, 120 bp, Homo sapiens
  misc_feature: 1317 for SV(W|O) and mtDNA
gggggctattcctagttttattgctatagccattatgattattaatgatgagtactgattggtagtattggttatggttcattgtccggagagtatattgttgaagaggatagctattag

SEQ ID NO: 60786 - DNA, 120 bp, Homo sapiens
  misc_feature: 1317 for SV(W|O) and mtDNA
cggctgccaggcgtttaatggggtttagtagggtagggttattttcgttaatgttagtaagggtggggaagcgaggttgacctgttagggtgagaagaattattcgagtgctataggcgc

SEQ ID NO: 60787 - DNA, 120 bp, Homo sapiens
  misc_feature: 1317 for SV(W|O) and mtDNA
agttccctgctaagggagggtagactgttcaacctgttcctgctccggcctccactatagcagatgcgagcaggagtaggagagagggaggtaagagtcagaagcttatgttgtttatgc

SEQ ID NO: 60788 - DNA, 120 bp, Homo sapiens
  misc_feature: 1317 for SV(W|O) and mtDNA
cgctgggtcaatagtacttgccgcagtactcttaaaactaggcggctatggtataatacgcctcacactcattctcaaccccctgacaaaacacatagcctaccccttccttgtactatc

SEQ ID NO: 60789 - DNA, 120 bp, Homo sapiens
  misc_feature: 1317 for SV(W|O) and mtDNA
ataaaattcttcttagtagctattaccttcttattatttgatctagaaattgccctccttttacccctaccatgagccctacaaacaactaacctgccactaatagttatgtcatccctc

SEQ ID NO: 60790 - DNA, 120 bp, Homo sapiens
  misc_feature: 1317 for SV(W|O) and mtDNA
aaaaatcccaaacatataactgaactcctcatacccaattggaccaatctatcaccctatagaagaactaatgttagtataagtaacatgaaaacattctcctccgcataagcctgcgtc

SEQ ID NO: 60791 - DNA, 120 bp, Homo sapiens
  misc_feature: 1317 for SV(W|O) and mtDNA
caggagtttgatagttcttgggcagtgagagtgagtagtagaatgtttagtgagcctagggtgttgtgagtgtaaattagtgcgatgagtaggggaagggagcctactagggtgtagaat

SEQ ID NO: 60792 - DNA, 120 bp, Homo sapiens
  misc_feature: 1317 for SV(W|O) and mtDNA
ataccaaggccaccacacaccacctgtccaaaaaggccttcgatacgggataatcctatttattacctcagaagtttttttcttcgcaggatttttctgagccttttaccactccagcct

SEQ ID NO: 60793 - DNA, 120 bp, Homo sapiens
  misc_feature: 1317 for SV(W|O) and mtDNA
aggagtaggaggttggccatgggtatgttgttaagaagaggaattgaacctctgactgtaaagttttaagttttatgcgattaccgggctctgccatcttaacaaaccctgttcttgggt

SEQ ID NO: 60794 - DNA, 120 bp, Homo sapiens
  misc_feature: 1316 for SV(W|O) and mtDNA
tgatggataagattgagagagtgaggagaaggcttacgtttagtgagggagagatttggtatatgattgagatgggggctagtttttgtcatgtgagaagaagcaggccggatgtcagag

SEQ ID NO: 60795 - DNA, 120 bp, Homo sapiens
  misc_feature: 1316 for SV(W|O) and mtDNA
tctacctctctatactaatctccctacaaatctccttaattataacattcacagccacagaactaatcatattttatatcttcttcgaaaccacacttatccccaccttggctatcatca

SEQ ID NO: 60796 - DNA, 120 bp, Homo sapiens
  misc_feature: 1316 for SV(W|O) and mtDNA
gggtgaggcttggattagcgtttagaagggctatttgttgtgggtctcatgagttggagtgtaggataaatcatgctaaggcgaggatgaaaccgatatcgccgatacggttgtatagga

SEQ ID NO: 60797 - DNA, 120 bp, Homo sapiens
  misc_feature: 1316 for SV(W|O) and mtDNA
tcatatgaagtcaccctagccatcattctactatcaacattactaataagtggctcctttaacctctccacccttatcacaacacaagaacacctctgattactcctgccatcatgaccc

SEQ ID NO: 60798 - DNA, 120 bp, Homo sapiens
  misc_feature: 1316 for SV(W|O) and mtDNA
tatgatggataagattgagagagtgaggagaaggcttacgtttagtgagggagagatttggtatatgattgagatgggggctagtttttgtcatgtgagaagaagcaggccggatgtcag

SEQ ID NO: 60799 - DNA, 120 bp, Homo sapiens
  misc_feature: 1316 for SV(W|O) and mtDNA
ccccgatatggcgtttccccgcataaacaacataagcttctgactcttacctccctctctcctactcctgctcgcatctgctatagtggaggccggagcaggaacaggttgaacagtcta

SEQ ID NO: 60800 - DNA, 120 bp, Homo sapiens
  misc_feature: 1316 for SV(W|O) and mtDNA
taaaattcttcttagtagctattaccttcttattatttgatctagaaattgccctccttttacccctaccatgagccctacaaacaactaacctgccactaatagttatgtcatccctct

SEQ ID NO: 60801 - DNA, 120 bp, Homo sapiens
  misc_feature: 1316 for SV(W|O) and mtDNA
gttcaactaagcactctactctcagtttactgctaaatccaccttcgacccttaagtttcataagggctatcgtagttttctggggtagaaaatgtagcccatttcttgccacctcatgg

SEQ ID NO: 60802 - DNA, 120 bp, Homo sapiens
  misc_feature: 1316 for SV(W|O) and mtDNA
ccaccatcatagccaccatcaccctccttaacctctacttctacctacgcctaatctactccacctcaatcacactactccccatatctaacaacgtaaaaataaaatgacagtttgaac

SEQ ID NO: 60803 - DNA, 120 bp, Homo sapiens
  misc_feature: 1316 for SV(W|O) and mtDNA
atattttgtcaccaagaccctacttctaacctccctgttcttatgaattcgaacagcatacccccgattccgctacgaccaactcatacacctcctatgaaaaaacttcctaccactcac

SEQ ID NO: 60804 - DNA, 120 bp, Homo sapiens
  misc_feature: 1316 for SV(W|O) and mtDNA
cctcagataggggtcccttgaccaccatcctccgtgaaatcaatatcccgcacaagagtgctactctcctcgctccgggcccataacacttgggggtagctaaagtgaactgtatccgac

SEQ ID NO: 60805 - DNA, 120 bp, Homo sapiens
  misc_feature: 1316 for SV(W|O) and mtDNA
ccaccccttacgagtgcggcttcgaccctatatcccccgcccgcgtccctttctccataaaattcttcttagtagctattaccttcttattatttgatctagaaattgccctccttttac

SEQ ID NO: 60806 - DNA, 120 bp, Homo sapiens
  misc_feature: 1316 for SV(W|O) and mtDNA
gggagtagttccctgctaagggagggtagactgttcaacctgttcctgctccggcctccactatagcagatgcgagcaggagtaggagagagggaggtaagagtcagaagcttatgttgt

SEQ ID NO: 60807 - DNA, 120 bp, Homo sapiens
  misc_feature: 1316 for SV(W|O) and mtDNA
ggagtccgaggaggttagttgtggcaataaaaatgattaaggatactagtataagagatcaggttcgtcctttagtgttgtgtatggttatcatttgttttgaggttagtttgattagtc

SEQ ID NO: 60808 - DNA, 120 bp, Homo sapiens
  misc_feature: 1316 for SV(W|O) and mtDNA
ggagtaggaggttggccatgggtatgttgttaagaagaggaattgaacctctgactgtaaagttttaagttttatgcgattaccgggctctgccatcttaacaaaccctgttcttgggtg

SEQ ID NO: 60809 - DNA, 120 bp, Homo sapiens
  misc_feature: 1316 for SV(W|O) and mtDNA
gctagaggtgatgtttttggtaaacaggcggggtaagatttgccgagttccttttactttttttaacctttccttatgagcatgcctgtgttgggttgacagtgagggtaataatgactt

SEQ ID NO: 60810 - DNA, 120 bp, Homo sapiens
  misc_feature: 1316 for SV(W|O) and mtDNA
agcggtgaaagtggtttggtttagacgtccgggaattgcatctgtttttaagcctaatgtggggacagctcatgagtgcaagacgtcttgtgatgtaattattatacgaatgggggcttc

SEQ ID NO: 60811 - DNA, 120 bp, Homo sapiens
  misc_feature: 1316 for SV(W|O) and mtDNA
ctgtgatccatcgtgatgtcttatttaaggggaacgtgtgggctatttaggctttatgaccctgaagtaggaaccagatgtcggatacagttcactttagctacccccaagtgttatggg

SEQ ID NO: 60812 - DNA, 120 bp, Homo sapiens
  misc_feature: 1316 for SV(W|O) and mtDNA
cctcaaacctaagaaatatgtctgataaaagagttactttgatagagtaaataataggagcttaaacccccttatttctaggactatgagaatcgaacccatccctgagaatccaaaatt

SEQ ID NO: 60813 - DNA, 120 bp, Homo sapiens
  misc_feature: 1316 for SV(W|O) and mtDNA
caaccagccagaacgcctgaacgcaggcacatacttcctattctacaccctagtaggctcccttcccctactcatcgcactaatttacactcacaacaccctaggctcactaaacattct

SEQ ID NO: 60814 - DNA, 120 bp, Homo sapiens
  misc_feature: 1316 for SV(W|O) and mtDNA
atctgacgcaggcttatgcggaggagaatgttttcatgttacttatactaacattagttcttctatagggtgatagattggtccaattgggtatgaggagttcagttatatgtttgggat

SEQ ID NO: 60815 - DNA, 120 bp, Homo sapiens
  misc_feature: 1316 for SV(W|O) and mtDNA
atctctccctcactaaacgtaagccttctcctcactctctcaatcttatccatcatagcaggcagttgaggtggattaaaccaaacccagctacgcaaaatcttagcatactcctcaatt

SEQ ID NO: 60816 - DNA, 120 bp, Homo sapiens
  misc_feature: 1315 for SV(W|O) and mtDNA
cctgaagcgcgtacacaccgcccgtcaccctcctcaagtatacttcaaaggacatttaactaaaacccctacgcatttatatagaggagacaagtcgtaacatggtaagtgtactggaaa

SEQ ID NO: 60817 - DNA, 120 bp, Homo sapiens
  misc_feature: 1315 for SV(W|O) and mtDNA
actttacttcctctctttcttcttcccactcatcctaaccctactcctaatcacataacctattcccccgagcaatctcaattacaatatatacaccaacaaacaatgttcaaccagtaa

SEQ ID NO: 60818 - DNA, 120 bp, Homo sapiens
  misc_feature: 1315 for SV(W|O) and mtDNA
tccctcactaaacgtaagccttctcctcactctctcaatcttatccatcatagcaggcagttgaggtggattaaaccaaacccagctacgcaaaatcttagcatactcctcaattaccca

SEQ ID NO: 60819 - DNA, 120 bp, Homo sapiens
  misc_feature: 1315 for SV(W|O) and mtDNA
tgaggcttggattagcgtttagaagggctatttgttgtgggtctcatgagttggagtgtaggataaatcatgctaaggcgaggatgaaaccgatatcgccgatacggttgtataggattg

SEQ ID NO: 60820 - DNA, 120 bp, Homo sapiens
  misc_feature: 1315 for SV(W|O) and mtDNA
aaaatcccaaacatataactgaactcctcatacccaattggaccaatctatcaccctatagaagaactaatgttagtataagtaacatgaaaacattctcctccgcataagcctgcgtca

SEQ ID NO: 60821 - DNA, 120 bp, Homo sapiens
  misc_feature: 1315 for SV(W|O) and mtDNA
atgcatggagagctcccgtgagtggttaatagggtgatagacctgtgatccatcgtgatgtcttatttaaggggaacgtgtgggctatttaggctttatgaccctgaagtaggaaccaga

SEQ ID NO: 60822 - DNA, 120 bp, Homo sapiens
  misc_feature: 1315 for SV(W|O) and mtDNA
atgttgagtcctgtaagtaggagagtgatatttgatcaggagaacgtggttactagcacagagagttctcccagtaggttaatagtggggggtaaggcgaggttagcgaggcttgctaga

SEQ ID NO: 60823 - DNA, 120 bp, Homo sapiens
  misc_feature: 1315 for SV(W|O) and mtDNA
aacgaaaatctgttcgcttcattcattgcccccacaatcctaggcctacccgccgcagtactgatcattctatttccccctctattgatccccacctccaaatatctcatcaacaaccga

SEQ ID NO: 60824 - DNA, 120 bp, Homo sapiens
  misc_feature: 1315 for SV(W|O) and mtDNA
tcgccctattcttcatagccgaatacacaaacattattataataaacaccctcaccactacaatcttcctaggaacaacatatgacgcactctcccctgaactctacacaacatattttg

SEQ ID NO: 60825 - DNA, 120 bp, Homo sapiens
  misc_feature: 1315 for SV(W|O) and mtDNA
aggagtttgatagttcttgggcagtgagagtgagtagtagaatgtttagtgagcctagggtgttgtgagtgtaaattagtgcgatgagtaggggaagggagcctactagggtgtagaata

SEQ ID NO: 60826 - DNA, 120 bp, Homo sapiens
  misc_feature: 1315 for SV(W|O) and mtDNA
tagcggtgaaagtggtttggtttagacgtccgggaattgcatctgtttttaagcctaatgtggggacagctcatgagtgcaagacgtcttgtgatgtaattattatacgaatgggggctt

SEQ ID NO: 60827 - DNA, 120 bp, Homo sapiens
  misc_feature: 1315 for SV(W|O) and mtDNA
agtcgcaggtcgcctggttctaggaataatgggggaagtatgtaggagttgaagattagtccgccgtagtcggtgtactcgtaggttcagtaccattggtggccaattgatttgatggta

SEQ ID NO: 60828 - DNA, 120 bp, Homo sapiens
  misc_feature: 1315 for SV(W|O) and mtDNA
ccctcactaaacgtaagccttctcctcactctctcaatcttatccatcatagcaggcagttgaggtggattaaaccaaacccagctacgcaaaatcttagcatactcctcaattacccac

SEQ ID NO: 60829 - DNA, 120 bp, Homo sapiens
  misc_feature: 1315 for SV(W|O) and mtDNA
gtaagtttgtaattactgtggcccctcagaatgatatttggcctcacgggaggacatagcctatgaaggctgttgctatagttgcaagcaggaggataatgccgatgtttcaggtttctg

SEQ ID NO: 60830 - DNA, 120 bp, Homo sapiens
  misc_feature: 1315 for SV(W|O) and mtDNA
gggccctgaagcgcgtacacaccgcccgtcaccctcctcaagtatacttcaaaggacatttaactaaaacccctacgcatttatatagaggagacaagtcgtaacatggtaagtgtactg

SEQ ID NO: 60831 - DNA, 120 bp, Homo sapiens
  misc_feature: 1315 for SV(W|O) and mtDNA
cataccaaggccaccacacaccacctgtccaaaaaggccttcgatacgggataatcctatttattacctcagaagtttttttcttcgcaggatttttctgagccttttaccactccagcc

SEQ ID NO: 60832 - DNA, 120 bp, Homo sapiens
  misc_feature: 1315 for SV(W|O) and mtDNA
ggagtagttccctgctaagggagggtagactgttcaacctgttcctgctccggcctccactatagcagatgcgagcaggagtaggagagagggaggtaagagtcagaagcttatgttgtt

SEQ ID NO: 60833 - DNA, 120 bp, Homo sapiens
  misc_feature: 1315 for SV(W|O) and mtDNA
ccattgtgttgtggtaaatatgtagagggagtatagggctgtgactagtatgttgagtcctgtaagtaggagagtgatatttgatcaggagaacgtggttactagcacagagagttctcc

SEQ ID NO: 60834 - DNA, 120 bp, Homo sapiens
  misc_feature: 1315 for SV(W|O) and mtDNA
agttagttttgttgtgagtgttaggaaaagggcatacaggactaggaagcagataaggaaaatgattatgagggcgtgatcatgaaaggtgataagctcttctatgataggggaagtagc

SEQ ID NO: 60835 - DNA, 120 bp, Homo sapiens
  misc_feature: 1315 for SV(W|O) and mtDNA
gagaggggtcagggttgattcgggaggatcctattggtgcgggggctttgtatgattatgggcgttgattagtagtagttactggttgaacattgtttgttggtgtatatattgtaattg

SEQ ID NO: 60836 - DNA, 120 bp, Homo sapiens
  misc_feature: 1315 for SV(W|O) and mtDNA
ctgatgttttggttaaactatatttacaagaggaaaacccggtaatgatgtcggggttgagggataggaggagaatgggggataggtgtatgaacatgagggtgttttctcgtgtgaatg

SEQ ID NO: 60837 - DNA, 120 bp, Homo sapiens
  misc_feature: 1315 for SV(W|O) and mtDNA
attgaactaggtctgtcccaatgtatgggatggcggatagtaagtttgtaattactgtggcccctcagaatgatatttggcctcacgggaggacatagcctatgaaggctgttgctatag

SEQ ID NO: 60838 - DNA, 120 bp, Homo sapiens
  misc_feature: 1315 for SV(W|O) and mtDNA
atgcctatcatatagtaaaacccagcccatgacccctaacaggggccctctcagccctcctaatgacctccggcctagccatgtgatttcacttccactccataacgctcctcatactag

SEQ ID NO: 60839 - DNA, 120 bp, Homo sapiens
  misc_feature: 1314 for SV(W|O) and mtDNA
tttggtttaatccacctcaactgcctgctatgatggataagattgagagagtgaggagaaggcttacgtttagtgagggagagatttggtatatgattgagatgggggctagtttttgtc

SEQ ID NO: 60840 - DNA, 120 bp, Homo sapiens
  misc_feature: 1314 for SV(W|O) and mtDNA
ttctccataaaattcttcttagtagctattaccttcttattatttgatctagaaattgccctccttttacccctaccatgagccctacaaacaactaacctgccactaatagttatgtca

SEQ ID NO: 60841 - DNA, 120 bp, Homo sapiens
  misc_feature: 1314 for SV(W|O) and mtDNA
ttcctaggaagattgtagtggtgagggtgtttattataataatgtttgtgtattcggctatgaagaatagggcgaaggggcctgcggcgtattcgatgttgaagcctgagactagttcgg

SEQ ID NO: 60842 - DNA, 120 bp, Homo sapiens
  misc_feature: 1314 for SV(W|O) and mtDNA
tacacctagcaggtgtctcctctatcttaggggccatcaatttcatcacaacaattatcaatataaaaccccctgccataacccaataccaaacgcccctcttcgtctgatccgtcctaa

SEQ ID NO: 60843 - DNA, 120 bp, Homo sapiens
  misc_feature: 1314 for SV(W|O) and mtDNA
tggatgcggttgcttgcgtgaggaaatacttgatggcagcttctgtggaacgagggtttatttttttggttagaactggaataaaagctagcatgtttatttctaggcctactcaggtaa

SEQ ID NO: 60844 - DNA, 120 bp, Homo sapiens
  misc_feature: 1314 for SV(W|O) and mtDNA
gtcgcaggtcgcctggttctaggaataatgggggaagtatgtaggagttgaagattagtccgccgtagtcggtgtactcgtaggttcagtaccattggtggccaattgatttgatggtaa

SEQ ID NO: 60845 - DNA, 120 bp, Homo sapiens
  misc_feature: 1314 for SV(W|O) and mtDNA
ttaaaggagccacttattagtaatgttgatagtagaatgatggctagggtgacttcatatgagattgtttgggctactgctcgcagtgcgccgatcagggcgtagtttgagtttgatgct

SEQ ID NO: 60846 - DNA, 120 bp, Homo sapiens
  misc_feature: 1314 for SV(W|O) and mtDNA
tggcaggttagttgtttgtagggctcatggtaggggtaaaaggagggcaatttctagatcaaataataagaaggtaatagctactaagaagaattttatggagaaagggacgcgggcggg

SEQ ID NO: 60847 - DNA, 120 bp, Homo sapiens
  misc_feature: 1314 for SV(W|O) and mtDNA
gtcagctaaataagctatcgggcccataccccgaaaatgttggttatacccttcccgtactaattaatcccctggcccaacccgtcatctactctaccatctttgcaggcacactcatca

SEQ ID NO: 60848 - DNA, 120 bp, Homo sapiens
  misc_feature: 1314 for SV(W|O) and mtDNA
cgaaaaatcagaataggtgttggtatagaatggggtctcctcctccggcggggtcgaagaaggtggtgttgaggttgcggtctgttagtagtatagtgatgccagcagctaggactggga

SEQ ID NO: 60849 - DNA, 120 bp, Homo sapiens
  misc_feature: 1314 for SV(W|O) and mtDNA
tcattgaactaggtctgtcccaatgtatgggatggcggatagtaagtttgtaattactgtggcccctcagaatgatatttggcctcacgggaggacatagcctatgaaggctgttgctat

SEQ ID NO: 60850 - DNA, 120 bp, Homo sapiens
  misc_feature: 1314 for SV(W|O) and mtDNA
taagtttgtaattactgtggcccctcagaatgatatttggcctcacgggaggacatagcctatgaaggctgttgctatagttgcaagcaggaggataatgccgatgtttcaggtttctga

SEQ ID NO: 60851 - DNA, 120 bp, Homo sapiens
  misc_feature: 1314 for SV(W|O) and mtDNA
ggaaattttttgttatgatgtctgtgtggaaagcggctgtgcagacattcaattgttattattatgtcctacaagcattaattaattaacacactttagtaagtatgttcgcctgtaata

SEQ ID NO: 60852 - DNA, 120 bp, Homo sapiens
  misc_feature: 1314 for SV(W|O) and mtDNA
gctctttggtgaagagttttatggcgtcagcgaagggttgtagtagcccgtaggggcctacaacgttggggcctttgcgtagttgtatatagcctagaatttttcgttcggtaagcatta

SEQ ID NO: 60853 - DNA, 120 bp, Homo sapiens
  misc_feature: 1314 for SV(W|O) and mtDNA
aaattcttcttagtagctattaccttcttattatttgatctagaaattgccctccttttacccctaccatgagccctacaaacaactaacctgccactaatagttatgtcatccctctta

SEQ ID NO: 60854 - DNA, 120 bp, Homo sapiens
  misc_feature: 1314 for SV(W|O) and mtDNA
gtttgattagtcattgttgggtggtgattagtcggttgttgatgagatatttggaggtggggatcaatagagggggaaatagaatgatcagtactgcggcgggtaggcctaggattgtgg

SEQ ID NO: 60855 - DNA, 120 bp, Homo sapiens
  misc_feature: 1314 for SV(W|O) and mtDNA
gtctcaggcttcaacatcgaatacgccgcaggccccttcgccctattcttcatagccgaatacacaaacattattataataaacaccctcaccactacaatcttcctaggaacaacatat

SEQ ID NO: 60856 - DNA, 120 bp, Homo sapiens
  misc_feature: 1314 for SV(W|O) and mtDNA
ccatcgctgggtcaatagtacttgccgcagtactcttaaaactaggcggctatggtataatacgcctcacactcattctcaaccccctgacaaaacacatagcctaccccttccttgtac

SEQ ID NO: 60857 - DNA, 120 bp, Homo sapiens
  misc_feature: 1314 for SV(W|O) and mtDNA
attgtgtgttcagatatgttaaagccactttcgtagtctattttgtgtcaactggagttttttacaactcaggtgagttttagctttattggggagggggtgatctaaaacactctttac

SEQ ID NO: 60858 - DNA, 120 bp, Homo sapiens
  misc_feature: 1314 for SV(W|O) and mtDNA
ggaagattgtagtggtgagggtgtttattataataatgtttgtgtattcggctatgaagaatagggcgaaggggcctgcggcgtattcgatgttgaagcctgagactagttcggactccc

SEQ ID NO: 60859 - DNA, 120 bp, Homo sapiens
  misc_feature: 1314 for SV(W|O) and mtDNA
ccgcggtaccctaaccgtgcaaaggtagcataatcacttgttccttaaatagggacctgtatgaatggctccacgagggttcagctgtctcttacttttaaccagtgaaattgacctgcc

SEQ ID NO: 60860 - DNA, 120 bp, Homo sapiens
  misc_feature: 1314 for SV(W|O) and mtDNA
ccttacacctagcaggtgtctcctctatcttaggggccatcaatttcatcacaacaattatcaatataaaaccccctgccataacccaataccaaacgcccctcttcgtctgatccgtcc

SEQ ID NO: 60861 - DNA, 120 bp, Homo sapiens
  misc_feature: 1314 for SV(W|O) and mtDNA
gcctatcatatagtaaaacccagcccatgacccctaacaggggccctctcagccctcctaatgacctccggcctagccatgtgatttcacttccactccataacgctcctcatactaggc

SEQ ID NO: 60862 - DNA, 120 bp, Homo sapiens
  misc_feature: 1314 for SV(W|O) and mtDNA
gccacatagccctcgtagtaacagccattctcatccaaaccccctgaagcttcaccggcgcagtcattctcataatcgcccacgggcttacatcctcattactattctgcctagcaaact

SEQ ID NO: 60863 - DNA, 120 bp, Homo sapiens
  misc_feature: 1314 for SV(W|O) and mtDNA
gcaaccagccagaacgcctgaacgcaggcacatacttcctattctacaccctagtaggctcccttcccctactcatcgcactaatttacactcacaacaccctaggctcactaaacattc

SEQ ID NO: 60864 - DNA, 120 bp, Homo sapiens
  misc_feature: 1314 for SV(W|O) and mtDNA
gatagtaagtttgtaattactgtggcccctcagaatgatatttggcctcacgggaggacatagcctatgaaggctgttgctatagttgcaagcaggaggataatgccgatgtttcaggtt

SEQ ID NO: 60865 - DNA, 120 bp, Homo sapiens
  misc_feature: 1314 for SV(W|O) and mtDNA
ctgactcttacctccctctctcctactcctgctcgcatctgctatagtggaggccggagcaggaacaggttgaacagtctaccctcccttagcagggaactactcccaccctggagcctc

SEQ ID NO: 60866 - DNA, 120 bp, Homo sapiens
  misc_feature: 1314 for SV(W|O) and mtDNA
ctgaggggagtcaggggtggagacctaattgggctgatttgcctgctgctgctaggaggaggcctagtagtggggtgaggcttggattagcgtttagaagggctatttgttgtgggtctc

SEQ ID NO: 60867 - DNA, 120 bp, Homo sapiens
  misc_feature: 1314 for SV(W|O) and mtDNA
ctacacaacatattttgtcaccaagaccctacttctaacctccctgttcttatgaattcgaacagcatacccccgattccgctacgaccaactcatacacctcctatgaaaaaacttcct

SEQ ID NO: 60868 - DNA, 120 bp, Homo sapiens
  misc_feature: 1313 for SV(W|O) and mtDNA
tttgattagtcattgttgggtggtgattagtcggttgttgatgagatatttggaggtggggatcaatagagggggaaatagaatgatcagtactgcggcgggtaggcctaggattgtggg

SEQ ID NO: 60869 - DNA, 120 bp, Homo sapiens
  misc_feature: 1313 for SV(W|O) and mtDNA
ttgaacctctgactgtaaagttttaagttttatgcgattaccgggctctgccatcttaacaaaccctgttcttgggtgggtgtgggtataatactaagttgagatgatatcatttacggg

SEQ ID NO: 60870 - DNA, 120 bp, Homo sapiens
  misc_feature: 1313 for SV(W|O) and mtDNA
ttacacctagcaggtgtctcctctatcttaggggccatcaatttcatcacaacaattatcaatataaaaccccctgccataacccaataccaaacgcccctcttcgtctgatccgtccta

SEQ ID NO: 60871 - DNA, 120 bp, Homo sapiens
  misc_feature: 1313 for SV(W|O) and mtDNA
tgaagtccttgagagaggattatgatgcgactgtgagtgcgttcgtagtttgagtttgctaggcagaatagtaatgaggatgtaagcccgtgggcgattatgagaatgactgcgccggtg

SEQ ID NO: 60872 - DNA, 120 bp, Homo sapiens
  misc_feature: 1313 for SV(W|O) and mtDNA
gttcttgggtgggtgtgggtataatactaagttgagatgatatcatttacgggggaaggcgctttgtgaagtaggccttatttctcttgtcctttcgtacagggaggaatttgaagtaga

SEQ ID NO: 60873 - DNA, 120 bp, Homo sapiens
  misc_feature: 1313 for SV(W|O) and mtDNA
gtcctagaaataagggggtttaagctcctattatttactctatcaaagtaactcttttatcagacatatttcttaggtttgagggggaatgctggagattgtaatgggtatggagacata

SEQ ID NO: 60874 - DNA, 120 bp, Homo sapiens
  misc_feature: 1313 for SV(W|O) and mtDNA
gttttaggggctctttggtgaagagttttatggcgtcagcgaagggttgtagtagcccgtaggggcctacaacgttggggcctttgcgtagttgtatatagcctagaatttttcgttcgg

SEQ ID NO: 60875 - DNA, 120 bp, Homo sapiens
  misc_feature: 1313 for SV(W|O) and mtDNA
gttcagatatgttaaagccactttcgtagtctattttgtgtcaactggagttttttacaactcaggtgagttttagctttattggggagggggtgatctaaaacactctttacgccggct

SEQ ID NO: 60876 - DNA, 120 bp, Homo sapiens
  misc_feature: 1313 for SV(W|O) and mtDNA
actcctacctatctccccttttatactaataatcttatagaaatttaggttaaatacagaccaagagccttcaaagccctcagtaagttgcaatacttaatttctgtaacagctaaggac

SEQ ID NO: 60877 - DNA, 120 bp, Homo sapiens
  misc_feature: 1313 for SV(W|O) and mtDNA
ggtgaggcttggattagcgtttagaagggctatttgttgtgggtctcatgagttggagtgtaggataaatcatgctaaggcgaggatgaaaccgatatcgccgatacggttgtataggat

SEQ ID NO: 60878 - DNA, 120 bp, Homo sapiens
  misc_feature: 1313 for SV(W|O) and mtDNA
gatgagtgtgcctgcaaagatggtagagtagatgacgggttgggccaggggattaattagtacgggaagggtataaccaacattttcggggtatgggcccgatagcttatttagctgacc

SEQ ID NO: 60879 - DNA, 120 bp, Homo sapiens
  misc_feature: 1313 for SV(W|O) and mtDNA
ggctctttggtgaagagttttatggcgtcagcgaagggttgtagtagcccgtaggggcctacaacgttggggcctttgcgtagttgtatatagcctagaatttttcgttcggtaagcatt

SEQ ID NO: 60880 - DNA, 120 bp, Homo sapiens
  misc_feature: 1313 for SV(W|O) and mtDNA
ggatagtaagtttgtaattactgtggcccctcagaatgatatttggcctcacgggaggacatagcctatgaaggctgttgctatagttgcaagcaggaggataatgccgatgtttcaggt

SEQ ID NO: 60881 - DNA, 120 bp, Homo sapiens
  misc_feature: 1313 for SV(W|O) and mtDNA
ccatgcatttggtattttcgtctggggggtatgcacgcgatagcattgcgagacgctggagccggagcaccctatgtcgcagtatctgtctttgattcctgcctcatcccattatttatc

SEQ ID NO: 60882 - DNA, 120 bp, Homo sapiens
  misc_feature: 1313 for SV(W|O) and mtDNA
ctctacacaacatattttgtcaccaagaccctacttctaacctccctgttcttatgaattcgaacagcatacccccgattccgctacgaccaactcatacacctcctatgaaaaaacttc

SEQ ID NO: 60883 - DNA, 120 bp, Homo sapiens
  misc_feature: 1313 for SV(W|O) and mtDNA
agtccttgagagaggattatgatgcgactgtgagtgcgttcgtagtttgagtttgctaggcagaatagtaatgaggatgtaagcccgtgggcgattatgagaatgactgcgccggtgaag

SEQ ID NO: 60884 - DNA, 120 bp, Homo sapiens
  misc_feature: 1313 for SV(W|O) and mtDNA
cttacacctagcaggtgtctcctctatcttaggggccatcaatttcatcacaacaattatcaatataaaaccccctgccataacccaataccaaacgcccctcttcgtctgatccgtcct

SEQ ID NO: 60885 - DNA, 120 bp, Homo sapiens
  misc_feature: 1313 for SV(W|O) and mtDNA
ctctttggtgaagagttttatggcgtcagcgaagggttgtagtagcccgtaggggcctacaacgttggggcctttgcgtagttgtatatagcctagaatttttcgttcggtaagcattag

SEQ ID NO: 60886 - DNA, 120 bp, Homo sapiens
  misc_feature: 1313 for SV(W|O) and mtDNA
ctccaaataaaagtaataaccatgcacactactataaccaccctaaccctgacttccctaattccccccatccttaccaccctcgttaaccctaacaaaaaaaactcatacccccattat

SEQ ID NO: 60887 - DNA, 120 bp, Homo sapiens
  misc_feature: 1313 for SV(W|O) and mtDNA
ccttaccatcaaatcaattggccaccaatggtactgaacctacgagtacaccgactacggcggactaatcttcaactcctacatacttcccccattattcctagaaccaggcgacctgcg

SEQ ID NO: 60888 - DNA, 120 bp, Homo sapiens
  misc_feature: 1312 for SV(W|O) and mtDNA
ttgtcaccaagaccctacttctaacctccctgttcttatgaattcgaacagcatacccccgattccgctacgaccaactcatacacctcctatgaaaaaacttcctaccactcaccctag

SEQ ID NO: 60889 - DNA, 120 bp, Homo sapiens
  misc_feature: 1312 for SV(W|O) and mtDNA
ttggtaaacaggcggggtaagatttgccgagttccttttactttttttaacctttccttatgagcatgcctgtgttgggttgacagtgagggtaataatgacttgttggttgattgtaga

SEQ ID NO: 60890 - DNA, 120 bp, Homo sapiens
  misc_feature: 1312 for SV(W|O) and mtDNA
acatataactgaactcctcatacccaattggaccaatctatcaccctatagaagaactaatgttagtataagtaacatgaaaacattctcctccgcataagcctgcgtcagattaaaaca

SEQ ID NO: 60891 - DNA, 120 bp, Homo sapiens
  misc_feature: 1312 for SV(W|O) and mtDNA
attatttatcgcacctacgttcaatattacaggcgaacatacttactaaagtgtgttaattaattaatgcttgtaggacataataataacaattgaatgtctgcacagccgctttccaca

SEQ ID NO: 60892 - DNA, 120 bp, Homo sapiens
  misc_feature: 1312 for SV(W|O) and mtDNA
tgaccaaccctggggttagtatagcttagttaaactttcgtttattgctaaaggttaatcactgctgtttcccgtgggggtgtggctaggctaagcgttttgagctgcattgctgcgtgc

SEQ ID NO: 60893 - DNA, 120 bp, Homo sapiens
  misc_feature: 1312 for SV(W|O) and mtDNA
tgaacgaaaatctgttcgcttcattcattgcccccacaatcctaggcctacccgccgcagtactgatcattctatttccccctctattgatccccacctccaaatatctcatcaacaacc

SEQ ID NO: 60894 - DNA, 120 bp, Homo sapiens
  misc_feature: 1312 for SV(W|O) and mtDNA
gggtgtgggtataatactaagttgagatgatatcatttacgggggaaggcgctttgtgaagtaggccttatttctcttgtcctttcgtacagggaggaatttgaagtagatagaaaccga

SEQ ID NO: 60895 - DNA, 120 bp, Homo sapiens
  misc_feature: 1312 for SV(W|O) and mtDNA
tcaaccagtaactactactaatcaacgcccataatcatacaaagcccccgcaccaataggatcctcccgaatcaaccctgacccctctccttcataaattattcagcttcctacactatt

SEQ ID NO: 60896 - DNA, 120 bp, Homo sapiens
  misc_feature: 1312 for SV(W|O) and mtDNA
tatttctcttgtcctttcgtacagggaggaatttgaagtagatagaaaccgacctggattactccggtctgaactcagatcacgtaggactttaatcgttgaacaaacgaacctttaata

SEQ ID NO: 60897 - DNA, 120 bp, Homo sapiens
  misc_feature: 1312 for SV(W|O) and mtDNA
gttcaaccagtaactactactaatcaacgcccataatcatacaaagcccccgcaccaataggatcctcccgaatcaaccctgacccctctccttcataaattattcagcttcctacacta

SEQ ID NO: 60898 - DNA, 120 bp, Homo sapiens
  misc_feature: 1312 for SV(W|O) and mtDNA
gtttggtttaatccacctcaactgcctgctatgatggataagattgagagagtgaggagaaggcttacgtttagtgagggagagatttggtatatgattgagatgggggctagtttttgt

SEQ ID NO: 60899 - DNA, 120 bp, Homo sapiens
  misc_feature: 1312 for SV(W|O) and mtDNA
gttcttatgaattcgaacagcatacccccgattccgctacgaccaactcatacacctcctatgaaaaaacttcctaccactcaccctagcattacttatatgatatgtctccatacccat

SEQ ID NO: 60900 - DNA, 120 bp, Homo sapiens
  misc_feature: 1312 for SV(W|O) and mtDNA
gtgtgttcagatatgttaaagccactttcgtagtctattttgtgtcaactggagttttttacaactcaggtgagttttagctttattggggagggggtgatctaaaacactctttacgcc

SEQ ID NO: 60901 - DNA, 120 bp, Homo sapiens
  misc_feature: 1312 for SV(W|O) and mtDNA
gcccttctaaacgctaatccaagcctcaccccactactaggcctcctcctagcagcagcaggcaaatcagcccaattaggtctccacccctgactcccctcagccatagaaggccccacc

SEQ ID NO: 60902 - DNA, 120 bp, Homo sapiens
  misc_feature: 1312 for SV(W|O) and mtDNA
ggtcgcctggttctaggaataatgggggaagtatgtaggagttgaagattagtccgccgtagtcggtgtactcgtaggttcagtaccattggtggccaattgatttgatggtaagggagg

SEQ ID NO: 60903 - DNA, 120 bp, Homo sapiens
  misc_feature: 1312 for SV(W|O) and mtDNA
ctctacctctctatactaatctccctacaaatctccttaattataacattcacagccacagaactaatcatattttatatcttcttcgaaaccacacttatccccaccttggctatcatc

SEQ ID NO: 60904 - DNA, 120 bp, Homo sapiens
  misc_feature: 1312 for SV(W|O) and mtDNA
gactgtaaagttttaagttttatgcgattaccgggctctgccatcttaacaaaccctgttcttgggtgggtgtgggtataatactaagttgagatgatatcatttacgggggaaggcgct

SEQ ID NO: 60905 - DNA, 120 bp, Homo sapiens
  misc_feature: 1312 for SV(W|O) and mtDNA
cacataccaaggccaccacacaccacctgtccaaaaaggccttcgatacgggataatcctatttattacctcagaagtttttttcttcgcaggatttttctgagccttttaccactccag

SEQ ID NO: 60906 - DNA, 120 bp, Homo sapiens
  misc_feature: 1312 for SV(W|O) and mtDNA
ataggggtcccttgaccaccatcctccgtgaaatcaatatcccgcacaagagtgctactctcctcgctccgggcccataacacttgggggtagctaaagtgaactgtatccgacatctgg

SEQ ID NO: 60907 - DNA, 120 bp, Homo sapiens
  misc_feature: 1312 for SV(W|O) and mtDNA
aggagaggggtcagggttgattcgggaggatcctattggtgcgggggctttgtatgattatgggcgttgattagtagtagttactggttgaacattgtttgttggtgtatatattgtaat

SEQ ID NO: 60908 - DNA, 120 bp, Homo sapiens
  misc_feature: 1312 for SV(W|O) and mtDNA
acctaaaaaatcccaaacatataactgaactcctcatacccaattggaccaatctatcaccctatagaagaactaatgttagtataagtaacatgaaaacattctcctccgcataagcct

SEQ ID NO: 60909 - DNA, 120 bp, Homo sapiens
  misc_feature: 1311 for SV(W|O) and mtDNA
ttgtgtgttcagatatgttaaagccactttcgtagtctattttgtgtcaactggagttttttacaactcaggtgagttttagctttattggggagggggtgatctaaaacactctttacg

SEQ ID NO: 60910 - DNA, 120 bp, Homo sapiens
  misc_feature: 1311 for SV(W|O) and mtDNA
ttgattagtcattgttgggtggtgattagtcggttgttgatgagatatttggaggtggggatcaatagagggggaaatagaatgatcagtactgcggcgggtaggcctaggattgtgggg

SEQ ID NO: 60911 - DNA, 120 bp, Homo sapiens
  misc_feature: 1311 for SV(W|O) and mtDNA
ttcagatatgttaaagccactttcgtagtctattttgtgtcaactggagttttttacaactcaggtgagttttagctttattggggagggggtgatctaaaacactctttacgccggctt

SEQ ID NO: 60912 - DNA, 120 bp, Homo sapiens
  misc_feature: 1311 for SV(W|O) and mtDNA
cactacctaaaaaatcccaaacatataactgaactcctcatacccaattggaccaatctatcaccctatagaagaactaatgttagtataagtaacatgaaaacattctcctccgcataa

SEQ ID NO: 60913 - DNA, 120 bp, Homo sapiens
  misc_feature: 1311 for SV(W|O) and mtDNA
tgttcagatatgttaaagccactttcgtagtctattttgtgtcaactggagttttttacaactcaggtgagttttagctttattggggagggggtgatctaaaacactctttacgccggc

SEQ ID NO: 60914 - DNA, 120 bp, Homo sapiens
  misc_feature: 1311 for SV(W|O) and mtDNA
tgtgtggaaagcggctgtgcagacattcaattgttattattatgtcctacaagcattaattaattaacacactttagtaagtatgttcgcctgtaatattgaacgtaggtgcgataaata

SEQ ID NO: 60915 - DNA, 120 bp, Homo sapiens
  misc_feature: 1311 for SV(W|O) and mtDNA
tgcctatcatatagtaaaacccagcccatgacccctaacaggggccctctcagccctcctaatgacctccggcctagccatgtgatttcacttccactccataacgctcctcatactagg

SEQ ID NO: 60916 - DNA, 120 bp, Homo sapiens
  misc_feature: 1311 for SV(W|O) and mtDNA
aggttagtttgattagtcattgttgggtggtgattagtcggttgttgatgagatatttggaggtggggatcaatagagggggaaatagaatgatcagtactgcggcgggtaggcctagga

SEQ ID NO: 60917 - DNA, 120 bp, Homo sapiens
  misc_feature: 1311 for SV(W|O) and mtDNA
tcatagaagagcttatcacctttcatgatcacgccctcataatcattttccttatctgcttcctagtcctgtatgcccttttcctaacactcacaacaaaactaactaatactaacatct

SEQ ID NO: 60918 - DNA, 120 bp, Homo sapiens
  misc_feature: 1311 for SV(W|O) and mtDNA
tcaaacctaagaaatatgtctgataaaagagttactttgatagagtaaataataggagcttaaacccccttatttctaggactatgagaatcgaacccatccctgagaatccaaaattct

SEQ ID NO: 60919 - DNA, 120 bp, Homo sapiens
  misc_feature: 1311 for SV(W|O) and mtDNA
cgcagactgctgcgaacagagtggtgatagcgcctaagcatagtgttagagtttggattagtgggctattttctgctagggggtggaagcggatgagtaagaagattcctgctacaacta

SEQ ID NO: 60920 - DNA, 120 bp, Homo sapiens
  misc_feature: 1311 for SV(W|O) and mtDNA
agcccttctaaacgctaatccaagcctcaccccactactaggcctcctcctagcagcagcaggcaaatcagcccaattaggtctccacccctgactcccctcagccatagaaggccccac

SEQ ID NO: 60921 - DNA, 120 bp, Homo sapiens
  misc_feature: 1311 for SV(W|O) and mtDNA
acacaacatattttgtcaccaagaccctacttctaacctccctgttcttatgaattcgaacagcatacccccgattccgctacgaccaactcatacacctcctatgaaaaaacttcctac

SEQ ID NO: 60922 - DNA, 120 bp, Homo sapiens
  misc_feature: 1311 for SV(W|O) and mtDNA
gtaaactttaatagtgtaggaagctgaataatttatgaaggagaggggtcagggttgattcgggaggatcctattggtgcgggggctttgtatgattatgggcgttgattagtagtagtt

SEQ ID NO: 60923 - DNA, 120 bp, Homo sapiens
  misc_feature: 1311 for SV(W|O) and mtDNA
ggccaccacacaccacctgtccaaaaaggccttcgatacgggataatcctatttattacctcagaagtttttttcttcgcaggatttttctgagccttttaccactccagcctagcccct

SEQ ID NO: 60924 - DNA, 120 bp, Homo sapiens
  misc_feature: 1311 for SV(W|O) and mtDNA
cattcaagcaatcctatacaaccgtatcggcgatatcggtttcatcctcgccttagcatgatttatcctacactccaactcatgagacccacaacaaatagcccttctaaacgctaatcc

SEQ ID NO: 60925 - DNA, 120 bp, Homo sapiens
  misc_feature: 1311 for SV(W|O) and mtDNA
aagtaggagagtgatatttgatcaggagaacgtggttactagcacagagagttctcccagtaggttaatagtggggggtaaggcgaggttagcgaggcttgctagaagtcatcaaaaagc

SEQ ID NO: 60926 - DNA, 120 bp, Homo sapiens
  misc_feature: 1311 for SV(W|O) and mtDNA
gccctattcttcatagccgaatacacaaacattattataataaacaccctcaccactacaatcttcctaggaacaacatatgacgcactctcccctgaactctacacaacatattttgtc

SEQ ID NO: 60927 - DNA, 120 bp, Homo sapiens
  misc_feature: 1311 for SV(W|O) and mtDNA
gagtcgcaggtcgcctggttctaggaataatgggggaagtatgtaggagttgaagattagtccgccgtagtcggtgtactcgtaggttcagtaccattggtggccaattgatttgatggt

SEQ ID NO: 60928 - DNA, 120 bp, Homo sapiens
  misc_feature: 1311 for SV(W|O) and mtDNA
ctcaaacctaagaaatatgtctgataaaagagttactttgatagagtaaataataggagcttaaacccccttatttctaggactatgagaatcgaacccatccctgagaatccaaaattc

SEQ ID NO: 60929 - DNA, 120 bp, Homo sapiens
  misc_feature: 1311 for SV(W|O) and mtDNA
cttcaatcgggagtactactcgattgtcaacgtcaaggagtcgcaggtcgcctggttctaggaataatgggggaagtatgtaggagttgaagattagtccgccgtagtcggtgtactcgt

SEQ ID NO: 60930 - DNA, 120 bp, Homo sapiens
  misc_feature: 1311 for SV(W|O) and mtDNA
atactaacatctcagacgctcaggaaatagaaaccgtctgaactatcctgcccgccatcatcctagtcctcatcgccctcccatccctacgcatcctttacataacagacgaggtcaacg

SEQ ID NO: 60931 - DNA, 120 bp, Homo sapiens
  misc_feature: 1311 for SV(W|O) and mtDNA
caatatatacaccaacaaacaatgttcaaccagtaactactactaatcaacgcccataatcatacaaagcccccgcaccaataggatcctcccgaatcaaccctgacccctctccttcat

SEQ ID NO: 60932 - DNA, 120 bp, Homo sapiens
  misc_feature: 1311 for SV(W|O) and mtDNA
attctcatagtcctagaaataagggggtttaagctcctattatttactctatcaaagtaactcttttatcagacatatttcttaggtttgagggggaatgctggagattgtaatgggtat

SEQ ID NO: 60933 - DNA, 120 bp, Homo sapiens
  misc_feature: 1311 for SV(W|O) and mtDNA
actctacctctctatactaatctccctacaaatctccttaattataacattcacagccacagaactaatcatattttatatcttcttcgaaaccacacttatccccaccttggctatcat

SEQ ID NO: 60934 - DNA, 120 bp, Homo sapiens
  misc_feature: 1310 for SV(W|O) and mtDNA
tttgttatgatgtctgtgtggaaagcggctgtgcagacattcaattgttattattatgtcctacaagcattaattaattaacacactttagtaagtatgttcgcctgtaatattgaacgt

SEQ ID NO: 60935 - DNA, 120 bp, Homo sapiens
  misc_feature: 1310 for SV(W|O) and mtDNA
tttctccataaaattcttcttagtagctattaccttcttattatttgatctagaaattgccctccttttacccctaccatgagccctacaaacaactaacctgccactaatagttatgtc

SEQ ID NO: 60936 - DNA, 120 bp, Homo sapiens
  misc_feature: 1310 for SV(W|O) and mtDNA
tttatcctacactccaactcatgagacccacaacaaatagcccttctaaacgctaatccaagcctcaccccactactaggcctcctcctagcagcagcaggcaaatcagcccaattaggt

SEQ ID NO: 60937 - DNA, 120 bp, Homo sapiens
  misc_feature: 1310 for SV(W|O) and mtDNA
tttagaagggctatttgttgtgggtctcatgagttggagtgtaggataaatcatgctaaggcgaggatgaaaccgatatcgccgatacggttgtataggattgcttgaatggctgctgtg

SEQ ID NO: 60938 - DNA, 120 bp, Homo sapiens
  misc_feature: 1310 for SV(W|O) and mtDNA
ttatgaattcgaacagcatacccccgattccgctacgaccaactcatacacctcctatgaaaaaacttcctaccactcaccctagcattacttatatgatatgtctccatacccattaca

SEQ ID NO: 60939 - DNA, 120 bp, Homo sapiens
  misc_feature: 1310 for SV(W|O) and mtDNA
tgttatgatgtctgtgtggaaagcggctgtgcagacattcaattgttattattatgtcctacaagcattaattaattaacacactttagtaagtatgttcgcctgtaatattgaacgtag

SEQ ID NO: 60940 - DNA, 120 bp, Homo sapiens
  misc_feature: 1310 for SV(W|O) and mtDNA
tgatccatcgtgatgtcttatttaaggggaacgtgtgggctatttaggctttatgaccctgaagtaggaaccagatgtcggatacagttcactttagctacccccaagtgttatgggccc

SEQ ID NO: 60941 - DNA, 120 bp, Homo sapiens
  misc_feature: 1310 for SV(W|O) and mtDNA
caaatctctccctcactaaacgtaagccttctcctcactctctcaatcttatccatcatagcaggcagttgaggtggattaaaccaaacccagctacgcaaaatcttagcatactcctca

SEQ ID NO: 60942 - DNA, 120 bp, Homo sapiens
  misc_feature: 1310 for SV(W|O) and mtDNA
aatcccaaacatataactgaactcctcatacccaattggaccaatctatcaccctatagaagaactaatgttagtataagtaacatgaaaacattctcctccgcataagcctgcgtcaga

SEQ ID NO: 60943 - DNA, 120 bp, Homo sapiens
  misc_feature: 1310 for SV(W|O) and mtDNA
ggggctattcctagttttattgctatagccattatgattattaatgatgagtactgattggtagtattggttatggttcattgtccggagagtatattgttgaagaggatagctattaga

SEQ ID NO: 60944 - DNA, 120 bp, Homo sapiens
  misc_feature: 1310 for SV(W|O) and mtDNA
tatggctgaggggagtcaggggtggagacctaattgggctgatttgcctgctgctgctaggaggaggcctagtagtggggtgaggcttggattagcgtttagaagggctatttgttgtgg

SEQ ID NO: 60945 - DNA, 120 bp, Homo sapiens
  misc_feature: 1310 for SV(W|O) and mtDNA
atggatgcggttgcttgcgtgaggaaatacttgatggcagcttctgtggaacgagggtttatttttttggttagaactggaataaaagctagcatgtttatttctaggcctactcaggta

SEQ ID NO: 60946 - DNA, 120 bp, Homo sapiens
  misc_feature: 1310 for SV(W|O) and mtDNA
caacatattttgtcaccaagaccctacttctaacctccctgttcttatgaattcgaacagcatacccccgattccgctacgaccaactcatacacctcctatgaaaaaacttcctaccac

SEQ ID NO: 60947 - DNA, 120 bp, Homo sapiens
  misc_feature: 1310 for SV(W|O) and mtDNA
gaattgaacctctgactgtaaagttttaagttttatgcgattaccgggctctgccatcttaacaaaccctgttcttgggtgggtgtgggtataatactaagttgagatgatatcatttac

SEQ ID NO: 60948 - DNA, 120 bp, Homo sapiens
  misc_feature: 1310 for SV(W|O) and mtDNA
accccttacgagtgcggcttcgaccctatatcccccgcccgcgtccctttctccataaaattcttcttagtagctattaccttcttattatttgatctagaaattgccctccttttaccc

SEQ ID NO: 60949 - DNA, 120 bp, Homo sapiens
  misc_feature: 1310 for SV(W|O) and mtDNA
cgaaaaattctaggctatatacaactacgcaaaggccccaacgttgtaggcccctacgggctactacaacccttcgctgacgccataaaactcttcaccaaagagcccctaaaacccgcc

SEQ ID NO: 60950 - DNA, 120 bp, Homo sapiens
  misc_feature: 1310 for SV(W|O) and mtDNA
gatagacctgtgatccatcgtgatgtcttatttaaggggaacgtgtgggctatttaggctttatgaccctgaagtaggaaccagatgtcggatacagttcactttagctacccccaagtg

SEQ ID NO: 60951 - DNA, 120 bp, Homo sapiens
  misc_feature: 1310 for SV(W|O) and mtDNA
cattgtttgttggtgtatatattgtaattgagattgctcgggggaataggttatgtgattaggagtagggttaggatgagtgggaagaagaaagagaggaagtaaagtttaattatgcct

SEQ ID NO: 60952 - DNA, 120 bp, Homo sapiens
  misc_feature: 1310 for SV(W|O) and mtDNA
cactctactctcagtttactgctaaatccaccttcgacccttaagtttcataagggctatcgtagttttctggggtagaaaatgtagcccatttcttgccacctcatgggctacaccttg

SEQ ID NO: 60953 - DNA, 120 bp, Homo sapiens
  misc_feature: 1310 for SV(W|O) and mtDNA
atgatggcaggagtaatcagaggtgttcttgtgttgtgataagggtggagaggttaaaggagccacttattagtaatgttgatagtagaatgatggctagggtgacttcatatgagattg

SEQ ID NO: 60954 - DNA, 120 bp, Homo sapiens
  misc_feature: 1310 for SV(W|O) and mtDNA
attgtttgttggtgtatatattgtaattgagattgctcgggggaataggttatgtgattaggagtagggttaggatgagtgggaagaagaaagagaggaagtaaagtttaattatgcctt

SEQ ID NO: 60955 - DNA, 120 bp, Homo sapiens
  misc_feature: 1310 for SV(W|O) and mtDNA
agtccgaggaggttagttgtggcaataaaaatgattaaggatactagtataagagatcaggttcgtcctttagtgttgtgtatggttatcatttgttttgaggttagtttgattagtcat

SEQ ID NO: 60956 - DNA, 120 bp, Homo sapiens
  misc_feature: 1310 for SV(W|O) and mtDNA
aaaattcttcttagtagctattaccttcttattatttgatctagaaattgccctccttttacccctaccatgagccctacaaacaactaacctgccactaatagttatgtcatccctctt

SEQ ID NO: 60957 - DNA, 120 bp, Homo sapiens
  misc_feature: 1309 for SV(W|O) and mtDNA
ttgttatgatgtctgtgtggaaagcggctgtgcagacattcaattgttattattatgtcctacaagcattaattaattaacacactttagtaagtatgttcgcctgtaatattgaacgta

SEQ ID NO: 60958 - DNA, 120 bp, Homo sapiens
  misc_feature: 1309 for SV(W|O) and mtDNA
ttcaagcaatcctatacaaccgtatcggcgatatcggtttcatcctcgccttagcatgatttatcctacactccaactcatgagacccacaacaaatagcccttctaaacgctaatccaa

SEQ ID NO: 60959 - DNA, 120 bp, Homo sapiens
  misc_feature: 1309 for SV(W|O) and mtDNA
ttctcatagtcctagaaataagggggtttaagctcctattatttactctatcaaagtaactcttttatcagacatatttcttaggtttgagggggaatgctggagattgtaatgggtatg

SEQ ID NO: 60960 - DNA, 120 bp, Homo sapiens
  misc_feature: 1309 for SV(W|O) and mtDNA
ggagccggagcaccctatgtcgcagtatctgtctttgattcctgcctcatcccattatttatcgcacctacgttcaatattacaggcgaacatacttactaaagtgtgttaattaattaa

SEQ ID NO: 60961 - DNA, 120 bp, Homo sapiens
  misc_feature: 1309 for SV(W|O) and mtDNA
tggaagtgaaatcacatggctaggccggaggtcattaggagggctgagagggcccctgttaggggtcatgggctgggttttactatatgataggcatgtgattggtgggtcattatgtgt

SEQ ID NO: 60962 - DNA, 120 bp, Homo sapiens
  misc_feature: 1309 for SV(W|O) and mtDNA
tatgttaaagccactttcgtagtctattttgtgtcaactggagttttttacaactcaggtgagttttagctttattggggagggggtgatctaaaacactctttacgccggcttctattg

SEQ ID NO: 60963 - DNA, 120 bp, Homo sapiens
  misc_feature: 1309 for SV(W|O) and mtDNA
cattgaactaggtctgtcccaatgtatgggatggcggatagtaagtttgtaattactgtggcccctcagaatgatatttggcctcacgggaggacatagcctatgaaggctgttgctata

SEQ ID NO: 60964 - DNA, 120 bp, Homo sapiens
  misc_feature: 1309 for SV(W|O) and mtDNA
gtttagtagggtagggttattttcgttaatgttagtaagggtggggaagcgaggttgacctgttagggtgagaagaattattcgagtgctataggcgcttgtcagggaggtagcgatgag

SEQ ID NO: 60965 - DNA, 120 bp, Homo sapiens
  misc_feature: 1309 for SV(W|O) and mtDNA
gttagtttgattagtcattgttgggtggtgattagtcggttgttgatgagatatttggaggtggggatcaatagagggggaaatagaatgatcagtactgcggcgggtaggcctaggatt

SEQ ID NO: 60966 - DNA, 120 bp, Homo sapiens
  misc_feature: 1309 for SV(W|O) and mtDNA
ctctccctcactaaacgtaagccttctcctcactctctcaatcttatccatcatagcaggcagttgaggtggattaaaccaaacccagctacgcaaaatcttagcatactcctcaattac

SEQ ID NO: 60967 - DNA, 120 bp, Homo sapiens
  misc_feature: 1309 for SV(W|O) and mtDNA
gaacgaaaaattctaggctatatacaactacgcaaaggccccaacgttgtaggcccctacgggctactacaacccttcgctgacgccataaaactcttcaccaaagagcccctaaaaccc

SEQ ID NO: 60968 - DNA, 120 bp, Homo sapiens
  misc_feature: 1309 for SV(W|O) and mtDNA
gggttaggatgagtgggaagaagaaagagaggaagtaaagtttaattatgcctttttgggttgaggtgatgatggaggtggagatttggtgctgtgaaattgttttaggtaatagctttt

SEQ ID NO: 60969 - DNA, 120 bp, Homo sapiens
  misc_feature: 1309 for SV(W|O) and mtDNA
aaatagcccttctaaacgctaatccaagcctcaccccactactaggcctcctcctagcagcagcaggcaaatcagcccaattaggtctccacccctgactcccctcagccatagaaggcc

SEQ ID NO: 60970 - DNA, 120 bp, Homo sapiens
  misc_feature: 1309 for SV(W|O) and mtDNA
acgaaaaattctaggctatatacaactacgcaaaggccccaacgttgtaggcccctacgggctactacaacccttcgctgacgccataaaactcttcaccaaagagcccctaaaacccgc

SEQ ID NO: 60971 - DNA, 120 bp, Homo sapiens
  misc_feature: 1309 for SV(W|O) and mtDNA
cttgggtgggtgtgggtataatactaagttgagatgatatcatttacgggggaaggcgctttgtgaagtaggccttatttctcttgtcctttcgtacagggaggaatttgaagtagatag

SEQ ID NO: 60972 - DNA, 120 bp, Homo sapiens
  misc_feature: 1309 for SV(W|O) and mtDNA
ctatggctgaggggagtcaggggtggagacctaattgggctgatttgcctgctgctgctaggaggaggcctagtagtggggtgaggcttggattagcgtttagaagggctatttgttgtg

SEQ ID NO: 60973 - DNA, 120 bp, Homo sapiens
  misc_feature: 1309 for SV(W|O) and mtDNA
ccggctgccaggcgtttaatggggtttagtagggtagggttattttcgttaatgttagtaagggtggggaagcgaggttgacctgttagggtgagaagaattattcgagtgctataggcg

SEQ ID NO: 60974 - DNA, 120 bp, Homo sapiens
  misc_feature: 1309 for SV(W|O) and mtDNA
cgagtgctataggcgcttgtcagggaggtagcgatgagagtaatagatagggctcaggcgtttgtgtatgatatgtttgcggtttcgatgatgtggtctttggagtagaaacctgtgagg

SEQ ID NO: 60975 - DNA, 120 bp, Homo sapiens
  misc_feature: 1309 for SV(W|O) and mtDNA
ccagggtgggagtagttccctgctaagggagggtagactgttcaacctgttcctgctccggcctccactatagcagatgcgagcaggagtaggagagagggaggtaagagtcagaagctt

SEQ ID NO: 60976 - DNA, 120 bp, Homo sapiens
  misc_feature: 1309 for SV(W|O) and mtDNA
cataaaattcttcttagtagctattaccttcttattatttgatctagaaattgccctccttttacccctaccatgagccctacaaacaactaacctgccactaatagttatgtcatccct

SEQ ID NO: 60977 - DNA, 120 bp, Homo sapiens
  misc_feature: 1309 for SV(W|O) and mtDNA
aatctctccctcactaaacgtaagccttctcctcactctctcaatcttatccatcatagcaggcagttgaggtggattaaaccaaacccagctacgcaaaatcttagcatactcctcaat

SEQ ID NO: 60978 - DNA, 120 bp, Homo sapiens
  misc_feature: 1308 for SV(W|O) and mtDNA
tttgcgtagctgggtttggtttaatccacctcaactgcctgctatgatggataagattgagagagtgaggagaaggcttacgtttagtgagggagagatttggtatatgattgagatggg

SEQ ID NO: 60979 - DNA, 120 bp, Homo sapiens
  misc_feature: 1308 for SV(W|O) and mtDNA
ttctgactcttacctccctctctcctactcctgctcgcatctgctatagtggaggccggagcaggaacaggttgaacagtctaccctcccttagcagggaactactcccaccctggagcc

SEQ ID NO: 60980 - DNA, 120 bp, Homo sapiens
  misc_feature: 1308 for SV(W|O) and mtDNA
ctcagataggggtcccttgaccaccatcctccgtgaaatcaatatcccgcacaagagtgctactctcctcgctccgggcccataacacttgggggtagctaaagtgaactgtatccgaca

SEQ ID NO: 60981 - DNA, 120 bp, Homo sapiens
  misc_feature: 1308 for SV(W|O) and mtDNA
aaaactagcccccatctcaatcatataccaaatctctccctcactaaacgtaagccttctcctcactctctcaatcttatccatcatagcaggcagttgaggtggattaaaccaaaccca

SEQ ID NO: 60982 - DNA, 120 bp, Homo sapiens
  misc_feature: 1308 for SV(W|O) and mtDNA
tgctatgatggataagattgagagagtgaggagaaggcttacgtttagtgagggagagatttggtatatgattgagatgggggctagtttttgtcatgtgagaagaagcaggccggatgt

SEQ ID NO: 60983 - DNA, 120 bp, Homo sapiens
  misc_feature: 1308 for SV(W|O) and mtDNA
acccaaggcacccctctgacatccggcctgcttcttctcacatgacaaaaactagcccccatctcaatcatataccaaatctctccctcactaaacgtaagccttctcctcactctctca

SEQ ID NO: 60984 - DNA, 120 bp, Homo sapiens
  misc_feature: 1308 for SV(W|O) and mtDNA
tcaacacccactacctaaaaaatcccaaacatataactgaactcctcatacccaattggaccaatctatcaccctatagaagaactaatgttagtataagtaacatgaaaacattctcct

SEQ ID NO: 60985 - DNA, 120 bp, Homo sapiens
  misc_feature: 1308 for SV(W|O) and mtDNA
gattctcatagtcctagaaataagggggtttaagctcctattatttactctatcaaagtaactcttttatcagacatatttcttaggtttgagggggaatgctggagattgtaatgggta

SEQ ID NO: 60986 - DNA, 120 bp, Homo sapiens
  misc_feature: 1308 for SV(W|O) and mtDNA
taaacaggcggggtaagatttgccgagttccttttactttttttaacctttccttatgagcatgcctgtgttgggttgacagtgagggtaataatgacttgttggttgattgtagatatt

SEQ ID NO: 60987 - DNA, 120 bp, Homo sapiens
  misc_feature: 1308 for SV(W|O) and mtDNA
acattgtttgttggtgtatatattgtaattgagattgctcgggggaataggttatgtgattaggagtagggttaggatgagtgggaagaagaaagagaggaagtaaagtttaattatgcc

SEQ ID NO: 60988 - DNA, 120 bp, Homo sapiens
  misc_feature: 1308 for SV(W|O) and mtDNA
agctaaataagctatcgggcccataccccgaaaatgttggttatacccttcccgtactaattaatcccctggcccaacccgtcatctactctaccatctttgcaggcacactcatcacag

SEQ ID NO: 60989 - DNA, 120 bp, Homo sapiens
  misc_feature: 1308 for SV(W|O) and mtDNA
ctgagtcccagaggttacccaaggcacccctctgacatccggcctgcttcttctcacatgacaaaaactagcccccatctcaatcatataccaaatctctccctcactaaacgtaagcct

SEQ ID NO: 60990 - DNA, 120 bp, Homo sapiens
  misc_feature: 1308 for SV(W|O) and mtDNA
atgtcctcccgtgaggccaaatatcattctgaggggccacagtaattacaaacttactatccgccatcccatacattgggacagacctagttcaatgaatctgaggaggctactcagtag

SEQ ID NO: 60991 - DNA, 120 bp, Homo sapiens
  misc_feature: 1308 for SV(W|O) and mtDNA
ccaaggcacccctctgacatccggcctgcttcttctcacatgacaaaaactagcccccatctcaatcatataccaaatctctccctcactaaacgtaagccttctcctcactctctcaat

SEQ ID NO: 60992 - DNA, 120 bp, Homo sapiens
  misc_feature: 1308 for SV(W|O) and mtDNA
cattgaccgtagtatacccccggtcgtgtagcggtgaaagtggtttggtttagacgtccgggaattgcatctgtttttaagcctaatgtggggacagctcatgagtgcaagacgtcttgt

SEQ ID NO: 60993 - DNA, 120 bp, Homo sapiens
  misc_feature: 1308 for SV(W|O) and mtDNA
aaattctaggctatatacaactacgcaaaggccccaacgttgtaggcccctacgggctactacaacccttcgctgacgccataaaactcttcaccaaagagcccctaaaacccgccacat

SEQ ID NO: 60994 - DNA, 120 bp, Homo sapiens
  misc_feature: 1308 for SV(W|O) and mtDNA
acatgcctatcatatagtaaaacccagcccatgacccctaacaggggccctctcagccctcctaatgacctccggcctagccatgtgatttcacttccactccataacgctcctcatact

SEQ ID NO: 60995 - DNA, 120 bp, Homo sapiens
  misc_feature: 1307 for SV(W|O) and mtDNA
ttgaccaaccctggggttagtatagcttagttaaactttcgtttattgctaaaggttaatcactgctgtttcccgtgggggtgtggctaggctaagcgttttgagctgcattgctgcgtg

SEQ ID NO: 60996 - DNA, 120 bp, Homo sapiens
  misc_feature: 1307 for SV(W|O) and mtDNA
tagcccttctaaacgctaatccaagcctcaccccactactaggcctcctcctagcagcagcaggcaaatcagcccaattaggtctccacccctgactcccctcagccatagaaggcccca

SEQ ID NO: 60997 - DNA, 120 bp, Homo sapiens
  misc_feature: 1307 for SV(W|O) and mtDNA
gagtccgaggaggttagttgtggcaataaaaatgattaaggatactagtataagagatcaggttcgtcctttagtgttgtgtatggttatcatttgttttgaggttagtttgattagtca

SEQ ID NO: 60998 - DNA, 120 bp, Homo sapiens
  misc_feature: 1307 for SV(W|O) and mtDNA
agtcctagctgctggcatcactatactactaacagaccgcaacctcaacaccaccttcttcgaccccgccggaggaggagaccccattctataccaacacctattctgatttttcggtca

SEQ ID NO: 60999 - DNA, 120 bp, Homo sapiens
  misc_feature: 1307 for SV(W|O) and mtDNA
gcggtgaaagtggtttggtttagacgtccgggaattgcatctgtttttaagcctaatgtggggacagctcatgagtgcaagacgtcttgtgatgtaattattatacgaatgggggcttca

SEQ ID NO: 61000 - DNA, 120 bp, Homo sapiens
  misc_feature: 1307 for SV(W|O) and mtDNA
gtaggaaccagatgtcggatacagttcactttagctacccccaagtgttatgggcccggagcgaggagagtagcactcttgtgcgggatattgatttcacggaggatggtggtcaaggga

SEQ ID NO: 61001 - DNA, 120 bp, Homo sapiens
  misc_feature: 1307 for SV(W|O) and mtDNA
tcagctaaataagctatcgggcccataccccgaaaatgttggttatacccttcccgtactaattaatcccctggcccaacccgtcatctactctaccatctttgcaggcacactcatcac

SEQ ID NO: 61002 - DNA, 120 bp, Homo sapiens
  misc_feature: 1307 for SV(W|O) and mtDNA
ctggttgaacattgtttgttggtgtatatattgtaattgagattgctcgggggaataggttatgtgattaggagtagggttaggatgagtgggaagaagaaagagaggaagtaaagttta

SEQ ID NO: 61003 - DNA, 120 bp, Homo sapiens
  misc_feature: 1307 for SV(W|O) and mtDNA
gtgggtataatactaagttgagatgatatcatttacgggggaaggcgctttgtgaagtaggccttatttctcttgtcctttcgtacagggaggaatttgaagtagatagaaaccgacctg

SEQ ID NO: 61004 - DNA, 120 bp, Homo sapiens
  misc_feature: 1307 for SV(W|O) and mtDNA
cccgatatggcgtttccccgcataaacaacataagcttctgactcttacctccctctctcctactcctgctcgcatctgctatagtggaggccggagcaggaacaggttgaacagtctac

SEQ ID NO: 61005 - DNA, 120 bp, Homo sapiens
  misc_feature: 1307 for SV(W|O) and mtDNA
gctatgatggataagattgagagagtgaggagaaggcttacgtttagtgagggagagatttggtatatgattgagatgggggctagtttttgtcatgtgagaagaagcaggccggatgtc

SEQ ID NO: 61006 - DNA, 120 bp, Homo sapiens
  misc_feature: 1307 for SV(W|O) and mtDNA
aacattgtttgttggtgtatatattgtaattgagattgctcgggggaataggttatgtgattaggagtagggttaggatgagtgggaagaagaaagagaggaagtaaagtttaattatgc

SEQ ID NO: 61007 - DNA, 120 bp, Homo sapiens
  misc_feature: 1307 for SV(W|O) and mtDNA
gatggataagattgagagagtgaggagaaggcttacgtttagtgagggagagatttggtatatgattgagatgggggctagtttttgtcatgtgagaagaagcaggccggatgtcagagg

SEQ ID NO: 61008 - DNA, 120 bp, Homo sapiens
  misc_feature: 1307 for SV(W|O) and mtDNA
gaggaggttagttgtggcaataaaaatgattaaggatactagtataagagatcaggttcgtcctttagtgttgtgtatggttatcatttgttttgaggttagtttgattagtcattgttg

SEQ ID NO: 61009 - DNA, 120 bp, Homo sapiens
  misc_feature: 1307 for SV(W|O) and mtDNA
gaacctctgactgtaaagttttaagttttatgcgattaccgggctctgccatcttaacaaaccctgttcttgggtgggtgtgggtataatactaagttgagatgatatcatttacggggg

SEQ ID NO: 61010 - DNA, 120 bp, Homo sapiens
  misc_feature: 1307 for SV(W|O) and mtDNA
aaggagggtgatggtggctatgatggtggggatgatgaggctattgttttttgtgaattcttcgataatggcccatttgggcaaaaagccggttagcgggggcaggcctcctagggagag

SEQ ID NO: 61011 - DNA, 120 bp, Homo sapiens
  misc_feature: 1307 for SV(W|O) and mtDNA
aattatggtgggccatacggtagtatttagttggggcatttcactgtaaagaggtgttggttctcttaatctttaacttaaaaggttaatgctaagttagctttacagtgggctctagag

SEQ ID NO: 61012 - DNA, 120 bp, Homo sapiens
  misc_feature: 1307 for SV(W|O) and mtDNA
atttctcttgtcctttcgtacagggaggaatttgaagtagatagaaaccgacctggattactccggtctgaactcagatcacgtaggactttaatcgttgaacaaacgaacctttaatag

SEQ ID NO: 61013 - DNA, 120 bp, Homo sapiens
  misc_feature: 1307 for SV(W|O) and mtDNA
cgaggaggttagttgtggcaataaaaatgattaaggatactagtataagagatcaggttcgtcctttagtgttgtgtatggttatcatttgttttgaggttagtttgattagtcattgtt

SEQ ID NO: 61014 - DNA, 120 bp, Homo sapiens
  misc_feature: 1307 for SV(W|O) and mtDNA
agtaggaaccagatgtcggatacagttcactttagctacccccaagtgttatgggcccggagcgaggagagtagcactcttgtgcgggatattgatttcacggaggatggtggtcaaggg

SEQ ID NO: 61015 - DNA, 120 bp, Homo sapiens
  misc_feature: 1307 for SV(W|O) and mtDNA
atggataagattgagagagtgaggagaaggcttacgtttagtgagggagagatttggtatatgattgagatgggggctagtttttgtcatgtgagaagaagcaggccggatgtcagaggg

SEQ ID NO: 61016 - DNA, 120 bp, Homo sapiens
  misc_feature: 1307 for SV(W|O) and mtDNA
acaggcggggtaagatttgccgagttccttttactttttttaacctttccttatgagcatgcctgtgttgggttgacagtgagggtaataatgacttgttggttgattgtagatattggg

SEQ ID NO: 61017 - DNA, 120 bp, Homo sapiens
  misc_feature: 1307 for SV(W|O) and mtDNA
aggcaggagtccgaggaggttagttgtggcaataaaaatgattaaggatactagtataagagatcaggttcgtcctttagtgttgtgtatggttatcatttgttttgaggttagtttgat

SEQ ID NO: 61018 - DNA, 120 bp, Homo sapiens
  misc_feature: 1306 for SV(W|O) and mtDNA
cccaaggcacccctctgacatccggcctgcttcttctcacatgacaaaaactagcccccatctcaatcatataccaaatctctccctcactaaacgtaagccttctcctcactctctcaa

SEQ ID NO: 61019 - DNA, 120 bp, Homo sapiens
  misc_feature: 1306 for SV(W|O) and mtDNA
ttacaatatatacaccaacaaacaatgttcaaccagtaactactactaatcaacgcccataatcatacaaagcccccgcaccaataggatcctcccgaatcaaccctgacccctctcctt

SEQ ID NO: 61020 - DNA, 120 bp, Homo sapiens
  misc_feature: 1306 for SV(W|O) and mtDNA
tgtagcggtgaaagtggtttggtttagacgtccgggaattgcatctgtttttaagcctaatgtggggacagctcatgagtgcaagacgtcttgtgatgtaattattatacgaatgggggc

SEQ ID NO: 61021 - DNA, 120 bp, Homo sapiens
  misc_feature: 1306 for SV(W|O) and mtDNA
tggtggtcaagggacccctatctgaggggggtcatccatggggacgagaagggatttgactgtaatgtgctatgtacggtaaatggctttatgtactatgtactgttaagggtgggtagg

SEQ ID NO: 61022 - DNA, 120 bp, Homo sapiens
  misc_feature: 1306 for SV(W|O) and mtDNA
tggtaaactttaatagtgtaggaagctgaataatttatgaaggagaggggtcagggttgattcgggaggatcctattggtgcgggggctttgtatgattatgggcgttgattagtagtag

SEQ ID NO: 61023 - DNA, 120 bp, Homo sapiens
  misc_feature: 1306 for SV(W|O) and mtDNA
tggataagattgagagagtgaggagaaggcttacgtttagtgagggagagatttggtatatgattgagatgggggctagtttttgtcatgtgagaagaagcaggccggatgtcagagggg

SEQ ID NO: 61024 - DNA, 120 bp, Homo sapiens
  misc_feature: 1306 for SV(W|O) and mtDNA
tgaacctctgactgtaaagttttaagttttatgcgattaccgggctctgccatcttaacaaaccctgttcttgggtgggtgtgggtataatactaagttgagatgatatcatttacgggg

SEQ ID NO: 61025 - DNA, 120 bp, Homo sapiens
  misc_feature: 1306 for SV(W|O) and mtDNA
tctgactcttacctccctctctcctactcctgctcgcatctgctatagtggaggccggagcaggaacaggttgaacagtctaccctcccttagcagggaactactcccaccctggagcct

SEQ ID NO: 61026 - DNA, 120 bp, Homo sapiens
  misc_feature: 1306 for SV(W|O) and mtDNA
taatctgacgcaggcttatgcggaggagaatgttttcatgttacttatactaacattagttcttctatagggtgatagattggtccaattgggtatgaggagttcagttatatgtttggg

SEQ ID NO: 61027 - DNA, 120 bp, Homo sapiens
  misc_feature: 1306 for SV(W|O) and mtDNA
ggtaaactttaatagtgtaggaagctgaataatttatgaaggagaggggtcagggttgattcgggaggatcctattggtgcgggggctttgtatgattatgggcgttgattagtagtagt

SEQ ID NO: 61028 - DNA, 120 bp, Homo sapiens
  misc_feature: 1306 for SV(W|O) and mtDNA
gctgattgaagagtatgcaatgagcgattttaggtctgtttgtcgtaggcagatggagcttgttataattatgcctcatagggatagtacaaggaaggggtaggctatgtgttttgtcag

SEQ ID NO: 61029 - DNA, 120 bp, Homo sapiens
  misc_feature: 1306 for SV(W|O) and mtDNA
gcactctactctcagtttactgctaaatccaccttcgacccttaagtttcataagggctatcgtagttttctggggtagaaaatgtagcccatttcttgccacctcatgggctacacctt

SEQ ID NO: 61030 - DNA, 120 bp, Homo sapiens
  misc_feature: 1306 for SV(W|O) and mtDNA
gactcttacctccctctctcctactcctgctcgcatctgctatagtggaggccggagcaggaacaggttgaacagtctaccctcccttagcagggaactactcccaccctggagcctccg

SEQ ID NO: 61031 - DNA, 120 bp, Homo sapiens
  misc_feature: 1306 for SV(W|O) and mtDNA
gaccgaaaaatcagaataggtgttggtatagaatggggtctcctcctccggcggggtcgaagaaggtggtgttgaggttgcggtctgttagtagtatagtgatgccagcagctaggactg

SEQ ID NO: 61032 - DNA, 120 bp, Homo sapiens
  misc_feature: 1306 for SV(W|O) and mtDNA
ctaggaagattgtagtggtgagggtgtttattataataatgtttgtgtattcggctatgaagaatagggcgaaggggcctgcggcgtattcgatgttgaagcctgagactagttcggact

SEQ ID NO: 61033 - DNA, 120 bp, Homo sapiens
  misc_feature: 1306 for SV(W|O) and mtDNA
agagggggtgctatagggtaaatacgggccctatttcaaagatttttaggggaattaattctaggacgatgggcatgaaactgtggtttgctccacagatttcagagcattgaccgtagt

SEQ ID NO: 61034 - DNA, 120 bp, Homo sapiens
  misc_feature: 1305 for SV(W|O) and mtDNA
tgttcttatgaattcgaacagcatacccccgattccgctacgaccaactcatacacctcctatgaaaaaacttcctaccactcaccctagcattacttatatgatatgtctccataccca

SEQ ID NO: 61035 - DNA, 120 bp, Homo sapiens
  misc_feature: 1305 for SV(W|O) and mtDNA
tgtaattactgtggcccctcagaatgatatttggcctcacgggaggacatagcctatgaaggctgttgctatagttgcaagcaggaggataatgccgatgtttcaggtttctgagtagag

SEQ ID NO: 61036 - DNA, 120 bp, Homo sapiens
  misc_feature: 1305 for SV(W|O) and mtDNA
aaatgcatggagagctcccgtgagtggttaatagggtgatagacctgtgatccatcgtgatgtcttatttaaggggaacgtgtgggctatttaggctttatgaccctgaagtaggaacca

SEQ ID NO: 61037 - DNA, 120 bp, Homo sapiens
  misc_feature: 1305 for SV(W|O) and mtDNA
tgagtcccagaggttacccaaggcacccctctgacatccggcctgcttcttctcacatgacaaaaactagcccccatctcaatcatataccaaatctctccctcactaaacgtaagcctt

SEQ ID NO: 61038 - DNA, 120 bp, Homo sapiens
  misc_feature: 1305 for SV(W|O) and mtDNA
agaataggtgttggtatagaatggggtctcctcctccggcggggtcgaagaaggtggtgttgaggttgcggtctgttagtagtatagtgatgccagcagctaggactgggagagatagga

SEQ ID NO: 61039 - DNA, 120 bp, Homo sapiens
  misc_feature: 1305 for SV(W|O) and mtDNA
tagtttgattagtcattgttgggtggtgattagtcggttgttgatgagatatttggaggtggggatcaatagagggggaaatagaatgatcagtactgcggcgggtaggcctaggattgt

SEQ ID NO: 61040 - DNA, 120 bp, Homo sapiens
  misc_feature: 1305 for SV(W|O) and mtDNA
taggatgatggcgggcaggatagttcagacggtttctatttcctgagcgtctgagatgttagtattagttagttttgttgtgagtgttaggaaaagggcatacaggactaggaagcagat

SEQ ID NO: 61041 - DNA, 120 bp, Homo sapiens
  misc_feature: 1305 for SV(W|O) and mtDNA
tagccctcgtagtaacagccattctcatccaaaccccctgaagcttcaccggcgcagtcattctcataatcgcccacgggcttacatcctcattactattctgcctagcaaactcaaact

SEQ ID NO: 61042 - DNA, 120 bp, Homo sapiens
  misc_feature: 1305 for SV(W|O) and mtDNA
cagggtgggagtagttccctgctaagggagggtagactgttcaacctgttcctgctccggcctccactatagcagatgcgagcaggagtaggagagagggaggtaagagtcagaagctta

SEQ ID NO: 61043 - DNA, 120 bp, Homo sapiens
  misc_feature: 1305 for SV(W|O) and mtDNA
atagccctcgtagtaacagccattctcatccaaaccccctgaagcttcaccggcgcagtcattctcataatcgcccacgggcttacatcctcattactattctgcctagcaaactcaaac

SEQ ID NO: 61044 - DNA, 120 bp, Homo sapiens
  misc_feature: 1305 for SV(W|O) and mtDNA
cctaggaagattgtagtggtgagggtgtttattataataatgtttgtgtattcggctatgaagaatagggcgaaggggcctgcggcgtattcgatgttgaagcctgagactagttcggac

SEQ ID NO: 61045 - DNA, 120 bp, Homo sapiens
  misc_feature: 1305 for SV(W|O) and mtDNA
gtagggctcatggtaggggtaaaaggagggcaatttctagatcaaataataagaaggtaatagctactaagaagaattttatggagaaagggacgcgggcgggggatatagggtcgaagc

SEQ ID NO: 61046 - DNA, 120 bp, Homo sapiens
  misc_feature: 1305 for SV(W|O) and mtDNA
caaaaactagcccccatctcaatcatataccaaatctctccctcactaaacgtaagccttctcctcactctctcaatcttatccatcatagcaggcagttgaggtggattaaaccaaacc

SEQ ID NO: 61047 - DNA, 120 bp, Homo sapiens
  misc_feature: 1305 for SV(W|O) and mtDNA
ctgttcttatgaattcgaacagcatacccccgattccgctacgaccaactcatacacctcctatgaaaaaacttcctaccactcaccctagcattacttatatgatatgtctccataccc

SEQ ID NO: 61048 - DNA, 120 bp, Homo sapiens
  misc_feature: 1305 for SV(W|O) and mtDNA
gggagggtagactgttcaacctgttcctgctccggcctccactatagcagatgcgagcaggagtaggagagagggaggtaagagtcagaagcttatgttgtttatgcggggaaacgccat

SEQ ID NO: 61049 - DNA, 120 bp, Homo sapiens
  misc_feature: 1305 for SV(W|O) and mtDNA
gctaaataagctatcgggcccataccccgaaaatgttggttatacccttcccgtactaattaatcccctggcccaacccgtcatctactctaccatctttgcaggcacactcatcacagc

SEQ ID NO: 61050 - DNA, 120 bp, Homo sapiens
  misc_feature: 1305 for SV(W|O) and mtDNA
gcgtccctttctccataaaattcttcttagtagctattaccttcttattatttgatctagaaattgccctccttttacccctaccatgagccctacaaacaactaacctgccactaatag

SEQ ID NO: 61051 - DNA, 120 bp, Homo sapiens
  misc_feature: 1305 for SV(W|O) and mtDNA
accgaaaaatcagaataggtgttggtatagaatggggtctcctcctccggcggggtcgaagaaggtggtgttgaggttgcggtctgttagtagtatagtgatgccagcagctaggactgg

SEQ ID NO: 61052 - DNA, 120 bp, Homo sapiens
  misc_feature: 1305 for SV(W|O) and mtDNA
acatgtttaacggccgcggtaccctaaccgtgcaaaggtagcataatcacttgttccttaaatagggacctgtatgaatggctccacgagggttcagctgtctcttacttttaaccagtg

SEQ ID NO: 61053 - DNA, 120 bp, Homo sapiens
  misc_feature: 1304 for SV(W|O) and mtDNA
gggtgggtgtgggtataatactaagttgagatgatatcatttacgggggaaggcgctttgtgaagtaggccttatttctcttgtcctttcgtacagggaggaatttgaagtagatagaaa

SEQ ID NO: 61054 - DNA, 120 bp, Homo sapiens
  misc_feature: 1304 for SV(W|O) and mtDNA
ttccccctcaaacctaagaaatatgtctgataaaagagttactttgatagagtaaataataggagcttaaacccccttatttctaggactatgagaatcgaacccatccctgagaatcca

SEQ ID NO: 61055 - DNA, 120 bp, Homo sapiens
  misc_feature: 1304 for SV(W|O) and mtDNA
ttatttatcgcacctacgttcaatattacaggcgaacatacttactaaagtgtgttaattaattaatgcttgtaggacataataataacaattgaatgtctgcacagccgctttccacac

SEQ ID NO: 61056 - DNA, 120 bp, Homo sapiens
  misc_feature: 1304 for SV(W|O) and mtDNA
tggttgaacattgtttgttggtgtatatattgtaattgagattgctcgggggaataggttatgtgattaggagtagggttaggatgagtgggaagaagaaagagaggaagtaaagtttaa

SEQ ID NO: 61057 - DNA, 120 bp, Homo sapiens
  misc_feature: 1304 for SV(W|O) and mtDNA
tgtcctcccgtgaggccaaatatcattctgaggggccacagtaattacaaacttactatccgccatcccatacattgggacagacctagttcaatgaatctgaggaggctactcagtaga

SEQ ID NO: 61058 - DNA, 120 bp, Homo sapiens
  misc_feature: 1304 for SV(W|O) and mtDNA
tctccttacacctagcaggtgtctcctctatcttaggggccatcaatttcatcacaacaattatcaatataaaaccccctgccataacccaataccaaacgcccctcttcgtctgatccg

SEQ ID NO: 61059 - DNA, 120 bp, Homo sapiens
  misc_feature: 1304 for SV(W|O) and mtDNA
atcagaataggtgttggtatagaatggggtctcctcctccggcggggtcgaagaaggtggtgttgaggttgcggtctgttagtagtatagtgatgccagcagctaggactgggagagata

SEQ ID NO: 61060 - DNA, 120 bp, Homo sapiens
  misc_feature: 1304 for SV(W|O) and mtDNA
aaccagccagaacgcctgaacgcaggcacatacttcctattctacaccctagtaggctcccttcccctactcatcgcactaatttacactcacaacaccctaggctcactaaacattcta

SEQ ID NO: 61061 - DNA, 120 bp, Homo sapiens
  misc_feature: 1304 for SV(W|O) and mtDNA
agtagttccctgctaagggagggtagactgttcaacctgttcctgctccggcctccactatagcagatgcgagcaggagtaggagagagggaggtaagagtcagaagcttatgttgttta

SEQ ID NO: 61062 - DNA, 120 bp, Homo sapiens
  misc_feature: 1304 for SV(W|O) and mtDNA
gttgaacattgtttgttggtgtatatattgtaattgagattgctcgggggaataggttatgtgattaggagtagggttaggatgagtgggaagaagaaagagaggaagtaaagtttaatt

SEQ ID NO: 61063 - DNA, 120 bp, Homo sapiens
  misc_feature: 1304 for SV(W|O) and mtDNA
gttatgatgtctgtgtggaaagcggctgtgcagacattcaattgttattattatgtcctacaagcattaattaattaacacactttagtaagtatgttcgcctgtaatattgaacgtagg

SEQ ID NO: 61064 - DNA, 120 bp, Homo sapiens
  misc_feature: 1304 for SV(W|O) and mtDNA
gtggaagtgaaatcacatggctaggccggaggtcattaggagggctgagagggcccctgttaggggtcatgggctgggttttactatatgataggcatgtgattggtgggtcattatgtg

SEQ ID NO: 61065 - DNA, 120 bp, Homo sapiens
  misc_feature: 1304 for SV(W|O) and mtDNA
ggtgtgggtataatactaagttgagatgatatcatttacgggggaaggcgctttgtgaagtaggccttatttctcttgtcctttcgtacagggaggaatttgaagtagatagaaaccgac

SEQ ID NO: 61066 - DNA, 120 bp, Homo sapiens
  misc_feature: 1304 for SV(W|O) and mtDNA
gtagaggttaaggagggtgatggtggctatgatggtggggatgatgaggctattgttttttgtgaattcttcgataatggcccatttgggcaaaaagccggttagcgggggcaggcctcc

SEQ ID NO: 61067 - DNA, 120 bp, Homo sapiens
  misc_feature: 1304 for SV(W|O) and mtDNA
atagcccttctaaacgctaatccaagcctcaccccactactaggcctcctcctagcagcagcaggcaaatcagcccaattaggtctccacccctgactcccctcagccatagaaggcccc

SEQ ID NO: 61068 - DNA, 120 bp, Homo sapiens
  misc_feature: 1304 for SV(W|O) and mtDNA
gggatttgactgtaatgtgctatgtacggtaaatggctttatgtactatgtactgttaagggtgggtaggtttgttggtatcctagtgggtgaggggtggctttggagttgcagttgatg

SEQ ID NO: 61069 - DNA, 120 bp, Homo sapiens
  misc_feature: 1304 for SV(W|O) and mtDNA
gccggagcaccctatgtcgcagtatctgtctttgattcctgcctcatcccattatttatcgcacctacgttcaatattacaggcgaacatacttactaaagtgtgttaattaattaatgc

SEQ ID NO: 61070 - DNA, 120 bp, Homo sapiens
  misc_feature: 1304 for SV(W|O) and mtDNA
gcaggttagttgtttgtagggctcatggtaggggtaaaaggagggcaatttctagatcaaataataagaaggtaatagctactaagaagaattttatggagaaagggacgcgggcggggg

SEQ ID NO: 61071 - DNA, 120 bp, Homo sapiens
  misc_feature: 1304 for SV(W|O) and mtDNA
gatccatcgtgatgtcttatttaaggggaacgtgtgggctatttaggctttatgaccctgaagtaggaaccagatgtcggatacagttcactttagctacccccaagtgttatgggcccg

SEQ ID NO: 61072 - DNA, 120 bp, Homo sapiens
  misc_feature: 1304 for SV(W|O) and mtDNA
gagtagttccctgctaagggagggtagactgttcaacctgttcctgctccggcctccactatagcagatgcgagcaggagtaggagagagggaggtaagagtcagaagcttatgttgttt

SEQ ID NO: 61073 - DNA, 120 bp, Homo sapiens
  misc_feature: 1304 for SV(W|O) and mtDNA
gaacgaaaatctgttcgcttcattcattgcccccacaatcctaggcctacccgccgcagtactgatcattctatttccccctctattgatccccacctccaaatatctcatcaacaaccg

SEQ ID NO: 61074 - DNA, 120 bp, Homo sapiens
  misc_feature: 1304 for SV(W|O) and mtDNA
ctgctatgatggataagattgagagagtgaggagaaggcttacgtttagtgagggagagatttggtatatgattgagatgggggctagtttttgtcatgtgagaagaagcaggccggatg

SEQ ID NO: 61075 - DNA, 120 bp, Homo sapiens
  misc_feature: 1304 for SV(W|O) and mtDNA
attgaacctctgactgtaaagttttaagttttatgcgattaccgggctctgccatcttaacaaaccctgttcttgggtgggtgtgggtataatactaagttgagatgatatcatttacgg

SEQ ID NO: 61076 - DNA, 120 bp, Homo sapiens
  misc_feature: 1304 for SV(W|O) and mtDNA
atggcaggagtaatcagaggtgttcttgtgttgtgataagggtggagaggttaaaggagccacttattagtaatgttgatagtagaatgatggctagggtgacttcatatgagattgttt

SEQ ID NO: 61077 - DNA, 120 bp, Homo sapiens
  misc_feature: 1303 for SV(W|O) and mtDNA
ttttgcgtagctgggtttggtttaatccacctcaactgcctgctatgatggataagattgagagagtgaggagaaggcttacgtttagtgagggagagatttggtatatgattgagatgg

SEQ ID NO: 61078 - DNA, 120 bp, Homo sapiens
  misc_feature: 1303 for SV(W|O) and mtDNA
ttgaccgtagtatacccccggtcgtgtagcggtgaaagtggtttggtttagacgtccgggaattgcatctgtttttaagcctaatgtggggacagctcatgagtgcaagacgtcttgtga

SEQ ID NO: 61079 - DNA, 120 bp, Homo sapiens
  misc_feature: 1303 for SV(W|O) and mtDNA
ttagtttgattagtcattgttgggtggtgattagtcggttgttgatgagatatttggaggtggggatcaatagagggggaaatagaatgatcagtactgcggcgggtaggcctaggattg

SEQ ID NO: 61080 - DNA, 120 bp, Homo sapiens
  misc_feature: 1303 for SV(W|O) and mtDNA
tgtggctgattgaagagtatgcaatgagcgattttaggtctgtttgtcgtaggcagatggagcttgttataattatgcctcatagggatagtacaaggaaggggtaggctatgtgttttg

SEQ ID NO: 61081 - DNA, 120 bp, Homo sapiens
  misc_feature: 1303 for SV(W|O) and mtDNA
catattttgtcaccaagaccctacttctaacctccctgttcttatgaattcgaacagcatacccccgattccgctacgaccaactcatacacctcctatgaaaaaacttcctaccactca

SEQ ID NO: 61082 - DNA, 120 bp, Homo sapiens
  misc_feature: 1303 for SV(W|O) and mtDNA
tgaactaggtctgtcccaatgtatgggatggcggatagtaagtttgtaattactgtggcccctcagaatgatatttggcctcacgggaggacatagcctatgaaggctgttgctatagtt

SEQ ID NO: 61083 - DNA, 120 bp, Homo sapiens
  misc_feature: 1303 for SV(W|O) and mtDNA
tcagacgctcaggaaatagaaaccgtctgaactatcctgcccgccatcatcctagtcctcatcgccctcccatccctacgcatcctttacataacagacgaggtcaacgatccctccctt

SEQ ID NO: 61084 - DNA, 120 bp, Homo sapiens
  misc_feature: 1303 for SV(W|O) and mtDNA
ggttaaggagggtgatggtggctatgatggtggggatgatgaggctattgttttttgtgaattcttcgataatggcccatttgggcaaaaagccggttagcgggggcaggcctcctaggg

SEQ ID NO: 61085 - DNA, 120 bp, Homo sapiens
  misc_feature: 1303 for SV(W|O) and mtDNA
ggggtaattatggtgggccatacggtagtatttagttggggcatttcactgtaaagaggtgttggttctcttaatctttaacttaaaaggttaatgctaagttagctttacagtgggctc

SEQ ID NO: 61086 - DNA, 120 bp, Homo sapiens
  misc_feature: 1303 for SV(W|O) and mtDNA
aatagcccttctaaacgctaatccaagcctcaccccactactaggcctcctcctagcagcagcaggcaaatcagcccaattaggtctccacccctgactcccctcagccatagaaggccc

SEQ ID NO: 61087 - DNA, 120 bp, Homo sapiens
  misc_feature: 1303 for SV(W|O) and mtDNA
ggagtttgatagttcttgggcagtgagagtgagtagtagaatgtttagtgagcctagggtgttgtgagtgtaaattagtgcgatgagtaggggaagggagcctactagggtgtagaatag

SEQ ID NO: 61088 - DNA, 120 bp, Homo sapiens
  misc_feature: 1303 for SV(W|O) and mtDNA
gctccagggtgggagtagttccctgctaagggagggtagactgttcaacctgttcctgctccggcctccactatagcagatgcgagcaggagtaggagagagggaggtaagagtcagaag

SEQ ID NO: 61089 - DNA, 120 bp, Homo sapiens
  misc_feature: 1303 for SV(W|O) and mtDNA
gagtttgatagttcttgggcagtgagagtgagtagtagaatgtttagtgagcctagggtgttgtgagtgtaaattagtgcgatgagtaggggaagggagcctactagggtgtagaatagg

SEQ ID NO: 61090 - DNA, 120 bp, Homo sapiens
  misc_feature: 1303 for SV(W|O) and mtDNA
cttctgagtcccagaggttacccaaggcacccctctgacatccggcctgcttcttctcacatgacaaaaactagcccccatctcaatcatataccaaatctctccctcactaaacgtaag

SEQ ID NO: 61091 - DNA, 120 bp, Homo sapiens
  misc_feature: 1303 for SV(W|O) and mtDNA
ctccttacacctagcaggtgtctcctctatcttaggggccatcaatttcatcacaacaattatcaatataaaaccccctgccataacccaataccaaacgcccctcttcgtctgatccgt

SEQ ID NO: 61092 - DNA, 120 bp, Homo sapiens
  misc_feature: 1303 for SV(W|O) and mtDNA
cgattctcatagtcctagaaataagggggtttaagctcctattatttactctatcaaagtaactcttttatcagacatatttcttaggtttgagggggaatgctggagattgtaatgggt

SEQ ID NO: 61093 - DNA, 120 bp, Homo sapiens
  misc_feature: 1303 for SV(W|O) and mtDNA
aacaggcggggtaagatttgccgagttccttttactttttttaacctttccttatgagcatgcctgtgttgggttgacagtgagggtaataatgacttgttggttgattgtagatattgg

SEQ ID NO: 61094 - DNA, 120 bp, Homo sapiens
  misc_feature: 1303 for SV(W|O) and mtDNA
catcgctgggtcaatagtacttgccgcagtactcttaaaactaggcggctatggtataatacgcctcacactcattctcaaccccctgacaaaacacatagcctaccccttccttgtact

SEQ ID NO: 61095 - DNA, 120 bp, Homo sapiens
  misc_feature: 1303 for SV(W|O) and mtDNA
attgaccgtagtatacccccggtcgtgtagcggtgaaagtggtttggtttagacgtccgggaattgcatctgtttttaagcctaatgtggggacagctcatgagtgcaagacgtcttgtg

SEQ ID NO: 61096 - DNA, 120 bp, Homo sapiens
  misc_feature: 1303 for SV(W|O) and mtDNA
atatgttaaagccactttcgtagtctattttgtgtcaactggagttttttacaactcaggtgagttttagctttattggggagggggtgatctaaaacactctttacgccggcttctatt

SEQ ID NO: 61097 - DNA, 120 bp, Homo sapiens
  misc_feature: 1303 for SV(W|O) and mtDNA
agggttaggatgagtgggaagaagaaagagaggaagtaaagtttaattatgcctttttgggttgaggtgatgatggaggtggagatttggtgctgtgaaattgttttaggtaatagcttt

SEQ ID NO: 61098 - DNA, 120 bp, Homo sapiens
  misc_feature: 1303 for SV(W|O) and mtDNA
aggggtcccttgaccaccatcctccgtgaaatcaatatcccgcacaagagtgctactctcctcgctccgggcccataacacttgggggtagctaaagtgaactgtatccgacatctggtt

SEQ ID NO: 61099 - DNA, 120 bp, Homo sapiens
  misc_feature: 1303 for SV(W|O) and mtDNA
acggagaattttggattctcagggatgggttcgattctcatagtcctagaaataagggggtttaagctcctattatttactctatcaaagtaactcttttatcagacatatttcttaggt

SEQ ID NO: 61100 - DNA, 120 bp, Homo sapiens
  misc_feature: 1302 for SV(W|O) and mtDNA
tctgtgtggaaagcggctgtgcagacattcaattgttattattatgtcctacaagcattaattaattaacacactttagtaagtatgttcgcctgtaatattgaacgtaggtgcgataaa

SEQ ID NO: 61101 - DNA, 120 bp, Homo sapiens
  misc_feature: 1302 for SV(W|O) and mtDNA
ttgtaatgggtatggagacatatcatataagtaatgctagggtgagtggtaggaagttttttcataggaggtgtatgagttggtcgtagcggaatcgggggtatgctgttcgaattcata

SEQ ID NO: 61102 - DNA, 120 bp, Homo sapiens
  misc_feature: 1302 for SV(W|O) and mtDNA
ttaggtttgagggggaatgctggagattgtaatgggtatggagacatatcatataagtaatgctagggtgagtggtaggaagttttttcataggaggtgtatgagttggtcgtagcggaa

SEQ ID NO: 61103 - DNA, 120 bp, Homo sapiens
  misc_feature: 1302 for SV(W|O) and mtDNA
ccctgaagcgcgtacacaccgcccgtcaccctcctcaagtatacttcaaaggacatttaactaaaacccctacgcatttatatagaggagacaagtcgtaacatggtaagtgtactggaa

SEQ ID NO: 61104 - DNA, 120 bp, Homo sapiens
  misc_feature: 1302 for SV(W|O) and mtDNA
agccattcaagcaatcctatacaaccgtatcggcgatatcggtttcatcctcgccttagcatgatttatcctacactccaactcatgagacccacaacaaatagcccttctaaacgctaa

SEQ ID NO: 61105 - DNA, 120 bp, Homo sapiens
  misc_feature: 1302 for SV(W|O) and mtDNA
tgggtgtgggtataatactaagttgagatgatatcatttacgggggaaggcgctttgtgaagtaggccttatttctcttgtcctttcgtacagggaggaatttgaagtagatagaaaccg

SEQ ID NO: 61106 - DNA, 120 bp, Homo sapiens
  misc_feature: 1302 for SV(W|O) and mtDNA
tgatggcaggagtaatcagaggtgttcttgtgttgtgataagggtggagaggttaaaggagccacttattagtaatgttgatagtagaatgatggctagggtgacttcatatgagattgt

SEQ ID NO: 61107 - DNA, 120 bp, Homo sapiens
  misc_feature: 1302 for SV(W|O) and mtDNA
cacatagccctcgtagtaacagccattctcatccaaaccccctgaagcttcaccggcgcagtcattctcataatcgcccacgggcttacatcctcattactattctgcctagcaaactca

SEQ ID NO: 61108 - DNA, 120 bp, Homo sapiens
  misc_feature: 1302 for SV(W|O) and mtDNA
tgactgtaaagttttaagttttatgcgattaccgggctctgccatcttaacaaaccctgttcttgggtgggtgtgggtataatactaagttgagatgatatcatttacgggggaaggcgc

SEQ ID NO: 61109 - DNA, 120 bp, Homo sapiens
  misc_feature: 1302 for SV(W|O) and mtDNA
acaatatatacaccaacaaacaatgttcaaccagtaactactactaatcaacgcccataatcatacaaagcccccgcaccaataggatcctcccgaatcaaccctgacccctctccttca

SEQ ID NO: 61110 - DNA, 120 bp, Homo sapiens
  misc_feature: 1302 for SV(W|O) and mtDNA
tctccctcactaaacgtaagccttctcctcactctctcaatcttatccatcatagcaggcagttgaggtggattaaaccaaacccagctacgcaaaatcttagcatactcctcaattacc

SEQ ID NO: 61111 - DNA, 120 bp, Homo sapiens
  misc_feature: 1302 for SV(W|O) and mtDNA
tctatggctgaggggagtcaggggtggagacctaattgggctgatttgcctgctgctgctaggaggaggcctagtagtggggtgaggcttggattagcgtttagaagggctatttgttgt

SEQ ID NO: 61112 - DNA, 120 bp, Homo sapiens
  misc_feature: 1302 for SV(W|O) and mtDNA
taattatggtgggccatacggtagtatttagttggggcatttcactgtaaagaggtgttggttctcttaatctttaacttaaaaggttaatgctaagttagctttacagtgggctctaga

SEQ ID NO: 61113 - DNA, 120 bp, Homo sapiens
  misc_feature: 1302 for SV(W|O) and mtDNA
tctacacaacatattttgtcaccaagaccctacttctaacctccctgttcttatgaattcgaacagcatacccccgattccgctacgaccaactcatacacctcctatgaaaaaacttcc

SEQ ID NO: 61114 - DNA, 120 bp, Homo sapiens
  misc_feature: 1302 for SV(W|O) and mtDNA
tatggatgcggttgcttgcgtgaggaaatacttgatggcagcttctgtggaacgagggtttatttttttggttagaactggaataaaagctagcatgtttatttctaggcctactcaggt

SEQ ID NO: 61115 - DNA, 120 bp, Homo sapiens
  misc_feature: 1302 for SV(W|O) and mtDNA
aggatgatggcgggcaggatagttcagacggtttctatttcctgagcgtctgagatgttagtattagttagttttgttgtgagtgttaggaaaagggcatacaggactaggaagcagata

SEQ ID NO: 61116 - DNA, 120 bp, Homo sapiens
  misc_feature: 1302 for SV(W|O) and mtDNA
cccatcgctgggtcaatagtacttgccgcagtactcttaaaactaggcggctatggtataatacgcctcacactcattctcaaccccctgacaaaacacatagcctaccccttccttgta

SEQ ID NO: 61117 - DNA, 120 bp, Homo sapiens
  misc_feature: 1302 for SV(W|O) and mtDNA
agacctgtgatccatcgtgatgtcttatttaaggggaacgtgtgggctatttaggctttatgaccctgaagtaggaaccagatgtcggatacagttcactttagctacccccaagtgtta

SEQ ID NO: 61118 - DNA, 120 bp, Homo sapiens
  misc_feature: 1302 for SV(W|O) and mtDNA
cggtgcccccgatatggcgtttccccgcataaacaacataagcttctgactcttacctccctctctcctactcctgctcgcatctgctatagtggaggccggagcaggaacaggttgaac

SEQ ID NO: 61119 - DNA, 120 bp, Homo sapiens
  misc_feature: 1302 for SV(W|O) and mtDNA
cacatgcctatcatatagtaaaacccagcccatgacccctaacaggggccctctcagccctcctaatgacctccggcctagccatgtgatttcacttccactccataacgctcctcatac

SEQ ID NO: 61120 - DNA, 120 bp, Homo sapiens
  misc_feature: 1302 for SV(W|O) and mtDNA
cgaacgaaaaattctaggctatatacaactacgcaaaggccccaacgttgtaggcccctacgggctactacaacccttcgctgacgccataaaactcttcaccaaagagcccctaaaacc

SEQ ID NO: 61121 - DNA, 120 bp, Homo sapiens
  misc_feature: 1302 for SV(W|O) and mtDNA
ggttagtttgattagtcattgttgggtggtgattagtcggttgttgatgagatatttggaggtggggatcaatagagggggaaatagaatgatcagtactgcggcgggtaggcctaggat

SEQ ID NO: 61122 - DNA, 120 bp, Homo sapiens
  misc_feature: 1302 for SV(W|O) and mtDNA
ccattcaagcaatcctatacaaccgtatcggcgatatcggtttcatcctcgccttagcatgatttatcctacactccaactcatgagacccacaacaaatagcccttctaaacgctaatc

SEQ ID NO: 61123 - DNA, 120 bp, Homo sapiens
  misc_feature: 1302 for SV(W|O) and mtDNA
ctgactgtaaagttttaagttttatgcgattaccgggctctgccatcttaacaaaccctgttcttgggtgggtgtgggtataatactaagttgagatgatatcatttacgggggaaggcg

SEQ ID NO: 61124 - DNA, 120 bp, Homo sapiens
  misc_feature: 1302 for SV(W|O) and mtDNA
acttatccagtgaaccactatcacgaaaaaaactctacctctctatactaatctccctacaaatctccttaattataacattcacagccacagaactaatcatattttatatcttcttcg

SEQ ID NO: 61125 - DNA, 120 bp, Homo sapiens
  misc_feature: 1302 for SV(W|O) and mtDNA
cagaataggtgttggtatagaatggggtctcctcctccggcggggtcgaagaaggtggtgttgaggttgcggtctgttagtagtatagtgatgccagcagctaggactgggagagatagg

SEQ ID NO: 61126 - DNA, 120 bp, Homo sapiens
  misc_feature: 1302 for SV(W|O) and mtDNA
cagatatgttaaagccactttcgtagtctattttgtgtcaactggagttttttacaactcaggtgagttttagctttattggggagggggtgatctaaaacactctttacgccggcttct

SEQ ID NO: 61127 - DNA, 120 bp, Homo sapiens
  misc_feature: 1302 for SV(W|O) and mtDNA
agtttgattagtcattgttgggtggtgattagtcggttgttgatgagatatttggaggtggggatcaatagagggggaaatagaatgatcagtactgcggcgggtaggcctaggattgtg

SEQ ID NO: 61128 - DNA, 120 bp, Homo sapiens
  misc_feature: 1302 for SV(W|O) and mtDNA
atttcacagcaccaaatctccacctccatcatcacctcaacccaaaaaggcataattaaactttacttcctctctttcttcttcccactcatcctaaccctactcctaatcacataacct

SEQ ID NO: 61129 - DNA, 120 bp, Homo sapiens
  misc_feature: 1301 for SV(W|O) and mtDNA
ttgagagaggattatgatgcgactgtgagtgcgttcgtagtttgagtttgctaggcagaatagtaatgaggatgtaagcccgtgggcgattatgagaatgactgcgccggtgaagcttca

SEQ ID NO: 61130 - DNA, 120 bp, Homo sapiens
  misc_feature: 1301 for SV(W|O) and mtDNA
tcggtgcccccgatatggcgtttccccgcataaacaacataagcttctgactcttacctccctctctcctactcctgctcgcatctgctatagtggaggccggagcaggaacaggttgaa

SEQ ID NO: 61131 - DNA, 120 bp, Homo sapiens
  misc_feature: 1301 for SV(W|O) and mtDNA
tcgcaggtcgcctggttctaggaataatgggggaagtatgtaggagttgaagattagtccgccgtagtcggtgtactcgtaggttcagtaccattggtggccaattgatttgatggtaag

SEQ ID NO: 61132 - DNA, 120 bp, Homo sapiens
  misc_feature: 1301 for SV(W|O) and mtDNA
tcctgctacaactatagtgcttgagtggagtagggctgagactggggtggggccttctatggctgaggggagtcaggggtggagacctaattgggctgatttgcctgctgctgctaggag

SEQ ID NO: 61133 - DNA, 120 bp, Homo sapiens
  misc_feature: 1301 for SV(W|O) and mtDNA
taggtgttggtatagaatggggtctcctcctccggcggggtcgaagaaggtggtgttgaggttgcggtctgttagtagtatagtgatgccagcagctaggactgggagagataggagaag

SEQ ID NO: 61134 - DNA, 120 bp, Homo sapiens
  misc_feature: 1301 for SV(W|O) and mtDNA
gtcccttgaccaccatcctccgtgaaatcaatatcccgcacaagagtgctactctcctcgctccgggcccataacacttgggggtagctaaagtgaactgtatccgacatctggttccta

SEQ ID NO: 61135 - DNA, 120 bp, Homo sapiens
  misc_feature: 1301 for SV(W|O) and mtDNA
tagacctgtgatccatcgtgatgtcttatttaaggggaacgtgtgggctatttaggctttatgaccctgaagtaggaaccagatgtcggatacagttcactttagctacccccaagtgtt

SEQ ID NO: 61136 - DNA, 120 bp, Homo sapiens
  misc_feature: 1301 for SV(W|O) and mtDNA
ggttaggatgagtgggaagaagaaagagaggaagtaaagtttaattatgcctttttgggttgaggtgatgatggaggtggagatttggtgctgtgaaattgttttaggtaatagcttttc

SEQ ID NO: 61137 - DNA, 120 bp, Homo sapiens
  misc_feature: 1301 for SV(W|O) and mtDNA
ggccctgaagcgcgtacacaccgcccgtcaccctcctcaagtatacttcaaaggacatttaactaaaacccctacgcatttatatagaggagacaagtcgtaacatggtaagtgtactgg

SEQ ID NO: 61138 - DNA, 120 bp, Homo sapiens
  misc_feature: 1301 for SV(W|O) and mtDNA
ggatttgactgtaatgtgctatgtacggtaaatggctttatgtactatgtactgttaagggtgggtaggtttgttggtatcctagtgggtgaggggtggctttggagttgcagttgatgt

SEQ ID NO: 61139 - DNA, 120 bp, Homo sapiens
  misc_feature: 1301 for SV(W|O) and mtDNA
ctccagggtgggagtagttccctgctaagggagggtagactgttcaacctgttcctgctccggcctccactatagcagatgcgagcaggagtaggagagagggaggtaagagtcagaagc

SEQ ID NO: 61140 - DNA, 120 bp, Homo sapiens
  misc_feature: 1301 for SV(W|O) and mtDNA
gcattgaccgtagtatacccccggtcgtgtagcggtgaaagtggtttggtttagacgtccgggaattgcatctgtttttaagcctaatgtggggacagctcatgagtgcaagacgtcttg

SEQ ID NO: 61141 - DNA, 120 bp, Homo sapiens
  misc_feature: 1301 for SV(W|O) and mtDNA
gataggggtcccttgaccaccatcctccgtgaaatcaatatcccgcacaagagtgctactctcctcgctccgggcccataacacttgggggtagctaaagtgaactgtatccgacatctg

SEQ ID NO: 61142 - DNA, 120 bp, Homo sapiens
  misc_feature: 1301 for SV(W|O) and mtDNA
agattgtaatgggtatggagacatatcatataagtaatgctagggtgagtggtaggaagttttttcataggaggtgtatgagttggtcgtagcggaatcgggggtatgctgttcgaattc

SEQ ID NO: 61143 - DNA, 120 bp, Homo sapiens
  misc_feature: 1301 for SV(W|O) and mtDNA
ccttcgccctattcttcatagccgaatacacaaacattattataataaacaccctcaccactacaatcttcctaggaacaacatatgacgcactctcccctgaactctacacaacatatt

SEQ ID NO: 61144 - DNA, 120 bp, Homo sapiens
  misc_feature: 1301 for SV(W|O) and mtDNA
caactgcctgctatgatggataagattgagagagtgaggagaaggcttacgtttagtgagggagagatttggtatatgattgagatgggggctagtttttgtcatgtgagaagaagcagg

SEQ ID NO: 61145 - DNA, 120 bp, Homo sapiens
  misc_feature: 1301 for SV(W|O) and mtDNA
aggttaaggagggtgatggtggctatgatggtggggatgatgaggctattgttttttgtgaattcttcgataatggcccatttgggcaaaaagccggttagcgggggcaggcctcctagg

SEQ ID NO: 61146 - DNA, 120 bp, Homo sapiens
  misc_feature: 1300 for SV(W|O) and mtDNA
tttcacagcaccaaatctccacctccatcatcacctcaacccaaaaaggcataattaaactttacttcctctctttcttcttcccactcatcctaaccctactcctaatcacataaccta

SEQ ID NO: 61147 - DNA, 120 bp, Homo sapiens
  misc_feature: 1300 for SV(W|O) and mtDNA
cgatgagagtaatagatagggctcaggcgtttgtgtatgatatgtttgcggtttcgatgatgtggtctttggagtagaaacctgtgaggaaaggtattcctgctaatgctaggctgccaa

SEQ ID NO: 61148 - DNA, 120 bp, Homo sapiens
  misc_feature: 1300 for SV(W|O) and mtDNA
ttctgagtcccagaggttacccaaggcacccctctgacatccggcctgcttcttctcacatgacaaaaactagcccccatctcaatcatataccaaatctctccctcactaaacgtaagc

SEQ ID NO: 61149 - DNA, 120 bp, Homo sapiens
  misc_feature: 1300 for SV(W|O) and mtDNA
gattactcctgccatcatgacccttggccataatatgatttatctccacactagcagagaccaaccgaacccccttcgaccttgccgaaggggagtccgaactagtctcaggcttcaaca

SEQ ID NO: 61150 - DNA, 120 bp, Homo sapiens
  misc_feature: 1300 for SV(W|O) and mtDNA
tgcggcttcgaccctatatcccccgcccgcgtccctttctccataaaattcttcttagtagctattaccttcttattatttgatctagaaattgccctccttttacccctaccatgagcc

SEQ ID NO: 61151 - DNA, 120 bp, Homo sapiens
  misc_feature: 1300 for SV(W|O) and mtDNA
tgaccgtagtatacccccggtcgtgtagcggtgaaagtggtttggtttagacgtccgggaattgcatctgtttttaagcctaatgtggggacagctcatgagtgcaagacgtcttgtgat

SEQ ID NO: 61152 - DNA, 120 bp, Homo sapiens
  misc_feature: 1300 for SV(W|O) and mtDNA
ctatgatggataagattgagagagtgaggagaaggcttacgtttagtgagggagagatttggtatatgattgagatgggggctagtttttgtcatgtgagaagaagcaggccggatgtca

SEQ ID NO: 61153 - DNA, 120 bp, Homo sapiens
  misc_feature: 1300 for SV(W|O) and mtDNA
ggctgattgaagagtatgcaatgagcgattttaggtctgtttgtcgtaggcagatggagcttgttataattatgcctcatagggatagtacaaggaaggggtaggctatgtgttttgtca

SEQ ID NO: 61154 - DNA, 120 bp, Homo sapiens
  misc_feature: 1300 for SV(W|O) and mtDNA
tcttacctccctctctcctactcctgctcgcatctgctatagtggaggccggagcaggaacaggttgaacagtctaccctcccttagcagggaactactcccaccctggagcctccgtag

SEQ ID NO: 61155 - DNA, 120 bp, Homo sapiens
  misc_feature: 1300 for SV(W|O) and mtDNA
aataggtgttggtatagaatggggtctcctcctccggcggggtcgaagaaggtggtgttgaggttgcggtctgttagtagtatagtgatgccagcagctaggactgggagagataggaga

SEQ ID NO: 61156 - DNA, 120 bp, Homo sapiens
  misc_feature: 1300 for SV(W|O) and mtDNA
ctcaggcttcaacatcgaatacgccgcaggccccttcgccctattcttcatagccgaatacacaaacattattataataaacaccctcaccactacaatcttcctaggaacaacatatga

SEQ ID NO: 61157 - DNA, 120 bp, Homo sapiens
  misc_feature: 1300 for SV(W|O) and mtDNA
tcaactgcctgctatgatggataagattgagagagtgaggagaaggcttacgtttagtgagggagagatttggtatatgattgagatgggggctagtttttgtcatgtgagaagaagcag

SEQ ID NO: 61158 - DNA, 120 bp, Homo sapiens
  misc_feature: 1300 for SV(W|O) and mtDNA
gtttgtaattactgtggcccctcagaatgatatttggcctcacgggaggacatagcctatgaaggctgttgctatagttgcaagcaggaggataatgccgatgtttcaggtttctgagta

SEQ ID NO: 61159 - DNA, 120 bp, Homo sapiens
  misc_feature: 1300 for SV(W|O) and mtDNA
gtgttcagatatgttaaagccactttcgtagtctattttgtgtcaactggagttttttacaactcaggtgagttttagctttattggggagggggtgatctaaaacactctttacgccgg

SEQ ID NO: 61160 - DNA, 120 bp, Homo sapiens
  misc_feature: 1300 for SV(W|O) and mtDNA
ctcaacacccactacctaaaaaatcccaaacatataactgaactcctcatacccaattggaccaatctatcaccctatagaagaactaatgttagtataagtaacatgaaaacattctcc

SEQ ID NO: 61161 - DNA, 120 bp, Homo sapiens
  misc_feature: 1300 for SV(W|O) and mtDNA
gacctgtgatccatcgtgatgtcttatttaaggggaacgtgtgggctatttaggctttatgaccctgaagtaggaaccagatgtcggatacagttcactttagctacccccaagtgttat

SEQ ID NO: 61162 - DNA, 120 bp, Homo sapiens
  misc_feature: 1300 for SV(W|O) and mtDNA
aggagtccgaggaggttagttgtggcaataaaaatgattaaggatactagtataagagatcaggttcgtcctttagtgttgtgtatggttatcatttgttttgaggttagtttgattagt

SEQ ID NO: 61163 - DNA, 120 bp, Homo sapiens
  misc_feature: 1299 for SV(W|O) and mtDNA
acatagccctcgtagtaacagccattctcatccaaaccccctgaagcttcaccggcgcagtcattctcataatcgcccacgggcttacatcctcattactattctgcctagcaaactcaa

SEQ ID NO: 61164 - DNA, 120 bp, Homo sapiens
  misc_feature: 1299 for SV(W|O) and mtDNA
ttcctgctacaactatagtgcttgagtggagtagggctgagactggggtggggccttctatggctgaggggagtcaggggtggagacctaattgggctgatttgcctgctgctgctagga

SEQ ID NO: 61165 - DNA, 120 bp, Homo sapiens
  misc_feature: 1299 for SV(W|O) and mtDNA
ttatgatgtctgtgtggaaagcggctgtgcagacattcaattgttattattatgtcctacaagcattaattaattaacacactttagtaagtatgttcgcctgtaatattgaacgtaggt

SEQ ID NO: 61166 - DNA, 120 bp, Homo sapiens
  misc_feature: 1299 for SV(W|O) and mtDNA
caccatcatagccaccatcaccctccttaacctctacttctacctacgcctaatctactccacctcaatcacactactccccatatctaacaacgtaaaaataaaatgacagtttgaaca

SEQ ID NO: 61167 - DNA, 120 bp, Homo sapiens
  misc_feature: 1299 for SV(W|O) and mtDNA
tgtctgtgtggaaagcggctgtgcagacattcaattgttattattatgtcctacaagcattaattaattaacacactttagtaagtatgttcgcctgtaatattgaacgtaggtgcgata

SEQ ID NO: 61168 - DNA, 120 bp, Homo sapiens
  misc_feature: 1299 for SV(W|O) and mtDNA
taaggagggtgatggtggctatgatggtggggatgatgaggctattgttttttgtgaattcttcgataatggcccatttgggcaaaaagccggttagcgggggcaggcctcctagggaga

SEQ ID NO: 61169 - DNA, 120 bp, Homo sapiens
  misc_feature: 1299 for SV(W|O) and mtDNA
tctcaggcttcaacatcgaatacgccgcaggccccttcgccctattcttcatagccgaatacacaaacattattataataaacaccctcaccactacaatcttcctaggaacaacatatg

SEQ ID NO: 61170 - DNA, 120 bp, Homo sapiens
  misc_feature: 1299 for SV(W|O) and mtDNA
gaagtccttgagagaggattatgatgcgactgtgagtgcgttcgtagtttgagtttgctaggcagaatagtaatgaggatgtaagcccgtgggcgattatgagaatgactgcgccggtga

SEQ ID NO: 61171 - DNA, 120 bp, Homo sapiens
  misc_feature: 1299 for SV(W|O) and mtDNA
taggtttgagggggaatgctggagattgtaatgggtatggagacatatcatataagtaatgctagggtgagtggtaggaagttttttcataggaggtgtatgagttggtcgtagcggaat

SEQ ID NO: 61172 - DNA, 120 bp, Homo sapiens
  misc_feature: 1299 for SV(W|O) and mtDNA
aaagctaacttagcattaaccttttaagttaaagattaagagaaccaacacctctttacagtgaaatgccccaactaaatactaccgtatggcccaccataattacccccatactcctta

SEQ ID NO: 61173 - DNA, 120 bp, Homo sapiens
  misc_feature: 1299 for SV(W|O) and mtDNA
gtggctgattgaagagtatgcaatgagcgattttaggtctgtttgtcgtaggcagatggagcttgttataattatgcctcatagggatagtacaaggaaggggtaggctatgtgttttgt

SEQ ID NO: 61174 - DNA, 120 bp, Homo sapiens
  misc_feature: 1299 for SV(W|O) and mtDNA
gattagtcattgttgggtggtgattagtcggttgttgatgagatatttggaggtggggatcaatagagggggaaatagaatgatcagtactgcggcgggtaggcctaggattgtgggggc

SEQ ID NO: 61175 - DNA, 120 bp, Homo sapiens
  misc_feature: 1299 for SV(W|O) and mtDNA
acatattttgtcaccaagaccctacttctaacctccctgttcttatgaattcgaacagcatacccccgattccgctacgaccaactcatacacctcctatgaaaaaacttcctaccactc

SEQ ID NO: 61176 - DNA, 120 bp, Homo sapiens
  misc_feature: 1299 for SV(W|O) and mtDNA
gaagcgcgtacacaccgcccgtcaccctcctcaagtatacttcaaaggacatttaactaaaacccctacgcatttatatagaggagacaagtcgtaacatggtaagtgtactggaaagtg

SEQ ID NO: 61177 - DNA, 120 bp, Homo sapiens
  misc_feature: 1299 for SV(W|O) and mtDNA
aaacaggcggggtaagatttgccgagttccttttactttttttaacctttccttatgagcatgcctgtgttgggttgacagtgagggtaataatgacttgttggttgattgtagatattg

SEQ ID NO: 61178 - DNA, 120 bp, Homo sapiens
  misc_feature: 1299 for SV(W|O) and mtDNA
attgtaatgggtatggagacatatcatataagtaatgctagggtgagtggtaggaagttttttcataggaggtgtatgagttggtcgtagcggaatcgggggtatgctgttcgaattcat

SEQ ID NO: 61179 - DNA, 120 bp, Homo sapiens
  misc_feature: 1299 for SV(W|O) and mtDNA
atgagtgtgcctgcaaagatggtagagtagatgacgggttgggccaggggattaattagtacgggaagggtataaccaacattttcggggtatgggcccgatagcttatttagctgacct

SEQ ID NO: 61180 - DNA, 120 bp, Homo sapiens
  misc_feature: 1299 for SV(W|O) and mtDNA
aggttaaaggagccacttattagtaatgttgatagtagaatgatggctagggtgacttcatatgagattgtttgggctactgctcgcagtgcgccgatcagggcgtagtttgagtttgat

SEQ ID NO: 61181 - DNA, 120 bp, Homo sapiens
  misc_feature: 1299 for SV(W|O) and mtDNA
agtaggagagtgatatttgatcaggagaacgtggttactagcacagagagttctcccagtaggttaatagtggggggtaaggcgaggttagcgaggcttgctagaagtcatcaaaaagct

SEQ ID NO: 61182 - DNA, 120 bp, Homo sapiens
  misc_feature: 1298 for SV(W|O) and mtDNA
tccccctcaaacctaagaaatatgtctgataaaagagttactttgatagagtaaataataggagcttaaacccccttatttctaggactatgagaatcgaacccatccctgagaatccaa

SEQ ID NO: 61183 - DNA, 120 bp, Homo sapiens
  misc_feature: 1298 for SV(W|O) and mtDNA
ttgaactaggtctgtcccaatgtatgggatggcggatagtaagtttgtaattactgtggcccctcagaatgatatttggcctcacgggaggacatagcctatgaaggctgttgctatagt

SEQ ID NO: 61184 - DNA, 120 bp, Homo sapiens
  misc_feature: 1298 for SV(W|O) and mtDNA
tgttgagtcctgtaagtaggagagtgatatttgatcaggagaacgtggttactagcacagagagttctcccagtaggttaatagtggggggtaaggcgaggttagcgaggcttgctagaa

SEQ ID NO: 61185 - DNA, 120 bp, Homo sapiens
  misc_feature: 1298 for SV(W|O) and mtDNA
tgtgggtataatactaagttgagatgatatcatttacgggggaaggcgctttgtgaagtaggccttatttctcttgtcctttcgtacagggaggaatttgaagtagatagaaaccgacct

SEQ ID NO: 61186 - DNA, 120 bp, Homo sapiens
  misc_feature: 1298 for SV(W|O) and mtDNA
tggtaaacaggcggggtaagatttgccgagttccttttactttttttaacctttccttatgagcatgcctgtgttgggttgacagtgagggtaataatgacttgttggttgattgtagat

SEQ ID NO: 61187 - DNA, 120 bp, Homo sapiens
  misc_feature: 1298 for SV(W|O) and mtDNA
tccttacacctagcaggtgtctcctctatcttaggggccatcaatttcatcacaacaattatcaatataaaaccccctgccataacccaataccaaacgcccctcttcgtctgatccgtc

SEQ ID NO: 61188 - DNA, 120 bp, Homo sapiens
  misc_feature: 1298 for SV(W|O) and mtDNA
ggttgaacattgtttgttggtgtatatattgtaattgagattgctcgggggaataggttatgtgattaggagtagggttaggatgagtgggaagaagaaagagaggaagtaaagtttaat

SEQ ID NO: 61189 - DNA, 120 bp, Homo sapiens
  misc_feature: 1298 for SV(W|O) and mtDNA
ccataaaattcttcttagtagctattaccttcttattatttgatctagaaattgccctccttttacccctaccatgagccctacaaacaactaacctgccactaatagttatgtcatccc

SEQ ID NO: 61190 - DNA, 120 bp, Homo sapiens
  misc_feature: 1298 for SV(W|O) and mtDNA
ggcaggttagttgtttgtagggctcatggtaggggtaaaaggagggcaatttctagatcaaataataagaaggtaatagctactaagaagaattttatggagaaagggacgcgggcgggg

SEQ ID NO: 61191 - DNA, 120 bp, Homo sapiens
  misc_feature: 1298 for SV(W|O) and mtDNA
aacacccactacctaaaaaatcccaaacatataactgaactcctcatacccaattggaccaatctatcaccctatagaagaactaatgttagtataagtaacatgaaaacattctcctcc

SEQ ID NO: 61192 - DNA, 120 bp, Homo sapiens
  misc_feature: 1298 for SV(W|O) and mtDNA
gattgagagagtgaggagaaggcttacgtttagtgagggagagatttggtatatgattgagatgggggctagtttttgtcatgtgagaagaagcaggccggatgtcagaggggtgccttg

SEQ ID NO: 61193 - DNA, 120 bp, Homo sapiens
  misc_feature: 1298 for SV(W|O) and mtDNA
aggatgagtgggaagaagaaagagaggaagtaaagtttaattatgcctttttgggttgaggtgatgatggaggtggagatttggtgctgtgaaattgttttaggtaatagcttttctagt

SEQ ID NO: 61194 - DNA, 120 bp, Homo sapiens
  misc_feature: 1297 for SV(W|O) and mtDNA
gtatacttcaaaggacatttaactaaaacccctacgcatttatatagaggagacaagtcgtaacatggtaagtgtactggaaagtgcacttggacgaaccagagtgtagcttaacacaaa

SEQ ID NO: 61195 - DNA, 120 bp, Homo sapiens
  misc_feature: 1297 for SV(W|O) and mtDNA
tttgtaattactgtggcccctcagaatgatatttggcctcacgggaggacatagcctatgaaggctgttgctatagttgcaagcaggaggataatgccgatgtttcaggtttctgagtag

SEQ ID NO: 61196 - DNA, 120 bp, Homo sapiens
  misc_feature: 1297 for SV(W|O) and mtDNA
ttctatggctgaggggagtcaggggtggagacctaattgggctgatttgcctgctgctgctaggaggaggcctagtagtggggtgaggcttggattagcgtttagaagggctatttgttg

SEQ ID NO: 61197 - DNA, 120 bp, Homo sapiens
  misc_feature: 1297 for SV(W|O) and mtDNA
aagtccttgagagaggattatgatgcgactgtgagtgcgttcgtagtttgagtttgctaggcagaatagtaatgaggatgtaagcccgtgggcgattatgagaatgactgcgccggtgaa

SEQ ID NO: 61198 - DNA, 120 bp, Homo sapiens
  misc_feature: 1297 for SV(W|O) and mtDNA
ttactaataagtggctcctttaacctctccacccttatcacaacacaagaacacctctgattactcctgccatcatgacccttggccataatatgatttatctccacactagcagagacc

SEQ ID NO: 61199 - DNA, 120 bp, Homo sapiens
  misc_feature: 1297 for SV(W|O) and mtDNA
ttaaggagggtgatggtggctatgatggtggggatgatgaggctattgttttttgtgaattcttcgataatggcccatttgggcaaaaagccggttagcgggggcaggcctcctagggag

SEQ ID NO: 61200 - DNA, 120 bp, Homo sapiens
  misc_feature: 1297 for SV(W|O) and mtDNA
cttatttctcttgtcctttcgtacagggaggaatttgaagtagatagaaaccgacctggattactccggtctgaactcagatcacgtaggactttaatcgttgaacaaacgaacctttaa

SEQ ID NO: 61201 - DNA, 120 bp, Homo sapiens
  misc_feature: 1297 for SV(W|O) and mtDNA
tggaaattttttgttatgatgtctgtgtggaaagcggctgtgcagacattcaattgttattattatgtcctacaagcattaattaattaacacactttagtaagtatgttcgcctgtaat

SEQ ID NO: 61202 - DNA, 120 bp, Homo sapiens
  misc_feature: 1297 for SV(W|O) and mtDNA
aactctacctctctatactaatctccctacaaatctccttaattataacattcacagccacagaactaatcatattttatatcttcttcgaaaccacacttatccccaccttggctatca

SEQ ID NO: 61203 - DNA, 120 bp, Homo sapiens
  misc_feature: 1297 for SV(W|O) and mtDNA
agaagagcttatcacctttcatgatcacgccctcataatcattttccttatctgcttcctagtcctgtatgcccttttcctaacactcacaacaaaactaactaatactaacatctcaga

SEQ ID NO: 61204 - DNA, 120 bp, Homo sapiens
  misc_feature: 1297 for SV(W|O) and mtDNA
tctccataaaattcttcttagtagctattaccttcttattatttgatctagaaattgccctccttttacccctaccatgagccctacaaacaactaacctgccactaatagttatgtcat

SEQ ID NO: 61205 - DNA, 120 bp, Homo sapiens
  misc_feature: 1297 for SV(W|O) and mtDNA
tcagaataggtgttggtatagaatggggtctcctcctccggcggggtcgaagaaggtggtgttgaggttgcggtctgttagtagtatagtgatgccagcagctaggactgggagagatag

SEQ ID NO: 61206 - DNA, 120 bp, Homo sapiens
  misc_feature: 1297 for SV(W|O) and mtDNA
gaggttaaaggagccacttattagtaatgttgatagtagaatgatggctagggtgacttcatatgagattgtttgggctactgctcgcagtgcgccgatcagggcgtagtttgagtttga

SEQ ID NO: 61207 - DNA, 120 bp, Homo sapiens
  misc_feature: 1297 for SV(W|O) and mtDNA
agccctcgtagtaacagccattctcatccaaaccccctgaagcttcaccggcgcagtcattctcataatcgcccacgggcttacatcctcattactattctgcctagcaaactcaaacta

SEQ ID NO: 61208 - DNA, 120 bp, Homo sapiens
  misc_feature: 1297 for SV(W|O) and mtDNA
tagttccctgctaagggagggtagactgttcaacctgttcctgctccggcctccactatagcagatgcgagcaggagtaggagagagggaggtaagagtcagaagcttatgttgtttatg

SEQ ID NO: 61209 - DNA, 120 bp, Homo sapiens
  misc_feature: 1297 for SV(W|O) and mtDNA
tactggttgaacattgtttgttggtgtatatattgtaattgagattgctcgggggaataggttatgtgattaggagtagggttaggatgagtgggaagaagaaagagaggaagtaaagtt

SEQ ID NO: 61210 - DNA, 120 bp, Homo sapiens
  misc_feature: 1297 for SV(W|O) and mtDNA
tacaatatatacaccaacaaacaatgttcaaccagtaactactactaatcaacgcccataatcatacaaagcccccgcaccaataggatcctcccgaatcaaccctgacccctctccttc

SEQ ID NO: 61211 - DNA, 120 bp, Homo sapiens
  misc_feature: 1297 for SV(W|O) and mtDNA
cctaataatcggtgcccccgatatggcgtttccccgcataaacaacataagcttctgactcttacctccctctctcctactcctgctcgcatctgctatagtggaggccggagcaggaac

SEQ ID NO: 61212 - DNA, 120 bp, Homo sapiens
  misc_feature: 1297 for SV(W|O) and mtDNA
ggtcagggttgattcgggaggatcctattggtgcgggggctttgtatgattatgggcgttgattagtagtagttactggttgaacattgtttgttggtgtatatattgtaattgagattg

SEQ ID NO: 61213 - DNA, 120 bp, Homo sapiens
  misc_feature: 1297 for SV(W|O) and mtDNA
gctcaacacccactacctaaaaaatcccaaacatataactgaactcctcatacccaattggaccaatctatcaccctatagaagaactaatgttagtataagtaacatgaaaacattctc

SEQ ID NO: 61214 - DNA, 120 bp, Homo sapiens
  misc_feature: 1297 for SV(W|O) and mtDNA
caaatagcccttctaaacgctaatccaagcctcaccccactactaggcctcctcctagcagcagcaggcaaatcagcccaattaggtctccacccctgactcccctcagccatagaaggc

SEQ ID NO: 61215 - DNA, 120 bp, Homo sapiens
  misc_feature: 1297 for SV(W|O) and mtDNA
gattcctgctacaactatagtgcttgagtggagtagggctgagactggggtggggccttctatggctgaggggagtcaggggtggagacctaattgggctgatttgcctgctgctgctag

SEQ ID NO: 61216 - DNA, 120 bp, Homo sapiens
  misc_feature: 1297 for SV(W|O) and mtDNA
attcctgctacaactatagtgcttgagtggagtagggctgagactggggtggggccttctatggctgaggggagtcaggggtggagacctaattgggctgatttgcctgctgctgctagg

SEQ ID NO: 61217 - DNA, 120 bp, Homo sapiens
  misc_feature: 1297 for SV(W|O) and mtDNA
aagattcctgctacaactatagtgcttgagtggagtagggctgagactggggtggggccttctatggctgaggggagtcaggggtggagacctaattgggctgatttgcctgctgctgct

SEQ ID NO: 61218 - DNA, 120 bp, Homo sapiens
  misc_feature: 1296 for SV(W|O) and mtDNA
tttgatagttcttgggcagtgagagtgagtagtagaatgtttagtgagcctagggtgttgtgagtgtaaattagtgcgatgagtaggggaagggagcctactagggtgtagaataggaag

SEQ ID NO: 61219 - DNA, 120 bp, Homo sapiens
  misc_feature: 1296 for SV(W|O) and mtDNA
gccctgaagcgcgtacacaccgcccgtcaccctcctcaagtatacttcaaaggacatttaactaaaacccctacgcatttatatagaggagacaagtcgtaacatggtaagtgtactgga

SEQ ID NO: 61220 - DNA, 120 bp, Homo sapiens
  misc_feature: 1296 for SV(W|O) and mtDNA
tcatagtcctagaaataagggggtttaagctcctattatttactctatcaaagtaactcttttatcagacatatttcttaggtttgagggggaatgctggagattgtaatgggtatggag

SEQ ID NO: 61221 - DNA, 120 bp, Homo sapiens
  misc_feature: 1296 for SV(W|O) and mtDNA
tcagataggggtcccttgaccaccatcctccgtgaaatcaatatcccgcacaagagtgctactctcctcgctccgggcccataacacttgggggtagctaaagtgaactgtatccgacat

SEQ ID NO: 61222 - DNA, 120 bp, Homo sapiens
  misc_feature: 1296 for SV(W|O) and mtDNA
tagaagagcttatcacctttcatgatcacgccctcataatcattttccttatctgcttcctagtcctgtatgcccttttcctaacactcacaacaaaactaactaatactaacatctcag

SEQ ID NO: 61223 - DNA, 120 bp, Homo sapiens
  misc_feature: 1296 for SV(W|O) and mtDNA
gtgtagcggtgaaagtggtttggtttagacgtccgggaattgcatctgtttttaagcctaatgtggggacagctcatgagtgcaagacgtcttgtgatgtaattattatacgaatggggg

SEQ ID NO: 61224 - DNA, 120 bp, Homo sapiens
  misc_feature: 1296 for SV(W|O) and mtDNA
gtcgtgtagcggtgaaagtggtttggtttagacgtccgggaattgcatctgtttttaagcctaatgtggggacagctcatgagtgcaagacgtcttgtgatgtaattattatacgaatgg

SEQ ID NO: 61225 - DNA, 120 bp, Homo sapiens
  misc_feature: 1296 for SV(W|O) and mtDNA
ctcatatgaagtcaccctagccatcattctactatcaacattactaataagtggctcctttaacctctccacccttatcacaacacaagaacacctctgattactcctgccatcatgacc

SEQ ID NO: 61226 - DNA, 120 bp, Homo sapiens
  misc_feature: 1296 for SV(W|O) and mtDNA
aaaaactagcccccatctcaatcatataccaaatctctccctcactaaacgtaagccttctcctcactctctcaatcttatccatcatagcaggcagttgaggtggattaaaccaaaccc

SEQ ID NO: 61227 - DNA, 120 bp, Homo sapiens
  misc_feature: 1296 for SV(W|O) and mtDNA
ccccttacgagtgcggcttcgaccctatatcccccgcccgcgtccctttctccataaaattcttcttagtagctattaccttcttattatttgatctagaaattgccctccttttacccc

SEQ ID NO: 61228 - DNA, 120 bp, Homo sapiens
  misc_feature: 1296 for SV(W|O) and mtDNA
catagaagagcttatcacctttcatgatcacgccctcataatcattttccttatctgcttcctagtcctgtatgcccttttcctaacactcacaacaaaactaactaatactaacatctc

SEQ ID NO: 61229 - DNA, 120 bp, Homo sapiens
  misc_feature: 1296 for SV(W|O) and mtDNA
acaaatagcccttctaaacgctaatccaagcctcaccccactactaggcctcctcctagcagcagcaggcaaatcagcccaattaggtctccacccctgactcccctcagccatagaagg

SEQ ID NO: 61230 - DNA, 120 bp, Homo sapiens
  misc_feature: 1296 for SV(W|O) and mtDNA
ccccatcgctgggtcaatagtacttgccgcagtactcttaaaactaggcggctatggtataatacgcctcacactcattctcaaccccctgacaaaacacatagcctaccccttccttgt

SEQ ID NO: 61231 - DNA, 120 bp, Homo sapiens
  misc_feature: 1296 for SV(W|O) and mtDNA
agtttgtaattactgtggcccctcagaatgatatttggcctcacgggaggacatagcctatgaaggctgttgctatagttgcaagcaggaggataatgccgatgtttcaggtttctgagt

SEQ ID NO: 61232 - DNA, 120 bp, Homo sapiens
  misc_feature: 1296 for SV(W|O) and mtDNA
actggttgaacattgtttgttggtgtatatattgtaattgagattgctcgggggaataggttatgtgattaggagtagggttaggatgagtgggaagaagaaagagaggaagtaaagttt

SEQ ID NO: 61233 - DNA, 120 bp, Homo sapiens
  misc_feature: 1295 for SV(W|O) and mtDNA
tttaatctgacgcaggcttatgcggaggagaatgttttcatgttacttatactaacattagttcttctatagggtgatagattggtccaattgggtatgaggagttcagttatatgtttg

SEQ ID NO: 61234 - DNA, 120 bp, Homo sapiens
  misc_feature: 1295 for SV(W|O) and mtDNA
aaatctctccctcactaaacgtaagccttctcctcactctctcaatcttatccatcatagcaggcagttgaggtggattaaaccaaacccagctacgcaaaatcttagcatactcctcaa

SEQ ID NO: 61235 - DNA, 120 bp, Homo sapiens
  misc_feature: 1295 for SV(W|O) and mtDNA
ataggtgttggtatagaatggggtctcctcctccggcggggtcgaagaaggtggtgttgaggttgcggtctgttagtagtatagtgatgccagcagctaggactgggagagataggagaa

SEQ ID NO: 61236 - DNA, 120 bp, Homo sapiens
  misc_feature: 1295 for SV(W|O) and mtDNA
tggctgattgaagagtatgcaatgagcgattttaggtctgtttgtcgtaggcagatggagcttgttataattatgcctcatagggatagtacaaggaaggggtaggctatgtgttttgtc

SEQ ID NO: 61237 - DNA, 120 bp, Homo sapiens
  misc_feature: 1295 for SV(W|O) and mtDNA
gattgtaatgggtatggagacatatcatataagtaatgctagggtgagtggtaggaagttttttcataggaggtgtatgagttggtcgtagcggaatcgggggtatgctgttcgaattca

SEQ ID NO: 61238 - DNA, 120 bp, Homo sapiens
  misc_feature: 1295 for SV(W|O) and mtDNA
tgaacattgtttgttggtgtatatattgtaattgagattgctcgggggaataggttatgtgattaggagtagggttaggatgagtgggaagaagaaagagaggaagtaaagtttaattat

SEQ ID NO: 61239 - DNA, 120 bp, Homo sapiens
  misc_feature: 1295 for SV(W|O) and mtDNA
tctcatagtcctagaaataagggggtttaagctcctattatttactctatcaaagtaactcttttatcagacatatttcttaggtttgagggggaatgctggagattgtaatgggtatgg

SEQ ID NO: 61240 - DNA, 120 bp, Homo sapiens
  misc_feature: 1295 for SV(W|O) and mtDNA
tcctaggaagattgtagtggtgagggtgtttattataataatgtttgtgtattcggctatgaagaatagggcgaaggggcctgcggcgtattcgatgttgaagcctgagactagttcgga

SEQ ID NO: 61241 - DNA, 120 bp, Homo sapiens
  misc_feature: 1295 for SV(W|O) and mtDNA
tcagatatgttaaagccactttcgtagtctattttgtgtcaactggagttttttacaactcaggtgagttttagctttattggggagggggtgatctaaaacactctttacgccggcttc

SEQ ID NO: 61242 - DNA, 120 bp, Homo sapiens
  misc_feature: 1295 for SV(W|O) and mtDNA
atcggtgcccccgatatggcgtttccccgcataaacaacataagcttctgactcttacctccctctctcctactcctgctcgcatctgctatagtggaggccggagcaggaacaggttga

SEQ ID NO: 61243 - DNA, 120 bp, Homo sapiens
  misc_feature: 1295 for SV(W|O) and mtDNA
ctccatgcatttggtattttcgtctggggggtatgcacgcgatagcattgcgagacgctggagccggagcaccctatgtcgcagtatctgtctttgattcctgcctcatcccattattta

SEQ ID NO: 61244 - DNA, 120 bp, Homo sapiens
  misc_feature: 1295 for SV(W|O) and mtDNA
gttcctaggaagattgtagtggtgagggtgtttattataataatgtttgtgtattcggctatgaagaatagggcgaaggggcctgcggcgtattcgatgttgaagcctgagactagttcg

SEQ ID NO: 61245 - DNA, 120 bp, Homo sapiens
  misc_feature: 1295 for SV(W|O) and mtDNA
gtgaggcttggattagcgtttagaagggctatttgttgtgggtctcatgagttggagtgtaggataaatcatgctaaggcgaggatgaaaccgatatcgccgatacggttgtataggatt

SEQ ID NO: 61246 - DNA, 120 bp, Homo sapiens
  misc_feature: 1295 for SV(W|O) and mtDNA
gtcgaagcccccatcgctgggtcaatagtacttgccgcagtactcttaaaactaggcggctatggtataatacgcctcacactcattctcaaccccctgacaaaacacatagcctacccc

SEQ ID NO: 61247 - DNA, 120 bp, Homo sapiens
  misc_feature: 1295 for SV(W|O) and mtDNA
cctcaccccactactaggcctcctcctagcagcagcaggcaaatcagcccaattaggtctccacccctgactcccctcagccatagaaggccccaccccagtctcagccctactccactc

SEQ ID NO: 61248 - DNA, 120 bp, Homo sapiens
  misc_feature: 1295 for SV(W|O) and mtDNA
aatgcatggagagctcccgtgagtggttaatagggtgatagacctgtgatccatcgtgatgtcttatttaaggggaacgtgtgggctatttaggctttatgaccctgaagtaggaaccag

SEQ ID NO: 61249 - DNA, 120 bp, Homo sapiens
  misc_feature: 1295 for SV(W|O) and mtDNA
aattgaacctctgactgtaaagttttaagttttatgcgattaccgggctctgccatcttaacaaaccctgttcttgggtgggtgtgggtataatactaagttgagatgatatcatttacg

SEQ ID NO: 61250 - DNA, 120 bp, Homo sapiens
  misc_feature: 1295 for SV(W|O) and mtDNA
cgaaatacatagcggttgttgatgggtgagtcaatacttgggtggtacccaaatctgcttccccatgaaagaatagagaatagtttaaattagaatcttagctttgggtgctaatggtgg

SEQ ID NO: 61251 - DNA, 120 bp, Homo sapiens
  misc_feature: 1295 for SV(W|O) and mtDNA
aacatattttgtcaccaagaccctacttctaacctccctgttcttatgaattcgaacagcatacccccgattccgctacgaccaactcatacacctcctatgaaaaaacttcctaccact

SEQ ID NO: 61252 - DNA, 120 bp, Homo sapiens
  misc_feature: 1295 for SV(W|O) and mtDNA
aagattgagagagtgaggagaaggcttacgtttagtgagggagagatttggtatatgattgagatgggggctagtttttgtcatgtgagaagaagcaggccggatgtcagaggggtgcct

SEQ ID NO: 61253 - DNA, 120 bp, Homo sapiens
  misc_feature: 1294 for SV(W|O) and mtDNA
ttttgggttgaggtgatgatggaggtggagatttggtgctgtgaaattgttttaggtaatagcttttctagtcaggttaggtctaggaggagtaggggcaggttttggctcgtaagaagg

SEQ ID NO: 61254 - DNA, 120 bp, Homo sapiens
  misc_feature: 1294 for SV(W|O) and mtDNA
tggagaaataaaatgtgcatagtggggattttattttaagtttgttggttaggtagttgaggtctagggctgttagaagtcctaggaaagtgacagcgagggctgtgagttttaggtaga

SEQ ID NO: 61255 - DNA, 120 bp, Homo sapiens
  misc_feature: 1294 for SV(W|O) and mtDNA
gagtgcggcttcgaccctatatcccccgcccgcgtccctttctccataaaattcttcttagtagctattaccttcttattatttgatctagaaattgccctccttttacccctaccatga

SEQ ID NO: 61256 - DNA, 120 bp, Homo sapiens
  misc_feature: 1294 for SV(W|O) and mtDNA
gaggcaggagtccgaggaggttagttgtggcaataaaaatgattaaggatactagtataagagatcaggttcgtcctttagtgttgtgtatggttatcatttgttttgaggttagtttga

SEQ ID NO: 61257 - DNA, 120 bp, Homo sapiens
  misc_feature: 1294 for SV(W|O) and mtDNA
ccccttcgccctattcttcatagccgaatacacaaacattattataataaacaccctcaccactacaatcttcctaggaacaacatatgacgcactctcccctgaactctacacaacata

SEQ ID NO: 61258 - DNA, 120 bp, Homo sapiens
  misc_feature: 1294 for SV(W|O) and mtDNA
tagtgcttgagtggagtagggctgagactggggtggggccttctatggctgaggggagtcaggggtggagacctaattgggctgatttgcctgctgctgctaggaggaggcctagtagtg

SEQ ID NO: 61259 - DNA, 120 bp, Homo sapiens
  misc_feature: 1294 for SV(W|O) and mtDNA
ccttacgagtgcggcttcgaccctatatcccccgcccgcgtccctttctccataaaattcttcttagtagctattaccttcttattatttgatctagaaattgccctccttttaccccta

SEQ ID NO: 61260 - DNA, 120 bp, Homo sapiens
  misc_feature: 1294 for SV(W|O) and mtDNA
taggatgagtgggaagaagaaagagaggaagtaaagtttaattatgcctttttgggttgaggtgatgatggaggtggagatttggtgctgtgaaattgttttaggtaatagcttttctag

SEQ ID NO: 61261 - DNA, 120 bp, Homo sapiens
  misc_feature: 1294 for SV(W|O) and mtDNA
agatatgttaaagccactttcgtagtctattttgtgtcaactggagttttttacaactcaggtgagttttagctttattggggagggggtgatctaaaacactctttacgccggcttcta

SEQ ID NO: 61262 - DNA, 120 bp, Homo sapiens
  misc_feature: 1294 for SV(W|O) and mtDNA
aagcaatcctatacaaccgtatcggcgatatcggtttcatcctcgccttagcatgatttatcctacactccaactcatgagacccacaacaaatagcccttctaaacgctaatccaagcc

SEQ ID NO: 61263 - DNA, 120 bp, Homo sapiens
  misc_feature: 1294 for SV(W|O) and mtDNA
attccccctcaaacctaagaaatatgtctgataaaagagttactttgatagagtaaataataggagcttaaacccccttatttctaggactatgagaatcgaacccatccctgagaatcc

SEQ ID NO: 61264 - DNA, 120 bp, Homo sapiens
  misc_feature: 1294 for SV(W|O) and mtDNA
aaactcaaactacgccctgatcggcgcactgcgagcagtagcccaaacaatctcatatgaagtcaccctagccatcattctactatcaacattactaataagtggctcctttaacctctc

SEQ ID NO: 61265 - DNA, 120 bp, Homo sapiens
  misc_feature: 1294 for SV(W|O) and mtDNA
aaatcccaaacatataactgaactcctcatacccaattggaccaatctatcaccctatagaagaactaatgttagtataagtaacatgaaaacattctcctccgcataagcctgcgtcag

SEQ ID NO: 61266 - DNA, 120 bp, Homo sapiens
  misc_feature: 1294 for SV(W|O) and mtDNA
agggctcatggtaggggtaaaaggagggcaatttctagatcaaataataagaaggtaatagctactaagaagaattttatggagaaagggacgcgggcgggggatatagggtcgaagccg

SEQ ID NO: 61267 - DNA, 120 bp, Homo sapiens
  misc_feature: 1294 for SV(W|O) and mtDNA
agtcctagaaataagggggtttaagctcctattatttactctatcaaagtaactcttttatcagacatatttcttaggtttgagggggaatgctggagattgtaatgggtatggagacat

SEQ ID NO: 61268 - DNA, 120 bp, Homo sapiens
  misc_feature: 1294 for SV(W|O) and mtDNA
agtggaagtgaaatcacatggctaggccggaggtcattaggagggctgagagggcccctgttaggggtcatgggctgggttttactatatgataggcatgtgattggtgggtcattatgt

SEQ ID NO: 61269 - DNA, 120 bp, Homo sapiens
  misc_feature: 1294 for SV(W|O) and mtDNA
actctacacaacatattttgtcaccaagaccctacttctaacctccctgttcttatgaattcgaacagcatacccccgattccgctacgaccaactcatacacctcctatgaaaaaactt

SEQ ID NO: 61270 - DNA, 120 bp, Homo sapiens
  misc_feature: 1293 for SV(W|O) and mtDNA
agtatacttcaaaggacatttaactaaaacccctacgcatttatatagaggagacaagtcgtaacatggtaagtgtactggaaagtgcacttggacgaaccagagtgtagcttaacacaa

SEQ ID NO: 61271 - DNA, 120 bp, Homo sapiens
  misc_feature: 1293 for SV(W|O) and mtDNA
ttgcgtagctgggtttggtttaatccacctcaactgcctgctatgatggataagattgagagagtgaggagaaggcttacgtttagtgagggagagatttggtatatgattgagatgggg

SEQ ID NO: 61272 - DNA, 120 bp, Homo sapiens
  misc_feature: 1293 for SV(W|O) and mtDNA
tgctataggcgcttgtcagggaggtagcgatgagagtaatagatagggctcaggcgtttgtgtatgatatgtttgcggtttcgatgatgtggtctttggagtagaaacctgtgaggaaag

SEQ ID NO: 61273 - DNA, 120 bp, Homo sapiens
  misc_feature: 1293 for SV(W|O) and mtDNA
agcgcgtacacaccgcccgtcaccctcctcaagtatacttcaaaggacatttaactaaaacccctacgcatttatatagaggagacaagtcgtaacatggtaagtgtactggaaagtgca

SEQ ID NO: 61274 - DNA, 120 bp, Homo sapiens
  misc_feature: 1293 for SV(W|O) and mtDNA
tgatgtctgtgtggaaagcggctgtgcagacattcaattgttattattatgtcctacaagcattaattaattaacacactttagtaagtatgttcgcctgtaatattgaacgtaggtgcg

SEQ ID NO: 61275 - DNA, 120 bp, Homo sapiens
  misc_feature: 1293 for SV(W|O) and mtDNA
tgatggcgggcaggatagttcagacggtttctatttcctgagcgtctgagatgttagtattagttagttttgttgtgagtgttaggaaaagggcatacaggactaggaagcagataagga

SEQ ID NO: 61276 - DNA, 120 bp, Homo sapiens
  misc_feature: 1293 for SV(W|O) and mtDNA
tcctgtaagtaggagagtgatatttgatcaggagaacgtggttactagcacagagagttctcccagtaggttaatagtggggggtaaggcgaggttagcgaggcttgctagaagtcatca

SEQ ID NO: 61277 - DNA, 120 bp, Homo sapiens
  misc_feature: 1293 for SV(W|O) and mtDNA
tgagtcctgtaagtaggagagtgatatttgatcaggagaacgtggttactagcacagagagttctcccagtaggttaatagtggggggtaaggcgaggttagcgaggcttgctagaagtc

SEQ ID NO: 61278 - DNA, 120 bp, Homo sapiens
  misc_feature: 1293 for SV(W|O) and mtDNA
ctcatagtcctagaaataagggggtttaagctcctattatttactctatcaaagtaactcttttatcagacatatttcttaggtttgagggggaatgctggagattgtaatgggtatgga

SEQ ID NO: 61279 - DNA, 120 bp, Homo sapiens
  misc_feature: 1293 for SV(W|O) and mtDNA
ggttaaaggagccacttattagtaatgttgatagtagaatgatggctagggtgacttcatatgagattgtttgggctactgctcgcagtgcgccgatcagggcgtagtttgagtttgatg

SEQ ID NO: 61280 - DNA, 120 bp, Homo sapiens
  misc_feature: 1293 for SV(W|O) and mtDNA
gggctcatggtaggggtaaaaggagggcaatttctagatcaaataataagaaggtaatagctactaagaagaattttatggagaaagggacgcgggcgggggatatagggtcgaagccgc

SEQ ID NO: 61281 - DNA, 120 bp, Homo sapiens
  misc_feature: 1293 for SV(W|O) and mtDNA
caagcaatcctatacaaccgtatcggcgatatcggtttcatcctcgccttagcatgatttatcctacactccaactcatgagacccacaacaaatagcccttctaaacgctaatccaagc

SEQ ID NO: 61282 - DNA, 120 bp, Homo sapiens
  misc_feature: 1293 for SV(W|O) and mtDNA
cacccactacctaaaaaatcccaaacatataactgaactcctcatacccaattggaccaatctatcaccctatagaagaactaatgttagtataagtaacatgaaaacattctcctccgc

SEQ ID NO: 61283 - DNA, 120 bp, Homo sapiens
  misc_feature: 1293 for SV(W|O) and mtDNA
gccgcggtaccctaaccgtgcaaaggtagcataatcacttgttccttaaatagggacctgtatgaatggctccacgagggttcagctgtctcttacttttaaccagtgaaattgacctgc

SEQ ID NO: 61284 - DNA, 120 bp, Homo sapiens
  misc_feature: 1293 for SV(W|O) and mtDNA
gccattcaagcaatcctatacaaccgtatcggcgatatcggtttcatcctcgccttagcatgatttatcctacactccaactcatgagacccacaacaaatagcccttctaaacgctaat

SEQ ID NO: 61285 - DNA, 120 bp, Homo sapiens
  misc_feature: 1293 for SV(W|O) and mtDNA
gaggcttggattagcgtttagaagggctatttgttgtgggtctcatgagttggagtgtaggataaatcatgctaaggcgaggatgaaaccgatatcgccgatacggttgtataggattgc

SEQ ID NO: 61286 - DNA, 120 bp, Homo sapiens
  misc_feature: 1293 for SV(W|O) and mtDNA
caaacctaagaaatatgtctgataaaagagttactttgatagagtaaataataggagcttaaacccccttatttctaggactatgagaatcgaacccatccctgagaatccaaaattctc

SEQ ID NO: 61287 - DNA, 120 bp, Homo sapiens
  misc_feature: 1293 for SV(W|O) and mtDNA
cttgagagaggattatgatgcgactgtgagtgcgttcgtagtttgagtttgctaggcagaatagtaatgaggatgtaagcccgtgggcgattatgagaatgactgcgccggtgaagcttc

SEQ ID NO: 61288 - DNA, 120 bp, Homo sapiens
  misc_feature: 1293 for SV(W|O) and mtDNA
gaaattgttttaggtaatagcttttctagtcaggttaggtctaggaggagtaggggcaggttttggctcgtaagaaggcctagataggggattgtgcggtgtgtgatgctagggtagaat

SEQ ID NO: 61289 - DNA, 120 bp, Homo sapiens
  misc_feature: 1293 for SV(W|O) and mtDNA
acacccactacctaaaaaatcccaaacatataactgaactcctcatacccaattggaccaatctatcaccctatagaagaactaatgttagtataagtaacatgaaaacattctcctccg

SEQ ID NO: 61290 - DNA, 120 bp, Homo sapiens
  misc_feature: 1293 for SV(W|O) and mtDNA
aagtaggaaccagatgtcggatacagttcactttagctacccccaagtgttatgggcccggagcgaggagagtagcactcttgtgcgggatattgatttcacggaggatggtggtcaagg

SEQ ID NO: 61291 - DNA, 120 bp, Homo sapiens
  misc_feature: 1293 for SV(W|O) and mtDNA
cccttacgagtgcggcttcgaccctatatcccccgcccgcgtccctttctccataaaattcttcttagtagctattaccttcttattatttgatctagaaattgccctccttttacccct

SEQ ID NO: 61292 - DNA, 120 bp, Homo sapiens
  misc_feature: 1293 for SV(W|O) and mtDNA
attctaggctatatacaactacgcaaaggccccaacgttgtaggcccctacgggctactacaacccttcgctgacgccataaaactcttcaccaaagagcccctaaaacccgccacatct

SEQ ID NO: 61293 - DNA, 120 bp, Homo sapiens
  misc_feature: 1293 for SV(W|O) and mtDNA
aggcttggattagcgtttagaagggctatttgttgtgggtctcatgagttggagtgtaggataaatcatgctaaggcgaggatgaaaccgatatcgccgatacggttgtataggattgct

SEQ ID NO: 61294 - DNA, 120 bp, Homo sapiens
  misc_feature: 1292 for SV(W|O) and mtDNA
ttgatagttcttgggcagtgagagtgagtagtagaatgtttagtgagcctagggtgttgtgagtgtaaattagtgcgatgagtaggggaagggagcctactagggtgtagaataggaagt

SEQ ID NO: 61295 - DNA, 120 bp, Homo sapiens
  misc_feature: 1292 for SV(W|O) and mtDNA
gtctgtgtggaaagcggctgtgcagacattcaattgttattattatgtcctacaagcattaattaattaacacactttagtaagtatgttcgcctgtaatattgaacgtaggtgcgataa

SEQ ID NO: 61296 - DNA, 120 bp, Homo sapiens
  misc_feature: 1292 for SV(W|O) and mtDNA
gtaattactgtggcccctcagaatgatatttggcctcacgggaggacatagcctatgaaggctgttgctatagttgcaagcaggaggataatgccgatgtttcaggtttctgagtagaga

SEQ ID NO: 61297 - DNA, 120 bp, Homo sapiens
  misc_feature: 1292 for SV(W|O) and mtDNA
ggtaaacaggcggggtaagatttgccgagttccttttactttttttaacctttccttatgagcatgcctgtgttgggttgacagtgagggtaataatgacttgttggttgattgtagata

SEQ ID NO: 61298 - DNA, 120 bp, Homo sapiens
  misc_feature: 1292 for SV(W|O) and mtDNA
taggcgcttgtcagggaggtagcgatgagagtaatagatagggctcaggcgtttgtgtatgatatgtttgcggtttcgatgatgtggtctttggagtagaaacctgtgaggaaaggtatt

SEQ ID NO: 61299 - DNA, 120 bp, Homo sapiens
  misc_feature: 1292 for SV(W|O) and mtDNA
agattcctgctacaactatagtgcttgagtggagtagggctgagactggggtggggccttctatggctgaggggagtcaggggtggagacctaattgggctgatttgcctgctgctgcta

SEQ ID NO: 61300 - DNA, 120 bp, Homo sapiens
  misc_feature: 1292 for SV(W|O) and mtDNA
ggtgggtgtgggtataatactaagttgagatgatatcatttacgggggaaggcgctttgtgaagtaggccttatttctcttgtcctttcgtacagggaggaatttgaagtagatagaaac

SEQ ID NO: 61301 - DNA, 120 bp, Homo sapiens
  misc_feature: 1292 for SV(W|O) and mtDNA
gttacccaaggcacccctctgacatccggcctgcttcttctcacatgacaaaaactagcccccatctcaatcatataccaaatctctccctcactaaacgtaagccttctcctcactctc

SEQ ID NO: 61302 - DNA, 120 bp, Homo sapiens
  misc_feature: 1292 for SV(W|O) and mtDNA
cattatttatcgcacctacgttcaatattacaggcgaacatacttactaaagtgtgttaattaattaatgcttgtaggacataataataacaattgaatgtctgcacagccgctttccac

SEQ ID NO: 61303 - DNA, 120 bp, Homo sapiens
  misc_feature: 1292 for SV(W|O) and mtDNA
accagccagaacgcctgaacgcaggcacatacttcctattctacaccctagtaggctcccttcccctactcatcgcactaatttacactcacaacaccctaggctcactaaacattctac

SEQ ID NO: 61304 - DNA, 120 bp, Homo sapiens
  misc_feature: 1292 for SV(W|O) and mtDNA
ggtggtcaagggacccctatctgaggggggtcatccatggggacgagaagggatttgactgtaatgtgctatgtacggtaaatggctttatgtactatgtactgttaagggtgggtaggt

SEQ ID NO: 61305 - DNA, 120 bp, Homo sapiens
  misc_feature: 1292 for SV(W|O) and mtDNA
ggtcgtgtagcggtgaaagtggtttggtttagacgtccgggaattgcatctgtttttaagcctaatgtggggacagctcatgagtgcaagacgtcttgtgatgtaattattatacgaatg

SEQ ID NO: 61306 - DNA, 120 bp, Homo sapiens
  misc_feature: 1292 for SV(W|O) and mtDNA
gacgctcaggaaatagaaaccgtctgaactatcctgcccgccatcatcctagtcctcatcgccctcccatccctacgcatcctttacataacagacgaggtcaacgatccctcccttacc

SEQ ID NO: 61307 - DNA, 120 bp, Homo sapiens
  misc_feature: 1292 for SV(W|O) and mtDNA
gggtcccttgaccaccatcctccgtgaaatcaatatcccgcacaagagtgctactctcctcgctccgggcccataacacttgggggtagctaaagtgaactgtatccgacatctggttcc

SEQ ID NO: 61308 - DNA, 120 bp, Homo sapiens
  misc_feature: 1292 for SV(W|O) and mtDNA
cagataggggtcccttgaccaccatcctccgtgaaatcaatatcccgcacaagagtgctactctcctcgctccgggcccataacacttgggggtagctaaagtgaactgtatccgacatc

SEQ ID NO: 61309 - DNA, 120 bp, Homo sapiens
  misc_feature: 1292 for SV(W|O) and mtDNA
cggtcgtgtagcggtgaaagtggtttggtttagacgtccgggaattgcatctgtttttaagcctaatgtggggacagctcatgagtgcaagacgtcttgtgatgtaattattatacgaat

SEQ ID NO: 61310 - DNA, 120 bp, Homo sapiens
  misc_feature: 1292 for SV(W|O) and mtDNA
ccttgagagaggattatgatgcgactgtgagtgcgttcgtagtttgagtttgctaggcagaatagtaatgaggatgtaagcccgtgggcgattatgagaatgactgcgccggtgaagctt

SEQ ID NO: 61311 - DNA, 120 bp, Homo sapiens
  misc_feature: 1292 for SV(W|O) and mtDNA
ccggagcaccctatgtcgcagtatctgtctttgattcctgcctcatcccattatttatcgcacctacgttcaatattacaggcgaacatacttactaaagtgtgttaattaattaatgct

SEQ ID NO: 61312 - DNA, 120 bp, Homo sapiens
  misc_feature: 1292 for SV(W|O) and mtDNA
aatctcatatgaagtcaccctagccatcattctactatcaacattactaataagtggctcctttaacctctccacccttatcacaacacaagaacacctctgattactcctgccatcatg

SEQ ID NO: 61313 - DNA, 120 bp, Homo sapiens
  misc_feature: 1292 for SV(W|O) and mtDNA
agcccccatcgctgggtcaatagtacttgccgcagtactcttaaaactaggcggctatggtataatacgcctcacactcattctcaaccccctgacaaaacacatagcctaccccttcct

SEQ ID NO: 61314 - DNA, 120 bp, Homo sapiens
  misc_feature: 1291 for SV(W|O) and mtDNA
tttgggttgaggtgatgatggaggtggagatttggtgctgtgaaattgttttaggtaatagcttttctagtcaggttaggtctaggaggagtaggggcaggttttggctcgtaagaaggc

SEQ ID NO: 61315 - DNA, 120 bp, Homo sapiens
  misc_feature: 1291 for SV(W|O) and mtDNA
ttgtaattactgtggcccctcagaatgatatttggcctcacgggaggacatagcctatgaaggctgttgctatagttgcaagcaggaggataatgccgatgtttcaggtttctgagtaga

SEQ ID NO: 61316 - DNA, 120 bp, Homo sapiens
  misc_feature: 1291 for SV(W|O) and mtDNA
gatggcgggcaggatagttcagacggtttctatttcctgagcgtctgagatgttagtattagttagttttgttgtgagtgttaggaaaagggcatacaggactaggaagcagataaggaa

SEQ ID NO: 61317 - DNA, 120 bp, Homo sapiens
  misc_feature: 1291 for SV(W|O) and mtDNA
gtttgatagttcttgggcagtgagagtgagtagtagaatgtttagtgagcctagggtgttgtgagtgtaaattagtgcgatgagtaggggaagggagcctactagggtgtagaataggaa

SEQ ID NO: 61318 - DNA, 120 bp, Homo sapiens
  misc_feature: 1291 for SV(W|O) and mtDNA
ttaggatgagtgggaagaagaaagagaggaagtaaagtttaattatgcctttttgggttgaggtgatgatggaggtggagatttggtgctgtgaaattgttttaggtaatagcttttcta

SEQ ID NO: 61319 - DNA, 120 bp, Homo sapiens
  misc_feature: 1291 for SV(W|O) and mtDNA
ggtgcccccgatatggcgtttccccgcataaacaacataagcttctgactcttacctccctctctcctactcctgctcgcatctgctatagtggaggccggagcaggaacaggttgaaca

SEQ ID NO: 61320 - DNA, 120 bp, Homo sapiens
  misc_feature: 1291 for SV(W|O) and mtDNA
tacgcctaatctactccacctcaatcacactactccccatatctaacaacgtaaaaataaaatgacagtttgaacatacaaaacccaccccattcctccccacactcatcgcccttacca

SEQ ID NO: 61321 - DNA, 120 bp, Homo sapiens
  misc_feature: 1291 for SV(W|O) and mtDNA
acgctcaggaaatagaaaccgtctgaactatcctgcccgccatcatcctagtcctcatcgccctcccatccctacgcatcctttacataacagacgaggtcaacgatccctcccttacca

SEQ ID NO: 61322 - DNA, 120 bp, Homo sapiens
  misc_feature: 1291 for SV(W|O) and mtDNA
tctcatatgaagtcaccctagccatcattctactatcaacattactaataagtggctcctttaacctctccacccttatcacaacacaagaacacctctgattactcctgccatcatgac

SEQ ID NO: 61323 - DNA, 120 bp, Homo sapiens
  misc_feature: 1291 for SV(W|O) and mtDNA
ctgctacaactatagtgcttgagtggagtagggctgagactggggtggggccttctatggctgaggggagtcaggggtggagacctaattgggctgatttgcctgctgctgctaggagga

SEQ ID NO: 61324 - DNA, 120 bp, Homo sapiens
  misc_feature: 1291 for SV(W|O) and mtDNA
atctcatatgaagtcaccctagccatcattctactatcaacattactaataagtggctcctttaacctctccacccttatcacaacacaagaacacctctgattactcctgccatcatga

SEQ ID NO: 61325 - DNA, 120 bp, Homo sapiens
  misc_feature: 1291 for SV(W|O) and mtDNA
gtagctgggtttggtttaatccacctcaactgcctgctatgatggataagattgagagagtgaggagaaggcttacgtttagtgagggagagatttggtatatgattgagatgggggcta

SEQ ID NO: 61326 - DNA, 120 bp, Homo sapiens
  misc_feature: 1291 for SV(W|O) and mtDNA
tacccaaggcacccctctgacatccggcctgcttcttctcacatgacaaaaactagcccccatctcaatcatataccaaatctctccctcactaaacgtaagccttctcctcactctctc

SEQ ID NO: 61327 - DNA, 120 bp, Homo sapiens
  misc_feature: 1291 for SV(W|O) and mtDNA
gtcctgtaagtaggagagtgatatttgatcaggagaacgtggttactagcacagagagttctcccagtaggttaatagtggggggtaaggcgaggttagcgaggcttgctagaagtcatc

SEQ ID NO: 61328 - DNA, 120 bp, Homo sapiens
  misc_feature: 1291 for SV(W|O) and mtDNA
gtagttccctgctaagggagggtagactgttcaacctgttcctgctccggcctccactatagcagatgcgagcaggagtaggagagagggaggtaagagtcagaagcttatgttgtttat

SEQ ID NO: 61329 - DNA, 120 bp, Homo sapiens
  misc_feature: 1291 for SV(W|O) and mtDNA
gtagcggtgaaagtggtttggtttagacgtccgggaattgcatctgtttttaagcctaatgtggggacagctcatgagtgcaagacgtcttgtgatgtaattattatacgaatgggggct

SEQ ID NO: 61330 - DNA, 120 bp, Homo sapiens
  misc_feature: 1291 for SV(W|O) and mtDNA
aggccaccacacaccacctgtccaaaaaggccttcgatacgggataatcctatttattacctcagaagtttttttcttcgcaggatttttctgagccttttaccactccagcctagcccc

SEQ ID NO: 61331 - DNA, 120 bp, Homo sapiens
  misc_feature: 1291 for SV(W|O) and mtDNA
aactcaaactacgccctgatcggcgcactgcgagcagtagcccaaacaatctcatatgaagtcaccctagccatcattctactatcaacattactaataagtggctcctttaacctctcc

SEQ ID NO: 61332 - DNA, 120 bp, Homo sapiens
  misc_feature: 1291 for SV(W|O) and mtDNA
aagcgcgtacacaccgcccgtcaccctcctcaagtatacttcaaaggacatttaactaaaacccctacgcatttatatagaggagacaagtcgtaacatggtaagtgtactggaaagtgc

SEQ ID NO: 61333 - DNA, 120 bp, Homo sapiens
  misc_feature: 1291 for SV(W|O) and mtDNA
ccaaatctctccctcactaaacgtaagccttctcctcactctctcaatcttatccatcatagcaggcagttgaggtggattaaaccaaacccagctacgcaaaatcttagcatactcctc

SEQ ID NO: 61334 - DNA, 120 bp, Homo sapiens
  misc_feature: 1291 for SV(W|O) and mtDNA
gaataggtgttggtatagaatggggtctcctcctccggcggggtcgaagaaggtggtgttgaggttgcggtctgttagtagtatagtgatgccagcagctaggactgggagagataggag

SEQ ID NO: 61335 - DNA, 120 bp, Homo sapiens
  misc_feature: 1291 for SV(W|O) and mtDNA
ccgaggaggttagttgtggcaataaaaatgattaaggatactagtataagagatcaggttcgtcctttagtgttgtgtatggttatcatttgttttgaggttagtttgattagtcattgt

SEQ ID NO: 61336 - DNA, 120 bp, Homo sapiens
  misc_feature: 1291 for SV(W|O) and mtDNA
attttgcgtagctgggtttggtttaatccacctcaactgcctgctatgatggataagattgagagagtgaggagaaggcttacgtttagtgagggagagatttggtatatgattgagatg

SEQ ID NO: 61337 - DNA, 120 bp, Homo sapiens
  misc_feature: 1291 for SV(W|O) and mtDNA
atctgtctttgattcctgcctcatcccattatttatcgcacctacgttcaatattacaggcgaacatacttactaaagtgtgttaattaattaatgcttgtaggacataataataacaat

SEQ ID NO: 61338 - DNA, 120 bp, Homo sapiens
  misc_feature: 1291 for SV(W|O) and mtDNA
aggcaaatcagcccaattaggtctccacccctgactcccctcagccatagaaggccccaccccagtctcagccctactccactcaagcactatagttgtagcaggaatcttcttactcat

SEQ ID NO: 61339 - DNA, 120 bp, Homo sapiens
  misc_feature: 1291 for SV(W|O) and mtDNA
atagacctgtgatccatcgtgatgtcttatttaaggggaacgtgtgggctatttaggctttatgaccctgaagtaggaaccagatgtcggatacagttcactttagctacccccaagtgt

SEQ ID NO: 61340 - DNA, 120 bp, Homo sapiens
  misc_feature: 1290 for SV(W|O) and mtDNA
ttgtttgttggtgtatatattgtaattgagattgctcgggggaataggttatgtgattaggagtagggttaggatgagtgggaagaagaaagagaggaagtaaagtttaattatgccttt

SEQ ID NO: 61341 - DNA, 120 bp, Homo sapiens
  misc_feature: 1290 for SV(W|O) and mtDNA
gggttcgattctcatagtcctagaaataagggggtttaagctcctattatttactctatcaaagtaactcttttatcagacatatttcttaggtttgagggggaatgctggagattgtaa

SEQ ID NO: 61342 - DNA, 120 bp, Homo sapiens
  misc_feature: 1290 for SV(W|O) and mtDNA
tgggttcgattctcatagtcctagaaataagggggtttaagctcctattatttactctatcaaagtaactcttttatcagacatatttcttaggtttgagggggaatgctggagattgta

SEQ ID NO: 61343 - DNA, 120 bp, Homo sapiens
  misc_feature: 1290 for SV(W|O) and mtDNA
tgctacaactatagtgcttgagtggagtagggctgagactggggtggggccttctatggctgaggggagtcaggggtggagacctaattgggctgatttgcctgctgctgctaggaggag

SEQ ID NO: 61344 - DNA, 120 bp, Homo sapiens
  misc_feature: 1290 for SV(W|O) and mtDNA
tgcgtagctgggtttggtttaatccacctcaactgcctgctatgatggataagattgagagagtgaggagaaggcttacgtttagtgagggagagatttggtatatgattgagatggggg

SEQ ID NO: 61345 - DNA, 120 bp, Homo sapiens
  misc_feature: 1290 for SV(W|O) and mtDNA
acccactacctaaaaaatcccaaacatataactgaactcctcatacccaattggaccaatctatcaccctatagaagaactaatgttagtataagtaacatgaaaacattctcctccgca

SEQ ID NO: 61346 - DNA, 120 bp, Homo sapiens
  misc_feature: 1290 for SV(W|O) and mtDNA
tgagtgtgcctgcaaagatggtagagtagatgacgggttgggccaggggattaattagtacgggaagggtataaccaacattttcggggtatgggcccgatagcttatttagctgacctt

SEQ ID NO: 61347 - DNA, 120 bp, Homo sapiens
  misc_feature: 1290 for SV(W|O) and mtDNA
atagaagagcttatcacctttcatgatcacgccctcataatcattttccttatctgcttcctagtcctgtatgcccttttcctaacactcacaacaaaactaactaatactaacatctca

SEQ ID NO: 61348 - DNA, 120 bp, Homo sapiens
  misc_feature: 1290 for SV(W|O) and mtDNA
cttaggtttgagggggaatgctggagattgtaatgggtatggagacatatcatataagtaatgctagggtgagtggtaggaagttttttcataggaggtgtatgagttggtcgtagcgga

SEQ ID NO: 61349 - DNA, 120 bp, Homo sapiens
  misc_feature: 1290 for SV(W|O) and mtDNA
catgtttaacggccgcggtaccctaaccgtgcaaaggtagcataatcacttgttccttaaatagggacctgtatgaatggctccacgagggttcagctgtctcttacttttaaccagtga

SEQ ID NO: 61350 - DNA, 120 bp, Homo sapiens
  misc_feature: 1290 for SV(W|O) and mtDNA
tcacatgcctatcatatagtaaaacccagcccatgacccctaacaggggccctctcagccctcctaatgacctccggcctagccatgtgatttcacttccactccataacgctcctcata

SEQ ID NO: 61351 - DNA, 120 bp, Homo sapiens
  misc_feature: 1290 for SV(W|O) and mtDNA
tcaagcaatcctatacaaccgtatcggcgatatcggtttcatcctcgccttagcatgatttatcctacactccaactcatgagacccacaacaaatagcccttctaaacgctaatccaag

SEQ ID NO: 61352 - DNA, 120 bp, Homo sapiens
  misc_feature: 1290 for SV(W|O) and mtDNA
taccaaggccaccacacaccacctgtccaaaaaggccttcgatacgggataatcctatttattacctcagaagtttttttcttcgcaggatttttctgagccttttaccactccagccta

SEQ ID NO: 61353 - DNA, 120 bp, Homo sapiens
  misc_feature: 1290 for SV(W|O) and mtDNA
ctacctaaaaaatcccaaacatataactgaactcctcatacccaattggaccaatctatcaccctatagaagaactaatgttagtataagtaacatgaaaacattctcctccgcataagc

SEQ ID NO: 61354 - DNA, 120 bp, Homo sapiens
  misc_feature: 1290 for SV(W|O) and mtDNA
gatggcaggagtaatcagaggtgttcttgtgttgtgataagggtggagaggttaaaggagccacttattagtaatgttgatagtagaatgatggctagggtgacttcatatgagattgtt

SEQ ID NO: 61355 - DNA, 120 bp, Homo sapiens
  misc_feature: 1290 for SV(W|O) and mtDNA
aacctaagaaatatgtctgataaaagagttactttgatagagtaaataataggagcttaaacccccttatttctaggactatgagaatcgaacccatccctgagaatccaaaattctccg

SEQ ID NO: 61356 - DNA, 120 bp, Homo sapiens
  misc_feature: 1290 for SV(W|O) and mtDNA
cgagtgcggcttcgaccctatatcccccgcccgcgtccctttctccataaaattcttcttagtagctattaccttcttattatttgatctagaaattgccctccttttacccctaccatg

SEQ ID NO: 61357 - DNA, 120 bp, Homo sapiens
  misc_feature: 1290 for SV(W|O) and mtDNA
agaggttaaaggagccacttattagtaatgttgatagtagaatgatggctagggtgacttcatatgagattgtttgggctactgctcgcagtgcgccgatcagggcgtagtttgagtttg

SEQ ID NO: 61358 - DNA, 120 bp, Homo sapiens
  misc_feature: 1290 for SV(W|O) and mtDNA
agattgagagagtgaggagaaggcttacgtttagtgagggagagatttggtatatgattgagatgggggctagtttttgtcatgtgagaagaagcaggccggatgtcagaggggtgcctt

SEQ ID NO: 61359 - DNA, 120 bp, Homo sapiens
  misc_feature: 1289 for SV(W|O) and mtDNA
tgaactctacacaacatattttgtcaccaagaccctacttctaacctccctgttcttatgaattcgaacagcatacccccgattccgctacgaccaactcatacacctcctatgaaaaaa

SEQ ID NO: 61360 - DNA, 120 bp, Homo sapiens
  misc_feature: 1289 for SV(W|O) and mtDNA
ttatttctcttgtcctttcgtacagggaggaatttgaagtagatagaaaccgacctggattactccggtctgaactcagatcacgtaggactttaatcgttgaacaaacgaacctttaat

SEQ ID NO: 61361 - DNA, 120 bp, Homo sapiens
  misc_feature: 1289 for SV(W|O) and mtDNA
aagtatacttcaaaggacatttaactaaaacccctacgcatttatatagaggagacaagtcgtaacatggtaagtgtactggaaagtgcacttggacgaaccagagtgtagcttaacaca

SEQ ID NO: 61362 - DNA, 120 bp, Homo sapiens
  misc_feature: 1289 for SV(W|O) and mtDNA
tgtcaccaagaccctacttctaacctccctgttcttatgaattcgaacagcatacccccgattccgctacgaccaactcatacacctcctatgaaaaaacttcctaccactcaccctagc

SEQ ID NO: 61363 - DNA, 120 bp, Homo sapiens
  misc_feature: 1289 for SV(W|O) and mtDNA
tctgagtcccagaggttacccaaggcacccctctgacatccggcctgcttcttctcacatgacaaaaactagcccccatctcaatcatataccaaatctctccctcactaaacgtaagcc

SEQ ID NO: 61364 - DNA, 120 bp, Homo sapiens
  misc_feature: 1289 for SV(W|O) and mtDNA
tccggctgccaggcgtttaatggggtttagtagggtagggttattttcgttaatgttagtaagggtggggaagcgaggttgacctgttagggtgagaagaattattcgagtgctataggc

SEQ ID NO: 61365 - DNA, 120 bp, Homo sapiens
  misc_feature: 1289 for SV(W|O) and mtDNA
tacacaccgcccgtcaccctcctcaagtatacttcaaaggacatttaactaaaacccctacgcatttatatagaggagacaagtcgtaacatggtaagtgtactggaaagtgcacttgga

SEQ ID NO: 61366 - DNA, 120 bp, Homo sapiens
  misc_feature: 1289 for SV(W|O) and mtDNA
tatgatgtctgtgtggaaagcggctgtgcagacattcaattgttattattatgtcctacaagcattaattaattaacacactttagtaagtatgttcgcctgtaatattgaacgtaggtg

SEQ ID NO: 61367 - DNA, 120 bp, Homo sapiens
  misc_feature: 1289 for SV(W|O) and mtDNA
gtgggtgtgggtataatactaagttgagatgatatcatttacgggggaaggcgctttgtgaagtaggccttatttctcttgtcctttcgtacagggaggaatttgaagtagatagaaacc

SEQ ID NO: 61368 - DNA, 120 bp, Homo sapiens
  misc_feature: 1289 for SV(W|O) and mtDNA
aaacctaagaaatatgtctgataaaagagttactttgatagagtaaataataggagcttaaacccccttatttctaggactatgagaatcgaacccatccctgagaatccaaaattctcc

SEQ ID NO: 61369 - DNA, 120 bp, Homo sapiens
  misc_feature: 1289 for SV(W|O) and mtDNA
gctacaactatagtgcttgagtggagtagggctgagactggggtggggccttctatggctgaggggagtcaggggtggagacctaattgggctgatttgcctgctgctgctaggaggagg

SEQ ID NO: 61370 - DNA, 120 bp, Homo sapiens
  misc_feature: 1289 for SV(W|O) and mtDNA
aggtttgagggggaatgctggagattgtaatgggtatggagacatatcatataagtaatgctagggtgagtggtaggaagttttttcataggaggtgtatgagttggtcgtagcggaatc

SEQ ID NO: 61371 - DNA, 120 bp, Homo sapiens
  misc_feature: 1289 for SV(W|O) and mtDNA
gaagtaggaaccagatgtcggatacagttcactttagctacccccaagtgttatgggcccggagcgaggagagtagcactcttgtgcgggatattgatttcacggaggatggtggtcaag

SEQ ID NO: 61372 - DNA, 120 bp, Homo sapiens
  misc_feature: 1289 for SV(W|O) and mtDNA
gaactaggtctgtcccaatgtatgggatggcggatagtaagtttgtaattactgtggcccctcagaatgatatttggcctcacgggaggacatagcctatgaaggctgttgctatagttg

SEQ ID NO: 61373 - DNA, 120 bp, Homo sapiens
  misc_feature: 1289 for SV(W|O) and mtDNA
actacctaaaaaatcccaaacatataactgaactcctcatacccaattggaccaatctatcaccctatagaagaactaatgttagtataagtaacatgaaaacattctcctccgcataag

SEQ ID NO: 61374 - DNA, 120 bp, Homo sapiens
  misc_feature: 1289 for SV(W|O) and mtDNA
cggagcaccctatgtcgcagtatctgtctttgattcctgcctcatcccattatttatcgcacctacgttcaatattacaggcgaacatacttactaaagtgtgttaattaattaatgctt

SEQ ID NO: 61375 - DNA, 120 bp, Homo sapiens
  misc_feature: 1289 for SV(W|O) and mtDNA
cctcctcaagtatacttcaaaggacatttaactaaaacccctacgcatttatatagaggagacaagtcgtaacatggtaagtgtactggaaagtgcacttggacgaaccagagtgtagct

SEQ ID NO: 61376 - DNA, 120 bp, Homo sapiens
  misc_feature: 1289 for SV(W|O) and mtDNA
atccatcgtgatgtcttatttaaggggaacgtgtgggctatttaggctttatgaccctgaagtaggaaccagatgtcggatacagttcactttagctacccccaagtgttatgggcccgg

SEQ ID NO: 61377 - DNA, 120 bp, Homo sapiens
  misc_feature: 1289 for SV(W|O) and mtDNA
aataggcttccggctgccaggcgtttaatggggtttagtagggtagggttattttcgttaatgttagtaagggtggggaagcgaggttgacctgttagggtgagaagaattattcgagtg

SEQ ID NO: 61378 - DNA, 120 bp, Homo sapiens
  misc_feature: 1288 for SV(W|O) and mtDNA
ttctaaacgctaatccaagcctcaccccactactaggcctcctcctagcagcagcaggcaaatcagcccaattaggtctccacccctgactcccctcagccatagaaggccccaccccag

SEQ ID NO: 61379 - DNA, 120 bp, Homo sapiens
  misc_feature: 1288 for SV(W|O) and mtDNA
ttacgagtgcggcttcgaccctatatcccccgcccgcgtccctttctccataaaattcttcttagtagctattaccttcttattatttgatctagaaattgccctccttttacccctacc

SEQ ID NO: 61380 - DNA, 120 bp, Homo sapiens
  misc_feature: 1288 for SV(W|O) and mtDNA
tggcaggagtaatcagaggtgttcttgtgttgtgataagggtggagaggttaaaggagccacttattagtaatgttgatagtagaatgatggctagggtgacttcatatgagattgtttg

SEQ ID NO: 61381 - DNA, 120 bp, Homo sapiens
  misc_feature: 1288 for SV(W|O) and mtDNA
gttaaggagggtgatggtggctatgatggtggggatgatgaggctattgttttttgtgaattcttcgataatggcccatttgggcaaaaagccggttagcgggggcaggcctcctaggga

SEQ ID NO: 61382 - DNA, 120 bp, Homo sapiens
  misc_feature: 1288 for SV(W|O) and mtDNA
tccatgcatttggtattttcgtctggggggtatgcacgcgatagcattgcgagacgctggagccggagcaccctatgtcgcagtatctgtctttgattcctgcctcatcccattatttat

SEQ ID NO: 61383 - DNA, 120 bp, Homo sapiens
  misc_feature: 1288 for SV(W|O) and mtDNA
gtggtaaactttaatagtgtaggaagctgaataatttatgaaggagaggggtcagggttgattcgggaggatcctattggtgcgggggctttgtatgattatgggcgttgattagtagta

SEQ ID NO: 61384 - DNA, 120 bp, Homo sapiens
  misc_feature: 1288 for SV(W|O) and mtDNA
gtgaggcaggagtccgaggaggttagttgtggcaataaaaatgattaaggatactagtataagagatcaggttcgtcctttagtgttgtgtatggttatcatttgttttgaggttagttt

SEQ ID NO: 61385 - DNA, 120 bp, Homo sapiens
  misc_feature: 1288 for SV(W|O) and mtDNA
cctacgcctaatctactccacctcaatcacactactccccatatctaacaacgtaaaaataaaatgacagtttgaacatacaaaacccaccccattcctccccacactcatcgcccttac

SEQ ID NO: 61386 - DNA, 120 bp, Homo sapiens
  misc_feature: 1288 for SV(W|O) and mtDNA
ggttacccaaggcacccctctgacatccggcctgcttcttctcacatgacaaaaactagcccccatctcaatcatataccaaatctctccctcactaaacgtaagccttctcctcactct

SEQ ID NO: 61387 - DNA, 120 bp, Homo sapiens
  misc_feature: 1288 for SV(W|O) and mtDNA
ggtcccttgaccaccatcctccgtgaaatcaatatcccgcacaagagtgctactctcctcgctccgggcccataacacttgggggtagctaaagtgaactgtatccgacatctggttcct

SEQ ID NO: 61388 - DNA, 120 bp, Homo sapiens
  misc_feature: 1288 for SV(W|O) and mtDNA
ggatgagtgggaagaagaaagagaggaagtaaagtttaattatgcctttttgggttgaggtgatgatggaggtggagatttggtgctgtgaaattgttttaggtaatagcttttctagtc

SEQ ID NO: 61389 - DNA, 120 bp, Homo sapiens
  misc_feature: 1288 for SV(W|O) and mtDNA
aaacgctaatccaagcctcaccccactactaggcctcctcctagcagcagcaggcaaatcagcccaattaggtctccacccctgactcccctcagccatagaaggccccaccccagtctc

SEQ ID NO: 61390 - DNA, 120 bp, Homo sapiens
  misc_feature: 1288 for SV(W|O) and mtDNA
cccccgatatggcgtttccccgcataaacaacataagcttctgactcttacctccctctctcctactcctgctcgcatctgctatagtggaggccggagcaggaacaggttgaacagtct

SEQ ID NO: 61391 - DNA, 120 bp, Homo sapiens
  misc_feature: 1288 for SV(W|O) and mtDNA
atagtgcttgagtggagtagggctgagactggggtggggccttctatggctgaggggagtcaggggtggagacctaattgggctgatttgcctgctgctgctaggaggaggcctagtagt

SEQ ID NO: 61392 - DNA, 120 bp, Homo sapiens
  misc_feature: 1288 for SV(W|O) and mtDNA
aactctacacaacatattttgtcaccaagaccctacttctaacctccctgttcttatgaattcgaacagcatacccccgattccgctacgaccaactcatacacctcctatgaaaaaact

SEQ ID NO: 61393 - DNA, 120 bp, Homo sapiens
  misc_feature: 1287 for SV(W|O) and mtDNA
tgtttgttggtgtatatattgtaattgagattgctcgggggaataggttatgtgattaggagtagggttaggatgagtgggaagaagaaagagaggaagtaaagtttaattatgcctttt

SEQ ID NO: 61394 - DNA, 120 bp, Homo sapiens
  misc_feature: 1287 for SV(W|O) and mtDNA
tggaaagcggctgtgcagacattcaattgttattattatgtcctacaagcattaattaattaacacactttagtaagtatgttcgcctgtaatattgaacgtaggtgcgataaataatgg

SEQ ID NO: 61395 - DNA, 120 bp, Homo sapiens
  misc_feature: 1287 for SV(W|O) and mtDNA
tgagagaggattatgatgcgactgtgagtgcgttcgtagtttgagtttgctaggcagaatagtaatgaggatgtaagcccgtgggcgattatgagaatgactgcgccggtgaagcttcag

SEQ ID NO: 61396 - DNA, 120 bp, Homo sapiens
  misc_feature: 1287 for SV(W|O) and mtDNA
tcgattctcatagtcctagaaataagggggtttaagctcctattatttactctatcaaagtaactcttttatcagacatatttcttaggtttgagggggaatgctggagattgtaatggg

SEQ ID NO: 61397 - DNA, 120 bp, Homo sapiens
  misc_feature: 1287 for SV(W|O) and mtDNA
tcgaagcccccatcgctgggtcaatagtacttgccgcagtactcttaaaactaggcggctatggtataatacgcctcacactcattctcaaccccctgacaaaacacatagcctacccct

SEQ ID NO: 61398 - DNA, 120 bp, Homo sapiens
  misc_feature: 1287 for SV(W|O) and mtDNA
tagctttacagtgggctctagagggggtagagggggtgctatagggtaaatacgggccctatttcaaagatttttaggggaattaattctaggacgatgggcatgaaactgtggtttgct

SEQ ID NO: 61399 - DNA, 120 bp, Homo sapiens
  misc_feature: 1287 for SV(W|O) and mtDNA
taaagctaacttagcattaaccttttaagttaaagattaagagaaccaacacctctttacagtgaaatgccccaactaaatactaccgtatggcccaccataattacccccatactcctt

SEQ ID NO: 61400 - DNA, 120 bp, Homo sapiens
  misc_feature: 1287 for SV(W|O) and mtDNA
gaactctacacaacatattttgtcaccaagaccctacttctaacctccctgttcttatgaattcgaacagcatacccccgattccgctacgaccaactcatacacctcctatgaaaaaac

SEQ ID NO: 61401 - DNA, 120 bp, Homo sapiens
  misc_feature: 1287 for SV(W|O) and mtDNA
gttaggatgagtgggaagaagaaagagaggaagtaaagtttaattatgcctttttgggttgaggtgatgatggaggtggagatttggtgctgtgaaattgttttaggtaatagcttttct

SEQ ID NO: 61402 - DNA, 120 bp, Homo sapiens
  misc_feature: 1287 for SV(W|O) and mtDNA
gtgcggcttcgaccctatatcccccgcccgcgtccctttctccataaaattcttcttagtagctattaccttcttattatttgatctagaaattgccctccttttacccctaccatgagc

SEQ ID NO: 61403 - DNA, 120 bp, Homo sapiens
  misc_feature: 1287 for SV(W|O) and mtDNA
ggttcgattctcatagtcctagaaataagggggtttaagctcctattatttactctatcaaagtaactcttttatcagacatatttcttaggtttgagggggaatgctggagattgtaat

SEQ ID NO: 61404 - DNA, 120 bp, Homo sapiens
  misc_feature: 1287 for SV(W|O) and mtDNA
ggagaaataaaatgtgcatagtggggattttattttaagtttgttggttaggtagttgaggtctagggctgttagaagtcctaggaaagtgacagcgagggctgtgagttttaggtagag

SEQ ID NO: 61405 - DNA, 120 bp, Homo sapiens
  misc_feature: 1287 for SV(W|O) and mtDNA
gataagattgagagagtgaggagaaggcttacgtttagtgagggagagatttggtatatgattgagatgggggctagtttttgtcatgtgagaagaagcaggccggatgtcagaggggtg

SEQ ID NO: 61406 - DNA, 120 bp, Homo sapiens
  misc_feature: 1287 for SV(W|O) and mtDNA
ctaaacgctaatccaagcctcaccccactactaggcctcctcctagcagcagcaggcaaatcagcccaattaggtctccacccctgactcccctcagccatagaaggccccaccccagtc

SEQ ID NO: 61407 - DNA, 120 bp, Homo sapiens
  misc_feature: 1287 for SV(W|O) and mtDNA
agtgcggcttcgaccctatatcccccgcccgcgtccctttctccataaaattcttcttagtagctattaccttcttattatttgatctagaaattgccctccttttacccctaccatgag

SEQ ID NO: 61408 - DNA, 120 bp, Homo sapiens
  misc_feature: 1287 for SV(W|O) and mtDNA
cgtgtagcggtgaaagtggtttggtttagacgtccgggaattgcatctgtttttaagcctaatgtggggacagctcatgagtgcaagacgtcttgtgatgtaattattatacgaatgggg

SEQ ID NO: 61409 - DNA, 120 bp, Homo sapiens
  misc_feature: 1287 for SV(W|O) and mtDNA
acctgtgatccatcgtgatgtcttatttaaggggaacgtgtgggctatttaggctttatgaccctgaagtaggaaccagatgtcggatacagttcactttagctacccccaagtgttatg

SEQ ID NO: 61410 - DNA, 120 bp, Homo sapiens
  misc_feature: 1287 for SV(W|O) and mtDNA
acgaaatacatagcggttgttgatgggtgagtcaatacttgggtggtacccaaatctgcttccccatgaaagaatagagaatagtttaaattagaatcttagctttgggtgctaatggtg

SEQ ID NO: 61411 - DNA, 120 bp, Homo sapiens
  misc_feature: 1286 for SV(W|O) and mtDNA
ttgagtcctgtaagtaggagagtgatatttgatcaggagaacgtggttactagcacagagagttctcccagtaggttaatagtggggggtaaggcgaggttagcgaggcttgctagaagt

SEQ ID NO: 61412 - DNA, 120 bp, Homo sapiens
  misc_feature: 1286 for SV(W|O) and mtDNA
ttcgattctcatagtcctagaaataagggggtttaagctcctattatttactctatcaaagtaactcttttatcagacatatttcttaggtttgagggggaatgctggagattgtaatgg

SEQ ID NO: 61413 - DNA, 120 bp, Homo sapiens
  misc_feature: 1286 for SV(W|O) and mtDNA
ttacagtgggctctagagggggtagagggggtgctatagggtaaatacgggccctatttcaaagatttttaggggaattaattctaggacgatgggcatgaaactgtggtttgctccaca

SEQ ID NO: 61414 - DNA, 120 bp, Homo sapiens
  misc_feature: 1286 for SV(W|O) and mtDNA
ttaatctgacgcaggcttatgcggaggagaatgttttcatgttacttatactaacattagttcttctatagggtgatagattggtccaattgggtatgaggagttcagttatatgtttgg

SEQ ID NO: 61415 - DNA, 120 bp, Homo sapiens
  misc_feature: 1286 for SV(W|O) and mtDNA
agggagggtagactgttcaacctgttcctgctccggcctccactatagcagatgcgagcaggagtaggagagagggaggtaagagtcagaagcttatgttgtttatgcggggaaacgcca

SEQ ID NO: 61416 - DNA, 120 bp, Homo sapiens
  misc_feature: 1286 for SV(W|O) and mtDNA
tagagggggtgctatagggtaaatacgggccctatttcaaagatttttaggggaattaattctaggacgatgggcatgaaactgtggtttgctccacagatttcagagcattgaccgtag

SEQ ID NO: 61417 - DNA, 120 bp, Homo sapiens
  misc_feature: 1286 for SV(W|O) and mtDNA
tacaactatagtgcttgagtggagtagggctgagactggggtggggccttctatggctgaggggagtcaggggtggagacctaattgggctgatttgcctgctgctgctaggaggaggcc

SEQ ID NO: 61418 - DNA, 120 bp, Homo sapiens
  misc_feature: 1286 for SV(W|O) and mtDNA
gagtgtgcctgcaaagatggtagagtagatgacgggttgggccaggggattaattagtacgggaagggtataaccaacattttcggggtatgggcccgatagcttatttagctgacctta

SEQ ID NO: 61419 - DNA, 120 bp, Homo sapiens
  misc_feature: 1286 for SV(W|O) and mtDNA
gttgagtcctgtaagtaggagagtgatatttgatcaggagaacgtggttactagcacagagagttctcccagtaggttaatagtggggggtaaggcgaggttagcgaggcttgctagaag

SEQ ID NO: 61420 - DNA, 120 bp, Homo sapiens
  misc_feature: 1286 for SV(W|O) and mtDNA
gtccttgagagaggattatgatgcgactgtgagtgcgttcgtagtttgagtttgctaggcagaatagtaatgaggatgtaagcccgtgggcgattatgagaatgactgcgccggtgaagc

SEQ ID NO: 61421 - DNA, 120 bp, Homo sapiens
  misc_feature: 1286 for SV(W|O) and mtDNA
gtaaacaggcggggtaagatttgccgagttccttttactttttttaacctttccttatgagcatgcctgtgttgggttgacagtgagggtaataatgacttgttggttgattgtagatat

SEQ ID NO: 61422 - DNA, 120 bp, Homo sapiens
  misc_feature: 1286 for SV(W|O) and mtDNA
gctttacagtgggctctagagggggtagagggggtgctatagggtaaatacgggccctatttcaaagatttttaggggaattaattctaggacgatgggcatgaaactgtggtttgctcc

SEQ ID NO: 61423 - DNA, 120 bp, Homo sapiens
  misc_feature: 1286 for SV(W|O) and mtDNA
gcgtagctgggtttggtttaatccacctcaactgcctgctatgatggataagattgagagagtgaggagaaggcttacgtttagtgagggagagatttggtatatgattgagatgggggc

SEQ ID NO: 61424 - DNA, 120 bp, Homo sapiens
  misc_feature: 1286 for SV(W|O) and mtDNA
gaacattgtttgttggtgtatatattgtaattgagattgctcgggggaataggttatgtgattaggagtagggttaggatgagtgggaagaagaaagagaggaagtaaagtttaattatg

SEQ ID NO: 61425 - DNA, 120 bp, Homo sapiens
  misc_feature: 1286 for SV(W|O) and mtDNA
ctccaccattagcacccaaagctaagattctaatttaaactattctctattctttcatggggaagcagatttgggtaccacccaagtattgactcacccatcaacaaccgctatgtattt

SEQ ID NO: 61426 - DNA, 120 bp, Homo sapiens
  misc_feature: 1286 for SV(W|O) and mtDNA
cggatagtaagtttgtaattactgtggcccctcagaatgatatttggcctcacgggaggacatagcctatgaaggctgttgctatagttgcaagcaggaggataatgccgatgtttcagg

SEQ ID NO: 61427 - DNA, 120 bp, Homo sapiens
  misc_feature: 1286 for SV(W|O) and mtDNA
agggatttgactgtaatgtgctatgtacggtaaatggctttatgtactatgtactgttaagggtgggtaggtttgttggtatcctagtgggtgaggggtggctttggagttgcagttgat

SEQ ID NO: 61428 - DNA, 120 bp, Homo sapiens
  misc_feature: 1285 for SV(W|O) and mtDNA
tgctaagggagggtagactgttcaacctgttcctgctccggcctccactatagcagatgcgagcaggagtaggagagagggaggtaagagtcagaagcttatgttgtttatgcggggaaa

SEQ ID NO: 61429 - DNA, 120 bp, Homo sapiens
  misc_feature: 1285 for SV(W|O) and mtDNA
tttagtattgattgttagcggtgtggtcgggtgtgttattattctgaattttgggggaggttatatgggtttaatagtttttttaatttatttagggggaatgatggttgtctttggata

SEQ ID NO: 61430 - DNA, 120 bp, Homo sapiens
  misc_feature: 1285 for SV(W|O) and mtDNA
agtgctataggcgcttgtcagggaggtagcgatgagagtaatagatagggctcaggcgtttgtgtatgatatgtttgcggtttcgatgatgtggtctttggagtagaaacctgtgaggaa

SEQ ID NO: 61431 - DNA, 120 bp, Homo sapiens
  misc_feature: 1285 for SV(W|O) and mtDNA
ttccggctgccaggcgtttaatggggtttagtagggtagggttattttcgttaatgttagtaagggtggggaagcgaggttgacctgttagggtgagaagaattattcgagtgctatagg

SEQ ID NO: 61432 - DNA, 120 bp, Homo sapiens
  misc_feature: 1285 for SV(W|O) and mtDNA
acaatttcacagcaccaaatctccacctccatcatcacctcaacccaaaaaggcataattaaactttacttcctctctttcttcttcccactcatcctaaccctactcctaatcacataa

SEQ ID NO: 61433 - DNA, 120 bp, Homo sapiens
  misc_feature: 1285 for SV(W|O) and mtDNA
tgatagttcttgggcagtgagagtgagtagtagaatgtttagtgagcctagggtgttgtgagtgtaaattagtgcgatgagtaggggaagggagcctactagggtgtagaataggaagta

SEQ ID NO: 61434 - DNA, 120 bp, Homo sapiens
  misc_feature: 1285 for SV(W|O) and mtDNA
tctgtctttgattcctgcctcatcccattatttatcgcacctacgttcaatattacaggcgaacatacttactaaagtgtgttaattaattaatgcttgtaggacataataataacaatt

SEQ ID NO: 61435 - DNA, 120 bp, Homo sapiens
  misc_feature: 1285 for SV(W|O) and mtDNA
gatgtctgtgtggaaagcggctgtgcagacattcaattgttattattatgtcctacaagcattaattaattaacacactttagtaagtatgttcgcctgtaatattgaacgtaggtgcga

SEQ ID NO: 61436 - DNA, 120 bp, Homo sapiens
  misc_feature: 1285 for SV(W|O) and mtDNA
taggagagtgatatttgatcaggagaacgtggttactagcacagagagttctcccagtaggttaatagtggggggtaaggcgaggttagcgaggcttgctagaagtcatcaaaaagctat

SEQ ID NO: 61437 - DNA, 120 bp, Homo sapiens
  misc_feature: 1285 for SV(W|O) and mtDNA
taaaacaatttcacagcaccaaatctccacctccatcatcacctcaacccaaaaaggcataattaaactttacttcctctctttcttcttcccactcatcctaaccctactcctaatcac

SEQ ID NO: 61438 - DNA, 120 bp, Homo sapiens
  misc_feature: 1285 for SV(W|O) and mtDNA
gtttagaagggctatttgttgtgggtctcatgagttggagtgtaggataaatcatgctaaggcgaggatgaaaccgatatcgccgatacggttgtataggattgcttgaatggctgctgt

SEQ ID NO: 61439 - DNA, 120 bp, Homo sapiens
  misc_feature: 1285 for SV(W|O) and mtDNA
atgatgtctgtgtggaaagcggctgtgcagacattcaattgttattattatgtcctacaagcattaattaattaacacactttagtaagtatgttcgcctgtaatattgaacgtaggtgc

SEQ ID NO: 61440 - DNA, 120 bp, Homo sapiens
  misc_feature: 1285 for SV(W|O) and mtDNA
ataagattgagagagtgaggagaaggcttacgtttagtgagggagagatttggtatatgattgagatgggggctagtttttgtcatgtgagaagaagcaggccggatgtcagaggggtgc

SEQ ID NO: 61441 - DNA, 120 bp, Homo sapiens
  misc_feature: 1285 for SV(W|O) and mtDNA
aaactctacctctctatactaatctccctacaaatctccttaattataacattcacagccacagaactaatcatattttatatcttcttcgaaaccacacttatccccaccttggctatc

SEQ ID NO: 61442 - DNA, 120 bp, Homo sapiens
  misc_feature: 1285 for SV(W|O) and mtDNA
caacacccactacctaaaaaatcccaaacatataactgaactcctcatacccaattggaccaatctatcaccctatagaagaactaatgttagtataagtaacatgaaaacattctcctc

SEQ ID NO: 61443 - DNA, 120 bp, Homo sapiens
  misc_feature: 1285 for SV(W|O) and mtDNA
ctcctcaagtatacttcaaaggacatttaactaaaacccctacgcatttatatagaggagacaagtcgtaacatggtaagtgtactggaaagtgcacttggacgaaccagagtgtagctt

SEQ ID NO: 61444 - DNA, 120 bp, Homo sapiens
  misc_feature: 1285 for SV(W|O) and mtDNA
ataggcgcttgtcagggaggtagcgatgagagtaatagatagggctcaggcgtttgtgtatgatatgtttgcggtttcgatgatgtggtctttggagtagaaacctgtgaggaaaggtat

SEQ ID NO: 61445 - DNA, 120 bp, Homo sapiens
  misc_feature: 1285 for SV(W|O) and mtDNA
aggagagtgatatttgatcaggagaacgtggttactagcacagagagttctcccagtaggttaatagtggggggtaaggcgaggttagcgaggcttgctagaagtcatcaaaaagctatt

SEQ ID NO: 61446 - DNA, 120 bp, Homo sapiens
  misc_feature: 1285 for SV(W|O) and mtDNA
agataggggtcccttgaccaccatcctccgtgaaatcaatatcccgcacaagagtgctactctcctcgctccgggcccataacacttgggggtagctaaagtgaactgtatccgacatct

SEQ ID NO: 61447 - DNA, 120 bp, Homo sapiens
  misc_feature: 1284 for SV(W|O) and mtDNA
ttgtggtaaactttaatagtgtaggaagctgaataatttatgaaggagaggggtcagggttgattcgggaggatcctattggtgcgggggctttgtatgattatgggcgttgattagtag

SEQ ID NO: 61448 - DNA, 120 bp, Homo sapiens
  misc_feature: 1284 for SV(W|O) and mtDNA
tgtggtaaactttaatagtgtaggaagctgaataatttatgaaggagaggggtcagggttgattcgggaggatcctattggtgcgggggctttgtatgattatgggcgttgattagtagt

SEQ ID NO: 61449 - DNA, 120 bp, Homo sapiens
  misc_feature: 1284 for SV(W|O) and mtDNA
ctcaccccactactaggcctcctcctagcagcagcaggcaaatcagcccaattaggtctccacccctgactcccctcagccatagaaggccccaccccagtctcagccctactccactca

SEQ ID NO: 61450 - DNA, 120 bp, Homo sapiens
  misc_feature: 1284 for SV(W|O) and mtDNA
tccttgagagaggattatgatgcgactgtgagtgcgttcgtagtttgagtttgctaggcagaatagtaatgaggatgtaagcccgtgggcgattatgagaatgactgcgccggtgaagct

SEQ ID NO: 61451 - DNA, 120 bp, Homo sapiens
  misc_feature: 1284 for SV(W|O) and mtDNA
tataggcgcttgtcagggaggtagcgatgagagtaatagatagggctcaggcgtttgtgtatgatatgtttgcggtttcgatgatgtggtctttggagtagaaacctgtgaggaaaggta

SEQ ID NO: 61452 - DNA, 120 bp, Homo sapiens
  misc_feature: 1284 for SV(W|O) and mtDNA
caactatagtgcttgagtggagtagggctgagactggggtggggccttctatggctgaggggagtcaggggtggagacctaattgggctgatttgcctgctgctgctaggaggaggccta

SEQ ID NO: 61453 - DNA, 120 bp, Homo sapiens
  misc_feature: 1284 for SV(W|O) and mtDNA
gtcagggttgattcgggaggatcctattggtgcgggggctttgtatgattatgggcgttgattagtagtagttactggttgaacattgtttgttggtgtatatattgtaattgagattgc

SEQ ID NO: 61454 - DNA, 120 bp, Homo sapiens
  misc_feature: 1284 for SV(W|O) and mtDNA
ggggtcccttgaccaccatcctccgtgaaatcaatatcccgcacaagagtgctactctcctcgctccgggcccataacacttgggggtagctaaagtgaactgtatccgacatctggttc

SEQ ID NO: 61455 - DNA, 120 bp, Homo sapiens
  misc_feature: 1284 for SV(W|O) and mtDNA
gccccttcgccctattcttcatagccgaatacacaaacattattataataaacaccctcaccactacaatcttcctaggaacaacatatgacgcactctcccctgaactctacacaacat

SEQ ID NO: 61456 - DNA, 120 bp, Homo sapiens
  misc_feature: 1284 for SV(W|O) and mtDNA
gagtggaagtgaaatcacatggctaggccggaggtcattaggagggctgagagggcccctgttaggggtcatgggctgggttttactatatgataggcatgtgattggtgggtcattatg

SEQ ID NO: 61457 - DNA, 120 bp, Homo sapiens
  misc_feature: 1284 for SV(W|O) and mtDNA
gaagcccccatcgctgggtcaatagtacttgccgcagtactcttaaaactaggcggctatggtataatacgcctcacactcattctcaaccccctgacaaaacacatagcctaccccttc

SEQ ID NO: 61458 - DNA, 120 bp, Homo sapiens
  misc_feature: 1284 for SV(W|O) and mtDNA
aactatagtgcttgagtggagtagggctgagactggggtggggccttctatggctgaggggagtcaggggtggagacctaattgggctgatttgcctgctgctgctaggaggaggcctag

SEQ ID NO: 61459 - DNA, 120 bp, Homo sapiens
  misc_feature: 1284 for SV(W|O) and mtDNA
atgtctgtgtggaaagcggctgtgcagacattcaattgttattattatgtcctacaagcattaattaattaacacactttagtaagtatgttcgcctgtaatattgaacgtaggtgcgat

SEQ ID NO: 61460 - DNA, 120 bp, Homo sapiens
  misc_feature: 1283 for SV(W|O) and mtDNA
ttcgaacagcatacccccgattccgctacgaccaactcatacacctcctatgaaaaaacttcctaccactcaccctagcattacttatatgatatgtctccatacccattacaatctcca

SEQ ID NO: 61461 - DNA, 120 bp, Homo sapiens
  misc_feature: 1283 for SV(W|O) and mtDNA
agctaacttagcattaaccttttaagttaaagattaagagaaccaacacctctttacagtgaaatgccccaactaaatactaccgtatggcccaccataattacccccatactccttaca

SEQ ID NO: 61462 - DNA, 120 bp, Homo sapiens
  misc_feature: 1283 for SV(W|O) and mtDNA
gtaggagagtgatatttgatcaggagaacgtggttactagcacagagagttctcccagtaggttaatagtggggggtaaggcgaggttagcgaggcttgctagaagtcatcaaaaagcta

SEQ ID NO: 61463 - DNA, 120 bp, Homo sapiens
  misc_feature: 1283 for SV(W|O) and mtDNA
gctaagggagggtagactgttcaacctgttcctgctccggcctccactatagcagatgcgagcaggagtaggagagagggaggtaagagtcagaagcttatgttgtttatgcggggaaac

SEQ ID NO: 61464 - DNA, 120 bp, Homo sapiens
  misc_feature: 1283 for SV(W|O) and mtDNA
gtgggctctagagggggtagagggggtgctatagggtaaatacgggccctatttcaaagatttttaggggaattaattctaggacgatgggcatgaaactgtggtttgctccacagattt

SEQ ID NO: 61465 - DNA, 120 bp, Homo sapiens
  misc_feature: 1283 for SV(W|O) and mtDNA
ctcaaactacgccctgatcggcgcactgcgagcagtagcccaaacaatctcatatgaagtcaccctagccatcattctactatcaacattactaataagtggctcctttaacctctccac

SEQ ID NO: 61466 - DNA, 120 bp, Homo sapiens
  misc_feature: 1283 for SV(W|O) and mtDNA
gtaattatggtgggccatacggtagtatttagttggggcatttcactgtaaagaggtgttggttctcttaatctttaacttaaaaggttaatgctaagttagctttacagtgggctctag

SEQ ID NO: 61467 - DNA, 120 bp, Homo sapiens
  misc_feature: 1283 for SV(W|O) and mtDNA
ggataagattgagagagtgaggagaaggcttacgtttagtgagggagagatttggtatatgattgagatgggggctagtttttgtcatgtgagaagaagcaggccggatgtcagaggggt

SEQ ID NO: 61468 - DNA, 120 bp, Homo sapiens
  misc_feature: 1283 for SV(W|O) and mtDNA
gcccccatcgctgggtcaatagtacttgccgcagtactcttaaaactaggcggctatggtataatacgcctcacactcattctcaaccccctgacaaaacacatagcctaccccttcctt

SEQ ID NO: 61469 - DNA, 120 bp, Homo sapiens
  misc_feature: 1283 for SV(W|O) and mtDNA
cgtagctgggtttggtttaatccacctcaactgcctgctatgatggataagattgagagagtgaggagaaggcttacgtttagtgagggagagatttggtatatgattgagatgggggct

SEQ ID NO: 61470 - DNA, 120 bp, Homo sapiens
  misc_feature: 1283 for SV(W|O) and mtDNA
agtcctgtaagtaggagagtgatatttgatcaggagaacgtggttactagcacagagagttctcccagtaggttaatagtggggggtaaggcgaggttagcgaggcttgctagaagtcat

SEQ ID NO: 61471 - DNA, 120 bp, Homo sapiens
  misc_feature: 1282 for SV(W|O) and mtDNA
gtgctataggcgcttgtcagggaggtagcgatgagagtaatagatagggctcaggcgtttgtgtatgatatgtttgcggtttcgatgatgtggtctttggagtagaaacctgtgaggaaa

SEQ ID NO: 61472 - DNA, 120 bp, Homo sapiens
  misc_feature: 1282 for SV(W|O) and mtDNA
tacgagtgcggcttcgaccctatatcccccgcccgcgtccctttctccataaaattcttcttagtagctattaccttcttattatttgatctagaaattgccctccttttacccctacca

SEQ ID NO: 61473 - DNA, 120 bp, Homo sapiens
  misc_feature: 1282 for SV(W|O) and mtDNA
ctaaaacaatttcacagcaccaaatctccacctccatcatcacctcaacccaaaaaggcataattaaactttacttcctctctttcttcttcccactcatcctaaccctactcctaatca

SEQ ID NO: 61474 - DNA, 120 bp, Homo sapiens
  misc_feature: 1282 for SV(W|O) and mtDNA
tgagcgtctgagatgttagtattagttagttttgttgtgagtgttaggaaaagggcatacaggactaggaagcagataaggaaaatgattatgagggcgtgatcatgaaaggtgataagc

SEQ ID NO: 61475 - DNA, 120 bp, Homo sapiens
  misc_feature: 1282 for SV(W|O) and mtDNA
gagtgctataggcgcttgtcagggaggtagcgatgagagtaatagatagggctcaggcgtttgtgtatgatatgtttgcggtttcgatgatgtggtctttggagtagaaacctgtgagga

SEQ ID NO: 61476 - DNA, 120 bp, Homo sapiens
  misc_feature: 1282 for SV(W|O) and mtDNA
tccagggtgggagtagttccctgctaagggagggtagactgttcaacctgttcctgctccggcctccactatagcagatgcgagcaggagtaggagagagggaggtaagagtcagaagct

SEQ ID NO: 61477 - DNA, 120 bp, Homo sapiens
  misc_feature: 1282 for SV(W|O) and mtDNA
tcaggcttcaacatcgaatacgccgcaggccccttcgccctattcttcatagccgaatacacaaacattattataataaacaccctcaccactacaatcttcctaggaacaacatatgac

SEQ ID NO: 61478 - DNA, 120 bp, Homo sapiens
  misc_feature: 1282 for SV(W|O) and mtDNA
ccaatgtatgggatggcggatagtaagtttgtaattactgtggcccctcagaatgatatttggcctcacgggaggacatagcctatgaaggctgttgctatagttgcaagcaggaggata

SEQ ID NO: 61479 - DNA, 120 bp, Homo sapiens
  misc_feature: 1282 for SV(W|O) and mtDNA
cagacgctcaggaaatagaaaccgtctgaactatcctgcccgccatcatcctagtcctcatcgccctcccatccctacgcatcctttacataacagacgaggtcaacgatccctccctta

SEQ ID NO: 61480 - DNA, 120 bp, Homo sapiens
  misc_feature: 1282 for SV(W|O) and mtDNA
gtgtgggtataatactaagttgagatgatatcatttacgggggaaggcgctttgtgaagtaggccttatttctcttgtcctttcgtacagggaggaatttgaagtagatagaaaccgacc

SEQ ID NO: 61481 - DNA, 120 bp, Homo sapiens
  misc_feature: 1282 for SV(W|O) and mtDNA
aatttcacagcaccaaatctccacctccatcatcacctcaacccaaaaaggcataattaaactttacttcctctctttcttcttcccactcatcctaaccctactcctaatcacataacc

SEQ ID NO: 61482 - DNA, 120 bp, Homo sapiens
  misc_feature: 1282 for SV(W|O) and mtDNA
ctacgcctaatctactccacctcaatcacactactccccatatctaacaacgtaaaaataaaatgacagtttgaacatacaaaacccaccccattcctccccacactcatcgcccttacc

SEQ ID NO: 61483 - DNA, 120 bp, Homo sapiens
  misc_feature: 1282 for SV(W|O) and mtDNA
aagggagggtagactgttcaacctgttcctgctccggcctccactatagcagatgcgagcaggagtaggagagagggaggtaagagtcagaagcttatgttgtttatgcggggaaacgcc

SEQ ID NO: 61484 - DNA, 120 bp, Homo sapiens
  misc_feature: 1282 for SV(W|O) and mtDNA
caggagtccgaggaggttagttgtggcaataaaaatgattaaggatactagtataagagatcaggttcgtcctttagtgttgtgtatggttatcatttgttttgaggttagtttgattag

SEQ ID NO: 61485 - DNA, 120 bp, Homo sapiens
  misc_feature: 1282 for SV(W|O) and mtDNA
ccagccagaacgcctgaacgcaggcacatacttcctattctacaccctagtaggctcccttcccctactcatcgcactaatttacactcacaacaccctaggctcactaaacattctact

SEQ ID NO: 61486 - DNA, 120 bp, Homo sapiens
  misc_feature: 1282 for SV(W|O) and mtDNA
agaagattcctgctacaactatagtgcttgagtggagtagggctgagactggggtggggccttctatggctgaggggagtcaggggtggagacctaattgggctgatttgcctgctgctg

SEQ ID NO: 61487 - DNA, 120 bp, Homo sapiens
  misc_feature: 1282 for SV(W|O) and mtDNA
agcagcaggcaaatcagcccaattaggtctccacccctgactcccctcagccatagaaggccccaccccagtctcagccctactccactcaagcactatagttgtagcaggaatcttctt

SEQ ID NO: 61488 - DNA, 120 bp, Homo sapiens
  misc_feature: 1281 for SV(W|O) and mtDNA
ttagtattgattgttagcggtgtggtcgggtgtgttattattctgaattttgggggaggttatatgggtttaatagtttttttaatttatttagggggaatgatggttgtctttggatat

SEQ ID NO: 61489 - DNA, 120 bp, Homo sapiens
  misc_feature: 1281 for SV(W|O) and mtDNA
ttacccaaggcacccctctgacatccggcctgcttcttctcacatgacaaaaactagcccccatctcaatcatataccaaatctctccctcactaaacgtaagccttctcctcactctct

SEQ ID NO: 61490 - DNA, 120 bp, Homo sapiens
  misc_feature: 1281 for SV(W|O) and mtDNA
catagtcctagaaataagggggtttaagctcctattatttactctatcaaagtaactcttttatcagacatatttcttaggtttgagggggaatgctggagattgtaatgggtatggaga

SEQ ID NO: 61491 - DNA, 120 bp, Homo sapiens
  misc_feature: 1281 for SV(W|O) and mtDNA
tcgtgtagcggtgaaagtggtttggtttagacgtccgggaattgcatctgtttttaagcctaatgtggggacagctcatgagtgcaagacgtcttgtgatgtaattattatacgaatggg

SEQ ID NO: 61492 - DNA, 120 bp, Homo sapiens
  misc_feature: 1281 for SV(W|O) and mtDNA
tccataaaattcttcttagtagctattaccttcttattatttgatctagaaattgccctccttttacccctaccatgagccctacaaacaactaacctgccactaatagttatgtcatcc

SEQ ID NO: 61493 - DNA, 120 bp, Homo sapiens
  misc_feature: 1281 for SV(W|O) and mtDNA
tacagtgggctctagagggggtagagggggtgctatagggtaaatacgggccctatttcaaagatttttaggggaattaattctaggacgatgggcatgaaactgtggtttgctccacag

SEQ ID NO: 61494 - DNA, 120 bp, Homo sapiens
  misc_feature: 1281 for SV(W|O) and mtDNA
gtggtcaagggacccctatctgaggggggtcatccatggggacgagaagggatttgactgtaatgtgctatgtacggtaaatggctttatgtactatgtactgttaagggtgggtaggtt

SEQ ID NO: 61495 - DNA, 120 bp, Homo sapiens
  misc_feature: 1281 for SV(W|O) and mtDNA
gtccgaggaggttagttgtggcaataaaaatgattaaggatactagtataagagatcaggttcgtcctttagtgttgtgtatggttatcatttgttttgaggttagtttgattagtcatt

SEQ ID NO: 61496 - DNA, 120 bp, Homo sapiens
  misc_feature: 1281 for SV(W|O) and mtDNA
attcgaacagcatacccccgattccgctacgaccaactcatacacctcctatgaaaaaacttcctaccactcaccctagcattacttatatgatatgtctccatacccattacaatctcc

SEQ ID NO: 61497 - DNA, 120 bp, Homo sapiens
  misc_feature: 1281 for SV(W|O) and mtDNA
aggttacccaaggcacccctctgacatccggcctgcttcttctcacatgacaaaaactagcccccatctcaatcatataccaaatctctccctcactaaacgtaagccttctcctcactc

SEQ ID NO: 61498 - DNA, 120 bp, Homo sapiens
  misc_feature: 1281 for SV(W|O) and mtDNA
agcgtctgagatgttagtattagttagttttgttgtgagtgttaggaaaagggcatacaggactaggaagcagataaggaaaatgattatgagggcgtgatcatgaaaggtgataagctc

SEQ ID NO: 61499 - DNA, 120 bp, Homo sapiens
  misc_feature: 1281 for SV(W|O) and mtDNA
aggcgcttgtcagggaggtagcgatgagagtaatagatagggctcaggcgtttgtgtatgatatgtttgcggtttcgatgatgtggtctttggagtagaaacctgtgaggaaaggtattc

SEQ ID NO: 61500 - DNA, 120 bp, Homo sapiens
  misc_feature: 1281 for SV(W|O) and mtDNA
cttctatggctgaggggagtcaggggtggagacctaattgggctgatttgcctgctgctgctaggaggaggcctagtagtggggtgaggcttggattagcgtttagaagggctatttgtt

SEQ ID NO: 61501 - DNA, 120 bp, Homo sapiens
  misc_feature: 1281 for SV(W|O) and mtDNA
cgaagcccccatcgctgggtcaatagtacttgccgcagtactcttaaaactaggcggctatggtataatacgcctcacactcattctcaaccccctgacaaaacacatagcctacccctt

SEQ ID NO: 61502 - DNA, 120 bp, Homo sapiens
  misc_feature: 1280 for SV(W|O) and mtDNA
tgttggagaaataaaatgtgcatagtggggattttattttaagtttgttggttaggtagttgaggtctagggctgttagaagtcctaggaaagtgacagcgagggctgtgagttttaggt

SEQ ID NO: 61503 - DNA, 120 bp, Homo sapiens
  misc_feature: 1280 for SV(W|O) and mtDNA
tgtctttgattcctgcctcatcccattatttatcgcacctacgttcaatattacaggcgaacatacttactaaagtgtgttaattaattaatgcttgtaggacataataataacaattga

SEQ ID NO: 61504 - DNA, 120 bp, Homo sapiens
  misc_feature: 1280 for SV(W|O) and mtDNA
tagtcctagaaataagggggtttaagctcctattatttactctatcaaagtaactcttttatcagacatatttcttaggtttgagggggaatgctggagattgtaatgggtatggagaca

SEQ ID NO: 61505 - DNA, 120 bp, Homo sapiens
  misc_feature: 1280 for SV(W|O) and mtDNA
tcccaatgtatgggatggcggatagtaagtttgtaattactgtggcccctcagaatgatatttggcctcacgggaggacatagcctatgaaggctgttgctatagttgcaagcaggagga

SEQ ID NO: 61506 - DNA, 120 bp, Homo sapiens
  misc_feature: 1280 for SV(W|O) and mtDNA
caccctcctcaagtatacttcaaaggacatttaactaaaacccctacgcatttatatagaggagacaagtcgtaacatggtaagtgtactggaaagtgcacttggacgaaccagagtgta

SEQ ID NO: 61507 - DNA, 120 bp, Homo sapiens
  misc_feature: 1280 for SV(W|O) and mtDNA
aggccccttcgccctattcttcatagccgaatacacaaacattattataataaacaccctcaccactacaatcttcctaggaacaacatatgacgcactctcccctgaactctacacaac

SEQ ID NO: 61508 - DNA, 120 bp, Homo sapiens
  misc_feature: 1280 for SV(W|O) and mtDNA
gttaaaggagccacttattagtaatgttgatagtagaatgatggctagggtgacttcatatgagattgtttgggctactgctcgcagtgcgccgatcagggcgtagtttgagtttgatgc

SEQ ID NO: 61509 - DNA, 120 bp, Homo sapiens
  misc_feature: 1280 for SV(W|O) and mtDNA
gtgcccccgatatggcgtttccccgcataaacaacataagcttctgactcttacctccctctctcctactcctgctcgcatctgctatagtggaggccggagcaggaacaggttgaacag

SEQ ID NO: 61510 - DNA, 120 bp, Homo sapiens
  misc_feature: 1280 for SV(W|O) and mtDNA
aagctaacttagcattaaccttttaagttaaagattaagagaaccaacacctctttacagtgaaatgccccaactaaatactaccgtatggcccaccataattacccccatactccttac

SEQ ID NO: 61511 - DNA, 120 bp, Homo sapiens
  misc_feature: 1280 for SV(W|O) and mtDNA
ggttgtggtaaactttaatagtgtaggaagctgaataatttatgaaggagaggggtcagggttgattcgggaggatcctattggtgcgggggctttgtatgattatgggcgttgattagt

SEQ ID NO: 61512 - DNA, 120 bp, Homo sapiens
  misc_feature: 1280 for SV(W|O) and mtDNA
gggtaattatggtgggccatacggtagtatttagttggggcatttcactgtaaagaggtgttggttctcttaatctttaacttaaaaggttaatgctaagttagctttacagtgggctct

SEQ ID NO: 61513 - DNA, 120 bp, Homo sapiens
  misc_feature: 1280 for SV(W|O) and mtDNA
ccctcctcaagtatacttcaaaggacatttaactaaaacccctacgcatttatatagaggagacaagtcgtaacatggtaagtgtactggaaagtgcacttggacgaaccagagtgtagc

SEQ ID NO: 61514 - DNA, 120 bp, Homo sapiens
  misc_feature: 1280 for SV(W|O) and mtDNA
ctccataaaattcttcttagtagctattaccttcttattatttgatctagaaattgccctccttttacccctaccatgagccctacaaacaactaacctgccactaatagttatgtcatc

SEQ ID NO: 61515 - DNA, 120 bp, Homo sapiens
  misc_feature: 1280 for SV(W|O) and mtDNA
ctgtctttgattcctgcctcatcccattatttatcgcacctacgttcaatattacaggcgaacatacttactaaagtgtgttaattaattaatgcttgtaggacataataataacaattg

SEQ ID NO: 61516 - DNA, 120 bp, Homo sapiens
  misc_feature: 1280 for SV(W|O) and mtDNA
caggcttcaacatcgaatacgccgcaggccccttcgccctattcttcatagccgaatacacaaacattattataataaacaccctcaccactacaatcttcctaggaacaacatatgacg

SEQ ID NO: 61517 - DNA, 120 bp, Homo sapiens
  misc_feature: 1280 for SV(W|O) and mtDNA
cccttcgccctattcttcatagccgaatacacaaacattattataataaacaccctcaccactacaatcttcctaggaacaacatatgacgcactctcccctgaactctacacaacatat

SEQ ID NO: 61518 - DNA, 120 bp, Homo sapiens
  misc_feature: 1280 for SV(W|O) and mtDNA
acaactatagtgcttgagtggagtagggctgagactggggtggggccttctatggctgaggggagtcaggggtggagacctaattgggctgatttgcctgctgctgctaggaggaggcct

SEQ ID NO: 61519 - DNA, 120 bp, Homo sapiens
  misc_feature: 1280 for SV(W|O) and mtDNA
acacgttccccttaaataagacatcacgatggatcacaggtctatcaccctattaaccactcacgggagctctccatgcatttggtattttcgtctggggggtatgcacgcgatagcatt

SEQ ID NO: 61520 - DNA, 120 bp, Homo sapiens
  misc_feature: 1279 for SV(W|O) and mtDNA
ccctgaactctacacaacatattttgtcaccaagaccctacttctaacctccctgttcttatgaattcgaacagcatacccccgattccgctacgaccaactcatacacctcctatgaaa

SEQ ID NO: 61521 - DNA, 120 bp, Homo sapiens
  misc_feature: 1279 for SV(W|O) and mtDNA
atcggcgcactgcgagcagtagcccaaacaatctcatatgaagtcaccctagccatcattctactatcaacattactaataagtggctcctttaacctctccacccttatcacaacacaa

SEQ ID NO: 61522 - DNA, 120 bp, Homo sapiens
  misc_feature: 1279 for SV(W|O) and mtDNA
ttcttaggtttgagggggaatgctggagattgtaatgggtatggagacatatcatataagtaatgctagggtgagtggtaggaagttttttcataggaggtgtatgagttggtcgtagcg

SEQ ID NO: 61523 - DNA, 120 bp, Homo sapiens
  misc_feature: 1279 for SV(W|O) and mtDNA
gcgatgagagtaatagatagggctcaggcgtttgtgtatgatatgtttgcggtttcgatgatgtggtctttggagtagaaacctgtgaggaaaggtattcctgctaatgctaggctgcca

SEQ ID NO: 61524 - DNA, 120 bp, Homo sapiens
  misc_feature: 1279 for SV(W|O) and mtDNA
tgaggcaggagtccgaggaggttagttgtggcaataaaaatgattaaggatactagtataagagatcaggttcgtcctttagtgttgtgtatggttatcatttgttttgaggttagtttg

SEQ ID NO: 61525 - DNA, 120 bp, Homo sapiens
  misc_feature: 1279 for SV(W|O) and mtDNA
tatagtgcttgagtggagtagggctgagactggggtggggccttctatggctgaggggagtcaggggtggagacctaattgggctgatttgcctgctgctgctaggaggaggcctagtag

SEQ ID NO: 61526 - DNA, 120 bp, Homo sapiens
  misc_feature: 1279 for SV(W|O) and mtDNA
cagccagaacgcctgaacgcaggcacatacttcctattctacaccctagtaggctcccttcccctactcatcgcactaatttacactcacaacaccctaggctcactaaacattctacta

SEQ ID NO: 61527 - DNA, 120 bp, Homo sapiens
  misc_feature: 1279 for SV(W|O) and mtDNA
gttgtggtaaactttaatagtgtaggaagctgaataatttatgaaggagaggggtcagggttgattcgggaggatcctattggtgcgggggctttgtatgattatgggcgttgattagta

SEQ ID NO: 61528 - DNA, 120 bp, Homo sapiens
  misc_feature: 1279 for SV(W|O) and mtDNA
gtagagggggtgctatagggtaaatacgggccctatttcaaagatttttaggggaattaattctaggacgatgggcatgaaactgtggtttgctccacagatttcagagcattgaccgta

SEQ ID NO: 61529 - DNA, 120 bp, Homo sapiens
  misc_feature: 1279 for SV(W|O) and mtDNA
tacgaaatacatagcggttgttgatgggtgagtcaatacttgggtggtacccaaatctgcttccccatgaaagaatagagaatagtttaaattagaatcttagctttgggtgctaatggt

SEQ ID NO: 61530 - DNA, 120 bp, Homo sapiens
  misc_feature: 1279 for SV(W|O) and mtDNA
gcaggagtccgaggaggttagttgtggcaataaaaatgattaaggatactagtataagagatcaggttcgtcctttagtgttgtgtatggttatcatttgttttgaggttagtttgatta

SEQ ID NO: 61531 - DNA, 120 bp, Homo sapiens
  misc_feature: 1279 for SV(W|O) and mtDNA
gcagcaggcaaatcagcccaattaggtctccacccctgactcccctcagccatagaaggccccaccccagtctcagccctactccactcaagcactatagttgtagcaggaatcttctta

SEQ ID NO: 61532 - DNA, 120 bp, Homo sapiens
  misc_feature: 1279 for SV(W|O) and mtDNA
ctaatccaagcctcaccccactactaggcctcctcctagcagcagcaggcaaatcagcccaattaggtctccacccctgactcccctcagccatagaaggccccaccccagtctcagccc

SEQ ID NO: 61533 - DNA, 120 bp, Homo sapiens
  misc_feature: 1279 for SV(W|O) and mtDNA
ggcaggagtccgaggaggttagttgtggcaataaaaatgattaaggatactagtataagagatcaggttcgtcctttagtgttgtgtatggttatcatttgttttgaggttagtttgatt

SEQ ID NO: 61534 - DNA, 120 bp, Homo sapiens
  misc_feature: 1279 for SV(W|O) and mtDNA
aagcccccatcgctgggtcaatagtacttgccgcagtactcttaaaactaggcggctatggtataatacgcctcacactcattctcaaccccctgacaaaacacatagcctaccccttcc

SEQ ID NO: 61535 - DNA, 120 bp, Homo sapiens
  misc_feature: 1279 for SV(W|O) and mtDNA
gagcaccctatgtcgcagtatctgtctttgattcctgcctcatcccattatttatcgcacctacgttcaatattacaggcgaacatacttactaaagtgtgttaattaattaatgcttgt

SEQ ID NO: 61536 - DNA, 120 bp, Homo sapiens
  misc_feature: 1279 for SV(W|O) and mtDNA
cgtttagaagggctatttgttgtgggtctcatgagttggagtgtaggataaatcatgctaaggcgaggatgaaaccgatatcgccgatacggttgtataggattgcttgaatggctgctg

SEQ ID NO: 61537 - DNA, 120 bp, Homo sapiens
  misc_feature: 1279 for SV(W|O) and mtDNA
attagcacccaaagctaagattctaatttaaactattctctattctttcatggggaagcagatttgggtaccacccaagtattgactcacccatcaacaaccgctatgtatttcgtacat

SEQ ID NO: 61538 - DNA, 120 bp, Homo sapiens
  misc_feature: 1279 for SV(W|O) and mtDNA
agtgggctctagagggggtagagggggtgctatagggtaaatacgggccctatttcaaagatttttaggggaattaattctaggacgatgggcatgaaactgtggtttgctccacagatt

SEQ ID NO: 61539 - DNA, 120 bp, Homo sapiens
  misc_feature: 1278 for SV(W|O) and mtDNA
tttcttaggtttgagggggaatgctggagattgtaatgggtatggagacatatcatataagtaatgctagggtgagtggtaggaagttttttcataggaggtgtatgagttggtcgtagc

SEQ ID NO: 61540 - DNA, 120 bp, Homo sapiens
  misc_feature: 1278 for SV(W|O) and mtDNA
ttccccttaaataagacatcacgatggatcacaggtctatcaccctattaaccactcacgggagctctccatgcatttggtattttcgtctggggggtatgcacgcgatagcattgcgag

SEQ ID NO: 61541 - DNA, 120 bp, Homo sapiens
  misc_feature: 1278 for SV(W|O) and mtDNA
cctgagcgtctgagatgttagtattagttagttttgttgtgagtgttaggaaaagggcatacaggactaggaagcagataaggaaaatgattatgagggcgtgatcatgaaaggtgataa

SEQ ID NO: 61542 - DNA, 120 bp, Homo sapiens
  misc_feature: 1278 for SV(W|O) and mtDNA
tgggggtttagtattgattgttagcggtgtggtcgggtgtgttattattctgaattttgggggaggttatatgggtttaatagtttttttaatttatttagggggaatgatggttgtctt

SEQ ID NO: 61543 - DNA, 120 bp, Homo sapiens
  misc_feature: 1278 for SV(W|O) and mtDNA
gagtcctgtaagtaggagagtgatatttgatcaggagaacgtggttactagcacagagagttctcccagtaggttaatagtggggggtaaggcgaggttagcgaggcttgctagaagtca

SEQ ID NO: 61544 - DNA, 120 bp, Homo sapiens
  misc_feature: 1278 for SV(W|O) and mtDNA
gggctctagagggggtagagggggtgctatagggtaaatacgggccctatttcaaagatttttaggggaattaattctaggacgatgggcatgaaactgtggtttgctccacagatttca

SEQ ID NO: 61545 - DNA, 120 bp, Homo sapiens
  misc_feature: 1278 for SV(W|O) and mtDNA
tcttaggtttgagggggaatgctggagattgtaatgggtatggagacatatcatataagtaatgctagggtgagtggtaggaagttttttcataggaggtgtatgagttggtcgtagcgg

SEQ ID NO: 61546 - DNA, 120 bp, Homo sapiens
  misc_feature: 1278 for SV(W|O) and mtDNA
tcgaagaagatataaaatatgattagttctgtggctgtgaatgttataattaaggagatttgtagggagattagtatagagaggtagagtttttttcgtgatagtggttcactggataag

SEQ ID NO: 61547 - DNA, 120 bp, Homo sapiens
  misc_feature: 1278 for SV(W|O) and mtDNA
tccatcgtgatgtcttatttaaggggaacgtgtgggctatttaggctttatgaccctgaagtaggaaccagatgtcggatacagttcactttagctacccccaagtgttatgggcccgga

SEQ ID NO: 61548 - DNA, 120 bp, Homo sapiens
  misc_feature: 1278 for SV(W|O) and mtDNA
tccgaggaggttagttgtggcaataaaaatgattaaggatactagtataagagatcaggttcgtcctttagtgttgtgtatggttatcatttgttttgaggttagtttgattagtcattg

SEQ ID NO: 61549 - DNA, 120 bp, Homo sapiens
  misc_feature: 1278 for SV(W|O) and mtDNA
taagattgagagagtgaggagaaggcttacgtttagtgagggagagatttggtatatgattgagatgggggctagtttttgtcatgtgagaagaagcaggccggatgtcagaggggtgcc

SEQ ID NO: 61550 - DNA, 120 bp, Homo sapiens
  misc_feature: 1278 for SV(W|O) and mtDNA
gttcgattctcatagtcctagaaataagggggtttaagctcctattatttactctatcaaagtaactcttttatcagacatatttcttaggtttgagggggaatgctggagattgtaatg

SEQ ID NO: 61551 - DNA, 120 bp, Homo sapiens
  misc_feature: 1278 for SV(W|O) and mtDNA
ccattagcacccaaagctaagattctaatttaaactattctctattctttcatggggaagcagatttgggtaccacccaagtattgactcacccatcaacaaccgctatgtatttcgtac

SEQ ID NO: 61552 - DNA, 120 bp, Homo sapiens
  misc_feature: 1278 for SV(W|O) and mtDNA
aaggccaccacacaccacctgtccaaaaaggccttcgatacgggataatcctatttattacctcagaagtttttttcttcgcaggatttttctgagccttttaccactccagcctagccc

SEQ ID NO: 61553 - DNA, 120 bp, Homo sapiens
  misc_feature: 1278 for SV(W|O) and mtDNA
aggcttcaacatcgaatacgccgcaggccccttcgccctattcttcatagccgaatacacaaacattattataataaacaccctcaccactacaatcttcctaggaacaacatatgacgc

SEQ ID NO: 61554 - DNA, 120 bp, Homo sapiens
  misc_feature: 1278 for SV(W|O) and mtDNA
gcccccgatatggcgtttccccgcataaacaacataagcttctgactcttacctccctctctcctactcctgctcgcatctgctatagtggaggccggagcaggaacaggttgaacagtc

SEQ ID NO: 61555 - DNA, 120 bp, Homo sapiens
  misc_feature: 1278 for SV(W|O) and mtDNA
gatatgttaaagccactttcgtagtctattttgtgtcaactggagttttttacaactcaggtgagttttagctttattggggagggggtgatctaaaacactctttacgccggcttctat

SEQ ID NO: 61556 - DNA, 120 bp, Homo sapiens
  misc_feature: 1278 for SV(W|O) and mtDNA
agctttacagtgggctctagagggggtagagggggtgctatagggtaaatacgggccctatttcaaagatttttaggggaattaattctaggacgatgggcatgaaactgtggtttgctc

SEQ ID NO: 61557 - DNA, 120 bp, Homo sapiens
  misc_feature: 1278 for SV(W|O) and mtDNA
aattcgaacagcatacccccgattccgctacgaccaactcatacacctcctatgaaaaaacttcctaccactcaccctagcattacttatatgatatgtctccatacccattacaatctc

SEQ ID NO: 61558 - DNA, 120 bp, Homo sapiens
  misc_feature: 1278 for SV(W|O) and mtDNA
aaagcggctgtgcagacattcaattgttattattatgtcctacaagcattaattaattaacacactttagtaagtatgttcgcctgtaatattgaacgtaggtgcgataaataatgggat

SEQ ID NO: 61559 - DNA, 120 bp, Homo sapiens
  misc_feature: 1277 for SV(W|O) and mtDNA
ttcacagcaccaaatctccacctccatcatcacctcaacccaaaaaggcataattaaactttacttcctctctttcttcttcccactcatcctaaccctactcctaatcacataacctat

SEQ ID NO: 61560 - DNA, 120 bp, Homo sapiens
  misc_feature: 1277 for SV(W|O) and mtDNA
gttccccttaaataagacatcacgatggatcacaggtctatcaccctattaaccactcacgggagctctccatgcatttggtattttcgtctggggggtatgcacgcgatagcattgcga

SEQ ID NO: 61561 - DNA, 120 bp, Homo sapiens
  misc_feature: 1277 for SV(W|O) and mtDNA
aacaatttcacagcaccaaatctccacctccatcatcacctcaacccaaaaaggcataattaaactttacttcctctctttcttcttcccactcatcctaaccctactcctaatcacata

SEQ ID NO: 61562 - DNA, 120 bp, Homo sapiens
  misc_feature: 1277 for SV(W|O) and mtDNA
taggtctgtcccaatgtatgggatggcggatagtaagtttgtaattactgtggcccctcagaatgatatttggcctcacgggaggacatagcctatgaaggctgttgctatagttgcaag

SEQ ID NO: 61563 - DNA, 120 bp, Homo sapiens
  misc_feature: 1277 for SV(W|O) and mtDNA
ggtcaagggacccctatctgaggggggtcatccatggggacgagaagggatttgactgtaatgtgctatgtacggtaaatggctttatgtactatgtactgttaagggtgggtaggtttg

SEQ ID NO: 61564 - DNA, 120 bp, Homo sapiens
  misc_feature: 1277 for SV(W|O) and mtDNA
ctgagcgtctgagatgttagtattagttagttttgttgtgagtgttaggaaaagggcatacaggactaggaagcagataaggaaaatgattatgagggcgtgatcatgaaaggtgataag

SEQ ID NO: 61565 - DNA, 120 bp, Homo sapiens
  misc_feature: 1277 for SV(W|O) and mtDNA
accctcctcaagtatacttcaaaggacatttaactaaaacccctacgcatttatatagaggagacaagtcgtaacatggtaagtgtactggaaagtgcacttggacgaaccagagtgtag

SEQ ID NO: 61566 - DNA, 120 bp, Homo sapiens
  misc_feature: 1277 for SV(W|O) and mtDNA
acgagtgcggcttcgaccctatatcccccgcccgcgtccctttctccataaaattcttcttagtagctattaccttcttattatttgatctagaaattgccctccttttacccctaccat

SEQ ID NO: 61567 - DNA, 120 bp, Homo sapiens
  misc_feature: 1276 for SV(W|O) and mtDNA
tatctgtctttgattcctgcctcatcccattatttatcgcacctacgttcaatattacaggcgaacatacttactaaagtgtgttaattaattaatgcttgtaggacataataataacaa

SEQ ID NO: 61568 - DNA, 120 bp, Homo sapiens
  misc_feature: 1276 for SV(W|O) and mtDNA
tggttgtggtaaactttaatagtgtaggaagctgaataatttatgaaggagaggggtcagggttgattcgggaggatcctattggtgcgggggctttgtatgattatgggcgttgattag

SEQ ID NO: 61569 - DNA, 120 bp, Homo sapiens
  misc_feature: 1276 for SV(W|O) and mtDNA
tggtcaagggacccctatctgaggggggtcatccatggggacgagaagggatttgactgtaatgtgctatgtacggtaaatggctttatgtactatgtactgttaagggtgggtaggttt

SEQ ID NO: 61570 - DNA, 120 bp, Homo sapiens
  misc_feature: 1276 for SV(W|O) and mtDNA
actcaaactacgccctgatcggcgcactgcgagcagtagcccaaacaatctcatatgaagtcaccctagccatcattctactatcaacattactaataagtggctcctttaacctctcca

SEQ ID NO: 61571 - DNA, 120 bp, Homo sapiens
  misc_feature: 1276 for SV(W|O) and mtDNA
tgattactcctgccatcatgacccttggccataatatgatttatctccacactagcagagaccaaccgaacccccttcgaccttgccgaaggggagtccgaactagtctcaggcttcaac

SEQ ID NO: 61572 - DNA, 120 bp, Homo sapiens
  misc_feature: 1276 for SV(W|O) and mtDNA
gatgagtgggaagaagaaagagaggaagtaaagtttaattatgcctttttgggttgaggtgatgatggaggtggagatttggtgctgtgaaattgttttaggtaatagcttttctagtca

SEQ ID NO: 61573 - DNA, 120 bp, Homo sapiens
  misc_feature: 1276 for SV(W|O) and mtDNA
acagtgggctctagagggggtagagggggtgctatagggtaaatacgggccctatttcaaagatttttaggggaattaattctaggacgatgggcatgaaactgtggtttgctccacaga

SEQ ID NO: 61574 - DNA, 120 bp, Homo sapiens
  misc_feature: 1276 for SV(W|O) and mtDNA
tccccttaaataagacatcacgatggatcacaggtctatcaccctattaaccactcacgggagctctccatgcatttggtattttcgtctggggggtatgcacgcgatagcattgcgaga

SEQ ID NO: 61575 - DNA, 120 bp, Homo sapiens
  misc_feature: 1276 for SV(W|O) and mtDNA
tctaaacgctaatccaagcctcaccccactactaggcctcctcctagcagcagcaggcaaatcagcccaattaggtctccacccctgactcccctcagccatagaaggccccaccccagt

SEQ ID NO: 61576 - DNA, 120 bp, Homo sapiens
  misc_feature: 1276 for SV(W|O) and mtDNA
tcaagggacccctatctgaggggggtcatccatggggacgagaagggatttgactgtaatgtgctatgtacggtaaatggctttatgtactatgtactgttaagggtgggtaggtttgtt

SEQ ID NO: 61577 - DNA, 120 bp, Homo sapiens
  misc_feature: 1276 for SV(W|O) and mtDNA
gccaccacacaccacctgtccaaaaaggccttcgatacgggataatcctatttattacctcagaagtttttttcttcgcaggatttttctgagccttttaccactccagcctagccccta

SEQ ID NO: 61578 - DNA, 120 bp, Homo sapiens
  misc_feature: 1276 for SV(W|O) and mtDNA
cactgtaaagctaacttagcattaaccttttaagttaaagattaagagaaccaacacctctttacagtgaaatgccccaactaaatactaccgtatggcccaccataattacccccatac

SEQ ID NO: 61579 - DNA, 120 bp, Homo sapiens
  misc_feature: 1276 for SV(W|O) and mtDNA
cttacgagtgcggcttcgaccctatatcccccgcccgcgtccctttctccataaaattcttcttagtagctattaccttcttattatttgatctagaaattgccctccttttacccctac

SEQ ID NO: 61580 - DNA, 120 bp, Homo sapiens
  misc_feature: 1276 for SV(W|O) and mtDNA
caaatgcatggagagctcccgtgagtggttaatagggtgatagacctgtgatccatcgtgatgtcttatttaaggggaacgtgtgggctatttaggctttatgaccctgaagtaggaacc

SEQ ID NO: 61581 - DNA, 120 bp, Homo sapiens
  misc_feature: 1276 for SV(W|O) and mtDNA
ataggcttccggctgccaggcgtttaatggggtttagtagggtagggttattttcgttaatgttagtaagggtggggaagcgaggttgacctgttagggtgagaagaattattcgagtgc

SEQ ID NO: 61582 - DNA, 120 bp, Homo sapiens
  misc_feature: 1276 for SV(W|O) and mtDNA
aactaggtctgtcccaatgtatgggatggcggatagtaagtttgtaattactgtggcccctcagaatgatatttggcctcacgggaggacatagcctatgaaggctgttgctatagttgc

SEQ ID NO: 61583 - DNA, 120 bp, Homo sapiens
  misc_feature: 1276 for SV(W|O) and mtDNA
gattttgcgtagctgggtttggtttaatccacctcaactgcctgctatgatggataagattgagagagtgaggagaaggcttacgtttagtgagggagagatttggtatatgattgagat

SEQ ID NO: 61584 - DNA, 120 bp, Homo sapiens
  misc_feature: 1276 for SV(W|O) and mtDNA
cctaaaacaatttcacagcaccaaatctccacctccatcatcacctcaacccaaaaaggcataattaaactttacttcctctctttcttcttcccactcatcctaaccctactcctaatc

SEQ ID NO: 61585 - DNA, 120 bp, Homo sapiens
  misc_feature: 1276 for SV(W|O) and mtDNA
ctaagttagctttacagtgggctctagagggggtagagggggtgctatagggtaaatacgggccctatttcaaagatttttaggggaattaattctaggacgatgggcatgaaactgtgg

SEQ ID NO: 61586 - DNA, 120 bp, Homo sapiens
  misc_feature: 1276 for SV(W|O) and mtDNA
aagggacccctatctgaggggggtcatccatggggacgagaagggatttgactgtaatgtgctatgtacggtaaatggctttatgtactatgtactgttaagggtgggtaggtttgttgg

SEQ ID NO: 61587 - DNA, 120 bp, Homo sapiens
  misc_feature: 1275 for SV(W|O) and mtDNA
tttacagtgggctctagagggggtagagggggtgctatagggtaaatacgggccctatttcaaagatttttaggggaattaattctaggacgatgggcatgaaactgtggtttgctccac

SEQ ID NO: 61588 - DNA, 120 bp, Homo sapiens
  misc_feature: 1275 for SV(W|O) and mtDNA
ctaggtctgtcccaatgtatgggatggcggatagtaagtttgtaattactgtggcccctcagaatgatatttggcctcacgggaggacatagcctatgaaggctgttgctatagttgcaa

SEQ ID NO: 61589 - DNA, 120 bp, Homo sapiens
  misc_feature: 1275 for SV(W|O) and mtDNA
ttatccagtgaaccactatcacgaaaaaaactctacctctctatactaatctccctacaaatctccttaattataacattcacagccacagaactaatcatattttatatcttcttcgaa

SEQ ID NO: 61590 - DNA, 120 bp, Homo sapiens
  misc_feature: 1275 for SV(W|O) and mtDNA
caggcaaatcagcccaattaggtctccacccctgactcccctcagccatagaaggccccaccccagtctcagccctactccactcaagcactatagttgtagcaggaatcttcttactca

SEQ ID NO: 61591 - DNA, 120 bp, Homo sapiens
  misc_feature: 1275 for SV(W|O) and mtDNA
tctccagcattccccctcaaacctaagaaatatgtctgataaaagagttactttgatagagtaaataataggagcttaaacccccttatttctaggactatgagaatcgaacccatccct

SEQ ID NO: 61592 - DNA, 120 bp, Homo sapiens
  misc_feature: 1275 for SV(W|O) and mtDNA
tcacagcaccaaatctccacctccatcatcacctcaacccaaaaaggcataattaaactttacttcctctctttcttcttcccactcatcctaaccctactcctaatcacataacctatt

SEQ ID NO: 61593 - DNA, 120 bp, Homo sapiens
  misc_feature: 1275 for SV(W|O) and mtDNA
aagggatttgactgtaatgtgctatgtacggtaaatggctttatgtactatgtactgttaagggtgggtaggtttgttggtatcctagtgggtgaggggtggctttggagttgcagttga

SEQ ID NO: 61594 - DNA, 120 bp, Homo sapiens
  misc_feature: 1275 for SV(W|O) and mtDNA
tatggagtggaagtgaaatcacatggctaggccggaggtcattaggagggctgagagggcccctgttaggggtcatgggctgggttttactatatgataggcatgtgattggtgggtcat

SEQ ID NO: 61595 - DNA, 120 bp, Homo sapiens
  misc_feature: 1275 for SV(W|O) and mtDNA
aagctattacctaaaacaatttcacagcaccaaatctccacctccatcatcacctcaacccaaaaaggcataattaaactttacttcctctctttcttcttcccactcatcctaacccta

SEQ ID NO: 61596 - DNA, 120 bp, Homo sapiens
  misc_feature: 1275 for SV(W|O) and mtDNA
gtttgttggtgtatatattgtaattgagattgctcgggggaataggttatgtgattaggagtagggttaggatgagtgggaagaagaaagagaggaagtaaagtttaattatgccttttt

SEQ ID NO: 61597 - DNA, 120 bp, Homo sapiens
  misc_feature: 1275 for SV(W|O) and mtDNA
gcgcgtacacaccgcccgtcaccctcctcaagtatacttcaaaggacatttaactaaaacccctacgcatttatatagaggagacaagtcgtaacatggtaagtgtactggaaagtgcac

SEQ ID NO: 61598 - DNA, 120 bp, Homo sapiens
  misc_feature: 1275 for SV(W|O) and mtDNA
gtcaagggacccctatctgaggggggtcatccatggggacgagaagggatttgactgtaatgtgctatgtacggtaaatggctttatgtactatgtactgttaagggtgggtaggtttgt

SEQ ID NO: 61599 - DNA, 120 bp, Homo sapiens
  misc_feature: 1275 for SV(W|O) and mtDNA
ggcaaatcagcccaattaggtctccacccctgactcccctcagccatagaaggccccaccccagtctcagccctactccactcaagcactatagttgtagcaggaatcttcttactcatc

SEQ ID NO: 61600 - DNA, 120 bp, Homo sapiens
  misc_feature: 1275 for SV(W|O) and mtDNA
aggtctgtcccaatgtatgggatggcggatagtaagtttgtaattactgtggcccctcagaatgatatttggcctcacgggaggacatagcctatgaaggctgttgctatagttgcaagc

SEQ ID NO: 61601 - DNA, 120 bp, Homo sapiens
  misc_feature: 1275 for SV(W|O) and mtDNA
aaatagcccacacgttccccttaaataagacatcacgatggatcacaggtctatcaccctattaaccactcacgggagctctccatgcatttggtattttcgtctggggggtatgcacgc

SEQ ID NO: 61602 - DNA, 120 bp, Homo sapiens
  misc_feature: 1275 for SV(W|O) and mtDNA
gagtcccagaggttacccaaggcacccctctgacatccggcctgcttcttctcacatgacaaaaactagcccccatctcaatcatataccaaatctctccctcactaaacgtaagccttc

SEQ ID NO: 61603 - DNA, 120 bp, Homo sapiens
  misc_feature: 1275 for SV(W|O) and mtDNA
ccagaggttacccaaggcacccctctgacatccggcctgcttcttctcacatgacaaaaactagcccccatctcaatcatataccaaatctctccctcactaaacgtaagccttctcctc

SEQ ID NO: 61604 - DNA, 120 bp, Homo sapiens
  misc_feature: 1275 for SV(W|O) and mtDNA
agtgcttgagtggagtagggctgagactggggtggggccttctatggctgaggggagtcaggggtggagacctaattgggctgatttgcctgctgctgctaggaggaggcctagtagtgg

SEQ ID NO: 61605 - DNA, 120 bp, Homo sapiens
  misc_feature: 1275 for SV(W|O) and mtDNA
actgtaaagctaacttagcattaaccttttaagttaaagattaagagaaccaacacctctttacagtgaaatgccccaactaaatactaccgtatggcccaccataattacccccatact

SEQ ID NO: 61606 - DNA, 120 bp, Homo sapiens
  misc_feature: 1275 for SV(W|O) and mtDNA
actccaccattagcacccaaagctaagattctaatttaaactattctctattctttcatggggaagcagatttgggtaccacccaagtattgactcacccatcaacaaccgctatgtatt

SEQ ID NO: 61607 - DNA, 120 bp, Homo sapiens
  misc_feature: 1275 for SV(W|O) and mtDNA
actatagtgcttgagtggagtagggctgagactggggtggggccttctatggctgaggggagtcaggggtggagacctaattgggctgatttgcctgctgctgctaggaggaggcctagt

SEQ ID NO: 61608 - DNA, 120 bp, Homo sapiens
  misc_feature: 1274 for SV(W|O) and mtDNA
atgtttaacggccgcggtaccctaaccgtgcaaaggtagcataatcacttgttccttaaatagggacctgtatgaatggctccacgagggttcagctgtctcttacttttaaccagtgaa

SEQ ID NO: 61609 - DNA, 120 bp, Homo sapiens
  misc_feature: 1274 for SV(W|O) and mtDNA
ggatgatggcgggcaggatagttcagacggtttctatttcctgagcgtctgagatgttagtattagttagttttgttgtgagtgttaggaaaagggcatacaggactaggaagcagataa

SEQ ID NO: 61610 - DNA, 120 bp, Homo sapiens
  misc_feature: 1274 for SV(W|O) and mtDNA
cattagcacccaaagctaagattctaatttaaactattctctattctttcatggggaagcagatttgggtaccacccaagtattgactcacccatcaacaaccgctatgtatttcgtaca

SEQ ID NO: 61611 - DNA, 120 bp, Homo sapiens
  misc_feature: 1274 for SV(W|O) and mtDNA
tgtaaagctaacttagcattaaccttttaagttaaagattaagagaaccaacacctctttacagtgaaatgccccaactaaatactaccgtatggcccaccataattacccccatactcc

SEQ ID NO: 61612 - DNA, 120 bp, Homo sapiens
  misc_feature: 1274 for SV(W|O) and mtDNA
tagtattgattgttagcggtgtggtcgggtgtgttattattctgaattttgggggaggttatatgggtttaatagtttttttaatttatttagggggaatgatggttgtctttggatata

SEQ ID NO: 61613 - DNA, 120 bp, Homo sapiens
  misc_feature: 1274 for SV(W|O) and mtDNA
caatttcacagcaccaaatctccacctccatcatcacctcaacccaaaaaggcataattaaactttacttcctctctttcttcttcccactcatcctaaccctactcctaatcacataac

SEQ ID NO: 61614 - DNA, 120 bp, Homo sapiens
  misc_feature: 1274 for SV(W|O) and mtDNA
gaagagcttatcacctttcatgatcacgccctcataatcattttccttatctgcttcctagtcctgtatgcccttttcctaacactcacaacaaaactaactaatactaacatctcagac

SEQ ID NO: 61615 - DNA, 120 bp, Homo sapiens
  misc_feature: 1274 for SV(W|O) and mtDNA
ccccttaaataagacatcacgatggatcacaggtctatcaccctattaaccactcacgggagctctccatgcatttggtattttcgtctggggggtatgcacgcgatagcattgcgagac

SEQ ID NO: 61616 - DNA, 120 bp, Homo sapiens
  misc_feature: 1274 for SV(W|O) and mtDNA
gccctcgtagtaacagccattctcatccaaaccccctgaagcttcaccggcgcagtcattctcataatcgcccacgggcttacatcctcattactattctgcctagcaaactcaaactac

SEQ ID NO: 61617 - DNA, 120 bp, Homo sapiens
  misc_feature: 1274 for SV(W|O) and mtDNA
agctattacctaaaacaatttcacagcaccaaatctccacctccatcatcacctcaacccaaaaaggcataattaaactttacttcctctctttcttcttcccactcatcctaaccctac

SEQ ID NO: 61618 - DNA, 120 bp, Homo sapiens
  misc_feature: 1274 for SV(W|O) and mtDNA
gtacacaccgcccgtcaccctcctcaagtatacttcaaaggacatttaactaaaacccctacgcatttatatagaggagacaagtcgtaacatggtaagtgtactggaaagtgcacttgg

SEQ ID NO: 61619 - DNA, 120 bp, Homo sapiens
  misc_feature: 1274 for SV(W|O) and mtDNA
gcgtacacaccgcccgtcaccctcctcaagtatacttcaaaggacatttaactaaaacccctacgcatttatatagaggagacaagtcgtaacatggtaagtgtactggaaagtgcactt

SEQ ID NO: 61620 - DNA, 120 bp, Homo sapiens
  misc_feature: 1273 for SV(W|O) and mtDNA
atggcgggcaggatagttcagacggtttctatttcctgagcgtctgagatgttagtattagttagttttgttgtgagtgttaggaaaagggcatacaggactaggaagcagataaggaaa

SEQ ID NO: 61621 - DNA, 120 bp, Homo sapiens
  misc_feature: 1273 for SV(W|O) and mtDNA
tgaagtaggaaccagatgtcggatacagttcactttagctacccccaagtgttatgggcccggagcgaggagagtagcactcttgtgcgggatattgatttcacggaggatggtggtcaa

SEQ ID NO: 61622 - DNA, 120 bp, Homo sapiens
  misc_feature: 1273 for SV(W|O) and mtDNA
tgtcccaatgtatgggatggcggatagtaagtttgtaattactgtggcccctcagaatgatatttggcctcacgggaggacatagcctatgaaggctgttgctatagttgcaagcaggag

SEQ ID NO: 61623 - DNA, 120 bp, Homo sapiens
  misc_feature: 1273 for SV(W|O) and mtDNA
ctttacagtgggctctagagggggtagagggggtgctatagggtaaatacgggccctatttcaaagatttttaggggaattaattctaggacgatgggcatgaaactgtggtttgctcca

SEQ ID NO: 61624 - DNA, 120 bp, Homo sapiens
  misc_feature: 1273 for SV(W|O) and mtDNA
tgcccccgatatggcgtttccccgcataaacaacataagcttctgactcttacctccctctctcctactcctgctcgcatctgctatagtggaggccggagcaggaacaggttgaacagt

SEQ ID NO: 61625 - DNA, 120 bp, Homo sapiens
  misc_feature: 1273 for SV(W|O) and mtDNA
cagaggttacccaaggcacccctctgacatccggcctgcttcttctcacatgacaaaaactagcccccatctcaatcatataccaaatctctccctcactaaacgtaagccttctcctca

SEQ ID NO: 61626 - DNA, 120 bp, Homo sapiens
  misc_feature: 1273 for SV(W|O) and mtDNA
tccaccattagcacccaaagctaagattctaatttaaactattctctattctttcatggggaagcagatttgggtaccacccaagtattgactcacccatcaacaaccgctatgtatttc

SEQ ID NO: 61627 - DNA, 120 bp, Homo sapiens
  misc_feature: 1273 for SV(W|O) and mtDNA
tattacctaaaacaatttcacagcaccaaatctccacctccatcatcacctcaacccaaaaaggcataattaaactttacttcctctctttcttcttcccactcatcctaaccctactcc

SEQ ID NO: 61628 - DNA, 120 bp, Homo sapiens
  misc_feature: 1273 for SV(W|O) and mtDNA
ggagcaccctatgtcgcagtatctgtctttgattcctgcctcatcccattatttatcgcacctacgttcaatattacaggcgaacatacttactaaagtgtgttaattaattaatgcttg

SEQ ID NO: 61629 - DNA, 120 bp, Homo sapiens
  misc_feature: 1273 for SV(W|O) and mtDNA
gcgtctgagatgttagtattagttagttttgttgtgagtgttaggaaaagggcatacaggactaggaagcagataaggaaaatgattatgagggcgtgatcatgaaaggtgataagctct

SEQ ID NO: 61630 - DNA, 120 bp, Homo sapiens
  misc_feature: 1273 for SV(W|O) and mtDNA
ataccaaatctctccctcactaaacgtaagccttctcctcactctctcaatcttatccatcatagcaggcagttgaggtggattaaaccaaacccagctacgcaaaatcttagcatactc

SEQ ID NO: 61631 - DNA, 120 bp, Homo sapiens
  misc_feature: 1273 for SV(W|O) and mtDNA
gaggttacccaaggcacccctctgacatccggcctgcttcttctcacatgacaaaaactagcccccatctcaatcatataccaaatctctccctcactaaacgtaagccttctcctcact

SEQ ID NO: 61632 - DNA, 120 bp, Homo sapiens
  misc_feature: 1273 for SV(W|O) and mtDNA
gaataggcttccggctgccaggcgtttaatggggtttagtagggtagggttattttcgttaatgttagtaagggtggggaagcgaggttgacctgttagggtgagaagaattattcgagt

SEQ ID NO: 61633 - DNA, 120 bp, Homo sapiens
  misc_feature: 1273 for SV(W|O) and mtDNA
atgatggcgggcaggatagttcagacggtttctatttcctgagcgtctgagatgttagtattagttagttttgttgtgagtgttaggaaaagggcatacaggactaggaagcagataagg

SEQ ID NO: 61634 - DNA, 120 bp, Homo sapiens
  misc_feature: 1273 for SV(W|O) and mtDNA
cccagaggttacccaaggcacccctctgacatccggcctgcttcttctcacatgacaaaaactagcccccatctcaatcatataccaaatctctccctcactaaacgtaagccttctcct

SEQ ID NO: 61635 - DNA, 120 bp, Homo sapiens
  misc_feature: 1273 for SV(W|O) and mtDNA
aatcggtgcccccgatatggcgtttccccgcataaacaacataagcttctgactcttacctccctctctcctactcctgctcgcatctgctatagtggaggccggagcaggaacaggttg

SEQ ID NO: 61636 - DNA, 120 bp, Homo sapiens
  misc_feature: 1273 for SV(W|O) and mtDNA
aggggattaattagtacgggaagggtataaccaacattttcggggtatgggcccgatagcttatttagctgaccttactttaggatggggtgtgataggtggcacggagaattttggatt

SEQ ID NO: 61637 - DNA, 120 bp, Homo sapiens
  misc_feature: 1272 for SV(W|O) and mtDNA
ctgaactctacacaacatattttgtcaccaagaccctacttctaacctccctgttcttatgaattcgaacagcatacccccgattccgctacgaccaactcatacacctcctatgaaaaa

SEQ ID NO: 61638 - DNA, 120 bp, Homo sapiens
  misc_feature: 1272 for SV(W|O) and mtDNA
cctgaactctacacaacatattttgtcaccaagaccctacttctaacctccctgttcttatgaattcgaacagcatacccccgattccgctacgaccaactcatacacctcctatgaaaa

SEQ ID NO: 61639 - DNA, 120 bp, Homo sapiens
  misc_feature: 1272 for SV(W|O) and mtDNA
tttgttggtgtatatattgtaattgagattgctcgggggaataggttatgtgattaggagtagggttaggatgagtgggaagaagaaagagaggaagtaaagtttaattatgcctttttg

SEQ ID NO: 61640 - DNA, 120 bp, Homo sapiens
  misc_feature: 1272 for SV(W|O) and mtDNA
ttatggagtggaagtgaaatcacatggctaggccggaggtcattaggagggctgagagggcccctgttaggggtcatgggctgggttttactatatgataggcatgtgattggtgggtca

SEQ ID NO: 61641 - DNA, 120 bp, Homo sapiens
  misc_feature: 1272 for SV(W|O) and mtDNA
tcctattggtgcgggggctttgtatgattatgggcgttgattagtagtagttactggttgaacattgtttgttggtgtatatattgtaattgagattgctcgggggaataggttatgtga

SEQ ID NO: 61642 - DNA, 120 bp, Homo sapiens
  misc_feature: 1272 for SV(W|O) and mtDNA
taatcggtgcccccgatatggcgtttccccgcataaacaacataagcttctgactcttacctccctctctcctactcctgctcgcatctgctatagtggaggccggagcaggaacaggtt

SEQ ID NO: 61643 - DNA, 120 bp, Homo sapiens
  misc_feature: 1272 for SV(W|O) and mtDNA
agacgctcaggaaatagaaaccgtctgaactatcctgcccgccatcatcctagtcctcatcgccctcccatccctacgcatcctttacataacagacgaggtcaacgatccctcccttac

SEQ ID NO: 61644 - DNA, 120 bp, Homo sapiens
  misc_feature: 1272 for SV(W|O) and mtDNA
ggaaagcggctgtgcagacattcaattgttattattatgtcctacaagcattaattaattaacacactttagtaagtatgttcgcctgtaatattgaacgtaggtgcgataaataatggg

SEQ ID NO: 61645 - DNA, 120 bp, Homo sapiens
  misc_feature: 1272 for SV(W|O) and mtDNA
cattccccctcaaacctaagaaatatgtctgataaaagagttactttgatagagtaaataataggagcttaaacccccttatttctaggactatgagaatcgaacccatccctgagaatc

SEQ ID NO: 61646 - DNA, 120 bp, Homo sapiens
  misc_feature: 1272 for SV(W|O) and mtDNA
cccccatcgctgggtcaatagtacttgccgcagtactcttaaaactaggcggctatggtataatacgcctcacactcattctcaaccccctgacaaaacacatagcctaccccttccttg

SEQ ID NO: 61647 - DNA, 120 bp, Homo sapiens
  misc_feature: 1272 for SV(W|O) and mtDNA
accaaatctctccctcactaaacgtaagccttctcctcactctctcaatcttatccatcatagcaggcagttgaggtggattaaaccaaacccagctacgcaaaatcttagcatactcct

SEQ ID NO: 61648 - DNA, 120 bp, Homo sapiens
  misc_feature: 1271 for SV(W|O) and mtDNA
agattttgcgtagctgggtttggtttaatccacctcaactgcctgctatgatggataagattgagagagtgaggagaaggcttacgtttagtgagggagagatttggtatatgattgaga

SEQ ID NO: 61649 - DNA, 120 bp, Homo sapiens
  misc_feature: 1271 for SV(W|O) and mtDNA
tcctcaagtatacttcaaaggacatttaactaaaacccctacgcatttatatagaggagacaagtcgtaacatggtaagtgtactggaaagtgcacttggacgaaccagagtgtagctta

SEQ ID NO: 61650 - DNA, 120 bp, Homo sapiens
  misc_feature: 1271 for SV(W|O) and mtDNA
tcaaactacgccctgatcggcgcactgcgagcagtagcccaaacaatctcatatgaagtcaccctagccatcattctactatcaacattactaataagtggctcctttaacctctccacc

SEQ ID NO: 61651 - DNA, 120 bp, Homo sapiens
  misc_feature: 1271 for SV(W|O) and mtDNA
ggtaattatggtgggccatacggtagtatttagttggggcatttcactgtaaagaggtgttggttctcttaatctttaacttaaaaggttaatgctaagttagctttacagtgggctcta

SEQ ID NO: 61652 - DNA, 120 bp, Homo sapiens
  misc_feature: 1271 for SV(W|O) and mtDNA
ctatagtgcttgagtggagtagggctgagactggggtggggccttctatggctgaggggagtcaggggtggagacctaattgggctgatttgcctgctgctgctaggaggaggcctagta

SEQ ID NO: 61653 - DNA, 120 bp, Homo sapiens
  misc_feature: 1271 for SV(W|O) and mtDNA
taccaaatctctccctcactaaacgtaagccttctcctcactctctcaatcttatccatcatagcaggcagttgaggtggattaaaccaaacccagctacgcaaaatcttagcatactcc

SEQ ID NO: 61654 - DNA, 120 bp, Homo sapiens
  misc_feature: 1271 for SV(W|O) and mtDNA
gtttagtattgattgttagcggtgtggtcgggtgtgttattattctgaattttgggggaggttatatgggtttaatagtttttttaatttatttagggggaatgatggttgtctttggat

SEQ ID NO: 61655 - DNA, 120 bp, Homo sapiens
  misc_feature: 1271 for SV(W|O) and mtDNA
gtttaacggccgcggtaccctaaccgtgcaaaggtagcataatcacttgttccttaaatagggacctgtatgaatggctccacgagggttcagctgtctcttacttttaaccagtgaaat

SEQ ID NO: 61656 - DNA, 120 bp, Homo sapiens
  misc_feature: 1271 for SV(W|O) and mtDNA
gtcctcccgtgaggccaaatatcattctgaggggccacagtaattacaaacttactatccgccatcccatacattgggacagacctagttcaatgaatctgaggaggctactcagtagac

SEQ ID NO: 61657 - DNA, 120 bp, Homo sapiens
  misc_feature: 1271 for SV(W|O) and mtDNA
ggtttgagggggaatgctggagattgtaatgggtatggagacatatcatataagtaatgctagggtgagtggtaggaagttttttcataggaggtgtatgagttggtcgtagcggaatcg

SEQ ID NO: 61658 - DNA, 120 bp, Homo sapiens
  misc_feature: 1271 for SV(W|O) and mtDNA
ggagtggaagtgaaatcacatggctaggccggaggtcattaggagggctgagagggcccctgttaggggtcatgggctgggttttactatatgataggcatgtgattggtgggtcattat

SEQ ID NO: 61659 - DNA, 120 bp, Homo sapiens
  misc_feature: 1271 for SV(W|O) and mtDNA
gctattacctaaaacaatttcacagcaccaaatctccacctccatcatcacctcaacccaaaaaggcataattaaactttacttcctctctttcttcttcccactcatcctaaccctact

SEQ ID NO: 61660 - DNA, 120 bp, Homo sapiens
  misc_feature: 1271 for SV(W|O) and mtDNA
cccacacgttccccttaaataagacatcacgatggatcacaggtctatcaccctattaaccactcacgggagctctccatgcatttggtattttcgtctggggggtatgcacgcgatagc

SEQ ID NO: 61661 - DNA, 120 bp, Homo sapiens
  misc_feature: 1271 for SV(W|O) and mtDNA
gaagattcctgctacaactatagtgcttgagtggagtagggctgagactggggtggggccttctatggctgaggggagtcaggggtggagacctaattgggctgatttgcctgctgctgc

SEQ ID NO: 61662 - DNA, 120 bp, Homo sapiens
  misc_feature: 1271 for SV(W|O) and mtDNA
atttcttaggtttgagggggaatgctggagattgtaatgggtatggagacatatcatataagtaatgctagggtgagtggtaggaagttttttcataggaggtgtatgagttggtcgtag

SEQ ID NO: 61663 - DNA, 120 bp, Homo sapiens
  misc_feature: 1271 for SV(W|O) and mtDNA
cctattggtgcgggggctttgtatgattatgggcgttgattagtagtagttactggttgaacattgtttgttggtgtatatattgtaattgagattgctcgggggaataggttatgtgat

SEQ ID NO: 61664 - DNA, 120 bp, Homo sapiens
  misc_feature: 1270 for SV(W|O) and mtDNA
tgtttaacggccgcggtaccctaaccgtgcaaaggtagcataatcacttgttccttaaatagggacctgtatgaatggctccacgagggttcagctgtctcttacttttaaccagtgaaa

SEQ ID NO: 61665 - DNA, 120 bp, Homo sapiens
  misc_feature: 1270 for SV(W|O) and mtDNA
ttggagaaataaaatgtgcatagtggggattttattttaagtttgttggttaggtagttgaggtctagggctgttagaagtcctaggaaagtgacagcgagggctgtgagttttaggtag

SEQ ID NO: 61666 - DNA, 120 bp, Homo sapiens
  misc_feature: 1270 for SV(W|O) and mtDNA
acaaccatcattccccctaaataaattaaaaaaactattaaacccatataacctcccccaaaattcagaataataacacacccgaccacaccgctaacaatcaatactaaacccccataa

SEQ ID NO: 61667 - DNA, 120 bp, Homo sapiens
  misc_feature: 1270 for SV(W|O) and mtDNA
cctcaagtatacttcaaaggacatttaactaaaacccctacgcatttatatagaggagacaagtcgtaacatggtaagtgtactggaaagtgcacttggacgaaccagagtgtagcttaa

SEQ ID NO: 61668 - DNA, 120 bp, Homo sapiens
  misc_feature: 1270 for SV(W|O) and mtDNA
ggccccttcgccctattcttcatagccgaatacacaaacattattataataaacaccctcaccactacaatcttcctaggaacaacatatgacgcactctcccctgaactctacacaaca

SEQ ID NO: 61669 - DNA, 120 bp, Homo sapiens
  misc_feature: 1270 for SV(W|O) and mtDNA
taggctatatacaactacgcaaaggccccaacgttgtaggcccctacgggctactacaacccttcgctgacgccataaaactcttcaccaaagagcccctaaaacccgccacatctacca

SEQ ID NO: 61670 - DNA, 120 bp, Homo sapiens
  misc_feature: 1270 for SV(W|O) and mtDNA
ggcggatagtaagtttgtaattactgtggcccctcagaatgatatttggcctcacgggaggacatagcctatgaaggctgttgctatagttgcaagcaggaggataatgccgatgtttca

SEQ ID NO: 61671 - DNA, 120 bp, Homo sapiens
  misc_feature: 1270 for SV(W|O) and mtDNA
tatttcttaggtttgagggggaatgctggagattgtaatgggtatggagacatatcatataagtaatgctagggtgagtggtaggaagttttttcataggaggtgtatgagttggtcgta

SEQ ID NO: 61672 - DNA, 120 bp, Homo sapiens
  misc_feature: 1270 for SV(W|O) and mtDNA
catataccaaatctctccctcactaaacgtaagccttctcctcactctctcaatcttatccatcatagcaggcagttgaggtggattaaaccaaacccagctacgcaaaatcttagcata

SEQ ID NO: 61673 - DNA, 120 bp, Homo sapiens
  misc_feature: 1270 for SV(W|O) and mtDNA
tataccaaatctctccctcactaaacgtaagccttctcctcactctctcaatcttatccatcatagcaggcagttgaggtggattaaaccaaacccagctacgcaaaatcttagcatact

SEQ ID NO: 61674 - DNA, 120 bp, Homo sapiens
  misc_feature: 1270 for SV(W|O) and mtDNA
gttggagaaataaaatgtgcatagtggggattttattttaagtttgttggttaggtagttgaggtctagggctgttagaagtcctaggaaagtgacagcgagggctgtgagttttaggta

SEQ ID NO: 61675 - DNA, 120 bp, Homo sapiens
  misc_feature: 1270 for SV(W|O) and mtDNA
ggagagtgatatttgatcaggagaacgtggttactagcacagagagttctcccagtaggttaatagtggggggtaaggcgaggttagcgaggcttgctagaagtcatcaaaaagctatta

SEQ ID NO: 61676 - DNA, 120 bp, Homo sapiens
  misc_feature: 1270 for SV(W|O) and mtDNA
agaggttacccaaggcacccctctgacatccggcctgcttcttctcacatgacaaaaactagcccccatctcaatcatataccaaatctctccctcactaaacgtaagccttctcctcac

SEQ ID NO: 61677 - DNA, 120 bp, Homo sapiens
  misc_feature: 1270 for SV(W|O) and mtDNA
gtcccaatgtatgggatggcggatagtaagtttgtaattactgtggcccctcagaatgatatttggcctcacgggaggacatagcctatgaaggctgttgctatagttgcaagcaggagg

SEQ ID NO: 61678 - DNA, 120 bp, Homo sapiens
  misc_feature: 1270 for SV(W|O) and mtDNA
gctataggcgcttgtcagggaggtagcgatgagagtaatagatagggctcaggcgtttgtgtatgatatgtttgcggtttcgatgatgtggtctttggagtagaaacctgtgaggaaagg

SEQ ID NO: 61679 - DNA, 120 bp, Homo sapiens
  misc_feature: 1270 for SV(W|O) and mtDNA
cttccggctgccaggcgtttaatggggtttagtagggtagggttattttcgttaatgttagtaagggtggggaagcgaggttgacctgttagggtgagaagaattattcgagtgctatag

SEQ ID NO: 61680 - DNA, 120 bp, Homo sapiens
  misc_feature: 1270 for SV(W|O) and mtDNA
cccaatgtatgggatggcggatagtaagtttgtaattactgtggcccctcagaatgatatttggcctcacgggaggacatagcctatgaaggctgttgctatagttgcaagcaggaggat

SEQ ID NO: 61681 - DNA, 120 bp, Homo sapiens
  misc_feature: 1270 for SV(W|O) and mtDNA
cagtgggctctagagggggtagagggggtgctatagggtaaatacgggccctatttcaaagatttttaggggaattaattctaggacgatgggcatgaaactgtggtttgctccacagat

SEQ ID NO: 61682 - DNA, 120 bp, Homo sapiens
  misc_feature: 1270 for SV(W|O) and mtDNA
aggtgttcttgtgttgtgataagggtggagaggttaaaggagccacttattagtaatgttgatagtagaatgatggctagggtgacttcatatgagattgtttgggctactgctcgcagt

SEQ ID NO: 61683 - DNA, 120 bp, Homo sapiens
  misc_feature: 1269 for SV(W|O) and mtDNA
tgaaattgttttaggtaatagcttttctagtcaggttaggtctaggaggagtaggggcaggttttggctcgtaagaaggcctagataggggattgtgcggtgtgtgatgctagggtagaa

SEQ ID NO: 61684 - DNA, 120 bp, Homo sapiens
  misc_feature: 1269 for SV(W|O) and mtDNA
atagtcctagaaataagggggtttaagctcctattatttactctatcaaagtaactcttttatcagacatatttcttaggtttgagggggaatgctggagattgtaatgggtatggagac

SEQ ID NO: 61685 - DNA, 120 bp, Homo sapiens
  misc_feature: 1269 for SV(W|O) and mtDNA
ggcgcttgtcagggaggtagcgatgagagtaatagatagggctcaggcgtttgtgtatgatatgtttgcggtttcgatgatgtggtctttggagtagaaacctgtgaggaaaggtattcc

SEQ ID NO: 61686 - DNA, 120 bp, Homo sapiens
  misc_feature: 1269 for SV(W|O) and mtDNA
ggccgcggtaccctaaccgtgcaaaggtagcataatcacttgttccttaaatagggacctgtatgaatggctccacgagggttcagctgtctcttacttttaaccagtgaaattgacctg

SEQ ID NO: 61687 - DNA, 120 bp, Homo sapiens
  misc_feature: 1269 for SV(W|O) and mtDNA
agcgatgagagtaatagatagggctcaggcgtttgtgtatgatatgtttgcggtttcgatgatgtggtctttggagtagaaacctgtgaggaaaggtattcctgctaatgctaggctgcc

SEQ ID NO: 61688 - DNA, 120 bp, Homo sapiens
  misc_feature: 1269 for SV(W|O) and mtDNA
gagcgtctgagatgttagtattagttagttttgttgtgagtgttaggaaaagggcatacaggactaggaagcagataaggaaaatgattatgagggcgtgatcatgaaaggtgataagct

SEQ ID NO: 61689 - DNA, 120 bp, Homo sapiens
  misc_feature: 1269 for SV(W|O) and mtDNA
cgtacacaccgcccgtcaccctcctcaagtatacttcaaaggacatttaactaaaacccctacgcatttatatagaggagacaagtcgtaacatggtaagtgtactggaaagtgcacttg

SEQ ID NO: 61690 - DNA, 120 bp, Homo sapiens
  misc_feature: 1269 for SV(W|O) and mtDNA
cacgttccccttaaataagacatcacgatggatcacaggtctatcaccctattaaccactcacgggagctctccatgcatttggtattttcgtctggggggtatgcacgcgatagcattg

SEQ ID NO: 61691 - DNA, 120 bp, Homo sapiens
  misc_feature: 1269 for SV(W|O) and mtDNA
acctaaaacaatttcacagcaccaaatctccacctccatcatcacctcaacccaaaaaggcataattaaactttacttcctctctttcttcttcccactcatcctaaccctactcctaat

SEQ ID NO: 61692 - DNA, 120 bp, Homo sapiens
  misc_feature: 1269 for SV(W|O) and mtDNA
attacctaaaacaatttcacagcaccaaatctccacctccatcatcacctcaacccaaaaaggcataattaaactttacttcctctctttcttcttcccactcatcctaaccctactcct

SEQ ID NO: 61693 - DNA, 120 bp, Homo sapiens
  misc_feature: 1269 for SV(W|O) and mtDNA
agggacccctatctgaggggggtcatccatggggacgagaagggatttgactgtaatgtgctatgtacggtaaatggctttatgtactatgtactgttaagggtgggtaggtttgttggt

SEQ ID NO: 61694 - DNA, 120 bp, Homo sapiens
  misc_feature: 1268 for SV(W|O) and mtDNA
ttgttggtgtatatattgtaattgagattgctcgggggaataggttatgtgattaggagtagggttaggatgagtgggaagaagaaagagaggaagtaaagtttaattatgcctttttgg

SEQ ID NO: 61695 - DNA, 120 bp, Homo sapiens
  misc_feature: 1268 for SV(W|O) and mtDNA
caatgtatgggatggcggatagtaagtttgtaattactgtggcccctcagaatgatatttggcctcacgggaggacatagcctatgaaggctgttgctatagttgcaagcaggaggataa

SEQ ID NO: 61696 - DNA, 120 bp, Homo sapiens
  misc_feature: 1268 for SV(W|O) and mtDNA
tggcggatagtaagtttgtaattactgtggcccctcagaatgatatttggcctcacgggaggacatagcctatgaaggctgttgctatagttgcaagcaggaggataatgccgatgtttc

SEQ ID NO: 61697 - DNA, 120 bp, Homo sapiens
  misc_feature: 1268 for SV(W|O) and mtDNA
tggagtggaagtgaaatcacatggctaggccggaggtcattaggagggctgagagggcccctgttaggggtcatgggctgggttttactatatgataggcatgtgattggtgggtcatta

SEQ ID NO: 61698 - DNA, 120 bp, Homo sapiens
  misc_feature: 1268 for SV(W|O) and mtDNA
tgcttgagtggagtagggctgagactggggtggggccttctatggctgaggggagtcaggggtggagacctaattgggctgatttgcctgctgctgctaggaggaggcctagtagtgggg

SEQ ID NO: 61699 - DNA, 120 bp, Homo sapiens
  misc_feature: 1268 for SV(W|O) and mtDNA
agcccacacgttccccttaaataagacatcacgatggatcacaggtctatcaccctattaaccactcacgggagctctccatgcatttggtattttcgtctggggggtatgcacgcgata

SEQ ID NO: 61700 - DNA, 120 bp, Homo sapiens
  misc_feature: 1268 for SV(W|O) and mtDNA
gcttccggctgccaggcgtttaatggggtttagtagggtagggttattttcgttaatgttagtaagggtggggaagcgaggttgacctgttagggtgagaagaattattcgagtgctata

SEQ ID NO: 61701 - DNA, 120 bp, Homo sapiens
  misc_feature: 1268 for SV(W|O) and mtDNA
ctaggctatatacaactacgcaaaggccccaacgttgtaggcccctacgggctactacaacccttcgctgacgccataaaactcttcaccaaagagcccctaaaacccgccacatctacc

SEQ ID NO: 61702 - DNA, 120 bp, Homo sapiens
  misc_feature: 1268 for SV(W|O) and mtDNA
gggtttagtattgattgttagcggtgtggtcgggtgtgttattattctgaattttgggggaggttatatgggtttaatagtttttttaatttatttagggggaatgatggttgtctttgg

SEQ ID NO: 61703 - DNA, 120 bp, Homo sapiens
  misc_feature: 1268 for SV(W|O) and mtDNA
caaactacgccctgatcggcgcactgcgagcagtagcccaaacaatctcatatgaagtcaccctagccatcattctactatcaacattactaataagtggctcctttaacctctccaccc

SEQ ID NO: 61704 - DNA, 120 bp, Homo sapiens
  misc_feature: 1268 for SV(W|O) and mtDNA
ggggtttagtattgattgttagcggtgtggtcgggtgtgttattattctgaattttgggggaggttatatgggtttaatagtttttttaatttatttagggggaatgatggttgtctttg

SEQ ID NO: 61705 - DNA, 120 bp, Homo sapiens
  misc_feature: 1268 for SV(W|O) and mtDNA
caaggccaccacacaccacctgtccaaaaaggccttcgatacgggataatcctatttattacctcagaagtttttttcttcgcaggatttttctgagccttttaccactccagcctagcc

SEQ ID NO: 61706 - DNA, 120 bp, Homo sapiens
  misc_feature: 1268 for SV(W|O) and mtDNA
gcaaatcagcccaattaggtctccacccctgactcccctcagccatagaaggccccaccccagtctcagccctactccactcaagcactatagttgtagcaggaatcttcttactcatcc

SEQ ID NO: 61707 - DNA, 120 bp, Homo sapiens
  misc_feature: 1268 for SV(W|O) and mtDNA
accaaggccaccacacaccacctgtccaaaaaggccttcgatacgggataatcctatttattacctcagaagtttttttcttcgcaggatttttctgagccttttaccactccagcctag

SEQ ID NO: 61708 - DNA, 120 bp, Homo sapiens
  misc_feature: 1268 for SV(W|O) and mtDNA
cgcgtacacaccgcccgtcaccctcctcaagtatacttcaaaggacatttaactaaaacccctacgcatttatatagaggagacaagtcgtaacatggtaagtgtactggaaagtgcact

SEQ ID NO: 61709 - DNA, 120 bp, Homo sapiens
  misc_feature: 1268 for SV(W|O) and mtDNA
accatcatagccaccatcaccctccttaacctctacttctacctacgcctaatctactccacctcaatcacactactccccatatctaacaacgtaaaaataaaatgacagtttgaacat

SEQ ID NO: 61710 - DNA, 120 bp, Homo sapiens
  misc_feature: 1268 for SV(W|O) and mtDNA
atatttcttaggtttgagggggaatgctggagattgtaatgggtatggagacatatcatataagtaatgctagggtgagtggtaggaagttttttcataggaggtgtatgagttggtcgt

SEQ ID NO: 61711 - DNA, 120 bp, Homo sapiens
  misc_feature: 1268 for SV(W|O) and mtDNA
agtcccagaggttacccaaggcacccctctgacatccggcctgcttcttctcacatgacaaaaactagcccccatctcaatcatataccaaatctctccctcactaaacgtaagccttct

SEQ ID NO: 61712 - DNA, 120 bp, Homo sapiens
  misc_feature: 1267 for SV(W|O) and mtDNA
tatccagtgaaccactatcacgaaaaaaactctacctctctatactaatctccctacaaatctccttaattataacattcacagccacagaactaatcatattttatatcttcttcgaaa

SEQ ID NO: 61713 - DNA, 120 bp, Homo sapiens
  misc_feature: 1267 for SV(W|O) and mtDNA
gtctttgattcctgcctcatcccattatttatcgcacctacgttcaatattacaggcgaacatacttactaaagtgtgttaattaattaatgcttgtaggacataataataacaattgaa

SEQ ID NO: 61714 - DNA, 120 bp, Homo sapiens
  misc_feature: 1267 for SV(W|O) and mtDNA
ttacctaaaacaatttcacagcaccaaatctccacctccatcatcacctcaacccaaaaaggcataattaaactttacttcctctctttcttcttcccactcatcctaaccctactccta

SEQ ID NO: 61715 - DNA, 120 bp, Homo sapiens
  misc_feature: 1267 for SV(W|O) and mtDNA
aacgctaatccaagcctcaccccactactaggcctcctcctagcagcagcaggcaaatcagcccaattaggtctccacccctgactcccctcagccatagaaggccccaccccagtctca

SEQ ID NO: 61716 - DNA, 120 bp, Homo sapiens
  misc_feature: 1267 for SV(W|O) and mtDNA
ggtttagtattgattgttagcggtgtggtcgggtgtgttattattctgaattttgggggaggttatatgggtttaatagtttttttaatttatttagggggaatgatggttgtctttgga

SEQ ID NO: 61717 - DNA, 120 bp, Homo sapiens
  misc_feature: 1267 for SV(W|O) and mtDNA
tattgattgttagcggtgtggtcgggtgtgttattattctgaattttgggggaggttatatgggtttaatagtttttttaatttatttagggggaatgatggttgtctttggatatacta

SEQ ID NO: 61718 - DNA, 120 bp, Homo sapiens
  misc_feature: 1267 for SV(W|O) and mtDNA
tacctacgcctaatctactccacctcaatcacactactccccatatctaacaacgtaaaaataaaatgacagtttgaacatacaaaacccaccccattcctccccacactcatcgccctt

SEQ ID NO: 61719 - DNA, 120 bp, Homo sapiens
  misc_feature: 1267 for SV(W|O) and mtDNA
gggacccctatctgaggggggtcatccatggggacgagaagggatttgactgtaatgtgctatgtacggtaaatggctttatgtactatgtactgttaagggtgggtaggtttgttggta

SEQ ID NO: 61720 - DNA, 120 bp, Homo sapiens
  misc_feature: 1267 for SV(W|O) and mtDNA
acacaccgcccgtcaccctcctcaagtatacttcaaaggacatttaactaaaacccctacgcatttatatagaggagacaagtcgtaacatggtaagtgtactggaaagtgcacttggac

SEQ ID NO: 61721 - DNA, 120 bp, Homo sapiens
  misc_feature: 1267 for SV(W|O) and mtDNA
ctaggccttcttacgagccaaaacctgcccctactcctcctagacctaacctgactagaaaagctattacctaaaacaatttcacagcaccaaatctccacctccatcatcacctcaacc

SEQ ID NO: 61722 - DNA, 120 bp, Homo sapiens
  misc_feature: 1267 for SV(W|O) and mtDNA
ggcttccggctgccaggcgtttaatggggtttagtagggtagggttattttcgttaatgttagtaagggtggggaagcgaggttgacctgttagggtgagaagaattattcgagtgctat

SEQ ID NO: 61723 - DNA, 120 bp, Homo sapiens
  misc_feature: 1267 for SV(W|O) and mtDNA
gatgatggcgggcaggatagttcagacggtttctatttcctgagcgtctgagatgttagtattagttagttttgttgtgagtgttaggaaaagggcatacaggactaggaagcagataag

SEQ ID NO: 61724 - DNA, 120 bp, Homo sapiens
  misc_feature: 1267 for SV(W|O) and mtDNA
ctattacctaaaacaatttcacagcaccaaatctccacctccatcatcacctcaacccaaaaaggcataattaaactttacttcctctctttcttcttcccactcatcctaaccctactc

SEQ ID NO: 61725 - DNA, 120 bp, Homo sapiens
  misc_feature: 1267 for SV(W|O) and mtDNA
ctataggcgcttgtcagggaggtagcgatgagagtaatagatagggctcaggcgtttgtgtatgatatgtttgcggtttcgatgatgtggtctttggagtagaaacctgtgaggaaaggt

SEQ ID NO: 61726 - DNA, 120 bp, Homo sapiens
  misc_feature: 1267 for SV(W|O) and mtDNA
atcctattggtgcgggggctttgtatgattatgggcgttgattagtagtagttactggttgaacattgtttgttggtgtatatattgtaattgagattgctcgggggaataggttatgtg

SEQ ID NO: 61727 - DNA, 120 bp, Homo sapiens
  misc_feature: 1267 for SV(W|O) and mtDNA
cacacgttccccttaaataagacatcacgatggatcacaggtctatcaccctattaaccactcacgggagctctccatgcatttggtattttcgtctggggggtatgcacgcgatagcat

SEQ ID NO: 61728 - DNA, 120 bp, Homo sapiens
  misc_feature: 1267 for SV(W|O) and mtDNA
aaactacgccctgatcggcgcactgcgagcagtagcccaaacaatctcatatgaagtcaccctagccatcattctactatcaacattactaataagtggctcctttaacctctccaccct

SEQ ID NO: 61729 - DNA, 120 bp, Homo sapiens
  misc_feature: 1266 for SV(W|O) and mtDNA
aaaaagtctttaactccaccattagcacccaaagctaagattctaatttaaactattctctattctttcatggggaagcagatttgggtaccacccaagtattgactcacccatcaacaa

SEQ ID NO: 61730 - DNA, 120 bp, Homo sapiens
  misc_feature: 1266 for SV(W|O) and mtDNA
tcctcccgtgaggccaaatatcattctgaggggccacagtaattacaaacttactatccgccatcccatacattgggacagacctagttcaatgaatctgaggaggctactcagtagaca

SEQ ID NO: 61731 - DNA, 120 bp, Homo sapiens
  misc_feature: 1266 for SV(W|O) and mtDNA
tgggctctagagggggtagagggggtgctatagggtaaatacgggccctatttcaaagatttttaggggaattaattctaggacgatgggcatgaaactgtggtttgctccacagatttc

SEQ ID NO: 61732 - DNA, 120 bp, Homo sapiens
  misc_feature: 1266 for SV(W|O) and mtDNA
actaggtctgtcccaatgtatgggatggcggatagtaagtttgtaattactgtggcccctcagaatgatatttggcctcacgggaggacatagcctatgaaggctgttgctatagttgca

SEQ ID NO: 61733 - DNA, 120 bp, Homo sapiens
  misc_feature: 1266 for SV(W|O) and mtDNA
tctaggccttcttacgagccaaaacctgcccctactcctcctagacctaacctgactagaaaagctattacctaaaacaatttcacagcaccaaatctccacctccatcatcacctcaac

SEQ ID NO: 61734 - DNA, 120 bp, Homo sapiens
  misc_feature: 1266 for SV(W|O) and mtDNA
taataatcggtgcccccgatatggcgtttccccgcataaacaacataagcttctgactcttacctccctctctcctactcctgctcgcatctgctatagtggaggccggagcaggaacag

SEQ ID NO: 61735 - DNA, 120 bp, Homo sapiens
  misc_feature: 1266 for SV(W|O) and mtDNA
gtgcttgagtggagtagggctgagactggggtggggccttctatggctgaggggagtcaggggtggagacctaattgggctgatttgcctgctgctgctaggaggaggcctagtagtggg

SEQ ID NO: 61736 - DNA, 120 bp, Homo sapiens
  misc_feature: 1266 for SV(W|O) and mtDNA
agccagaacgcctgaacgcaggcacatacttcctattctacaccctagtaggctcccttcccctactcatcgcactaatttacactcacaacaccctaggctcactaaacattctactac

SEQ ID NO: 61737 - DNA, 120 bp, Homo sapiens
  misc_feature: 1266 for SV(W|O) and mtDNA
ctaagggagggtagactgttcaacctgttcctgctccggcctccactatagcagatgcgagcaggagtaggagagagggaggtaagagtcagaagcttatgttgtttatgcggggaaacg

SEQ ID NO: 61738 - DNA, 120 bp, Homo sapiens
  misc_feature: 1266 for SV(W|O) and mtDNA
cgtctgagatgttagtattagttagttttgttgtgagtgttaggaaaagggcatacaggactaggaagcagataaggaaaatgattatgagggcgtgatcatgaaaggtgataagctctt

SEQ ID NO: 61739 - DNA, 120 bp, Homo sapiens
  misc_feature: 1265 for SV(W|O) and mtDNA
caggccccttcgccctattcttcatagccgaatacacaaacattattataataaacaccctcaccactacaatcttcctaggaacaacatatgacgcactctcccctgaactctacacaa

SEQ ID NO: 61740 - DNA, 120 bp, Homo sapiens
  misc_feature: 1265 for SV(W|O) and mtDNA
gatcggcgcactgcgagcagtagcccaaacaatctcatatgaagtcaccctagccatcattctactatcaacattactaataagtggctcctttaacctctccacccttatcacaacaca

SEQ ID NO: 61741 - DNA, 120 bp, Homo sapiens
  misc_feature: 1265 for SV(W|O) and mtDNA
tcggcgcactgcgagcagtagcccaaacaatctcatatgaagtcaccctagccatcattctactatcaacattactaataagtggctcctttaacctctccacccttatcacaacacaag

SEQ ID NO: 61742 - DNA, 120 bp, Homo sapiens
  misc_feature: 1265 for SV(W|O) and mtDNA
taaacgctaatccaagcctcaccccactactaggcctcctcctagcagcagcaggcaaatcagcccaattaggtctccacccctgactcccctcagccatagaaggccccaccccagtct

SEQ ID NO: 61743 - DNA, 120 bp, Homo sapiens
  misc_feature: 1265 for SV(W|O) and mtDNA
ggtgttcttgtgttgtgataagggtggagaggttaaaggagccacttattagtaatgttgatagtagaatgatggctagggtgacttcatatgagattgtttgggctactgctcgcagtg

SEQ ID NO: 61744 - DNA, 120 bp, Homo sapiens
  misc_feature: 1265 for SV(W|O) and mtDNA
gctaagttagctttacagtgggctctagagggggtagagggggtgctatagggtaaatacgggccctatttcaaagatttttaggggaattaattctaggacgatgggcatgaaactgtg

SEQ ID NO: 61745 - DNA, 120 bp, Homo sapiens
  misc_feature: 1265 for SV(W|O) and mtDNA
gcggatagtaagtttgtaattactgtggcccctcagaatgatatttggcctcacgggaggacatagcctatgaaggctgttgctatagttgcaagcaggaggataatgccgatgtttcag

SEQ ID NO: 61746 - DNA, 120 bp, Homo sapiens
  misc_feature: 1265 for SV(W|O) and mtDNA
ctacaactatagtgcttgagtggagtagggctgagactggggtggggccttctatggctgaggggagtcaggggtggagacctaattgggctgatttgcctgctgctgctaggaggaggc

SEQ ID NO: 61747 - DNA, 120 bp, Homo sapiens
  misc_feature: 1265 for SV(W|O) and mtDNA
ctgtaaagctaacttagcattaaccttttaagttaaagattaagagaaccaacacctctttacagtgaaatgccccaactaaatactaccgtatggcccaccataattacccccatactc

SEQ ID NO: 61748 - DNA, 120 bp, Homo sapiens
  misc_feature: 1265 for SV(W|O) and mtDNA
cgaataggcttccggctgccaggcgtttaatggggtttagtagggtagggttattttcgttaatgttagtaagggtggggaagcgaggttgacctgttagggtgagaagaattattcgag

SEQ ID NO: 61749 - DNA, 120 bp, Homo sapiens
  misc_feature: 1265 for SV(W|O) and mtDNA
ccagcattccccctcaaacctaagaaatatgtctgataaaagagttactttgatagagtaaataataggagcttaaacccccttatttctaggactatgagaatcgaacccatccctgag

SEQ ID NO: 61750 - DNA, 120 bp, Homo sapiens
  misc_feature: 1265 for SV(W|O) and mtDNA
aagcggctgtgcagacattcaattgttattattatgtcctacaagcattaattaattaacacactttagtaagtatgttcgcctgtaatattgaacgtaggtgcgataaataatgggatg

SEQ ID NO: 61751 - DNA, 120 bp, Homo sapiens
  misc_feature: 1265 for SV(W|O) and mtDNA
aaaactctacctctctatactaatctccctacaaatctccttaattataacattcacagccacagaactaatcatattttatatcttcttcgaaaccacacttatccccaccttggctat

SEQ ID NO: 61752 - DNA, 120 bp, Homo sapiens
  misc_feature: 1264 for SV(W|O) and mtDNA
ttctaggctatatacaactacgcaaaggccccaacgttgtaggcccctacgggctactacaacccttcgctgacgccataaaactcttcaccaaagagcccctaaaacccgccacatcta

SEQ ID NO: 61753 - DNA, 120 bp, Homo sapiens
  misc_feature: 1264 for SV(W|O) and mtDNA
tgttggtgtatatattgtaattgagattgctcgggggaataggttatgtgattaggagtagggttaggatgagtgggaagaagaaagagaggaagtaaagtttaattatgcctttttggg

SEQ ID NO: 61754 - DNA, 120 bp, Homo sapiens
  misc_feature: 1264 for SV(W|O) and mtDNA
tgattcctgcctcatcccattatttatcgcacctacgttcaatattacaggcgaacatacttactaaagtgtgttaattaattaatgcttgtaggacataataataacaattgaatgtct

SEQ ID NO: 61755 - DNA, 120 bp, Homo sapiens
  misc_feature: 1264 for SV(W|O) and mtDNA
tcaccctcctcaagtatacttcaaaggacatttaactaaaacccctacgcatttatatagaggagacaagtcgtaacatggtaagtgtactggaaagtgcacttggacgaaccagagtgt

SEQ ID NO: 61756 - DNA, 120 bp, Homo sapiens
  misc_feature: 1264 for SV(W|O) and mtDNA
ccatcatagccaccatcaccctccttaacctctacttctacctacgcctaatctactccacctcaatcacactactccccatatctaacaacgtaaaaataaaatgacagtttgaacata

SEQ ID NO: 61757 - DNA, 120 bp, Homo sapiens
  misc_feature: 1264 for SV(W|O) and mtDNA
gacaaccatcattccccctaaataaattaaaaaaactattaaacccatataacctcccccaaaattcagaataataacacacccgaccacaccgctaacaatcaatactaaacccccata

SEQ ID NO: 61758 - DNA, 120 bp, Homo sapiens
  misc_feature: 1264 for SV(W|O) and mtDNA
acctacgcctaatctactccacctcaatcacactactccccatatctaacaacgtaaaaataaaatgacagtttgaacatacaaaacccaccccattcctccccacactcatcgccctta

SEQ ID NO: 61759 - DNA, 120 bp, Homo sapiens
  misc_feature: 1264 for SV(W|O) and mtDNA
taagggagggtagactgttcaacctgttcctgctccggcctccactatagcagatgcgagcaggagtaggagagagggaggtaagagtcagaagcttatgttgtttatgcggggaaacgc

SEQ ID NO: 61760 - DNA, 120 bp, Homo sapiens
  misc_feature: 1264 for SV(W|O) and mtDNA
gtgttcttgtgttgtgataagggtggagaggttaaaggagccacttattagtaatgttgatagtagaatgatggctagggtgacttcatatgagattgtttgggctactgctcgcagtgc

SEQ ID NO: 61761 - DNA, 120 bp, Homo sapiens
  misc_feature: 1264 for SV(W|O) and mtDNA
agcatacccccgattccgctacgaccaactcatacacctcctatgaaaaaacttcctaccactcaccctagcattacttatatgatatgtctccatacccattacaatctccagcattcc

SEQ ID NO: 61762 - DNA, 120 bp, Homo sapiens
  misc_feature: 1264 for SV(W|O) and mtDNA
atacttcctattctacaccctagtaggctcccttcccctactcatcgcactaatttacactcacaacaccctaggctcactaaacattctactactcactctcactgcccaagaactatc

SEQ ID NO: 61763 - DNA, 120 bp, Homo sapiens
  misc_feature: 1264 for SV(W|O) and mtDNA
gaagggatttgactgtaatgtgctatgtacggtaaatggctttatgtactatgtactgttaagggtgggtaggtttgttggtatcctagtgggtgaggggtggctttggagttgcagttg

SEQ ID NO: 61764 - DNA, 120 bp, Homo sapiens
  misc_feature: 1264 for SV(W|O) and mtDNA
atgagtgggaagaagaaagagaggaagtaaagtttaattatgcctttttgggttgaggtgatgatggaggtggagatttggtgctgtgaaattgttttaggtaatagcttttctagtcag

SEQ ID NO: 61765 - DNA, 120 bp, Homo sapiens
  misc_feature: 1264 for SV(W|O) and mtDNA
agggttgattcgggaggatcctattggtgcgggggctttgtatgattatgggcgttgattagtagtagttactggttgaacattgtttgttggtgtatatattgtaattgagattgctcg

SEQ ID NO: 61766 - DNA, 120 bp, Homo sapiens
  misc_feature: 1263 for SV(W|O) and mtDNA
aaaacaatttcacagcaccaaatctccacctccatcatcacctcaacccaaaaaggcataattaaactttacttcctctctttcttcttcccactcatcctaaccctactcctaatcaca

SEQ ID NO: 61767 - DNA, 120 bp, Homo sapiens
  misc_feature: 1263 for SV(W|O) and mtDNA
tcccagaggttacccaaggcacccctctgacatccggcctgcttcttctcacatgacaaaaactagcccccatctcaatcatataccaaatctctccctcactaaacgtaagccttctcc

SEQ ID NO: 61768 - DNA, 120 bp, Homo sapiens
  misc_feature: 1263 for SV(W|O) and mtDNA
gcttcaacatcgaatacgccgcaggccccttcgccctattcttcatagccgaatacacaaacattattataataaacaccctcaccactacaatcttcctaggaacaacatatgacgcac

SEQ ID NO: 61769 - DNA, 120 bp, Homo sapiens
  misc_feature: 1263 for SV(W|O) and mtDNA
gccagaacgcctgaacgcaggcacatacttcctattctacaccctagtaggctcccttcccctactcatcgcactaatttacactcacaacaccctaggctcactaaacattctactact

SEQ ID NO: 61770 - DNA, 120 bp, Homo sapiens
  misc_feature: 1263 for SV(W|O) and mtDNA
gagagtgatatttgatcaggagaacgtggttactagcacagagagttctcccagtaggttaatagtggggggtaaggcgaggttagcgaggcttgctagaagtcatcaaaaagctattag

SEQ ID NO: 61771 - DNA, 120 bp, Homo sapiens
  misc_feature: 1263 for SV(W|O) and mtDNA
caagggacccctatctgaggggggtcatccatggggacgagaagggatttgactgtaatgtgctatgtacggtaaatggctttatgtactatgtactgttaagggtgggtaggtttgttg

SEQ ID NO: 61772 - DNA, 120 bp, Homo sapiens
  misc_feature: 1263 for SV(W|O) and mtDNA
aactccaccattagcacccaaagctaagattctaatttaaactattctctattctttcatggggaagcagatttgggtaccacccaagtattgactcacccatcaacaaccgctatgtat

SEQ ID NO: 61773 - DNA, 120 bp, Homo sapiens
  misc_feature: 1262 for SV(W|O) and mtDNA
tttctatttcctgagcgtctgagatgttagtattagttagttttgttgtgagtgttaggaaaagggcatacaggactaggaagcagataaggaaaatgattatgagggcgtgatcatgaa

SEQ ID NO: 61774 - DNA, 120 bp, Homo sapiens
  misc_feature: 1262 for SV(W|O) and mtDNA
cagtatctgtctttgattcctgcctcatcccattatttatcgcacctacgttcaatattacaggcgaacatacttactaaagtgtgttaattaattaatgcttgtaggacataataataa

SEQ ID NO: 61775 - DNA, 120 bp, Homo sapiens
  misc_feature: 1262 for SV(W|O) and mtDNA
tacctaaaacaatttcacagcaccaaatctccacctccatcatcacctcaacccaaaaaggcataattaaactttacttcctctctttcttcttcccactcatcctaaccctactcctaa

SEQ ID NO: 61776 - DNA, 120 bp, Homo sapiens
  misc_feature: 1262 for SV(W|O) and mtDNA
tgtagagttcaggggagagtgcgtcatatgttgttcctaggaagattgtagtggtgagggtgtttattataataatgtttgtgtattcggctatgaagaatagggcgaaggggcctgcgg

SEQ ID NO: 61777 - DNA, 120 bp, Homo sapiens
  misc_feature: 1262 for SV(W|O) and mtDNA
tctttaactccaccattagcacccaaagctaagattctaatttaaactattctctattctttcatggggaagcagatttgggtaccacccaagtattgactcacccatcaacaaccgcta

SEQ ID NO: 61778 - DNA, 120 bp, Homo sapiens
  misc_feature: 1262 for SV(W|O) and mtDNA
tcctgagcgtctgagatgttagtattagttagttttgttgtgagtgttaggaaaagggcatacaggactaggaagcagataaggaaaatgattatgagggcgtgatcatgaaaggtgata

SEQ ID NO: 61779 - DNA, 120 bp, Homo sapiens
  misc_feature: 1262 for SV(W|O) and mtDNA
ccctatctgaggggggtcatccatggggacgagaagggatttgactgtaatgtgctatgtacggtaaatggctttatgtactatgtactgttaagggtgggtaggtttgttggtatccta

SEQ ID NO: 61780 - DNA, 120 bp, Homo sapiens
  misc_feature: 1262 for SV(W|O) and mtDNA
cagccattcaagcaatcctatacaaccgtatcggcgatatcggtttcatcctcgccttagcatgatttatcctacactccaactcatgagacccacaacaaatagcccttctaaacgcta

SEQ ID NO: 61781 - DNA, 120 bp, Homo sapiens
  misc_feature: 1262 for SV(W|O) and mtDNA
gttatggagtggaagtgaaatcacatggctaggccggaggtcattaggagggctgagagggcccctgttaggggtcatgggctgggttttactatatgataggcatgtgattggtgggtc

SEQ ID NO: 61782 - DNA, 120 bp, Homo sapiens
  misc_feature: 1262 for SV(W|O) and mtDNA
ctcaagtatacttcaaaggacatttaactaaaacccctacgcatttatatagaggagacaagtcgtaacatggtaagtgtactggaaagtgcacttggacgaaccagagtgtagcttaac

SEQ ID NO: 61783 - DNA, 120 bp, Homo sapiens
  misc_feature: 1262 for SV(W|O) and mtDNA
gtaaagctaacttagcattaaccttttaagttaaagattaagagaaccaacacctctttacagtgaaatgccccaactaaatactaccgtatggcccaccataattacccccatactcct

SEQ ID NO: 61784 - DNA, 120 bp, Homo sapiens
  misc_feature: 1262 for SV(W|O) and mtDNA
cgaacagcatacccccgattccgctacgaccaactcatacacctcctatgaaaaaacttcctaccactcaccctagcattacttatatgatatgtctccatacccattacaatctccagc

SEQ ID NO: 61785 - DNA, 120 bp, Homo sapiens
  misc_feature: 1262 for SV(W|O) and mtDNA
cacagcaccaaatctccacctccatcatcacctcaacccaaaaaggcataattaaactttacttcctctctttcttcttcccactcatcctaaccctactcctaatcacataacctattc

SEQ ID NO: 61786 - DNA, 120 bp, Homo sapiens
  misc_feature: 1261 for SV(W|O) and mtDNA
tcaccccactactaggcctcctcctagcagcagcaggcaaatcagcccaattaggtctccacccctgactcccctcagccatagaaggccccaccccagtctcagccctactccactcaa

SEQ ID NO: 61787 - DNA, 120 bp, Homo sapiens
  misc_feature: 1261 for SV(W|O) and mtDNA
atctaggccttcttacgagccaaaacctgcccctactcctcctagacctaacctgactagaaaagctattacctaaaacaatttcacagcaccaaatctccacctccatcatcacctcaa

SEQ ID NO: 61788 - DNA, 120 bp, Homo sapiens
  misc_feature: 1261 for SV(W|O) and mtDNA
cccctgaactctacacaacatattttgtcaccaagaccctacttctaacctccctgttcttatgaattcgaacagcatacccccgattccgctacgaccaactcatacacctcctatgaa

SEQ ID NO: 61789 - DNA, 120 bp, Homo sapiens
  misc_feature: 1261 for SV(W|O) and mtDNA
ttcaacatcgaatacgccgcaggccccttcgccctattcttcatagccgaatacacaaacattattataataaacaccctcaccactacaatcttcctaggaacaacatatgacgcactc

SEQ ID NO: 61790 - DNA, 120 bp, Homo sapiens
  misc_feature: 1261 for SV(W|O) and mtDNA
ctgatcggcgcactgcgagcagtagcccaaacaatctcatatgaagtcaccctagccatcattctactatcaacattactaataagtggctcctttaacctctccacccttatcacaaca

SEQ ID NO: 61791 - DNA, 120 bp, Homo sapiens
  misc_feature: 1261 for SV(W|O) and mtDNA
tctttgattcctgcctcatcccattatttatcgcacctacgttcaatattacaggcgaacatacttactaaagtgtgttaattaattaatgcttgtaggacataataataacaattgaat

SEQ ID NO: 61792 - DNA, 120 bp, Homo sapiens
  misc_feature: 1261 for SV(W|O) and mtDNA
tagcgatgagagtaatagatagggctcaggcgtttgtgtatgatatgtttgcggtttcgatgatgtggtctttggagtagaaacctgtgaggaaaggtattcctgctaatgctaggctgc

SEQ ID NO: 61793 - DNA, 120 bp, Homo sapiens
  misc_feature: 1261 for SV(W|O) and mtDNA
aaagtctttaactccaccattagcacccaaagctaagattctaatttaaactattctctattctttcatggggaagcagatttgggtaccacccaagtattgactcacccatcaacaacc

SEQ ID NO: 61794 - DNA, 120 bp, Homo sapiens
  misc_feature: 1261 for SV(W|O) and mtDNA
cgctaatccaagcctcaccccactactaggcctcctcctagcagcagcaggcaaatcagcccaattaggtctccacccctgactcccctcagccatagaaggccccaccccagtctcagc

SEQ ID NO: 61795 - DNA, 120 bp, Homo sapiens
  misc_feature: 1261 for SV(W|O) and mtDNA
ccaaggccaccacacaccacctgtccaaaaaggccttcgatacgggataatcctatttattacctcagaagtttttttcttcgcaggatttttctgagccttttaccactccagcctagc

SEQ ID NO: 61796 - DNA, 120 bp, Homo sapiens
  misc_feature: 1261 for SV(W|O) and mtDNA
gatcctattggtgcgggggctttgtatgattatgggcgttgattagtagtagttactggttgaacattgtttgttggtgtatatattgtaattgagattgctcgggggaataggttatgt

SEQ ID NO: 61797 - DNA, 120 bp, Homo sapiens
  misc_feature: 1261 for SV(W|O) and mtDNA
caccccactactaggcctcctcctagcagcagcaggcaaatcagcccaattaggtctccacccctgactcccctcagccatagaaggccccaccccagtctcagccctactccactcaag

SEQ ID NO: 61798 - DNA, 120 bp, Homo sapiens
  misc_feature: 1261 for SV(W|O) and mtDNA
atgttggagaaataaaatgtgcatagtggggattttattttaagtttgttggttaggtagttgaggtctagggctgttagaagtcctaggaaagtgacagcgagggctgtgagttttagg

SEQ ID NO: 61799 - DNA, 120 bp, Homo sapiens
  misc_feature: 1261 for SV(W|O) and mtDNA
accctgaagtaggaaccagatgtcggatacagttcactttagctacccccaagtgttatgggcccggagcgaggagagtagcactcttgtgcgggatattgatttcacggaggatggtgg

SEQ ID NO: 61800 - DNA, 120 bp, Homo sapiens
  misc_feature: 1261 for SV(W|O) and mtDNA
agagtgatatttgatcaggagaacgtggttactagcacagagagttctcccagtaggttaatagtggggggtaaggcgaggttagcgaggcttgctagaagtcatcaaaaagctattagt

SEQ ID NO: 61801 - DNA, 120 bp, Homo sapiens
  misc_feature: 1261 for SV(W|O) and mtDNA
aagttagctttacagtgggctctagagggggtagagggggtgctatagggtaaatacgggccctatttcaaagatttttaggggaattaattctaggacgatgggcatgaaactgtggtt

SEQ ID NO: 61802 - DNA, 120 bp, Homo sapiens
  misc_feature: 1260 for SV(W|O) and mtDNA
ggcttcaacatcgaatacgccgcaggccccttcgccctattcttcatagccgaatacacaaacattattataataaacaccctcaccactacaatcttcctaggaacaacatatgacgca

SEQ ID NO: 61803 - DNA, 120 bp, Homo sapiens
  misc_feature: 1260 for SV(W|O) and mtDNA
tctatttcctgagcgtctgagatgttagtattagttagttttgttgtgagtgttaggaaaagggcatacaggactaggaagcagataaggaaaatgattatgagggcgtgatcatgaaag

SEQ ID NO: 61804 - DNA, 120 bp, Homo sapiens
  misc_feature: 1260 for SV(W|O) and mtDNA
tcgaacagcatacccccgattccgctacgaccaactcatacacctcctatgaaaaaacttcctaccactcaccctagcattacttatatgatatgtctccatacccattacaatctccag

SEQ ID NO: 61805 - DNA, 120 bp, Homo sapiens
  misc_feature: 1260 for SV(W|O) and mtDNA
tcatataccaaatctctccctcactaaacgtaagccttctcctcactctctcaatcttatccatcatagcaggcagttgaggtggattaaaccaaacccagctacgcaaaatcttagcat

SEQ ID NO: 61806 - DNA, 120 bp, Homo sapiens
  misc_feature: 1260 for SV(W|O) and mtDNA
taggcttccggctgccaggcgtttaatggggtttagtagggtagggttattttcgttaatgttagtaagggtggggaagcgaggttgacctgttagggtgagaagaattattcgagtgct

SEQ ID NO: 61807 - DNA, 120 bp, Homo sapiens
  misc_feature: 1260 for SV(W|O) and mtDNA
taactccaccattagcacccaaagctaagattctaatttaaactattctctattctttcatggggaagcagatttgggtaccacccaagtattgactcacccatcaacaaccgctatgta

SEQ ID NO: 61808 - DNA, 120 bp, Homo sapiens
  misc_feature: 1260 for SV(W|O) and mtDNA
aaaagtctttaactccaccattagcacccaaagctaagattctaatttaaactattctctattctttcatggggaagcagatttgggtaccacccaagtattgactcacccatcaacaac

SEQ ID NO: 61809 - DNA, 120 bp, Homo sapiens
  misc_feature: 1260 for SV(W|O) and mtDNA
gcgtttagaagggctatttgttgtgggtctcatgagttggagtgtaggataaatcatgctaaggcgaggatgaaaccgatatcgccgatacggttgtataggattgcttgaatggctgct

SEQ ID NO: 61810 - DNA, 120 bp, Homo sapiens
  misc_feature: 1260 for SV(W|O) and mtDNA
cctgaagtaggaaccagatgtcggatacagttcactttagctacccccaagtgttatgggcccggagcgaggagagtagcactcttgtgcgggatattgatttcacggaggatggtggtc

SEQ ID NO: 61811 - DNA, 120 bp, Homo sapiens
  misc_feature: 1260 for SV(W|O) and mtDNA
ctttgattcctgcctcatcccattatttatcgcacctacgttcaatattacaggcgaacatacttactaaagtgtgttaattaattaatgcttgtaggacataataataacaattgaatg

SEQ ID NO: 61812 - DNA, 120 bp, Homo sapiens
  misc_feature: 1259 for SV(W|O) and mtDNA
tttaacggccgcggtaccctaaccgtgcaaaggtagcataatcacttgttccttaaatagggacctgtatgaatggctccacgagggttcagctgtctcttacttttaaccagtgaaatt

SEQ ID NO: 61813 - DNA, 120 bp, Homo sapiens
  misc_feature: 1259 for SV(W|O) and mtDNA
ttgggttgaggtgatgatggaggtggagatttggtgctgtgaaattgttttaggtaatagcttttctagtcaggttaggtctaggaggagtaggggcaggttttggctcgtaagaaggcc

SEQ ID NO: 61814 - DNA, 120 bp, Homo sapiens
  misc_feature: 1259 for SV(W|O) and mtDNA
ttagcacccaaagctaagattctaatttaaactattctctattctttcatggggaagcagatttgggtaccacccaagtattgactcacccatcaacaaccgctatgtatttcgtacatt

SEQ ID NO: 61815 - DNA, 120 bp, Homo sapiens
  misc_feature: 1259 for SV(W|O) and mtDNA
tgagtgggaagaagaaagagaggaagtaaagtttaattatgcctttttgggttgaggtgatgatggaggtggagatttggtgctgtgaaattgttttaggtaatagcttttctagtcagg

SEQ ID NO: 61816 - DNA, 120 bp, Homo sapiens
  misc_feature: 1259 for SV(W|O) and mtDNA
taatcacataacctattcccccgagcaatctcaattacaatatatacaccaacaaacaatgttcaaccagtaactactactaatcaacgcccataatcatacaaagcccccgcaccaata

SEQ ID NO: 61817 - DNA, 120 bp, Homo sapiens
  misc_feature: 1259 for SV(W|O) and mtDNA
aatccaagcctcaccccactactaggcctcctcctagcagcagcaggcaaatcagcccaattaggtctccacccctgactcccctcagccatagaaggccccaccccagtctcagcccta

SEQ ID NO: 61818 - DNA, 120 bp, Homo sapiens
  misc_feature: 1259 for SV(W|O) and mtDNA
gggggtttagtattgattgttagcggtgtggtcgggtgtgttattattctgaattttgggggaggttatatgggtttaatagtttttttaatttatttagggggaatgatggttgtcttt

SEQ ID NO: 61819 - DNA, 120 bp, Homo sapiens
  misc_feature: 1259 for SV(W|O) and mtDNA
caggggattaattagtacgggaagggtataaccaacattttcggggtatgggcccgatagcttatttagctgaccttactttaggatggggtgtgataggtggcacggagaattttggat

SEQ ID NO: 61820 - DNA, 120 bp, Homo sapiens
  misc_feature: 1258 for SV(W|O) and mtDNA
ttacactattcctcatcacccaactaaaaatattaaacacaaactaccacctacctccctcaccaaagcccataaaaataaaaaattataacaaaccctgagaaccaaaatgaacgaaaa

SEQ ID NO: 61821 - DNA, 120 bp, Homo sapiens
  misc_feature: 1258 for SV(W|O) and mtDNA
ccacacgttccccttaaataagacatcacgatggatcacaggtctatcaccctattaaccactcacgggagctctccatgcatttggtattttcgtctggggggtatgcacgcgatagca

SEQ ID NO: 61822 - DNA, 120 bp, Homo sapiens
  misc_feature: 1258 for SV(W|O) and mtDNA
cctcgtagtaacagccattctcatccaaaccccctgaagcttcaccggcgcagtcattctcataatcgcccacgggcttacatcctcattactattctgcctagcaaactcaaactacga

SEQ ID NO: 61823 - DNA, 120 bp, Homo sapiens
  misc_feature: 1258 for SV(W|O) and mtDNA
tccagcattccccctcaaacctaagaaatatgtctgataaaagagttactttgatagagtaaataataggagcttaaacccccttatttctaggactatgagaatcgaacccatccctga

SEQ ID NO: 61824 - DNA, 120 bp, Homo sapiens
  misc_feature: 1258 for SV(W|O) and mtDNA
taagttagctttacagtgggctctagagggggtagagggggtgctatagggtaaatacgggccctatttcaaagatttttaggggaattaattctaggacgatgggcatgaaactgtggt

SEQ ID NO: 61825 - DNA, 120 bp, Homo sapiens
  misc_feature: 1258 for SV(W|O) and mtDNA
gcaggagtaatcagaggtgttcttgtgttgtgataagggtggagaggttaaaggagccacttattagtaatgttgatagtagaatgatggctagggtgacttcatatgagattgtttggg

SEQ ID NO: 61826 - DNA, 120 bp, Homo sapiens
  misc_feature: 1258 for SV(W|O) and mtDNA
cagcatacccccgattccgctacgaccaactcatacacctcctatgaaaaaacttcctaccactcaccctagcattacttatatgatatgtctccatacccattacaatctccagcattc

SEQ ID NO: 61827 - DNA, 120 bp, Homo sapiens
  misc_feature: 1258 for SV(W|O) and mtDNA
aagattttgcgtagctgggtttggtttaatccacctcaactgcctgctatgatggataagattgagagagtgaggagaaggcttacgtttagtgagggagagatttggtatatgattgag

SEQ ID NO: 61828 - DNA, 120 bp, Homo sapiens
  misc_feature: 1258 for SV(W|O) and mtDNA
ctattggtgcgggggctttgtatgattatgggcgttgattagtagtagttactggttgaacattgtttgttggtgtatatattgtaattgagattgctcgggggaataggttatgtgatt

SEQ ID NO: 61829 - DNA, 120 bp, Homo sapiens
  misc_feature: 1258 for SV(W|O) and mtDNA
atgggggtttagtattgattgttagcggtgtggtcgggtgtgttattattctgaattttgggggaggttatatgggtttaatagtttttttaatttatttagggggaatgatggttgtct

SEQ ID NO: 61830 - DNA, 120 bp, Homo sapiens
  misc_feature: 1257 for SV(W|O) and mtDNA
ttatggtaccgtacaatattcatggtggctggcagtaatgtacgaaatacatagcggttgttgatgggtgagtcaatacttgggtggtacccaaatctgcttccccatgaaagaatagag

SEQ ID NO: 61831 - DNA, 120 bp, Homo sapiens
  misc_feature: 1257 for SV(W|O) and mtDNA
ctaataatcggtgcccccgatatggcgtttccccgcataaacaacataagcttctgactcttacctccctctctcctactcctgctcgcatctgctatagtggaggccggagcaggaaca

SEQ ID NO: 61832 - DNA, 120 bp, Homo sapiens
  misc_feature: 1257 for SV(W|O) and mtDNA
cggcgcactgcgagcagtagcccaaacaatctcatatgaagtcaccctagccatcattctactatcaacattactaataagtggctcctttaacctctccacccttatcacaacacaaga

SEQ ID NO: 61833 - DNA, 120 bp, Homo sapiens
  misc_feature: 1257 for SV(W|O) and mtDNA
cccgtcaccctcctcaagtatacttcaaaggacatttaactaaaacccctacgcatttatatagaggagacaagtcgtaacatggtaagtgtactggaaagtgcacttggacgaaccaga

SEQ ID NO: 61834 - DNA, 120 bp, Homo sapiens
  misc_feature: 1257 for SV(W|O) and mtDNA
gaaagcggctgtgcagacattcaattgttattattatgtcctacaagcattaattaattaacacactttagtaagtatgttcgcctgtaatattgaacgtaggtgcgataaataatggga

SEQ ID NO: 61835 - DNA, 120 bp, Homo sapiens
  misc_feature: 1257 for SV(W|O) and mtDNA
tagcccacacgttccccttaaataagacatcacgatggatcacaggtctatcaccctattaaccactcacgggagctctccatgcatttggtattttcgtctggggggtatgcacgcgat

SEQ ID NO: 61836 - DNA, 120 bp, Homo sapiens
  misc_feature: 1257 for SV(W|O) and mtDNA
ccctatgtcgcagtatctgtctttgattcctgcctcatcccattatttatcgcacctacgttcaatattacaggcgaacatacttactaaagtgtgttaattaattaatgcttgtaggac

SEQ ID NO: 61837 - DNA, 120 bp, Homo sapiens
  misc_feature: 1257 for SV(W|O) and mtDNA
gtattgattgttagcggtgtggtcgggtgtgttattattctgaattttgggggaggttatatgggtttaatagtttttttaatttatttagggggaatgatggttgtctttggatatact

SEQ ID NO: 61838 - DNA, 120 bp, Homo sapiens
  misc_feature: 1257 for SV(W|O) and mtDNA
ggattaattagtacgggaagggtataaccaacattttcggggtatgggcccgatagcttatttagctgaccttactttaggatggggtgtgataggtggcacggagaattttggattctc

SEQ ID NO: 61839 - DNA, 120 bp, Homo sapiens
  misc_feature: 1257 for SV(W|O) and mtDNA
gcgcttgtcagggaggtagcgatgagagtaatagatagggctcaggcgtttgtgtatgatatgtttgcggtttcgatgatgtggtctttggagtagaaacctgtgaggaaaggtattcct

SEQ ID NO: 61840 - DNA, 120 bp, Homo sapiens
  misc_feature: 1257 for SV(W|O) and mtDNA
gcctcaccccactactaggcctcctcctagcagcagcaggcaaatcagcccaattaggtctccacccctgactcccctcagccatagaaggccccaccccagtctcagccctactccact

SEQ ID NO: 61841 - DNA, 120 bp, Homo sapiens
  misc_feature: 1257 for SV(W|O) and mtDNA
cttaaataagacatcacgatggatcacaggtctatcaccctattaaccactcacgggagctctccatgcatttggtattttcgtctggggggtatgcacgcgatagcattgcgagacgct

SEQ ID NO: 61842 - DNA, 120 bp, Homo sapiens
  misc_feature: 1257 for SV(W|O) and mtDNA
ccgtcaccctcctcaagtatacttcaaaggacatttaactaaaacccctacgcatttatatagaggagacaagtcgtaacatggtaagtgtactggaaagtgcacttggacgaaccagag

SEQ ID NO: 61843 - DNA, 120 bp, Homo sapiens
  misc_feature: 1257 for SV(W|O) and mtDNA
cgttccccttaaataagacatcacgatggatcacaggtctatcaccctattaaccactcacgggagctctccatgcatttggtattttcgtctggggggtatgcacgcgatagcattgcg

SEQ ID NO: 61844 - DNA, 120 bp, Homo sapiens
  misc_feature: 1257 for SV(W|O) and mtDNA
aatagcccacacgttccccttaaataagacatcacgatggatcacaggtctatcaccctattaaccactcacgggagctctccatgcatttggtattttcgtctggggggtatgcacgcg

SEQ ID NO: 61845 - DNA, 120 bp, Homo sapiens
  misc_feature: 1257 for SV(W|O) and mtDNA
catatttcttaggtttgagggggaatgctggagattgtaatgggtatggagacatatcatataagtaatgctagggtgagtggtaggaagttttttcataggaggtgtatgagttggtcg

SEQ ID NO: 61846 - DNA, 120 bp, Homo sapiens
  misc_feature: 1257 for SV(W|O) and mtDNA
aataatcggtgcccccgatatggcgtttccccgcataaacaacataagcttctgactcttacctccctctctcctactcctgctcgcatctgctatagtggaggccggagcaggaacagg

SEQ ID NO: 61847 - DNA, 120 bp, Homo sapiens
  misc_feature: 1256 for SV(W|O) and mtDNA
ttagctttacagtgggctctagagggggtagagggggtgctatagggtaaatacgggccctatttcaaagatttttaggggaattaattctaggacgatgggcatgaaactgtggtttgc

SEQ ID NO: 61848 - DNA, 120 bp, Homo sapiens
  misc_feature: 1256 for SV(W|O) and mtDNA
tgttcttgtgttgtgataagggtggagaggttaaaggagccacttattagtaatgttgatagtagaatgatggctagggtgacttcatatgagattgtttgggctactgctcgcagtgcg

SEQ ID NO: 61849 - DNA, 120 bp, Homo sapiens
  misc_feature: 1256 for SV(W|O) and mtDNA
ctgaagtaggaaccagatgtcggatacagttcactttagctacccccaagtgttatgggcccggagcgaggagagtagcactcttgtgcgggatattgatttcacggaggatggtggtca

SEQ ID NO: 61850 - DNA, 120 bp, Homo sapiens
  misc_feature: 1256 for SV(W|O) and mtDNA
tatggtaccgtacaatattcatggtggctggcagtaatgtacgaaatacatagcggttgttgatgggtgagtcaatacttgggtggtacccaaatctgcttccccatgaaagaatagaga

SEQ ID NO: 61851 - DNA, 120 bp, Homo sapiens
  misc_feature: 1256 for SV(W|O) and mtDNA
tctaggctatatacaactacgcaaaggccccaacgttgtaggcccctacgggctactacaacccttcgctgacgccataaaactcttcaccaaagagcccctaaaacccgccacatctac

SEQ ID NO: 61852 - DNA, 120 bp, Homo sapiens
  misc_feature: 1256 for SV(W|O) and mtDNA
ctgtcccaatgtatgggatggcggatagtaagtttgtaattactgtggcccctcagaatgatatttggcctcacgggaggacatagcctatgaaggctgttgctatagttgcaagcagga

SEQ ID NO: 61853 - DNA, 120 bp, Homo sapiens
  misc_feature: 1256 for SV(W|O) and mtDNA
tcagggttgattcgggaggatcctattggtgcgggggctttgtatgattatgggcgttgattagtagtagttactggttgaacattgtttgttggtgtatatattgtaattgagattgct

SEQ ID NO: 61854 - DNA, 120 bp, Homo sapiens
  misc_feature: 1256 for SV(W|O) and mtDNA
tcaacatcgaatacgccgcaggccccttcgccctattcttcatagccgaatacacaaacattattataataaacaccctcaccactacaatcttcctaggaacaacatatgacgcactct

SEQ ID NO: 61855 - DNA, 120 bp, Homo sapiens
  misc_feature: 1256 for SV(W|O) and mtDNA
tatacaactacgcaaaggccccaacgttgtaggcccctacgggctactacaacccttcgctgacgccataaaactcttcaccaaagagcccctaaaacccgccacatctaccatcaccct

SEQ ID NO: 61856 - DNA, 120 bp, Homo sapiens
  misc_feature: 1256 for SV(W|O) and mtDNA
taatccaagcctcaccccactactaggcctcctcctagcagcagcaggcaaatcagcccaattaggtctccacccctgactcccctcagccatagaaggccccaccccagtctcagccct

SEQ ID NO: 61857 - DNA, 120 bp, Homo sapiens
  misc_feature: 1256 for SV(W|O) and mtDNA
atataccaaatctctccctcactaaacgtaagccttctcctcactctctcaatcttatccatcatagcaggcagttgaggtggattaaaccaaacccagctacgcaaaatcttagcatac

SEQ ID NO: 61858 - DNA, 120 bp, Homo sapiens
  misc_feature: 1256 for SV(W|O) and mtDNA
attgattgttagcggtgtggtcgggtgtgttattattctgaattttgggggaggttatatgggtttaatagtttttttaatttatttagggggaatgatggttgtctttggatatactac

SEQ ID NO: 61859 - DNA, 120 bp, Homo sapiens
  misc_feature: 1256 for SV(W|O) and mtDNA
ggacccctatctgaggggggtcatccatggggacgagaagggatttgactgtaatgtgctatgtacggtaaatggctttatgtactatgtactgttaagggtgggtaggtttgttggtat

SEQ ID NO: 61860 - DNA, 120 bp, Homo sapiens
  misc_feature: 1256 for SV(W|O) and mtDNA
caaaggccccaacgttgtaggcccctacgggctactacaacccttcgctgacgccataaaactcttcaccaaagagcccctaaaacccgccacatctaccatcaccctctacatcaccgc

SEQ ID NO: 61861 - DNA, 120 bp, Homo sapiens
  misc_feature: 1256 for SV(W|O) and mtDNA
aacagcatacccccgattccgctacgaccaactcatacacctcctatgaaaaaacttcctaccactcaccctagcattacttatatgatatgtctccatacccattacaatctccagcat

SEQ ID NO: 61862 - DNA, 120 bp, Homo sapiens
  misc_feature: 1255 for SV(W|O) and mtDNA
ttattcagcttcctacactattaaagtttaccacaaccaccaccccatcatactctttcacccacagcaccaatcctacctccatcgctaaccccactaaaacactcaccaagacctcaa

SEQ ID NO: 61863 - DNA, 120 bp, Homo sapiens
  misc_feature: 1255 for SV(W|O) and mtDNA
ggcgcactgcgagcagtagcccaaacaatctcatatgaagtcaccctagccatcattctactatcaacattactaataagtggctcctttaacctctccacccttatcacaacacaagaa

SEQ ID NO: 61864 - DNA, 120 bp, Homo sapiens
  misc_feature: 1255 for SV(W|O) and mtDNA
gtatctgtctttgattcctgcctcatcccattatttatcgcacctacgttcaatattacaggcgaacatacttactaaagtgtgttaattaattaatgcttgtaggacataataataaca

SEQ ID NO: 61865 - DNA, 120 bp, Homo sapiens
  misc_feature: 1255 for SV(W|O) and mtDNA
aggccttcttacgagccaaaacctgcccctactcctcctagacctaacctgactagaaaagctattacctaaaacaatttcacagcaccaaatctccacctccatcatcacctcaaccca

SEQ ID NO: 61866 - DNA, 120 bp, Homo sapiens
  misc_feature: 1255 for SV(W|O) and mtDNA
tacactattcctcatcacccaactaaaaatattaaacacaaactaccacctacctccctcaccaaagcccataaaaataaaaaattataacaaaccctgagaaccaaaatgaacgaaaat

SEQ ID NO: 61867 - DNA, 120 bp, Homo sapiens
  misc_feature: 1255 for SV(W|O) and mtDNA
caagtatacttcaaaggacatttaactaaaacccctacgcatttatatagaggagacaagtcgtaacatggtaagtgtactggaaagtgcacttggacgaaccagagtgtagcttaacac

SEQ ID NO: 61868 - DNA, 120 bp, Homo sapiens
  misc_feature: 1255 for SV(W|O) and mtDNA
gtcccagaggttacccaaggcacccctctgacatccggcctgcttcttctcacatgacaaaaactagcccccatctcaatcatataccaaatctctccctcactaaacgtaagccttctc

SEQ ID NO: 61869 - DNA, 120 bp, Homo sapiens
  misc_feature: 1255 for SV(W|O) and mtDNA
caactacgcaaaggccccaacgttgtaggcccctacgggctactacaacccttcgctgacgccataaaactcttcaccaaagagcccctaaaacccgccacatctaccatcaccctctac

SEQ ID NO: 61870 - DNA, 120 bp, Homo sapiens
  misc_feature: 1255 for SV(W|O) and mtDNA
gggattaattagtacgggaagggtataaccaacattttcggggtatgggcccgatagcttatttagctgaccttactttaggatggggtgtgataggtggcacggagaattttggattct

SEQ ID NO: 61871 - DNA, 120 bp, Homo sapiens
  misc_feature: 1255 for SV(W|O) and mtDNA
ctatttcctgagcgtctgagatgttagtattagttagttttgttgtgagtgttaggaaaagggcatacaggactaggaagcagataaggaaaatgattatgagggcgtgatcatgaaagg

SEQ ID NO: 61872 - DNA, 120 bp, Homo sapiens
  misc_feature: 1255 for SV(W|O) and mtDNA
cctatctgaggggggtcatccatggggacgagaagggatttgactgtaatgtgctatgtacggtaaatggctttatgtactatgtactgttaagggtgggtaggtttgttggtatcctag

SEQ ID NO: 61873 - DNA, 120 bp, Homo sapiens
  misc_feature: 1255 for SV(W|O) and mtDNA
aaacaatttcacagcaccaaatctccacctccatcatcacctcaacccaaaaaggcataattaaactttacttcctctctttcttcttcccactcatcctaaccctactcctaatcacat

SEQ ID NO: 61874 - DNA, 120 bp, Homo sapiens
  misc_feature: 1255 for SV(W|O) and mtDNA
atggcggatagtaagtttgtaattactgtggcccctcagaatgatatttggcctcacgggaggacatagcctatgaaggctgttgctatagttgcaagcaggaggataatgccgatgttt

SEQ ID NO: 61875 - DNA, 120 bp, Homo sapiens
  misc_feature: 1255 for SV(W|O) and mtDNA
agcaggcaaatcagcccaattaggtctccacccctgactcccctcagccatagaaggccccaccccagtctcagccctactccactcaagcactatagttgtagcaggaatcttcttact

SEQ ID NO: 61876 - DNA, 120 bp, Homo sapiens
  misc_feature: 1255 for SV(W|O) and mtDNA
aactacgccctgatcggcgcactgcgagcagtagcccaaacaatctcatatgaagtcaccctagccatcattctactatcaacattactaataagtggctcctttaacctctccaccctt

SEQ ID NO: 61877 - DNA, 120 bp, Homo sapiens
  misc_feature: 1254 for SV(W|O) and mtDNA
tgtcagggaggtagcgatgagagtaatagatagggctcaggcgtttgtgtatgatatgtttgcggtttcgatgatgtggtctttggagtagaaacctgtgaggaaaggtattcctgctaa

SEQ ID NO: 61878 - DNA, 120 bp, Homo sapiens
  misc_feature: 1254 for SV(W|O) and mtDNA
tgctgtgaaattgttttaggtaatagcttttctagtcaggttaggtctaggaggagtaggggcaggttttggctcgtaagaaggcctagataggggattgtgcggtgtgtgatgctaggg

SEQ ID NO: 61879 - DNA, 120 bp, Homo sapiens
  misc_feature: 1254 for SV(W|O) and mtDNA
attattcagcttcctacactattaaagtttaccacaaccaccaccccatcatactctttcacccacagcaccaatcctacctccatcgctaaccccactaaaacactcaccaagacctca

SEQ ID NO: 61880 - DNA, 120 bp, Homo sapiens
  misc_feature: 1254 for SV(W|O) and mtDNA
taagattttgcgtagctgggtttggtttaatccacctcaactgcctgctatgatggataagattgagagagtgaggagaaggcttacgtttagtgagggagagatttggtatatgattga

SEQ ID NO: 61881 - DNA, 120 bp, Homo sapiens
  misc_feature: 1254 for SV(W|O) and mtDNA
tagcacccaaagctaagattctaatttaaactattctctattctttcatggggaagcagatttgggtaccacccaagtattgactcacccatcaacaaccgctatgtatttcgtacatta

SEQ ID NO: 61882 - DNA, 120 bp, Homo sapiens
  misc_feature: 1254 for SV(W|O) and mtDNA
ccaaatgcatggagagctcccgtgagtggttaatagggtgatagacctgtgatccatcgtgatgtcttatttaaggggaacgtgtgggctatttaggctttatgaccctgaagtaggaac

SEQ ID NO: 61883 - DNA, 120 bp, Homo sapiens
  misc_feature: 1254 for SV(W|O) and mtDNA
cagcaggcaaatcagcccaattaggtctccacccctgactcccctcagccatagaaggccccaccccagtctcagccctactccactcaagcactatagttgtagcaggaatcttcttac

SEQ ID NO: 61884 - DNA, 120 bp, Homo sapiens
  misc_feature: 1254 for SV(W|O) and mtDNA
atatacaactacgcaaaggccccaacgttgtaggcccctacgggctactacaacccttcgctgacgccataaaactcttcaccaaagagcccctaaaacccgccacatctaccatcaccc

SEQ ID NO: 61885 - DNA, 120 bp, Homo sapiens
  misc_feature: 1254 for SV(W|O) and mtDNA
atctccagcattccccctcaaacctaagaaatatgtctgataaaagagttactttgatagagtaaataataggagcttaaacccccttatttctaggactatgagaatcgaacccatccc

SEQ ID NO: 61886 - DNA, 120 bp, Homo sapiens
  misc_feature: 1254 for SV(W|O) and mtDNA
ggcaggagtaatcagaggtgttcttgtgttgtgataagggtggagaggttaaaggagccacttattagtaatgttgatagtagaatgatggctagggtgacttcatatgagattgtttgg

SEQ ID NO: 61887 - DNA, 120 bp, Homo sapiens
  misc_feature: 1254 for SV(W|O) and mtDNA
gcccacacgttccccttaaataagacatcacgatggatcacaggtctatcaccctattaaccactcacgggagctctccatgcatttggtattttcgtctggggggtatgcacgcgatag

SEQ ID NO: 61888 - DNA, 120 bp, Homo sapiens
  misc_feature: 1254 for SV(W|O) and mtDNA
gacccctatctgaggggggtcatccatggggacgagaagggatttgactgtaatgtgctatgtacggtaaatggctttatgtactatgtactgttaagggtgggtaggtttgttggtatc

SEQ ID NO: 61889 - DNA, 120 bp, Homo sapiens
  misc_feature: 1254 for SV(W|O) and mtDNA
caacatcgaatacgccgcaggccccttcgccctattcttcatagccgaatacacaaacattattataataaacaccctcaccactacaatcttcctaggaacaacatatgacgcactctc

SEQ ID NO: 61890 - DNA, 120 bp, Homo sapiens
  misc_feature: 1254 for SV(W|O) and mtDNA
ctttatgaccctgaagtaggaaccagatgtcggatacagttcactttagctacccccaagtgttatgggcccggagcgaggagagtagcactcttgtgcgggatattgatttcacggagg

SEQ ID NO: 61891 - DNA, 120 bp, Homo sapiens
  misc_feature: 1254 for SV(W|O) and mtDNA
ccatcgtgatgtcttatttaaggggaacgtgtgggctatttaggctttatgaccctgaagtaggaaccagatgtcggatacagttcactttagctacccccaagtgttatgggcccggag

SEQ ID NO: 61892 - DNA, 120 bp, Homo sapiens
  misc_feature: 1254 for SV(W|O) and mtDNA
cgtcaccctcctcaagtatacttcaaaggacatttaactaaaacccctacgcatttatatagaggagacaagtcgtaacatggtaagtgtactggaaagtgcacttggacgaaccagagt

SEQ ID NO: 61893 - DNA, 120 bp, Homo sapiens
  misc_feature: 1254 for SV(W|O) and mtDNA
ccctgaagtaggaaccagatgtcggatacagttcactttagctacccccaagtgttatgggcccggagcgaggagagtagcactcttgtgcgggatattgatttcacggaggatggtggt

SEQ ID NO: 61894 - DNA, 120 bp, Homo sapiens
  misc_feature: 1254 for SV(W|O) and mtDNA
agttagctttacagtgggctctagagggggtagagggggtgctatagggtaaatacgggccctatttcaaagatttttaggggaattaattctaggacgatgggcatgaaactgtggttt

SEQ ID NO: 61895 - DNA, 120 bp, Homo sapiens
  misc_feature: 1253 for SV(W|O) and mtDNA
tttgattcctgcctcatcccattatttatcgcacctacgttcaatattacaggcgaacatacttactaaagtgtgttaattaattaatgcttgtaggacataataataacaattgaatgt

SEQ ID NO: 61896 - DNA, 120 bp, Homo sapiens
  misc_feature: 1253 for SV(W|O) and mtDNA
ttaaataagacatcacgatggatcacaggtctatcaccctattaaccactcacgggagctctccatgcatttggtattttcgtctggggggtatgcacgcgatagcattgcgagacgctg

SEQ ID NO: 61897 - DNA, 120 bp, Homo sapiens
  misc_feature: 1253 for SV(W|O) and mtDNA
tgtcgcagtatctgtctttgattcctgcctcatcccattatttatcgcacctacgttcaatattacaggcgaacatacttactaaagtgtgttaattaattaatgcttgtaggacataat

SEQ ID NO: 61898 - DNA, 120 bp, Homo sapiens
  misc_feature: 1253 for SV(W|O) and mtDNA
tgggatggcggatagtaagtttgtaattactgtggcccctcagaatgatatttggcctcacgggaggacatagcctatgaaggctgttgctatagttgcaagcaggaggataatgccgat

SEQ ID NO: 61899 - DNA, 120 bp, Homo sapiens
  misc_feature: 1253 for SV(W|O) and mtDNA
aaaaactctacctctctatactaatctccctacaaatctccttaattataacattcacagccacagaactaatcatattttatatcttcttcgaaaccacacttatccccaccttggcta

SEQ ID NO: 61900 - DNA, 120 bp, Homo sapiens
  misc_feature: 1253 for SV(W|O) and mtDNA
acaactacgcaaaggccccaacgttgtaggcccctacgggctactacaacccttcgctgacgccataaaactcttcaccaaagagcccctaaaacccgccacatctaccatcaccctcta

SEQ ID NO: 61901 - DNA, 120 bp, Homo sapiens
  misc_feature: 1253 for SV(W|O) and mtDNA
actacgccctgatcggcgcactgcgagcagtagcccaaacaatctcatatgaagtcaccctagccatcattctactatcaacattactaataagtggctcctttaacctctccaccctta

SEQ ID NO: 61902 - DNA, 120 bp, Homo sapiens
  misc_feature: 1253 for SV(W|O) and mtDNA
agtattgattgttagcggtgtggtcgggtgtgttattattctgaattttgggggaggttatatgggtttaatagtttttttaatttatttagggggaatgatggttgtctttggatatac

SEQ ID NO: 61903 - DNA, 120 bp, Homo sapiens
  misc_feature: 1253 for SV(W|O) and mtDNA
aatctccagcattccccctcaaacctaagaaatatgtctgataaaagagttactttgatagagtaaataataggagcttaaacccccttatttctaggactatgagaatcgaacccatcc

SEQ ID NO: 61904 - DNA, 120 bp, Homo sapiens
  misc_feature: 1253 for SV(W|O) and mtDNA
ccttaaataagacatcacgatggatcacaggtctatcaccctattaaccactcacgggagctctccatgcatttggtattttcgtctggggggtatgcacgcgatagcattgcgagacgc

SEQ ID NO: 61905 - DNA, 120 bp, Homo sapiens
  misc_feature: 1253 for SV(W|O) and mtDNA
cttcaacatcgaatacgccgcaggccccttcgccctattcttcatagccgaatacacaaacattattataataaacaccctcaccactacaatcttcctaggaacaacatatgacgcact

SEQ ID NO: 61906 - DNA, 120 bp, Homo sapiens
  misc_feature: 1253 for SV(W|O) and mtDNA
acgctaatccaagcctcaccccactactaggcctcctcctagcagcagcaggcaaatcagcccaattaggtctccacccctgactcccctcagccatagaaggccccaccccagtctcag

SEQ ID NO: 61907 - DNA, 120 bp, Homo sapiens
  misc_feature: 1253 for SV(W|O) and mtDNA
catagtgttagagtttggattagtgggctattttctgctagggggtggaagcggatgagtaagaagattcctgctacaactatagtgcttgagtggagtagggctgagactggggtgggg

SEQ ID NO: 61908 - DNA, 120 bp, Homo sapiens
  misc_feature: 1252 for SV(W|O) and mtDNA
tctgtcccaatgtatgggatggcggatagtaagtttgtaattactgtggcccctcagaatgatatttggcctcacgggaggacatagcctatgaaggctgttgctatagttgcaagcagg

SEQ ID NO: 61909 - DNA, 120 bp, Homo sapiens
  misc_feature: 1252 for SV(W|O) and mtDNA
atagcccacacgttccccttaaataagacatcacgatggatcacaggtctatcaccctattaaccactcacgggagctctccatgcatttggtattttcgtctggggggtatgcacgcga

SEQ ID NO: 61910 - DNA, 120 bp, Homo sapiens
  misc_feature: 1252 for SV(W|O) and mtDNA
taggccttcttacgagccaaaacctgcccctactcctcctagacctaacctgactagaaaagctattacctaaaacaatttcacagcaccaaatctccacctccatcatcacctcaaccc

SEQ ID NO: 61911 - DNA, 120 bp, Homo sapiens
  misc_feature: 1252 for SV(W|O) and mtDNA
taaatagcccacacgttccccttaaataagacatcacgatggatcacaggtctatcaccctattaaccactcacgggagctctccatgcatttggtattttcgtctggggggtatgcacg

SEQ ID NO: 61912 - DNA, 120 bp, Homo sapiens
  misc_feature: 1252 for SV(W|O) and mtDNA
gtcaccctcctcaagtatacttcaaaggacatttaactaaaacccctacgcatttatatagaggagacaagtcgtaacatggtaagtgtactggaaagtgcacttggacgaaccagagtg

SEQ ID NO: 61913 - DNA, 120 bp, Homo sapiens
  misc_feature: 1252 for SV(W|O) and mtDNA
gctgtgaaattgttttaggtaatagcttttctagtcaggttaggtctaggaggagtaggggcaggttttggctcgtaagaaggcctagataggggattgtgcggtgtgtgatgctagggt

SEQ ID NO: 61914 - DNA, 120 bp, Homo sapiens
  misc_feature: 1252 for SV(W|O) and mtDNA
ctaagattttgcgtagctgggtttggtttaatccacctcaactgcctgctatgatggataagattgagagagtgaggagaaggcttacgtttagtgagggagagatttggtatatgattg

SEQ ID NO: 61915 - DNA, 120 bp, Homo sapiens
  misc_feature: 1252 for SV(W|O) and mtDNA
cccttaaataagacatcacgatggatcacaggtctatcaccctattaaccactcacgggagctctccatgcatttggtattttcgtctggggggtatgcacgcgatagcattgcgagacg

SEQ ID NO: 61916 - DNA, 120 bp, Homo sapiens
  misc_feature: 1252 for SV(W|O) and mtDNA
cacaccgcccgtcaccctcctcaagtatacttcaaaggacatttaactaaaacccctacgcatttatatagaggagacaagtcgtaacatggtaagtgtactggaaagtgcacttggacg

SEQ ID NO: 61917 - DNA, 120 bp, Homo sapiens
  misc_feature: 1252 for SV(W|O) and mtDNA
aggctatatacaactacgcaaaggccccaacgttgtaggcccctacgggctactacaacccttcgctgacgccataaaactcttcaccaaagagcccctaaaacccgccacatctaccat

SEQ ID NO: 61918 - DNA, 120 bp, Homo sapiens
  misc_feature: 1252 for SV(W|O) and mtDNA
atggagtggaagtgaaatcacatggctaggccggaggtcattaggagggctgagagggcccctgttaggggtcatgggctgggttttactatatgataggcatgtgattggtgggtcatt

SEQ ID NO: 61919 - DNA, 120 bp, Homo sapiens
  misc_feature: 1252 for SV(W|O) and mtDNA
ataatcggtgcccccgatatggcgtttccccgcataaacaacataagcttctgactcttacctccctctctcctactcctgctcgcatctgctatagtggaggccggagcaggaacaggt

SEQ ID NO: 61920 - DNA, 120 bp, Homo sapiens
  misc_feature: 1251 for SV(W|O) and mtDNA
tgtgaaattgttttaggtaatagcttttctagtcaggttaggtctaggaggagtaggggcaggttttggctcgtaagaaggcctagataggggattgtgcggtgtgtgatgctagggtag

SEQ ID NO: 61921 - DNA, 120 bp, Homo sapiens
  misc_feature: 1251 for SV(W|O) and mtDNA
gaacagcatacccccgattccgctacgaccaactcatacacctcctatgaaaaaacttcctaccactcaccctagcattacttatatgatatgtctccatacccattacaatctccagca

SEQ ID NO: 61922 - DNA, 120 bp, Homo sapiens
  misc_feature: 1251 for SV(W|O) and mtDNA
tatctaggccttcttacgagccaaaacctgcccctactcctcctagacctaacctgactagaaaagctattacctaaaacaatttcacagcaccaaatctccacctccatcatcacctca

SEQ ID NO: 61923 - DNA, 120 bp, Homo sapiens
  misc_feature: 1251 for SV(W|O) and mtDNA
tgaccctgaagtaggaaccagatgtcggatacagttcactttagctacccccaagtgttatgggcccggagcgaggagagtagcactcttgtgcgggatattgatttcacggaggatggt

SEQ ID NO: 61924 - DNA, 120 bp, Homo sapiens
  misc_feature: 1251 for SV(W|O) and mtDNA
tatttcctgagcgtctgagatgttagtattagttagttttgttgtgagtgttaggaaaagggcatacaggactaggaagcagataaggaaaatgattatgagggcgtgatcatgaaaggt

SEQ ID NO: 61925 - DNA, 120 bp, Homo sapiens
  misc_feature: 1251 for SV(W|O) and mtDNA
tatatacaactacgcaaaggccccaacgttgtaggcccctacgggctactacaacccttcgctgacgccataaaactcttcaccaaagagcccctaaaacccgccacatctaccatcacc

SEQ ID NO: 61926 - DNA, 120 bp, Homo sapiens
  misc_feature: 1251 for SV(W|O) and mtDNA
gcttgagtggagtagggctgagactggggtggggccttctatggctgaggggagtcaggggtggagacctaattgggctgatttgcctgctgctgctaggaggaggcctagtagtggggt

SEQ ID NO: 61927 - DNA, 120 bp, Homo sapiens
  misc_feature: 1251 for SV(W|O) and mtDNA
gcagccattcaagcaatcctatacaaccgtatcggcgatatcggtttcatcctcgccttagcatgatttatcctacactccaactcatgagacccacaacaaatagcccttctaaacgct

SEQ ID NO: 61928 - DNA, 120 bp, Homo sapiens
  misc_feature: 1251 for SV(W|O) and mtDNA
acgttccccttaaataagacatcacgatggatcacaggtctatcaccctattaaccactcacgggagctctccatgcatttggtattttcgtctggggggtatgcacgcgatagcattgc

SEQ ID NO: 61929 - DNA, 120 bp, Homo sapiens
  misc_feature: 1251 for SV(W|O) and mtDNA
gattcctgcctcatcccattatttatcgcacctacgttcaatattacaggcgaacatacttactaaagtgtgttaattaattaatgcttgtaggacataataataacaattgaatgtctg

SEQ ID NO: 61930 - DNA, 120 bp, Homo sapiens
  misc_feature: 1251 for SV(W|O) and mtDNA
gaccctgaagtaggaaccagatgtcggatacagttcactttagctacccccaagtgttatgggcccggagcgaggagagtagcactcttgtgcgggatattgatttcacggaggatggtg

SEQ ID NO: 61931 - DNA, 120 bp, Homo sapiens
  misc_feature: 1251 for SV(W|O) and mtDNA
aatgtatgggatggcggatagtaagtttgtaattactgtggcccctcagaatgatatttggcctcacgggaggacatagcctatgaaggctgttgctatagttgcaagcaggaggataat

SEQ ID NO: 61932 - DNA, 120 bp, Homo sapiens
  misc_feature: 1250 for SV(W|O) and mtDNA
ttctatttcctgagcgtctgagatgttagtattagttagttttgttgtgagtgttaggaaaagggcatacaggactaggaagcagataaggaaaatgattatgagggcgtgatcatgaaa

SEQ ID NO: 61933 - DNA, 120 bp, Homo sapiens
  misc_feature: 1250 for SV(W|O) and mtDNA
gctctagagggggtagagggggtgctatagggtaaatacgggccctatttcaaagatttttaggggaattaattctaggacgatgggcatgaaactgtggtttgctccacagatttcaga

SEQ ID NO: 61934 - DNA, 120 bp, Homo sapiens
  misc_feature: 1250 for SV(W|O) and mtDNA
atccagtgaaccactatcacgaaaaaaactctacctctctatactaatctccctacaaatctccttaattataacattcacagccacagaactaatcatattttatatcttcttcgaaac

SEQ ID NO: 61935 - DNA, 120 bp, Homo sapiens
  misc_feature: 1250 for SV(W|O) and mtDNA
agtatctgtctttgattcctgcctcatcccattatttatcgcacctacgttcaatattacaggcgaacatacttactaaagtgtgttaattaattaatgcttgtaggacataataataac

SEQ ID NO: 61936 - DNA, 120 bp, Homo sapiens
  misc_feature: 1250 for SV(W|O) and mtDNA
gtctttaactccaccattagcacccaaagctaagattctaatttaaactattctctattctttcatggggaagcagatttgggtaccacccaagtattgactcacccatcaacaaccgct

SEQ ID NO: 61937 - DNA, 120 bp, Homo sapiens
  misc_feature: 1250 for SV(W|O) and mtDNA
gcatacccccgattccgctacgaccaactcatacacctcctatgaaaaaacttcctaccactcaccctagcattacttatatgatatgtctccatacccattacaatctccagcattccc

SEQ ID NO: 61938 - DNA, 120 bp, Homo sapiens
  misc_feature: 1250 for SV(W|O) and mtDNA
ggctctagagggggtagagggggtgctatagggtaaatacgggccctatttcaaagatttttaggggaattaattctaggacgatgggcatgaaactgtggtttgctccacagatttcag

SEQ ID NO: 61939 - DNA, 120 bp, Homo sapiens
  misc_feature: 1250 for SV(W|O) and mtDNA
caagcctcaccccactactaggcctcctcctagcagcagcaggcaaatcagcccaattaggtctccacccctgactcccctcagccatagaaggccccaccccagtctcagccctactcc

SEQ ID NO: 61940 - DNA, 120 bp, Homo sapiens
  misc_feature: 1250 for SV(W|O) and mtDNA
atttcctgagcgtctgagatgttagtattagttagttttgttgtgagtgttaggaaaagggcatacaggactaggaagcagataaggaaaatgattatgagggcgtgatcatgaaaggtg

SEQ ID NO: 61941 - DNA, 120 bp, Homo sapiens
  misc_feature: 1250 for SV(W|O) and mtDNA
acagcatacccccgattccgctacgaccaactcatacacctcctatgaaaaaacttcctaccactcaccctagcattacttatatgatatgtctccatacccattacaatctccagcatt

SEQ ID NO: 61942 - DNA, 120 bp, Homo sapiens
  misc_feature: 1249 for SV(W|O) and mtDNA
caccgcccgtcaccctcctcaagtatacttcaaaggacatttaactaaaacccctacgcatttatatagaggagacaagtcgtaacatggtaagtgtactggaaagtgcacttggacgaa

SEQ ID NO: 61943 - DNA, 120 bp, Homo sapiens
  misc_feature: 1249 for SV(W|O) and mtDNA
ctcgtagtaacagccattctcatccaaaccccctgaagcttcaccggcgcagtcattctcataatcgcccacgggcttacatcctcattactattctgcctagcaaactcaaactacgaa

SEQ ID NO: 61944 - DNA, 120 bp, Homo sapiens
  misc_feature: 1249 for SV(W|O) and mtDNA
tcaagtatacttcaaaggacatttaactaaaacccctacgcatttatatagaggagacaagtcgtaacatggtaagtgtactggaaagtgcacttggacgaaccagagtgtagcttaaca

SEQ ID NO: 61945 - DNA, 120 bp, Homo sapiens
  misc_feature: 1249 for SV(W|O) and mtDNA
atcatataccaaatctctccctcactaaacgtaagccttctcctcactctctcaatcttatccatcatagcaggcagttgaggtggattaaaccaaacccagctacgcaaaatcttagca

SEQ ID NO: 61946 - DNA, 120 bp, Homo sapiens
  misc_feature: 1249 for SV(W|O) and mtDNA
tgcctcatcccattatttatcgcacctacgttcaatattacaggcgaacatacttactaaagtgtgttaattaattaatgcttgtaggacataataataacaattgaatgtctgcacagc

SEQ ID NO: 61947 - DNA, 120 bp, Homo sapiens
  misc_feature: 1249 for SV(W|O) and mtDNA
cagcattccccctcaaacctaagaaatatgtctgataaaagagttactttgatagagtaaataataggagcttaaacccccttatttctaggactatgagaatcgaacccatccctgaga

SEQ ID NO: 61948 - DNA, 120 bp, Homo sapiens
  misc_feature: 1249 for SV(W|O) and mtDNA
gtgaaattgttttaggtaatagcttttctagtcaggttaggtctaggaggagtaggggcaggttttggctcgtaagaaggcctagataggggattgtgcggtgtgtgatgctagggtaga

SEQ ID NO: 61949 - DNA, 120 bp, Homo sapiens
  misc_feature: 1249 for SV(W|O) and mtDNA
ggctttatgaccctgaagtaggaaccagatgtcggatacagttcactttagctacccccaagtgttatgggcccggagcgaggagagtagcactcttgtgcgggatattgatttcacgga

SEQ ID NO: 61950 - DNA, 120 bp, Homo sapiens
  misc_feature: 1249 for SV(W|O) and mtDNA
aggcttccggctgccaggcgtttaatggggtttagtagggtagggttattttcgttaatgttagtaagggtggggaagcgaggttgacctgttagggtgagaagaattattcgagtgcta

SEQ ID NO: 61951 - DNA, 120 bp, Homo sapiens
  misc_feature: 1249 for SV(W|O) and mtDNA
gttcttgtgttgtgataagggtggagaggttaaaggagccacttattagtaatgttgatagtagaatgatggctagggtgacttcatatgagattgtttgggctactgctcgcagtgcgc

SEQ ID NO: 61952 - DNA, 120 bp, Homo sapiens
  misc_feature: 1249 for SV(W|O) and mtDNA
agcctcaccccactactaggcctcctcctagcagcagcaggcaaatcagcccaattaggtctccacccctgactcccctcagccatagaaggccccaccccagtctcagccctactccac

SEQ ID NO: 61953 - DNA, 120 bp, Homo sapiens
  misc_feature: 1249 for SV(W|O) and mtDNA
gtagagttcaggggagagtgcgtcatatgttgttcctaggaagattgtagtggtgagggtgtttattataataatgtttgtgtattcggctatgaagaatagggcgaaggggcctgcggc

SEQ ID NO: 61954 - DNA, 120 bp, Homo sapiens
  misc_feature: 1249 for SV(W|O) and mtDNA
ctacctacgcctaatctactccacctcaatcacactactccccatatctaacaacgtaaaaataaaatgacagtttgaacatacaaaacccaccccattcctccccacactcatcgccct

SEQ ID NO: 61955 - DNA, 120 bp, Homo sapiens
  misc_feature: 1248 for SV(W|O) and mtDNA
gcaggccccttcgccctattcttcatagccgaatacacaaacattattataataaacaccctcaccactacaatcttcctaggaacaacatatgacgcactctcccctgaactctacaca

SEQ ID NO: 61956 - DNA, 120 bp, Homo sapiens
  misc_feature: 1248 for SV(W|O) and mtDNA
aactacgcaaaggccccaacgttgtaggcccctacgggctactacaacccttcgctgacgccataaaactcttcaccaaagagcccctaaaacccgccacatctaccatcaccctctaca

SEQ ID NO: 61957 - DNA, 120 bp, Homo sapiens
  misc_feature: 1248 for SV(W|O) and mtDNA
aagcctcaccccactactaggcctcctcctagcagcagcaggcaaatcagcccaattaggtctccacccctgactcccctcagccatagaaggccccaccccagtctcagccctactcca

SEQ ID NO: 61958 - DNA, 120 bp, Homo sapiens
  misc_feature: 1248 for SV(W|O) and mtDNA
tgctaagttagctttacagtgggctctagagggggtagagggggtgctatagggtaaatacgggccctatttcaaagatttttaggggaattaattctaggacgatgggcatgaaactgt

SEQ ID NO: 61959 - DNA, 120 bp, Homo sapiens
  misc_feature: 1248 for SV(W|O) and mtDNA
tgatcggcgcactgcgagcagtagcccaaacaatctcatatgaagtcaccctagccatcattctactatcaacattactaataagtggctcctttaacctctccacccttatcacaacac

SEQ ID NO: 61960 - DNA, 120 bp, Homo sapiens
  misc_feature: 1248 for SV(W|O) and mtDNA
tatgttggagaaataaaatgtgcatagtggggattttattttaagtttgttggttaggtagttgaggtctagggctgttagaagtcctaggaaagtgacagcgagggctgtgagttttag

SEQ ID NO: 61961 - DNA, 120 bp, Homo sapiens
  misc_feature: 1248 for SV(W|O) and mtDNA
gaatccaaaattctccgtgccacctatcacaccccatcctaaagtaaggtcagctaaataagctatcgggcccataccccgaaaatgttggttatacccttcccgtactaattaatcccc

SEQ ID NO: 61962 - DNA, 120 bp, Homo sapiens
  misc_feature: 1248 for SV(W|O) and mtDNA
gctaatccaagcctcaccccactactaggcctcctcctagcagcagcaggcaaatcagcccaattaggtctccacccctgactcccctcagccatagaaggccccaccccagtctcagcc

SEQ ID NO: 61963 - DNA, 120 bp, Homo sapiens
  misc_feature: 1248 for SV(W|O) and mtDNA
caggagtaatcagaggtgttcttgtgttgtgataagggtggagaggttaaaggagccacttattagtaatgttgatagtagaatgatggctagggtgacttcatatgagattgtttgggc

SEQ ID NO: 61964 - DNA, 120 bp, Homo sapiens
  misc_feature: 1248 for SV(W|O) and mtDNA
gaggtgttcttgtgttgtgataagggtggagaggttaaaggagccacttattagtaatgttgatagtagaatgatggctagggtgacttcatatgagattgtttgggctactgctcgcag

SEQ ID NO: 61965 - DNA, 120 bp, Homo sapiens
  misc_feature: 1248 for SV(W|O) and mtDNA
cagggttgattcgggaggatcctattggtgcgggggctttgtatgattatgggcgttgattagtagtagttactggttgaacattgtttgttggtgtatatattgtaattgagattgctc

SEQ ID NO: 61966 - DNA, 120 bp, Homo sapiens
  misc_feature: 1248 for SV(W|O) and mtDNA
cctcccgtgaggccaaatatcattctgaggggccacagtaattacaaacttactatccgccatcccatacattgggacagacctagttcaatgaatctgaggaggctactcagtagacag

SEQ ID NO: 61967 - DNA, 120 bp, Homo sapiens
  misc_feature: 1248 for SV(W|O) and mtDNA
ccctcgtagtaacagccattctcatccaaaccccctgaagcttcaccggcgcagtcattctcataatcgcccacgggcttacatcctcattactattctgcctagcaaactcaaactacg

SEQ ID NO: 61968 - DNA, 120 bp, Homo sapiens
  misc_feature: 1248 for SV(W|O) and mtDNA
aagaaagagaggaagtaaagtttaattatgcctttttgggttgaggtgatgatggaggtggagatttggtgctgtgaaattgttttaggtaatagcttttctagtcaggttaggtctagg

SEQ ID NO: 61969 - DNA, 120 bp, Homo sapiens
  misc_feature: 1248 for SV(W|O) and mtDNA
acaatctccagcattccccctcaaacctaagaaatatgtctgataaaagagttactttgatagagtaaataataggagcttaaacccccttatttctaggactatgagaatcgaacccat

SEQ ID NO: 61970 - DNA, 120 bp, Homo sapiens
  misc_feature: 1248 for SV(W|O) and mtDNA
aggagtaatcagaggtgttcttgtgttgtgataagggtggagaggttaaaggagccacttattagtaatgttgatagtagaatgatggctagggtgacttcatatgagattgtttgggct

SEQ ID NO: 61971 - DNA, 120 bp, Homo sapiens
  misc_feature: 1247 for SV(W|O) and mtDNA
tggcgggcaggatagttcagacggtttctatttcctgagcgtctgagatgttagtattagttagttttgttgtgagtgttaggaaaagggcatacaggactaggaagcagataaggaaaa

SEQ ID NO: 61972 - DNA, 120 bp, Homo sapiens
  misc_feature: 1247 for SV(W|O) and mtDNA
tttcctgagcgtctgagatgttagtattagttagttttgttgtgagtgttaggaaaagggcatacaggactaggaagcagataaggaaaatgattatgagggcgtgatcatgaaaggtga

SEQ ID NO: 61973 - DNA, 120 bp, Homo sapiens
  misc_feature: 1247 for SV(W|O) and mtDNA
accaaatgcatggagagctcccgtgagtggttaatagggtgatagacctgtgatccatcgtgatgtcttatttaaggggaacgtgtgggctatttaggctttatgaccctgaagtaggaa

SEQ ID NO: 61974 - DNA, 120 bp, Homo sapiens
  misc_feature: 1247 for SV(W|O) and mtDNA
cctatgtcgcagtatctgtctttgattcctgcctcatcccattatttatcgcacctacgttcaatattacaggcgaacatacttactaaagtgtgttaattaattaatgcttgtaggaca

SEQ ID NO: 61975 - DNA, 120 bp, Homo sapiens
  misc_feature: 1247 for SV(W|O) and mtDNA
cgcccgtcaccctcctcaagtatacttcaaaggacatttaactaaaacccctacgcatttatatagaggagacaagtcgtaacatggtaagtgtactggaaagtgcacttggacgaacca

SEQ ID NO: 61976 - DNA, 120 bp, Homo sapiens
  misc_feature: 1247 for SV(W|O) and mtDNA
ggatcctattggtgcgggggctttgtatgattatgggcgttgattagtagtagttactggttgaacattgtttgttggtgtatatattgtaattgagattgctcgggggaataggttatg

SEQ ID NO: 61977 - DNA, 120 bp, Homo sapiens
  misc_feature: 1247 for SV(W|O) and mtDNA
gagtgatatttgatcaggagaacgtggttactagcacagagagttctcccagtaggttaatagtggggggtaaggcgaggttagcgaggcttgctagaagtcatcaaaaagctattagtg

SEQ ID NO: 61978 - DNA, 120 bp, Homo sapiens
  misc_feature: 1247 for SV(W|O) and mtDNA
ccagaacgcctgaacgcaggcacatacttcctattctacaccctagtaggctcccttcccctactcatcgcactaatttacactcacaacaccctaggctcactaaacattctactactc

SEQ ID NO: 61979 - DNA, 120 bp, Homo sapiens
  misc_feature: 1247 for SV(W|O) and mtDNA
ctttaactccaccattagcacccaaagctaagattctaatttaaactattctctattctttcatggggaagcagatttgggtaccacccaagtattgactcacccatcaacaaccgctat

SEQ ID NO: 61980 - DNA, 120 bp, Homo sapiens
  misc_feature: 1247 for SV(W|O) and mtDNA
cgggaggatcctattggtgcgggggctttgtatgattatgggcgttgattagtagtagttactggttgaacattgtttgttggtgtatatattgtaattgagattgctcgggggaatagg

SEQ ID NO: 61981 - DNA, 120 bp, Homo sapiens
  misc_feature: 1247 for SV(W|O) and mtDNA
cactattcctcatcacccaactaaaaatattaaacacaaactaccacctacctccctcaccaaagcccataaaaataaaaaattataacaaaccctgagaaccaaaatgaacgaaaatct

SEQ ID NO: 61982 - DNA, 120 bp, Homo sapiens
  misc_feature: 1246 for SV(W|O) and mtDNA
ttgattgttagcggtgtggtcgggtgtgttattattctgaattttgggggaggttatatgggtttaatagtttttttaatttatttagggggaatgatggttgtctttggatatactaca

SEQ ID NO: 61983 - DNA, 120 bp, Homo sapiens
  misc_feature: 1246 for SV(W|O) and mtDNA
ttgattcctgcctcatcccattatttatcgcacctacgttcaatattacaggcgaacatacttactaaagtgtgttaattaattaatgcttgtaggacataataataacaattgaatgtc

SEQ ID NO: 61984 - DNA, 120 bp, Homo sapiens
  misc_feature: 1246 for SV(W|O) and mtDNA
ttcctgagcgtctgagatgttagtattagttagttttgttgtgagtgttaggaaaagggcatacaggactaggaagcagataaggaaaatgattatgagggcgtgatcatgaaaggtgat

SEQ ID NO: 61985 - DNA, 120 bp, Homo sapiens
  misc_feature: 1246 for SV(W|O) and mtDNA
gaaaaagtctttaactccaccattagcacccaaagctaagattctaatttaaactattctctattctttcatggggaagcagatttgggtaccacccaagtattgactcacccatcaaca

SEQ ID NO: 61986 - DNA, 120 bp, Homo sapiens
  misc_feature: 1246 for SV(W|O) and mtDNA
ggtctgtcccaatgtatgggatggcggatagtaagtttgtaattactgtggcccctcagaatgatatttggcctcacgggaggacatagcctatgaaggctgttgctatagttgcaagca

SEQ ID NO: 61987 - DNA, 120 bp, Homo sapiens
  misc_feature: 1246 for SV(W|O) and mtDNA
atgggatggcggatagtaagtttgtaattactgtggcccctcagaatgatatttggcctcacgggaggacatagcctatgaaggctgttgctatagttgcaagcaggaggataatgccga

SEQ ID NO: 61988 - DNA, 120 bp, Homo sapiens
  misc_feature: 1246 for SV(W|O) and mtDNA
gagttcaggggagagtgcgtcatatgttgttcctaggaagattgtagtggtgagggtgtttattataataatgtttgtgtattcggctatgaagaatagggcgaaggggcctgcggcgta

SEQ ID NO: 61989 - DNA, 120 bp, Homo sapiens
  misc_feature: 1246 for SV(W|O) and mtDNA
gttagctttacagtgggctctagagggggtagagggggtgctatagggtaaatacgggccctatttcaaagatttttaggggaattaattctaggacgatgggcatgaaactgtggtttg

SEQ ID NO: 61990 - DNA, 120 bp, Homo sapiens
  misc_feature: 1246 for SV(W|O) and mtDNA
ctccagcattccccctcaaacctaagaaatatgtctgataaaagagttactttgatagagtaaataataggagcttaaacccccttatttctaggactatgagaatcgaacccatccctg

SEQ ID NO: 61991 - DNA, 120 bp, Homo sapiens
  misc_feature: 1246 for SV(W|O) and mtDNA
aagtctttaactccaccattagcacccaaagctaagattctaatttaaactattctctattctttcatggggaagcagatttgggtaccacccaagtattgactcacccatcaacaaccg

SEQ ID NO: 61992 - DNA, 120 bp, Homo sapiens
  misc_feature: 1246 for SV(W|O) and mtDNA
atacgccgcaggccccttcgccctattcttcatagccgaatacacaaacattattataataaacaccctcaccactacaatcttcctaggaacaacatatgacgcactctcccctgaact

SEQ ID NO: 61993 - DNA, 120 bp, Homo sapiens
  misc_feature: 1245 for SV(W|O) and mtDNA
tttaactccaccattagcacccaaagctaagattctaatttaaactattctctattctttcatggggaagcagatttgggtaccacccaagtattgactcacccatcaacaaccgctatg

SEQ ID NO: 61994 - DNA, 120 bp, Homo sapiens
  misc_feature: 1245 for SV(W|O) and mtDNA
ttaactccaccattagcacccaaagctaagattctaatttaaactattctctattctttcatggggaagcagatttgggtaccacccaagtattgactcacccatcaacaaccgctatgt

SEQ ID NO: 61995 - DNA, 120 bp, Homo sapiens
  misc_feature: 1245 for SV(W|O) and mtDNA
gtgtgcctgcaaagatggtagagtagatgacgggttgggccaggggattaattagtacgggaagggtataaccaacattttcggggtatgggcccgatagcttatttagctgaccttact

SEQ ID NO: 61996 - DNA, 120 bp, Homo sapiens
  misc_feature: 1245 for SV(W|O) and mtDNA
atccaagcctcaccccactactaggcctcctcctagcagcagcaggcaaatcagcccaattaggtctccacccctgactcccctcagccatagaaggccccaccccagtctcagccctac

SEQ ID NO: 61997 - DNA, 120 bp, Homo sapiens
  misc_feature: 1245 for SV(W|O) and mtDNA
caccacacaccacctgtccaaaaaggccttcgatacgggataatcctatttattacctcagaagtttttttcttcgcaggatttttctgagccttttaccactccagcctagcccctacc

SEQ ID NO: 61998 - DNA, 120 bp, Homo sapiens
  misc_feature: 1245 for SV(W|O) and mtDNA
gggcaggatagttcagacggtttctatttcctgagcgtctgagatgttagtattagttagttttgttgtgagtgttaggaaaagggcatacaggactaggaagcagataaggaaaatgat

SEQ ID NO: 61999 - DNA, 120 bp, Homo sapiens
  misc_feature: 1245 for SV(W|O) and mtDNA
gggatggcggatagtaagtttgtaattactgtggcccctcagaatgatatttggcctcacgggaggacatagcctatgaaggctgttgctatagttgcaagcaggaggataatgccgatg

SEQ ID NO: 62000 - DNA, 120 bp, Homo sapiens
  misc_feature: 1245 for SV(W|O) and mtDNA
aggatagttcagacggtttctatttcctgagcgtctgagatgttagtattagttagttttgttgtgagtgttaggaaaagggcatacaggactaggaagcagataaggaaaatgattatg

SEQ ID NO: 62001 - DNA, 120 bp, Homo sapiens
  misc_feature: 1244 for SV(W|O) and mtDNA
tttatggtaccgtacaatattcatggtggctggcagtaatgtacgaaatacatagcggttgttgatgggtgagtcaatacttgggtggtacccaaatctgcttccccatgaaagaataga

SEQ ID NO: 62002 - DNA, 120 bp, Homo sapiens
  misc_feature: 1244 for SV(W|O) and mtDNA
agcattccccctcaaacctaagaaatatgtctgataaaagagttactttgatagagtaaataataggagcttaaacccccttatttctaggactatgagaatcgaacccatccctgagaa

SEQ ID NO: 62003 - DNA, 120 bp, Homo sapiens
  misc_feature: 1244 for SV(W|O) and mtDNA
cctgcctcatcccattatttatcgcacctacgttcaatattacaggcgaacatacttactaaagtgtgttaattaattaatgcttgtaggacataataataacaattgaatgtctgcaca

SEQ ID NO: 62004 - DNA, 120 bp, Homo sapiens
  misc_feature: 1244 for SV(W|O) and mtDNA
tctccatgcatttggtattttcgtctggggggtatgcacgcgatagcattgcgagacgctggagccggagcaccctatgtcgcagtatctgtctttgattcctgcctcatcccattattt

SEQ ID NO: 62005 - DNA, 120 bp, Homo sapiens
  misc_feature: 1244 for SV(W|O) and mtDNA
tagagttcaggggagagtgcgtcatatgttgttcctaggaagattgtagtggtgagggtgtttattataataatgtttgtgtattcggctatgaagaatagggcgaaggggcctgcggcg

SEQ ID NO: 62006 - DNA, 120 bp, Homo sapiens
  misc_feature: 1244 for SV(W|O) and mtDNA
tacaactacgcaaaggccccaacgttgtaggcccctacgggctactacaacccttcgctgacgccataaaactcttcaccaaagagcccctaaaacccgccacatctaccatcaccctct

SEQ ID NO: 62007 - DNA, 120 bp, Homo sapiens
  misc_feature: 1244 for SV(W|O) and mtDNA
gcaggatagttcagacggtttctatttcctgagcgtctgagatgttagtattagttagttttgttgtgagtgttaggaaaagggcatacaggactaggaagcagataaggaaaatgatta

SEQ ID NO: 62008 - DNA, 120 bp, Homo sapiens
  misc_feature: 1244 for SV(W|O) and mtDNA
gtgctgtgaaattgttttaggtaatagcttttctagtcaggttaggtctaggaggagtaggggcaggttttggctcgtaagaaggcctagataggggattgtgcggtgtgtgatgctagg

SEQ ID NO: 62009 - DNA, 120 bp, Homo sapiens
  misc_feature: 1244 for SV(W|O) and mtDNA
agtgtgcctgcaaagatggtagagtagatgacgggttgggccaggggattaattagtacgggaagggtataaccaacattttcggggtatgggcccgatagcttatttagctgaccttac

SEQ ID NO: 62010 - DNA, 120 bp, Homo sapiens
  misc_feature: 1244 for SV(W|O) and mtDNA
aacatcgaatacgccgcaggccccttcgccctattcttcatagccgaatacacaaacattattataataaacaccctcaccactacaatcttcctaggaacaacatatgacgcactctcc

SEQ ID NO: 62011 - DNA, 120 bp, Homo sapiens
  misc_feature: 1244 for SV(W|O) and mtDNA
gcaggcaaatcagcccaattaggtctccacccctgactcccctcagccatagaaggccccaccccagtctcagccctactccactcaagcactatagttgtagcaggaatcttcttactc

SEQ ID NO: 62012 - DNA, 120 bp, Homo sapiens
  misc_feature: 1244 for SV(W|O) and mtDNA
caccctatgtcgcagtatctgtctttgattcctgcctcatcccattatttatcgcacctacgttcaatattacaggcgaacatacttactaaagtgtgttaattaattaatgcttgtagg

SEQ ID NO: 62013 - DNA, 120 bp, Homo sapiens
  misc_feature: 1244 for SV(W|O) and mtDNA
aggatcctattggtgcgggggctttgtatgattatgggcgttgattagtagtagttactggttgaacattgtttgttggtgtatatattgtaattgagattgctcgggggaataggttat

SEQ ID NO: 62014 - DNA, 120 bp, Homo sapiens
  misc_feature: 1244 for SV(W|O) and mtDNA
aatcagaggtgttcttgtgttgtgataagggtggagaggttaaaggagccacttattagtaatgttgatagtagaatgatggctagggtgacttcatatgagattgtttgggctactgct

SEQ ID NO: 62015 - DNA, 120 bp, Homo sapiens
  misc_feature: 1243 for SV(W|O) and mtDNA
agaggtgttcttgtgttgtgataagggtggagaggttaaaggagccacttattagtaatgttgatagtagaatgatggctagggtgacttcatatgagattgtttgggctactgctcgca

SEQ ID NO: 62016 - DNA, 120 bp, Homo sapiens
  misc_feature: 1243 for SV(W|O) and mtDNA
tgcgacatagggtgctccggctccagcgtctcgcaatgctatcgcgtgcataccccccagacgaaaataccaaatgcatggagagctcccgtgagtggttaatagggtgatagacctgtg

SEQ ID NO: 62017 - DNA, 120 bp, Homo sapiens
  misc_feature: 1243 for SV(W|O) and mtDNA
gctatatacaactacgcaaaggccccaacgttgtaggcccctacgggctactacaacccttcgctgacgccataaaactcttcaccaaagagcccctaaaacccgccacatctaccatca

SEQ ID NO: 62018 - DNA, 120 bp, Homo sapiens
  misc_feature: 1243 for SV(W|O) and mtDNA
tctacctacgcctaatctactccacctcaatcacactactccccatatctaacaacgtaaaaataaaatgacagtttgaacatacaaaacccaccccattcctccccacactcatcgccc

SEQ ID NO: 62019 - DNA, 120 bp, Homo sapiens
  misc_feature: 1243 for SV(W|O) and mtDNA
gtcgcagtatctgtctttgattcctgcctcatcccattatttatcgcacctacgttcaatattacaggcgaacatacttactaaagtgtgttaattaattaatgcttgtaggacataata

SEQ ID NO: 62020 - DNA, 120 bp, Homo sapiens
  misc_feature: 1243 for SV(W|O) and mtDNA
acatacttcctattctacaccctagtaggctcccttcccctactcatcgcactaatttacactcacaacaccctaggctcactaaacattctactactcactctcactgcccaagaacta

SEQ ID NO: 62021 - DNA, 120 bp, Homo sapiens
  misc_feature: 1243 for SV(W|O) and mtDNA
acatcgaatacgccgcaggccccttcgccctattcttcatagccgaatacacaaacattattataataaacaccctcaccactacaatcttcctaggaacaacatatgacgcactctccc

SEQ ID NO: 62022 - DNA, 120 bp, Homo sapiens
  misc_feature: 1243 for SV(W|O) and mtDNA
gcccgtcaccctcctcaagtatacttcaaaggacatttaactaaaacccctacgcatttatatagaggagacaagtcgtaacatggtaagtgtactggaaagtgcacttggacgaaccag

SEQ ID NO: 62023 - DNA, 120 bp, Homo sapiens
  misc_feature: 1243 for SV(W|O) and mtDNA
atcgaatacgccgcaggccccttcgccctattcttcatagccgaatacacaaacattattataataaacaccctcaccactacaatcttcctaggaacaacatatgacgcactctcccct

SEQ ID NO: 62024 - DNA, 120 bp, Homo sapiens
  misc_feature: 1243 for SV(W|O) and mtDNA
agagttcaggggagagtgcgtcatatgttgttcctaggaagattgtagtggtgagggtgtttattataataatgtttgtgtattcggctatgaagaatagggcgaaggggcctgcggcgt

SEQ ID NO: 62025 - DNA, 120 bp, Homo sapiens
  misc_feature: 1242 for SV(W|O) and mtDNA
attcatggtggctggcagtaatgtacgaaatacatagcggttgttgatgggtgagtcaatacttgggtggtacccaaatctgcttccccatgaaagaatagagaatagtttaaattagaa

SEQ ID NO: 62026 - DNA, 120 bp, Homo sapiens
  misc_feature: 1242 for SV(W|O) and mtDNA
tattcatggtggctggcagtaatgtacgaaatacatagcggttgttgatgggtgagtcaatacttgggtggtacccaaatctgcttccccatgaaagaatagagaatagtttaaattaga

SEQ ID NO: 62027 - DNA, 120 bp, Homo sapiens
  misc_feature: 1242 for SV(W|O) and mtDNA
tatgtcgcagtatctgtctttgattcctgcctcatcccattatttatcgcacctacgttcaatattacaggcgaacatacttactaaagtgtgttaattaattaatgcttgtaggacata

SEQ ID NO: 62028 - DNA, 120 bp, Homo sapiens
  misc_feature: 1242 for SV(W|O) and mtDNA
agcaccctatgtcgcagtatctgtctttgattcctgcctcatcccattatttatcgcacctacgttcaatattacaggcgaacatacttactaaagtgtgttaattaattaatgcttgta

SEQ ID NO: 62029 - DNA, 120 bp, Homo sapiens
  misc_feature: 1242 for SV(W|O) and mtDNA
taatcagaggtgttcttgtgttgtgataagggtggagaggttaaaggagccacttattagtaatgttgatagtagaatgatggctagggtgacttcatatgagattgtttgggctactgc

SEQ ID NO: 62030 - DNA, 120 bp, Homo sapiens
  misc_feature: 1242 for SV(W|O) and mtDNA
taaattattcagcttcctacactattaaagtttaccacaaccaccaccccatcatactctttcacccacagcaccaatcctacctccatcgctaaccccactaaaacactcaccaagacc

SEQ ID NO: 62031 - DNA, 120 bp, Homo sapiens
  misc_feature: 1242 for SV(W|O) and mtDNA
attcctgcctcatcccattatttatcgcacctacgttcaatattacaggcgaacatacttactaaagtgtgttaattaattaatgcttgtaggacataataataacaattgaatgtctgc

SEQ ID NO: 62032 - DNA, 120 bp, Homo sapiens
  misc_feature: 1242 for SV(W|O) and mtDNA
gatggcggatagtaagtttgtaattactgtggcccctcagaatgatatttggcctcacgggaggacatagcctatgaaggctgttgctatagttgcaagcaggaggataatgccgatgtt

SEQ ID NO: 62033 - DNA, 120 bp, Homo sapiens
  misc_feature: 1242 for SV(W|O) and mtDNA
aattattcagcttcctacactattaaagtttaccacaaccaccaccccatcatactctttcacccacagcaccaatcctacctccatcgctaaccccactaaaacactcaccaagacctc

SEQ ID NO: 62034 - DNA, 120 bp, Homo sapiens
  misc_feature: 1242 for SV(W|O) and mtDNA
ctgcgacatagggtgctccggctccagcgtctcgcaatgctatcgcgtgcataccccccagacgaaaataccaaatgcatggagagctcccgtgagtggttaatagggtgatagacctgt

SEQ ID NO: 62035 - DNA, 120 bp, Homo sapiens
  misc_feature: 1242 for SV(W|O) and mtDNA
cgcttgtcagggaggtagcgatgagagtaatagatagggctcaggcgtttgtgtatgatatgtttgcggtttcgatgatgtggtctttggagtagaaacctgtgaggaaaggtattcctg

SEQ ID NO: 62036 - DNA, 120 bp, Homo sapiens
  misc_feature: 1242 for SV(W|O) and mtDNA
atgctaagttagctttacagtgggctctagagggggtagagggggtgctatagggtaaatacgggccctatttcaaagatttttaggggaattaattctaggacgatgggcatgaaactg

SEQ ID NO: 62037 - DNA, 120 bp, Homo sapiens
  misc_feature: 1242 for SV(W|O) and mtDNA
agggaggtagcgatgagagtaatagatagggctcaggcgtttgtgtatgatatgtttgcggtttcgatgatgtggtctttggagtagaaacctgtgaggaaaggtattcctgctaatgct

SEQ ID NO: 62038 - DNA, 120 bp, Homo sapiens
  misc_feature: 1241 for SV(W|O) and mtDNA
agaaagagaggaagtaaagtttaattatgcctttttgggttgaggtgatgatggaggtggagatttggtgctgtgaaattgttttaggtaatagcttttctagtcaggttaggtctagga

SEQ ID NO: 62039 - DNA, 120 bp, Homo sapiens
  misc_feature: 1241 for SV(W|O) and mtDNA
ggagtaatcagaggtgttcttgtgttgtgataagggtggagaggttaaaggagccacttattagtaatgttgatagtagaatgatggctagggtgacttcatatgagattgtttgggcta

SEQ ID NO: 62040 - DNA, 120 bp, Homo sapiens
  misc_feature: 1241 for SV(W|O) and mtDNA
agaaaaagtctttaactccaccattagcacccaaagctaagattctaatttaaactattctctattctttcatggggaagcagatttgggtaccacccaagtattgactcacccatcaac

SEQ ID NO: 62041 - DNA, 120 bp, Homo sapiens
  misc_feature: 1241 for SV(W|O) and mtDNA
gtctgtcccaatgtatgggatggcggatagtaagtttgtaattactgtggcccctcagaatgatatttggcctcacgggaggacatagcctatgaaggctgttgctatagttgcaagcag

SEQ ID NO: 62042 - DNA, 120 bp, Homo sapiens
  misc_feature: 1241 for SV(W|O) and mtDNA
gctttatgaccctgaagtaggaaccagatgtcggatacagttcactttagctacccccaagtgttatgggcccggagcgaggagagtagcactcttgtgcgggatattgatttcacggag

SEQ ID NO: 62043 - DNA, 120 bp, Homo sapiens
  misc_feature: 1241 for SV(W|O) and mtDNA
gcaccctatgtcgcagtatctgtctttgattcctgcctcatcccattatttatcgcacctacgttcaatattacaggcgaacatacttactaaagtgtgttaattaattaatgcttgtag

SEQ ID NO: 62044 - DNA, 120 bp, Homo sapiens
  misc_feature: 1241 for SV(W|O) and mtDNA
caatctccagcattccccctcaaacctaagaaatatgtctgataaaagagttactttgatagagtaaataataggagcttaaacccccttatttctaggactatgagaatcgaacccatc

SEQ ID NO: 62045 - DNA, 120 bp, Homo sapiens
  misc_feature: 1241 for SV(W|O) and mtDNA
cgttatggagtggaagtgaaatcacatggctaggccggaggtcattaggagggctgagagggcccctgttaggggtcatgggctgggttttactatatgataggcatgtgattggtgggt

SEQ ID NO: 62046 - DNA, 120 bp, Homo sapiens
  misc_feature: 1241 for SV(W|O) and mtDNA
cggccgcggtaccctaaccgtgcaaaggtagcataatcacttgttccttaaatagggacctgtatgaatggctccacgagggttcagctgtctcttacttttaaccagtgaaattgacct

SEQ ID NO: 62047 - DNA, 120 bp, Homo sapiens
  misc_feature: 1241 for SV(W|O) and mtDNA
atgaccctgaagtaggaaccagatgtcggatacagttcactttagctacccccaagtgttatgggcccggagcgaggagagtagcactcttgtgcgggatattgatttcacggaggatgg

SEQ ID NO: 62048 - DNA, 120 bp, Homo sapiens
  misc_feature: 1241 for SV(W|O) and mtDNA
catacttcctattctacaccctagtaggctcccttcccctactcatcgcactaatttacactcacaacaccctaggctcactaaacattctactactcactctcactgcccaagaactat

SEQ ID NO: 62049 - DNA, 120 bp, Homo sapiens
  misc_feature: 1241 for SV(W|O) and mtDNA
actattcctcatcacccaactaaaaatattaaacacaaactaccacctacctccctcaccaaagcccataaaaataaaaaattataacaaaccctgagaaccaaaatgaacgaaaatctg

SEQ ID NO: 62050 - DNA, 120 bp, Homo sapiens
  misc_feature: 1240 for SV(W|O) and mtDNA
ttaacggccgcggtaccctaaccgtgcaaaggtagcataatcacttgttccttaaatagggacctgtatgaatggctccacgagggttcagctgtctcttacttttaaccagtgaaattg

SEQ ID NO: 62051 - DNA, 120 bp, Homo sapiens
  misc_feature: 1240 for SV(W|O) and mtDNA
acaccgcccgtcaccctcctcaagtatacttcaaaggacatttaactaaaacccctacgcatttatatagaggagacaagtcgtaacatggtaagtgtactggaaagtgcacttggacga

SEQ ID NO: 62052 - DNA, 120 bp, Homo sapiens
  misc_feature: 1240 for SV(W|O) and mtDNA
tattcagcttcctacactattaaagtttaccacaaccaccaccccatcatactctttcacccacagcaccaatcctacctccatcgctaaccccactaaaacactcaccaagacctcaac

SEQ ID NO: 62053 - DNA, 120 bp, Homo sapiens
  misc_feature: 1240 for SV(W|O) and mtDNA
acagcaccaaatctccacctccatcatcacctcaacccaaaaaggcataattaaactttacttcctctctttcttcttcccactcatcctaaccctactcctaatcacataacctattcc

SEQ ID NO: 62054 - DNA, 120 bp, Homo sapiens
  misc_feature: 1240 for SV(W|O) and mtDNA
cagaggtgttcttgtgttgtgataagggtggagaggttaaaggagccacttattagtaatgttgatagtagaatgatggctagggtgacttcatatgagattgtttgggctactgctcgc

SEQ ID NO: 62055 - DNA, 120 bp, Homo sapiens
  misc_feature: 1240 for SV(W|O) and mtDNA
ctacgccctgatcggcgcactgcgagcagtagcccaaacaatctcatatgaagtcaccctagccatcattctactatcaacattactaataagtggctcctttaacctctccacccttat

SEQ ID NO: 62056 - DNA, 120 bp, Homo sapiens
  misc_feature: 1239 for SV(W|O) and mtDNA
accctatgtcgcagtatctgtctttgattcctgcctcatcccattatttatcgcacctacgttcaatattacaggcgaacatacttactaaagtgtgttaattaattaatgcttgtagga

SEQ ID NO: 62057 - DNA, 120 bp, Homo sapiens
  misc_feature: 1239 for SV(W|O) and mtDNA
cgggcaggatagttcagacggtttctatttcctgagcgtctgagatgttagtattagttagttttgttgtgagtgttaggaaaagggcatacaggactaggaagcagataaggaaaatga

SEQ ID NO: 62058 - DNA, 120 bp, Homo sapiens
  misc_feature: 1239 for SV(W|O) and mtDNA
tattctttcatggggaagcagatttgggtaccacccaagtattgactcacccatcaacaaccgctatgtatttcgtacattactgccagccaccatgaatattgtacggtaccataaata

SEQ ID NO: 62059 - DNA, 120 bp, Homo sapiens
  misc_feature: 1239 for SV(W|O) and mtDNA
tacgccctgatcggcgcactgcgagcagtagcccaaacaatctcatatgaagtcaccctagccatcattctactatcaacattactaataagtggctcctttaacctctccacccttatc

SEQ ID NO: 62060 - DNA, 120 bp, Homo sapiens
  misc_feature: 1239 for SV(W|O) and mtDNA
ctgtgaaattgttttaggtaatagcttttctagtcaggttaggtctaggaggagtaggggcaggttttggctcgtaagaaggcctagataggggattgtgcggtgtgtgatgctagggta

SEQ ID NO: 62061 - DNA, 120 bp, Homo sapiens
  misc_feature: 1239 for SV(W|O) and mtDNA
ctaaatagcccacacgttccccttaaataagacatcacgatggatcacaggtctatcaccctattaaccactcacgggagctctccatgcatttggtattttcgtctggggggtatgcac

SEQ ID NO: 62062 - DNA, 120 bp, Homo sapiens
  misc_feature: 1239 for SV(W|O) and mtDNA
ccaccacacaccacctgtccaaaaaggccttcgatacgggataatcctatttattacctcagaagtttttttcttcgcaggatttttctgagccttttaccactccagcctagcccctac

SEQ ID NO: 62063 - DNA, 120 bp, Homo sapiens
  misc_feature: 1239 for SV(W|O) and mtDNA
ggcgggcaggatagttcagacggtttctatttcctgagcgtctgagatgttagtattagttagttttgttgtgagtgttaggaaaagggcatacaggactaggaagcagataaggaaaat

SEQ ID NO: 62064 - DNA, 120 bp, Homo sapiens
  misc_feature: 1239 for SV(W|O) and mtDNA
catcgtgatgtcttatttaaggggaacgtgtgggctatttaggctttatgaccctgaagtaggaaccagatgtcggatacagttcactttagctacccccaagtgttatgggcccggagc

SEQ ID NO: 62065 - DNA, 120 bp, Homo sapiens
  misc_feature: 1239 for SV(W|O) and mtDNA
ctacgcaaaggccccaacgttgtaggcccctacgggctactacaacccttcgctgacgccataaaactcttcaccaaagagcccctaaaacccgccacatctaccatcaccctctacatc

SEQ ID NO: 62066 - DNA, 120 bp, Homo sapiens
  misc_feature: 1239 for SV(W|O) and mtDNA
cccctatctgaggggggtcatccatggggacgagaagggatttgactgtaatgtgctatgtacggtaaatggctttatgtactatgtactgttaagggtgggtaggtttgttggtatcct

SEQ ID NO: 62067 - DNA, 120 bp, Homo sapiens
  misc_feature: 1238 for SV(W|O) and mtDNA
ttatgaccctgaagtaggaaccagatgtcggatacagttcactttagctacccccaagtgttatgggcccggagcgaggagagtagcactcttgtgcgggatattgatttcacggaggat

SEQ ID NO: 62068 - DNA, 120 bp, Homo sapiens
  misc_feature: 1238 for SV(W|O) and mtDNA
tcatcccattatttatcgcacctacgttcaatattacaggcgaacatacttactaaagtgtgttaattaattaatgcttgtaggacataataataacaattgaatgtctgcacagccgct

SEQ ID NO: 62069 - DNA, 120 bp, Homo sapiens
  misc_feature: 1238 for SV(W|O) and mtDNA
cgaatacgccgcaggccccttcgccctattcttcatagccgaatacacaaacattattataataaacaccctcaccactacaatcttcctaggaacaacatatgacgcactctcccctga

SEQ ID NO: 62070 - DNA, 120 bp, Homo sapiens
  misc_feature: 1238 for SV(W|O) and mtDNA
taagacatcacgatggatcacaggtctatcaccctattaaccactcacgggagctctccatgcatttggtattttcgtctggggggtatgcacgcgatagcattgcgagacgctggagcc

SEQ ID NO: 62071 - DNA, 120 bp, Homo sapiens
  misc_feature: 1238 for SV(W|O) and mtDNA
attctttcatggggaagcagatttgggtaccacccaagtattgactcacccatcaacaaccgctatgtatttcgtacattactgccagccaccatgaatattgtacggtaccataaatac

SEQ ID NO: 62072 - DNA, 120 bp, Homo sapiens
  misc_feature: 1238 for SV(W|O) and mtDNA
ggaggatcctattggtgcgggggctttgtatgattatgggcgttgattagtagtagttactggttgaacattgtttgttggtgtatatattgtaattgagattgctcgggggaataggtt

SEQ ID NO: 62073 - DNA, 120 bp, Homo sapiens
  misc_feature: 1238 for SV(W|O) and mtDNA
gcttgtcagggaggtagcgatgagagtaatagatagggctcaggcgtttgtgtatgatatgtttgcggtttcgatgatgtggtctttggagtagaaacctgtgaggaaaggtattcctgc

SEQ ID NO: 62074 - DNA, 120 bp, Homo sapiens
  misc_feature: 1238 for SV(W|O) and mtDNA
aatcatataccaaatctctccctcactaaacgtaagccttctcctcactctctcaatcttatccatcatagcaggcagttgaggtggattaaaccaaacccagctacgcaaaatcttagc

SEQ ID NO: 62075 - DNA, 120 bp, Homo sapiens
  misc_feature: 1238 for SV(W|O) and mtDNA
ctgaacgcaggcacatacttcctattctacaccctagtaggctcccttcccctactcatcgcactaatttacactcacaacaccctaggctcactaaacattctactactcactctcact

SEQ ID NO: 62076 - DNA, 120 bp, Homo sapiens
  misc_feature: 1238 for SV(W|O) and mtDNA
aagacatcacgatggatcacaggtctatcaccctattaaccactcacgggagctctccatgcatttggtattttcgtctggggggtatgcacgcgatagcattgcgagacgctggagccg

SEQ ID NO: 62077 - DNA, 120 bp, Homo sapiens
  misc_feature: 1238 for SV(W|O) and mtDNA
aaattattcagcttcctacactattaaagtttaccacaaccaccaccccatcatactctttcacccacagcaccaatcctacctccatcgctaaccccactaaaacactcaccaagacct

SEQ ID NO: 62078 - DNA, 120 bp, Homo sapiens
  misc_feature: 1238 for SV(W|O) and mtDNA
aaaaaactctacctctctatactaatctccctacaaatctccttaattataacattcacagccacagaactaatcatattttatatcttcttcgaaaccacacttatccccaccttggct

SEQ ID NO: 62079 - DNA, 120 bp, Homo sapiens
  misc_feature: 1237 for SV(W|O) and mtDNA
cagaacgcctgaacgcaggcacatacttcctattctacaccctagtaggctcccttcccctactcatcgcactaatttacactcacaacaccctaggctcactaaacattctactactca

SEQ ID NO: 62080 - DNA, 120 bp, Homo sapiens
  misc_feature: 1237 for SV(W|O) and mtDNA
tcgggaggatcctattggtgcgggggctttgtatgattatgggcgttgattagtagtagttactggttgaacattgtttgttggtgtatatattgtaattgagattgctcgggggaatag

SEQ ID NO: 62081 - DNA, 120 bp, Homo sapiens
  misc_feature: 1237 for SV(W|O) and mtDNA
ccaggggattaattagtacgggaagggtataaccaacattttcggggtatgggcccgatagcttatttagctgaccttactttaggatggggtgtgataggtggcacggagaattttgga

SEQ ID NO: 62082 - DNA, 120 bp, Homo sapiens
  misc_feature: 1237 for SV(W|O) and mtDNA
tatgaccctgaagtaggaaccagatgtcggatacagttcactttagctacccccaagtgttatgggcccggagcgaggagagtagcactcttgtgcgggatattgatttcacggaggatg

SEQ ID NO: 62083 - DNA, 120 bp, Homo sapiens
  misc_feature: 1237 for SV(W|O) and mtDNA
gtggttgtggtaaactttaatagtgtaggaagctgaataatttatgaaggagaggggtcagggttgattcgggaggatcctattggtgcgggggctttgtatgattatgggcgttgatta

SEQ ID NO: 62084 - DNA, 120 bp, Homo sapiens
  misc_feature: 1237 for SV(W|O) and mtDNA
cgcaggccccttcgccctattcttcatagccgaatacacaaacattattataataaacaccctcaccactacaatcttcctaggaacaacatatgacgcactctcccctgaactctacac

SEQ ID NO: 62085 - DNA, 120 bp, Homo sapiens
  misc_feature: 1237 for SV(W|O) and mtDNA
catcgaatacgccgcaggccccttcgccctattcttcatagccgaatacacaaacattattataataaacaccctcaccactacaatcttcctaggaacaacatatgacgcactctcccc

SEQ ID NO: 62086 - DNA, 120 bp, Homo sapiens
  misc_feature: 1237 for SV(W|O) and mtDNA
gcgggcaggatagttcagacggtttctatttcctgagcgtctgagatgttagtattagttagttttgttgtgagtgttaggaaaagggcatacaggactaggaagcagataaggaaaatg

SEQ ID NO: 62087 - DNA, 120 bp, Homo sapiens
  misc_feature: 1237 for SV(W|O) and mtDNA
atcacacaccgcacaatcccctatctaggccttcttacgagccaaaacctgcccctactcctcctagacctaacctgactagaaaagctattacctaaaacaatttcacagcaccaaatc

SEQ ID NO: 62088 - DNA, 120 bp, Homo sapiens
  misc_feature: 1237 for SV(W|O) and mtDNA
agtgttagagtttggattagtgggctattttctgctagggggtggaagcggatgagtaagaagattcctgctacaactatagtgcttgagtggagtagggctgagactggggtggggcct

SEQ ID NO: 62089 - DNA, 120 bp, Homo sapiens
  misc_feature: 1236 for SV(W|O) and mtDNA
gaatacgccgcaggccccttcgccctattcttcatagccgaatacacaaacattattataataaacaccctcaccactacaatcttcctaggaacaacatatgacgcactctcccctgaa

SEQ ID NO: 62090 - DNA, 120 bp, Homo sapiens
  misc_feature: 1236 for SV(W|O) and mtDNA
atcagagaaaaagtctttaactccaccattagcacccaaagctaagattctaatttaaactattctctattctttcatggggaagcagatttgggtaccacccaagtattgactcaccca

SEQ ID NO: 62091 - DNA, 120 bp, Homo sapiens
  misc_feature: 1236 for SV(W|O) and mtDNA
taacggccgcggtaccctaaccgtgcaaaggtagcataatcacttgttccttaaatagggacctgtatgaatggctccacgagggttcagctgtctcttacttttaaccagtgaaattga

SEQ ID NO: 62092 - DNA, 120 bp, Homo sapiens
  misc_feature: 1236 for SV(W|O) and mtDNA
gaggatcctattggtgcgggggctttgtatgattatgggcgttgattagtagtagttactggttgaacattgtttgttggtgtatatattgtaattgagattgctcgggggaataggtta

SEQ ID NO: 62093 - DNA, 120 bp, Homo sapiens
  misc_feature: 1236 for SV(W|O) and mtDNA
gtagcgatgagagtaatagatagggctcaggcgtttgtgtatgatatgtttgcggtttcgatgatgtggtctttggagtagaaacctgtgaggaaaggtattcctgctaatgctaggctg

SEQ ID NO: 62094 - DNA, 120 bp, Homo sapiens
  misc_feature: 1236 for SV(W|O) and mtDNA
ataagacatcacgatggatcacaggtctatcaccctattaaccactcacgggagctctccatgcatttggtattttcgtctggggggtatgcacgcgatagcattgcgagacgctggagc

SEQ ID NO: 62095 - DNA, 120 bp, Homo sapiens
  misc_feature: 1236 for SV(W|O) and mtDNA
gccaggggattaattagtacgggaagggtataaccaacattttcggggtatgggcccgatagcttatttagctgaccttactttaggatggggtgtgataggtggcacggagaattttgg

SEQ ID NO: 62096 - DNA, 120 bp, Homo sapiens
  misc_feature: 1236 for SV(W|O) and mtDNA
cagagaaaaagtctttaactccaccattagcacccaaagctaagattctaatttaaactattctctattctttcatggggaagcagatttgggtaccacccaagtattgactcacccatc

SEQ ID NO: 62097 - DNA, 120 bp, Homo sapiens
  misc_feature: 1236 for SV(W|O) and mtDNA
gaggtagcgatgagagtaatagatagggctcaggcgtttgtgtatgatatgtttgcggtttcgatgatgtggtctttggagtagaaacctgtgaggaaaggtattcctgctaatgctagg

SEQ ID NO: 62098 - DNA, 120 bp, Homo sapiens
  misc_feature: 1236 for SV(W|O) and mtDNA
atacaactacgcaaaggccccaacgttgtaggcccctacgggctactacaacccttcgctgacgccataaaactcttcaccaaagagcccctaaaacccgccacatctaccatcaccctc

SEQ ID NO: 62099 - DNA, 120 bp, Homo sapiens
  misc_feature: 1236 for SV(W|O) and mtDNA
ctattctttcatggggaagcagatttgggtaccacccaagtattgactcacccatcaacaaccgctatgtatttcgtacattactgccagccaccatgaatattgtacggtaccataaat

SEQ ID NO: 62100 - DNA, 120 bp, Homo sapiens
  misc_feature: 1236 for SV(W|O) and mtDNA
cgcagtatctgtctttgattcctgcctcatcccattatttatcgcacctacgttcaatattacaggcgaacatacttactaaagtgtgttaattaattaatgcttgtaggacataataat

SEQ ID NO: 62101 - DNA, 120 bp, Homo sapiens
  misc_feature: 1235 for SV(W|O) and mtDNA
ttcatggtggctggcagtaatgtacgaaatacatagcggttgttgatgggtgagtcaatacttgggtggtacccaaatctgcttccccatgaaagaatagagaatagtttaaattagaat

SEQ ID NO: 62102 - DNA, 120 bp, Homo sapiens
  misc_feature: 1235 for SV(W|O) and mtDNA
tggtggctggcagtaatgtacgaaatacatagcggttgttgatgggtgagtcaatacttgggtggtacccaaatctgcttccccatgaaagaatagagaatagtttaaattagaatctta

SEQ ID NO: 62103 - DNA, 120 bp, Homo sapiens
  misc_feature: 1235 for SV(W|O) and mtDNA
ggtgtgtgatgctagggtagaatccgagtatgttggagaaataaaatgtgcatagtggggattttattttaagtttgttggttaggtagttgaggtctagggctgttagaagtcctagga

SEQ ID NO: 62104 - DNA, 120 bp, Homo sapiens
  misc_feature: 1235 for SV(W|O) and mtDNA
gcagtatctgtctttgattcctgcctcatcccattatttatcgcacctacgttcaatattacaggcgaacatacttactaaagtgtgttaattaattaatgcttgtaggacataataata

SEQ ID NO: 62105 - DNA, 120 bp, Homo sapiens
  misc_feature: 1235 for SV(W|O) and mtDNA
aatattcatggtggctggcagtaatgtacgaaatacatagcggttgttgatgggtgagtcaatacttgggtggtacccaaatctgcttccccatgaaagaatagagaatagtttaaatta

SEQ ID NO: 62106 - DNA, 120 bp, Homo sapiens
  misc_feature: 1235 for SV(W|O) and mtDNA
gtgatgtcttatttaaggggaacgtgtgggctatttaggctttatgaccctgaagtaggaaccagatgtcggatacagttcactttagctacccccaagtgttatgggcccggagcgagg

SEQ ID NO: 62107 - DNA, 120 bp, Homo sapiens
  misc_feature: 1235 for SV(W|O) and mtDNA
gtcagggaggtagcgatgagagtaatagatagggctcaggcgtttgtgtatgatatgtttgcggtttcgatgatgtggtctttggagtagaaacctgtgaggaaaggtattcctgctaat

SEQ ID NO: 62108 - DNA, 120 bp, Homo sapiens
  misc_feature: 1235 for SV(W|O) and mtDNA
gcctcatcccattatttatcgcacctacgttcaatattacaggcgaacatacttactaaagtgtgttaattaattaatgcttgtaggacataataataacaattgaatgtctgcacagcc

SEQ ID NO: 62109 - DNA, 120 bp, Homo sapiens
  misc_feature: 1235 for SV(W|O) and mtDNA
ggcaggatagttcagacggtttctatttcctgagcgtctgagatgttagtattagttagttttgttgtgagtgttaggaaaagggcatacaggactaggaagcagataaggaaaatgatt

SEQ ID NO: 62110 - DNA, 120 bp, Homo sapiens
  misc_feature: 1235 for SV(W|O) and mtDNA
acaaacttaaaataaaatccccactatgcacattttatttctccaacatactcggattctaccctagcatcacacaccgcacaatcccctatctaggccttcttacgagccaaaacctgc

SEQ ID NO: 62111 - DNA, 120 bp, Homo sapiens
  misc_feature: 1235 for SV(W|O) and mtDNA
cttgtcagggaggtagcgatgagagtaatagatagggctcaggcgtttgtgtatgatatgtttgcggtttcgatgatgtggtctttggagtagaaacctgtgaggaaaggtattcctgct

SEQ ID NO: 62112 - DNA, 120 bp, Homo sapiens
  misc_feature: 1235 for SV(W|O) and mtDNA
ctatgtcgcagtatctgtctttgattcctgcctcatcccattatttatcgcacctacgttcaatattacaggcgaacatacttactaaagtgtgttaattaattaatgcttgtaggacat

SEQ ID NO: 62113 - DNA, 120 bp, Homo sapiens
  misc_feature: 1235 for SV(W|O) and mtDNA
aggctttatgaccctgaagtaggaaccagatgtcggatacagttcactttagctacccccaagtgttatgggcccggagcgaggagagtagcactcttgtgcgggatattgatttcacgg

SEQ ID NO: 62114 - DNA, 120 bp, Homo sapiens
  misc_feature: 1234 for SV(W|O) and mtDNA
tttatgaccctgaagtaggaaccagatgtcggatacagttcactttagctacccccaagtgttatgggcccggagcgaggagagtagcactcttgtgcgggatattgatttcacggagga

SEQ ID NO: 62115 - DNA, 120 bp, Homo sapiens
  misc_feature: 1234 for SV(W|O) and mtDNA
ttcctgcctcatcccattatttatcgcacctacgttcaatattacaggcgaacatacttactaaagtgtgttaattaattaatgcttgtaggacataataataacaattgaatgtctgca

SEQ ID NO: 62116 - DNA, 120 bp, Homo sapiens
  misc_feature: 1234 for SV(W|O) and mtDNA
cataaattattcagcttcctacactattaaagtttaccacaaccaccaccccatcatactctttcacccacagcaccaatcctacctccatcgctaaccccactaaaacactcaccaaga

SEQ ID NO: 62117 - DNA, 120 bp, Homo sapiens
  misc_feature: 1234 for SV(W|O) and mtDNA
tcagaggtgttcttgtgttgtgataagggtggagaggttaaaggagccacttattagtaatgttgatagtagaatgatggctagggtgacttcatatgagattgtttgggctactgctcg

SEQ ID NO: 62118 - DNA, 120 bp, Homo sapiens
  misc_feature: 1234 for SV(W|O) and mtDNA
tcagagaaaaagtctttaactccaccattagcacccaaagctaagattctaatttaaactattctctattctttcatggggaagcagatttgggtaccacccaagtattgactcacccat

SEQ ID NO: 62119 - DNA, 120 bp, Homo sapiens
  misc_feature: 1234 for SV(W|O) and mtDNA
agaagaaagagaggaagtaaagtttaattatgcctttttgggttgaggtgatgatggaggtggagatttggtgctgtgaaattgttttaggtaatagcttttctagtcaggttaggtcta

SEQ ID NO: 62120 - DNA, 120 bp, Homo sapiens
  misc_feature: 1234 for SV(W|O) and mtDNA
ggctatatacaactacgcaaaggccccaacgttgtaggcccctacgggctactacaacccttcgctgacgccataaaactcttcaccaaagagcccctaaaacccgccacatctaccatc

SEQ ID NO: 62121 - DNA, 120 bp, Homo sapiens
  misc_feature: 1234 for SV(W|O) and mtDNA
acactattcctcatcacccaactaaaaatattaaacacaaactaccacctacctccctcaccaaagcccataaaaataaaaaattataacaaaccctgagaaccaaaatgaacgaaaatc

SEQ ID NO: 62122 - DNA, 120 bp, Homo sapiens
  misc_feature: 1234 for SV(W|O) and mtDNA
atcgtgatgtcttatttaaggggaacgtgtgggctatttaggctttatgaccctgaagtaggaaccagatgtcggatacagttcactttagctacccccaagtgttatgggcccggagcg

SEQ ID NO: 62123 - DNA, 120 bp, Homo sapiens
  misc_feature: 1233 for SV(W|O) and mtDNA
gagaaaaagtctttaactccaccattagcacccaaagctaagattctaatttaaactattctctattctttcatggggaagcagatttgggtaccacccaagtattgactcacccatcaa

SEQ ID NO: 62124 - DNA, 120 bp, Homo sapiens
  misc_feature: 1233 for SV(W|O) and mtDNA
ttctacctacgcctaatctactccacctcaatcacactactccccatatctaacaacgtaaaaataaaatgacagtttgaacatacaaaacccaccccattcctccccacactcatcgcc

SEQ ID NO: 62125 - DNA, 120 bp, Homo sapiens
  misc_feature: 1233 for SV(W|O) and mtDNA
tgtgcctgcaaagatggtagagtagatgacgggttgggccaggggattaattagtacgggaagggtataaccaacattttcggggtatgggcccgatagcttatttagctgaccttactt

SEQ ID NO: 62126 - DNA, 120 bp, Homo sapiens
  misc_feature: 1233 for SV(W|O) and mtDNA
acgccctgatcggcgcactgcgagcagtagcccaaacaatctcatatgaagtcaccctagccatcattctactatcaacattactaataagtggctcctttaacctctccacccttatca

SEQ ID NO: 62127 - DNA, 120 bp, Homo sapiens
  misc_feature: 1233 for SV(W|O) and mtDNA
taccaaatgcatggagagctcccgtgagtggttaatagggtgatagacctgtgatccatcgtgatgtcttatttaaggggaacgtgtgggctatttaggctttatgaccctgaagtagga

SEQ ID NO: 62128 - DNA, 120 bp, Homo sapiens
  misc_feature: 1233 for SV(W|O) and mtDNA
aaataagacatcacgatggatcacaggtctatcaccctattaaccactcacgggagctctccatgcatttggtattttcgtctggggggtatgcacgcgatagcattgcgagacgctgga

SEQ ID NO: 62129 - DNA, 120 bp, Homo sapiens
  misc_feature: 1233 for SV(W|O) and mtDNA
gggaggatcctattggtgcgggggctttgtatgattatgggcgttgattagtagtagttactggttgaacattgtttgttggtgtatatattgtaattgagattgctcgggggaataggt

SEQ ID NO: 62130 - DNA, 120 bp, Homo sapiens
  misc_feature: 1233 for SV(W|O) and mtDNA
gcattccccctcaaacctaagaaatatgtctgataaaagagttactttgatagagtaaataataggagcttaaacccccttatttctaggactatgagaatcgaacccatccctgagaat

SEQ ID NO: 62131 - DNA, 120 bp, Homo sapiens
  misc_feature: 1233 for SV(W|O) and mtDNA
ctgcctcatcccattatttatcgcacctacgttcaatattacaggcgaacatacttactaaagtgtgttaattaattaatgcttgtaggacataataataacaattgaatgtctgcacag

SEQ ID NO: 62132 - DNA, 120 bp, Homo sapiens
  misc_feature: 1233 for SV(W|O) and mtDNA
actacgcaaaggccccaacgttgtaggcccctacgggctactacaacccttcgctgacgccataaaactcttcaccaaagagcccctaaaacccgccacatctaccatcaccctctacat

SEQ ID NO: 62133 - DNA, 120 bp, Homo sapiens
  misc_feature: 1232 for SV(W|O) and mtDNA
aggcacatacttcctattctacaccctagtaggctcccttcccctactcatcgcactaatttacactcacaacaccctaggctcactaaacattctactactcactctcactgcccaaga

SEQ ID NO: 62134 - DNA, 120 bp, Homo sapiens
  misc_feature: 1232 for SV(W|O) and mtDNA
tccagtgaaccactatcacgaaaaaaactctacctctctatactaatctccctacaaatctccttaattataacattcacagccacagaactaatcatattttatatcttcttcgaaacc

SEQ ID NO: 62135 - DNA, 120 bp, Homo sapiens
  misc_feature: 1232 for SV(W|O) and mtDNA
aacggccgcggtaccctaaccgtgcaaaggtagcataatcacttgttccttaaatagggacctgtatgaatggctccacgagggttcagctgtctcttacttttaaccagtgaaattgac

SEQ ID NO: 62136 - DNA, 120 bp, Homo sapiens
  misc_feature: 1232 for SV(W|O) and mtDNA
gtaatcagaggtgttcttgtgttgtgataagggtggagaggttaaaggagccacttattagtaatgttgatagtagaatgatggctagggtgacttcatatgagattgtttgggctactg

SEQ ID NO: 62137 - DNA, 120 bp, Homo sapiens
  misc_feature: 1232 for SV(W|O) and mtDNA
ggtagcgatgagagtaatagatagggctcaggcgtttgtgtatgatatgtttgcggtttcgatgatgtggtctttggagtagaaacctgtgaggaaaggtattcctgctaatgctaggct

SEQ ID NO: 62138 - DNA, 120 bp, Homo sapiens
  misc_feature: 1232 for SV(W|O) and mtDNA
agtctttaactccaccattagcacccaaagctaagattctaatttaaactattctctattctttcatggggaagcagatttgggtaccacccaagtattgactcacccatcaacaaccgc

SEQ ID NO: 62139 - DNA, 120 bp, Homo sapiens
  misc_feature: 1232 for SV(W|O) and mtDNA
atcagaggtgttcttgtgttgtgataagggtggagaggttaaaggagccacttattagtaatgttgatagtagaatgatggctagggtgacttcatatgagattgtttgggctactgctc

SEQ ID NO: 62140 - DNA, 120 bp, Homo sapiens
  misc_feature: 1232 for SV(W|O) and mtDNA
gaagaaagagaggaagtaaagtttaattatgcctttttgggttgaggtgatgatggaggtggagatttggtgctgtgaaattgttttaggtaatagcttttctagtcaggttaggtctag

SEQ ID NO: 62141 - DNA, 120 bp, Homo sapiens
  misc_feature: 1232 for SV(W|O) and mtDNA
catcacacaccgcacaatcccctatctaggccttcttacgagccaaaacctgcccctactcctcctagacctaacctgactagaaaagctattacctaaaacaatttcacagcaccaaat

SEQ ID NO: 62142 - DNA, 120 bp, Homo sapiens
  misc_feature: 1232 for SV(W|O) and mtDNA
caggatagttcagacggtttctatttcctgagcgtctgagatgttagtattagttagttttgttgtgagtgttaggaaaagggcatacaggactaggaagcagataaggaaaatgattat

SEQ ID NO: 62143 - DNA, 120 bp, Homo sapiens
  misc_feature: 1231 for SV(W|O) and mtDNA
ttcataaattattcagcttcctacactattaaagtttaccacaaccaccaccccatcatactctttcacccacagcaccaatcctacctccatcgctaaccccactaaaacactcaccaa

SEQ ID NO: 62144 - DNA, 120 bp, Homo sapiens
  misc_feature: 1231 for SV(W|O) and mtDNA
atggtaccgtacaatattcatggtggctggcagtaatgtacgaaatacatagcggttgttgatgggtgagtcaatacttgggtggtacccaaatctgcttccccatgaaagaatagagaa

SEQ ID NO: 62145 - DNA, 120 bp, Homo sapiens
  misc_feature: 1231 for SV(W|O) and mtDNA
cgcaggcacatacttcctattctacaccctagtaggctcccttcccctactcatcgcactaatttacactcacaacaccctaggctcactaaacattctactactcactctcactgccca

SEQ ID NO: 62146 - DNA, 120 bp, Homo sapiens
  misc_feature: 1231 for SV(W|O) and mtDNA
tgattgttagcggtgtggtcgggtgtgttattattctgaattttgggggaggttatatgggtttaatagtttttttaatttatttagggggaatgatggttgtctttggatatactacag

SEQ ID NO: 62147 - DNA, 120 bp, Homo sapiens
  misc_feature: 1231 for SV(W|O) and mtDNA
agagaaaaagtctttaactccaccattagcacccaaagctaagattctaatttaaactattctctattctttcatggggaagcagatttgggtaccacccaagtattgactcacccatca

SEQ ID NO: 62148 - DNA, 120 bp, Homo sapiens
  misc_feature: 1231 for SV(W|O) and mtDNA
taaataagacatcacgatggatcacaggtctatcaccctattaaccactcacgggagctctccatgcatttggtattttcgtctggggggtatgcacgcgatagcattgcgagacgctgg

SEQ ID NO: 62149 - DNA, 120 bp, Homo sapiens
  misc_feature: 1231 for SV(W|O) and mtDNA
ccgcccgtcaccctcctcaagtatacttcaaaggacatttaactaaaacccctacgcatttatatagaggagacaagtcgtaacatggtaagtgtactggaaagtgcacttggacgaacc

SEQ ID NO: 62150 - DNA, 120 bp, Homo sapiens
  misc_feature: 1231 for SV(W|O) and mtDNA
gattgttagcggtgtggtcgggtgtgttattattctgaattttgggggaggttatatgggtttaatagtttttttaatttatttagggggaatgatggttgtctttggatatactacagc

SEQ ID NO: 62151 - DNA, 120 bp, Homo sapiens
  misc_feature: 1231 for SV(W|O) and mtDNA
ccaagcctcaccccactactaggcctcctcctagcagcagcaggcaaatcagcccaattaggtctccacccctgactcccctcagccatagaaggccccaccccagtctcagccctactc

SEQ ID NO: 62152 - DNA, 120 bp, Homo sapiens
  misc_feature: 1230 for SV(W|O) and mtDNA
tgtgtgatgctagggtagaatccgagtatgttggagaaataaaatgtgcatagtggggattttattttaagtttgttggttaggtagttgaggtctagggctgttagaagtcctaggaaa

SEQ ID NO: 62153 - DNA, 120 bp, Homo sapiens
  misc_feature: 1230 for SV(W|O) and mtDNA
tcagggaggtagcgatgagagtaatagatagggctcaggcgtttgtgtatgatatgtttgcggtttcgatgatgtggtctttggagtagaaacctgtgaggaaaggtattcctgctaatg

SEQ ID NO: 62154 - DNA, 120 bp, Homo sapiens
  misc_feature: 1230 for SV(W|O) and mtDNA
tatgggatggcggatagtaagtttgtaattactgtggcccctcagaatgatatttggcctcacgggaggacatagcctatgaaggctgttgctatagttgcaagcaggaggataatgccg

SEQ ID NO: 62155 - DNA, 120 bp, Homo sapiens
  misc_feature: 1230 for SV(W|O) and mtDNA
atgtatgggatggcggatagtaagtttgtaattactgtggcccctcagaatgatatttggcctcacgggaggacatagcctatgaaggctgttgctatagttgcaagcaggaggataatg

SEQ ID NO: 62156 - DNA, 120 bp, Homo sapiens
  misc_feature: 1230 for SV(W|O) and mtDNA
catggtggctggcagtaatgtacgaaatacatagcggttgttgatgggtgagtcaatacttgggtggtacccaaatctgcttccccatgaaagaatagagaatagtttaaattagaatct

SEQ ID NO: 62157 - DNA, 120 bp, Homo sapiens
  misc_feature: 1230 for SV(W|O) and mtDNA
cacatacttcctattctacaccctagtaggctcccttcccctactcatcgcactaatttacactcacaacaccctaggctcactaaacattctactactcactctcactgcccaagaact

SEQ ID NO: 62158 - DNA, 120 bp, Homo sapiens
  misc_feature: 1229 for SV(W|O) and mtDNA
ccctgatcggcgcactgcgagcagtagcccaaacaatctcatatgaagtcaccctagccatcattctactatcaacattactaataagtggctcctttaacctctccacccttatcacaa

SEQ ID NO: 62159 - DNA, 120 bp, Homo sapiens
  misc_feature: 1229 for SV(W|O) and mtDNA
ttgtcagggaggtagcgatgagagtaatagatagggctcaggcgtttgtgtatgatatgtttgcggtttcgatgatgtggtctttggagtagaaacctgtgaggaaaggtattcctgcta

SEQ ID NO: 62160 - DNA, 120 bp, Homo sapiens
  misc_feature: 1229 for SV(W|O) and mtDNA
ccagtgaaccactatcacgaaaaaaactctacctctctatactaatctccctacaaatctccttaattataacattcacagccacagaactaatcatattttatatcttcttcgaaacca

SEQ ID NO: 62161 - DNA, 120 bp, Homo sapiens
  misc_feature: 1229 for SV(W|O) and mtDNA
tatcacgaaaaaaactctacctctctatactaatctccctacaaatctccttaattataacattcacagccacagaactaatcatattttatatcttcttcgaaaccacacttatcccca

SEQ ID NO: 62162 - DNA, 120 bp, Homo sapiens
  misc_feature: 1229 for SV(W|O) and mtDNA
agatactgcgacatagggtgctccggctccagcgtctcgcaatgctatcgcgtgcataccccccagacgaaaataccaaatgcatggagagctcccgtgagtggttaatagggtgataga

SEQ ID NO: 62163 - DNA, 120 bp, Homo sapiens
  misc_feature: 1228 for SV(W|O) and mtDNA
gcatcacacaccgcacaatcccctatctaggccttcttacgagccaaaacctgcccctactcctcctagacctaacctgactagaaaagctattacctaaaacaatttcacagcaccaaa

SEQ ID NO: 62164 - DNA, 120 bp, Homo sapiens
  misc_feature: 1228 for SV(W|O) and mtDNA
atgtcgcagtatctgtctttgattcctgcctcatcccattatttatcgcacctacgttcaatattacaggcgaacatacttactaaagtgtgttaattaattaatgcttgtaggacataa

SEQ ID NO: 62165 - DNA, 120 bp, Homo sapiens
  misc_feature: 1228 for SV(W|O) and mtDNA
tcatggtggctggcagtaatgtacgaaatacatagcggttgttgatgggtgagtcaatacttgggtggtacccaaatctgcttccccatgaaagaatagagaatagtttaaattagaatc

SEQ ID NO: 62166 - DNA, 120 bp, Homo sapiens
  misc_feature: 1228 for SV(W|O) and mtDNA
ggatagttcagacggtttctatttcctgagcgtctgagatgttagtattagttagttttgttgtgagtgttaggaaaagggcatacaggactaggaagcagataaggaaaatgattatga

SEQ ID NO: 62167 - DNA, 120 bp, Homo sapiens
  misc_feature: 1228 for SV(W|O) and mtDNA
acagatactgcgacatagggtgctccggctccagcgtctcgcaatgctatcgcgtgcataccccccagacgaaaataccaaatgcatggagagctcccgtgagtggttaatagggtgata

SEQ ID NO: 62168 - DNA, 120 bp, Homo sapiens
  misc_feature: 1228 for SV(W|O) and mtDNA
gtgtgatgctagggtagaatccgagtatgttggagaaataaaatgtgcatagtggggattttattttaagtttgttggttaggtagttgaggtctagggctgttagaagtcctaggaaag

SEQ ID NO: 62169 - DNA, 120 bp, Homo sapiens
  misc_feature: 1228 for SV(W|O) and mtDNA
caatattcatggtggctggcagtaatgtacgaaatacatagcggttgttgatgggtgagtcaatacttgggtggtacccaaatctgcttccccatgaaagaatagagaatagtttaaatt

SEQ ID NO: 62170 - DNA, 120 bp, Homo sapiens
  misc_feature: 1228 for SV(W|O) and mtDNA
atggtggctggcagtaatgtacgaaatacatagcggttgttgatgggtgagtcaatacttgggtggtacccaaatctgcttccccatgaaagaatagagaatagtttaaattagaatctt

SEQ ID NO: 62171 - DNA, 120 bp, Homo sapiens
  misc_feature: 1227 for SV(W|O) and mtDNA
gccctgatcggcgcactgcgagcagtagcccaaacaatctcatatgaagtcaccctagccatcattctactatcaacattactaataagtggctcctttaacctctccacccttatcaca

SEQ ID NO: 62172 - DNA, 120 bp, Homo sapiens
  misc_feature: 1227 for SV(W|O) and mtDNA
accgcccgtcaccctcctcaagtatacttcaaaggacatttaactaaaacccctacgcatttatatagaggagacaagtcgtaacatggtaagtgtactggaaagtgcacttggacgaac

SEQ ID NO: 62173 - DNA, 120 bp, Homo sapiens
  misc_feature: 1227 for SV(W|O) and mtDNA
catcatagccaccatcaccctccttaacctctacttctacctacgcctaatctactccacctcaatcacactactccccatatctaacaacgtaaaaataaaatgacagtttgaacatac

SEQ ID NO: 62174 - DNA, 120 bp, Homo sapiens
  misc_feature: 1227 for SV(W|O) and mtDNA
gaacgcaggcacatacttcctattctacaccctagtaggctcccttcccctactcatcgcactaatttacactcacaacaccctaggctcactaaacattctactactcactctcactgc

SEQ ID NO: 62175 - DNA, 120 bp, Homo sapiens
  misc_feature: 1227 for SV(W|O) and mtDNA
aacgcctgaacgcaggcacatacttcctattctacaccctagtaggctcccttcccctactcatcgcactaatttacactcacaacaccctaggctcactaaacattctactactcactc

SEQ ID NO: 62176 - DNA, 120 bp, Homo sapiens
  misc_feature: 1227 for SV(W|O) and mtDNA
agataggggattgtgcggtgtgtgatgctagggtagaatccgagtatgttggagaaataaaatgtgcatagtggggattttattttaagtttgttggttaggtagttgaggtctagggct

SEQ ID NO: 62177 - DNA, 120 bp, Homo sapiens
  misc_feature: 1226 for SV(W|O) and mtDNA
ggcacatacttcctattctacaccctagtaggctcccttcccctactcatcgcactaatttacactcacaacaccctaggctcactaaacattctactactcactctcactgcccaagaa

SEQ ID NO: 62178 - DNA, 120 bp, Homo sapiens
  misc_feature: 1226 for SV(W|O) and mtDNA
tgaacgcaggcacatacttcctattctacaccctagtaggctcccttcccctactcatcgcactaatttacactcacaacaccctaggctcactaaacattctactactcactctcactg

SEQ ID NO: 62179 - DNA, 120 bp, Homo sapiens
  misc_feature: 1226 for SV(W|O) and mtDNA
tcgaatacgccgcaggccccttcgccctattcttcatagccgaatacacaaacattattataataaacaccctcaccactacaatcttcctaggaacaacatatgacgcactctcccctg

SEQ ID NO: 62180 - DNA, 120 bp, Homo sapiens
  misc_feature: 1226 for SV(W|O) and mtDNA
tccaagcctcaccccactactaggcctcctcctagcagcagcaggcaaatcagcccaattaggtctccacccctgactcccctcagccatagaaggccccaccccagtctcagccctact

SEQ ID NO: 62181 - DNA, 120 bp, Homo sapiens
  misc_feature: 1226 for SV(W|O) and mtDNA
agacagatactgcgacatagggtgctccggctccagcgtctcgcaatgctatcgcgtgcataccccccagacgaaaataccaaatgcatggagagctcccgtgagtggttaatagggtga

SEQ ID NO: 62182 - DNA, 120 bp, Homo sapiens
  misc_feature: 1226 for SV(W|O) and mtDNA
tagtgttagagtttggattagtgggctattttctgctagggggtggaagcggatgagtaagaagattcctgctacaactatagtgcttgagtggagtagggctgagactggggtggggcc

SEQ ID NO: 62183 - DNA, 120 bp, Homo sapiens
  misc_feature: 1226 for SV(W|O) and mtDNA
gggaggtagcgatgagagtaatagatagggctcaggcgtttgtgtatgatatgtttgcggtttcgatgatgtggtctttggagtagaaacctgtgaggaaaggtattcctgctaatgcta

SEQ ID NO: 62184 - DNA, 120 bp, Homo sapiens
  misc_feature: 1226 for SV(W|O) and mtDNA
gtatgttggagaaataaaatgtgcatagtggggattttattttaagtttgttggttaggtagttgaggtctagggctgttagaagtcctaggaaagtgacagcgagggctgtgagtttta

SEQ ID NO: 62185 - DNA, 120 bp, Homo sapiens
  misc_feature: 1226 for SV(W|O) and mtDNA
ccttcgatacgggataatcctatttattacctcagaagtttttttcttcgcaggatttttctgagccttttaccactccagcctagcccctaccccccaattaggagggcactggccccc

SEQ ID NO: 62186 - DNA, 120 bp, Homo sapiens
  misc_feature: 1226 for SV(W|O) and mtDNA
aacgcaggcacatacttcctattctacaccctagtaggctcccttcccctactcatcgcactaatttacactcacaacaccctaggctcactaaacattctactactcactctcactgcc

SEQ ID NO: 62187 - DNA, 120 bp, Homo sapiens
  misc_feature: 1226 for SV(W|O) and mtDNA
aatgctaagttagctttacagtgggctctagagggggtagagggggtgctatagggtaaatacgggccctatttcaaagatttttaggggaattaattctaggacgatgggcatgaaact

SEQ ID NO: 62188 - DNA, 120 bp, Homo sapiens
  misc_feature: 1225 for SV(W|O) and mtDNA
cttcgatacgggataatcctatttattacctcagaagtttttttcttcgcaggatttttctgagccttttaccactccagcctagcccctaccccccaattaggagggcactggccccca

SEQ ID NO: 62189 - DNA, 120 bp, Homo sapiens
  misc_feature: 1225 for SV(W|O) and mtDNA
gcgacatagggtgctccggctccagcgtctcgcaatgctatcgcgtgcataccccccagacgaaaataccaaatgcatggagagctcccgtgagtggttaatagggtgatagacctgtga

SEQ ID NO: 62190 - DNA, 120 bp, Homo sapiens
  misc_feature: 1225 for SV(W|O) and mtDNA
aatacgccgcaggccccttcgccctattcttcatagccgaatacacaaacattattataataaacaccctcaccactacaatcttcctaggaacaacatatgacgcactctcccctgaac

SEQ ID NO: 62191 - DNA, 120 bp, Homo sapiens
  misc_feature: 1225 for SV(W|O) and mtDNA
ggtggttgtggtaaactttaatagtgtaggaagctgaataatttatgaaggagaggggtcagggttgattcgggaggatcctattggtgcgggggctttgtatgattatgggcgttgatt

SEQ ID NO: 62192 - DNA, 120 bp, Homo sapiens
  misc_feature: 1225 for SV(W|O) and mtDNA
cgcaaaggccccaacgttgtaggcccctacgggctactacaacccttcgctgacgccataaaactcttcaccaaagagcccctaaaacccgccacatctaccatcaccctctacatcacc

SEQ ID NO: 62193 - DNA, 120 bp, Homo sapiens
  misc_feature: 1225 for SV(W|O) and mtDNA
acccctatctgaggggggtcatccatggggacgagaagggatttgactgtaatgtgctatgtacggtaaatggctttatgtactatgtactgttaagggtgggtaggtttgttggtatcc

SEQ ID NO: 62194 - DNA, 120 bp, Homo sapiens
  misc_feature: 1225 for SV(W|O) and mtDNA
caggcacatacttcctattctacaccctagtaggctcccttcccctactcatcgcactaatttacactcacaacaccctaggctcactaaacattctactactcactctcactgcccaag

SEQ ID NO: 62195 - DNA, 120 bp, Homo sapiens
  misc_feature: 1225 for SV(W|O) and mtDNA
aacaaacttaaaataaaatccccactatgcacattttatttctccaacatactcggattctaccctagcatcacacaccgcacaatcccctatctaggccttcttacgagccaaaacctg

SEQ ID NO: 62196 - DNA, 120 bp, Homo sapiens
  misc_feature: 1225 for SV(W|O) and mtDNA
agtaatcagaggtgttcttgtgttgtgataagggtggagaggttaaaggagccacttattagtaatgttgatagtagaatgatggctagggtgacttcatatgagattgtttgggctact

SEQ ID NO: 62197 - DNA, 120 bp, Homo sapiens
  misc_feature: 1224 for SV(W|O) and mtDNA
acgcaaaggccccaacgttgtaggcccctacgggctactacaacccttcgctgacgccataaaactcttcaccaaagagcccctaaaacccgccacatctaccatcaccctctacatcac

SEQ ID NO: 62198 - DNA, 120 bp, Homo sapiens
  misc_feature: 1224 for SV(W|O) and mtDNA
ctatatacaactacgcaaaggccccaacgttgtaggcccctacgggctactacaacccttcgctgacgccataaaactcttcaccaaagagcccctaaaacccgccacatctaccatcac

SEQ ID NO: 62199 - DNA, 120 bp, Homo sapiens
  misc_feature: 1224 for SV(W|O) and mtDNA
cgccctgatcggcgcactgcgagcagtagcccaaacaatctcatatgaagtcaccctagccatcattctactatcaacattactaataagtggctcctttaacctctccacccttatcac

SEQ ID NO: 62200 - DNA, 120 bp, Homo sapiens
  misc_feature: 1224 for SV(W|O) and mtDNA
agaacgcctgaacgcaggcacatacttcctattctacaccctagtaggctcccttcccctactcatcgcactaatttacactcacaacaccctaggctcactaaacattctactactcac

SEQ ID NO: 62201 - DNA, 120 bp, Homo sapiens
  misc_feature: 1224 for SV(W|O) and mtDNA
ataaattattcagcttcctacactattaaagtttaccacaaccaccaccccatcatactctttcacccacagcaccaatcctacctccatcgctaaccccactaaaacactcaccaagac

SEQ ID NO: 62202 - DNA, 120 bp, Homo sapiens
  misc_feature: 1224 for SV(W|O) and mtDNA
agcacccaaagctaagattctaatttaaactattctctattctttcatggggaagcagatttgggtaccacccaagtattgactcacccatcaacaaccgctatgtatttcgtacattac

SEQ ID NO: 62203 - DNA, 120 bp, Homo sapiens
  misc_feature: 1224 for SV(W|O) and mtDNA
ctcatcccattatttatcgcacctacgttcaatattacaggcgaacatacttactaaagtgtgttaattaattaatgcttgtaggacataataataacaattgaatgtctgcacagccgc

SEQ ID NO: 62204 - DNA, 120 bp, Homo sapiens
  misc_feature: 1224 for SV(W|O) and mtDNA
atagtgttagagtttggattagtgggctattttctgctagggggtggaagcggatgagtaagaagattcctgctacaactatagtgcttgagtggagtagggctgagactggggtggggc

SEQ ID NO: 62205 - DNA, 120 bp, Homo sapiens
  misc_feature: 1223 for SV(W|O) and mtDNA
tacaatattcatggtggctggcagtaatgtacgaaatacatagcggttgttgatgggtgagtcaatacttgggtggtacccaaatctgcttccccatgaaagaatagagaatagtttaaa

SEQ ID NO: 62206 - DNA, 120 bp, Homo sapiens
  misc_feature: 1223 for SV(W|O) and mtDNA
agcatcacacaccgcacaatcccctatctaggccttcttacgagccaaaacctgcccctactcctcctagacctaacctgactagaaaagctattacctaaaacaatttcacagcaccaa

SEQ ID NO: 62207 - DNA, 120 bp, Homo sapiens
  misc_feature: 1223 for SV(W|O) and mtDNA
tacgcaaaggccccaacgttgtaggcccctacgggctactacaacccttcgctgacgccataaaactcttcaccaaagagcccctaaaacccgccacatctaccatcaccctctacatca

SEQ ID NO: 62208 - DNA, 120 bp, Homo sapiens
  misc_feature: 1223 for SV(W|O) and mtDNA
ggtgctgtgaaattgttttaggtaatagcttttctagtcaggttaggtctaggaggagtaggggcaggttttggctcgtaagaaggcctagataggggattgtgcggtgtgtgatgctag

SEQ ID NO: 62209 - DNA, 120 bp, Homo sapiens
  misc_feature: 1223 for SV(W|O) and mtDNA
atgatggggtggtggttgtggtaaactttaatagtgtaggaagctgaataatttatgaaggagaggggtcagggttgattcgggaggatcctattggtgcgggggctttgtatgattatg

SEQ ID NO: 62210 - DNA, 120 bp, Homo sapiens
  misc_feature: 1223 for SV(W|O) and mtDNA
aaggttaatgctaagttagctttacagtgggctctagagggggtagagggggtgctatagggtaaatacgggccctatttcaaagatttttaggggaattaattctaggacgatgggcat

SEQ ID NO: 62211 - DNA, 120 bp, Homo sapiens
  misc_feature: 1222 for SV(W|O) and mtDNA
tcatagccaccatcaccctccttaacctctacttctacctacgcctaatctactccacctcaatcacactactccccatatctaacaacgtaaaaataaaatgacagtttgaacatacaa

SEQ ID NO: 62212 - DNA, 120 bp, Homo sapiens
  misc_feature: 1222 for SV(W|O) and mtDNA
agtgaaccactatcacgaaaaaaactctacctctctatactaatctccctacaaatctccttaattataacattcacagccacagaactaatcatattttatatcttcttcgaaaccaca

SEQ ID NO: 62213 - DNA, 120 bp, Homo sapiens
  misc_feature: 1222 for SV(W|O) and mtDNA
atcatagccaccatcaccctccttaacctctacttctacctacgcctaatctactccacctcaatcacactactccccatatctaacaacgtaaaaataaaatgacagtttgaacataca

SEQ ID NO: 62214 - DNA, 120 bp, Homo sapiens
  misc_feature: 1222 for SV(W|O) and mtDNA
tggtaccgtacaatattcatggtggctggcagtaatgtacgaaatacatagcggttgttgatgggtgagtcaatacttgggtggtacccaaatctgcttccccatgaaagaatagagaat

SEQ ID NO: 62215 - DNA, 120 bp, Homo sapiens
  misc_feature: 1222 for SV(W|O) and mtDNA
tagttcagacggtttctatttcctgagcgtctgagatgttagtattagttagttttgttgtgagtgttaggaaaagggcatacaggactaggaagcagataaggaaaatgattatgaggg

SEQ ID NO: 62216 - DNA, 120 bp, Homo sapiens
  misc_feature: 1222 for SV(W|O) and mtDNA
cagggaggtagcgatgagagtaatagatagggctcaggcgtttgtgtatgatatgtttgcggtttcgatgatgtggtctttggagtagaaacctgtgaggaaaggtattcctgctaatgc

SEQ ID NO: 62217 - DNA, 120 bp, Homo sapiens
  misc_feature: 1222 for SV(W|O) and mtDNA
gcaaaggccccaacgttgtaggcccctacgggctactacaacccttcgctgacgccataaaactcttcaccaaagagcccctaaaacccgccacatctaccatcaccctctacatcaccg

SEQ ID NO: 62218 - DNA, 120 bp, Homo sapiens
  misc_feature: 1222 for SV(W|O) and mtDNA
gacagatactgcgacatagggtgctccggctccagcgtctcgcaatgctatcgcgtgcataccccccagacgaaaataccaaatgcatggagagctcccgtgagtggttaatagggtgat

SEQ ID NO: 62219 - DNA, 120 bp, Homo sapiens
  misc_feature: 1222 for SV(W|O) and mtDNA
atattcatggtggctggcagtaatgtacgaaatacatagcggttgttgatgggtgagtcaatacttgggtggtacccaaatctgcttccccatgaaagaatagagaatagtttaaattag

SEQ ID NO: 62220 - DNA, 120 bp, Homo sapiens
  misc_feature: 1222 for SV(W|O) and mtDNA
acaatattcatggtggctggcagtaatgtacgaaatacatagcggttgttgatgggtgagtcaatacttgggtggtacccaaatctgcttccccatgaaagaatagagaatagtttaaat

SEQ ID NO: 62221 - DNA, 120 bp, Homo sapiens
  misc_feature: 1221 for SV(W|O) and mtDNA
ctatcacgaaaaaaactctacctctctatactaatctccctacaaatctccttaattataacattcacagccacagaactaatcatattttatatcttcttcgaaaccacacttatcccc

SEQ ID NO: 62222 - DNA, 120 bp, Homo sapiens
  misc_feature: 1221 for SV(W|O) and mtDNA
gataggggattgtgcggtgtgtgatgctagggtagaatccgagtatgttggagaaataaaatgtgcatagtggggattttattttaagtttgttggttaggtagttgaggtctagggctg

SEQ ID NO: 62223 - DNA, 120 bp, Homo sapiens
  misc_feature: 1221 for SV(W|O) and mtDNA
cggtgtgtgatgctagggtagaatccgagtatgttggagaaataaaatgtgcatagtggggattttattttaagtttgttggttaggtagttgaggtctagggctgttagaagtcctagg

SEQ ID NO: 62224 - DNA, 120 bp, Homo sapiens
  misc_feature: 1221 for SV(W|O) and mtDNA
atagttcagacggtttctatttcctgagcgtctgagatgttagtattagttagttttgttgtgagtgttaggaaaagggcatacaggactaggaagcagataaggaaaatgattatgagg

SEQ ID NO: 62225 - DNA, 120 bp, Homo sapiens
  misc_feature: 1220 for SV(W|O) and mtDNA
gtttctatttcctgagcgtctgagatgttagtattagttagttttgttgtgagtgttaggaaaagggcatacaggactaggaagcagataaggaaaatgattatgagggcgtgatcatga

SEQ ID NO: 62226 - DNA, 120 bp, Homo sapiens
  misc_feature: 1220 for SV(W|O) and mtDNA
cagtgaaccactatcacgaaaaaaactctacctctctatactaatctccctacaaatctccttaattataacattcacagccacagaactaatcatattttatatcttcttcgaaaccac

SEQ ID NO: 62227 - DNA, 120 bp, Homo sapiens
  misc_feature: 1220 for SV(W|O) and mtDNA
gagtaatcagaggtgttcttgtgttgtgataagggtggagaggttaaaggagccacttattagtaatgttgatagtagaatgatggctagggtgacttcatatgagattgtttgggctac

SEQ ID NO: 62228 - DNA, 120 bp, Homo sapiens
  misc_feature: 1220 for SV(W|O) and mtDNA
acgcaggcacatacttcctattctacaccctagtaggctcccttcccctactcatcgcactaatttacactcacaacaccctaggctcactaaacattctactactcactctcactgccc

SEQ ID NO: 62229 - DNA, 120 bp, Homo sapiens
  misc_feature: 1220 for SV(W|O) and mtDNA
cttctacctacgcctaatctactccacctcaatcacactactccccatatctaacaacgtaaaaataaaatgacagtttgaacatacaaaacccaccccattcctccccacactcatcgc

SEQ ID NO: 62230 - DNA, 120 bp, Homo sapiens
  misc_feature: 1220 for SV(W|O) and mtDNA
cggtttctatttcctgagcgtctgagatgttagtattagttagttttgttgtgagtgttaggaaaagggcatacaggactaggaagcagataaggaaaatgattatgagggcgtgatcat

SEQ ID NO: 62231 - DNA, 120 bp, Homo sapiens
  misc_feature: 1220 for SV(W|O) and mtDNA
aagatggtagagtagatgacgggttgggccaggggattaattagtacgggaagggtataaccaacattttcggggtatgggcccgatagcttatttagctgaccttactttaggatgggg

SEQ ID NO: 62232 - DNA, 120 bp, Homo sapiens
  misc_feature: 1219 for SV(W|O) and mtDNA
gcaggcacatacttcctattctacaccctagtaggctcccttcccctactcatcgcactaatttacactcacaacaccctaggctcactaaacattctactactcactctcactgcccaa

SEQ ID NO: 62233 - DNA, 120 bp, Homo sapiens
  misc_feature: 1219 for SV(W|O) and mtDNA
gtgtgtgatgctagggtagaatccgagtatgttggagaaataaaatgtgcatagtggggattttattttaagtttgttggttaggtagttgaggtctagggctgttagaagtcctaggaa

SEQ ID NO: 62234 - DNA, 120 bp, Homo sapiens
  misc_feature: 1219 for SV(W|O) and mtDNA
tcctgcctcatcccattatttatcgcacctacgttcaatattacaggcgaacatacttactaaagtgtgttaattaattaatgcttgtaggacataataataacaattgaatgtctgcac

SEQ ID NO: 62235 - DNA, 120 bp, Homo sapiens
  misc_feature: 1219 for SV(W|O) and mtDNA
cctgatcggcgcactgcgagcagtagcccaaacaatctcatatgaagtcaccctagccatcattctactatcaacattactaataagtggctcctttaacctctccacccttatcacaac

SEQ ID NO: 62236 - DNA, 120 bp, Homo sapiens
  misc_feature: 1219 for SV(W|O) and mtDNA
atcacgaaaaaaactctacctctctatactaatctccctacaaatctccttaattataacattcacagccacagaactaatcatattttatatcttcttcgaaaccacacttatccccac

SEQ ID NO: 62237 - DNA, 120 bp, Homo sapiens
  misc_feature: 1219 for SV(W|O) and mtDNA
gagtatgttggagaaataaaatgtgcatagtggggattttattttaagtttgttggttaggtagttgaggtctagggctgttagaagtcctaggaaagtgacagcgagggctgtgagttt

SEQ ID NO: 62238 - DNA, 120 bp, Homo sapiens
  misc_feature: 1219 for SV(W|O) and mtDNA
cagatactgcgacatagggtgctccggctccagcgtctcgcaatgctatcgcgtgcataccccccagacgaaaataccaaatgcatggagagctcccgtgagtggttaatagggtgatag

SEQ ID NO: 62239 - DNA, 120 bp, Homo sapiens
  misc_feature: 1218 for SV(W|O) and mtDNA
ttgttagcggtgtggtcgggtgtgttattattctgaattttgggggaggttatatgggtttaatagtttttttaatttatttagggggaatgatggttgtctttggatatactacagcga

SEQ ID NO: 62240 - DNA, 120 bp, Homo sapiens
  misc_feature: 1218 for SV(W|O) and mtDNA
tgtgatgctagggtagaatccgagtatgttggagaaataaaatgtgcatagtggggattttattttaagtttgttggttaggtagttgaggtctagggctgttagaagtcctaggaaagt

SEQ ID NO: 62241 - DNA, 120 bp, Homo sapiens
  misc_feature: 1218 for SV(W|O) and mtDNA
taggggattgtgcggtgtgtgatgctagggtagaatccgagtatgttggagaaataaaatgtgcatagtggggattttattttaagtttgttggttaggtagttgaggtctagggctgtt

SEQ ID NO: 62242 - DNA, 120 bp, Homo sapiens
  misc_feature: 1218 for SV(W|O) and mtDNA
acggccgcggtaccctaaccgtgcaaaggtagcataatcacttgttccttaaatagggacctgtatgaatggctccacgagggttcagctgtctcttacttttaaccagtgaaattgacc

SEQ ID NO: 62243 - DNA, 120 bp, Homo sapiens
  misc_feature: 1218 for SV(W|O) and mtDNA
actatcacgaaaaaaactctacctctctatactaatctccctacaaatctccttaattataacattcacagccacagaactaatcatattttatatcttcttcgaaaccacacttatccc

SEQ ID NO: 62244 - DNA, 120 bp, Homo sapiens
  misc_feature: 1218 for SV(W|O) and mtDNA
cactatcacgaaaaaaactctacctctctatactaatctccctacaaatctccttaattataacattcacagccacagaactaatcatattttatatcttcttcgaaaccacacttatcc

SEQ ID NO: 62245 - DNA, 120 bp, Homo sapiens
  misc_feature: 1218 for SV(W|O) and mtDNA
gcggtgtgtgatgctagggtagaatccgagtatgttggagaaataaaatgtgcatagtggggattttattttaagtttgttggttaggtagttgaggtctagggctgttagaagtcctag

SEQ ID NO: 62246 - DNA, 120 bp, Homo sapiens
  misc_feature: 1218 for SV(W|O) and mtDNA
ctctccatgcatttggtattttcgtctggggggtatgcacgcgatagcattgcgagacgctggagccggagcaccctatgtcgcagtatctgtctttgattcctgcctcatcccattatt

SEQ ID NO: 62247 - DNA, 120 bp, Homo sapiens
  misc_feature: 1218 for SV(W|O) and mtDNA
acgcctgaacgcaggcacatacttcctattctacaccctagtaggctcccttcccctactcatcgcactaatttacactcacaacaccctaggctcactaaacattctactactcactct

SEQ ID NO: 62248 - DNA, 120 bp, Homo sapiens
  misc_feature: 1217 for SV(W|O) and mtDNA
tggtggttgtggtaaactttaatagtgtaggaagctgaataatttatgaaggagaggggtcagggttgattcgggaggatcctattggtgcgggggctttgtatgattatgggcgttgat

SEQ ID NO: 62249 - DNA, 120 bp, Homo sapiens
  misc_feature: 1217 for SV(W|O) and mtDNA
cttcataaattattcagcttcctacactattaaagtttaccacaaccaccaccccatcatactctttcacccacagcaccaatcctacctccatcgctaaccccactaaaacactcacca

SEQ ID NO: 62250 - DNA, 120 bp, Homo sapiens
  misc_feature: 1217 for SV(W|O) and mtDNA
ggttaatgctaagttagctttacagtgggctctagagggggtagagggggtgctatagggtaaatacgggccctatttcaaagatttttaggggaattaattctaggacgatgggcatga

SEQ ID NO: 62251 - DNA, 120 bp, Homo sapiens
  misc_feature: 1217 for SV(W|O) and mtDNA
tcataaattattcagcttcctacactattaaagtttaccacaaccaccaccccatcatactctttcacccacagcaccaatcctacctccatcgctaaccccactaaaacactcaccaag

SEQ ID NO: 62252 - DNA, 120 bp, Homo sapiens
  misc_feature: 1217 for SV(W|O) and mtDNA
gccttcgatacgggataatcctatttattacctcagaagtttttttcttcgcaggatttttctgagccttttaccactccagcctagcccctaccccccaattaggagggcactggcccc

SEQ ID NO: 62253 - DNA, 120 bp, Homo sapiens
  misc_feature: 1217 for SV(W|O) and mtDNA
aggtagcgatgagagtaatagatagggctcaggcgtttgtgtatgatatgtttgcggtttcgatgatgtggtctttggagtagaaacctgtgaggaaaggtattcctgctaatgctaggc

SEQ ID NO: 62254 - DNA, 120 bp, Homo sapiens
  misc_feature: 1217 for SV(W|O) and mtDNA
gaacgcctgaacgcaggcacatacttcctattctacaccctagtaggctcccttcccctactcatcgcactaatttacactcacaacaccctaggctcactaaacattctactactcact

SEQ ID NO: 62255 - DNA, 120 bp, Homo sapiens
  misc_feature: 1217 for SV(W|O) and mtDNA
cgtgatgtcttatttaaggggaacgtgtgggctatttaggctttatgaccctgaagtaggaaccagatgtcggatacagttcactttagctacccccaagtgttatgggcccggagcgag

SEQ ID NO: 62256 - DNA, 120 bp, Homo sapiens
  misc_feature: 1217 for SV(W|O) and mtDNA
agtatgttggagaaataaaatgtgcatagtggggattttattttaagtttgttggttaggtagttgaggtctagggctgttagaagtcctaggaaagtgacagcgagggctgtgagtttt

SEQ ID NO: 62257 - DNA, 120 bp, Homo sapiens
  misc_feature: 1216 for SV(W|O) and mtDNA
ttaatgctaagttagctttacagtgggctctagagggggtagagggggtgctatagggtaaatacgggccctatttcaaagatttttaggggaattaattctaggacgatgggcatgaaa

SEQ ID NO: 62258 - DNA, 120 bp, Homo sapiens
  misc_feature: 1216 for SV(W|O) and mtDNA
tcgcagtatctgtctttgattcctgcctcatcccattatttatcgcacctacgttcaatattacaggcgaacatacttactaaagtgtgttaattaattaatgcttgtaggacataataa

SEQ ID NO: 62259 - DNA, 120 bp, Homo sapiens
  misc_feature: 1216 for SV(W|O) and mtDNA
tggtgctgtgaaattgttttaggtaatagcttttctagtcaggttaggtctaggaggagtaggggcaggttttggctcgtaagaaggcctagataggggattgtgcggtgtgtgatgcta

SEQ ID NO: 62260 - DNA, 120 bp, Homo sapiens
  misc_feature: 1216 for SV(W|O) and mtDNA
tgcggtgtgtgatgctagggtagaatccgagtatgttggagaaataaaatgtgcatagtggggattttattttaagtttgttggttaggtagttgaggtctagggctgttagaagtccta

SEQ ID NO: 62261 - DNA, 120 bp, Homo sapiens
  misc_feature: 1216 for SV(W|O) and mtDNA
gacatcacgatggatcacaggtctatcaccctattaaccactcacgggagctctccatgcatttggtattttcgtctggggggtatgcacgcgatagcattgcgagacgctggagccgga

SEQ ID NO: 62262 - DNA, 120 bp, Homo sapiens
  misc_feature: 1216 for SV(W|O) and mtDNA
ggtaccgtacaatattcatggtggctggcagtaatgtacgaaatacatagcggttgttgatgggtgagtcaatacttgggtggtacccaaatctgcttccccatgaaagaatagagaata

SEQ ID NO: 62263 - DNA, 120 bp, Homo sapiens
  misc_feature: 1216 for SV(W|O) and mtDNA
tatgatggggtggtggttgtggtaaactttaatagtgtaggaagctgaataatttatgaaggagaggggtcagggttgattcgggaggatcctattggtgcgggggctttgtatgattat

SEQ ID NO: 62264 - DNA, 120 bp, Homo sapiens
  misc_feature: 1216 for SV(W|O) and mtDNA
ggccaggggattaattagtacgggaagggtataaccaacattttcggggtatgggcccgatagcttatttagctgaccttactttaggatggggtgtgataggtggcacggagaattttg

SEQ ID NO: 62265 - DNA, 120 bp, Homo sapiens
  misc_feature: 1216 for SV(W|O) and mtDNA
actgcgacatagggtgctccggctccagcgtctcgcaatgctatcgcgtgcataccccccagacgaaaataccaaatgcatggagagctcccgtgagtggttaatagggtgatagacctg

SEQ ID NO: 62266 - DNA, 120 bp, Homo sapiens
  misc_feature: 1216 for SV(W|O) and mtDNA
aagacagatactgcgacatagggtgctccggctccagcgtctcgcaatgctatcgcgtgcataccccccagacgaaaataccaaatgcatggagagctcccgtgagtggttaatagggtg

SEQ ID NO: 62267 - DNA, 120 bp, Homo sapiens
  misc_feature: 1216 for SV(W|O) and mtDNA
caacaaacttaaaataaaatccccactatgcacattttatttctccaacatactcggattctaccctagcatcacacaccgcacaatcccctatctaggccttcttacgagccaaaacct

SEQ ID NO: 62268 - DNA, 120 bp, Homo sapiens
  misc_feature: 1216 for SV(W|O) and mtDNA
acgaaaaaaactctacctctctatactaatctccctacaaatctccttaattataacattcacagccacagaactaatcatattttatatcttcttcgaaaccacacttatccccacctt

SEQ ID NO: 62269 - DNA, 120 bp, Homo sapiens
  misc_feature: 1215 for SV(W|O) and mtDNA
gttaatgctaagttagctttacagtgggctctagagggggtagagggggtgctatagggtaaatacgggccctatttcaaagatttttaggggaattaattctaggacgatgggcatgaa

SEQ ID NO: 62270 - DNA, 120 bp, Homo sapiens
  misc_feature: 1215 for SV(W|O) and mtDNA
tgttagcggtgtggtcgggtgtgttattattctgaattttgggggaggttatatgggtttaatagtttttttaatttatttagggggaatgatggttgtctttggatatactacagcgat

SEQ ID NO: 62271 - DNA, 120 bp, Homo sapiens
  misc_feature: 1215 for SV(W|O) and mtDNA
gcacatacttcctattctacaccctagtaggctcccttcccctactcatcgcactaatttacactcacaacaccctaggctcactaaacattctactactcactctcactgcccaagaac

SEQ ID NO: 62272 - DNA, 120 bp, Homo sapiens
  misc_feature: 1215 for SV(W|O) and mtDNA
aaaaaaactctacctctctatactaatctccctacaaatctccttaattataacattcacagccacagaactaatcatattttatatcttcttcgaaaccacacttatccccaccttggc

SEQ ID NO: 62273 - DNA, 120 bp, Homo sapiens
  misc_feature: 1215 for SV(W|O) and mtDNA
acatcacgatggatcacaggtctatcaccctattaaccactcacgggagctctccatgcatttggtattttcgtctggggggtatgcacgcgatagcattgcgagacgctggagccggag

SEQ ID NO: 62274 - DNA, 120 bp, Homo sapiens
  misc_feature: 1215 for SV(W|O) and mtDNA
aataagacatcacgatggatcacaggtctatcaccctattaaccactcacgggagctctccatgcatttggtattttcgtctggggggtatgcacgcgatagcattgcgagacgctggag

SEQ ID NO: 62275 - DNA, 120 bp, Homo sapiens
  misc_feature: 1214 for SV(W|O) and mtDNA
taccgtacaatattcatggtggctggcagtaatgtacgaaatacatagcggttgttgatgggtgagtcaatacttgggtggtacccaaatctgcttccccatgaaagaatagagaatagt

SEQ ID NO: 62276 - DNA, 120 bp, Homo sapiens
  misc_feature: 1214 for SV(W|O) and mtDNA
gttggtgtatatattgtaattgagattgctcgggggaataggttatgtgattaggagtagggttaggatgagtgggaagaagaaagagaggaagtaaagtttaattatgcctttttgggt

SEQ ID NO: 62277 - DNA, 120 bp, Homo sapiens
  misc_feature: 1214 for SV(W|O) and mtDNA
gttagagtttggattagtgggctattttctgctagggggtggaagcggatgagtaagaagattcctgctacaactatagtgcttgagtggagtagggctgagactggggtggggccttct

SEQ ID NO: 62278 - DNA, 120 bp, Homo sapiens
  misc_feature: 1214 for SV(W|O) and mtDNA
gtgaaccactatcacgaaaaaaactctacctctctatactaatctccctacaaatctccttaattataacattcacagccacagaactaatcatattttatatcttcttcgaaaccacac

SEQ ID NO: 62279 - DNA, 120 bp, Homo sapiens
  misc_feature: 1213 for SV(W|O) and mtDNA
catagccaccatcaccctccttaacctctacttctacctacgcctaatctactccacctcaatcacactactccccatatctaacaacgtaaaaataaaatgacagtttgaacatacaaa

SEQ ID NO: 62280 - DNA, 120 bp, Homo sapiens
  misc_feature: 1213 for SV(W|O) and mtDNA
tgcataccccccagacgaaaataccaaatgcatggagagctcccgtgagtggttaatagggtgatagacctgtgatccatcgtgatgtcttatttaaggggaacgtgtgggctatttagg

SEQ ID NO: 62281 - DNA, 120 bp, Homo sapiens
  misc_feature: 1213 for SV(W|O) and mtDNA
acggtttctatttcctgagcgtctgagatgttagtattagttagttttgttgtgagtgttaggaaaagggcatacaggactaggaagcagataaggaaaatgattatgagggcgtgatca

SEQ ID NO: 62282 - DNA, 120 bp, Homo sapiens
  misc_feature: 1213 for SV(W|O) and mtDNA
tcgtgatgtcttatttaaggggaacgtgtgggctatttaggctttatgaccctgaagtaggaaccagatgtcggatacagttcactttagctacccccaagtgttatgggcccggagcga

SEQ ID NO: 62283 - DNA, 120 bp, Homo sapiens
  misc_feature: 1213 for SV(W|O) and mtDNA
gtgttagagtttggattagtgggctattttctgctagggggtggaagcggatgagtaagaagattcctgctacaactatagtgcttgagtggagtagggctgagactggggtggggcctt

SEQ ID NO: 62284 - DNA, 120 bp, Homo sapiens
  misc_feature: 1213 for SV(W|O) and mtDNA
aatcagagaaaaagtctttaactccaccattagcacccaaagctaagattctaatttaaactattctctattctttcatggggaagcagatttgggtaccacccaagtattgactcaccc

SEQ ID NO: 62285 - DNA, 120 bp, Homo sapiens
  misc_feature: 1213 for SV(W|O) and mtDNA
agttcagacggtttctatttcctgagcgtctgagatgttagtattagttagttttgttgtgagtgttaggaaaagggcatacaggactaggaagcagataaggaaaatgattatgagggc

SEQ ID NO: 62286 - DNA, 120 bp, Homo sapiens
  misc_feature: 1213 for SV(W|O) and mtDNA
aactcacagccctcgctgtcactttcctaggacttctaacagccctagacctcaactacctaaccaacaaacttaaaataaaatccccactatgcacattttatttctccaacatactcg

SEQ ID NO: 62287 - DNA, 120 bp, Homo sapiens
  misc_feature: 1213 for SV(W|O) and mtDNA
agacatcacgatggatcacaggtctatcaccctattaaccactcacgggagctctccatgcatttggtattttcgtctggggggtatgcacgcgatagcattgcgagacgctggagccgg

SEQ ID NO: 62288 - DNA, 120 bp, Homo sapiens
  misc_feature: 1213 for SV(W|O) and mtDNA
aggttaatgctaagttagctttacagtgggctctagagggggtagagggggtgctatagggtaaatacgggccctatttcaaagatttttaggggaattaattctaggacgatgggcatg

SEQ ID NO: 62289 - DNA, 120 bp, Homo sapiens
  misc_feature: 1212 for SV(W|O) and mtDNA
ttcgatacgggataatcctatttattacctcagaagtttttttcttcgcaggatttttctgagccttttaccactccagcctagcccctaccccccaattaggagggcactggcccccaa

SEQ ID NO: 62290 - DNA, 120 bp, Homo sapiens
  misc_feature: 1212 for SV(W|O) and mtDNA
tggggtggtggttgtggtaaactttaatagtgtaggaagctgaataatttatgaaggagaggggtcagggttgattcgggaggatcctattggtgcgggggctttgtatgattatgggcg

SEQ ID NO: 62291 - DNA, 120 bp, Homo sapiens
  misc_feature: 1212 for SV(W|O) and mtDNA
ccaacaaacttaaaataaaatccccactatgcacattttatttctccaacatactcggattctaccctagcatcacacaccgcacaatcccctatctaggccttcttacgagccaaaacc

SEQ ID NO: 62292 - DNA, 120 bp, Homo sapiens
  misc_feature: 1212 for SV(W|O) and mtDNA
ggatggcggatagtaagtttgtaattactgtggcccctcagaatgatatttggcctcacgggaggacatagcctatgaaggctgttgctatagttgcaagcaggaggataatgccgatgt

SEQ ID NO: 62293 - DNA, 120 bp, Homo sapiens
  misc_feature: 1212 for SV(W|O) and mtDNA
gatagttcagacggtttctatttcctgagcgtctgagatgttagtattagttagttttgttgtgagtgttaggaaaagggcatacaggactaggaagcagataaggaaaatgattatgag

SEQ ID NO: 62294 - DNA, 120 bp, Homo sapiens
  misc_feature: 1212 for SV(W|O) and mtDNA
cctcatcccattatttatcgcacctacgttcaatattacaggcgaacatacttactaaagtgtgttaattaattaatgcttgtaggacataataataacaattgaatgtctgcacagccg

SEQ ID NO: 62295 - DNA, 120 bp, Homo sapiens
  misc_feature: 1212 for SV(W|O) and mtDNA
cgacatagggtgctccggctccagcgtctcgcaatgctatcgcgtgcataccccccagacgaaaataccaaatgcatggagagctcccgtgagtggttaatagggtgatagacctgtgat

SEQ ID NO: 62296 - DNA, 120 bp, Homo sapiens
  misc_feature: 1212 for SV(W|O) and mtDNA
agatggtagagtagatgacgggttgggccaggggattaattagtacgggaagggtataaccaacattttcggggtatgggcccgatagcttatttagctgaccttactttaggatggggt

SEQ ID NO: 62297 - DNA, 120 bp, Homo sapiens
  misc_feature: 1211 for SV(W|O) and mtDNA
tagataggggattgtgcggtgtgtgatgctagggtagaatccgagtatgttggagaaataaaatgtgcatagtggggattttattttaagtttgttggttaggtagttgaggtctagggc

SEQ ID NO: 62298 - DNA, 120 bp, Homo sapiens
  misc_feature: 1211 for SV(W|O) and mtDNA
tacttcagggtcataaagcctaaatagcccacacgttccccttaaataagacatcacgatggatcacaggtctatcaccctattaaccactcacgggagctctccatgcatttggtattt

SEQ ID NO: 62299 - DNA, 120 bp, Homo sapiens
  misc_feature: 1211 for SV(W|O) and mtDNA
gtgcctgcaaagatggtagagtagatgacgggttgggccaggggattaattagtacgggaagggtataaccaacattttcggggtatgggcccgatagcttatttagctgaccttacttt

SEQ ID NO: 62300 - DNA, 120 bp, Homo sapiens
  misc_feature: 1211 for SV(W|O) and mtDNA
ggtttctatttcctgagcgtctgagatgttagtattagttagttttgttgtgagtgttaggaaaagggcatacaggactaggaagcagataaggaaaatgattatgagggcgtgatcatg

SEQ ID NO: 62301 - DNA, 120 bp, Homo sapiens
  misc_feature: 1211 for SV(W|O) and mtDNA
ggccttcgatacgggataatcctatttattacctcagaagtttttttcttcgcaggatttttctgagccttttaccactccagcctagcccctaccccccaattaggagggcactggccc

SEQ ID NO: 62302 - DNA, 120 bp, Homo sapiens
  misc_feature: 1211 for SV(W|O) and mtDNA
ggaggtagcgatgagagtaatagatagggctcaggcgtttgtgtatgatatgtttgcggtttcgatgatgtggtctttggagtagaaacctgtgaggaaaggtattcctgctaatgctag

SEQ ID NO: 62303 - DNA, 120 bp, Homo sapiens
  misc_feature: 1211 for SV(W|O) and mtDNA
gcacccaaagctaagattctaatttaaactattctctattctttcatggggaagcagatttgggtaccacccaagtattgactcacccatcaacaaccgctatgtatttcgtacattact

SEQ ID NO: 62304 - DNA, 120 bp, Homo sapiens
  misc_feature: 1211 for SV(W|O) and mtDNA
ctcccgtgaggccaaatatcattctgaggggccacagtaattacaaacttactatccgccatcccatacattgggacagacctagttcaatgaatctgaggaggctactcagtagacagt

SEQ ID NO: 62305 - DNA, 120 bp, Homo sapiens
  misc_feature: 1211 for SV(W|O) and mtDNA
cctacttcagggtcataaagcctaaatagcccacacgttccccttaaataagacatcacgatggatcacaggtctatcaccctattaaccactcacgggagctctccatgcatttggtat

SEQ ID NO: 62306 - DNA, 120 bp, Homo sapiens
  misc_feature: 1210 for SV(W|O) and mtDNA
aaaggttaatgctaagttagctttacagtgggctctagagggggtagagggggtgctatagggtaaatacgggccctatttcaaagatttttaggggaattaattctaggacgatgggca

SEQ ID NO: 62307 - DNA, 120 bp, Homo sapiens
  misc_feature: 1210 for SV(W|O) and mtDNA
gcctgaacgcaggcacatacttcctattctacaccctagtaggctcccttcccctactcatcgcactaatttacactcacaacaccctaggctcactaaacattctactactcactctca

SEQ ID NO: 62308 - DNA, 120 bp, Homo sapiens
  misc_feature: 1210 for SV(W|O) and mtDNA
taatgctaagttagctttacagtgggctctagagggggtagagggggtgctatagggtaaatacgggccctatttcaaagatttttaggggaattaattctaggacgatgggcatgaaac

SEQ ID NO: 62309 - DNA, 120 bp, Homo sapiens
  misc_feature: 1210 for SV(W|O) and mtDNA
gatactgcgacatagggtgctccggctccagcgtctcgcaatgctatcgcgtgcataccccccagacgaaaataccaaatgcatggagagctcccgtgagtggttaatagggtgatagac

SEQ ID NO: 62310 - DNA, 120 bp, Homo sapiens
  misc_feature: 1210 for SV(W|O) and mtDNA
gatggggtggtggttgtggtaaactttaatagtgtaggaagctgaataatttatgaaggagaggggtcagggttgattcgggaggatcctattggtgcgggggctttgtatgattatggg

SEQ ID NO: 62311 - DNA, 120 bp, Homo sapiens
  misc_feature: 1210 for SV(W|O) and mtDNA
cacgaaaaaaactctacctctctatactaatctccctacaaatctccttaattataacattcacagccacagaactaatcatattttatatcttcttcgaaaccacacttatccccacct

SEQ ID NO: 62312 - DNA, 120 bp, Homo sapiens
  misc_feature: 1209 for SV(W|O) and mtDNA
tgaaccactatcacgaaaaaaactctacctctctatactaatctccctacaaatctccttaattataacattcacagccacagaactaatcatattttatatcttcttcgaaaccacact

SEQ ID NO: 62313 - DNA, 120 bp, Homo sapiens
  misc_feature: 1209 for SV(W|O) and mtDNA
tcagacggtttctatttcctgagcgtctgagatgttagtattagttagttttgttgtgagtgttaggaaaagggcatacaggactaggaagcagataaggaaaatgattatgagggcgtg

SEQ ID NO: 62314 - DNA, 120 bp, Homo sapiens
  misc_feature: 1209 for SV(W|O) and mtDNA
gacggtttctatttcctgagcgtctgagatgttagtattagttagttttgttgtgagtgttaggaaaagggcatacaggactaggaagcagataaggaaaatgattatgagggcgtgatc

SEQ ID NO: 62315 - DNA, 120 bp, Homo sapiens
  misc_feature: 1209 for SV(W|O) and mtDNA
ctacttcagggtcataaagcctaaatagcccacacgttccccttaaataagacatcacgatggatcacaggtctatcaccctattaaccactcacgggagctctccatgcatttggtatt

SEQ ID NO: 62316 - DNA, 120 bp, Homo sapiens
  misc_feature: 1209 for SV(W|O) and mtDNA
aaagatggtagagtagatgacgggttgggccaggggattaattagtacgggaagggtataaccaacattttcggggtatgggcccgatagcttatttagctgaccttactttaggatggg

SEQ ID NO: 62317 - DNA, 120 bp, Homo sapiens
  misc_feature: 1208 for SV(W|O) and mtDNA
tgcctgcaaagatggtagagtagatgacgggttgggccaggggattaattagtacgggaagggtataaccaacattttcggggtatgggcccgatagcttatttagctgaccttacttta

SEQ ID NO: 62318 - DNA, 120 bp, Homo sapiens
  misc_feature: 1208 for SV(W|O) and mtDNA
tacttctacctacgcctaatctactccacctcaatcacactactccccatatctaacaacgtaaaaataaaatgacagtttgaacatacaaaacccaccccattcctccccacactcatc

SEQ ID NO: 62319 - DNA, 120 bp, Homo sapiens
  misc_feature: 1208 for SV(W|O) and mtDNA
ggtggctggcagtaatgtacgaaatacatagcggttgttgatgggtgagtcaatacttgggtggtacccaaatctgcttccccatgaaagaatagagaatagtttaaattagaatcttag

SEQ ID NO: 62320 - DNA, 120 bp, Homo sapiens
  misc_feature: 1208 for SV(W|O) and mtDNA
gacatagggtgctccggctccagcgtctcgcaatgctatcgcgtgcataccccccagacgaaaataccaaatgcatggagagctcccgtgagtggttaatagggtgatagacctgtgatc

SEQ ID NO: 62321 - DNA, 120 bp, Homo sapiens
  misc_feature: 1208 for SV(W|O) and mtDNA
gaaccactatcacgaaaaaaactctacctctctatactaatctccctacaaatctccttaattataacattcacagccacagaactaatcatattttatatcttcttcgaaaccacactt

SEQ ID NO: 62322 - DNA, 120 bp, Homo sapiens
  misc_feature: 1208 for SV(W|O) and mtDNA
ataggggattgtgcggtgtgtgatgctagggtagaatccgagtatgttggagaaataaaatgtgcatagtggggattttattttaagtttgttggttaggtagttgaggtctagggctgt

SEQ ID NO: 62323 - DNA, 120 bp, Homo sapiens
  misc_feature: 1208 for SV(W|O) and mtDNA
agggtcataaagcctaaatagcccacacgttccccttaaataagacatcacgatggatcacaggtctatcaccctattaaccactcacgggagctctccatgcatttggtattttcgtct

SEQ ID NO: 62324 - DNA, 120 bp, Homo sapiens
  misc_feature: 1207 for SV(W|O) and mtDNA
ttagagtttggattagtgggctattttctgctagggggtggaagcggatgagtaagaagattcctgctacaactatagtgcttgagtggagtagggctgagactggggtggggccttcta

SEQ ID NO: 62325 - DNA, 120 bp, Homo sapiens
  misc_feature: 1207 for SV(W|O) and mtDNA
tcacgaaaaaaactctacctctctatactaatctccctacaaatctccttaattataacattcacagccacagaactaatcatattttatatcttcttcgaaaccacacttatccccacc

SEQ ID NO: 62326 - DNA, 120 bp, Homo sapiens
  misc_feature: 1207 for SV(W|O) and mtDNA
atggggtggtggttgtggtaaactttaatagtgtaggaagctgaataatttatgaaggagaggggtcagggttgattcgggaggatcctattggtgcgggggctttgtatgattatgggc

SEQ ID NO: 62327 - DNA, 120 bp, Homo sapiens
  misc_feature: 1206 for SV(W|O) and mtDNA
tgttagagtttggattagtgggctattttctgctagggggtggaagcggatgagtaagaagattcctgctacaactatagtgcttgagtggagtagggctgagactggggtggggccttc

SEQ ID NO: 62328 - DNA, 120 bp, Homo sapiens
  misc_feature: 1206 for SV(W|O) and mtDNA
tgtatgggatggcggatagtaagtttgtaattactgtggcccctcagaatgatatttggcctcacgggaggacatagcctatgaaggctgttgctatagttgcaagcaggaggataatgc

SEQ ID NO: 62329 - DNA, 120 bp, Homo sapiens
  misc_feature: 1206 for SV(W|O) and mtDNA
gttagcggtgtggtcgggtgtgttattattctgaattttgggggaggttatatgggtttaatagtttttttaatttatttagggggaatgatggttgtctttggatatactacagcgatg

SEQ ID NO: 62330 - DNA, 120 bp, Homo sapiens
  misc_feature: 1206 for SV(W|O) and mtDNA
aaatcagagaaaaagtctttaactccaccattagcacccaaagctaagattctaatttaaactattctctattctttcatggggaagcagatttgggtaccacccaagtattgactcacc

SEQ ID NO: 62331 - DNA, 120 bp, Homo sapiens
  misc_feature: 1205 for SV(W|O) and mtDNA
tgatggggtggtggttgtggtaaactttaatagtgtaggaagctgaataatttatgaaggagaggggtcagggttgattcgggaggatcctattggtgcgggggctttgtatgattatgg

SEQ ID NO: 62332 - DNA, 120 bp, Homo sapiens
  misc_feature: 1205 for SV(W|O) and mtDNA
tcactttcctaggacttctaacagccctagacctcaactacctaaccaacaaacttaaaataaaatccccactatgcacattttatttctccaacatactcggattctaccctagcatca

SEQ ID NO: 62333 - DNA, 120 bp, Homo sapiens
  misc_feature: 1205 for SV(W|O) and mtDNA
tcgatacgggataatcctatttattacctcagaagtttttttcttcgcaggatttttctgagccttttaccactccagcctagcccctaccccccaattaggagggcactggcccccaac

SEQ ID NO: 62334 - DNA, 120 bp, Homo sapiens
  misc_feature: 1205 for SV(W|O) and mtDNA
ctcacagccctcgctgtcactttcctaggacttctaacagccctagacctcaactacctaaccaacaaacttaaaataaaatccccactatgcacattttatttctccaacatactcgga

SEQ ID NO: 62335 - DNA, 120 bp, Homo sapiens
  misc_feature: 1205 for SV(W|O) and mtDNA
aaccactatcacgaaaaaaactctacctctctatactaatctccctacaaatctccttaattataacattcacagccacagaactaatcatattttatatcttcttcgaaaccacactta

SEQ ID NO: 62336 - DNA, 120 bp, Homo sapiens
  misc_feature: 1205 for SV(W|O) and mtDNA
gttcagacggtttctatttcctgagcgtctgagatgttagtattagttagttttgttgtgagtgttaggaaaagggcatacaggactaggaagcagataaggaaaatgattatgagggcg

SEQ ID NO: 62337 - DNA, 120 bp, Homo sapiens
  misc_feature: 1205 for SV(W|O) and mtDNA
gtaccgtacaatattcatggtggctggcagtaatgtacgaaatacatagcggttgttgatgggtgagtcaatacttgggtggtacccaaatctgcttccccatgaaagaatagagaatag

SEQ ID NO: 62338 - DNA, 120 bp, Homo sapiens
  misc_feature: 1205 for SV(W|O) and mtDNA
ggtggtggttgtggtaaactttaatagtgtaggaagctgaataatttatgaaggagaggggtcagggttgattcgggaggatcctattggtgcgggggctttgtatgattatgggcgttg

SEQ ID NO: 62339 - DNA, 120 bp, Homo sapiens
  misc_feature: 1205 for SV(W|O) and mtDNA
attgttagcggtgtggtcgggtgtgttattattctgaattttgggggaggttatatgggtttaatagtttttttaatttatttagggggaatgatggttgtctttggatatactacagcg

SEQ ID NO: 62340 - DNA, 120 bp, Homo sapiens
  misc_feature: 1205 for SV(W|O) and mtDNA
cgaaaaaaactctacctctctatactaatctccctacaaatctccttaattataacattcacagccacagaactaatcatattttatatcttcttcgaaaccacacttatccccaccttg

SEQ ID NO: 62341 - DNA, 120 bp, Homo sapiens
  misc_feature: 1205 for SV(W|O) and mtDNA
agagtttggattagtgggctattttctgctagggggtggaagcggatgagtaagaagattcctgctacaactatagtgcttgagtggagtagggctgagactggggtggggccttctatg

SEQ ID NO: 62342 - DNA, 120 bp, Homo sapiens
  misc_feature: 1205 for SV(W|O) and mtDNA
attgtgcggtgtgtgatgctagggtagaatccgagtatgttggagaaataaaatgtgcatagtggggattttattttaagtttgttggttaggtagttgaggtctagggctgttagaagt

SEQ ID NO: 62343 - DNA, 120 bp, Homo sapiens
  misc_feature: 1205 for SV(W|O) and mtDNA
aaagacagatactgcgacatagggtgctccggctccagcgtctcgcaatgctatcgcgtgcataccccccagacgaaaataccaaatgcatggagagctcccgtgagtggttaatagggt

SEQ ID NO: 62344 - DNA, 120 bp, Homo sapiens
  misc_feature: 1204 for SV(W|O) and mtDNA
ttgtgcggtgtgtgatgctagggtagaatccgagtatgttggagaaataaaatgtgcatagtggggattttattttaagtttgttggttaggtagttgaggtctagggctgttagaagtc

SEQ ID NO: 62345 - DNA, 120 bp, Homo sapiens
  misc_feature: 1204 for SV(W|O) and mtDNA
ttcagacggtttctatttcctgagcgtctgagatgttagtattagttagttttgttgtgagtgttaggaaaagggcatacaggactaggaagcagataaggaaaatgattatgagggcgt

SEQ ID NO: 62346 - DNA, 120 bp, Homo sapiens
  misc_feature: 1204 for SV(W|O) and mtDNA
ggggtggtggttgtggtaaactttaatagtgtaggaagctgaataatttatgaaggagaggggtcagggttgattcgggaggatcctattggtgcgggggctttgtatgattatgggcgt

SEQ ID NO: 62347 - DNA, 120 bp, Homo sapiens
  misc_feature: 1204 for SV(W|O) and mtDNA
gatggtagagtagatgacgggttgggccaggggattaattagtacgggaagggtataaccaacattttcggggtatgggcccgatagcttatttagctgaccttactttaggatggggtg

SEQ ID NO: 62348 - DNA, 120 bp, Homo sapiens
  misc_feature: 1204 for SV(W|O) and mtDNA
cgcctgaacgcaggcacatacttcctattctacaccctagtaggctcccttcccctactcatcgcactaatttacactcacaacaccctaggctcactaaacattctactactcactctc

SEQ ID NO: 62349 - DNA, 120 bp, Homo sapiens
  misc_feature: 1204 for SV(W|O) and mtDNA
actcacagccctcgctgtcactttcctaggacttctaacagccctagacctcaactacctaaccaacaaacttaaaataaaatccccactatgcacattttatttctccaacatactcgg

SEQ ID NO: 62350 - DNA, 120 bp, Homo sapiens
  misc_feature: 1203 for SV(W|O) and mtDNA
ttaaaaggttaatgctaagttagctttacagtgggctctagagggggtagagggggtgctatagggtaaatacgggccctatttcaaagatttttaggggaattaattctaggacgatgg

SEQ ID NO: 62351 - DNA, 120 bp, Homo sapiens
  misc_feature: 1203 for SV(W|O) and mtDNA
gtggtggttgtggtaaactttaatagtgtaggaagctgaataatttatgaaggagaggggtcagggttgattcgggaggatcctattggtgcgggggctttgtatgattatgggcgttga

SEQ ID NO: 62352 - DNA, 120 bp, Homo sapiens
  misc_feature: 1203 for SV(W|O) and mtDNA
tagagtttggattagtgggctattttctgctagggggtggaagcggatgagtaagaagattcctgctacaactatagtgcttgagtggagtagggctgagactggggtggggccttctat

SEQ ID NO: 62353 - DNA, 120 bp, Homo sapiens
  misc_feature: 1203 for SV(W|O) and mtDNA
aggggattgtgcggtgtgtgatgctagggtagaatccgagtatgttggagaaataaaatgtgcatagtggggattttattttaagtttgttggttaggtagttgaggtctagggctgtta

SEQ ID NO: 62354 - DNA, 120 bp, Homo sapiens
  misc_feature: 1203 for SV(W|O) and mtDNA
atactgcgacatagggtgctccggctccagcgtctcgcaatgctatcgcgtgcataccccccagacgaaaataccaaatgcatggagagctcccgtgagtggttaatagggtgatagacc

SEQ ID NO: 62355 - DNA, 120 bp, Homo sapiens
  misc_feature: 1202 for SV(W|O) and mtDNA
tggtagagtagatgacgggttgggccaggggattaattagtacgggaagggtataaccaacattttcggggtatgggcccgatagcttatttagctgaccttactttaggatggggtgtg

SEQ ID NO: 62356 - DNA, 120 bp, Homo sapiens
  misc_feature: 1202 for SV(W|O) and mtDNA
taaaaggttaatgctaagttagctttacagtgggctctagagggggtagagggggtgctatagggtaaatacgggccctatttcaaagatttttaggggaattaattctaggacgatggg

SEQ ID NO: 62357 - DNA, 120 bp, Homo sapiens
  misc_feature: 1202 for SV(W|O) and mtDNA
cactttcctaggacttctaacagccctagacctcaactacctaaccaacaaacttaaaataaaatccccactatgcacattttatttctccaacatactcggattctaccctagcatcac

SEQ ID NO: 62358 - DNA, 120 bp, Homo sapiens
  misc_feature: 1202 for SV(W|O) and mtDNA
cctgaacgcaggcacatacttcctattctacaccctagtaggctcccttcccctactcatcgcactaatttacactcacaacaccctaggctcactaaacattctactactcactctcac

SEQ ID NO: 62359 - DNA, 120 bp, Homo sapiens
  misc_feature: 1202 for SV(W|O) and mtDNA
gtatgggatggcggatagtaagtttgtaattactgtggcccctcagaatgatatttggcctcacgggaggacatagcctatgaaggctgttgctatagttgcaagcaggaggataatgcc

SEQ ID NO: 62360 - DNA, 120 bp, Homo sapiens
  misc_feature: 1202 for SV(W|O) and mtDNA
ggactccccttcggcaaggtcgaagggggttcggttggtctctgctagtgtggagataaatcatattatggccaagggtcatgatggcaggagtaatcagaggtgttcttgtgttgtgat

SEQ ID NO: 62361 - DNA, 120 bp, Homo sapiens
  misc_feature: 1202 for SV(W|O) and mtDNA
gcctgcaaagatggtagagtagatgacgggttgggccaggggattaattagtacgggaagggtataaccaacattttcggggtatgggcccgatagcttatttagctgaccttactttag

SEQ ID NO: 62362 - DNA, 120 bp, Homo sapiens
  misc_feature: 1202 for SV(W|O) and mtDNA
acttcagggtcataaagcctaaatagcccacacgttccccttaaataagacatcacgatggatcacaggtctatcaccctattaaccactcacgggagctctccatgcatttggtatttt

SEQ ID NO: 62363 - DNA, 120 bp, Homo sapiens
  misc_feature: 1201 for SV(W|O) and mtDNA
gggattgtgcggtgtgtgatgctagggtagaatccgagtatgttggagaaataaaatgtgcatagtggggattttattttaagtttgttggttaggtagttgaggtctagggctgttaga

SEQ ID NO: 62364 - DNA, 120 bp, Homo sapiens
  misc_feature: 1201 for SV(W|O) and mtDNA
ctaatacaccagtcttgtaaaccggagatgaaaacctttttccaaggacaaatcagagaaaaagtctttaactccaccattagcacccaaagctaagattctaatttaaactattctcta

SEQ ID NO: 62365 - DNA, 120 bp, Homo sapiens
  misc_feature: 1201 for SV(W|O) and mtDNA
gcctagataggggattgtgcggtgtgtgatgctagggtagaatccgagtatgttggagaaataaaatgtgcatagtggggattttattttaagtttgttggttaggtagttgaggtctag

SEQ ID NO: 62366 - DNA, 120 bp, Homo sapiens
  misc_feature: 1201 for SV(W|O) and mtDNA
atcatacaaagcccccgcaccaataggatcctcccgaatcaaccctgacccctctccttcataaattattcagcttcctacactattaaagtttaccacaaccaccaccccatcatactc

SEQ ID NO: 62367 - DNA, 120 bp, Homo sapiens
  misc_feature: 1200 for SV(W|O) and mtDNA
gggccaggggattaattagtacgggaagggtataaccaacattttcggggtatgggcccgatagcttatttagctgaccttactttaggatggggtgtgataggtggcacggagaatttt

SEQ ID NO: 62368 - DNA, 120 bp, Homo sapiens
  misc_feature: 1200 for SV(W|O) and mtDNA
gcctaaatagcccacacgttccccttaaataagacatcacgatggatcacaggtctatcaccctattaaccactcacgggagctctccatgcatttggtattttcgtctggggggtatgc

SEQ ID NO: 62369 - DNA, 120 bp, Homo sapiens
  misc_feature: 1200 for SV(W|O) and mtDNA
aaaaggttaatgctaagttagctttacagtgggctctagagggggtagagggggtgctatagggtaaatacgggccctatttcaaagatttttaggggaattaattctaggacgatgggc

SEQ ID NO: 62370 - DNA, 120 bp, Homo sapiens
  misc_feature: 1200 for SV(W|O) and mtDNA
agaattgtgtaggcgaataggaaatatcattcgggcttgatgtggggaggggtgtttaaggggttggctagggtataattgtctgggtcgcctaggaggtctggtgagaatagtgttaat

SEQ ID NO: 62371 - DNA, 120 bp, Homo sapiens
  misc_feature: 1200 for SV(W|O) and mtDNA
accactatcacgaaaaaaactctacctctctatactaatctccctacaaatctccttaattataacattcacagccacagaactaatcatattttatatcttcttcgaaaccacacttat

SEQ ID NO: 62372 - DNA, 120 bp, Homo sapiens
  misc_feature: 1199 for SV(W|O) and mtDNA
gactccccttcggcaaggtcgaagggggttcggttggtctctgctagtgtggagataaatcatattatggccaagggtcatgatggcaggagtaatcagaggtgttcttgtgttgtgata

SEQ ID NO: 62373 - DNA, 120 bp, Homo sapiens
  misc_feature: 1199 for SV(W|O) and mtDNA
ccttcataaattattcagcttcctacactattaaagtttaccacaaccaccaccccatcatactctttcacccacagcaccaatcctacctccatcgctaaccccactaaaacactcacc

SEQ ID NO: 62374 - DNA, 120 bp, Homo sapiens
  misc_feature: 1199 for SV(W|O) and mtDNA
gattgtgcggtgtgtgatgctagggtagaatccgagtatgttggagaaataaaatgtgcatagtggggattttattttaagtttgttggttaggtagttgaggtctagggctgttagaag

SEQ ID NO: 62375 - DNA, 120 bp, Homo sapiens
  misc_feature: 1199 for SV(W|O) and mtDNA
ccactatcacgaaaaaaactctacctctctatactaatctccctacaaatctccttaattataacattcacagccacagaactaatcatattttatatcttcttcgaaaccacacttatc

SEQ ID NO: 62376 - DNA, 120 bp, Homo sapiens
  misc_feature: 1199 for SV(W|O) and mtDNA
cgggttgggccaggggattaattagtacgggaagggtataaccaacattttcggggtatgggcccgatagcttatttagctgaccttactttaggatggggtgtgataggtggcacggag

SEQ ID NO: 62377 - DNA, 120 bp, Homo sapiens
  misc_feature: 1199 for SV(W|O) and mtDNA
atacgggataatcctatttattacctcagaagtttttttcttcgcaggatttttctgagccttttaccactccagcctagcccctaccccccaattaggagggcactggcccccaacagg

SEQ ID NO: 62378 - DNA, 120 bp, Homo sapiens
  misc_feature: 1198 for SV(W|O) and mtDNA
ttggtgtatatattgtaattgagattgctcgggggaataggttatgtgattaggagtagggttaggatgagtgggaagaagaaagagaggaagtaaagtttaattatgcctttttgggtt

SEQ ID NO: 62379 - DNA, 120 bp, Homo sapiens
  misc_feature: 1198 for SV(W|O) and mtDNA
aggccttcgatacgggataatcctatttattacctcagaagtttttttcttcgcaggatttttctgagccttttaccactccagcctagcccctaccccccaattaggagggcactggcc

SEQ ID NO: 62380 - DNA, 120 bp, Homo sapiens
  misc_feature: 1198 for SV(W|O) and mtDNA
agagtagatgacgggttgggccaggggattaattagtacgggaagggtataaccaacattttcggggtatgggcccgatagcttatttagctgaccttactttaggatggggtgtgatag

SEQ ID NO: 62381 - DNA, 120 bp, Homo sapiens
  misc_feature: 1198 for SV(W|O) and mtDNA
agacggtttctatttcctgagcgtctgagatgttagtattagttagttttgttgtgagtgttaggaaaagggcatacaggactaggaagcagataaggaaaatgattatgagggcgtgat

SEQ ID NO: 62382 - DNA, 120 bp, Homo sapiens
  misc_feature: 1197 for SV(W|O) and mtDNA
acgggttgggccaggggattaattagtacgggaagggtataaccaacattttcggggtatgggcccgatagcttatttagctgaccttactttaggatggggtgtgataggtggcacgga

SEQ ID NO: 62383 - DNA, 120 bp, Homo sapiens
  misc_feature: 1197 for SV(W|O) and mtDNA
tcacagccctcgctgtcactttcctaggacttctaacagccctagacctcaactacctaaccaacaaacttaaaataaaatccccactatgcacattttatttctccaacatactcggat

SEQ ID NO: 62384 - DNA, 120 bp, Homo sapiens
  misc_feature: 1197 for SV(W|O) and mtDNA
gtgcggtgtgtgatgctagggtagaatccgagtatgttggagaaataaaatgtgcatagtggggattttattttaagtttgttggttaggtagttgaggtctagggctgttagaagtcct

SEQ ID NO: 62385 - DNA, 120 bp, Homo sapiens
  misc_feature: 1196 for SV(W|O) and mtDNA
atagccaccatcaccctccttaacctctacttctacctacgcctaatctactccacctcaatcacactactccccatatctaacaacgtaaaaataaaatgacagtttgaacatacaaaa

SEQ ID NO: 62386 - DNA, 120 bp, Homo sapiens
  misc_feature: 1196 for SV(W|O) and mtDNA
tttagcggggtgatgcctgttgggggccagtgccctcctaattggggggtaggggctaggctggagtggtaaaaggctcagaaaaatcctgcgaagaaaaaaacttctgaggtaataaat

SEQ ID NO: 62387 - DNA, 120 bp, Homo sapiens
  misc_feature: 1196 for SV(W|O) and mtDNA
gatgacgggttgggccaggggattaattagtacgggaagggtataaccaacattttcggggtatgggcccgatagcttatttagctgaccttactttaggatggggtgtgataggtggca

SEQ ID NO: 62388 - DNA, 120 bp, Homo sapiens
  misc_feature: 1196 for SV(W|O) and mtDNA
cagacggtttctatttcctgagcgtctgagatgttagtattagttagttttgttgtgagtgttaggaaaagggcatacaggactaggaagcagataaggaaaatgattatgagggcgtga

SEQ ID NO: 62389 - DNA, 120 bp, Homo sapiens
  misc_feature: 1196 for SV(W|O) and mtDNA
tagagtagatgacgggttgggccaggggattaattagtacgggaagggtataaccaacattttcggggtatgggcccgatagcttatttagctgaccttactttaggatggggtgtgata

SEQ ID NO: 62390 - DNA, 120 bp, Homo sapiens
  misc_feature: 1196 for SV(W|O) and mtDNA
tagcggggtgatgcctgttgggggccagtgccctcctaattggggggtaggggctaggctggagtggtaaaaggctcagaaaaatcctgcgaagaaaaaaacttctgaggtaataaatag

SEQ ID NO: 62391 - DNA, 120 bp, Homo sapiens
  misc_feature: 1196 for SV(W|O) and mtDNA
ggcctagataggggattgtgcggtgtgtgatgctagggtagaatccgagtatgttggagaaataaaatgtgcatagtggggattttattttaagtttgttggttaggtagttgaggtcta

SEQ ID NO: 62392 - DNA, 120 bp, Homo sapiens
  misc_feature: 1196 for SV(W|O) and mtDNA
cagggtcataaagcctaaatagcccacacgttccccttaaataagacatcacgatggatcacaggtctatcaccctattaaccactcacgggagctctccatgcatttggtattttcgtc

SEQ ID NO: 62393 - DNA, 120 bp, Homo sapiens
  misc_feature: 1195 for SV(W|O) and mtDNA
gggttgggccaggggattaattagtacgggaagggtataaccaacattttcggggtatgggcccgatagcttatttagctgaccttactttaggatggggtgtgataggtggcacggaga

SEQ ID NO: 62394 - DNA, 120 bp, Homo sapiens
  misc_feature: 1195 for SV(W|O) and mtDNA
gttagggacggatcggagaattgtgtaggcgaataggaaatatcattcgggcttgatgtggggaggggtgtttaaggggttggctagggtataattgtctgggtcgcctaggaggtctgg

SEQ ID NO: 62395 - DNA, 120 bp, Homo sapiens
  misc_feature: 1195 for SV(W|O) and mtDNA
caaagatggtagagtagatgacgggttgggccaggggattaattagtacgggaagggtataaccaacattttcggggtatgggcccgatagcttatttagctgaccttactttaggatgg

SEQ ID NO: 62396 - DNA, 120 bp, Homo sapiens
  misc_feature: 1195 for SV(W|O) and mtDNA
atagggtgctccggctccagcgtctcgcaatgctatcgcgtgcataccccccagacgaaaataccaaatgcatggagagctcccgtgagtggttaatagggtgatagacctgtgatccat

SEQ ID NO: 62397 - DNA, 120 bp, Homo sapiens
  misc_feature: 1195 for SV(W|O) and mtDNA
accgtacaatattcatggtggctggcagtaatgtacgaaatacatagcggttgttgatgggtgagtcaatacttgggtggtacccaaatctgcttccccatgaaagaatagagaatagtt

SEQ ID NO: 62398 - DNA, 120 bp, Homo sapiens
  misc_feature: 1194 for SV(W|O) and mtDNA
cgatacgggataatcctatttattacctcagaagtttttttcttcgcaggatttttctgagccttttaccactccagcctagcccctaccccccaattaggagggcactggcccccaaca

SEQ ID NO: 62399 - DNA, 120 bp, Homo sapiens
  misc_feature: 1194 for SV(W|O) and mtDNA
tgggccaggggattaattagtacgggaagggtataaccaacattttcggggtatgggcccgatagcttatttagctgaccttactttaggatggggtgtgataggtggcacggagaattt

SEQ ID NO: 62400 - DNA, 120 bp, Homo sapiens
  misc_feature: 1194 for SV(W|O) and mtDNA
tactgcgacatagggtgctccggctccagcgtctcgcaatgctatcgcgtgcataccccccagacgaaaataccaaatgcatggagagctcccgtgagtggttaatagggtgatagacct

SEQ ID NO: 62401 - DNA, 120 bp, Homo sapiens
  misc_feature: 1194 for SV(W|O) and mtDNA
acttctacctacgcctaatctactccacctcaatcacactactccccatatctaacaacgtaaaaataaaatgacagtttgaacatacaaaacccaccccattcctccccacactcatcg

SEQ ID NO: 62402 - DNA, 120 bp, Homo sapiens
  misc_feature: 1194 for SV(W|O) and mtDNA
ccgtacaatattcatggtggctggcagtaatgtacgaaatacatagcggttgttgatgggtgagtcaatacttgggtggtacccaaatctgcttccccatgaaagaatagagaatagttt

SEQ ID NO: 62403 - DNA, 120 bp, Homo sapiens
  misc_feature: 1194 for SV(W|O) and mtDNA
atggtagagtagatgacgggttgggccaggggattaattagtacgggaagggtataaccaacattttcggggtatgggcccgatagcttatttagctgaccttactttaggatggggtgt

SEQ ID NO: 62404 - DNA, 120 bp, Homo sapiens
  misc_feature: 1194 for SV(W|O) and mtDNA
agtatgatggggtggtggttgtggtaaactttaatagtgtaggaagctgaataatttatgaaggagaggggtcagggttgattcgggaggatcctattggtgcgggggctttgtatgatt

SEQ ID NO: 62405 - DNA, 120 bp, Homo sapiens
  misc_feature: 1193 for SV(W|O) and mtDNA
ttagcggggtgatgcctgttgggggccagtgccctcctaattggggggtaggggctaggctggagtggtaaaaggctcagaaaaatcctgcgaagaaaaaaacttctgaggtaataaata

SEQ ID NO: 62406 - DNA, 120 bp, Homo sapiens
  misc_feature: 1193 for SV(W|O) and mtDNA
tgtcactttcctaggacttctaacagccctagacctcaactacctaaccaacaaacttaaaataaaatccccactatgcacattttatttctccaacatactcggattctaccctagcat

SEQ ID NO: 62407 - DNA, 120 bp, Homo sapiens
  misc_feature: 1193 for SV(W|O) and mtDNA
gacgggttgggccaggggattaattagtacgggaagggtataaccaacattttcggggtatgggcccgatagcttatttagctgaccttactttaggatggggtgtgataggtggcacgg

SEQ ID NO: 62408 - DNA, 120 bp, Homo sapiens
  misc_feature: 1192 for SV(W|O) and mtDNA
ggattgtgcggtgtgtgatgctagggtagaatccgagtatgttggagaaataaaatgtgcatagtggggattttattttaagtttgttggttaggtagttgaggtctagggctgttagaa

SEQ ID NO: 62409 - DNA, 120 bp, Homo sapiens
  misc_feature: 1192 for SV(W|O) and mtDNA
gatacgggataatcctatttattacctcagaagtttttttcttcgcaggatttttctgagccttttaccactccagcctagcccctaccccccaattaggagggcactggcccccaacag

SEQ ID NO: 62410 - DNA, 120 bp, Homo sapiens
  misc_feature: 1192 for SV(W|O) and mtDNA
cctgcaaagatggtagagtagatgacgggttgggccaggggattaattagtacgggaagggtataaccaacattttcggggtatgggcccgatagcttatttagctgaccttactttagg

SEQ ID NO: 62411 - DNA, 120 bp, Homo sapiens
  misc_feature: 1192 for SV(W|O) and mtDNA
aattgtgtaggcgaataggaaatatcattcgggcttgatgtggggaggggtgtttaaggggttggctagggtataattgtctgggtcgcctaggaggtctggtgagaatagtgttaatgt

SEQ ID NO: 62412 - DNA, 120 bp, Homo sapiens
  misc_feature: 1191 for SV(W|O) and mtDNA
ttattacctcagaagtttttttcttcgcaggatttttctgagccttttaccactccagcctagcccctaccccccaattaggagggcactggcccccaacaggcatcaccccgctaaatc

SEQ ID NO: 62413 - DNA, 120 bp, Homo sapiens
  misc_feature: 1191 for SV(W|O) and mtDNA
agcctaaatagcccacacgttccccttaaataagacatcacgatggatcacaggtctatcaccctattaaccactcacgggagctctccatgcatttggtattttcgtctggggggtatg

SEQ ID NO: 62414 - DNA, 120 bp, Homo sapiens
  misc_feature: 1191 for SV(W|O) and mtDNA
attgtaattgagattgctcgggggaataggttatgtgattaggagtagggttaggatgagtgggaagaagaaagagaggaagtaaagtttaattatgcctttttgggttgaggtgatgat

SEQ ID NO: 62415 - DNA, 120 bp, Homo sapiens
  misc_feature: 1190 for SV(W|O) and mtDNA
tttattacctcagaagtttttttcttcgcaggatttttctgagccttttaccactccagcctagcccctaccccccaattaggagggcactggcccccaacaggcatcaccccgctaaat

SEQ ID NO: 62416 - DNA, 120 bp, Homo sapiens
  misc_feature: 1190 for SV(W|O) and mtDNA
catagggtgctccggctccagcgtctcgcaatgctatcgcgtgcataccccccagacgaaaataccaaatgcatggagagctcccgtgagtggttaatagggtgatagacctgtgatcca

SEQ ID NO: 62417 - DNA, 120 bp, Homo sapiens
  misc_feature: 1190 for SV(W|O) and mtDNA
gtatgatggggtggtggttgtggtaaactttaatagtgtaggaagctgaataatttatgaaggagaggggtcagggttgattcgggaggatcctattggtgcgggggctttgtatgatta

SEQ ID NO: 62418 - DNA, 120 bp, Homo sapiens
  misc_feature: 1190 for SV(W|O) and mtDNA
gggtggtggttgtggtaaactttaatagtgtaggaagctgaataatttatgaaggagaggggtcagggttgattcgggaggatcctattggtgcgggggctttgtatgattatgggcgtt

SEQ ID NO: 62419 - DNA, 120 bp, Homo sapiens
  misc_feature: 1190 for SV(W|O) and mtDNA
ggggattgtgcggtgtgtgatgctagggtagaatccgagtatgttggagaaataaaatgtgcatagtggggattttattttaagtttgttggttaggtagttgaggtctagggctgttag

SEQ ID NO: 62420 - DNA, 120 bp, Homo sapiens
  misc_feature: 1190 for SV(W|O) and mtDNA
gagtttggattagtgggctattttctgctagggggtggaagcggatgagtaagaagattcctgctacaactatagtgcttgagtggagtagggctgagactggggtggggccttctatgg

SEQ ID NO: 62421 - DNA, 120 bp, Homo sapiens
  misc_feature: 1190 for SV(W|O) and mtDNA
ctagataggggattgtgcggtgtgtgatgctagggtagaatccgagtatgttggagaaataaaatgtgcatagtggggattttattttaagtttgttggttaggtagttgaggtctaggg

SEQ ID NO: 62422 - DNA, 120 bp, Homo sapiens
  misc_feature: 1189 for SV(W|O) and mtDNA
ttgtaattgagattgctcgggggaataggttatgtgattaggagtagggttaggatgagtgggaagaagaaagagaggaagtaaagtttaattatgcctttttgggttgaggtgatgatg

SEQ ID NO: 62423 - DNA, 120 bp, Homo sapiens
  misc_feature: 1189 for SV(W|O) and mtDNA
ggtgtggtcgggtgtgttattattctgaattttgggggaggttatatgggtttaatagtttttttaatttatttagggggaatgatggttgtctttggatatactacagcgatggctatt

SEQ ID NO: 62424 - DNA, 120 bp, Homo sapiens
  misc_feature: 1189 for SV(W|O) and mtDNA
cccaaagctaagattctaatttaaactattctctattctttcatggggaagcagatttgggtaccacccaagtattgactcacccatcaacaaccgctatgtatttcgtacattactgcc

SEQ ID NO: 62425 - DNA, 120 bp, Homo sapiens
  misc_feature: 1189 for SV(W|O) and mtDNA
cctagataggggattgtgcggtgtgtgatgctagggtagaatccgagtatgttggagaaataaaatgtgcatagtggggattttattttaagtttgttggttaggtagttgaggtctagg

SEQ ID NO: 62426 - DNA, 120 bp, Homo sapiens
  misc_feature: 1188 for SV(W|O) and mtDNA
gtacaatattcatggtggctggcagtaatgtacgaaatacatagcggttgttgatgggtgagtcaatacttgggtggtacccaaatctgcttccccatgaaagaatagagaatagtttaa

SEQ ID NO: 62427 - DNA, 120 bp, Homo sapiens
  misc_feature: 1188 for SV(W|O) and mtDNA
taatacaccagtcttgtaaaccggagatgaaaacctttttccaaggacaaatcagagaaaaagtctttaactccaccattagcacccaaagctaagattctaatttaaactattctctat

SEQ ID NO: 62428 - DNA, 120 bp, Homo sapiens
  misc_feature: 1188 for SV(W|O) and mtDNA
gtggctggcagtaatgtacgaaatacatagcggttgttgatgggtgagtcaatacttgggtggtacccaaatctgcttccccatgaaagaatagagaatagtttaaattagaatcttagc

SEQ ID NO: 62429 - DNA, 120 bp, Homo sapiens
  misc_feature: 1188 for SV(W|O) and mtDNA
gagtagatgacgggttgggccaggggattaattagtacgggaagggtataaccaacattttcggggtatgggcccgatagcttatttagctgaccttactttaggatggggtgtgatagg

SEQ ID NO: 62430 - DNA, 120 bp, Homo sapiens
  misc_feature: 1188 for SV(W|O) and mtDNA
attgtgtaggcgaataggaaatatcattcgggcttgatgtggggaggggtgtttaaggggttggctagggtataattgtctgggtcgcctaggaggtctggtgagaatagtgttaatgtc

SEQ ID NO: 62431 - DNA, 120 bp, Homo sapiens
  misc_feature: 1188 for SV(W|O) and mtDNA
cttaaaaggttaatgctaagttagctttacagtgggctctagagggggtagagggggtgctatagggtaaatacgggccctatttcaaagatttttaggggaattaattctaggacgatg

SEQ ID NO: 62432 - DNA, 120 bp, Homo sapiens
  misc_feature: 1187 for SV(W|O) and mtDNA
tgacgggttgggccaggggattaattagtacgggaagggtataaccaacattttcggggtatgggcccgatagcttatttagctgaccttactttaggatggggtgtgataggtggcacg

SEQ ID NO: 62433 - DNA, 120 bp, Homo sapiens
  misc_feature: 1186 for SV(W|O) and mtDNA
ggttgggccaggggattaattagtacgggaagggtataaccaacattttcggggtatgggcccgatagcttatttagctgaccttactttaggatggggtgtgataggtggcacggagaa

SEQ ID NO: 62434 - DNA, 120 bp, Homo sapiens
  misc_feature: 1186 for SV(W|O) and mtDNA
gagaattgtgtaggcgaataggaaatatcattcgggcttgatgtggggaggggtgtttaaggggttggctagggtataattgtctgggtcgcctaggaggtctggtgagaatagtgttaa

SEQ ID NO: 62435 - DNA, 120 bp, Homo sapiens
  misc_feature: 1186 for SV(W|O) and mtDNA
tgcaaagatggtagagtagatgacgggttgggccaggggattaattagtacgggaagggtataaccaacattttcggggtatgggcccgatagcttatttagctgaccttactttaggat

SEQ ID NO: 62436 - DNA, 120 bp, Homo sapiens
  misc_feature: 1186 for SV(W|O) and mtDNA
tcccgtgaggccaaatatcattctgaggggccacagtaattacaaacttactatccgccatcccatacattgggacagacctagttcaatgaatctgaggaggctactcagtagacagtc

SEQ ID NO: 62437 - DNA, 120 bp, Homo sapiens
  misc_feature: 1186 for SV(W|O) and mtDNA
atgacgggttgggccaggggattaattagtacgggaagggtataaccaacattttcggggtatgggcccgatagcttatttagctgaccttactttaggatggggtgtgataggtggcac

SEQ ID NO: 62438 - DNA, 120 bp, Homo sapiens
  misc_feature: 1186 for SV(W|O) and mtDNA
acccaaagctaagattctaatttaaactattctctattctttcatggggaagcagatttgggtaccacccaagtattgactcacccatcaacaaccgctatgtatttcgtacattactgc

SEQ ID NO: 62439 - DNA, 120 bp, Homo sapiens
  misc_feature: 1186 for SV(W|O) and mtDNA
gcaaagatggtagagtagatgacgggttgggccaggggattaattagtacgggaagggtataaccaacattttcggggtatgggcccgatagcttatttagctgaccttactttaggatg

SEQ ID NO: 62440 - DNA, 120 bp, Homo sapiens
  misc_feature: 1186 for SV(W|O) and mtDNA
cttcagggtcataaagcctaaatagcccacacgttccccttaaataagacatcacgatggatcacaggtctatcaccctattaaccactcacgggagctctccatgcatttggtattttc

SEQ ID NO: 62441 - DNA, 120 bp, Homo sapiens
  misc_feature: 1185 for SV(W|O) and mtDNA
ttgtgtaggcgaataggaaatatcattcgggcttgatgtggggaggggtgtttaaggggttggctagggtataattgtctgggtcgcctaggaggtctggtgagaatagtgttaatgtca

SEQ ID NO: 62442 - DNA, 120 bp, Homo sapiens
  misc_feature: 1185 for SV(W|O) and mtDNA
agggacggatcggagaattgtgtaggcgaataggaaatatcattcgggcttgatgtggggaggggtgtttaaggggttggctagggtataattgtctgggtcgcctaggaggtctggtga

SEQ ID NO: 62443 - DNA, 120 bp, Homo sapiens
  misc_feature: 1185 for SV(W|O) and mtDNA
cgtacaatattcatggtggctggcagtaatgtacgaaatacatagcggttgttgatgggtgagtcaatacttgggtggtacccaaatctgcttccccatgaaagaatagagaatagttta

SEQ ID NO: 62444 - DNA, 120 bp, Homo sapiens
  misc_feature: 1185 for SV(W|O) and mtDNA
gggtcataaagcctaaatagcccacacgttccccttaaataagacatcacgatggatcacaggtctatcaccctattaaccactcacgggagctctccatgcatttggtattttcgtctg

SEQ ID NO: 62445 - DNA, 120 bp, Homo sapiens
  misc_feature: 1185 for SV(W|O) and mtDNA
ggactgtctactgagtagcctcctcagattcattgaactaggtctgtcccaatgtatgggatggcggatagtaagtttgtaattactgtggcccctcagaatgatatttggcctcacggg

SEQ ID NO: 62446 - DNA, 120 bp, Homo sapiens
  misc_feature: 1185 for SV(W|O) and mtDNA
gaaaaaaactctacctctctatactaatctccctacaaatctccttaattataacattcacagccacagaactaatcatattttatatcttcttcgaaaccacacttatccccaccttgg

SEQ ID NO: 62447 - DNA, 120 bp, Homo sapiens
  misc_feature: 1184 for SV(W|O) and mtDNA
tattgtaattgagattgctcgggggaataggttatgtgattaggagtagggttaggatgagtgggaagaagaaagagaggaagtaaagtttaattatgcctttttgggttgaggtgatga

SEQ ID NO: 62448 - DNA, 120 bp, Homo sapiens
  misc_feature: 1184 for SV(W|O) and mtDNA
gtcactttcctaggacttctaacagccctagacctcaactacctaaccaacaaacttaaaataaaatccccactatgcacattttatttctccaacatactcggattctaccctagcatc

SEQ ID NO: 62449 - DNA, 120 bp, Homo sapiens
  misc_feature: 1184 for SV(W|O) and mtDNA
acatagggtgctccggctccagcgtctcgcaatgctatcgcgtgcataccccccagacgaaaataccaaatgcatggagagctcccgtgagtggttaatagggtgatagacctgtgatcc

SEQ ID NO: 62450 - DNA, 120 bp, Homo sapiens
  misc_feature: 1184 for SV(W|O) and mtDNA
caaagacagatactgcgacatagggtgctccggctccagcgtctcgcaatgctatcgcgtgcataccccccagacgaaaataccaaatgcatggagagctcccgtgagtggttaataggg

SEQ ID NO: 62451 - DNA, 120 bp, Homo sapiens
  misc_feature: 1184 for SV(W|O) and mtDNA
aaaaggccttcgatacgggataatcctatttattacctcagaagtttttttcttcgcaggatttttctgagccttttaccactccagcctagcccctaccccccaattaggagggcactg

SEQ ID NO: 62452 - DNA, 120 bp, Homo sapiens
  misc_feature: 1184 for SV(W|O) and mtDNA
cacccaaagctaagattctaatttaaactattctctattctttcatggggaagcagatttgggtaccacccaagtattgactcacccatcaacaaccgctatgtatttcgtacattactg

SEQ ID NO: 62453 - DNA, 120 bp, Homo sapiens
  misc_feature: 1183 for SV(W|O) and mtDNA
ttcagggtcataaagcctaaatagcccacacgttccccttaaataagacatcacgatggatcacaggtctatcaccctattaaccactcacgggagctctccatgcatttggtattttcg

SEQ ID NO: 62454 - DNA, 120 bp, Homo sapiens
  misc_feature: 1183 for SV(W|O) and mtDNA
ctgcaaagatggtagagtagatgacgggttgggccaggggattaattagtacgggaagggtataaccaacattttcggggtatgggcccgatagcttatttagctgaccttactttagga

SEQ ID NO: 62455 - DNA, 120 bp, Homo sapiens
  misc_feature: 1183 for SV(W|O) and mtDNA
aatcaaagacagatactgcgacatagggtgctccggctccagcgtctcgcaatgctatcgcgtgcataccccccagacgaaaataccaaatgcatggagagctcccgtgagtggttaata

SEQ ID NO: 62456 - DNA, 120 bp, Homo sapiens
  misc_feature: 1183 for SV(W|O) and mtDNA
gtagagtagatgacgggttgggccaggggattaattagtacgggaagggtataaccaacattttcggggtatgggcccgatagcttatttagctgaccttactttaggatggggtgtgat

SEQ ID NO: 62457 - DNA, 120 bp, Homo sapiens
  misc_feature: 1183 for SV(W|O) and mtDNA
gaattgtgtaggcgaataggaaatatcattcgggcttgatgtggggaggggtgtttaaggggttggctagggtataattgtctgggtcgcctaggaggtctggtgagaatagtgttaatg

SEQ ID NO: 62458 - DNA, 120 bp, Homo sapiens
  misc_feature: 1183 for SV(W|O) and mtDNA
atattgtaattgagattgctcgggggaataggttatgtgattaggagtagggttaggatgagtgggaagaagaaagagaggaagtaaagtttaattatgcctttttgggttgaggtgatg

SEQ ID NO: 62459 - DNA, 120 bp, Homo sapiens
  misc_feature: 1183 for SV(W|O) and mtDNA
agtagatgacgggttgggccaggggattaattagtacgggaagggtataaccaacattttcggggtatgggcccgatagcttatttagctgaccttactttaggatggggtgtgataggt

SEQ ID NO: 62460 - DNA, 120 bp, Homo sapiens
  misc_feature: 1182 for SV(W|O) and mtDNA
ttttggctcgtaagaaggcctagataggggattgtgcggtgtgtgatgctagggtagaatccgagtatgttggagaaataaaatgtgcatagtggggattttattttaagtttgttggtt

SEQ ID NO: 62461 - DNA, 120 bp, Homo sapiens
  misc_feature: 1182 for SV(W|O) and mtDNA
ttagggacggatcggagaattgtgtaggcgaataggaaatatcattcgggcttgatgtggggaggggtgtttaaggggttggctagggtataattgtctgggtcgcctaggaggtctggt

SEQ ID NO: 62462 - DNA, 120 bp, Homo sapiens
  misc_feature: 1182 for SV(W|O) and mtDNA
tgtgcggtgtgtgatgctagggtagaatccgagtatgttggagaaataaaatgtgcatagtggggattttattttaagtttgttggttaggtagttgaggtctagggctgttagaagtcc

SEQ ID NO: 62463 - DNA, 120 bp, Homo sapiens
  misc_feature: 1182 for SV(W|O) and mtDNA
tcatacaaagcccccgcaccaataggatcctcccgaatcaaccctgacccctctccttcataaattattcagcttcctacactattaaagtttaccacaaccaccaccccatcatactct

SEQ ID NO: 62464 - DNA, 120 bp, Homo sapiens
  misc_feature: 1182 for SV(W|O) and mtDNA
ggctggcagtaatgtacgaaatacatagcggttgttgatgggtgagtcaatacttgggtggtacccaaatctgcttccccatgaaagaatagagaatagtttaaattagaatcttagctt

SEQ ID NO: 62465 - DNA, 120 bp, Homo sapiens
  misc_feature: 1182 for SV(W|O) and mtDNA
aaggccttcgatacgggataatcctatttattacctcagaagtttttttcttcgcaggatttttctgagccttttaccactccagcctagcccctaccccccaattaggagggcactggc

SEQ ID NO: 62466 - DNA, 120 bp, Homo sapiens
  misc_feature: 1182 for SV(W|O) and mtDNA
agatgacgggttgggccaggggattaattagtacgggaagggtataaccaacattttcggggtatgggcccgatagcttatttagctgaccttactttaggatggggtgtgataggtggc

SEQ ID NO: 62467 - DNA, 120 bp, Homo sapiens
  misc_feature: 1181 for SV(W|O) and mtDNA
ttagcggtgtggtcgggtgtgttattattctgaattttgggggaggttatatgggtttaatagtttttttaatttatttagggggaatgatggttgtctttggatatactacagcgatgg

SEQ ID NO: 62468 - DNA, 120 bp, Homo sapiens
  misc_feature: 1181 for SV(W|O) and mtDNA
tggcagtaatgtacgaaatacatagcggttgttgatgggtgagtcaatacttgggtggtacccaaatctgcttccccatgaaagaatagagaatagtttaaattagaatcttagctttgg

SEQ ID NO: 62469 - DNA, 120 bp, Homo sapiens
  misc_feature: 1181 for SV(W|O) and mtDNA
ggtagagtagatgacgggttgggccaggggattaattagtacgggaagggtataaccaacattttcggggtatgggcccgatagcttatttagctgaccttactttaggatggggtgtga

SEQ ID NO: 62470 - DNA, 120 bp, Homo sapiens
  misc_feature: 1181 for SV(W|O) and mtDNA
tagggacggatcggagaattgtgtaggcgaataggaaatatcattcgggcttgatgtggggaggggtgtttaaggggttggctagggtataattgtctgggtcgcctaggaggtctggtg

SEQ ID NO: 62471 - DNA, 120 bp, Homo sapiens
  misc_feature: 1181 for SV(W|O) and mtDNA
accaacaaacttaaaataaaatccccactatgcacattttatttctccaacatactcggattctaccctagcatcacacaccgcacaatcccctatctaggccttcttacgagccaaaac

SEQ ID NO: 62472 - DNA, 120 bp, Homo sapiens
  misc_feature: 1181 for SV(W|O) and mtDNA
gctctccatgcatttggtattttcgtctggggggtatgcacgcgatagcattgcgagacgctggagccggagcaccctatgtcgcagtatctgtctttgattcctgcctcatcccattat

SEQ ID NO: 62473 - DNA, 120 bp, Homo sapiens
  misc_feature: 1181 for SV(W|O) and mtDNA
gatcggagaattgtgtaggcgaataggaaatatcattcgggcttgatgtggggaggggtgtttaaggggttggctagggtataattgtctgggtcgcctaggaggtctggtgagaatagt

SEQ ID NO: 62474 - DNA, 120 bp, Homo sapiens
  misc_feature: 1181 for SV(W|O) and mtDNA
ctggcagtaatgtacgaaatacatagcggttgttgatgggtgagtcaatacttgggtggtacccaaatctgcttccccatgaaagaatagagaatagtttaaattagaatcttagctttg

SEQ ID NO: 62475 - DNA, 120 bp, Homo sapiens
  misc_feature: 1181 for SV(W|O) and mtDNA
aggcctagataggggattgtgcggtgtgtgatgctagggtagaatccgagtatgttggagaaataaaatgtgcatagtggggattttattttaagtttgttggttaggtagttgaggtct

SEQ ID NO: 62476 - DNA, 120 bp, Homo sapiens
  misc_feature: 1180 for SV(W|O) and mtDNA
gggactgtctactgagtagcctcctcagattcattgaactaggtctgtcccaatgtatgggatggcggatagtaagtttgtaattactgtggcccctcagaatgatatttggcctcacgg

SEQ ID NO: 62477 - DNA, 120 bp, Homo sapiens
  misc_feature: 1180 for SV(W|O) and mtDNA
gggacggatcggagaattgtgtaggcgaataggaaatatcattcgggcttgatgtggggaggggtgtttaaggggttggctagggtataattgtctgggtcgcctaggaggtctggtgag

SEQ ID NO: 62478 - DNA, 120 bp, Homo sapiens
  misc_feature: 1180 for SV(W|O) and mtDNA
aaaggccttcgatacgggataatcctatttattacctcagaagtttttttcttcgcaggatttttctgagccttttaccactccagcctagcccctaccccccaattaggagggcactgg

SEQ ID NO: 62479 - DNA, 120 bp, Homo sapiens
  misc_feature: 1180 for SV(W|O) and mtDNA
atcggagaattgtgtaggcgaataggaaatatcattcgggcttgatgtggggaggggtgtttaaggggttggctagggtataattgtctgggtcgcctaggaggtctggtgagaatagtg

SEQ ID NO: 62480 - DNA, 120 bp, Homo sapiens
  misc_feature: 1179 for SV(W|O) and mtDNA
tcagggtcataaagcctaaatagcccacacgttccccttaaataagacatcacgatggatcacaggtctatcaccctattaaccactcacgggagctctccatgcatttggtattttcgt

SEQ ID NO: 62481 - DNA, 120 bp, Homo sapiens
  misc_feature: 1179 for SV(W|O) and mtDNA
gctggcagtaatgtacgaaatacatagcggttgttgatgggtgagtcaatacttgggtggtacccaaatctgcttccccatgaaagaatagagaatagtttaaattagaatcttagcttt

SEQ ID NO: 62482 - DNA, 120 bp, Homo sapiens
  misc_feature: 1179 for SV(W|O) and mtDNA
cacagccctcgctgtcactttcctaggacttctaacagccctagacctcaactacctaaccaacaaacttaaaataaaatccccactatgcacattttatttctccaacatactcggatt

SEQ ID NO: 62483 - DNA, 120 bp, Homo sapiens
  misc_feature: 1178 for SV(W|O) and mtDNA
tcataaagcctaaatagcccacacgttccccttaaataagacatcacgatggatcacaggtctatcaccctattaaccactcacgggagctctccatgcatttggtattttcgtctgggg

SEQ ID NO: 62484 - DNA, 120 bp, Homo sapiens
  misc_feature: 1178 for SV(W|O) and mtDNA
tagccaccatcaccctccttaacctctacttctacctacgcctaatctactccacctcaatcacactactccccatatctaacaacgtaaaaataaaatgacagtttgaacatacaaaac

SEQ ID NO: 62485 - DNA, 120 bp, Homo sapiens
  misc_feature: 1177 for SV(W|O) and mtDNA
ttgggccaggggattaattagtacgggaagggtataaccaacattttcggggtatgggcccgatagcttatttagctgaccttactttaggatggggtgtgataggtggcacggagaatt

SEQ ID NO: 62486 - DNA, 120 bp, Homo sapiens
  misc_feature: 1177 for SV(W|O) and mtDNA
gaatcaaagacagatactgcgacatagggtgctccggctccagcgtctcgcaatgctatcgcgtgcataccccccagacgaaaataccaaatgcatggagagctcccgtgagtggttaat

SEQ ID NO: 62487 - DNA, 120 bp, Homo sapiens
  misc_feature: 1176 for SV(W|O) and mtDNA
gttgggccaggggattaattagtacgggaagggtataaccaacattttcggggtatgggcccgatagcttatttagctgaccttactttaggatggggtgtgataggtggcacggagaat

SEQ ID NO: 62488 - DNA, 120 bp, Homo sapiens
  misc_feature: 1176 for SV(W|O) and mtDNA
gtgccctcctaattggggggtaggggctaggctggagtggtaaaaggctcagaaaaatcctgcgaagaaaaaaacttctgaggtaataaataggattatcccgtatcgaaggcctttttg

SEQ ID NO: 62489 - DNA, 120 bp, Homo sapiens
  misc_feature: 1176 for SV(W|O) and mtDNA
aaggcctagataggggattgtgcggtgtgtgatgctagggtagaatccgagtatgttggagaaataaaatgtgcatagtggggattttattttaagtttgttggttaggtagttgaggtc

SEQ ID NO: 62490 - DNA, 120 bp, Homo sapiens
  misc_feature: 1176 for SV(W|O) and mtDNA
cggagaattgtgtaggcgaataggaaatatcattcgggcttgatgtggggaggggtgtttaaggggttggctagggtataattgtctgggtcgcctaggaggtctggtgagaatagtgtt

SEQ ID NO: 62491 - DNA, 120 bp, Homo sapiens
  misc_feature: 1175 for SV(W|O) and mtDNA
ggagaattgtgtaggcgaataggaaatatcattcgggcttgatgtggggaggggtgtttaaggggttggctagggtataattgtctgggtcgcctaggaggtctggtgagaatagtgtta

SEQ ID NO: 62492 - DNA, 120 bp, Homo sapiens
  misc_feature: 1175 for SV(W|O) and mtDNA
caaatcagagaaaaagtctttaactccaccattagcacccaaagctaagattctaatttaaactattctctattctttcatggggaagcagatttgggtaccacccaagtattgactcac

SEQ ID NO: 62493 - DNA, 120 bp, Homo sapiens
  misc_feature: 1175 for SV(W|O) and mtDNA
ggtcataaagcctaaatagcccacacgttccccttaaataagacatcacgatggatcacaggtctatcaccctattaaccactcacgggagctctccatgcatttggtattttcgtctgg

SEQ ID NO: 62494 - DNA, 120 bp, Homo sapiens
  misc_feature: 1175 for SV(W|O) and mtDNA
cctcgctgtcactttcctaggacttctaacagccctagacctcaactacctaaccaacaaacttaaaataaaatccccactatgcacattttatttctccaacatactcggattctaccc

SEQ ID NO: 62495 - DNA, 120 bp, Homo sapiens
  misc_feature: 1174 for SV(W|O) and mtDNA
tggctggcagtaatgtacgaaatacatagcggttgttgatgggtgagtcaatacttgggtggtacccaaatctgcttccccatgaaagaatagagaatagtttaaattagaatcttagct

SEQ ID NO: 62496 - DNA, 120 bp, Homo sapiens
  misc_feature: 1174 for SV(W|O) and mtDNA
catcacgatggatcacaggtctatcaccctattaaccactcacgggagctctccatgcatttggtattttcgtctggggggtatgcacgcgatagcattgcgagacgctggagccggagc

SEQ ID NO: 62497 - DNA, 120 bp, Homo sapiens
  misc_feature: 1174 for SV(W|O) and mtDNA
ctcgctgtcactttcctaggacttctaacagccctagacctcaactacctaaccaacaaacttaaaataaaatccccactatgcacattttatttctccaacatactcggattctaccct

SEQ ID NO: 62498 - DNA, 120 bp, Homo sapiens
  misc_feature: 1173 for SV(W|O) and mtDNA
acaaatcagagaaaaagtctttaactccaccattagcacccaaagctaagattctaatttaaactattctctattctttcatggggaagcagatttgggtaccacccaagtattgactca

SEQ ID NO: 62499 - DNA, 120 bp, Homo sapiens
  misc_feature: 1173 for SV(W|O) and mtDNA
tcggagaattgtgtaggcgaataggaaatatcattcgggcttgatgtggggaggggtgtttaaggggttggctagggtataattgtctgggtcgcctaggaggtctggtgagaatagtgt

SEQ ID NO: 62500 - DNA, 120 bp, Homo sapiens
  misc_feature: 1173 for SV(W|O) and mtDNA
tccttcataaattattcagcttcctacactattaaagtttaccacaaccaccaccccatcatactctttcacccacagcaccaatcctacctccatcgctaaccccactaaaacactcac

SEQ ID NO: 62501 - DNA, 120 bp, Homo sapiens
  misc_feature: 1173 for SV(W|O) and mtDNA
gtagatgacgggttgggccaggggattaattagtacgggaagggtataaccaacattttcggggtatgggcccgatagcttatttagctgaccttactttaggatggggtgtgataggtg

SEQ ID NO: 62502 - DNA, 120 bp, Homo sapiens
  misc_feature: 1172 for SV(W|O) and mtDNA
tttggctcgtaagaaggcctagataggggattgtgcggtgtgtgatgctagggtagaatccgagtatgttggagaaataaaatgtgcatagtggggattttattttaagtttgttggtta

SEQ ID NO: 62503 - DNA, 120 bp, Homo sapiens
  misc_feature: 1172 for SV(W|O) and mtDNA
gtttggattagtgggctattttctgctagggggtggaagcggatgagtaagaagattcctgctacaactatagtgcttgagtggagtagggctgagactggggtggggccttctatggct

SEQ ID NO: 62504 - DNA, 120 bp, Homo sapiens
  misc_feature: 1172 for SV(W|O) and mtDNA
aatacaccagtcttgtaaaccggagatgaaaacctttttccaaggacaaatcagagaaaaagtctttaactccaccattagcacccaaagctaagattctaatttaaactattctctatt

SEQ ID NO: 62505 - DNA, 120 bp, Homo sapiens
  misc_feature: 1171 for SV(W|O) and mtDNA
tttggattagtgggctattttctgctagggggtggaagcggatgagtaagaagattcctgctacaactatagtgcttgagtggagtagggctgagactggggtggggccttctatggctg

SEQ ID NO: 62506 - DNA, 120 bp, Homo sapiens
  misc_feature: 1171 for SV(W|O) and mtDNA
tgtgtaggcgaataggaaatatcattcgggcttgatgtggggaggggtgtttaaggggttggctagggtataattgtctgggtcgcctaggaggtctggtgagaatagtgttaatgtcat

SEQ ID NO: 62507 - DNA, 120 bp, Homo sapiens
  misc_feature: 1171 for SV(W|O) and mtDNA
tagatgacgggttgggccaggggattaattagtacgggaagggtataaccaacattttcggggtatgggcccgatagcttatttagctgaccttactttaggatggggtgtgataggtgg

SEQ ID NO: 62508 - DNA, 120 bp, Homo sapiens
  misc_feature: 1171 for SV(W|O) and mtDNA
acttaaaaggttaatgctaagttagctttacagtgggctctagagggggtagagggggtgctatagggtaaatacgggccctatttcaaagatttttaggggaattaattctaggacgat

SEQ ID NO: 62509 - DNA, 120 bp, Homo sapiens
  misc_feature: 1171 for SV(W|O) and mtDNA
aaaaaggccttcgatacgggataatcctatttattacctcagaagtttttttcttcgcaggatttttctgagccttttaccactccagcctagcccctaccccccaattaggagggcact

SEQ ID NO: 62510 - DNA, 120 bp, Homo sapiens
  misc_feature: 1170 for SV(W|O) and mtDNA
atcacgatggatcacaggtctatcaccctattaaccactcacgggagctctccatgcatttggtattttcgtctggggggtatgcacgcgatagcattgcgagacgctggagccggagca

SEQ ID NO: 62511 - DNA, 120 bp, Homo sapiens
  misc_feature: 1170 for SV(W|O) and mtDNA
ctccttcataaattattcagcttcctacactattaaagtttaccacaaccaccaccccatcatactctttcacccacagcaccaatcctacctccatcgctaaccccactaaaacactca

SEQ ID NO: 62512 - DNA, 120 bp, Homo sapiens
  misc_feature: 1170 for SV(W|O) and mtDNA
ggatcggagaattgtgtaggcgaataggaaatatcattcgggcttgatgtggggaggggtgtttaaggggttggctagggtataattgtctgggtcgcctaggaggtctggtgagaatag

SEQ ID NO: 62513 - DNA, 120 bp, Homo sapiens
  misc_feature: 1168 for SV(W|O) and mtDNA
tttaacttaaaaggttaatgctaagttagctttacagtgggctctagagggggtagagggggtgctatagggtaaatacgggccctatttcaaagatttttaggggaattaattctagga

SEQ ID NO: 62514 - DNA, 120 bp, Homo sapiens
  misc_feature: 1168 for SV(W|O) and mtDNA
agctctccatgcatttggtattttcgtctggggggtatgcacgcgatagcattgcgagacgctggagccggagcaccctatgtcgcagtatctgtctttgattcctgcctcatcccatta

SEQ ID NO: 62515 - DNA, 120 bp, Homo sapiens
  misc_feature: 1167 for SV(W|O) and mtDNA
ttggctcgtaagaaggcctagataggggattgtgcggtgtgtgatgctagggtagaatccgagtatgttggagaaataaaatgtgcatagtggggattttattttaagtttgttggttag

SEQ ID NO: 62516 - DNA, 120 bp, Homo sapiens
  misc_feature: 1167 for SV(W|O) and mtDNA
ttaacttaaaaggttaatgctaagttagctttacagtgggctctagagggggtagagggggtgctatagggtaaatacgggccctatttcaaagatttttaggggaattaattctaggac

SEQ ID NO: 62517 - DNA, 120 bp, Homo sapiens
  misc_feature: 1167 for SV(W|O) and mtDNA
tgtaggcgaataggaaatatcattcgggcttgatgtggggaggggtgtttaaggggttggctagggtataattgtctgggtcgcctaggaggtctggtgagaatagtgttaatgtcatta

SEQ ID NO: 62518 - DNA, 120 bp, Homo sapiens
  misc_feature: 1167 for SV(W|O) and mtDNA
tgggactgtctactgagtagcctcctcagattcattgaactaggtctgtcccaatgtatgggatggcggatagtaagtttgtaattactgtggcccctcagaatgatatttggcctcacg

SEQ ID NO: 62519 - DNA, 120 bp, Homo sapiens
  misc_feature: 1167 for SV(W|O) and mtDNA
cgatggatcacaggtctatcaccctattaaccactcacgggagctctccatgcatttggtattttcgtctggggggtatgcacgcgatagcattgcgagacgctggagccggagcaccct

SEQ ID NO: 62520 - DNA, 120 bp, Homo sapiens
  misc_feature: 1166 for SV(W|O) and mtDNA
tcaaagacagatactgcgacatagggtgctccggctccagcgtctcgcaatgctatcgcgtgcataccccccagacgaaaataccaaatgcatggagagctcccgtgagtggttaatagg

SEQ ID NO: 62521 - DNA, 120 bp, Homo sapiens
  misc_feature: 1166 for SV(W|O) and mtDNA
gatggatcacaggtctatcaccctattaaccactcacgggagctctccatgcatttggtattttcgtctggggggtatgcacgcgatagcattgcgagacgctggagccggagcacccta

SEQ ID NO: 62522 - DNA, 120 bp, Homo sapiens
  misc_feature: 1166 for SV(W|O) and mtDNA
gcggtgtggtcgggtgtgttattattctgaattttgggggaggttatatgggtttaatagtttttttaatttatttagggggaatgatggttgtctttggatatactacagcgatggcta

SEQ ID NO: 62523 - DNA, 120 bp, Homo sapiens
  misc_feature: 1166 for SV(W|O) and mtDNA
agccaccatcaccctccttaacctctacttctacctacgcctaatctactccacctcaatcacactactccccatatctaacaacgtaaaaataaaatgacagtttgaacatacaaaacc

SEQ ID NO: 62524 - DNA, 120 bp, Homo sapiens
  misc_feature: 1165 for SV(W|O) and mtDNA
acaaagcccccgcaccaataggatcctcccgaatcaaccctgacccctctccttcataaattattcagcttcctacactattaaagtttaccacaaccaccaccccatcatactctttca

SEQ ID NO: 62525 - DNA, 120 bp, Homo sapiens
  misc_feature: 1165 for SV(W|O) and mtDNA
ataaagcctaaatagcccacacgttccccttaaataagacatcacgatggatcacaggtctatcaccctattaaccactcacgggagctctccatgcatttggtattttcgtctgggggg

SEQ ID NO: 62526 - DNA, 120 bp, Homo sapiens
  misc_feature: 1165 for SV(W|O) and mtDNA
catacaaagcccccgcaccaataggatcctcccgaatcaaccctgacccctctccttcataaattattcagcttcctacactattaaagtttaccacaaccaccaccccatcatactctt

SEQ ID NO: 62527 - DNA, 120 bp, Homo sapiens
  misc_feature: 1164 for SV(W|O) and mtDNA
ctgtcactttcctaggacttctaacagccctagacctcaactacctaaccaacaaacttaaaataaaatccccactatgcacattttatttctccaacatactcggattctaccctagca

SEQ ID NO: 62528 - DNA, 120 bp, Homo sapiens
  misc_feature: 1164 for SV(W|O) and mtDNA
aagcctaaatagcccacacgttccccttaaataagacatcacgatggatcacaggtctatcaccctattaaccactcacgggagctctccatgcatttggtattttcgtctggggggtat

SEQ ID NO: 62529 - DNA, 120 bp, Homo sapiens
  misc_feature: 1163 for SV(W|O) and mtDNA
gtaggcgaataggaaatatcattcgggcttgatgtggggaggggtgtttaaggggttggctagggtataattgtctgggtcgcctaggaggtctggtgagaatagtgttaatgtcattaa

SEQ ID NO: 62530 - DNA, 120 bp, Homo sapiens
  misc_feature: 1163 for SV(W|O) and mtDNA
gtgtggtcgggtgtgttattattctgaattttgggggaggttatatgggtttaatagtttttttaatttatttagggggaatgatggttgtctttggatatactacagcgatggctattg

SEQ ID NO: 62531 - DNA, 120 bp, Homo sapiens
  misc_feature: 1163 for SV(W|O) and mtDNA
gtcataaagcctaaatagcccacacgttccccttaaataagacatcacgatggatcacaggtctatcaccctattaaccactcacgggagctctccatgcatttggtattttcgtctggg

SEQ ID NO: 62532 - DNA, 120 bp, Homo sapiens
  misc_feature: 1163 for SV(W|O) and mtDNA
acagccctcgctgtcactttcctaggacttctaacagccctagacctcaactacctaaccaacaaacttaaaataaaatccccactatgcacattttatttctccaacatactcggattc

SEQ ID NO: 62533 - DNA, 120 bp, Homo sapiens
  misc_feature: 1163 for SV(W|O) and mtDNA
cggtgtggtcgggtgtgttattattctgaattttgggggaggttatatgggtttaatagtttttttaatttatttagggggaatgatggttgtctttggatatactacagcgatggctat

SEQ ID NO: 62534 - DNA, 120 bp, Homo sapiens
  misc_feature: 1162 for SV(W|O) and mtDNA
tggctcgtaagaaggcctagataggggattgtgcggtgtgtgatgctagggtagaatccgagtatgttggagaaataaaatgtgcatagtggggattttattttaagtttgttggttagg

SEQ ID NO: 62535 - DNA, 120 bp, Homo sapiens
  misc_feature: 1161 for SV(W|O) and mtDNA
gacggatcggagaattgtgtaggcgaataggaaatatcattcgggcttgatgtggggaggggtgtttaaggggttggctagggtataattgtctgggtcgcctaggaggtctggtgagaa

SEQ ID NO: 62536 - DNA, 120 bp, Homo sapiens
  misc_feature: 1161 for SV(W|O) and mtDNA
aacttaaaaggttaatgctaagttagctttacagtgggctctagagggggtagagggggtgctatagggtaaatacgggccctatttcaaagatttttaggggaattaattctaggacga

SEQ ID NO: 62537 - DNA, 120 bp, Homo sapiens
  misc_feature: 1161 for SV(W|O) and mtDNA
taggcgaataggaaatatcattcgggcttgatgtggggaggggtgtttaaggggttggctagggtataattgtctgggtcgcctaggaggtctggtgagaatagtgttaatgtcattaag

SEQ ID NO: 62538 - DNA, 120 bp, Homo sapiens
  misc_feature: 1161 for SV(W|O) and mtDNA
taacttaaaaggttaatgctaagttagctttacagtgggctctagagggggtagagggggtgctatagggtaaatacgggccctatttcaaagatttttaggggaattaattctaggacg

SEQ ID NO: 62539 - DNA, 120 bp, Homo sapiens
  misc_feature: 1161 for SV(W|O) and mtDNA
aggcgaataggaaatatcattcgggcttgatgtggggaggggtgtttaaggggttggctagggtataattgtctgggtcgcctaggaggtctggtgagaatagtgttaatgtcattaagg

SEQ ID NO: 62540 - DNA, 120 bp, Homo sapiens
  misc_feature: 1161 for SV(W|O) and mtDNA
cagccctcgctgtcactttcctaggacttctaacagccctagacctcaactacctaaccaacaaacttaaaataaaatccccactatgcacattttatttctccaacatactcggattct

SEQ ID NO: 62541 - DNA, 120 bp, Homo sapiens
  misc_feature: 1161 for SV(W|O) and mtDNA
agcggtgtggtcgggtgtgttattattctgaattttgggggaggttatatgggtttaatagtttttttaatttatttagggggaatgatggttgtctttggatatactacagcgatggct

SEQ ID NO: 62542 - DNA, 120 bp, Homo sapiens
  misc_feature: 1160 for SV(W|O) and mtDNA
tgccctcctaattggggggtaggggctaggctggagtggtaaaaggctcagaaaaatcctgcgaagaaaaaaacttctgaggtaataaataggattatcccgtatcgaaggcctttttgg

SEQ ID NO: 62543 - DNA, 120 bp, Homo sapiens
  misc_feature: 1160 for SV(W|O) and mtDNA
cgggagctctccatgcatttggtattttcgtctggggggtatgcacgcgatagcattgcgagacgctggagccggagcaccctatgtcgcagtatctgtctttgattcctgcctcatccc

SEQ ID NO: 62544 - DNA, 120 bp, Homo sapiens
  misc_feature: 1160 for SV(W|O) and mtDNA
gctgtcactttcctaggacttctaacagccctagacctcaactacctaaccaacaaacttaaaataaaatccccactatgcacattttatttctccaacatactcggattctaccctagc

SEQ ID NO: 62545 - DNA, 120 bp, Homo sapiens
  misc_feature: 1160 for SV(W|O) and mtDNA
cttaatctttaacttaaaaggttaatgctaagttagctttacagtgggctctagagggggtagagggggtgctatagggtaaatacgggccctatttcaaagatttttaggggaattaat

SEQ ID NO: 62546 - DNA, 120 bp, Homo sapiens
  misc_feature: 1160 for SV(W|O) and mtDNA
agaaggcctagataggggattgtgcggtgtgtgatgctagggtagaatccgagtatgttggagaaataaaatgtgcatagtggggattttattttaagtttgttggttaggtagttgagg

SEQ ID NO: 62547 - DNA, 120 bp, Homo sapiens
  misc_feature: 1160 for SV(W|O) and mtDNA
cataaagcctaaatagcccacacgttccccttaaataagacatcacgatggatcacaggtctatcaccctattaaccactcacgggagctctccatgcatttggtattttcgtctggggg

SEQ ID NO: 62548 - DNA, 120 bp, Homo sapiens
  misc_feature: 1160 for SV(W|O) and mtDNA
atacaaagcccccgcaccaataggatcctcccgaatcaaccctgacccctctccttcataaattattcagcttcctacactattaaagtttaccacaaccaccaccccatcatactcttt

SEQ ID NO: 62549 - DNA, 120 bp, Homo sapiens
  misc_feature: 1159 for SV(W|O) and mtDNA
tcgctgtcactttcctaggacttctaacagccctagacctcaactacctaaccaacaaacttaaaataaaatccccactatgcacattttatttctccaacatactcggattctacccta

SEQ ID NO: 62550 - DNA, 120 bp, Homo sapiens
  misc_feature: 1159 for SV(W|O) and mtDNA
aaagcctaaatagcccacacgttccccttaaataagacatcacgatggatcacaggtctatcaccctattaaccactcacgggagctctccatgcatttggtattttcgtctggggggta

SEQ ID NO: 62551 - DNA, 120 bp, Homo sapiens
  misc_feature: 1159 for SV(W|O) and mtDNA
agtttggattagtgggctattttctgctagggggtggaagcggatgagtaagaagattcctgctacaactatagtgcttgagtggagtagggctgagactggggtggggccttctatggc

SEQ ID NO: 62552 - DNA, 120 bp, Homo sapiens
  misc_feature: 1158 for SV(W|O) and mtDNA
taaagcctaaatagcccacacgttccccttaaataagacatcacgatggatcacaggtctatcaccctattaaccactcacgggagctctccatgcatttggtattttcgtctggggggt

SEQ ID NO: 62553 - DNA, 120 bp, Homo sapiens
  misc_feature: 1158 for SV(W|O) and mtDNA
gtgtaggcgaataggaaatatcattcgggcttgatgtggggaggggtgtttaaggggttggctagggtataattgtctgggtcgcctaggaggtctggtgagaatagtgttaatgtcatt

SEQ ID NO: 62554 - DNA, 120 bp, Homo sapiens
  misc_feature: 1158 for SV(W|O) and mtDNA
cacgatggatcacaggtctatcaccctattaaccactcacgggagctctccatgcatttggtattttcgtctggggggtatgcacgcgatagcattgcgagacgctggagccggagcacc

SEQ ID NO: 62555 - DNA, 120 bp, Homo sapiens
  misc_feature: 1158 for SV(W|O) and mtDNA
atcaaagacagatactgcgacatagggtgctccggctccagcgtctcgcaatgctatcgcgtgcataccccccagacgaaaataccaaatgcatggagagctcccgtgagtggttaatag

SEQ ID NO: 62556 - DNA, 120 bp, Homo sapiens
  misc_feature: 1157 for SV(W|O) and mtDNA
ttggattagtgggctattttctgctagggggtggaagcggatgagtaagaagattcctgctacaactatagtgcttgagtggagtagggctgagactggggtggggccttctatggctga

SEQ ID NO: 62557 - DNA, 120 bp, Homo sapiens
  misc_feature: 1157 for SV(W|O) and mtDNA
taatctttaacttaaaaggttaatgctaagttagctttacagtgggctctagagggggtagagggggtgctatagggtaaatacgggccctatttcaaagatttttaggggaattaattc

SEQ ID NO: 62558 - DNA, 120 bp, Homo sapiens
  misc_feature: 1157 for SV(W|O) and mtDNA
gggtgggactgtctactgagtagcctcctcagattcattgaactaggtctgtcccaatgtatgggatggcggatagtaagtttgtaattactgtggcccctcagaatgatatttggcctc

SEQ ID NO: 62559 - DNA, 120 bp, Homo sapiens
  misc_feature: 1157 for SV(W|O) and mtDNA
acgatggatcacaggtctatcaccctattaaccactcacgggagctctccatgcatttggtattttcgtctggggggtatgcacgcgatagcattgcgagacgctggagccggagcaccc

SEQ ID NO: 62560 - DNA, 120 bp, Homo sapiens
  misc_feature: 1157 for SV(W|O) and mtDNA
gagctctccatgcatttggtattttcgtctggggggtatgcacgcgatagcattgcgagacgctggagccggagcaccctatgtcgcagtatctgtctttgattcctgcctcatcccatt

SEQ ID NO: 62561 - DNA, 120 bp, Homo sapiens
  misc_feature: 1156 for SV(W|O) and mtDNA
tctttaacttaaaaggttaatgctaagttagctttacagtgggctctagagggggtagagggggtgctatagggtaaatacgggccctatttcaaagatttttaggggaattaattctag

SEQ ID NO: 62562 - DNA, 120 bp, Homo sapiens
  misc_feature: 1156 for SV(W|O) and mtDNA
ggacggatcggagaattgtgtaggcgaataggaaatatcattcgggcttgatgtggggaggggtgtttaaggggttggctagggtataattgtctgggtcgcctaggaggtctggtgaga

SEQ ID NO: 62563 - DNA, 120 bp, Homo sapiens
  misc_feature: 1155 for SV(W|O) and mtDNA
aaagaggtgttggttctcttaatctttaacttaaaaggttaatgctaagttagctttacagtgggctctagagggggtagagggggtgctatagggtaaatacgggccctatttcaaaga

SEQ ID NO: 62564 - DNA, 120 bp, Homo sapiens
  misc_feature: 1155 for SV(W|O) and mtDNA
cgggcttgatgtggggaggggtgtttaaggggttggctagggtataattgtctgggtcgcctaggaggtctggtgagaatagtgttaatgtcattaaggagagaaggaagagaagtaagc

SEQ ID NO: 62565 - DNA, 120 bp, Homo sapiens
  misc_feature: 1155 for SV(W|O) and mtDNA
agggtgggactgtctactgagtagcctcctcagattcattgaactaggtctgtcccaatgtatgggatggcggatagtaagtttgtaattactgtggcccctcagaatgatatttggcct

SEQ ID NO: 62566 - DNA, 120 bp, Homo sapiens
  misc_feature: 1154 for SV(W|O) and mtDNA
ttaatctttaacttaaaaggttaatgctaagttagctttacagtgggctctagagggggtagagggggtgctatagggtaaatacgggccctatttcaaagatttttaggggaattaatt

SEQ ID NO: 62567 - DNA, 120 bp, Homo sapiens
  misc_feature: 1154 for SV(W|O) and mtDNA
ggtgggactgtctactgagtagcctcctcagattcattgaactaggtctgtcccaatgtatgggatggcggatagtaagtttgtaattactgtggcccctcagaatgatatttggcctca

SEQ ID NO: 62568 - DNA, 120 bp, Homo sapiens
  misc_feature: 1154 for SV(W|O) and mtDNA
tacaaagcccccgcaccaataggatcctcccgaatcaaccctgacccctctccttcataaattattcagcttcctacactattaaagtttaccacaaccaccaccccatcatactctttc

SEQ ID NO: 62569 - DNA, 120 bp, Homo sapiens
  misc_feature: 1154 for SV(W|O) and mtDNA
taaagaggtgttggttctcttaatctttaacttaaaaggttaatgctaagttagctttacagtgggctctagagggggtagagggggtgctatagggtaaatacgggccctatttcaaag

SEQ ID NO: 62570 - DNA, 120 bp, Homo sapiens
  misc_feature: 1153 for SV(W|O) and mtDNA
tgtggtcgggtgtgttattattctgaattttgggggaggttatatgggtttaatagtttttttaatttatttagggggaatgatggttgtctttggatatactacagcgatggctattga

SEQ ID NO: 62571 - DNA, 120 bp, Homo sapiens
  misc_feature: 1153 for SV(W|O) and mtDNA
taagaaggcctagataggggattgtgcggtgtgtgatgctagggtagaatccgagtatgttggagaaataaaatgtgcatagtggggattttattttaagtttgttggttaggtagttga

SEQ ID NO: 62572 - DNA, 120 bp, Homo sapiens
  misc_feature: 1153 for SV(W|O) and mtDNA
ctttaacttaaaaggttaatgctaagttagctttacagtgggctctagagggggtagagggggtgctatagggtaaatacgggccctatttcaaagatttttaggggaattaattctagg

SEQ ID NO: 62573 - DNA, 120 bp, Homo sapiens
  misc_feature: 1153 for SV(W|O) and mtDNA
aagaaggcctagataggggattgtgcggtgtgtgatgctagggtagaatccgagtatgttggagaaataaaatgtgcatagtggggattttattttaagtttgttggttaggtagttgag

SEQ ID NO: 62574 - DNA, 120 bp, Homo sapiens
  misc_feature: 1152 for SV(W|O) and mtDNA
tcttaatctttaacttaaaaggttaatgctaagttagctttacagtgggctctagagggggtagagggggtgctatagggtaaatacgggccctatttcaaagatttttaggggaattaa

SEQ ID NO: 62575 - DNA, 120 bp, Homo sapiens
  misc_feature: 1152 for SV(W|O) and mtDNA
gggagctctccatgcatttggtattttcgtctggggggtatgcacgcgatagcattgcgagacgctggagccggagcaccctatgtcgcagtatctgtctttgattcctgcctcatccca

SEQ ID NO: 62576 - DNA, 120 bp, Homo sapiens
  misc_feature: 1152 for SV(W|O) and mtDNA
tagcggtgtggtcgggtgtgttattattctgaattttgggggaggttatatgggtttaatagtttttttaatttatttagggggaatgatggttgtctttggatatactacagcgatggc

SEQ ID NO: 62577 - DNA, 120 bp, Homo sapiens
  misc_feature: 1151 for SV(W|O) and mtDNA
gaaatcctgcgaataggcttccggctgccaggcgtttaatggggtttagtagggtagggttattttcgttaatgttagtaagggtggggaagcgaggttgacctgttagggtgagaagaa

SEQ ID NO: 62578 - DNA, 120 bp, Homo sapiens
  misc_feature: 1151 for SV(W|O) and mtDNA
tctccttcataaattattcagcttcctacactattaaagtttaccacaaccaccaccccatcatactctttcacccacagcaccaatcctacctccatcgctaaccccactaaaacactc

SEQ ID NO: 62579 - DNA, 120 bp, Homo sapiens
  misc_feature: 1151 for SV(W|O) and mtDNA
tcgggcttgatgtggggaggggtgtttaaggggttggctagggtataattgtctgggtcgcctaggaggtctggtgagaatagtgttaatgtcattaaggagagaaggaagagaagtaag

SEQ ID NO: 62580 - DNA, 120 bp, Homo sapiens
  misc_feature: 1151 for SV(W|O) and mtDNA
gccctcctaattggggggtaggggctaggctggagtggtaaaaggctcagaaaaatcctgcgaagaaaaaaacttctgaggtaataaataggattatcccgtatcgaaggcctttttgga

SEQ ID NO: 62581 - DNA, 120 bp, Homo sapiens
  misc_feature: 1151 for SV(W|O) and mtDNA
gggcttgatgtggggaggggtgtttaaggggttggctagggtataattgtctgggtcgcctaggaggtctggtgagaatagtgttaatgtcattaaggagagaaggaagagaagtaagcc

SEQ ID NO: 62582 - DNA, 120 bp, Homo sapiens
  misc_feature: 1151 for SV(W|O) and mtDNA
gaatagagaatagtttaaattagaatcttagctttgggtgctaatggtggagttaaagactttttctctgatttgtccttggaaaaaggttttcatctccggtttacaagactggtgtat

SEQ ID NO: 62583 - DNA, 120 bp, Homo sapiens
  misc_feature: 1151 for SV(W|O) and mtDNA
ctcgtaagaaggcctagataggggattgtgcggtgtgtgatgctagggtagaatccgagtatgttggagaaataaaatgtgcatagtggggattttattttaagtttgttggttaggtag

SEQ ID NO: 62584 - DNA, 120 bp, Homo sapiens
  misc_feature: 1150 for SV(W|O) and mtDNA
ttcgggcttgatgtggggaggggtgtttaaggggttggctagggtataattgtctgggtcgcctaggaggtctggtgagaatagtgttaatgtcattaaggagagaaggaagagaagtaa

SEQ ID NO: 62585 - DNA, 120 bp, Homo sapiens
  misc_feature: 1150 for SV(W|O) and mtDNA
agccctcgctgtcactttcctaggacttctaacagccctagacctcaactacctaaccaacaaacttaaaataaaatccccactatgcacattttatttctccaacatactcggattcta

SEQ ID NO: 62586 - DNA, 120 bp, Homo sapiens
  misc_feature: 1150 for SV(W|O) and mtDNA
attcgggcttgatgtggggaggggtgtttaaggggttggctagggtataattgtctgggtcgcctaggaggtctggtgagaatagtgttaatgtcattaaggagagaaggaagagaagta

SEQ ID NO: 62587 - DNA, 120 bp, Homo sapiens
  misc_feature: 1149 for SV(W|O) and mtDNA
gctcgtaagaaggcctagataggggattgtgcggtgtgtgatgctagggtagaatccgagtatgttggagaaataaaatgtgcatagtggggattttattttaagtttgttggttaggta

SEQ ID NO: 62588 - DNA, 120 bp, Homo sapiens
  misc_feature: 1149 for SV(W|O) and mtDNA
gtgggactgtctactgagtagcctcctcagattcattgaactaggtctgtcccaatgtatgggatggcggatagtaagtttgtaattactgtggcccctcagaatgatatttggcctcac

SEQ ID NO: 62589 - DNA, 120 bp, Homo sapiens
  misc_feature: 1149 for SV(W|O) and mtDNA
ccaaggacaaatcagagaaaaagtctttaactccaccattagcacccaaagctaagattctaatttaaactattctctattctttcatggggaagcagatttgggtaccacccaagtatt

SEQ ID NO: 62590 - DNA, 120 bp, Homo sapiens
  misc_feature: 1148 for SV(W|O) and mtDNA
atctttaacttaaaaggttaatgctaagttagctttacagtgggctctagagggggtagagggggtgctatagggtaaatacgggccctatttcaaagatttttaggggaattaattcta

SEQ ID NO: 62591 - DNA, 120 bp, Homo sapiens
  misc_feature: 1148 for SV(W|O) and mtDNA
ccctcgctgtcactttcctaggacttctaacagccctagacctcaactacctaaccaacaaacttaaaataaaatccccactatgcacattttatttctccaacatactcggattctacc

SEQ ID NO: 62592 - DNA, 120 bp, Homo sapiens
  misc_feature: 1148 for SV(W|O) and mtDNA
gacaaatcagagaaaaagtctttaactccaccattagcacccaaagctaagattctaatttaaactattctctattctttcatggggaagcagatttgggtaccacccaagtattgactc

SEQ ID NO: 62593 - DNA, 120 bp, Homo sapiens
  misc_feature: 1147 for SV(W|O) and mtDNA
cggatcggagaattgtgtaggcgaataggaaatatcattcgggcttgatgtggggaggggtgtttaaggggttggctagggtataattgtctgggtcgcctaggaggtctggtgagaata

SEQ ID NO: 62594 - DNA, 120 bp, Homo sapiens
  misc_feature: 1147 for SV(W|O) and mtDNA
caaggacaaatcagagaaaaagtctttaactccaccattagcacccaaagctaagattctaatttaaactattctctattctttcatggggaagcagatttgggtaccacccaagtattg

SEQ ID NO: 62595 - DNA, 120 bp, Homo sapiens
  misc_feature: 1146 for SV(W|O) and mtDNA
ggagtgggacttctaggggatttagcggggtgatgcctgttgggggccagtgccctcctaattggggggtaggggctaggctggagtggtaaaaggctcagaaaaatcctgcgaagaaaa

SEQ ID NO: 62596 - DNA, 120 bp, Homo sapiens
  misc_feature: 1146 for SV(W|O) and mtDNA
ttgatgtggggaggggtgtttaaggggttggctagggtataattgtctgggtcgcctaggaggtctggtgagaatagtgttaatgtcattaaggagagaaggaagagaagtaagccgagg

SEQ ID NO: 62597 - DNA, 120 bp, Homo sapiens
  misc_feature: 1146 for SV(W|O) and mtDNA
aatctttaacttaaaaggttaatgctaagttagctttacagtgggctctagagggggtagagggggtgctatagggtaaatacgggccctatttcaaagatttttaggggaattaattct

SEQ ID NO: 62598 - DNA, 120 bp, Homo sapiens
  misc_feature: 1145 for SV(W|O) and mtDNA
tgatgtggggaggggtgtttaaggggttggctagggtataattgtctgggtcgcctaggaggtctggtgagaatagtgttaatgtcattaaggagagaaggaagagaagtaagccgaggg

SEQ ID NO: 62599 - DNA, 120 bp, Homo sapiens
  misc_feature: 1145 for SV(W|O) and mtDNA
caaagcccccgcaccaataggatcctcccgaatcaaccctgacccctctccttcataaattattcagcttcctacactattaaagtttaccacaaccaccaccccatcatactctttcac

SEQ ID NO: 62600 - DNA, 120 bp, Homo sapiens
  misc_feature: 1145 for SV(W|O) and mtDNA
ggctcgtaagaaggcctagataggggattgtgcggtgtgtgatgctagggtagaatccgagtatgttggagaaataaaatgtgcatagtggggattttattttaagtttgttggttaggt

SEQ ID NO: 62601 - DNA, 120 bp, Homo sapiens
  misc_feature: 1145 for SV(W|O) and mtDNA
ggagctctccatgcatttggtattttcgtctggggggtatgcacgcgatagcattgcgagacgctggagccggagcaccctatgtcgcagtatctgtctttgattcctgcctcatcccat

SEQ ID NO: 62602 - DNA, 120 bp, Homo sapiens
  misc_feature: 1144 for SV(W|O) and mtDNA
ggcttgatgtggggaggggtgtttaaggggttggctagggtataattgtctgggtcgcctaggaggtctggtgagaatagtgttaatgtcattaaggagagaaggaagagaagtaagccg

SEQ ID NO: 62603 - DNA, 120 bp, Homo sapiens
  misc_feature: 1144 for SV(W|O) and mtDNA
gatgtggggaggggtgtttaaggggttggctagggtataattgtctgggtcgcctaggaggtctggtgagaatagtgttaatgtcattaaggagagaaggaagagaagtaagccgagggc

SEQ ID NO: 62604 - DNA, 120 bp, Homo sapiens
  misc_feature: 1143 for SV(W|O) and mtDNA
tccaaggacaaatcagagaaaaagtctttaactccaccattagcacccaaagctaagattctaatttaaactattctctattctttcatggggaagcagatttgggtaccacccaagtat

SEQ ID NO: 62605 - DNA, 120 bp, Homo sapiens
  misc_feature: 1143 for SV(W|O) and mtDNA
acggatcggagaattgtgtaggcgaataggaaatatcattcgggcttgatgtggggaggggtgtttaaggggttggctagggtataattgtctgggtcgcctaggaggtctggtgagaat

SEQ ID NO: 62606 - DNA, 120 bp, Homo sapiens
  misc_feature: 1141 for SV(W|O) and mtDNA
gaaggcctagataggggattgtgcggtgtgtgatgctagggtagaatccgagtatgttggagaaataaaatgtgcatagtggggattttattttaagtttgttggttaggtagttgaggt

SEQ ID NO: 62607 - DNA, 120 bp, Homo sapiens
  misc_feature: 1140 for SV(W|O) and mtDNA
aaggacaaatcagagaaaaagtctttaactccaccattagcacccaaagctaagattctaatttaaactattctctattctttcatggggaagcagatttgggtaccacccaagtattga

SEQ ID NO: 62608 - DNA, 120 bp, Homo sapiens
  misc_feature: 1140 for SV(W|O) and mtDNA
gccctcgctgtcactttcctaggacttctaacagccctagacctcaactacctaaccaacaaacttaaaataaaatccccactatgcacattttatttctccaacatactcggattctac

SEQ ID NO: 62609 - DNA, 120 bp, Homo sapiens
  misc_feature: 1140 for SV(W|O) and mtDNA
gaataggaaatatcattcgggcttgatgtggggaggggtgtttaaggggttggctagggtataattgtctgggtcgcctaggaggtctggtgagaatagtgttaatgtcattaaggagag

SEQ ID NO: 62610 - DNA, 120 bp, Homo sapiens
  misc_feature: 1139 for SV(W|O) and mtDNA
tcttctcaccctaacaggtcaacctcgcttccccacccttactaacattaacgaaaataaccctaccctactaaaccccattaaacgcctggcagccggaagcctattcgcaggatttct

SEQ ID NO: 62611 - DNA, 120 bp, Homo sapiens
  misc_feature: 1139 for SV(W|O) and mtDNA
cgctgtcactttcctaggacttctaacagccctagacctcaactacctaaccaacaaacttaaaataaaatccccactatgcacattttatttctccaacatactcggattctaccctag

SEQ ID NO: 62612 - DNA, 120 bp, Homo sapiens
  misc_feature: 1138 for SV(W|O) and mtDNA
ggcgaataggaaatatcattcgggcttgatgtggggaggggtgtttaaggggttggctagggtataattgtctgggtcgcctaggaggtctggtgagaatagtgttaatgtcattaagga

SEQ ID NO: 62613 - DNA, 120 bp, Homo sapiens
  misc_feature: 1138 for SV(W|O) and mtDNA
tacaccagtcttgtaaaccggagatgaaaacctttttccaaggacaaatcagagaaaaagtctttaactccaccattagcacccaaagctaagattctaatttaaactattctctattct

SEQ ID NO: 62614 - DNA, 120 bp, Homo sapiens
  misc_feature: 1138 for SV(W|O) and mtDNA
cgtaagaaggcctagataggggattgtgcggtgtgtgatgctagggtagaatccgagtatgttggagaaataaaatgtgcatagtggggattttattttaagtttgttggttaggtagtt

SEQ ID NO: 62615 - DNA, 120 bp, Homo sapiens
  misc_feature: 1137 for SV(W|O) and mtDNA
tatcattcgggcttgatgtggggaggggtgtttaaggggttggctagggtataattgtctgggtcgcctaggaggtctggtgagaatagtgttaatgtcattaaggagagaaggaagaga

SEQ ID NO: 62616 - DNA, 120 bp, Homo sapiens
  misc_feature: 1136 for SV(W|O) and mtDNA
tcacgatggatcacaggtctatcaccctattaaccactcacgggagctctccatgcatttggtattttcgtctggggggtatgcacgcgatagcattgcgagacgctggagccggagcac

SEQ ID NO: 62617 - DNA, 120 bp, Homo sapiens
  misc_feature: 1136 for SV(W|O) and mtDNA
ctcttaatctttaacttaaaaggttaatgctaagttagctttacagtgggctctagagggggtagagggggtgctatagggtaaatacgggccctatttcaaagatttttaggggaatta

SEQ ID NO: 62618 - DNA, 120 bp, Homo sapiens
  misc_feature: 1136 for SV(W|O) and mtDNA
gagggtgggactgtctactgagtagcctcctcagattcattgaactaggtctgtcccaatgtatgggatggcggatagtaagtttgtaattactgtggcccctcagaatgatatttggcc

SEQ ID NO: 62619 - DNA, 120 bp, Homo sapiens
  misc_feature: 1136 for SV(W|O) and mtDNA
aagaggtgttggttctcttaatctttaacttaaaaggttaatgctaagttagctttacagtgggctctagagggggtagagggggtgctatagggtaaatacgggccctatttcaaagat

SEQ ID NO: 62620 - DNA, 120 bp, Homo sapiens
  misc_feature: 1135 for SV(W|O) and mtDNA
gcgaataggaaatatcattcgggcttgatgtggggaggggtgtttaaggggttggctagggtataattgtctgggtcgcctaggaggtctggtgagaatagtgttaatgtcattaaggag

SEQ ID NO: 62621 - DNA, 120 bp, Homo sapiens
  misc_feature: 1135 for SV(W|O) and mtDNA
cttgatgtggggaggggtgtttaaggggttggctagggtataattgtctgggtcgcctaggaggtctggtgagaatagtgttaatgtcattaaggagagaaggaagagaagtaagccgag

SEQ ID NO: 62622 - DNA, 120 bp, Homo sapiens
  misc_feature: 1134 for SV(W|O) and mtDNA
gtaagaaggcctagataggggattgtgcggtgtgtgatgctagggtagaatccgagtatgttggagaaataaaatgtgcatagtggggattttattttaagtttgttggttaggtagttg

SEQ ID NO: 62623 - DNA, 120 bp, Homo sapiens
  misc_feature: 1134 for SV(W|O) and mtDNA
atatcattcgggcttgatgtggggaggggtgtttaaggggttggctagggtataattgtctgggtcgcctaggaggtctggtgagaatagtgttaatgtcattaaggagagaaggaagag

SEQ ID NO: 62624 - DNA, 120 bp, Homo sapiens
  misc_feature: 1134 for SV(W|O) and mtDNA
ataggatcctcccgaatcaaccctgacccctctccttcataaattattcagcttcctacactattaaagtttaccacaaccaccaccccatcatactctttcacccacagcaccaatcct

SEQ ID NO: 62625 - DNA, 120 bp, Homo sapiens
  misc_feature: 1133 for SV(W|O) and mtDNA
atcattcgggcttgatgtggggaggggtgtttaaggggttggctagggtataattgtctgggtcgcctaggaggtctggtgagaatagtgttaatgtcattaaggagagaaggaagagaa

SEQ ID NO: 62626 - DNA, 120 bp, Homo sapiens
  misc_feature: 1133 for SV(W|O) and mtDNA
ttctcttaatctttaacttaaaaggttaatgctaagttagctttacagtgggctctagagggggtagagggggtgctatagggtaaatacgggccctatttcaaagatttttaggggaat

SEQ ID NO: 62627 - DNA, 120 bp, Homo sapiens
  misc_feature: 1133 for SV(W|O) and mtDNA
gcttgatgtggggaggggtgtttaaggggttggctagggtataattgtctgggtcgcctaggaggtctggtgagaatagtgttaatgtcattaaggagagaaggaagagaagtaagccga

SEQ ID NO: 62628 - DNA, 120 bp, Homo sapiens
  misc_feature: 1133 for SV(W|O) and mtDNA
cattcgggcttgatgtggggaggggtgtttaaggggttggctagggtataattgtctgggtcgcctaggaggtctggtgagaatagtgttaatgtcattaaggagagaaggaagagaagt

SEQ ID NO: 62629 - DNA, 120 bp, Homo sapiens
  misc_feature: 1132 for SV(W|O) and mtDNA
gcccccgcaccaataggatcctcccgaatcaaccctgacccctctccttcataaattattcagcttcctacactattaaagtttaccacaaccaccaccccatcatactctttcacccac

SEQ ID NO: 62630 - DNA, 120 bp, Homo sapiens
  misc_feature: 1131 for SV(W|O) and mtDNA
ggacaaatcagagaaaaagtctttaactccaccattagcacccaaagctaagattctaatttaaactattctctattctttcatggggaagcagatttgggtaccacccaagtattgact

SEQ ID NO: 62631 - DNA, 120 bp, Homo sapiens
  misc_feature: 1130 for SV(W|O) and mtDNA
tttcttcgcaggatttttctgagccttttaccactccagcctagcccctaccccccaattaggagggcactggcccccaacaggcatcaccccgctaaatcccctagaagtcccactcct

SEQ ID NO: 62632 - DNA, 120 bp, Homo sapiens
  misc_feature: 1130 for SV(W|O) and mtDNA
taggatcctcccgaatcaaccctgacccctctccttcataaattattcagcttcctacactattaaagtttaccacaaccaccaccccatcatactctttcacccacagcaccaatccta

SEQ ID NO: 62633 - DNA, 120 bp, Homo sapiens
  misc_feature: 1129 for SV(W|O) and mtDNA
tcgtaagaaggcctagataggggattgtgcggtgtgtgatgctagggtagaatccgagtatgttggagaaataaaatgtgcatagtggggattttattttaagtttgttggttaggtagt

SEQ ID NO: 62634 - DNA, 120 bp, Homo sapiens
  misc_feature: 1129 for SV(W|O) and mtDNA
aaatatcattcgggcttgatgtggggaggggtgtttaaggggttggctagggtataattgtctgggtcgcctaggaggtctggtgagaatagtgttaatgtcattaaggagagaaggaag

SEQ ID NO: 62635 - DNA, 120 bp, Homo sapiens
  misc_feature: 1128 for SV(W|O) and mtDNA
ataggaaatatcattcgggcttgatgtggggaggggtgtttaaggggttggctagggtataattgtctgggtcgcctaggaggtctggtgagaatagtgttaatgtcattaaggagagaa

SEQ ID NO: 62636 - DNA, 120 bp, Homo sapiens
  misc_feature: 1128 for SV(W|O) and mtDNA
ttccaaggacaaatcagagaaaaagtctttaactccaccattagcacccaaagctaagattctaatttaaactattctctattctttcatggggaagcagatttgggtaccacccaagta

SEQ ID NO: 62637 - DNA, 120 bp, Homo sapiens
  misc_feature: 1128 for SV(W|O) and mtDNA
cccccgcaccaataggatcctcccgaatcaaccctgacccctctccttcataaattattcagcttcctacactattaaagtttaccacaaccaccaccccatcatactctttcacccaca

SEQ ID NO: 62638 - DNA, 120 bp, Homo sapiens
  misc_feature: 1128 for SV(W|O) and mtDNA
tcattcgggcttgatgtggggaggggtgtttaaggggttggctagggtataattgtctgggtcgcctaggaggtctggtgagaatagtgttaatgtcattaaggagagaaggaagagaag

SEQ ID NO: 62639 - DNA, 120 bp, Homo sapiens
  misc_feature: 1128 for SV(W|O) and mtDNA
ggggaggggtgtttaaggggttggctagggtataattgtctgggtcgcctaggaggtctggtgagaatagtgttaatgtcattaaggagagaaggaagagaagtaagccgagggcgtctt

SEQ ID NO: 62640 - DNA, 120 bp, Homo sapiens
  misc_feature: 1127 for SV(W|O) and mtDNA
tttccaaggacaaatcagagaaaaagtctttaactccaccattagcacccaaagctaagattctaatttaaactattctctattctttcatggggaagcagatttgggtaccacccaagt

SEQ ID NO: 62641 - DNA, 120 bp, Homo sapiens
  misc_feature: 1127 for SV(W|O) and mtDNA
aatatcattcgggcttgatgtggggaggggtgtttaaggggttggctagggtataattgtctgggtcgcctaggaggtctggtgagaatagtgttaatgtcattaaggagagaaggaaga

SEQ ID NO: 62642 - DNA, 120 bp, Homo sapiens
  misc_feature: 1127 for SV(W|O) and mtDNA
cgaataggaaatatcattcgggcttgatgtggggaggggtgtttaaggggttggctagggtataattgtctgggtcgcctaggaggtctggtgagaatagtgttaatgtcattaaggaga

SEQ ID NO: 62643 - DNA, 120 bp, Homo sapiens
  misc_feature: 1127 for SV(W|O) and mtDNA
caataggatcctcccgaatcaaccctgacccctctccttcataaattattcagcttcctacactattaaagtttaccacaaccaccaccccatcatactctttcacccacagcaccaatc

SEQ ID NO: 62644 - DNA, 120 bp, Homo sapiens
  misc_feature: 1127 for SV(W|O) and mtDNA
ccaataggatcctcccgaatcaaccctgacccctctccttcataaattattcagcttcctacactattaaagtttaccacaaccaccaccccatcatactctttcacccacagcaccaat

SEQ ID NO: 62645 - DNA, 120 bp, Homo sapiens
  misc_feature: 1127 for SV(W|O) and mtDNA
acaccagtcttgtaaaccggagatgaaaacctttttccaaggacaaatcagagaaaaagtctttaactccaccattagcacccaaagctaagattctaatttaaactattctctattctt

SEQ ID NO: 62646 - DNA, 120 bp, Homo sapiens
  misc_feature: 1126 for SV(W|O) and mtDNA
ctcaccctaacaggtcaacctcgcttccccacccttactaacattaacgaaaataaccctaccctactaaaccccattaaacgcctggcagccggaagcctattcgcaggatttctcatt

SEQ ID NO: 62647 - DNA, 120 bp, Homo sapiens
  misc_feature: 1125 for SV(W|O) and mtDNA
tctcttaatctttaacttaaaaggttaatgctaagttagctttacagtgggctctagagggggtagagggggtgctatagggtaaatacgggccctatttcaaagatttttaggggaatt

SEQ ID NO: 62648 - DNA, 120 bp, Homo sapiens
  misc_feature: 1125 for SV(W|O) and mtDNA
cttctcaccctaacaggtcaacctcgcttccccacccttactaacattaacgaaaataaccctaccctactaaaccccattaaacgcctggcagccggaagcctattcgcaggatttctc

SEQ ID NO: 62649 - DNA, 120 bp, Homo sapiens
  misc_feature: 1124 for SV(W|O) and mtDNA
ccacccttactacacaatcaaagacgccctcggcttacttctcttccttctctccttaatgacattaacactattctcaccagacctcctaggcgacccagacaattataccctagccaa

SEQ ID NO: 62650 - DNA, 120 bp, Homo sapiens
  misc_feature: 1123 for SV(W|O) and mtDNA
aataggaaatatcattcgggcttgatgtggggaggggtgtttaaggggttggctagggtataattgtctgggtcgcctaggaggtctggtgagaatagtgttaatgtcattaaggagaga

SEQ ID NO: 62651 - DNA, 120 bp, Homo sapiens
  misc_feature: 1122 for SV(W|O) and mtDNA
tgttggttctcttaatctttaacttaaaaggttaatgctaagttagctttacagtgggctctagagggggtagagggggtgctatagggtaaatacgggccctatttcaaagatttttag

SEQ ID NO: 62652 - DNA, 120 bp, Homo sapiens
  misc_feature: 1122 for SV(W|O) and mtDNA
tcccgaatcaaccctgacccctctccttcataaattattcagcttcctacactattaaagtttaccacaaccaccaccccatcatactctttcacccacagcaccaatcctacctccatc

SEQ ID NO: 62653 - DNA, 120 bp, Homo sapiens
  misc_feature: 1122 for SV(W|O) and mtDNA
tataattgtctgggtcgcctaggaggtctggtgagaatagtgttaatgtcattaaggagagaaggaagagaagtaagccgagggcgtctttgattgtgtagtaagggtggaaggtgattt

SEQ ID NO: 62654 - DNA, 120 bp, Homo sapiens
  misc_feature: 1122 for SV(W|O) and mtDNA
aggacaaatcagagaaaaagtctttaactccaccattagcacccaaagctaagattctaatttaaactattctctattctttcatggggaagcagatttgggtaccacccaagtattgac

SEQ ID NO: 62655 - DNA, 120 bp, Homo sapiens
  misc_feature: 1121 for SV(W|O) and mtDNA
ttccacccttactacacaatcaaagacgccctcggcttacttctcttccttctctccttaatgacattaacactattctcaccagacctcctaggcgacccagacaattataccctagcc

SEQ ID NO: 62656 - DNA, 120 bp, Homo sapiens
  misc_feature: 1121 for SV(W|O) and mtDNA
ctttttccaaggacaaatcagagaaaaagtctttaactccaccattagcacccaaagctaagattctaatttaaactattctctattctttcatggggaagcagatttgggtaccaccca

SEQ ID NO: 62657 - DNA, 120 bp, Homo sapiens
  misc_feature: 1121 for SV(W|O) and mtDNA
tctcaccctaacaggtcaacctcgcttccccacccttactaacattaacgaaaataaccctaccctactaaaccccattaaacgcctggcagccggaagcctattcgcaggatttctcat

SEQ ID NO: 62658 - DNA, 120 bp, Homo sapiens
  misc_feature: 1121 for SV(W|O) and mtDNA
atgtggggaggggtgtttaaggggttggctagggtataattgtctgggtcgcctaggaggtctggtgagaatagtgttaatgtcattaaggagagaaggaagagaagtaagccgagggcg

SEQ ID NO: 62659 - DNA, 120 bp, Homo sapiens
  misc_feature: 1120 for SV(W|O) and mtDNA
ttttccaaggacaaatcagagaaaaagtctttaactccaccattagcacccaaagctaagattctaatttaaactattctctattctttcatggggaagcagatttgggtaccacccaag

SEQ ID NO: 62660 - DNA, 120 bp, Homo sapiens
  misc_feature: 1119 for SV(W|O) and mtDNA
aaagcccccgcaccaataggatcctcccgaatcaaccctgacccctctccttcataaattattcagcttcctacactattaaagtttaccacaaccaccaccccatcatactctttcacc

SEQ ID NO: 62661 - DNA, 120 bp, Homo sapiens
  misc_feature: 1119 for SV(W|O) and mtDNA
ggtataattgtctgggtcgcctaggaggtctggtgagaatagtgttaatgtcattaaggagagaaggaagagaagtaagccgagggcgtctttgattgtgtagtaagggtggaaggtgat

SEQ ID NO: 62662 - DNA, 120 bp, Homo sapiens
  misc_feature: 1119 for SV(W|O) and mtDNA
aatctttgaaatagggcccgtatttaccctatagcaccccctctaccccctctagagcccactgtaaagctaacttagcattaaccttttaagttaaagattaagagaaccaacacctct

SEQ ID NO: 62663 - DNA, 120 bp, Homo sapiens
  misc_feature: 1118 for SV(W|O) and mtDNA
tttttccaaggacaaatcagagaaaaagtctttaactccaccattagcacccaaagctaagattctaatttaaactattctctattctttcatggggaagcagatttgggtaccacccaa

SEQ ID NO: 62664 - DNA, 120 bp, Homo sapiens
  misc_feature: 1118 for SV(W|O) and mtDNA
accaataggatcctcccgaatcaaccctgacccctctccttcataaattattcagcttcctacactattaaagtttaccacaaccaccaccccatcatactctttcacccacagcaccaa

SEQ ID NO: 62665 - DNA, 120 bp, Homo sapiens
  misc_feature: 1118 for SV(W|O) and mtDNA
gaaatatcattcgggcttgatgtggggaggggtgtttaaggggttggctagggtataattgtctgggtcgcctaggaggtctggtgagaatagtgttaatgtcattaaggagagaaggaa

SEQ ID NO: 62666 - DNA, 120 bp, Homo sapiens
  misc_feature: 1118 for SV(W|O) and mtDNA
caccaataggatcctcccgaatcaaccctgacccctctccttcataaattattcagcttcctacactattaaagtttaccacaaccaccaccccatcatactctttcacccacagcacca

SEQ ID NO: 62667 - DNA, 120 bp, Homo sapiens
  misc_feature: 1118 for SV(W|O) and mtDNA
ccccgcaccaataggatcctcccgaatcaaccctgacccctctccttcataaattattcagcttcctacactattaaagtttaccacaaccaccaccccatcatactctttcacccacag

SEQ ID NO: 62668 - DNA, 120 bp, Homo sapiens
  misc_feature: 1117 for SV(W|O) and mtDNA
ttctcaccctaacaggtcaacctcgcttccccacccttactaacattaacgaaaataaccctaccctactaaaccccattaaacgcctggcagccggaagcctattcgcaggatttctca

SEQ ID NO: 62669 - DNA, 120 bp, Homo sapiens
  misc_feature: 1117 for SV(W|O) and mtDNA
gttctcttaatctttaacttaaaaggttaatgctaagttagctttacagtgggctctagagggggtagagggggtgctatagggtaaatacgggccctatttcaaagatttttaggggaa

SEQ ID NO: 62670 - DNA, 120 bp, Homo sapiens
  misc_feature: 1117 for SV(W|O) and mtDNA
ccttccacccttactacacaatcaaagacgccctcggcttacttctcttccttctctccttaatgacattaacactattctcaccagacctcctaggcgacccagacaattataccctag

SEQ ID NO: 62671 - DNA, 120 bp, Homo sapiens
  misc_feature: 1117 for SV(W|O) and mtDNA
aggaaatatcattcgggcttgatgtggggaggggtgtttaaggggttggctagggtataattgtctgggtcgcctaggaggtctggtgagaatagtgttaatgtcattaaggagagaagg

SEQ ID NO: 62672 - DNA, 120 bp, Homo sapiens
  misc_feature: 1116 for SV(W|O) and mtDNA
ttcttcgcaggatttttctgagccttttaccactccagcctagcccctaccccccaattaggagggcactggcccccaacaggcatcaccccgctaaatcccctagaagtcccactccta

SEQ ID NO: 62673 - DNA, 120 bp, Homo sapiens
  misc_feature: 1116 for SV(W|O) and mtDNA
tgtttaaggggttggctagggtataattgtctgggtcgcctaggaggtctggtgagaatagtgttaatgtcattaaggagagaaggaagagaagtaagccgagggcgtctttgattgtgt

SEQ ID NO: 62674 - DNA, 120 bp, Homo sapiens
  misc_feature: 1116 for SV(W|O) and mtDNA
tggggaggggtgtttaaggggttggctagggtataattgtctgggtcgcctaggaggtctggtgagaatagtgttaatgtcattaaggagagaaggaagagaagtaagccgagggcgtct

SEQ ID NO: 62675 - DNA, 120 bp, Homo sapiens
  misc_feature: 1116 for SV(W|O) and mtDNA
accttccacccttactacacaatcaaagacgccctcggcttacttctcttccttctctccttaatgacattaacactattctcaccagacctcctaggcgacccagacaattatacccta

SEQ ID NO: 62676 - DNA, 120 bp, Homo sapiens
  misc_feature: 1116 for SV(W|O) and mtDNA
cttccacccttactacacaatcaaagacgccctcggcttacttctcttccttctctccttaatgacattaacactattctcaccagacctcctaggcgacccagacaattataccctagc

SEQ ID NO: 62677 - DNA, 120 bp, Homo sapiens
  misc_feature: 1116 for SV(W|O) and mtDNA
caccttccacccttactacacaatcaaagacgccctcggcttacttctcttccttctctccttaatgacattaacactattctcaccagacctcctaggcgacccagacaattataccct

SEQ ID NO: 62678 - DNA, 120 bp, Homo sapiens
  misc_feature: 1115 for SV(W|O) and mtDNA
ataattgtctgggtcgcctaggaggtctggtgagaatagtgttaatgtcattaaggagagaaggaagagaagtaagccgagggcgtctttgattgtgtagtaagggtggaaggtgatttt

SEQ ID NO: 62679 - DNA, 120 bp, Homo sapiens
  misc_feature: 1114 for SV(W|O) and mtDNA
ttactacacaatcaaagacgccctcggcttacttctcttccttctctccttaatgacattaacactattctcaccagacctcctaggcgacccagacaattataccctagccaacccctt

SEQ ID NO: 62680 - DNA, 120 bp, Homo sapiens
  misc_feature: 1114 for SV(W|O) and mtDNA
gtataattgtctgggtcgcctaggaggtctggtgagaatagtgttaatgtcattaaggagagaaggaagagaagtaagccgagggcgtctttgattgtgtagtaagggtggaaggtgatt

SEQ ID NO: 62681 - DNA, 120 bp, Homo sapiens
  misc_feature: 1114 for SV(W|O) and mtDNA
aataggatcctcccgaatcaaccctgacccctctccttcataaattattcagcttcctacactattaaagtttaccacaaccaccaccccatcatactctttcacccacagcaccaatcc

SEQ ID NO: 62682 - DNA, 120 bp, Homo sapiens
  misc_feature: 1114 for SV(W|O) and mtDNA
cccgcaccaataggatcctcccgaatcaaccctgacccctctccttcataaattattcagcttcctacactattaaagtttaccacaaccaccaccccatcatactctttcacccacagc

SEQ ID NO: 62683 - DNA, 120 bp, Homo sapiens
  misc_feature: 1113 for SV(W|O) and mtDNA
tgtggggaggggtgtttaaggggttggctagggtataattgtctgggtcgcctaggaggtctggtgagaatagtgttaatgtcattaaggagagaaggaagagaagtaagccgagggcgt

SEQ ID NO: 62684 - DNA, 120 bp, Homo sapiens
  misc_feature: 1113 for SV(W|O) and mtDNA
tcaccttccacccttactacacaatcaaagacgccctcggcttacttctcttccttctctccttaatgacattaacactattctcaccagacctcctaggcgacccagacaattataccc

SEQ ID NO: 62685 - DNA, 120 bp, Homo sapiens
  misc_feature: 1113 for SV(W|O) and mtDNA
taattgtctgggtcgcctaggaggtctggtgagaatagtgttaatgtcattaaggagagaaggaagagaagtaagccgagggcgtctttgattgtgtagtaagggtggaaggtgatttta

SEQ ID NO: 62686 - DNA, 120 bp, Homo sapiens
  misc_feature: 1113 for SV(W|O) and mtDNA
ctcccgaatcaaccctgacccctctccttcataaattattcagcttcctacactattaaagtttaccacaaccaccaccccatcatactctttcacccacagcaccaatcctacctccat

SEQ ID NO: 62687 - DNA, 120 bp, Homo sapiens
  misc_feature: 1112 for SV(W|O) and mtDNA
tgagggtgggactgtctactgagtagcctcctcagattcattgaactaggtctgtcccaatgtatgggatggcggatagtaagtttgtaattactgtggcccctcagaatgatatttggc

SEQ ID NO: 62688 - DNA, 120 bp, Homo sapiens
  misc_feature: 1112 for SV(W|O) and mtDNA
ggaaatatcattcgggcttgatgtggggaggggtgtttaaggggttggctagggtataattgtctgggtcgcctaggaggtctggtgagaatagtgttaatgtcattaaggagagaagga

SEQ ID NO: 62689 - DNA, 120 bp, Homo sapiens
  misc_feature: 1112 for SV(W|O) and mtDNA
cctttttccaaggacaaatcagagaaaaagtctttaactccaccattagcacccaaagctaagattctaatttaaactattctctattctttcatggggaagcagatttgggtaccaccc

SEQ ID NO: 62690 - DNA, 120 bp, Homo sapiens
  misc_feature: 1111 for SV(W|O) and mtDNA
tcttcgcaggatttttctgagccttttaccactccagcctagcccctaccccccaattaggagggcactggcccccaacaggcatcaccccgctaaatcccctagaagtcccactcctaa

SEQ ID NO: 62691 - DNA, 120 bp, Homo sapiens
  misc_feature: 1111 for SV(W|O) and mtDNA
gtggggaggggtgtttaaggggttggctagggtataattgtctgggtcgcctaggaggtctggtgagaatagtgttaatgtcattaaggagagaaggaagagaagtaagccgagggcgtc

SEQ ID NO: 62692 - DNA, 120 bp, Homo sapiens
  misc_feature: 1110 for SV(W|O) and mtDNA
aggatcctcccgaatcaaccctgacccctctccttcataaattattcagcttcctacactattaaagtttaccacaaccaccaccccatcatactctttcacccacagcaccaatcctac

SEQ ID NO: 62693 - DNA, 120 bp, Homo sapiens
  misc_feature: 1109 for SV(W|O) and mtDNA
cttcgcaggatttttctgagccttttaccactccagcctagcccctaccccccaattaggagggcactggcccccaacaggcatcaccccgctaaatcccctagaagtcccactcctaaa

SEQ ID NO: 62694 - DNA, 120 bp, Homo sapiens
  misc_feature: 1109 for SV(W|O) and mtDNA
gtgttggttctcttaatctttaacttaaaaggttaatgctaagttagctttacagtgggctctagagggggtagagggggtgctatagggtaaatacgggccctatttcaaagattttta

SEQ ID NO: 62695 - DNA, 120 bp, Homo sapiens
  misc_feature: 1109 for SV(W|O) and mtDNA
gttggttctcttaatctttaacttaaaaggttaatgctaagttagctttacagtgggctctagagggggtagagggggtgctatagggtaaatacgggccctatttcaaagatttttagg

SEQ ID NO: 62696 - DNA, 120 bp, Homo sapiens
  misc_feature: 1109 for SV(W|O) and mtDNA
attgtctgggtcgcctaggaggtctggtgagaatagtgttaatgtcattaaggagagaaggaagagaagtaagccgagggcgtctttgattgtgtagtaagggtggaaggtgattttatc

SEQ ID NO: 62697 - DNA, 120 bp, Homo sapiens
  misc_feature: 1109 for SV(W|O) and mtDNA
caccagtcttgtaaaccggagatgaaaacctttttccaaggacaaatcagagaaaaagtctttaactccaccattagcacccaaagctaagattctaatttaaactattctctattcttt

SEQ ID NO: 62698 - DNA, 120 bp, Homo sapiens
  misc_feature: 1108 for SV(W|O) and mtDNA
tggttctcttaatctttaacttaaaaggttaatgctaagttagctttacagtgggctctagagggggtagagggggtgctatagggtaaatacgggccctatttcaaagatttttagggg

SEQ ID NO: 62699 - DNA, 120 bp, Homo sapiens
  misc_feature: 1108 for SV(W|O) and mtDNA
agcccccgcaccaataggatcctcccgaatcaaccctgacccctctccttcataaattattcagcttcctacactattaaagtttaccacaaccaccaccccatcatactctttcaccca

SEQ ID NO: 62700 - DNA, 120 bp, Homo sapiens
  misc_feature: 1108 for SV(W|O) and mtDNA
tcaccctaacaggtcaacctcgcttccccacccttactaacattaacgaaaataaccctaccctactaaaccccattaaacgcctggcagccggaagcctattcgcaggatttctcatta

SEQ ID NO: 62701 - DNA, 120 bp, Homo sapiens
  misc_feature: 1108 for SV(W|O) and mtDNA
taggaaatatcattcgggcttgatgtggggaggggtgtttaaggggttggctagggtataattgtctgggtcgcctaggaggtctggtgagaatagtgttaatgtcattaaggagagaag

SEQ ID NO: 62702 - DNA, 120 bp, Homo sapiens
  misc_feature: 1107 for SV(W|O) and mtDNA
tccacccttactacacaatcaaagacgccctcggcttacttctcttccttctctccttaatgacattaacactattctcaccagacctcctaggcgacccagacaattataccctagcca

SEQ ID NO: 62703 - DNA, 120 bp, Homo sapiens
  misc_feature: 1107 for SV(W|O) and mtDNA
gaggtgttggttctcttaatctttaacttaaaaggttaatgctaagttagctttacagtgggctctagagggggtagagggggtgctatagggtaaatacgggccctatttcaaagattt

SEQ ID NO: 62704 - DNA, 120 bp, Homo sapiens
  misc_feature: 1107 for SV(W|O) and mtDNA
atgtgtttaggagtgggacttctaggggatttagcggggtgatgcctgttgggggccagtgccctcctaattggggggtaggggctaggctggagtggtaaaaggctcagaaaaatcctg

SEQ ID NO: 62705 - DNA, 120 bp, Homo sapiens
  misc_feature: 1107 for SV(W|O) and mtDNA
aattgtctgggtcgcctaggaggtctggtgagaatagtgttaatgtcattaaggagagaaggaagagaagtaagccgagggcgtctttgattgtgtagtaagggtggaaggtgattttat

SEQ ID NO: 62706 - DNA, 120 bp, Homo sapiens
  misc_feature: 1105 for SV(W|O) and mtDNA
ggttctcttaatctttaacttaaaaggttaatgctaagttagctttacagtgggctctagagggggtagagggggtgctatagggtaaatacgggccctatttcaaagatttttagggga

SEQ ID NO: 62707 - DNA, 120 bp, Homo sapiens
  misc_feature: 1105 for SV(W|O) and mtDNA
tactacacaatcaaagacgccctcggcttacttctcttccttctctccttaatgacattaacactattctcaccagacctcctaggcgacccagacaattataccctagccaacccctta

SEQ ID NO: 62708 - DNA, 120 bp, Homo sapiens
  misc_feature: 1105 for SV(W|O) and mtDNA
aagcccccgcaccaataggatcctcccgaatcaaccctgacccctctccttcataaattattcagcttcctacactattaaagtttaccacaaccaccaccccatcatactctttcaccc

SEQ ID NO: 62709 - DNA, 120 bp, Homo sapiens
  misc_feature: 1103 for SV(W|O) and mtDNA
ccgcaccaataggatcctcccgaatcaaccctgacccctctccttcataaattattcagcttcctacactattaaagtttaccacaaccaccaccccatcatactctttcacccacagca

SEQ ID NO: 62710 - DNA, 120 bp, Homo sapiens
  misc_feature: 1103 for SV(W|O) and mtDNA
tacacaatcaaagacgccctcggcttacttctcttccttctctccttaatgacattaacactattctcaccagacctcctaggcgacccagacaattataccctagccaaccccttaaac

SEQ ID NO: 62711 - DNA, 120 bp, Homo sapiens
  misc_feature: 1102 for SV(W|O) and mtDNA
ctacacaatcaaagacgccctcggcttacttctcttccttctctccttaatgacattaacactattctcaccagacctcctaggcgacccagacaattataccctagccaaccccttaaa

SEQ ID NO: 62712 - DNA, 120 bp, Homo sapiens
  misc_feature: 1102 for SV(W|O) and mtDNA
ttggttctcttaatctttaacttaaaaggttaatgctaagttagctttacagtgggctctagagggggtagagggggtgctatagggtaaatacgggccctatttcaaagatttttaggg

SEQ ID NO: 62713 - DNA, 120 bp, Homo sapiens
  misc_feature: 1102 for SV(W|O) and mtDNA
gcaggatttttctgagccttttaccactccagcctagcccctaccccccaattaggagggcactggcccccaacaggcatcaccccgctaaatcccctagaagtcccactcctaaacaca

SEQ ID NO: 62714 - DNA, 120 bp, Homo sapiens
  misc_feature: 1100 for SV(W|O) and mtDNA
cctcccgaatcaaccctgacccctctccttcataaattattcagcttcctacactattaaagtttaccacaaccaccaccccatcatactctttcacccacagcaccaatcctacctcca

SEQ ID NO: 62715 - DNA, 120 bp, Homo sapiens
  misc_feature: 1100 for SV(W|O) and mtDNA
tcttgtaaaccggagatgaaaacctttttccaaggacaaatcagagaaaaagtctttaactccaccattagcacccaaagctaagattctaatttaaactattctctattctttcatggg

SEQ ID NO: 62716 - DNA, 120 bp, Homo sapiens
  misc_feature: 1100 for SV(W|O) and mtDNA
acctttttccaaggacaaatcagagaaaaagtctttaactccaccattagcacccaaagctaagattctaatttaaactattctctattctttcatggggaagcagatttgggtaccacc

SEQ ID NO: 62717 - DNA, 120 bp, Homo sapiens
  misc_feature: 1099 for SV(W|O) and mtDNA
ttgtctgggtcgcctaggaggtctggtgagaatagtgttaatgtcattaaggagagaaggaagagaagtaagccgagggcgtctttgattgtgtagtaagggtggaaggtgattttatcg

SEQ ID NO: 62718 - DNA, 120 bp, Homo sapiens
  misc_feature: 1099 for SV(W|O) and mtDNA
tcctcccgaatcaaccctgacccctctccttcataaattattcagcttcctacactattaaagtttaccacaaccaccaccccatcatactctttcacccacagcaccaatcctacctcc

SEQ ID NO: 62719 - DNA, 120 bp, Homo sapiens
  misc_feature: 1099 for SV(W|O) and mtDNA
cttgtaaaccggagatgaaaacctttttccaaggacaaatcagagaaaaagtctttaactccaccattagcacccaaagctaagattctaatttaaactattctctattctttcatgggg

SEQ ID NO: 62720 - DNA, 120 bp, Homo sapiens
  misc_feature: 1099 for SV(W|O) and mtDNA
cttactacacaatcaaagacgccctcggcttacttctcttccttctctccttaatgacattaacactattctcaccagacctcctaggcgacccagacaattataccctagccaacccct

SEQ ID NO: 62721 - DNA, 120 bp, Homo sapiens
  misc_feature: 1099 for SV(W|O) and mtDNA
ccaaatctgcttccccatgaaagaatagagaatagtttaaattagaatcttagctttgggtgctaatggtggagttaaagactttttctctgatttgtccttggaaaaaggttttcatct

SEQ ID NO: 62722 - DNA, 120 bp, Homo sapiens
  misc_feature: 1098 for SV(W|O) and mtDNA
cgcaggatttttctgagccttttaccactccagcctagcccctaccccccaattaggagggcactggcccccaacaggcatcaccccgctaaatcccctagaagtcccactcctaaacac

SEQ ID NO: 62723 - DNA, 120 bp, Homo sapiens
  misc_feature: 1098 for SV(W|O) and mtDNA
gcgatggaggtaggattggtgctgtgggtgaaagagtatgatggggtggtggttgtggtaaactttaatagtgtaggaagctgaataatttatgaaggagaggggtcagggttgattcgg

SEQ ID NO: 62724 - DNA, 120 bp, Homo sapiens
  misc_feature: 1097 for SV(W|O) and mtDNA
ccttactacacaatcaaagacgccctcggcttacttctcttccttctctccttaatgacattaacactattctcaccagacctcctaggcgacccagacaattataccctagccaacccc

SEQ ID NO: 62725 - DNA, 120 bp, Homo sapiens
  misc_feature: 1096 for SV(W|O) and mtDNA
gcaccaataggatcctcccgaatcaaccctgacccctctccttcataaattattcagcttcctacactattaaagtttaccacaaccaccaccccatcatactctttcacccacagcacc

SEQ ID NO: 62726 - DNA, 120 bp, Homo sapiens
  misc_feature: 1095 for SV(W|O) and mtDNA
ttgtaaaccggagatgaaaacctttttccaaggacaaatcagagaaaaagtctttaactccaccattagcacccaaagctaagattctaatttaaactattctctattctttcatgggga

SEQ ID NO: 62727 - DNA, 120 bp, Homo sapiens
  misc_feature: 1093 for SV(W|O) and mtDNA
cacccttactacacaatcaaagacgccctcggcttacttctcttccttctctccttaatgacattaacactattctcaccagacctcctaggcgacccagacaattataccctagccaac

SEQ ID NO: 62728 - DNA, 120 bp, Homo sapiens
  misc_feature: 1092 for SV(W|O) and mtDNA
atcctcccgaatcaaccctgacccctctccttcataaattattcagcttcctacactattaaagtttaccacaaccaccaccccatcatactctttcacccacagcaccaatcctacctc

SEQ ID NO: 62729 - DNA, 120 bp, Homo sapiens
  misc_feature: 1091 for SV(W|O) and mtDNA
actacacaatcaaagacgccctcggcttacttctcttccttctctccttaatgacattaacactattctcaccagacctcctaggcgacccagacaattataccctagccaaccccttaa

SEQ ID NO: 62730 - DNA, 120 bp, Homo sapiens
  misc_feature: 1091 for SV(W|O) and mtDNA
ggatcctcccgaatcaaccctgacccctctccttcataaattattcagcttcctacactattaaagtttaccacaaccaccaccccatcatactctttcacccacagcaccaatcctacc

SEQ ID NO: 62731 - DNA, 120 bp, Homo sapiens
  misc_feature: 1091 for SV(W|O) and mtDNA
aaatctgcttccccatgaaagaatagagaatagtttaaattagaatcttagctttgggtgctaatggtggagttaaagactttttctctgatttgtccttggaaaaaggttttcatctcc

SEQ ID NO: 62732 - DNA, 120 bp, Homo sapiens
  misc_feature: 1091 for SV(W|O) and mtDNA
gatcctcccgaatcaaccctgacccctctccttcataaattattcagcttcctacactattaaagtttaccacaaccaccaccccatcatactctttcacccacagcaccaatcctacct

SEQ ID NO: 62733 - DNA, 120 bp, Homo sapiens
  misc_feature: 1091 for SV(W|O) and mtDNA
cgatggaggtaggattggtgctgtgggtgaaagagtatgatggggtggtggttgtggtaaactttaatagtgtaggaagctgaataatttatgaaggagaggggtcagggttgattcggg

SEQ ID NO: 62734 - DNA, 120 bp, Homo sapiens
  misc_feature: 1091 for SV(W|O) and mtDNA
aggtgttggttctcttaatctttaacttaaaaggttaatgctaagttagctttacagtgggctctagagggggtagagggggtgctatagggtaaatacgggccctatttcaaagatttt

SEQ ID NO: 62735 - DNA, 120 bp, Homo sapiens
  misc_feature: 1090 for SV(W|O) and mtDNA
cctaacaggtcaacctcgcttccccacccttactaacattaacgaaaataaccctaccctactaaaccccattaaacgcctggcagccggaagcctattcgcaggatttctcattactaa

SEQ ID NO: 62736 - DNA, 120 bp, Homo sapiens
  misc_feature: 1090 for SV(W|O) and mtDNA
gtgagggtgggactgtctactgagtagcctcctcagattcattgaactaggtctgtcccaatgtatgggatggcggatagtaagtttgtaattactgtggcccctcagaatgatatttgg

SEQ ID NO: 62737 - DNA, 120 bp, Homo sapiens
  misc_feature: 1089 for SV(W|O) and mtDNA
tctgggtcgcctaggaggtctggtgagaatagtgttaatgtcattaaggagagaaggaagagaagtaagccgagggcgtctttgattgtgtagtaagggtggaaggtgattttatcggaa

SEQ ID NO: 62738 - DNA, 120 bp, Homo sapiens
  misc_feature: 1089 for SV(W|O) and mtDNA
caaatctgcttccccatgaaagaatagagaatagtttaaattagaatcttagctttgggtgctaatggtggagttaaagactttttctctgatttgtccttggaaaaaggttttcatctc

SEQ ID NO: 62739 - DNA, 120 bp, Homo sapiens
  misc_feature: 1088 for SV(W|O) and mtDNA
ggtgttggttctcttaatctttaacttaaaaggttaatgctaagttagctttacagtgggctctagagggggtagagggggtgctatagggtaaatacgggccctatttcaaagattttt

SEQ ID NO: 62740 - DNA, 120 bp, Homo sapiens
  misc_feature: 1087 for SV(W|O) and mtDNA
tgtctgggtcgcctaggaggtctggtgagaatagtgttaatgtcattaaggagagaaggaagagaagtaagccgagggcgtctttgattgtgtagtaagggtggaaggtgattttatcgg

SEQ ID NO: 62741 - DNA, 120 bp, Homo sapiens
  misc_feature: 1087 for SV(W|O) and mtDNA
aaacctttttccaaggacaaatcagagaaaaagtctttaactccaccattagcacccaaagctaagattctaatttaaactattctctattctttcatggggaagcagatttgggtacca

SEQ ID NO: 62742 - DNA, 120 bp, Homo sapiens
  misc_feature: 1086 for SV(W|O) and mtDNA
tcgcaggatttttctgagccttttaccactccagcctagcccctaccccccaattaggagggcactggcccccaacaggcatcaccccgctaaatcccctagaagtcccactcctaaaca

SEQ ID NO: 62743 - DNA, 120 bp, Homo sapiens
  misc_feature: 1086 for SV(W|O) and mtDNA
tgtgagggtgggactgtctactgagtagcctcctcagattcattgaactaggtctgtcccaatgtatgggatggcggatagtaagtttgtaattactgtggcccctcagaatgatatttg

SEQ ID NO: 62744 - DNA, 120 bp, Homo sapiens
  misc_feature: 1086 for SV(W|O) and mtDNA
ccctaacaggtcaacctcgcttccccacccttactaacattaacgaaaataaccctaccctactaaaccccattaaacgcctggcagccggaagcctattcgcaggatttctcattacta

SEQ ID NO: 62745 - DNA, 120 bp, Homo sapiens
  misc_feature: 1086 for SV(W|O) and mtDNA
aacctttttccaaggacaaatcagagaaaaagtctttaactccaccattagcacccaaagctaagattctaatttaaactattctctattctttcatggggaagcagatttgggtaccac

SEQ ID NO: 62746 - DNA, 120 bp, Homo sapiens
  misc_feature: 1084 for SV(W|O) and mtDNA
gtcttgtaaaccggagatgaaaacctttttccaaggacaaatcagagaaaaagtctttaactccaccattagcacccaaagctaagattctaatttaaactattctctattctttcatgg

SEQ ID NO: 62747 - DNA, 120 bp, Homo sapiens
  misc_feature: 1083 for SV(W|O) and mtDNA
ttcgcaggatttttctgagccttttaccactccagcctagcccctaccccccaattaggagggcactggcccccaacaggcatcaccccgctaaatcccctagaagtcccactcctaaac

SEQ ID NO: 62748 - DNA, 120 bp, Homo sapiens
  misc_feature: 1083 for SV(W|O) and mtDNA
aatctgcttccccatgaaagaatagagaatagtttaaattagaatcttagctttgggtgctaatggtggagttaaagactttttctctgatttgtccttggaaaaaggttttcatctccg

SEQ ID NO: 62749 - DNA, 120 bp, Homo sapiens
  misc_feature: 1082 for SV(W|O) and mtDNA
ctaacaggtcaacctcgcttccccacccttactaacattaacgaaaataaccctaccctactaaaccccattaaacgcctggcagccggaagcctattcgcaggatttctcattactaac

SEQ ID NO: 62750 - DNA, 120 bp, Homo sapiens
  misc_feature: 1081 for SV(W|O) and mtDNA
cccttactacacaatcaaagacgccctcggcttacttctcttccttctctccttaatgacattaacactattctcaccagacctcctaggcgacccagacaattataccctagccaaccc

SEQ ID NO: 62751 - DNA, 120 bp, Homo sapiens
  misc_feature: 1081 for SV(W|O) and mtDNA
acccaaatctgcttccccatgaaagaatagagaatagtttaaattagaatcttagctttgggtgctaatggtggagttaaagactttttctctgatttgtccttggaaaaaggttttcat

SEQ ID NO: 62752 - DNA, 120 bp, Homo sapiens
  misc_feature: 1080 for SV(W|O) and mtDNA
cgcaccaataggatcctcccgaatcaaccctgacccctctccttcataaattattcagcttcctacactattaaagtttaccacaaccaccaccccatcatactctttcacccacagcac

SEQ ID NO: 62753 - DNA, 120 bp, Homo sapiens
  misc_feature: 1079 for SV(W|O) and mtDNA
tgtaaaccggagatgaaaacctttttccaaggacaaatcagagaaaaagtctttaactccaccattagcacccaaagctaagattctaatttaaactattctctattctttcatggggaa

SEQ ID NO: 62754 - DNA, 120 bp, Homo sapiens
  misc_feature: 1079 for SV(W|O) and mtDNA
taacaggtcaacctcgcttccccacccttactaacattaacgaaaataaccctaccctactaaaccccattaaacgcctggcagccggaagcctattcgcaggatttctcattactaaca

SEQ ID NO: 62755 - DNA, 120 bp, Homo sapiens
  misc_feature: 1079 for SV(W|O) and mtDNA
tacccaaatctgcttccccatgaaagaatagagaatagtttaaattagaatcttagctttgggtgctaatggtggagttaaagactttttctctgatttgtccttggaaaaaggttttca

SEQ ID NO: 62756 - DNA, 120 bp, Homo sapiens
  misc_feature: 1079 for SV(W|O) and mtDNA
acccttactacacaatcaaagacgccctcggcttacttctcttccttctctccttaatgacattaacactattctcaccagacctcctaggcgacccagacaattataccctagccaacc

SEQ ID NO: 62757 - DNA, 120 bp, Homo sapiens
  misc_feature: 1079 for SV(W|O) and mtDNA
aaaacctttttccaaggacaaatcagagaaaaagtctttaactccaccattagcacccaaagctaagattctaatttaaactattctctattctttcatggggaagcagatttgggtacc

SEQ ID NO: 62758 - DNA, 120 bp, Homo sapiens
  misc_feature: 1079 for SV(W|O) and mtDNA
accagtcttgtaaaccggagatgaaaacctttttccaaggacaaatcagagaaaaagtctttaactccaccattagcacccaaagctaagattctaatttaaactattctctattctttc

SEQ ID NO: 62759 - DNA, 120 bp, Homo sapiens
  misc_feature: 1079 for SV(W|O) and mtDNA
ctgggtcgcctaggaggtctggtgagaatagtgttaatgtcattaaggagagaaggaagagaagtaagccgagggcgtctttgattgtgtagtaagggtggaaggtgattttatcggaat

SEQ ID NO: 62760 - DNA, 120 bp, Homo sapiens
  misc_feature: 1079 for SV(W|O) and mtDNA
agtcttgtaaaccggagatgaaaacctttttccaaggacaaatcagagaaaaagtctttaactccaccattagcacccaaagctaagattctaatttaaactattctctattctttcatg

SEQ ID NO: 62761 - DNA, 120 bp, Homo sapiens
  misc_feature: 1078 for SV(W|O) and mtDNA
aacaggtcaacctcgcttccccacccttactaacattaacgaaaataaccctaccctactaaaccccattaaacgcctggcagccggaagcctattcgcaggatttctcattactaacaa

SEQ ID NO: 62762 - DNA, 120 bp, Homo sapiens
  misc_feature: 1076 for SV(W|O) and mtDNA
gtctgggtcgcctaggaggtctggtgagaatagtgttaatgtcattaaggagagaaggaagagaagtaagccgagggcgtctttgattgtgtagtaagggtggaaggtgattttatcgga

SEQ ID NO: 62763 - DNA, 120 bp, Homo sapiens
  misc_feature: 1076 for SV(W|O) and mtDNA
caccctaacaggtcaacctcgcttccccacccttactaacattaacgaaaataaccctaccctactaaaccccattaaacgcctggcagccggaagcctattcgcaggatttctcattac

SEQ ID NO: 62764 - DNA, 120 bp, Homo sapiens
  misc_feature: 1076 for SV(W|O) and mtDNA
cttccccatgaaagaatagagaatagtttaaattagaatcttagctttgggtgctaatggtggagttaaagactttttctctgatttgtccttggaaaaaggttttcatctccggtttac

SEQ ID NO: 62765 - DNA, 120 bp, Homo sapiens
  misc_feature: 1075 for SV(W|O) and mtDNA
ccagtcttgtaaaccggagatgaaaacctttttccaaggacaaatcagagaaaaagtctttaactccaccattagcacccaaagctaagattctaatttaaactattctctattctttca

SEQ ID NO: 62766 - DNA, 120 bp, Homo sapiens
  misc_feature: 1073 for SV(W|O) and mtDNA
tgttgttagtaatgagaaatcctgcgaataggcttccggctgccaggcgtttaatggggtttagtagggtagggttattttcgttaatgttagtaagggtggggaagcgaggttgacctg

SEQ ID NO: 62767 - DNA, 120 bp, Homo sapiens
  misc_feature: 1073 for SV(W|O) and mtDNA
gtgtgagggtgggactgtctactgagtagcctcctcagattcattgaactaggtctgtcccaatgtatgggatggcggatagtaagtttgtaattactgtggcccctcagaatgatattt

SEQ ID NO: 62768 - DNA, 120 bp, Homo sapiens
  misc_feature: 1071 for SV(W|O) and mtDNA
acaggtcaacctcgcttccccacccttactaacattaacgaaaataaccctaccctactaaaccccattaaacgcctggcagccggaagcctattcgcaggatttctcattactaacaac

SEQ ID NO: 62769 - DNA, 120 bp, Homo sapiens
  misc_feature: 1071 for SV(W|O) and mtDNA
cccaaatctgcttccccatgaaagaatagagaatagtttaaattagaatcttagctttgggtgctaatggtggagttaaagactttttctctgatttgtccttggaaaaaggttttcatc

SEQ ID NO: 62770 - DNA, 120 bp, Homo sapiens
  misc_feature: 1069 for SV(W|O) and mtDNA
tgggtcgcctaggaggtctggtgagaatagtgttaatgtcattaaggagagaaggaagagaagtaagccgagggcgtctttgattgtgtagtaagggtggaaggtgattttatcggaatg

SEQ ID NO: 62771 - DNA, 120 bp, Homo sapiens
  misc_feature: 1069 for SV(W|O) and mtDNA
accctaacaggtcaacctcgcttccccacccttactaacattaacgaaaataaccctaccctactaaaccccattaaacgcctggcagccggaagcctattcgcaggatttctcattact

SEQ ID NO: 62772 - DNA, 120 bp, Homo sapiens
  misc_feature: 1068 for SV(W|O) and mtDNA
gtacccaaatctgcttccccatgaaagaatagagaatagtttaaattagaatcttagctttgggtgctaatggtggagttaaagactttttctctgatttgtccttggaaaaaggttttc

SEQ ID NO: 62773 - DNA, 120 bp, Homo sapiens
  misc_feature: 1068 for SV(W|O) and mtDNA
atgttgttagtaatgagaaatcctgcgaataggcttccggctgccaggcgtttaatggggtttagtagggtagggttattttcgttaatgttagtaagggtggggaagcgaggttgacct

SEQ ID NO: 62774 - DNA, 120 bp, Homo sapiens
  misc_feature: 1064 for SV(W|O) and mtDNA
cagtcttgtaaaccggagatgaaaacctttttccaaggacaaatcagagaaaaagtctttaactccaccattagcacccaaagctaagattctaatttaaactattctctattctttcat

SEQ ID NO: 62775 - DNA, 120 bp, Homo sapiens
  misc_feature: 1063 for SV(W|O) and mtDNA
cgtgtgagggtgggactgtctactgagtagcctcctcagattcattgaactaggtctgtcccaatgtatgggatggcggatagtaagtttgtaattactgtggcccctcagaatgatatt

SEQ ID NO: 62776 - DNA, 120 bp, Homo sapiens
  misc_feature: 1063 for SV(W|O) and mtDNA
atctgcttccccatgaaagaatagagaatagtttaaattagaatcttagctttgggtgctaatggtggagttaaagactttttctctgatttgtccttggaaaaaggttttcatctccgg

SEQ ID NO: 62777 - DNA, 120 bp, Homo sapiens
  misc_feature: 1059 for SV(W|O) and mtDNA
gggtcgcctaggaggtctggtgagaatagtgttaatgtcattaaggagagaaggaagagaagtaagccgagggcgtctttgattgtgtagtaagggtggaaggtgattttatcggaatgg

SEQ ID NO: 62778 - DNA, 120 bp, Homo sapiens
  misc_feature: 1059 for SV(W|O) and mtDNA
aggaggtctggtgagaatagtgttaatgtcattaaggagagaaggaagagaagtaagccgagggcgtctttgattgtgtagtaagggtggaaggtgattttatcggaatgggaggtgatt

SEQ ID NO: 62779 - DNA, 120 bp, Homo sapiens
  misc_feature: 1058 for SV(W|O) and mtDNA
tctgcttccccatgaaagaatagagaatagtttaaattagaatcttagctttgggtgctaatggtggagttaaagactttttctctgatttgtccttggaaaaaggttttcatctccggt

SEQ ID NO: 62780 - DNA, 120 bp, Homo sapiens
  misc_feature: 1057 for SV(W|O) and mtDNA
gcttccccatgaaagaatagagaatagtttaaattagaatcttagctttgggtgctaatggtggagttaaagactttttctctgatttgtccttggaaaaaggttttcatctccggttta

SEQ ID NO: 62781 - DNA, 120 bp, Homo sapiens
  misc_feature: 1052 for SV(W|O) and mtDNA
tgcttccccatgaaagaatagagaatagtttaaattagaatcttagctttgggtgctaatggtggagttaaagactttttctctgatttgtccttggaaaaaggttttcatctccggttt

SEQ ID NO: 62782 - DNA, 120 bp, Homo sapiens
  misc_feature: 1045 for SV(W|O) and mtDNA
gtctggtgagaatagtgttaatgtcattaaggagagaaggaagagaagtaagccgagggcgtctttgattgtgtagtaagggtggaaggtgattttatcggaatgggaggtgattcctag

SEQ ID NO: 62783 - DNA, 120 bp, Homo sapiens
  misc_feature: 1044 for SV(W|O) and mtDNA
tcgtgtgagggtgggactgtctactgagtagcctcctcagattcattgaactaggtctgtcccaatgtatgggatggcggatagtaagtttgtaattactgtggcccctcagaatgatat

SEQ ID NO: 62784 - DNA, 120 bp, Homo sapiens
  misc_feature: 1044 for SV(W|O) and mtDNA
ctgcttccccatgaaagaatagagaatagtttaaattagaatcttagctttgggtgctaatggtggagttaaagactttttctctgatttgtccttggaaaaaggttttcatctccggtt

SEQ ID NO: 62785 - DNA, 120 bp, Homo sapiens
  misc_feature: 1043 for SV(W|O) and mtDNA
ggaggtctggtgagaatagtgttaatgtcattaaggagagaaggaagagaagtaagccgagggcgtctttgattgtgtagtaagggtggaaggtgattttatcggaatgggaggtgattc

SEQ ID NO: 62786 - DNA, 120 bp, Homo sapiens
  misc_feature: 1042 for SV(W|O) and mtDNA
aatgttgttagtaatgagaaatcctgcgaataggcttccggctgccaggcgtttaatggggtttagtagggtagggttattttcgttaatgttagtaagggtggggaagcgaggttgacc

SEQ ID NO: 62787 - DNA, 120 bp, Homo sapiens
  misc_feature: 1037 for SV(W|O) and mtDNA
gaaatgttgttagtaatgagaaatcctgcgaataggcttccggctgccaggcgtttaatggggtttagtagggtagggttattttcgttaatgttagtaagggtggggaagcgaggttga

SEQ ID NO: 62788 - DNA, 120 bp, Homo sapiens
  misc_feature: 1036 for SV(W|O) and mtDNA
aaatgttgttagtaatgagaaatcctgcgaataggcttccggctgccaggcgtttaatggggtttagtagggtagggttattttcgttaatgttagtaagggtggggaagcgaggttgac

SEQ ID NO: 62789 - DNA, 120 bp, Homo sapiens
  misc_feature: 1035 for SV(W|O) and mtDNA
atcgtgtgagggtgggactgtctactgagtagcctcctcagattcattgaactaggtctgtcccaatgtatgggatggcggatagtaagtttgtaattactgtggcccctcagaatgata

SEQ ID NO: 62790 - DNA, 120 bp, Homo sapiens
  misc_feature: 1030 for SV(W|O) and mtDNA
ggtctggtgagaatagtgttaatgtcattaaggagagaaggaagagaagtaagccgagggcgtctttgattgtgtagtaagggtggaaggtgattttatcggaatgggaggtgattccta

SEQ ID NO: 62791 - DNA, 120 bp, Homo sapiens
  misc_feature: 1026 for SV(W|O) and mtDNA
tagggctgcaataatgaagggcaagatgaagtgaaaggtaaagaatcgtgtgagggtgggactgtctactgagtagcctcctcagattcattgaactaggtctgtcccaatgtatgggat

SEQ ID NO: 62792 - DNA, 120 bp, Homo sapiens
  misc_feature: 1023 for SV(W|O) and mtDNA
aatcgtgtgagggtgggactgtctactgagtagcctcctcagattcattgaactaggtctgtcccaatgtatgggatggcggatagtaagtttgtaattactgtggcccctcagaatgat

SEQ ID NO: 62793 - DNA, 120 bp, Homo sapiens
  misc_feature: 1017 for SV(W|O) and mtDNA
gctagggctgcaataatgaagggcaagatgaagtgaaaggtaaagaatcgtgtgagggtgggactgtctactgagtagcctcctcagattcattgaactaggtctgtcccaatgtatggg

SEQ ID NO: 62794 - DNA, 120 bp, Homo sapiens
  misc_feature: 1017 for SV(W|O) and mtDNA
aggtctggtgagaatagtgttaatgtcattaaggagagaaggaagagaagtaagccgagggcgtctttgattgtgtagtaagggtggaaggtgattttatcggaatgggaggtgattcct

SEQ ID NO: 62795 - DNA, 120 bp, Homo sapiens
  misc_feature: 1015 for SV(W|O) and mtDNA
agggctgcaataatgaagggcaagatgaagtgaaaggtaaagaatcgtgtgagggtgggactgtctactgagtagcctcctcagattcattgaactaggtctgtcccaatgtatgggatg

SEQ ID NO: 62796 - DNA, 120 bp, Homo sapiens
  misc_feature: 1014 for SV(W|O) and mtDNA
tgctagggctgcaataatgaagggcaagatgaagtgaaaggtaaagaatcgtgtgagggtgggactgtctactgagtagcctcctcagattcattgaactaggtctgtcccaatgtatgg

SEQ ID NO: 62797 - DNA, 120 bp, Homo sapiens
  misc_feature: 1014 for SV(W|O) and mtDNA
ggctgcaataatgaagggcaagatgaagtgaaaggtaaagaatcgtgtgagggtgggactgtctactgagtagcctcctcagattcattgaactaggtctgtcccaatgtatgggatggc

SEQ ID NO: 62798 - DNA, 120 bp, Homo sapiens
  misc_feature: 1013 for SV(W|O) and mtDNA
gaggtctggtgagaatagtgttaatgtcattaaggagagaaggaagagaagtaagccgagggcgtctttgattgtgtagtaagggtggaaggtgattttatcggaatgggaggtgattcc

SEQ ID NO: 62799 - DNA, 120 bp, Homo sapiens
  misc_feature: 1008 for SV(W|O) and mtDNA
gggctgcaataatgaagggcaagatgaagtgaaaggtaaagaatcgtgtgagggtgggactgtctactgagtagcctcctcagattcattgaactaggtctgtcccaatgtatgggatgg

SEQ ID NO: 62800 - DNA, 120 bp, Homo sapiens
  misc_feature: 1005 for SV(W|O) and mtDNA
gaatcgtgtgagggtgggactgtctactgagtagcctcctcagattcattgaactaggtctgtcccaatgtatgggatggcggatagtaagtttgtaattactgtggcccctcagaatga

SEQ ID NO: 62801 - DNA, 120 bp, Homo sapiens
  misc_feature: 1003 for SV(W|O) and mtDNA
gctgcaataatgaagggcaagatgaagtgaaaggtaaagaatcgtgtgagggtgggactgtctactgagtagcctcctcagattcattgaactaggtctgtcccaatgtatgggatggcg

SEQ ID NO: 62802 - DNA, 120 bp, Homo sapiens
  misc_feature: 1001 for SV(W|O) and mtDNA
ctagggctgcaataatgaagggcaagatgaagtgaaaggtaaagaatcgtgtgagggtgggactgtctactgagtagcctcctcagattcattgaactaggtctgtcccaatgtatggga

SEQ ID NO: 62803 - DNA, 120 bp, Homo sapiens
  misc_feature: 1001 for SV(W|O) and mtDNA
taattacaaacttactatccgccatcccatacattgggacagacctagttcaatgaatctgaggaggctactcagtagacagtcccaccctcacacgattctttacctttcacttcatct

SEQ ID NO: 62804 - DNA, 120 bp, Homo sapiens
  misc_feature: 998 for SV(W|O) and mtDNA
ctgctagggctgcaataatgaagggcaagatgaagtgaaaggtaaagaatcgtgtgagggtgggactgtctactgagtagcctcctcagattcattgaactaggtctgtcccaatgtatg

SEQ ID NO: 62805 - DNA, 120 bp, Homo sapiens
  misc_feature: 997 for SV(W|O) and mtDNA
tggggattttattttaagtttgttggttaggtagttgaggtctagggctgttagaagtcctaggaaagtgacagcgagggctgtgagttttaggtagagggggattgttgtttggaaggg

SEQ ID NO: 62806 - DNA, 120 bp, Homo sapiens
  misc_feature: 997 for SV(W|O) and mtDNA
aaacttactatccgccatcccatacattgggacagacctagttcaatgaatctgaggaggctactcagtagacagtcccaccctcacacgattctttacctttcacttcatcttgccctt

SEQ ID NO: 62807 - DNA, 120 bp, Homo sapiens
  misc_feature: 994 for SV(W|O) and mtDNA
ctgcaataatgaagggcaagatgaagtgaaaggtaaagaatcgtgtgagggtgggactgtctactgagtagcctcctcagattcattgaactaggtctgtcccaatgtatgggatggcgg

SEQ ID NO: 62808 - DNA, 120 bp, Homo sapiens
  misc_feature: 993 for SV(W|O) and mtDNA
ataatgaagggcaagatgaagtgaaaggtaaagaatcgtgtgagggtgggactgtctactgagtagcctcctcagattcattgaactaggtctgtcccaatgtatgggatggcggatagt

SEQ ID NO: 62809 - DNA, 120 bp, Homo sapiens
  misc_feature: 992 for SV(W|O) and mtDNA
gcaataatgaagggcaagatgaagtgaaaggtaaagaatcgtgtgagggtgggactgtctactgagtagcctcctcagattcattgaactaggtctgtcccaatgtatgggatggcggat

SEQ ID NO: 62810 - DNA, 120 bp, Homo sapiens
  misc_feature: 991 for SV(W|O) and mtDNA
tgcaataatgaagggcaagatgaagtgaaaggtaaagaatcgtgtgagggtgggactgtctactgagtagcctcctcagattcattgaactaggtctgtcccaatgtatgggatggcgga

SEQ ID NO: 62811 - DNA, 120 bp, Homo sapiens
  misc_feature: 991 for SV(W|O) and mtDNA
gctgctagggctgcaataatgaagggcaagatgaagtgaaaggtaaagaatcgtgtgagggtgggactgtctactgagtagcctcctcagattcattgaactaggtctgtcccaatgtat

SEQ ID NO: 62812 - DNA, 120 bp, Homo sapiens
  misc_feature: 991 for SV(W|O) and mtDNA
agaatcgtgtgagggtgggactgtctactgagtagcctcctcagattcattgaactaggtctgtcccaatgtatgggatggcggatagtaagtttgtaattactgtggcccctcagaatg

SEQ ID NO: 62813 - DNA, 120 bp, Homo sapiens
  misc_feature: 990 for SV(W|O) and mtDNA
aataatgaagggcaagatgaagtgaaaggtaaagaatcgtgtgagggtgggactgtctactgagtagcctcctcagattcattgaactaggtctgtcccaatgtatgggatggcggatag

SEQ ID NO: 62814 - DNA, 120 bp, Homo sapiens
  misc_feature: 990 for SV(W|O) and mtDNA
caaacttactatccgccatcccatacattgggacagacctagttcaatgaatctgaggaggctactcagtagacagtcccaccctcacacgattctttacctttcacttcatcttgccct

SEQ ID NO: 62815 - DNA, 120 bp, Homo sapiens
  misc_feature: 989 for SV(W|O) and mtDNA
aagaatcgtgtgagggtgggactgtctactgagtagcctcctcagattcattgaactaggtctgtcccaatgtatgggatggcggatagtaagtttgtaattactgtggcccctcagaat

SEQ ID NO: 62816 - DNA, 120 bp, Homo sapiens
  misc_feature: 988 for SV(W|O) and mtDNA
tgctgctagggctgcaataatgaagggcaagatgaagtgaaaggtaaagaatcgtgtgagggtgggactgtctactgagtagcctcctcagattcattgaactaggtctgtcccaatgta

SEQ ID NO: 62817 - DNA, 120 bp, Homo sapiens
  misc_feature: 987 for SV(W|O) and mtDNA
taatgaagggcaagatgaagtgaaaggtaaagaatcgtgtgagggtgggactgtctactgagtagcctcctcagattcattgaactaggtctgtcccaatgtatgggatggcggatagta

SEQ ID NO: 62818 - DNA, 120 bp, Homo sapiens
  misc_feature: 987 for SV(W|O) and mtDNA
atgaagggcaagatgaagtgaaaggtaaagaatcgtgtgagggtgggactgtctactgagtagcctcctcagattcattgaactaggtctgtcccaatgtatgggatggcggatagtaag

SEQ ID NO: 62819 - DNA, 120 bp, Homo sapiens
  misc_feature: 983 for SV(W|O) and mtDNA
caataatgaagggcaagatgaagtgaaaggtaaagaatcgtgtgagggtgggactgtctactgagtagcctcctcagattcattgaactaggtctgtcccaatgtatgggatggcggata

SEQ ID NO: 62820 - DNA, 120 bp, Homo sapiens
  misc_feature: 982 for SV(W|O) and mtDNA
acaaacttactatccgccatcccatacattgggacagacctagttcaatgaatctgaggaggctactcagtagacagtcccaccctcacacgattctttacctttcacttcatcttgccc

SEQ ID NO: 62821 - DNA, 120 bp, Homo sapiens
  misc_feature: 982 for SV(W|O) and mtDNA
aattacaaacttactatccgccatcccatacattgggacagacctagttcaatgaatctgaggaggctactcagtagacagtcccaccctcacacgattctttacctttcacttcatctt

SEQ ID NO: 62822 - DNA, 120 bp, Homo sapiens
  misc_feature: 981 for SV(W|O) and mtDNA
aatgaagggcaagatgaagtgaaaggtaaagaatcgtgtgagggtgggactgtctactgagtagcctcctcagattcattgaactaggtctgtcccaatgtatgggatggcggatagtaa

SEQ ID NO: 62823 - DNA, 120 bp, Homo sapiens
  misc_feature: 980 for SV(W|O) and mtDNA
gtgctgctagggctgcaataatgaagggcaagatgaagtgaaaggtaaagaatcgtgtgagggtgggactgtctactgagtagcctcctcagattcattgaactaggtctgtcccaatgt

SEQ ID NO: 62824 - DNA, 120 bp, Homo sapiens
  misc_feature: 980 for SV(W|O) and mtDNA
aacttactatccgccatcccatacattgggacagacctagttcaatgaatctgaggaggctactcagtagacagtcccaccctcacacgattctttacctttcacttcatcttgcccttc

SEQ ID NO: 62825 - DNA, 120 bp, Homo sapiens
  misc_feature: 980 for SV(W|O) and mtDNA
agtgctgctagggctgcaataatgaagggcaagatgaagtgaaaggtaaagaatcgtgtgagggtgggactgtctactgagtagcctcctcagattcattgaactaggtctgtcccaatg

SEQ ID NO: 62826 - DNA, 120 bp, Homo sapiens
  misc_feature: 971 for SV(W|O) and mtDNA
tacaaacttactatccgccatcccatacattgggacagacctagttcaatgaatctgaggaggctactcagtagacagtcccaccctcacacgattctttacctttcacttcatcttgcc

SEQ ID NO: 62827 - DNA, 120 bp, Homo sapiens
  misc_feature: 969 for SV(W|O) and mtDNA
aaagaatcgtgtgagggtgggactgtctactgagtagcctcctcagattcattgaactaggtctgtcccaatgtatgggatggcggatagtaagtttgtaattactgtggcccctcagaa

SEQ ID NO: 62828 - DNA, 120 bp, Homo sapiens
  misc_feature: 968 for SV(W|O) and mtDNA
gtaattacaaacttactatccgccatcccatacattgggacagacctagttcaatgaatctgaggaggctactcagtagacagtcccaccctcacacgattctttacctttcacttcatc

SEQ ID NO: 62829 - DNA, 120 bp, Homo sapiens
  misc_feature: 967 for SV(W|O) and mtDNA
ttacaaacttactatccgccatcccatacattgggacagacctagttcaatgaatctgaggaggctactcagtagacagtcccaccctcacacgattctttacctttcacttcatcttgc

SEQ ID NO: 62830 - DNA, 120 bp, Homo sapiens
  misc_feature: 967 for SV(W|O) and mtDNA
ggggattttattttaagtttgttggttaggtagttgaggtctagggctgttagaagtcctaggaaagtgacagcgagggctgtgagttttaggtagagggggattgttgtttggaagggg

SEQ ID NO: 62831 - DNA, 120 bp, Homo sapiens
  misc_feature: 965 for SV(W|O) and mtDNA
ggagtgctgctagggctgcaataatgaagggcaagatgaagtgaaaggtaaagaatcgtgtgagggtgggactgtctactgagtagcctcctcagattcattgaactaggtctgtcccaa

SEQ ID NO: 62832 - DNA, 120 bp, Homo sapiens
  misc_feature: 965 for SV(W|O) and mtDNA
tgaagggcaagatgaagtgaaaggtaaagaatcgtgtgagggtgggactgtctactgagtagcctcctcagattcattgaactaggtctgtcccaatgtatgggatggcggatagtaagt

SEQ ID NO: 62833 - DNA, 120 bp, Homo sapiens
  misc_feature: 964 for SV(W|O) and mtDNA
tggagtgctgctagggctgcaataatgaagggcaagatgaagtgaaaggtaaagaatcgtgtgagggtgggactgtctactgagtagcctcctcagattcattgaactaggtctgtccca

SEQ ID NO: 62834 - DNA, 120 bp, Homo sapiens
  misc_feature: 962 for SV(W|O) and mtDNA
gagtgctgctagggctgcaataatgaagggcaagatgaagtgaaaggtaaagaatcgtgtgagggtgggactgtctactgagtagcctcctcagattcattgaactaggtctgtcccaat

SEQ ID NO: 62835 - DNA, 120 bp, Homo sapiens
  misc_feature: 961 for SV(W|O) and mtDNA
taaagaatcgtgtgagggtgggactgtctactgagtagcctcctcagattcattgaactaggtctgtcccaatgtatgggatggcggatagtaagtttgtaattactgtggcccctcaga

SEQ ID NO: 62836 - DNA, 120 bp, Homo sapiens
  misc_feature: 960 for SV(W|O) and mtDNA
tgaagtgaaaggtaaagaatcgtgtgagggtgggactgtctactgagtagcctcctcagattcattgaactaggtctgtcccaatgtatgggatggcggatagtaagtttgtaattactg

SEQ ID NO: 62837 - DNA, 120 bp, Homo sapiens
  misc_feature: 960 for SV(W|O) and mtDNA
agtaattacaaacttactatccgccatcccatacattgggacagacctagttcaatgaatctgaggaggctactcagtagacagtcccaccctcacacgattctttacctttcacttcat

SEQ ID NO: 62838 - DNA, 120 bp, Homo sapiens
  misc_feature: 959 for SV(W|O) and mtDNA
ggtaaagaatcgtgtgagggtgggactgtctactgagtagcctcctcagattcattgaactaggtctgtcccaatgtatgggatggcggatagtaagtttgtaattactgtggcccctca

SEQ ID NO: 62839 - DNA, 120 bp, Homo sapiens
  misc_feature: 959 for SV(W|O) and mtDNA
gtaaagaatcgtgtgagggtgggactgtctactgagtagcctcctcagattcattgaactaggtctgtcccaatgtatgggatggcggatagtaagtttgtaattactgtggcccctcag

SEQ ID NO: 62840 - DNA, 120 bp, Homo sapiens
  misc_feature: 959 for SV(W|O) and mtDNA
gaagtgaaaggtaaagaatcgtgtgagggtgggactgtctactgagtagcctcctcagattcattgaactaggtctgtcccaatgtatgggatggcggatagtaagtttgtaattactgt

SEQ ID NO: 62841 - DNA, 120 bp, Homo sapiens
  misc_feature: 955 for SV(W|O) and mtDNA
attacaaacttactatccgccatcccatacattgggacagacctagttcaatgaatctgaggaggctactcagtagacagtcccaccctcacacgattctttacctttcacttcatcttg

SEQ ID NO: 62842 - DNA, 120 bp, Homo sapiens
  misc_feature: 954 for SV(W|O) and mtDNA
aagtgaaaggtaaagaatcgtgtgagggtgggactgtctactgagtagcctcctcagattcattgaactaggtctgtcccaatgtatgggatggcggatagtaagtttgtaattactgtg

SEQ ID NO: 62843 - DNA, 120 bp, Homo sapiens
  misc_feature: 953 for SV(W|O) and mtDNA
ggggccacagtaattacaaacttactatccgccatcccatacattgggacagacctagttcaatgaatctgaggaggctactcagtagacagtcccaccctcacacgattctttaccttt

SEQ ID NO: 62844 - DNA, 120 bp, Homo sapiens
  misc_feature: 949 for SV(W|O) and mtDNA
ggccacagtaattacaaacttactatccgccatcccatacattgggacagacctagttcaatgaatctgaggaggctactcagtagacagtcccaccctcacacgattctttacctttca

SEQ ID NO: 62845 - DNA, 120 bp, Homo sapiens
  misc_feature: 949 for SV(W|O) and mtDNA
gtggagtgctgctagggctgcaataatgaagggcaagatgaagtgaaaggtaaagaatcgtgtgagggtgggactgtctactgagtagcctcctcagattcattgaactaggtctgtccc

SEQ ID NO: 62846 - DNA, 120 bp, Homo sapiens
  misc_feature: 949 for SV(W|O) and mtDNA
aggtaaagaatcgtgtgagggtgggactgtctactgagtagcctcctcagattcattgaactaggtctgtcccaatgtatgggatggcggatagtaagtttgtaattactgtggcccctc

SEQ ID NO: 62847 - DNA, 120 bp, Homo sapiens
  misc_feature: 945 for SV(W|O) and mtDNA
gggccacagtaattacaaacttactatccgccatcccatacattgggacagacctagttcaatgaatctgaggaggctactcagtagacagtcccaccctcacacgattctttacctttc

SEQ ID NO: 62848 - DNA, 120 bp, Homo sapiens
  misc_feature: 943 for SV(W|O) and mtDNA
gccacagtaattacaaacttactatccgccatcccatacattgggacagacctagttcaatgaatctgaggaggctactcagtagacagtcccaccctcacacgattctttacctttcac

SEQ ID NO: 62849 - DNA, 120 bp, Homo sapiens
  misc_feature: 943 for SV(W|O) and mtDNA
ggtggagtgctgctagggctgcaataatgaagggcaagatgaagtgaaaggtaaagaatcgtgtgagggtgggactgtctactgagtagcctcctcagattcattgaactaggtctgtcc

SEQ ID NO: 62850 - DNA, 120 bp, Homo sapiens
  misc_feature: 942 for SV(W|O) and mtDNA
agtgaaaggtaaagaatcgtgtgagggtgggactgtctactgagtagcctcctcagattcattgaactaggtctgtcccaatgtatgggatggcggatagtaagtttgtaattactgtgg

SEQ ID NO: 62851 - DNA, 120 bp, Homo sapiens
  misc_feature: 938 for SV(W|O) and mtDNA
aaggtaaagaatcgtgtgagggtgggactgtctactgagtagcctcctcagattcattgaactaggtctgtcccaatgtatgggatggcggatagtaagtttgtaattactgtggcccct

SEQ ID NO: 62852 - DNA, 120 bp, Homo sapiens
  misc_feature: 928 for SV(W|O) and mtDNA
cctcctattcttgcacgaaacgggatcaaacaaccccctaggaatcacctcccattccgataaaatcaccttccacccttactacacaatcaaagacgccctcggcttacttctcttcct

SEQ ID NO: 62853 - DNA, 120 bp, Homo sapiens
  misc_feature: 923 for SV(W|O) and mtDNA
gggattttattttaagtttgttggttaggtagttgaggtctagggctgttagaagtcctaggaaagtgacagcgagggctgtgagttttaggtagagggggattgttgtttggaaggggg

SEQ ID NO: 62854 - DNA, 120 bp, Homo sapiens
  misc_feature: 914 for SV(W|O) and mtDNA
gccctagcagcactccacctcctattcttgcacgaaacgggatcaaacaaccccctaggaatcacctcccattccgataaaatcaccttccacccttactacacaatcaaagacgccctc

SEQ ID NO: 62855 - DNA, 120 bp, Homo sapiens
  misc_feature: 911 for SV(W|O) and mtDNA
acctcctattcttgcacgaaacgggatcaaacaaccccctaggaatcacctcccattccgataaaatcaccttccacccttactacacaatcaaagacgccctcggcttacttctcttcc

SEQ ID NO: 62856 - DNA, 120 bp, Homo sapiens
  misc_feature: 910 for SV(W|O) and mtDNA
aaggaagagaagtaagccgagggcgtctttgattgtgtagtaagggtggaaggtgattttatcggaatgggaggtgattcctagggggttgtttgatcccgtttcgtgcaagaataggag

SEQ ID NO: 62857 - DNA, 120 bp, Homo sapiens
  misc_feature: 908 for SV(W|O) and mtDNA
ccctagcagcactccacctcctattcttgcacgaaacgggatcaaacaaccccctaggaatcacctcccattccgataaaatcaccttccacccttactacacaatcaaagacgccctcg

SEQ ID NO: 62858 - DNA, 120 bp, Homo sapiens
  misc_feature: 907 for SV(W|O) and mtDNA
ttattgcagccctagcagcactccacctcctattcttgcacgaaacgggatcaaacaaccccctaggaatcacctcccattccgataaaatcaccttccacccttactacacaatcaaag

SEQ ID NO: 62859 - DNA, 120 bp, Homo sapiens
  misc_feature: 905 for SV(W|O) and mtDNA
attattgcagccctagcagcactccacctcctattcttgcacgaaacgggatcaaacaaccccctaggaatcacctcccattccgataaaatcaccttccacccttactacacaatcaaa

SEQ ID NO: 62860 - DNA, 120 bp, Homo sapiens
  misc_feature: 900 for SV(W|O) and mtDNA
cacctcctattcttgcacgaaacgggatcaaacaaccccctaggaatcacctcccattccgataaaatcaccttccacccttactacacaatcaaagacgccctcggcttacttctcttc

SEQ ID NO: 62861 - DNA, 120 bp, Homo sapiens
  misc_feature: 896 for SV(W|O) and mtDNA
agccctagcagcactccacctcctattcttgcacgaaacgggatcaaacaaccccctaggaatcacctcccattccgataaaatcaccttccacccttactacacaatcaaagacgccct

SEQ ID NO: 62862 - DNA, 120 bp, Homo sapiens
  misc_feature: 895 for SV(W|O) and mtDNA
ttcattattgcagccctagcagcactccacctcctattcttgcacgaaacgggatcaaacaaccccctaggaatcacctcccattccgataaaatcaccttccacccttactacacaatc

SEQ ID NO: 62863 - DNA, 120 bp, Homo sapiens
  misc_feature: 895 for SV(W|O) and mtDNA
ctccacctcctattcttgcacgaaacgggatcaaacaaccccctaggaatcacctcccattccgataaaatcaccttccacccttactacacaatcaaagacgccctcggcttacttctc

SEQ ID NO: 62864 - DNA, 120 bp, Homo sapiens
  misc_feature: 894 for SV(W|O) and mtDNA
ccacctcctattcttgcacgaaacgggatcaaacaaccccctaggaatcacctcccattccgataaaatcaccttccacccttactacacaatcaaagacgccctcggcttacttctctt

SEQ ID NO: 62865 - DNA, 120 bp, Homo sapiens
  misc_feature: 891 for SV(W|O) and mtDNA
cagccctagcagcactccacctcctattcttgcacgaaacgggatcaaacaaccccctaggaatcacctcccattccgataaaatcaccttccacccttactacacaatcaaagacgccc

SEQ ID NO: 62866 - DNA, 120 bp, Homo sapiens
  misc_feature: 889 for SV(W|O) and mtDNA
tcattattgcagccctagcagcactccacctcctattcttgcacgaaacgggatcaaacaaccccctaggaatcacctcccattccgataaaatcaccttccacccttactacacaatca

SEQ ID NO: 62867 - DNA, 120 bp, Homo sapiens
  misc_feature: 889 for SV(W|O) and mtDNA
tccacctcctattcttgcacgaaacgggatcaaacaaccccctaggaatcacctcccattccgataaaatcaccttccacccttactacacaatcaaagacgccctcggcttacttctct

SEQ ID NO: 62868 - DNA, 120 bp, Homo sapiens
  misc_feature: 888 for SV(W|O) and mtDNA
cattattgcagccctagcagcactccacctcctattcttgcacgaaacgggatcaaacaaccccctaggaatcacctcccattccgataaaatcaccttccacccttactacacaatcaa

SEQ ID NO: 62869 - DNA, 120 bp, Homo sapiens
  misc_feature: 888 for SV(W|O) and mtDNA
tattgcagccctagcagcactccacctcctattcttgcacgaaacgggatcaaacaaccccctaggaatcacctcccattccgataaaatcaccttccacccttactacacaatcaaaga

SEQ ID NO: 62870 - DNA, 120 bp, Homo sapiens
  misc_feature: 887 for SV(W|O) and mtDNA
cactccacctcctattcttgcacgaaacgggatcaaacaaccccctaggaatcacctcccattccgataaaatcaccttccacccttactacacaatcaaagacgccctcggcttacttc

SEQ ID NO: 62871 - DNA, 120 bp, Homo sapiens
  misc_feature: 885 for SV(W|O) and mtDNA
tgcagccctagcagcactccacctcctattcttgcacgaaacgggatcaaacaaccccctaggaatcacctcccattccgataaaatcaccttccacccttactacacaatcaaagacgc

SEQ ID NO: 62872 - DNA, 120 bp, Homo sapiens
  misc_feature: 885 for SV(W|O) and mtDNA
ggattttattttaagtttgttggttaggtagttgaggtctagggctgttagaagtcctaggaaagtgacagcgagggctgtgagttttaggtagagggggattgttgtttggaaggggga

SEQ ID NO: 62873 - DNA, 120 bp, Homo sapiens
  misc_feature: 882 for SV(W|O) and mtDNA
cttcattattgcagccctagcagcactccacctcctattcttgcacgaaacgggatcaaacaaccccctaggaatcacctcccattccgataaaatcaccttccacccttactacacaat

SEQ ID NO: 62874 - DNA, 120 bp, Homo sapiens
  misc_feature: 881 for SV(W|O) and mtDNA
gcagccctagcagcactccacctcctattcttgcacgaaacgggatcaaacaaccccctaggaatcacctcccattccgataaaatcaccttccacccttactacacaatcaaagacgcc

SEQ ID NO: 62875 - DNA, 120 bp, Homo sapiens
  misc_feature: 881 for SV(W|O) and mtDNA
gattttattttaagtttgttggttaggtagttgaggtctagggctgttagaagtcctaggaaagtgacagcgagggctgtgagttttaggtagagggggattgttgtttggaagggggat

SEQ ID NO: 62876 - DNA, 120 bp, Homo sapiens
  misc_feature: 880 for SV(W|O) and mtDNA
attgcagccctagcagcactccacctcctattcttgcacgaaacgggatcaaacaaccccctaggaatcacctcccattccgataaaatcaccttccacccttactacacaatcaaagac

SEQ ID NO: 62877 - DNA, 120 bp, Homo sapiens
  misc_feature: 879 for SV(W|O) and mtDNA
actccacctcctattcttgcacgaaacgggatcaaacaaccccctaggaatcacctcccattccgataaaatcaccttccacccttactacacaatcaaagacgccctcggcttacttct

SEQ ID NO: 62878 - DNA, 120 bp, Homo sapiens
  misc_feature: 877 for SV(W|O) and mtDNA
ttgcagccctagcagcactccacctcctattcttgcacgaaacgggatcaaacaaccccctaggaatcacctcccattccgataaaatcaccttccacccttactacacaatcaaagacg

SEQ ID NO: 62879 - DNA, 120 bp, Homo sapiens
  misc_feature: 876 for SV(W|O) and mtDNA
ccttcattattgcagccctagcagcactccacctcctattcttgcacgaaacgggatcaaacaaccccctaggaatcacctcccattccgataaaatcaccttccacccttactacacaa

SEQ ID NO: 62880 - DNA, 120 bp, Homo sapiens
  misc_feature: 864 for SV(W|O) and mtDNA
cccttcattattgcagccctagcagcactccacctcctattcttgcacgaaacgggatcaaacaaccccctaggaatcacctcccattccgataaaatcaccttccacccttactacaca

SEQ ID NO: 62881 - DNA, 120 bp, Homo sapiens
  misc_feature: 863 for SV(W|O) and mtDNA
tgaatctgaggaggctactcagtagacagtcccaccctcacacgattctttacctttcacttcatcttgcccttcattattgcagccctagcagcactccacctcctattcttgcacgaa

SEQ ID NO: 62882 - DNA, 120 bp, Homo sapiens
  misc_feature: 858 for SV(W|O) and mtDNA
atgaatctgaggaggctactcagtagacagtcccaccctcacacgattctttacctttcacttcatcttgcccttcattattgcagccctagcagcactccacctcctattcttgcacga

SEQ ID NO: 62883 - DNA, 120 bp, Homo sapiens
  misc_feature: 852 for SV(W|O) and mtDNA
attttattttaagtttgttggttaggtagttgaggtctagggctgttagaagtcctaggaaagtgacagcgagggctgtgagttttaggtagagggggattgttgtttggaagggggatg

SEQ ID NO: 62884 - DNA, 120 bp, Homo sapiens
  misc_feature: 850 for SV(W|O) and mtDNA
gcccttcattattgcagccctagcagcactccacctcctattcttgcacgaaacgggatcaaacaaccccctaggaatcacctcccattccgataaaatcaccttccacccttactacac

SEQ ID NO: 62885 - DNA, 120 bp, Homo sapiens
  misc_feature: 849 for SV(W|O) and mtDNA
gaatctgaggaggctactcagtagacagtcccaccctcacacgattctttacctttcacttcatcttgcccttcattattgcagccctagcagcactccacctcctattcttgcacgaaa

SEQ ID NO: 62886 - DNA, 120 bp, Homo sapiens
  misc_feature: 845 for SV(W|O) and mtDNA
aatctgaggaggctactcagtagacagtcccaccctcacacgattctttacctttcacttcatcttgcccttcattattgcagccctagcagcactccacctcctattcttgcacgaaac

SEQ ID NO: 62887 - DNA, 120 bp, Homo sapiens
  misc_feature: 843 for SV(W|O) and mtDNA
tgcccttcattattgcagccctagcagcactccacctcctattcttgcacgaaacgggatcaaacaaccccctaggaatcacctcccattccgataaaatcaccttccacccttactaca

SEQ ID NO: 62888 - DNA, 120 bp, Homo sapiens
  misc_feature: 842 for SV(W|O) and mtDNA
tttcacttcatcttgcccttcattattgcagccctagcagcactccacctcctattcttgcacgaaacgggatcaaacaaccccctaggaatcacctcccattccgataaaatcaccttc

SEQ ID NO: 62889 - DNA, 120 bp, Homo sapiens
  misc_feature: 837 for SV(W|O) and mtDNA
atctgaggaggctactcagtagacagtcccaccctcacacgattctttacctttcacttcatcttgcccttcattattgcagccctagcagcactccacctcctattcttgcacgaaacg

SEQ ID NO: 62890 - DNA, 120 bp, Homo sapiens
  misc_feature: 834 for SV(W|O) and mtDNA
ttttattttaagtttgttggttaggtagttgaggtctagggctgttagaagtcctaggaaagtgacagcgagggctgtgagttttaggtagagggggattgttgtttggaagggggatgc

SEQ ID NO: 62891 - DNA, 120 bp, Homo sapiens
  misc_feature: 829 for SV(W|O) and mtDNA
ctttcacttcatcttgcccttcattattgcagccctagcagcactccacctcctattcttgcacgaaacgggatcaaacaaccccctaggaatcacctcccattccgataaaatcacctt

SEQ ID NO: 62892 - DNA, 120 bp, Homo sapiens
  misc_feature: 828 for SV(W|O) and mtDNA
ttcacttcatcttgcccttcattattgcagccctagcagcactccacctcctattcttgcacgaaacgggatcaaacaaccccctaggaatcacctcccattccgataaaatcaccttcc

SEQ ID NO: 62893 - DNA, 120 bp, Homo sapiens
  misc_feature: 828 for SV(W|O) and mtDNA
cttcatcttgcccttcattattgcagccctagcagcactccacctcctattcttgcacgaaacgggatcaaacaaccccctaggaatcacctcccattccgataaaatcaccttccaccc

SEQ ID NO: 62894 - DNA, 120 bp, Homo sapiens
  misc_feature: 827 for SV(W|O) and mtDNA
tctttacctttcacttcatcttgcccttcattattgcagccctagcagcactccacctcctattcttgcacgaaacgggatcaaacaaccccctaggaatcacctcccattccgataaaa

SEQ ID NO: 62895 - DNA, 120 bp, Homo sapiens
  misc_feature: 827 for SV(W|O) and mtDNA
ttcatcttgcccttcattattgcagccctagcagcactccacctcctattcttgcacgaaacgggatcaaacaaccccctaggaatcacctcccattccgataaaatcaccttccaccct

SEQ ID NO: 62896 - DNA, 120 bp, Homo sapiens
  misc_feature: 827 for SV(W|O) and mtDNA
cctttcacttcatcttgcccttcattattgcagccctagcagcactccacctcctattcttgcacgaaacgggatcaaacaaccccctaggaatcacctcccattccgataaaatcacct

SEQ ID NO: 62897 - DNA, 120 bp, Homo sapiens
  misc_feature: 826 for SV(W|O) and mtDNA
tctgaggaggctactcagtagacagtcccaccctcacacgattctttacctttcacttcatcttgcccttcattattgcagccctagcagcactccacctcctattcttgcacgaaacgg

SEQ ID NO: 62898 - DNA, 120 bp, Homo sapiens
  misc_feature: 826 for SV(W|O) and mtDNA
ctcagtagacagtcccaccctcacacgattctttacctttcacttcatcttgcccttcattattgcagccctagcagcactccacctcctattcttgcacgaaacgggatcaaacaaccc

SEQ ID NO: 62899 - DNA, 120 bp, Homo sapiens
  misc_feature: 825 for SV(W|O) and mtDNA
ttgcccttcattattgcagccctagcagcactccacctcctattcttgcacgaaacgggatcaaacaaccccctaggaatcacctcccattccgataaaatcaccttccacccttactac

SEQ ID NO: 62900 - DNA, 120 bp, Homo sapiens
  misc_feature: 824 for SV(W|O) and mtDNA
tcacttcatcttgcccttcattattgcagccctagcagcactccacctcctattcttgcacgaaacgggatcaaacaaccccctaggaatcacctcccattccgataaaatcaccttcca

SEQ ID NO: 62901 - DNA, 120 bp, Homo sapiens
  misc_feature: 824 for SV(W|O) and mtDNA
acctttcacttcatcttgcccttcattattgcagccctagcagcactccacctcctattcttgcacgaaacgggatcaaacaaccccctaggaatcacctcccattccgataaaatcacc

SEQ ID NO: 62902 - DNA, 120 bp, Homo sapiens
  misc_feature: 822 for SV(W|O) and mtDNA
tcagtagacagtcccaccctcacacgattctttacctttcacttcatcttgcccttcattattgcagccctagcagcactccacctcctattcttgcacgaaacgggatcaaacaacccc

SEQ ID NO: 62903 - DNA, 120 bp, Homo sapiens
  misc_feature: 821 for SV(W|O) and mtDNA
tacctttcacttcatcttgcccttcattattgcagccctagcagcactccacctcctattcttgcacgaaacgggatcaaacaaccccctaggaatcacctcccattccgataaaatcac

SEQ ID NO: 62904 - DNA, 120 bp, Homo sapiens
  misc_feature: 820 for SV(W|O) and mtDNA
acttcatcttgcccttcattattgcagccctagcagcactccacctcctattcttgcacgaaacgggatcaaacaaccccctaggaatcacctcccattccgataaaatcaccttccacc

SEQ ID NO: 62905 - DNA, 120 bp, Homo sapiens
  misc_feature: 819 for SV(W|O) and mtDNA
ctgaggaggctactcagtagacagtcccaccctcacacgattctttacctttcacttcatcttgcccttcattattgcagccctagcagcactccacctcctattcttgcacgaaacggg

SEQ ID NO: 62906 - DNA, 120 bp, Homo sapiens
  misc_feature: 818 for SV(W|O) and mtDNA
tcttgcccttcattattgcagccctagcagcactccacctcctattcttgcacgaaacgggatcaaacaaccccctaggaatcacctcccattccgataaaatcaccttccacccttact

SEQ ID NO: 62907 - DNA, 120 bp, Homo sapiens
  misc_feature: 817 for SV(W|O) and mtDNA
cttgcccttcattattgcagccctagcagcactccacctcctattcttgcacgaaacgggatcaaacaaccccctaggaatcacctcccattccgataaaatcaccttccacccttacta

SEQ ID NO: 62908 - DNA, 120 bp, Homo sapiens
  misc_feature: 816 for SV(W|O) and mtDNA
tcatcttgcccttcattattgcagccctagcagcactccacctcctattcttgcacgaaacgggatcaaacaaccccctaggaatcacctcccattccgataaaatcaccttccaccctt

SEQ ID NO: 62909 - DNA, 120 bp, Homo sapiens
  misc_feature: 815 for SV(W|O) and mtDNA
ttacctttcacttcatcttgcccttcattattgcagccctagcagcactccacctcctattcttgcacgaaacgggatcaaacaaccccctaggaatcacctcccattccgataaaatca

SEQ ID NO: 62910 - DNA, 120 bp, Homo sapiens
  misc_feature: 815 for SV(W|O) and mtDNA
cacttcatcttgcccttcattattgcagccctagcagcactccacctcctattcttgcacgaaacgggatcaaacaaccccctaggaatcacctcccattccgataaaatcaccttccac

SEQ ID NO: 62911 - DNA, 120 bp, Homo sapiens
  misc_feature: 815 for SV(W|O) and mtDNA
actcagtagacagtcccaccctcacacgattctttacctttcacttcatcttgcccttcattattgcagccctagcagcactccacctcctattcttgcacgaaacgggatcaaacaacc

SEQ ID NO: 62912 - DNA, 120 bp, Homo sapiens
  misc_feature: 814 for SV(W|O) and mtDNA
ttattttaagtttgttggttaggtagttgaggtctagggctgttagaagtcctaggaaagtgacagcgagggctgtgagttttaggtagagggggattgttgtttggaagggggatgcgg

SEQ ID NO: 62913 - DNA, 120 bp, Homo sapiens
  misc_feature: 814 for SV(W|O) and mtDNA
tgaggaggctactcagtagacagtcccaccctcacacgattctttacctttcacttcatcttgcccttcattattgcagccctagcagcactccacctcctattcttgcacgaaacggga

SEQ ID NO: 62914 - DNA, 120 bp, Homo sapiens
  misc_feature: 813 for SV(W|O) and mtDNA
tttattttaagtttgttggttaggtagttgaggtctagggctgttagaagtcctaggaaagtgacagcgagggctgtgagttttaggtagagggggattgttgtttggaagggggatgcg

SEQ ID NO: 62915 - DNA, 120 bp, Homo sapiens
  misc_feature: 810 for SV(W|O) and mtDNA
tttacctttcacttcatcttgcccttcattattgcagccctagcagcactccacctcctattcttgcacgaaacgggatcaaacaaccccctaggaatcacctcccattccgataaaatc

SEQ ID NO: 62916 - DNA, 120 bp, Homo sapiens
  misc_feature: 810 for SV(W|O) and mtDNA
ctttacctttcacttcatcttgcccttcattattgcagccctagcagcactccacctcctattcttgcacgaaacgggatcaaacaaccccctaggaatcacctcccattccgataaaat

SEQ ID NO: 62917 - DNA, 120 bp, Homo sapiens
  misc_feature: 809 for SV(W|O) and mtDNA
catcttgcccttcattattgcagccctagcagcactccacctcctattcttgcacgaaacgggatcaaacaaccccctaggaatcacctcccattccgataaaatcaccttccaccctta

SEQ ID NO: 62918 - DNA, 120 bp, Homo sapiens
  misc_feature: 808 for SV(W|O) and mtDNA
atcttgcccttcattattgcagccctagcagcactccacctcctattcttgcacgaaacgggatcaaacaaccccctaggaatcacctcccattccgataaaatcaccttccacccttac

SEQ ID NO: 62919 - DNA, 120 bp, Homo sapiens
  misc_feature: 806 for SV(W|O) and mtDNA
tactcagtagacagtcccaccctcacacgattctttacctttcacttcatcttgcccttcattattgcagccctagcagcactccacctcctattcttgcacgaaacgggatcaaacaac

SEQ ID NO: 62920 - DNA, 120 bp, Homo sapiens
  misc_feature: 803 for SV(W|O) and mtDNA
aggctactcagtagacagtcccaccctcacacgattctttacctttcacttcatcttgcccttcattattgcagccctagcagcactccacctcctattcttgcacgaaacgggatcaaa

SEQ ID NO: 62921 - DNA, 120 bp, Homo sapiens
  misc_feature: 803 for SV(W|O) and mtDNA
ttctttacctttcacttcatcttgcccttcattattgcagccctagcagcactccacctcctattcttgcacgaaacgggatcaaacaaccccctaggaatcacctcccattccgataaa

SEQ ID NO: 62922 - DNA, 120 bp, Homo sapiens
  misc_feature: 801 for SV(W|O) and mtDNA
ggtgactgttaaaagtgcataccgccaaaagataaaatttgaaatctggttaggctggtgttagggttctttgtttttggggtttggcagagatgtgtttaagtgctgtggccagaagcg

SEQ ID NO: 62923 - DNA, 120 bp, Homo sapiens
  misc_feature: 799 for SV(W|O) and mtDNA
ggctactcagtagacagtcccaccctcacacgattctttacctttcacttcatcttgcccttcattattgcagccctagcagcactccacctcctattcttgcacgaaacgggatcaaac

SEQ ID NO: 62924 - DNA, 120 bp, Homo sapiens
  misc_feature: 798 for SV(W|O) and mtDNA
gaggctactcagtagacagtcccaccctcacacgattctttacctttcacttcatcttgcccttcattattgcagccctagcagcactccacctcctattcttgcacgaaacgggatcaa

SEQ ID NO: 62925 - DNA, 120 bp, Homo sapiens
  misc_feature: 798 for SV(W|O) and mtDNA
tattttaagtttgttggttaggtagttgaggtctagggctgttagaagtcctaggaaagtgacagcgagggctgtgagttttaggtagagggggattgttgtttggaagggggatgcggg

SEQ ID NO: 62926 - DNA, 120 bp, Homo sapiens
  misc_feature: 798 for SV(W|O) and mtDNA
gaggaggctactcagtagacagtcccaccctcacacgattctttacctttcacttcatcttgcccttcattattgcagccctagcagcactccacctcctattcttgcacgaaacgggat

SEQ ID NO: 62927 - DNA, 120 bp, Homo sapiens
  misc_feature: 795 for SV(W|O) and mtDNA
ggaggctactcagtagacagtcccaccctcacacgattctttacctttcacttcatcttgcccttcattattgcagccctagcagcactccacctcctattcttgcacgaaacgggatca

SEQ ID NO: 62928 - DNA, 120 bp, Homo sapiens
  misc_feature: 792 for SV(W|O) and mtDNA
aggaggctactcagtagacagtcccaccctcacacgattctttacctttcacttcatcttgcccttcattattgcagccctagcagcactccacctcctattcttgcacgaaacgggatc

SEQ ID NO: 62929 - DNA, 120 bp, Homo sapiens
  misc_feature: 791 for SV(W|O) and mtDNA
cagtagacagtcccaccctcacacgattctttacctttcacttcatcttgcccttcattattgcagccctagcagcactccacctcctattcttgcacgaaacgggatcaaacaaccccc

SEQ ID NO: 62930 - DNA, 120 bp, Homo sapiens
  misc_feature: 790 for SV(W|O) and mtDNA
cctcacacgattctttacctttcacttcatcttgcccttcattattgcagccctagcagcactccacctcctattcttgcacgaaacgggatcaaacaaccccctaggaatcacctccca

SEQ ID NO: 62931 - DNA, 120 bp, Homo sapiens
  misc_feature: 790 for SV(W|O) and mtDNA
gtgactgttaaaagtgcataccgccaaaagataaaatttgaaatctggttaggctggtgttagggttctttgtttttggggtttggcagagatgtgtttaagtgctgtggccagaagcgg

SEQ ID NO: 62932 - DNA, 120 bp, Homo sapiens
  misc_feature: 788 for SV(W|O) and mtDNA
ccctcacacgattctttacctttcacttcatcttgcccttcattattgcagccctagcagcactccacctcctattcttgcacgaaacgggatcaaacaaccccctaggaatcacctccc

SEQ ID NO: 62933 - DNA, 120 bp, Homo sapiens
  misc_feature: 788 for SV(W|O) and mtDNA
ctcacacgattctttacctttcacttcatcttgcccttcattattgcagccctagcagcactccacctcctattcttgcacgaaacgggatcaaacaaccccctaggaatcacctcccat

SEQ ID NO: 62934 - DNA, 120 bp, Homo sapiens
  misc_feature: 786 for SV(W|O) and mtDNA
attctttacctttcacttcatcttgcccttcattattgcagccctagcagcactccacctcctattcttgcacgaaacgggatcaaacaaccccctaggaatcacctcccattccgataa

SEQ ID NO: 62935 - DNA, 120 bp, Homo sapiens
  misc_feature: 784 for SV(W|O) and mtDNA
gctactcagtagacagtcccaccctcacacgattctttacctttcacttcatcttgcccttcattattgcagccctagcagcactccacctcctattcttgcacgaaacgggatcaaaca

SEQ ID NO: 62936 - DNA, 120 bp, Homo sapiens
  misc_feature: 783 for SV(W|O) and mtDNA
cgattctttacctttcacttcatcttgcccttcattattgcagccctagcagcactccacctcctattcttgcacgaaacgggatcaaacaaccccctaggaatcacctcccattccgat

SEQ ID NO: 62937 - DNA, 120 bp, Homo sapiens
  misc_feature: 782 for SV(W|O) and mtDNA
accctcacacgattctttacctttcacttcatcttgcccttcattattgcagccctagcagcactccacctcctattcttgcacgaaacgggatcaaacaaccccctaggaatcacctcc

SEQ ID NO: 62938 - DNA, 120 bp, Homo sapiens
  misc_feature: 782 for SV(W|O) and mtDNA
agtagacagtcccaccctcacacgattctttacctttcacttcatcttgcccttcattattgcagccctagcagcactccacctcctattcttgcacgaaacgggatcaaacaaccccct

SEQ ID NO: 62939 - DNA, 120 bp, Homo sapiens
  misc_feature: 781 for SV(W|O) and mtDNA
ctactcagtagacagtcccaccctcacacgattctttacctttcacttcatcttgcccttcattattgcagccctagcagcactccacctcctattcttgcacgaaacgggatcaaacaa

SEQ ID NO: 62940 - DNA, 120 bp, Homo sapiens
  misc_feature: 781 for SV(W|O) and mtDNA
caccctcacacgattctttacctttcacttcatcttgcccttcattattgcagccctagcagcactccacctcctattcttgcacgaaacgggatcaaacaaccccctaggaatcacctc

SEQ ID NO: 62941 - DNA, 120 bp, Homo sapiens
  misc_feature: 780 for SV(W|O) and mtDNA
acgattctttacctttcacttcatcttgcccttcattattgcagccctagcagcactccacctcctattcttgcacgaaacgggatcaaacaaccccctaggaatcacctcccattccga

SEQ ID NO: 62942 - DNA, 120 bp, Homo sapiens
  misc_feature: 779 for SV(W|O) and mtDNA
cacgattctttacctttcacttcatcttgcccttcattattgcagccctagcagcactccacctcctattcttgcacgaaacgggatcaaacaaccccctaggaatcacctcccattccg

SEQ ID NO: 62943 - DNA, 120 bp, Homo sapiens
  misc_feature: 778 for SV(W|O) and mtDNA
ccaccctcacacgattctttacctttcacttcatcttgcccttcattattgcagccctagcagcactccacctcctattcttgcacgaaacgggatcaaacaaccccctaggaatcacct

SEQ ID NO: 62944 - DNA, 120 bp, Homo sapiens
  misc_feature: 775 for SV(W|O) and mtDNA
tcacacgattctttacctttcacttcatcttgcccttcattattgcagccctagcagcactccacctcctattcttgcacgaaacgggatcaaacaaccccctaggaatcacctcccatt

SEQ ID NO: 62945 - DNA, 120 bp, Homo sapiens
  misc_feature: 774 for SV(W|O) and mtDNA
cccaccctcacacgattctttacctttcacttcatcttgcccttcattattgcagccctagcagcactccacctcctattcttgcacgaaacgggatcaaacaaccccctaggaatcacc

SEQ ID NO: 62946 - DNA, 120 bp, Homo sapiens
  misc_feature: 772 for SV(W|O) and mtDNA
ttaggtagttgaggtctagggctgttagaagtcctaggaaagtgacagcgagggctgtgagttttaggtagagggggattgttgtttggaagggggatgcgggggaaatgttgttagtaa

SEQ ID NO: 62947 - DNA, 120 bp, Homo sapiens
  misc_feature: 772 for SV(W|O) and mtDNA
acacgattctttacctttcacttcatcttgcccttcattattgcagccctagcagcactccacctcctattcttgcacgaaacgggatcaaacaaccccctaggaatcacctcccattcc

SEQ ID NO: 62948 - DNA, 120 bp, Homo sapiens
  misc_feature: 772 for SV(W|O) and mtDNA
cacacgattctttacctttcacttcatcttgcccttcattattgcagccctagcagcactccacctcctattcttgcacgaaacgggatcaaacaaccccctaggaatcacctcccattc

SEQ ID NO: 62949 - DNA, 120 bp, Homo sapiens
  misc_feature: 769 for SV(W|O) and mtDNA
taggtagttgaggtctagggctgttagaagtcctaggaaagtgacagcgagggctgtgagttttaggtagagggggattgttgtttggaagggggatgcgggggaaatgttgttagtaat

SEQ ID NO: 62950 - DNA, 120 bp, Homo sapiens
  misc_feature: 767 for SV(W|O) and mtDNA
gattctttacctttcacttcatcttgcccttcattattgcagccctagcagcactccacctcctattcttgcacgaaacgggatcaaacaaccccctaggaatcacctcccattccgata

SEQ ID NO: 62951 - DNA, 120 bp, Homo sapiens
  misc_feature: 765 for SV(W|O) and mtDNA
attttaagtttgttggttaggtagttgaggtctagggctgttagaagtcctaggaaagtgacagcgagggctgtgagttttaggtagagggggattgttgtttggaagggggatgcgggg

SEQ ID NO: 62952 - DNA, 120 bp, Homo sapiens
  misc_feature: 762 for SV(W|O) and mtDNA
agacagtcccaccctcacacgattctttacctttcacttcatcttgcccttcattattgcagccctagcagcactccacctcctattcttgcacgaaacgggatcaaacaaccccctagg

SEQ ID NO: 62953 - DNA, 120 bp, Homo sapiens
  misc_feature: 761 for SV(W|O) and mtDNA
gttgaggtctagggctgttagaagtcctaggaaagtgacagcgagggctgtgagttttaggtagagggggattgttgtttggaagggggatgcgggggaaatgttgttagtaatgagaaa

SEQ ID NO: 62954 - DNA, 120 bp, Homo sapiens
  misc_feature: 761 for SV(W|O) and mtDNA
tcccaccctcacacgattctttacctttcacttcatcttgcccttcattattgcagccctagcagcactccacctcctattcttgcacgaaacgggatcaaacaaccccctaggaatcac

SEQ ID NO: 62955 - DNA, 120 bp, Homo sapiens
  misc_feature: 760 for SV(W|O) and mtDNA
ttttaagtttgttggttaggtagttgaggtctagggctgttagaagtcctaggaaagtgacagcgagggctgtgagttttaggtagagggggattgttgtttggaagggggatgcggggg

SEQ ID NO: 62956 - DNA, 120 bp, Homo sapiens
  misc_feature: 759 for SV(W|O) and mtDNA
ggttaggtagttgaggtctagggctgttagaagtcctaggaaagtgacagcgagggctgtgagttttaggtagagggggattgttgtttggaagggggatgcgggggaaatgttgttagt

SEQ ID NO: 62957 - DNA, 120 bp, Homo sapiens
  misc_feature: 759 for SV(W|O) and mtDNA
aggtagttgaggtctagggctgttagaagtcctaggaaagtgacagcgagggctgtgagttttaggtagagggggattgttgtttggaagggggatgcgggggaaatgttgttagtaatg

SEQ ID NO: 62958 - DNA, 120 bp, Homo sapiens
  misc_feature: 758 for SV(W|O) and mtDNA
ttgaggtctagggctgttagaagtcctaggaaagtgacagcgagggctgtgagttttaggtagagggggattgttgtttggaagggggatgcgggggaaatgttgttagtaatgagaaat

SEQ ID NO: 62959 - DNA, 120 bp, Homo sapiens
  misc_feature: 758 for SV(W|O) and mtDNA
agttgaggtctagggctgttagaagtcctaggaaagtgacagcgagggctgtgagttttaggtagagggggattgttgtttggaagggggatgcgggggaaatgttgttagtaatgagaa

SEQ ID NO: 62960 - DNA, 120 bp, Homo sapiens
  misc_feature: 757 for SV(W|O) and mtDNA
tagacagtcccaccctcacacgattctttacctttcacttcatcttgcccttcattattgcagccctagcagcactccacctcctattcttgcacgaaacgggatcaaacaaccccctag

SEQ ID NO: 62961 - DNA, 120 bp, Homo sapiens
  misc_feature: 756 for SV(W|O) and mtDNA
gttaggtagttgaggtctagggctgttagaagtcctaggaaagtgacagcgagggctgtgagttttaggtagagggggattgttgtttggaagggggatgcgggggaaatgttgttagta

SEQ ID NO: 62962 - DNA, 120 bp, Homo sapiens
  misc_feature: 755 for SV(W|O) and mtDNA
tgaggtctagggctgttagaagtcctaggaaagtgacagcgagggctgtgagttttaggtagagggggattgttgtttggaagggggatgcgggggaaatgttgttagtaatgagaaatc

SEQ ID NO: 62963 - DNA, 120 bp, Homo sapiens
  misc_feature: 755 for SV(W|O) and mtDNA
agtcccaccctcacacgattctttacctttcacttcatcttgcccttcattattgcagccctagcagcactccacctcctattcttgcacgaaacgggatcaaacaaccccctaggaatc

SEQ ID NO: 62964 - DNA, 120 bp, Homo sapiens
  misc_feature: 754 for SV(W|O) and mtDNA
gtcccaccctcacacgattctttacctttcacttcatcttgcccttcattattgcagccctagcagcactccacctcctattcttgcacgaaacgggatcaaacaaccccctaggaatca

SEQ ID NO: 62965 - DNA, 120 bp, Homo sapiens
  misc_feature: 754 for SV(W|O) and mtDNA
ggtagttgaggtctagggctgttagaagtcctaggaaagtgacagcgagggctgtgagttttaggtagagggggattgttgtttggaagggggatgcgggggaaatgttgttagtaatga

SEQ ID NO: 62966 - DNA, 120 bp, Homo sapiens
  misc_feature: 754 for SV(W|O) and mtDNA
cagtcccaccctcacacgattctttacctttcacttcatcttgcccttcattattgcagccctagcagcactccacctcctattcttgcacgaaacgggatcaaacaaccccctaggaat

SEQ ID NO: 62967 - DNA, 120 bp, Homo sapiens
  misc_feature: 753 for SV(W|O) and mtDNA
tagttgaggtctagggctgttagaagtcctaggaaagtgacagcgagggctgtgagttttaggtagagggggattgttgtttggaagggggatgcgggggaaatgttgttagtaatgaga

SEQ ID NO: 62968 - DNA, 120 bp, Homo sapiens
  misc_feature: 752 for SV(W|O) and mtDNA
acagtcccaccctcacacgattctttacctttcacttcatcttgcccttcattattgcagccctagcagcactccacctcctattcttgcacgaaacgggatcaaacaaccccctaggaa

SEQ ID NO: 62969 - DNA, 120 bp, Homo sapiens
  misc_feature: 752 for SV(W|O) and mtDNA
tggttaggtagttgaggtctagggctgttagaagtcctaggaaagtgacagcgagggctgtgagttttaggtagagggggattgttgtttggaagggggatgcgggggaaatgttgttag

SEQ ID NO: 62970 - DNA, 120 bp, Homo sapiens
  misc_feature: 751 for SV(W|O) and mtDNA
gtagacagtcccaccctcacacgattctttacctttcacttcatcttgcccttcattattgcagccctagcagcactccacctcctattcttgcacgaaacgggatcaaacaacccccta

SEQ ID NO: 62971 - DNA, 120 bp, Homo sapiens
  misc_feature: 751 for SV(W|O) and mtDNA
gtagttgaggtctagggctgttagaagtcctaggaaagtgacagcgagggctgtgagttttaggtagagggggattgttgtttggaagggggatgcgggggaaatgttgttagtaatgag

SEQ ID NO: 62972 - DNA, 120 bp, Homo sapiens
  misc_feature: 748 for SV(W|O) and mtDNA
gacagtcccaccctcacacgattctttacctttcacttcatcttgcccttcattattgcagccctagcagcactccacctcctattcttgcacgaaacgggatcaaacaaccccctagga

SEQ ID NO: 62973 - DNA, 120 bp, Homo sapiens
  misc_feature: 745 for SV(W|O) and mtDNA
gaggtctagggctgttagaagtcctaggaaagtgacagcgagggctgtgagttttaggtagagggggattgttgtttggaagggggatgcgggggaaatgttgttagtaatgagaaatcc

SEQ ID NO: 62974 - DNA, 120 bp, Homo sapiens
  misc_feature: 743 for SV(W|O) and mtDNA
tttaagtttgttggttaggtagttgaggtctagggctgttagaagtcctaggaaagtgacagcgagggctgtgagttttaggtagagggggattgttgtttggaagggggatgcggggga

SEQ ID NO: 62975 - DNA, 120 bp, Homo sapiens
  misc_feature: 743 for SV(W|O) and mtDNA
aggtctagggctgttagaagtcctaggaaagtgacagcgagggctgtgagttttaggtagagggggattgttgtttggaagggggatgcgggggaaatgttgttagtaatgagaaatcct

SEQ ID NO: 62976 - DNA, 120 bp, Homo sapiens
  misc_feature: 736 for SV(W|O) and mtDNA
ttggttaggtagttgaggtctagggctgttagaagtcctaggaaagtgacagcgagggctgtgagttttaggtagagggggattgttgtttggaagggggatgcgggggaaatgttgtta

SEQ ID NO: 62977 - DNA, 120 bp, Homo sapiens
  misc_feature: 735 for SV(W|O) and mtDNA
taagtttgttggttaggtagttgaggtctagggctgttagaagtcctaggaaagtgacagcgagggctgtgagttttaggtagagggggattgttgtttggaagggggatgcgggggaaa

SEQ ID NO: 62978 - DNA, 120 bp, Homo sapiens
  misc_feature: 733 for SV(W|O) and mtDNA
tctagggctgttagaagtcctaggaaagtgacagcgagggctgtgagttttaggtagagggggattgttgtttggaagggggatgcgggggaaatgttgttagtaatgagaaatcctgcg

SEQ ID NO: 62979 - DNA, 120 bp, Homo sapiens
  misc_feature: 733 for SV(W|O) and mtDNA
ggtctagggctgttagaagtcctaggaaagtgacagcgagggctgtgagttttaggtagagggggattgttgtttggaagggggatgcgggggaaatgttgttagtaatgagaaatcctg

SEQ ID NO: 62980 - DNA, 120 bp, Homo sapiens
  misc_feature: 732 for SV(W|O) and mtDNA
ttaagtttgttggttaggtagttgaggtctagggctgttagaagtcctaggaaagtgacagcgagggctgtgagttttaggtagagggggattgttgtttggaagggggatgcgggggaa

SEQ ID NO: 62981 - DNA, 120 bp, Homo sapiens
  misc_feature: 731 for SV(W|O) and mtDNA
ctagggctgttagaagtcctaggaaagtgacagcgagggctgtgagttttaggtagagggggattgttgtttggaagggggatgcgggggaaatgttgttagtaatgagaaatcctgcga

SEQ ID NO: 62982 - DNA, 120 bp, Homo sapiens
  misc_feature: 730 for SV(W|O) and mtDNA
gtctagggctgttagaagtcctaggaaagtgacagcgagggctgtgagttttaggtagagggggattgttgtttggaagggggatgcgggggaaatgttgttagtaatgagaaatcctgc

SEQ ID NO: 62983 - DNA, 120 bp, Homo sapiens
  misc_feature: 727 for SV(W|O) and mtDNA
tagggctgttagaagtcctaggaaagtgacagcgagggctgtgagttttaggtagagggggattgttgtttggaagggggatgcgggggaaatgttgttagtaatgagaaatcctgcgaa

SEQ ID NO: 62984 - DNA, 120 bp, Homo sapiens
  misc_feature: 722 for SV(W|O) and mtDNA
tgttggttaggtagttgaggtctagggctgttagaagtcctaggaaagtgacagcgagggctgtgagttttaggtagagggggattgttgtttggaagggggatgcgggggaaatgttgt

SEQ ID NO: 62985 - DNA, 120 bp, Homo sapiens
  misc_feature: 721 for SV(W|O) and mtDNA
gttggttaggtagttgaggtctagggctgttagaagtcctaggaaagtgacagcgagggctgtgagttttaggtagagggggattgttgtttggaagggggatgcgggggaaatgttgtt

SEQ ID NO: 62986 - DNA, 120 bp, Homo sapiens
  misc_feature: 720 for SV(W|O) and mtDNA
agtttgttggttaggtagttgaggtctagggctgttagaagtcctaggaaagtgacagcgagggctgtgagttttaggtagagggggattgttgtttggaagggggatgcgggggaaatg

SEQ ID NO: 62987 - DNA, 120 bp, Homo sapiens
  misc_feature: 719 for SV(W|O) and mtDNA
tttgttggttaggtagttgaggtctagggctgttagaagtcctaggaaagtgacagcgagggctgtgagttttaggtagagggggattgttgtttggaagggggatgcgggggaaatgtt

SEQ ID NO: 62988 - DNA, 120 bp, Homo sapiens
  misc_feature: 719 for SV(W|O) and mtDNA
agggctgttagaagtcctaggaaagtgacagcgagggctgtgagttttaggtagagggggattgttgtttggaagggggatgcgggggaaatgttgttagtaatgagaaatcctgcgaat

SEQ ID NO: 62989 - DNA, 120 bp, Homo sapiens
  misc_feature: 716 for SV(W|O) and mtDNA
ttgttggttaggtagttgaggtctagggctgttagaagtcctaggaaagtgacagcgagggctgtgagttttaggtagagggggattgttgtttggaagggggatgcgggggaaatgttg

SEQ ID NO: 62990 - DNA, 120 bp, Homo sapiens
  misc_feature: 715 for SV(W|O) and mtDNA
aagtttgttggttaggtagttgaggtctagggctgttagaagtcctaggaaagtgacagcgagggctgtgagttttaggtagagggggattgttgtttggaagggggatgcgggggaaat

SEQ ID NO: 62991 - DNA, 120 bp, Homo sapiens
  misc_feature: 710 for SV(W|O) and mtDNA
tgttagaagtcctaggaaagtgacagcgagggctgtgagttttaggtagagggggattgttgtttggaagggggatgcgggggaaatgttgttagtaatgagaaatcctgcgaataggct

SEQ ID NO: 62992 - DNA, 120 bp, Homo sapiens
  misc_feature: 710 for SV(W|O) and mtDNA
gtttgttggttaggtagttgaggtctagggctgttagaagtcctaggaaagtgacagcgagggctgtgagttttaggtagagggggattgttgtttggaagggggatgcgggggaaatgt

SEQ ID NO: 62993 - DNA, 120 bp, Homo sapiens
  misc_feature: 710 for SV(W|O) and mtDNA
ggctgttagaagtcctaggaaagtgacagcgagggctgtgagttttaggtagagggggattgttgtttggaagggggatgcgggggaaatgttgttagtaatgagaaatcctgcgaatag

SEQ ID NO: 62994 - DNA, 120 bp, Homo sapiens
  misc_feature: 709 for SV(W|O) and mtDNA
gttagaagtcctaggaaagtgacagcgagggctgtgagttttaggtagagggggattgttgtttggaagggggatgcgggggaaatgttgttagtaatgagaaatcctgcgaataggctt

SEQ ID NO: 62995 - DNA, 120 bp, Homo sapiens
  misc_feature: 708 for SV(W|O) and mtDNA
gctgttagaagtcctaggaaagtgacagcgagggctgtgagttttaggtagagggggattgttgtttggaagggggatgcgggggaaatgttgttagtaatgagaaatcctgcgaatagg

SEQ ID NO: 62996 - DNA, 120 bp, Homo sapiens
  misc_feature: 706 for SV(W|O) and mtDNA
ctgttagaagtcctaggaaagtgacagcgagggctgtgagttttaggtagagggggattgttgtttggaagggggatgcgggggaaatgttgttagtaatgagaaatcctgcgaataggc

SEQ ID NO: 62997 - DNA, 120 bp, Homo sapiens
  misc_feature: 703 for SV(W|O) and mtDNA
gggctgttagaagtcctaggaaagtgacagcgagggctgtgagttttaggtagagggggattgttgtttggaagggggatgcgggggaaatgttgttagtaatgagaaatcctgcgaata

SEQ ID NO: 62998 - DNA, 120 bp, Homo sapiens
  misc_feature: 699 for SV(W|O) and mtDNA
ttagaagtcctaggaaagtgacagcgagggctgtgagttttaggtagagggggattgttgtttggaagggggatgcgggggaaatgttgttagtaatgagaaatcctgcgaataggcttc

SEQ ID NO: 62999 - DNA, 120 bp, Homo sapiens
  misc_feature: 699 for SV(W|O) and mtDNA
tagaagtcctaggaaagtgacagcgagggctgtgagttttaggtagagggggattgttgtttggaagggggatgcgggggaaatgttgttagtaatgagaaatcctgcgaataggcttcc

SEQ ID NO: 63000 - DNA, 120 bp, Homo sapiens
  misc_feature: 699 for SV(W|O) and mtDNA
agtattaggaggggggttgttagggggtcggaggaaaaggttggggaacagctaaataggttgttgttgatttggttaaaaaatagtagagggatgatgctaataattaggctgtgggtg

SEQ ID NO: 63001 - DNA, 120 bp, Homo sapiens
  misc_feature: 691 for SV(W|O) and mtDNA
tagtattaggaggggggttgttagggggtcggaggaaaaggttggggaacagctaaataggttgttgttgatttggttaaaaaatagtagagggatgatgctaataattaggctgtgggt

SEQ ID NO: 63002 - DNA, 120 bp, Homo sapiens
  misc_feature: 690 for SV(W|O) and mtDNA
gtattaggaggggggttgttagggggtcggaggaaaaggttggggaacagctaaataggttgttgttgatttggttaaaaaatagtagagggatgatgctaataattaggctgtgggtgg

SEQ ID NO: 63003 - DNA, 120 bp, Homo sapiens
  misc_feature: 684 for SV(W|O) and mtDNA
agaagtcctaggaaagtgacagcgagggctgtgagttttaggtagagggggattgttgtttggaagggggatgcgggggaaatgttgttagtaatgagaaatcctgcgaataggcttccg

SEQ ID NO: 63004 - DNA, 120 bp, Homo sapiens
  misc_feature: 683 for SV(W|O) and mtDNA
ttagtattaggaggggggttgttagggggtcggaggaaaaggttggggaacagctaaataggttgttgttgatttggttaaaaaatagtagagggatgatgctaataattaggctgtggg

SEQ ID NO: 63005 - DNA, 120 bp, Homo sapiens
  misc_feature: 677 for SV(W|O) and mtDNA
gaagtcctaggaaagtgacagcgagggctgtgagttttaggtagagggggattgttgtttggaagggggatgcgggggaaatgttgttagtaatgagaaatcctgcgaataggcttccgg

SEQ ID NO: 63006 - DNA, 120 bp, Homo sapiens
  misc_feature: 671 for SV(W|O) and mtDNA
gttagtattaggaggggggttgttagggggtcggaggaaaaggttggggaacagctaaataggttgttgttgatttggttaaaaaatagtagagggatgatgctaataattaggctgtgg

SEQ ID NO: 63007 - DNA, 120 bp, Homo sapiens
  misc_feature: 666 for SV(W|O) and mtDNA
aagtcctaggaaagtgacagcgagggctgtgagttttaggtagagggggattgttgtttggaagggggatgcgggggaaatgttgttagtaatgagaaatcctgcgaataggcttccggc

SEQ ID NO: 63008 - DNA, 120 bp, Homo sapiens
  misc_feature: 666 for SV(W|O) and mtDNA
agttagtattaggaggggggttgttagggggtcggaggaaaaggttggggaacagctaaataggttgttgttgatttggttaaaaaatagtagagggatgatgctaataattaggctgtg

SEQ ID NO: 63009 - DNA, 120 bp, Homo sapiens
  misc_feature: 658 for SV(W|O) and mtDNA
tagttagtattaggaggggggttgttagggggtcggaggaaaaggttggggaacagctaaataggttgttgttgatttggttaaaaaatagtagagggatgatgctaataattaggctgt

SEQ ID NO: 63010 - DNA, 120 bp, Homo sapiens
  misc_feature: 652 for SV(W|O) and mtDNA
tggcttgccatgattgtgaggggtaggagtcaggtagttagtattaggaggggggttgttagggggtcggaggaaaaggttggggaacagctaaataggttgttgttgatttggttaaaa

SEQ ID NO: 63011 - DNA, 120 bp, Homo sapiens
  misc_feature: 651 for SV(W|O) and mtDNA
gttggcttgccatgattgtgaggggtaggagtcaggtagttagtattaggaggggggttgttagggggtcggaggaaaaggttggggaacagctaaataggttgttgttgatttggttaa

SEQ ID NO: 63012 - DNA, 120 bp, Homo sapiens
  misc_feature: 649 for SV(W|O) and mtDNA
agtcctaggaaagtgacagcgagggctgtgagttttaggtagagggggattgttgtttggaagggggatgcgggggaaatgttgttagtaatgagaaatcctgcgaataggcttccggct

SEQ ID NO: 63013 - DNA, 120 bp, Homo sapiens
  misc_feature: 648 for SV(W|O) and mtDNA
ttggcttgccatgattgtgaggggtaggagtcaggtagttagtattaggaggggggttgttagggggtcggaggaaaaggttggggaacagctaaataggttgttgttgatttggttaaa

SEQ ID NO: 63014 - DNA, 120 bp, Homo sapiens
  misc_feature: 647 for SV(W|O) and mtDNA
gtcctaggaaagtgacagcgagggctgtgagttttaggtagagggggattgttgtttggaagggggatgcgggggaaatgttgttagtaatgagaaatcctgcgaataggcttccggctg

SEQ ID NO: 63015 - DNA, 120 bp, Homo sapiens
  misc_feature: 643 for SV(W|O) and mtDNA
ggcttgccatgattgtgaggggtaggagtcaggtagttagtattaggaggggggttgttagggggtcggaggaaaaggttggggaacagctaaataggttgttgttgatttggttaaaaa

SEQ ID NO: 63016 - DNA, 120 bp, Homo sapiens
  misc_feature: 637 for SV(W|O) and mtDNA
gcttgccatgattgtgaggggtaggagtcaggtagttagtattaggaggggggttgttagggggtcggaggaaaaggttggggaacagctaaataggttgttgttgatttggttaaaaaa

SEQ ID NO: 63017 - DNA, 120 bp, Homo sapiens
  misc_feature: 637 for SV(W|O) and mtDNA
aggtagttagtattaggaggggggttgttagggggtcggaggaaaaggttggggaacagctaaataggttgttgttgatttggttaaaaaatagtagagggatgatgctaataattaggc

SEQ ID NO: 63018 - DNA, 120 bp, Homo sapiens
  misc_feature: 636 for SV(W|O) and mtDNA
aggaaagtgacagcgagggctgtgagttttaggtagagggggattgttgtttggaagggggatgcgggggaaatgttgttagtaatgagaaatcctgcgaataggcttccggctgccagg

SEQ ID NO: 63019 - DNA, 120 bp, Homo sapiens
  misc_feature: 635 for SV(W|O) and mtDNA
gtagttagtattaggaggggggttgttagggggtcggaggaaaaggttggggaacagctaaataggttgttgttgatttggttaaaaaatagtagagggatgatgctaataattaggctg

SEQ ID NO: 63020 - DNA, 120 bp, Homo sapiens
  misc_feature: 633 for SV(W|O) and mtDNA
tcctaggaaagtgacagcgagggctgtgagttttaggtagagggggattgttgtttggaagggggatgcgggggaaatgttgttagtaatgagaaatcctgcgaataggcttccggctgc

SEQ ID NO: 63021 - DNA, 120 bp, Homo sapiens
  misc_feature: 631 for SV(W|O) and mtDNA
ggtagttagtattaggaggggggttgttagggggtcggaggaaaaggttggggaacagctaaataggttgttgttgatttggttaaaaaatagtagagggatgatgctaataattaggct

SEQ ID NO: 63022 - DNA, 120 bp, Homo sapiens
  misc_feature: 630 for SV(W|O) and mtDNA
tcaggtagttagtattaggaggggggttgttagggggtcggaggaaaaggttggggaacagctaaataggttgttgttgatttggttaaaaaatagtagagggatgatgctaataattag

SEQ ID NO: 63023 - DNA, 120 bp, Homo sapiens
  misc_feature: 630 for SV(W|O) and mtDNA
ggggattgttgtttggaagggggatgcgggggaaatgttgttagtaatgagaaatcctgcgaataggcttccggctgccaggcgtttaatggggtttagtagggtagggttattttcgtt

SEQ ID NO: 63024 - DNA, 120 bp, Homo sapiens
  misc_feature: 630 for SV(W|O) and mtDNA
cttgccatgattgtgaggggtaggagtcaggtagttagtattaggaggggggttgttagggggtcggaggaaaaggttggggaacagctaaataggttgttgttgatttggttaaaaaat

SEQ ID NO: 63025 - DNA, 120 bp, Homo sapiens
  misc_feature: 629 for SV(W|O) and mtDNA
gaaagtgacagcgagggctgtgagttttaggtagagggggattgttgtttggaagggggatgcgggggaaatgttgttagtaatgagaaatcctgcgaataggcttccggctgccaggcg

SEQ ID NO: 63026 - DNA, 120 bp, Homo sapiens
  misc_feature: 627 for SV(W|O) and mtDNA
tggcgttggcttgccatgattgtgaggggtaggagtcaggtagttagtattaggaggggggttgttagggggtcggaggaaaaggttggggaacagctaaataggttgttgttgatttgg

SEQ ID NO: 63027 - DNA, 120 bp, Homo sapiens
  misc_feature: 625 for SV(W|O) and mtDNA
atgattgtgaggggtaggagtcaggtagttagtattaggaggggggttgttagggggtcggaggaaaaggttggggaacagctaaataggttgttgttgatttggttaaaaaatagtaga

SEQ ID NO: 63028 - DNA, 120 bp, Homo sapiens
  misc_feature: 625 for SV(W|O) and mtDNA
cgttggcttgccatgattgtgaggggtaggagtcaggtagttagtattaggaggggggttgttagggggtcggaggaaaaggttggggaacagctaaataggttgttgttgatttggtta

SEQ ID NO: 63029 - DNA, 120 bp, Homo sapiens
  misc_feature: 624 for SV(W|O) and mtDNA
taggaaagtgacagcgagggctgtgagttttaggtagagggggattgttgtttggaagggggatgcgggggaaatgttgttagtaatgagaaatcctgcgaataggcttccggctgccag

SEQ ID NO: 63030 - DNA, 120 bp, Homo sapiens
  misc_feature: 624 for SV(W|O) and mtDNA
caggtagttagtattaggaggggggttgttagggggtcggaggaaaaggttggggaacagctaaataggttgttgttgatttggttaaaaaatagtagagggatgatgctaataattagg

SEQ ID NO: 63031 - DNA, 120 bp, Homo sapiens
  misc_feature: 623 for SV(W|O) and mtDNA
gggggattgttgtttggaagggggatgcgggggaaatgttgttagtaatgagaaatcctgcgaataggcttccggctgccaggcgtttaatggggtttagtagggtagggttattttcgt

SEQ ID NO: 63032 - DNA, 120 bp, Homo sapiens
  misc_feature: 622 for SV(W|O) and mtDNA
gtggcgttggcttgccatgattgtgaggggtaggagtcaggtagttagtattaggaggggggttgttagggggtcggaggaaaaggttggggaacagctaaataggttgttgttgatttg

SEQ ID NO: 63033 - DNA, 120 bp, Homo sapiens
  misc_feature: 621 for SV(W|O) and mtDNA
gtcaggtagttagtattaggaggggggttgttagggggtcggaggaaaaggttggggaacagctaaataggttgttgttgatttggttaaaaaatagtagagggatgatgctaataatta

SEQ ID NO: 63034 - DNA, 120 bp, Homo sapiens
  misc_feature: 621 for SV(W|O) and mtDNA
gggattgttgtttggaagggggatgcgggggaaatgttgttagtaatgagaaatcctgcgaataggcttccggctgccaggcgtttaatggggtttagtagggtagggttattttcgtta

SEQ ID NO: 63035 - DNA, 120 bp, Homo sapiens
  misc_feature: 620 for SV(W|O) and mtDNA
cctaggaaagtgacagcgagggctgtgagttttaggtagagggggattgttgtttggaagggggatgcgggggaaatgttgttagtaatgagaaatcctgcgaataggcttccggctgcc

SEQ ID NO: 63036 - DNA, 120 bp, Homo sapiens
  misc_feature: 619 for SV(W|O) and mtDNA
ggaaagtgacagcgagggctgtgagttttaggtagagggggattgttgtttggaagggggatgcgggggaaatgttgttagtaatgagaaatcctgcgaataggcttccggctgccaggc

SEQ ID NO: 63037 - DNA, 120 bp, Homo sapiens
  misc_feature: 619 for SV(W|O) and mtDNA
gcgttggcttgccatgattgtgaggggtaggagtcaggtagttagtattaggaggggggttgttagggggtcggaggaaaaggttggggaacagctaaataggttgttgttgatttggtt

SEQ ID NO: 63038 - DNA, 120 bp, Homo sapiens
  misc_feature: 618 for SV(W|O) and mtDNA
ttgccatgattgtgaggggtaggagtcaggtagttagtattaggaggggggttgttagggggtcggaggaaaaggttggggaacagctaaataggttgttgttgatttggttaaaaaata

SEQ ID NO: 63039 - DNA, 120 bp, Homo sapiens
  misc_feature: 617 for SV(W|O) and mtDNA
ggcgttggcttgccatgattgtgaggggtaggagtcaggtagttagtattaggaggggggttgttagggggtcggaggaaaaggttggggaacagctaaataggttgttgttgatttggt

SEQ ID NO: 63040 - DNA, 120 bp, Homo sapiens
  misc_feature: 617 for SV(W|O) and mtDNA
attgtgaggggtaggagtcaggtagttagtattaggaggggggttgttagggggtcggaggaaaaggttggggaacagctaaataggttgttgttgatttggttaaaaaatagtagaggg

SEQ ID NO: 63041 - DNA, 120 bp, Homo sapiens
  misc_feature: 616 for SV(W|O) and mtDNA
tgccatgattgtgaggggtaggagtcaggtagttagtattaggaggggggttgttagggggtcggaggaaaaggttggggaacagctaaataggttgttgttgatttggttaaaaaatag

SEQ ID NO: 63042 - DNA, 120 bp, Homo sapiens
  misc_feature: 616 for SV(W|O) and mtDNA
aaagtgacagcgagggctgtgagttttaggtagagggggattgttgtttggaagggggatgcgggggaaatgttgttagtaatgagaaatcctgcgaataggcttccggctgccaggcgt

SEQ ID NO: 63043 - DNA, 120 bp, Homo sapiens
  misc_feature: 615 for SV(W|O) and mtDNA
gattgtgaggggtaggagtcaggtagttagtattaggaggggggttgttagggggtcggaggaaaaggttggggaacagctaaataggttgttgttgatttggttaaaaaatagtagagg

SEQ ID NO: 63044 - DNA, 120 bp, Homo sapiens
  misc_feature: 614 for SV(W|O) and mtDNA
catgattgtgaggggtaggagtcaggtagttagtattaggaggggggttgttagggggtcggaggaaaaggttggggaacagctaaataggttgttgttgatttggttaaaaaatagtag

SEQ ID NO: 63045 - DNA, 120 bp, Homo sapiens
  misc_feature: 614 for SV(W|O) and mtDNA
agtcaggtagttagtattaggaggggggttgttagggggtcggaggaaaaggttggggaacagctaaataggttgttgttgatttggttaaaaaatagtagagggatgatgctaataatt

SEQ ID NO: 63046 - DNA, 120 bp, Homo sapiens
  misc_feature: 613 for SV(W|O) and mtDNA
tgattgtgaggggtaggagtcaggtagttagtattaggaggggggttgttagggggtcggaggaaaaggttggggaacagctaaataggttgttgttgatttggttaaaaaatagtagag

SEQ ID NO: 63047 - DNA, 120 bp, Homo sapiens
  misc_feature: 613 for SV(W|O) and mtDNA
agggggattgttgtttggaagggggatgcgggggaaatgttgttagtaatgagaaatcctgcgaataggcttccggctgccaggcgtttaatggggtttagtagggtagggttattttcg

SEQ ID NO: 63048 - DNA, 120 bp, Homo sapiens
  misc_feature: 612 for SV(W|O) and mtDNA
ctaggaaagtgacagcgagggctgtgagttttaggtagagggggattgttgtttggaagggggatgcgggggaaatgttgttagtaatgagaaatcctgcgaataggcttccggctgcca

SEQ ID NO: 63049 - DNA, 120 bp, Homo sapiens
  misc_feature: 608 for SV(W|O) and mtDNA
ggagtcaggtagttagtattaggaggggggttgttagggggtcggaggaaaaggttggggaacagctaaataggttgttgttgatttggttaaaaaatagtagagggatgatgctaataa

SEQ ID NO: 63050 - DNA, 120 bp, Homo sapiens
  misc_feature: 608 for SV(W|O) and mtDNA
gagtcaggtagttagtattaggaggggggttgttagggggtcggaggaaaaggttggggaacagctaaataggttgttgttgatttggttaaaaaatagtagagggatgatgctaataat

SEQ ID NO: 63051 - DNA, 120 bp, Homo sapiens
  misc_feature: 605 for SV(W|O) and mtDNA
taggagtcaggtagttagtattaggaggggggttgttagggggtcggaggaaaaggttggggaacagctaaataggttgttgttgatttggttaaaaaatagtagagggatgatgctaat

SEQ ID NO: 63052 - DNA, 120 bp, Homo sapiens
  misc_feature: 603 for SV(W|O) and mtDNA
aggagtcaggtagttagtattaggaggggggttgttagggggtcggaggaaaaggttggggaacagctaaataggttgttgttgatttggttaaaaaatagtagagggatgatgctaata

SEQ ID NO: 63053 - DNA, 120 bp, Homo sapiens
  misc_feature: 602 for SV(W|O) and mtDNA
ttgtgaggggtaggagtcaggtagttagtattaggaggggggttgttagggggtcggaggaaaaggttggggaacagctaaataggttgttgttgatttggttaaaaaatagtagaggga

SEQ ID NO: 63054 - DNA, 120 bp, Homo sapiens
  misc_feature: 602 for SV(W|O) and mtDNA
ccatgattgtgaggggtaggagtcaggtagttagtattaggaggggggttgttagggggtcggaggaaaaggttggggaacagctaaataggttgttgttgatttggttaaaaaatagta

SEQ ID NO: 63055 - DNA, 120 bp, Homo sapiens
  misc_feature: 602 for SV(W|O) and mtDNA
aagtgacagcgagggctgtgagttttaggtagagggggattgttgtttggaagggggatgcgggggaaatgttgttagtaatgagaaatcctgcgaataggcttccggctgccaggcgtt

SEQ ID NO: 63056 - DNA, 120 bp, Homo sapiens
  misc_feature: 600 for SV(W|O) and mtDNA
gccatgattgtgaggggtaggagtcaggtagttagtattaggaggggggttgttagggggtcggaggaaaaggttggggaacagctaaataggttgttgttgatttggttaaaaaatagt

SEQ ID NO: 63057 - DNA, 120 bp, Homo sapiens
  misc_feature: 597 for SV(W|O) and mtDNA
ggtaggagtcaggtagttagtattaggaggggggttgttagggggtcggaggaaaaggttggggaacagctaaataggttgttgttgatttggttaaaaaatagtagagggatgatgcta

SEQ ID NO: 63058 - DNA, 120 bp, Homo sapiens
  misc_feature: 597 for SV(W|O) and mtDNA
agtgacagcgagggctgtgagttttaggtagagggggattgttgtttggaagggggatgcgggggaaatgttgttagtaatgagaaatcctgcgaataggcttccggctgccaggcgttt

SEQ ID NO: 63059 - DNA, 120 bp, Homo sapiens
  misc_feature: 595 for SV(W|O) and mtDNA
tgtgaggggtaggagtcaggtagttagtattaggaggggggttgttagggggtcggaggaaaaggttggggaacagctaaataggttgttgttgatttggttaaaaaatagtagagggat

SEQ ID NO: 63060 - DNA, 120 bp, Homo sapiens
  misc_feature: 594 for SV(W|O) and mtDNA
gtaggagtcaggtagttagtattaggaggggggttgttagggggtcggaggaaaaggttggggaacagctaaataggttgttgttgatttggttaaaaaatagtagagggatgatgctaa

SEQ ID NO: 63061 - DNA, 120 bp, Homo sapiens
  misc_feature: 593 for SV(W|O) and mtDNA
gagggggattgttgtttggaagggggatgcgggggaaatgttgttagtaatgagaaatcctgcgaataggcttccggctgccaggcgtttaatggggtttagtagggtagggttattttc

SEQ ID NO: 63062 - DNA, 120 bp, Homo sapiens
  misc_feature: 591 for SV(W|O) and mtDNA
ggggtaggagtcaggtagttagtattaggaggggggttgttagggggtcggaggaaaaggttggggaacagctaaataggttgttgttgatttggttaaaaaatagtagagggatgatgc

SEQ ID NO: 63063 - DNA, 120 bp, Homo sapiens
  misc_feature: 590 for SV(W|O) and mtDNA
tgacagcgagggctgtgagttttaggtagagggggattgttgtttggaagggggatgcgggggaaatgttgttagtaatgagaaatcctgcgaataggcttccggctgccaggcgtttaa

SEQ ID NO: 63064 - DNA, 120 bp, Homo sapiens
  misc_feature: 590 for SV(W|O) and mtDNA
gggtaggagtcaggtagttagtattaggaggggggttgttagggggtcggaggaaaaggttggggaacagctaaataggttgttgttgatttggttaaaaaatagtagagggatgatgct

SEQ ID NO: 63065 - DNA, 120 bp, Homo sapiens
  misc_feature: 590 for SV(W|O) and mtDNA
gacagcgagggctgtgagttttaggtagagggggattgttgtttggaagggggatgcgggggaaatgttgttagtaatgagaaatcctgcgaataggcttccggctgccaggcgtttaat

SEQ ID NO: 63066 - DNA, 120 bp, Homo sapiens
  misc_feature: 589 for SV(W|O) and mtDNA
gtgacagcgagggctgtgagttttaggtagagggggattgttgtttggaagggggatgcgggggaaatgttgttagtaatgagaaatcctgcgaataggcttccggctgccaggcgttta

SEQ ID NO: 63067 - DNA, 120 bp, Homo sapiens
  misc_feature: 587 for SV(W|O) and mtDNA
gaggggtaggagtcaggtagttagtattaggaggggggttgttagggggtcggaggaaaaggttggggaacagctaaataggttgttgttgatttggttaaaaaatagtagagggatgat

SEQ ID NO: 63068 - DNA, 120 bp, Homo sapiens
  misc_feature: 583 for SV(W|O) and mtDNA
aggggtaggagtcaggtagttagtattaggaggggggttgttagggggtcggaggaaaaggttggggaacagctaaataggttgttgttgatttggttaaaaaatagtagagggatgatg

SEQ ID NO: 63069 - DNA, 120 bp, Homo sapiens
  misc_feature: 582 for SV(W|O) and mtDNA
tgaggggtaggagtcaggtagttagtattaggaggggggttgttagggggtcggaggaaaaggttggggaacagctaaataggttgttgttgatttggttaaaaaatagtagagggatga

SEQ ID NO: 63070 - DNA, 120 bp, Homo sapiens
  misc_feature: 577 for SV(W|O) and mtDNA
gtgaggggtaggagtcaggtagttagtattaggaggggggttgttagggggtcggaggaaaaggttggggaacagctaaataggttgttgttgatttggttaaaaaatagtagagggatg

SEQ ID NO: 63071 - DNA, 120 bp, Homo sapiens
  misc_feature: 546 for SV(W|O) and mtDNA
gatgtgtttaagtgctgtggccagaagcggggggaggggggggtttggtggaaattttttgttatgatgtctgtgtggaaagcggctgtgcagacattcaattgttattattatgtccta

SEQ ID NO: 63072 - DNA, 120 bp, Homo sapiens
  misc_feature: 545 for SV(W|O) and mtDNA
tttaagtgctgtggccagaagcggggggaggggggggtttggtggaaattttttgttatgatgtctgtgtggaaagcggctgtgcagacattcaattgttattattatgtcctacaagca

SEQ ID NO: 63073 - DNA, 120 bp, Homo sapiens
  misc_feature: 542 for SV(W|O) and mtDNA
gagatgtgtttaagtgctgtggccagaagcggggggaggggggggtttggtggaaattttttgttatgatgtctgtgtggaaagcggctgtgcagacattcaattgttattattatgtcc

SEQ ID NO: 63074 - DNA, 120 bp, Homo sapiens
  misc_feature: 539 for SV(W|O) and mtDNA
atgtgtttaagtgctgtggccagaagcggggggaggggggggtttggtggaaattttttgttatgatgtctgtgtggaaagcggctgtgcagacattcaattgttattattatgtcctac

SEQ ID NO: 63075 - DNA, 120 bp, Homo sapiens
  misc_feature: 538 for SV(W|O) and mtDNA
tgtttaagtgctgtggccagaagcggggggaggggggggtttggtggaaattttttgttatgatgtctgtgtggaaagcggctgtgcagacattcaattgttattattatgtcctacaag

SEQ ID NO: 63076 - DNA, 120 bp, Homo sapiens
  misc_feature: 534 for SV(W|O) and mtDNA
ttaagtgctgtggccagaagcggggggaggggggggtttggtggaaattttttgttatgatgtctgtgtggaaagcggctgtgcagacattcaattgttattattatgtcctacaagcat

SEQ ID NO: 63077 - DNA, 120 bp, Homo sapiens
  misc_feature: 534 for SV(W|O) and mtDNA
agatgtgtttaagtgctgtggccagaagcggggggaggggggggtttggtggaaattttttgttatgatgtctgtgtggaaagcggctgtgcagacattcaattgttattattatgtcct

SEQ ID NO: 63078 - DNA, 120 bp, Homo sapiens
  misc_feature: 533 for SV(W|O) and mtDNA
agagatgtgtttaagtgctgtggccagaagcggggggaggggggggtttggtggaaattttttgttatgatgtctgtgtggaaagcggctgtgcagacattcaattgttattattatgtc

SEQ ID NO: 63079 - DNA, 120 bp, Homo sapiens
  misc_feature: 532 for SV(W|O) and mtDNA
ttgttgatgggtgagtcaatacttgggtggtacccaaatctgcttccccatgaaagaacagagaatagtttaaattagaatcttagctttgggtgctaatggtggagttaaagacttttt

SEQ ID NO: 63080 - DNA, 120 bp, Homo sapiens
  misc_feature: 530 for SV(W|O) and mtDNA
ggggtttggttggttcggggtatggggttagcagcggtgtgtgtgtgctgggtaggatgggcgggggttgtattgatgagattagtagtatgggagtgggaggggaaaataatgtgttag

SEQ ID NO: 63081 - DNA, 120 bp, Homo sapiens
  misc_feature: 528 for SV(W|O) and mtDNA
gtttaagtgctgtggccagaagcggggggaggggggggtttggtggaaattttttgttatgatgtctgtgtggaaagcggctgtgcagacattcaattgttattattatgtcctacaagc

SEQ ID NO: 63082 - DNA, 120 bp, Homo sapiens
  misc_feature: 526 for SV(W|O) and mtDNA
aaaagtctttaactccaccattagcacccaaagctaagattctaatttaaactattctctgttctttcatggggaagcagatttgggtaccacccaagtattgactcacccatcaacaac

SEQ ID NO: 63083 - DNA, 120 bp, Homo sapiens
  misc_feature: 525 for SV(W|O) and mtDNA
tgtgtttaagtgctgtggccagaagcggggggaggggggggtttggtggaaattttttgttatgatgtctgtgtggaaagcggctgtgcagacattcaattgttattattatgtcctaca

SEQ ID NO: 63084 - DNA, 120 bp, Homo sapiens
  misc_feature: 523 for SV(W|O) and mtDNA
gtgtttaagtgctgtggccagaagcggggggaggggggggtttggtggaaattttttgttatgatgtctgtgtggaaagcggctgtgcagacattcaattgttattattatgtcctacaa

SEQ ID NO: 63085 - DNA, 120 bp, Homo sapiens
  misc_feature: 523 for SV(W|O) and mtDNA
tgttgatgggtgagtcaatacttgggtggtacccaaatctgcttccccatgaaagaacagagaatagtttaaattagaatcttagctttgggtgctaatggtggagttaaagactttttc

SEQ ID NO: 63086 - DNA, 120 bp, Homo sapiens
  misc_feature: 522 for SV(W|O) and mtDNA
gttgatgggtgagtcaatacttgggtggtacccaaatctgcttccccatgaaagaacagagaatagtttaaattagaatcttagctttgggtgctaatggtggagttaaagactttttct

SEQ ID NO: 63087 - DNA, 120 bp, Homo sapiens
  misc_feature: 521 for SV(W|O) and mtDNA
aaagtctttaactccaccattagcacccaaagctaagattctaatttaaactattctctgttctttcatggggaagcagatttgggtaccacccaagtattgactcacccatcaacaacc

SEQ ID NO: 63088 - DNA, 120 bp, Homo sapiens
  misc_feature: 519 for SV(W|O) and mtDNA
cagagatgtgtttaagtgctgtggccagaagcggggggaggggggggtttggtggaaattttttgttatgatgtctgtgtggaaagcggctgtgcagacattcaattgttattattatgt

SEQ ID NO: 63089 - DNA, 120 bp, Homo sapiens
  misc_feature: 513 for SV(W|O) and mtDNA
ttgatgggtgagtcaatacttgggtggtacccaaatctgcttccccatgaaagaacagagaatagtttaaattagaatcttagctttgggtgctaatggtggagttaaagactttttctc

SEQ ID NO: 63090 - DNA, 120 bp, Homo sapiens
  misc_feature: 513 for SV(W|O) and mtDNA
gggtttggttggttcggggtatggggttagcagcggtgtgtgtgtgctgggtaggatgggcgggggttgtattgatgagattagtagtatgggagtgggaggggaaaataatgtgttagt

SEQ ID NO: 63091 - DNA, 120 bp, Homo sapiens
  misc_feature: 507 for SV(W|O) and mtDNA
tgatgggtgagtcaatacttgggtggtacccaaatctgcttccccatgaaagaacagagaatagtttaaattagaatcttagctttgggtgctaatggtggagttaaagactttttctct

SEQ ID NO: 63092 - DNA, 120 bp, Homo sapiens
  misc_feature: 506 for SV(W|O) and mtDNA
gggtaggatgggcgggggttgtattgatgagattagtagtatgggagtgggaggggaaaataatgtgttagttggggggtgactgttaaaagtgcataccgccaaaagataaaatttgaa

SEQ ID NO: 63093 - DNA, 120 bp, Homo sapiens
  misc_feature: 505 for SV(W|O) and mtDNA
ttctaatttaaactattctctgttctttcatggggaagcagatttgggtaccacccaagtattgactcacccatcaacaaccgctatgtatttcgtacattactgccagccaccatgaat

SEQ ID NO: 63094 - DNA, 120 bp, Homo sapiens
  misc_feature: 505 for SV(W|O) and mtDNA
attctaatttaaactattctctgttctttcatggggaagcagatttgggtaccacccaagtattgactcacccatcaacaaccgctatgtatttcgtacattactgccagccaccatgaa

SEQ ID NO: 63095 - DNA, 120 bp, Homo sapiens
  misc_feature: 505 for SV(W|O) and mtDNA
aagtctttaactccaccattagcacccaaagctaagattctaatttaaactattctctgttctttcatggggaagcagatttgggtaccacccaagtattgactcacccatcaacaaccg

SEQ ID NO: 63096 - DNA, 120 bp, Homo sapiens
  misc_feature: 504 for SV(W|O) and mtDNA
ggccagaagcggggggaggggggggtttggtggaaattttttgttatgatgtctgtgtggaaagcggctgtgcagacattcaattgttattattatgtcctacaagcattaattaattaa

SEQ ID NO: 63097 - DNA, 120 bp, Homo sapiens
  misc_feature: 504 for SV(W|O) and mtDNA
ctccaccattagcacccaaagctaagattctaatttaaactattctctgttctttcatggggaagcagatttgggtaccacccaagtattgactcacccatcaacaaccgctatgtattt

SEQ ID NO: 63098 - DNA, 120 bp, Homo sapiens
  misc_feature: 503 for SV(W|O) and mtDNA
atgggtgagtcaatacttgggtggtacccaaatctgcttccccatgaaagaacagagaatagtttaaattagaatcttagctttgggtgctaatggtggagttaaagactttttctctga

SEQ ID NO: 63099 - DNA, 120 bp, Homo sapiens
  misc_feature: 503 for SV(W|O) and mtDNA
gatgggtgagtcaatacttgggtggtacccaaatctgcttccccatgaaagaacagagaatagtttaaattagaatcttagctttgggtgctaatggtggagttaaagactttttctctg

SEQ ID NO: 63100 - DNA, 120 bp, Homo sapiens
  misc_feature: 502 for SV(W|O) and mtDNA
tgggtaggatgggcgggggttgtattgatgagattagtagtatgggagtgggaggggaaaataatgtgttagttggggggtgactgttaaaagtgcataccgccaaaagataaaatttga

SEQ ID NO: 63101 - DNA, 120 bp, Homo sapiens
  misc_feature: 502 for SV(W|O) and mtDNA
gattctaatttaaactattctctgttctttcatggggaagcagatttgggtaccacccaagtattgactcacccatcaacaaccgctatgtatttcgtacattactgccagccaccatga

SEQ ID NO: 63102 - DNA, 120 bp, Homo sapiens
  misc_feature: 502 for SV(W|O) and mtDNA
aacagagaatagtttaaattagaatcttagctttgggtgctaatggtggagttaaagactttttctctgatttgtccttggaaaaaggttttcatctccggtttacaagactggtgtatt

SEQ ID NO: 63103 - DNA, 120 bp, Homo sapiens
  misc_feature: 501 for SV(W|O) and mtDNA
attctctgttctttcatggggaagcagatttgggtaccacccaagtattgactcacccatcaacaaccgctatgtatttcgtacattactgccagccaccatgaatattgtacggtacca

SEQ ID NO: 63104 - DNA, 120 bp, Homo sapiens
  misc_feature: 501 for SV(W|O) and mtDNA
ctgttctttcatggggaagcagatttgggtaccacccaagtattgactcacccatcaacaaccgctatgtatttcgtacattactgccagccaccatgaatattgtacggtaccataaat

SEQ ID NO: 63105 - DNA, 120 bp, Homo sapiens
  misc_feature: 501 for SV(W|O) and mtDNA
cagagaatagtttaaattagaatcttagctttgggtgctaatggtggagttaaagactttttctctgatttgtccttggaaaaaggttttcatctccggtttacaagactggtgtattag

SEQ ID NO: 63106 - DNA, 120 bp, Homo sapiens
  misc_feature: 501 for SV(W|O) and mtDNA
aactccaccattagcacccaaagctaagattctaatttaaactattctctgttctttcatggggaagcagatttgggtaccacccaagtattgactcacccatcaacaaccgctatgtat

SEQ ID NO: 63107 - DNA, 120 bp, Homo sapiens
  misc_feature: 501 for SV(W|O) and mtDNA
actccaccattagcacccaaagctaagattctaatttaaactattctctgttctttcatggggaagcagatttgggtaccacccaagtattgactcacccatcaacaaccgctatgtatt

SEQ ID NO: 63108 - DNA, 120 bp, Homo sapiens
  misc_feature: 500 for SV(W|O) and mtDNA
ttctctgttctttcatggggaagcagatttgggtaccacccaagtattgactcacccatcaacaaccgctatgtatttcgtacattactgccagccaccatgaatattgtacggtaccat

SEQ ID NO: 63109 - DNA, 120 bp, Homo sapiens
  misc_feature: 500 for SV(W|O) and mtDNA
tccaccattagcacccaaagctaagattctaatttaaactattctctgttctttcatggggaagcagatttgggtaccacccaagtattgactcacccatcaacaaccgctatgtatttc

SEQ ID NO: 63110 - DNA, 120 bp, Homo sapiens
  misc_feature: 500 for SV(W|O) and mtDNA
acagagaatagtttaaattagaatcttagctttgggtgctaatggtggagttaaagactttttctctgatttgtccttggaaaaaggttttcatctccggtttacaagactggtgtatta

SEQ ID NO: 63111 - DNA, 120 bp, Homo sapiens
  misc_feature: 500 for SV(W|O) and mtDNA
agtctttaactccaccattagcacccaaagctaagattctaatttaaactattctctgttctttcatggggaagcagatttgggtaccacccaagtattgactcacccatcaacaaccgc

SEQ ID NO: 63112 - DNA, 120 bp, Homo sapiens
  misc_feature: 499 for SV(W|O) and mtDNA
tgggtgagtcaatacttgggtggtacccaaatctgcttccccatgaaagaacagagaatagtttaaattagaatcttagctttgggtgctaatggtggagttaaagactttttctctgat

SEQ ID NO: 63113 - DNA, 120 bp, Homo sapiens
  misc_feature: 499 for SV(W|O) and mtDNA
tctctgttctttcatggggaagcagatttgggtaccacccaagtattgactcacccatcaacaaccgctatgtatttcgtacattactgccagccaccatgaatattgtacggtaccata

SEQ ID NO: 63114 - DNA, 120 bp, Homo sapiens
  misc_feature: 499 for SV(W|O) and mtDNA
tctaatttaaactattctctgttctttcatggggaagcagatttgggtaccacccaagtattgactcacccatcaacaaccgctatgtatttcgtacattactgccagccaccatgaata

SEQ ID NO: 63115 - DNA, 120 bp, Homo sapiens
  misc_feature: 499 for SV(W|O) and mtDNA
gccagaagcggggggaggggggggtttggtggaaattttttgttatgatgtctgtgtggaaagcggctgtgcagacattcaattgttattattatgtcctacaagcattaattaattaac

SEQ ID NO: 63116 - DNA, 120 bp, Homo sapiens
  misc_feature: 499 for SV(W|O) and mtDNA
ccaccattagcacccaaagctaagattctaatttaaactattctctgttctttcatggggaagcagatttgggtaccacccaagtattgactcacccatcaacaaccgctatgtatttcg

SEQ ID NO: 63117 - DNA, 120 bp, Homo sapiens
  misc_feature: 498 for SV(W|O) and mtDNA
tgttctttcatggggaagcagatttgggtaccacccaagtattgactcacccatcaacaaccgctatgtatttcgtacattactgccagccaccatgaatattgtacggtaccataaata

SEQ ID NO: 63118 - DNA, 120 bp, Homo sapiens
  misc_feature: 498 for SV(W|O) and mtDNA
gggtgagtcaatacttgggtggtacccaaatctgcttccccatgaaagaacagagaatagtttaaattagaatcttagctttgggtgctaatggtggagttaaagactttttctctgatt

SEQ ID NO: 63119 - DNA, 120 bp, Homo sapiens
  misc_feature: 497 for SV(W|O) and mtDNA
ccagaagcggggggaggggggggtttggtggaaattttttgttatgatgtctgtgtggaaagcggctgtgcagacattcaattgttattattatgtcctacaagcattaattaattaaca

SEQ ID NO: 63120 - DNA, 120 bp, Homo sapiens
  misc_feature: 497 for SV(W|O) and mtDNA
gtctttaactccaccattagcacccaaagctaagattctaatttaaactattctctgttctttcatggggaagcagatttgggtaccacccaagtattgactcacccatcaacaaccgct

SEQ ID NO: 63121 - DNA, 120 bp, Homo sapiens
  misc_feature: 496 for SV(W|O) and mtDNA
ctctgttctttcatggggaagcagatttgggtaccacccaagtattgactcacccatcaacaaccgctatgtatttcgtacattactgccagccaccatgaatattgtacggtaccataa

SEQ ID NO: 63122 - DNA, 120 bp, Homo sapiens
  misc_feature: 496 for SV(W|O) and mtDNA
tctttaactccaccattagcacccaaagctaagattctaatttaaactattctctgttctttcatggggaagcagatttgggtaccacccaagtattgactcacccatcaacaaccgcta

SEQ ID NO: 63123 - DNA, 120 bp, Homo sapiens
  misc_feature: 496 for SV(W|O) and mtDNA
tattctctgttctttcatggggaagcagatttgggtaccacccaagtattgactcacccatcaacaaccgctatgtatttcgtacattactgccagccaccatgaatattgtacggtacc

SEQ ID NO: 63124 - DNA, 120 bp, Homo sapiens
  misc_feature: 496 for SV(W|O) and mtDNA
gttctttcatggggaagcagatttgggtaccacccaagtattgactcacccatcaacaaccgctatgtatttcgtacattactgccagccaccatgaatattgtacggtaccataaatac

SEQ ID NO: 63125 - DNA, 120 bp, Homo sapiens
  misc_feature: 496 for SV(W|O) and mtDNA
ctgggtaggatgggcgggggttgtattgatgagattagtagtatgggagtgggaggggaaaataatgtgttagttggggggtgactgttaaaagtgcataccgccaaaagataaaatttg

SEQ ID NO: 63126 - DNA, 120 bp, Homo sapiens
  misc_feature: 495 for SV(W|O) and mtDNA
ctttaactccaccattagcacccaaagctaagattctaatttaaactattctctgttctttcatggggaagcagatttgggtaccacccaagtattgactcacccatcaacaaccgctat

SEQ ID NO: 63127 - DNA, 120 bp, Homo sapiens
  misc_feature: 494 for SV(W|O) and mtDNA
tgtgctgggtaggatgggcgggggttgtattgatgagattagtagtatgggagtgggaggggaaaataatgtgttagttggggggtgactgttaaaagtgcataccgccaaaagataaaa

SEQ ID NO: 63128 - DNA, 120 bp, Homo sapiens
  misc_feature: 494 for SV(W|O) and mtDNA
gctgggtaggatgggcgggggttgtattgatgagattagtagtatgggagtgggaggggaaaataatgtgttagttggggggtgactgttaaaagtgcataccgccaaaagataaaattt

SEQ ID NO: 63129 - DNA, 120 bp, Homo sapiens
  misc_feature: 493 for SV(W|O) and mtDNA
tttaactccaccattagcacccaaagctaagattctaatttaaactattctctgttctttcatggggaagcagatttgggtaccacccaagtattgactcacccatcaacaaccgctatg

SEQ ID NO: 63130 - DNA, 120 bp, Homo sapiens
  misc_feature: 493 for SV(W|O) and mtDNA
tgtgtgctgggtaggatgggcgggggttgtattgatgagattagtagtatgggagtgggaggggaaaataatgtgttagttggggggtgactgttaaaagtgcataccgccaaaagataa

SEQ ID NO: 63131 - DNA, 120 bp, Homo sapiens
  misc_feature: 493 for SV(W|O) and mtDNA
tgctgggtaggatgggcgggggttgtattgatgagattagtagtatgggagtgggaggggaaaataatgtgttagttggggggtgactgttaaaagtgcataccgccaaaagataaaatt

SEQ ID NO: 63132 - DNA, 120 bp, Homo sapiens
  misc_feature: 492 for SV(W|O) and mtDNA
taactccaccattagcacccaaagctaagattctaatttaaactattctctgttctttcatggggaagcagatttgggtaccacccaagtattgactcacccatcaacaaccgctatgta

SEQ ID NO: 63133 - DNA, 120 bp, Homo sapiens
  misc_feature: 492 for SV(W|O) and mtDNA
caccattagcacccaaagctaagattctaatttaaactattctctgttctttcatggggaagcagatttgggtaccacccaagtattgactcacccatcaacaaccgctatgtatttcgt

SEQ ID NO: 63134 - DNA, 120 bp, Homo sapiens
  misc_feature: 491 for SV(W|O) and mtDNA
accattagcacccaaagctaagattctaatttaaactattctctgttctttcatggggaagcagatttgggtaccacccaagtattgactcacccatcaacaaccgctatgtatttcgta

SEQ ID NO: 63135 - DNA, 120 bp, Homo sapiens
  misc_feature: 490 for SV(W|O) and mtDNA
gtgctgggtaggatgggcgggggttgtattgatgagattagtagtatgggagtgggaggggaaaataatgtgttagttggggggtgactgttaaaagtgcataccgccaaaagataaaat

SEQ ID NO: 63136 - DNA, 120 bp, Homo sapiens
  misc_feature: 489 for SV(W|O) and mtDNA
tgtgtgtgtgctgggtaggatgggcgggggttgtattgatgagattagtagtatgggagtgggaggggaaaataatgtgttagttggggggtgactgttaaaagtgcataccgccaaaag

SEQ ID NO: 63137 - DNA, 120 bp, Homo sapiens
  misc_feature: 489 for SV(W|O) and mtDNA
ctaatttaaactattctctgttctttcatggggaagcagatttgggtaccacccaagtattgactcacccatcaacaaccgctatgtatttcgtacattactgccagccaccatgaatat

SEQ ID NO: 63138 - DNA, 120 bp, Homo sapiens
  misc_feature: 489 for SV(W|O) and mtDNA
agattctaatttaaactattctctgttctttcatggggaagcagatttgggtaccacccaagtattgactcacccatcaacaaccgctatgtatttcgtacattactgccagccaccatg

SEQ ID NO: 63139 - DNA, 120 bp, Homo sapiens
  misc_feature: 489 for SV(W|O) and mtDNA
aactattctctgttctttcatggggaagcagatttgggtaccacccaagtattgactcacccatcaacaaccgctatgtatttcgtacattactgccagccaccatgaatattgtacggt

SEQ ID NO: 63140 - DNA, 120 bp, Homo sapiens
  misc_feature: 488 for SV(W|O) and mtDNA
cattagcacccaaagctaagattctaatttaaactattctctgttctttcatggggaagcagatttgggtaccacccaagtattgactcacccatcaacaaccgctatgtatttcgtaca

SEQ ID NO: 63141 - DNA, 120 bp, Homo sapiens
  misc_feature: 488 for SV(W|O) and mtDNA
gtttggttggttcggggtatggggttagcagcggtgtgtgtgtgctgggtaggatgggcgggggttgtattgatgagattagtagtatgggagtgggaggggaaaataatgtgttagttg

SEQ ID NO: 63142 - DNA, 120 bp, Homo sapiens
  misc_feature: 488 for SV(W|O) and mtDNA
ctattctctgttctttcatggggaagcagatttgggtaccacccaagtattgactcacccatcaacaaccgctatgtatttcgtacattactgccagccaccatgaatattgtacggtac

SEQ ID NO: 63143 - DNA, 120 bp, Homo sapiens
  misc_feature: 488 for SV(W|O) and mtDNA
ggtttggttggttcggggtatggggttagcagcggtgtgtgtgtgctgggtaggatgggcgggggttgtattgatgagattagtagtatgggagtgggaggggaaaataatgtgttagtt

SEQ ID NO: 63144 - DNA, 120 bp, Homo sapiens
  misc_feature: 487 for SV(W|O) and mtDNA
tttggttggttcggggtatggggttagcagcggtgtgtgtgtgctgggtaggatgggcgggggttgtattgatgagattagtagtatgggagtgggaggggaaaataatgtgttagttgg

SEQ ID NO: 63145 - DNA, 120 bp, Homo sapiens
  misc_feature: 487 for SV(W|O) and mtDNA
tctgttctttcatggggaagcagatttgggtaccacccaagtattgactcacccatcaacaaccgctatgtatttcgtacattactgccagccaccatgaatattgtacggtaccataaa

SEQ ID NO: 63146 - DNA, 120 bp, Homo sapiens
  misc_feature: 487 for SV(W|O) and mtDNA
tttaaactattctctgttctttcatggggaagcagatttgggtaccacccaagtattgactcacccatcaacaaccgctatgtatttcgtacattactgccagccaccatgaatattgta

SEQ ID NO: 63147 - DNA, 120 bp, Homo sapiens
  misc_feature: 487 for SV(W|O) and mtDNA
actattctctgttctttcatggggaagcagatttgggtaccacccaagtattgactcacccatcaacaaccgctatgtatttcgtacattactgccagccaccatgaatattgtacggta

SEQ ID NO: 63148 - DNA, 120 bp, Homo sapiens
  misc_feature: 486 for SV(W|O) and mtDNA
ttaactccaccattagcacccaaagctaagattctaatttaaactattctctgttctttcatggggaagcagatttgggtaccacccaagtattgactcacccatcaacaaccgctatgt

SEQ ID NO: 63149 - DNA, 120 bp, Homo sapiens
  misc_feature: 486 for SV(W|O) and mtDNA
aaactattctctgttctttcatggggaagcagatttgggtaccacccaagtattgactcacccatcaacaaccgctatgtatttcgtacattactgccagccaccatgaatattgtacgg

SEQ ID NO: 63150 - DNA, 120 bp, Homo sapiens
  misc_feature: 485 for SV(W|O) and mtDNA
tgagtcaatacttgggtggtacccaaatctgcttccccatgaaagaacagagaatagtttaaattagaatcttagctttgggtgctaatggtggagttaaagactttttctctgatttgt

SEQ ID NO: 63151 - DNA, 120 bp, Homo sapiens
  misc_feature: 485 for SV(W|O) and mtDNA
gtgtgtgtgctgggtaggatgggcgggggttgtattgatgagattagtagtatgggagtgggaggggaaaataatgtgttagttggggggtgactgttaaaagtgcataccgccaaaaga

SEQ ID NO: 63152 - DNA, 120 bp, Homo sapiens
  misc_feature: 485 for SV(W|O) and mtDNA
ggtgagtcaatacttgggtggtacccaaatctgcttccccatgaaagaacagagaatagtttaaattagaatcttagctttgggtgctaatggtggagttaaagactttttctctgattt

SEQ ID NO: 63153 - DNA, 120 bp, Homo sapiens
  misc_feature: 484 for SV(W|O) and mtDNA
gaacagagaatagtttaaattagaatcttagctttgggtgctaatggtggagttaaagactttttctctgatttgtccttggaaaaaggttttcatctccggtttacaagactggtgtat

SEQ ID NO: 63154 - DNA, 120 bp, Homo sapiens
  misc_feature: 483 for SV(W|O) and mtDNA
gtgtgctgggtaggatgggcgggggttgtattgatgagattagtagtatgggagtgggaggggaaaataatgtgttagttggggggtgactgttaaaagtgcataccgccaaaagataaa

SEQ ID NO: 63155 - DNA, 120 bp, Homo sapiens
  misc_feature: 483 for SV(W|O) and mtDNA
agaacagagaatagtttaaattagaatcttagctttgggtgctaatggtggagttaaagactttttctctgatttgtccttggaaaaaggttttcatctccggtttacaagactggtgta

SEQ ID NO: 63156 - DNA, 120 bp, Homo sapiens
  misc_feature: 483 for SV(W|O) and mtDNA
attagcacccaaagctaagattctaatttaaactattctctgttctttcatggggaagcagatttgggtaccacccaagtattgactcacccatcaacaaccgctatgtatttcgtacat

SEQ ID NO: 63157 - DNA, 120 bp, Homo sapiens
  misc_feature: 482 for SV(W|O) and mtDNA
taagattctaatttaaactattctctgttctttcatggggaagcagatttgggtaccacccaagtattgactcacccatcaacaaccgctatgtatttcgtacattactgccagccacca

SEQ ID NO: 63158 - DNA, 120 bp, Homo sapiens
  misc_feature: 481 for SV(W|O) and mtDNA
tgtgtgtgctgggtaggatgggcgggggttgtattgatgagattagtagtatgggagtgggaggggaaaataatgtgttagttggggggtgactgttaaaagtgcataccgccaaaagat

SEQ ID NO: 63159 - DNA, 120 bp, Homo sapiens
  misc_feature: 481 for SV(W|O) and mtDNA
aatttaaactattctctgttctttcatggggaagcagatttgggtaccacccaagtattgactcacccatcaacaaccgctatgtatttcgtacattactgccagccaccatgaatattg

SEQ ID NO: 63160 - DNA, 120 bp, Homo sapiens
  misc_feature: 481 for SV(W|O) and mtDNA
atttaaactattctctgttctttcatggggaagcagatttgggtaccacccaagtattgactcacccatcaacaaccgctatgtatttcgtacattactgccagccaccatgaatattgt

SEQ ID NO: 63161 - DNA, 120 bp, Homo sapiens
  misc_feature: 480 for SV(W|O) and mtDNA
taatttaaactattctctgttctttcatggggaagcagatttgggtaccacccaagtattgactcacccatcaacaaccgctatgtatttcgtacattactgccagccaccatgaatatt

SEQ ID NO: 63162 - DNA, 120 bp, Homo sapiens
  misc_feature: 480 for SV(W|O) and mtDNA
ccattagcacccaaagctaagattctaatttaaactattctctgttctttcatggggaagcagatttgggtaccacccaagtattgactcacccatcaacaaccgctatgtatttcgtac

SEQ ID NO: 63163 - DNA, 120 bp, Homo sapiens
  misc_feature: 479 for SV(W|O) and mtDNA
ttaaactattctctgttctttcatggggaagcagatttgggtaccacccaagtattgactcacccatcaacaaccgctatgtatttcgtacattactgccagccaccatgaatattgtac

SEQ ID NO: 63164 - DNA, 120 bp, Homo sapiens
  misc_feature: 479 for SV(W|O) and mtDNA
aagattctaatttaaactattctctgttctttcatggggaagcagatttgggtaccacccaagtattgactcacccatcaacaaccgctatgtatttcgtacattactgccagccaccat

SEQ ID NO: 63165 - DNA, 120 bp, Homo sapiens
  misc_feature: 478 for SV(W|O) and mtDNA
tatggggttagcagcggtgtgtgtgtgctgggtaggatgggcgggggttgtattgatgagattagtagtatgggagtgggaggggaaaataatgtgttagttggggggtgactgttaaaa

SEQ ID NO: 63166 - DNA, 120 bp, Homo sapiens
  misc_feature: 478 for SV(W|O) and mtDNA
ggtgtgtgtgtgctgggtaggatgggcgggggttgtattgatgagattagtagtatgggagtgggaggggaaaataatgtgttagttggggggtgactgttaaaagtgcataccgccaaa

SEQ ID NO: 63167 - DNA, 120 bp, Homo sapiens
  misc_feature: 478 for SV(W|O) and mtDNA
gtgtgtgctgggtaggatgggcgggggttgtattgatgagattagtagtatgggagtgggaggggaaaataatgtgttagttggggggtgactgttaaaagtgcataccgccaaaagata

SEQ ID NO: 63168 - DNA, 120 bp, Homo sapiens
  misc_feature: 477 for SV(W|O) and mtDNA
taaactattctctgttctttcatggggaagcagatttgggtaccacccaagtattgactcacccatcaacaaccgctatgtatttcgtacattactgccagccaccatgaatattgtacg

SEQ ID NO: 63169 - DNA, 120 bp, Homo sapiens
  misc_feature: 477 for SV(W|O) and mtDNA
gtgagtcaatacttgggtggtacccaaatctgcttccccatgaaagaacagagaatagtttaaattagaatcttagctttgggtgctaatggtggagttaaagactttttctctgatttg

SEQ ID NO: 63170 - DNA, 120 bp, Homo sapiens
  misc_feature: 477 for SV(W|O) and mtDNA
atggggttagcagcggtgtgtgtgtgctgggtaggatgggcgggggttgtattgatgagattagtagtatgggagtgggaggggaaaataatgtgttagttggggggtgactgttaaaag

SEQ ID NO: 63171 - DNA, 120 bp, Homo sapiens
  misc_feature: 475 for SV(W|O) and mtDNA
tggggttagcagcggtgtgtgtgtgctgggtaggatgggcgggggttgtattgatgagattagtagtatgggagtgggaggggaaaataatgtgttagttggggggtgactgttaaaagt

SEQ ID NO: 63172 - DNA, 120 bp, Homo sapiens
  misc_feature: 474 for SV(W|O) and mtDNA
gtgtgtgtgtgctgggtaggatgggcgggggttgtattgatgagattagtagtatgggagtgggaggggaaaataatgtgttagttggggggtgactgttaaaagtgcataccgccaaaa

SEQ ID NO: 63173 - DNA, 120 bp, Homo sapiens
  misc_feature: 473 for SV(W|O) and mtDNA
cggtgtgtgtgtgctgggtaggatgggcgggggttgtattgatgagattagtagtatgggagtgggaggggaaaataatgtgttagttggggggtgactgttaaaagtgcataccgccaa

SEQ ID NO: 63174 - DNA, 120 bp, Homo sapiens
  misc_feature: 471 for SV(W|O) and mtDNA
ggggttagcagcggtgtgtgtgtgctgggtaggatgggcgggggttgtattgatgagattagtagtatgggagtgggaggggaaaataatgtgttagttggggggtgactgttaaaagtg

SEQ ID NO: 63175 - DNA, 120 bp, Homo sapiens
  misc_feature: 470 for SV(W|O) and mtDNA
gagtcaatacttgggtggtacccaaatctgcttccccatgaaagaacagagaatagtttaaattagaatcttagctttgggtgctaatggtggagttaaagactttttctctgatttgtc

SEQ ID NO: 63176 - DNA, 120 bp, Homo sapiens
  misc_feature: 470 for SV(W|O) and mtDNA
aagaacagagaatagtttaaattagaatcttagctttgggtgctaatggtggagttaaagactttttctctgatttgtccttggaaaaaggttttcatctccggtttacaagactggtgt

SEQ ID NO: 63177 - DNA, 120 bp, Homo sapiens
  misc_feature: 469 for SV(W|O) and mtDNA
tagcacccaaagctaagattctaatttaaactattctctgttctttcatggggaagcagatttgggtaccacccaagtattgactcacccatcaacaaccgctatgtatttcgtacatta

SEQ ID NO: 63178 - DNA, 120 bp, Homo sapiens
  misc_feature: 469 for SV(W|O) and mtDNA
gggttagcagcggtgtgtgtgtgctgggtaggatgggcgggggttgtattgatgagattagtagtatgggagtgggaggggaaaataatgtgttagttggggggtgactgttaaaagtgc

SEQ ID NO: 63179 - DNA, 120 bp, Homo sapiens
  misc_feature: 469 for SV(W|O) and mtDNA
agcggtgtgtgtgtgctgggtaggatgggcgggggttgtattgatgagattagtagtatgggagtgggaggggaaaataatgtgttagttggggggtgactgttaaaagtgcataccgcc

SEQ ID NO: 63180 - DNA, 120 bp, Homo sapiens
  misc_feature: 469 for SV(W|O) and mtDNA
agtcaatacttgggtggtacccaaatctgcttccccatgaaagaacagagaatagtttaaattagaatcttagctttgggtgctaatggtggagttaaagactttttctctgatttgtcc

SEQ ID NO: 63181 - DNA, 120 bp, Homo sapiens
  misc_feature: 469 for SV(W|O) and mtDNA
caatacttgggtggtacccaaatctgcttccccatgaaagaacagagaatagtttaaattagaatcttagctttgggtgctaatggtggagttaaagactttttctctgatttgtccttg

SEQ ID NO: 63182 - DNA, 120 bp, Homo sapiens
  misc_feature: 468 for SV(W|O) and mtDNA
gcggtgtgtgtgtgctgggtaggatgggcgggggttgtattgatgagattagtagtatgggagtgggaggggaaaataatgtgttagttggggggtgactgttaaaagtgcataccgcca

SEQ ID NO: 63183 - DNA, 120 bp, Homo sapiens
  misc_feature: 468 for SV(W|O) and mtDNA
tcaatacttgggtggtacccaaatctgcttccccatgaaagaacagagaatagtttaaattagaatcttagctttgggtgctaatggtggagttaaagactttttctctgatttgtcctt

SEQ ID NO: 63184 - DNA, 120 bp, Homo sapiens
  misc_feature: 467 for SV(W|O) and mtDNA
gtcaatacttgggtggtacccaaatctgcttccccatgaaagaacagagaatagtttaaattagaatcttagctttgggtgctaatggtggagttaaagactttttctctgatttgtcct

SEQ ID NO: 63185 - DNA, 120 bp, Homo sapiens
  misc_feature: 466 for SV(W|O) and mtDNA
ttagcacccaaagctaagattctaatttaaactattctctgttctttcatggggaagcagatttgggtaccacccaagtattgactcacccatcaacaaccgctatgtatttcgtacatt

SEQ ID NO: 63186 - DNA, 120 bp, Homo sapiens
  misc_feature: 466 for SV(W|O) and mtDNA
agcacccaaagctaagattctaatttaaactattctctgttctttcatggggaagcagatttgggtaccacccaagtattgactcacccatcaacaaccgctatgtatttcgtacattac

SEQ ID NO: 63187 - DNA, 120 bp, Homo sapiens
  misc_feature: 466 for SV(W|O) and mtDNA
aatacttgggtggtacccaaatctgcttccccatgaaagaacagagaatagtttaaattagaatcttagctttgggtgctaatggtggagttaaagactttttctctgatttgtccttgg

SEQ ID NO: 63188 - DNA, 120 bp, Homo sapiens
  misc_feature: 465 for SV(W|O) and mtDNA
cagcggtgtgtgtgtgctgggtaggatgggcgggggttgtattgatgagattagtagtatgggagtgggaggggaaaataatgtgttagttggggggtgactgttaaaagtgcataccgc

SEQ ID NO: 63189 - DNA, 120 bp, Homo sapiens
  misc_feature: 464 for SV(W|O) and mtDNA
ttagcagcggtgtgtgtgtgctgggtaggatgggcgggggttgtattgatgagattagtagtatgggagtgggaggggaaaataatgtgttagttggggggtgactgttaaaagtgcata

SEQ ID NO: 63190 - DNA, 120 bp, Homo sapiens
  misc_feature: 464 for SV(W|O) and mtDNA
ctaagattctaatttaaactattctctgttctttcatggggaagcagatttgggtaccacccaagtattgactcacccatcaacaaccgctatgtatttcgtacattactgccagccacc

SEQ ID NO: 63191 - DNA, 120 bp, Homo sapiens
  misc_feature: 462 for SV(W|O) and mtDNA
gtatggggttagcagcggtgtgtgtgtgctgggtaggatgggcgggggttgtattgatgagattagtagtatgggagtgggaggggaaaataatgtgttagttggggggtgactgttaaa

SEQ ID NO: 63192 - DNA, 120 bp, Homo sapiens
  misc_feature: 462 for SV(W|O) and mtDNA
cacccaaagctaagattctaatttaaactattctctgttctttcatggggaagcagatttgggtaccacccaagtattgactcacccatcaacaaccgctatgtatttcgtacattactg

SEQ ID NO: 63193 - DNA, 120 bp, Homo sapiens
  misc_feature: 461 for SV(W|O) and mtDNA
acccaaagctaagattctaatttaaactattctctgttctttcatggggaagcagatttgggtaccacccaagtattgactcacccatcaacaaccgctatgtatttcgtacattactgc

SEQ ID NO: 63194 - DNA, 120 bp, Homo sapiens
  misc_feature: 459 for SV(W|O) and mtDNA
ccaaagctaagattctaatttaaactattctctgttctttcatggggaagcagatttgggtaccacccaagtattgactcacccatcaacaaccgctatgtatttcgtacattactgcca

SEQ ID NO: 63195 - DNA, 120 bp, Homo sapiens
  misc_feature: 459 for SV(W|O) and mtDNA
gcacccaaagctaagattctaatttaaactattctctgttctttcatggggaagcagatttgggtaccacccaagtattgactcacccatcaacaaccgctatgtatttcgtacattact

SEQ ID NO: 63196 - DNA, 120 bp, Homo sapiens
  misc_feature: 458 for SV(W|O) and mtDNA
gttagcagcggtgtgtgtgtgctgggtaggatgggcgggggttgtattgatgagattagtagtatgggagtgggaggggaaaataatgtgttagttggggggtgactgttaaaagtgcat

SEQ ID NO: 63197 - DNA, 120 bp, Homo sapiens
  misc_feature: 457 for SV(W|O) and mtDNA
ggttagcagcggtgtgtgtgtgctgggtaggatgggcgggggttgtattgatgagattagtagtatgggagtgggaggggaaaataatgtgttagttggggggtgactgttaaaagtgca

SEQ ID NO: 63198 - DNA, 120 bp, Homo sapiens
  misc_feature: 456 for SV(W|O) and mtDNA
cccaaagctaagattctaatttaaactattctctgttctttcatggggaagcagatttgggtaccacccaagtattgactcacccatcaacaaccgctatgtatttcgtacattactgcc

SEQ ID NO: 63199 - DNA, 120 bp, Homo sapiens
  misc_feature: 456 for SV(W|O) and mtDNA
caaagctaagattctaatttaaactattctctgttctttcatggggaagcagatttgggtaccacccaagtattgactcacccatcaacaaccgctatgtatttcgtacattactgccag

SEQ ID NO: 63200 - DNA, 120 bp, Homo sapiens
  misc_feature: 456 for SV(W|O) and mtDNA
aaagaacagagaatagtttaaattagaatcttagctttgggtgctaatggtggagttaaagactttttctctgatttgtccttggaaaaaggttttcatctccggtttacaagactggtg

SEQ ID NO: 63201 - DNA, 120 bp, Homo sapiens
  misc_feature: 454 for SV(W|O) and mtDNA
gcagcggtgtgtgtgtgctgggtaggatgggcgggggttgtattgatgagattagtagtatgggagtgggaggggaaaataatgtgttagttggggggtgactgttaaaagtgcataccg

SEQ ID NO: 63202 - DNA, 120 bp, Homo sapiens
  misc_feature: 452 for SV(W|O) and mtDNA
gggtatggggttagcagcggtgtgtgtgtgctgggtaggatgggcgggggttgtattgatgagattagtagtatgggagtgggaggggaaaataatgtgttagttggggggtgactgtta

SEQ ID NO: 63203 - DNA, 120 bp, Homo sapiens
  misc_feature: 452 for SV(W|O) and mtDNA
gctaagattctaatttaaactattctctgttctttcatggggaagcagatttgggtaccacccaagtattgactcacccatcaacaaccgctatgtatttcgtacattactgccagccac

SEQ ID NO: 63204 - DNA, 120 bp, Homo sapiens
  misc_feature: 452 for SV(W|O) and mtDNA
agcagcggtgtgtgtgtgctgggtaggatgggcgggggttgtattgatgagattagtagtatgggagtgggaggggaaaataatgtgttagttggggggtgactgttaaaagtgcatacc

SEQ ID NO: 63205 - DNA, 120 bp, Homo sapiens
  misc_feature: 451 for SV(W|O) and mtDNA
tagcagcggtgtgtgtgtgctgggtaggatgggcgggggttgtattgatgagattagtagtatgggagtgggaggggaaaataatgtgttagttggggggtgactgttaaaagtgcatac

SEQ ID NO: 63206 - DNA, 120 bp, Homo sapiens
  misc_feature: 451 for SV(W|O) and mtDNA
aaagctaagattctaatttaaactattctctgttctttcatggggaagcagatttgggtaccacccaagtattgactcacccatcaacaaccgctatgtatttcgtacattactgccagc

SEQ ID NO: 63207 - DNA, 120 bp, Homo sapiens
  misc_feature: 449 for SV(W|O) and mtDNA
ggtatggggttagcagcggtgtgtgtgtgctgggtaggatgggcgggggttgtattgatgagattagtagtatgggagtgggaggggaaaataatgtgttagttggggggtgactgttaa

SEQ ID NO: 63208 - DNA, 120 bp, Homo sapiens
  misc_feature: 448 for SV(W|O) and mtDNA
aagctaagattctaatttaaactattctctgttctttcatggggaagcagatttgggtaccacccaagtattgactcacccatcaacaaccgctatgtatttcgtacattactgccagcc

SEQ ID NO: 63209 - DNA, 120 bp, Homo sapiens
  misc_feature: 447 for SV(W|O) and mtDNA
agctaagattctaatttaaactattctctgttctttcatggggaagcagatttgggtaccacccaagtattgactcacccatcaacaaccgctatgtatttcgtacattactgccagcca

SEQ ID NO: 63210 - DNA, 120 bp, Homo sapiens
  misc_feature: 447 for SV(W|O) and mtDNA
atacttgggtggtacccaaatctgcttccccatgaaagaacagagaatagtttaaattagaatcttagctttgggtgctaatggtggagttaaagactttttctctgatttgtccttgga

SEQ ID NO: 63211 - DNA, 120 bp, Homo sapiens
  misc_feature: 444 for SV(W|O) and mtDNA
tacttgggtggtacccaaatctgcttccccatgaaagaacagagaatagtttaaattagaatcttagctttgggtgctaatggtggagttaaagactttttctctgatttgtccttggaa

SEQ ID NO: 63212 - DNA, 120 bp, Homo sapiens
  misc_feature: 443 for SV(W|O) and mtDNA
gaaagaacagagaatagtttaaattagaatcttagctttgggtgctaatggtggagttaaagactttttctctgatttgtccttggaaaaaggttttcatctccggtttacaagactggt

SEQ ID NO: 63213 - DNA, 120 bp, Homo sapiens
  misc_feature: 440 for SV(W|O) and mtDNA
ggggtatggggttagcagcggtgtgtgtgtgctgggtaggatgggcgggggttgtattgatgagattagtagtatgggagtgggaggggaaaataatgtgttagttggggggtgactgtt

SEQ ID NO: 63214 - DNA, 120 bp, Homo sapiens
  misc_feature: 437 for SV(W|O) and mtDNA
acttgggtggtacccaaatctgcttccccatgaaagaacagagaatagtttaaattagaatcttagctttgggtgctaatggtggagttaaagactttttctctgatttgtccttggaaa

SEQ ID NO: 63215 - DNA, 120 bp, Homo sapiens
  misc_feature: 437 for SV(W|O) and mtDNA
tgaaagaacagagaatagtttaaattagaatcttagctttgggtgctaatggtggagttaaagactttttctctgatttgtccttggaaaaaggttttcatctccggtttacaagactgg

SEQ ID NO: 63216 - DNA, 120 bp, Homo sapiens
  misc_feature: 435 for SV(W|O) and mtDNA
tccccatgaaagaacagagaatagtttaaattagaatcttagctttgggtgctaatggtggagttaaagactttttctctgatttgtccttggaaaaaggttttcatctccggtttacaa

SEQ ID NO: 63217 - DNA, 120 bp, Homo sapiens
  misc_feature: 435 for SV(W|O) and mtDNA
cttccccatgaaagaacagagaatagtttaaattagaatcttagctttgggtgctaatggtggagttaaagactttttctctgatttgtccttggaaaaaggttttcatctccggtttac

SEQ ID NO: 63218 - DNA, 120 bp, Homo sapiens
  misc_feature: 434 for SV(W|O) and mtDNA
gcttccccatgaaagaacagagaatagtttaaattagaatcttagctttgggtgctaatggtggagttaaagactttttctctgatttgtccttggaaaaaggttttcatctccggttta

SEQ ID NO: 63219 - DNA, 120 bp, Homo sapiens
  misc_feature: 433 for SV(W|O) and mtDNA
tctgcttccccatgaaagaacagagaatagtttaaattagaatcttagctttgggtgctaatggtggagttaaagactttttctctgatttgtccttggaaaaaggttttcatctccggt

SEQ ID NO: 63220 - DNA, 120 bp, Homo sapiens
  misc_feature: 433 for SV(W|O) and mtDNA
cggggtatggggttagcagcggtgtgtgtgtgctgggtaggatgggcgggggttgtattgatgagattagtagtatgggagtgggaggggaaaataatgtgttagttggggggtgactgt

SEQ ID NO: 63221 - DNA, 120 bp, Homo sapiens
  misc_feature: 432 for SV(W|O) and mtDNA
ttccccatgaaagaacagagaatagtttaaattagaatcttagctttgggtgctaatggtggagttaaagactttttctctgatttgtccttggaaaaaggttttcatctccggtttaca

SEQ ID NO: 63222 - DNA, 120 bp, Homo sapiens
  misc_feature: 432 for SV(W|O) and mtDNA
tggtacccaaatctgcttccccatgaaagaacagagaatagtttaaattagaatcttagctttgggtgctaatggtggagttaaagactttttctctgatttgtccttggaaaaaggttt

SEQ ID NO: 63223 - DNA, 120 bp, Homo sapiens
  misc_feature: 431 for SV(W|O) and mtDNA
gtggtacccaaatctgcttccccatgaaagaacagagaatagtttaaattagaatcttagctttgggtgctaatggtggagttaaagactttttctctgatttgtccttggaaaaaggtt

SEQ ID NO: 63224 - DNA, 120 bp, Homo sapiens
  misc_feature: 430 for SV(W|O) and mtDNA
cttgggtggtacccaaatctgcttccccatgaaagaacagagaatagtttaaattagaatcttagctttgggtgctaatggtggagttaaagactttttctctgatttgtccttggaaaa

SEQ ID NO: 63225 - DNA, 120 bp, Homo sapiens
  misc_feature: 430 for SV(W|O) and mtDNA
atgaaagaacagagaatagtttaaattagaatcttagctttgggtgctaatggtggagttaaagactttttctctgatttgtccttggaaaaaggttttcatctccggtttacaagactg

SEQ ID NO: 63226 - DNA, 120 bp, Homo sapiens
  misc_feature: 429 for SV(W|O) and mtDNA
ttcggggtatggggttagcagcggtgtgtgtgtgctgggtaggatgggcgggggttgtattgatgagattagtagtatgggagtgggaggggaaaataatgtgttagttggggggtgact

SEQ ID NO: 63227 - DNA, 120 bp, Homo sapiens
  misc_feature: 428 for SV(W|O) and mtDNA
ttgggtggtacccaaatctgcttccccatgaaagaacagagaatagtttaaattagaatcttagctttgggtgctaatggtggagttaaagactttttctctgatttgtccttggaaaaa

SEQ ID NO: 63228 - DNA, 120 bp, Homo sapiens
  misc_feature: 428 for SV(W|O) and mtDNA
ggtacccaaatctgcttccccatgaaagaacagagaatagtttaaattagaatcttagctttgggtgctaatggtggagttaaagactttttctctgatttgtccttggaaaaaggtttt

SEQ ID NO: 63229 - DNA, 120 bp, Homo sapiens
  misc_feature: 428 for SV(W|O) and mtDNA
atctgcttccccatgaaagaacagagaatagtttaaattagaatcttagctttgggtgctaatggtggagttaaagactttttctctgatttgtccttggaaaaaggttttcatctccgg

SEQ ID NO: 63230 - DNA, 120 bp, Homo sapiens
  misc_feature: 427 for SV(W|O) and mtDNA
tgggtggtacccaaatctgcttccccatgaaagaacagagaatagtttaaattagaatcttagctttgggtgctaatggtggagttaaagactttttctctgatttgtccttggaaaaag

SEQ ID NO: 63231 - DNA, 120 bp, Homo sapiens
  misc_feature: 426 for SV(W|O) and mtDNA
tgcttccccatgaaagaacagagaatagtttaaattagaatcttagctttgggtgctaatggtggagttaaagactttttctctgatttgtccttggaaaaaggttttcatctccggttt

SEQ ID NO: 63232 - DNA, 120 bp, Homo sapiens
  misc_feature: 426 for SV(W|O) and mtDNA
tcggggtatggggttagcagcggtgtgtgtgtgctgggtaggatgggcgggggttgtattgatgagattagtagtatgggagtgggaggggaaaataatgtgttagttggggggtgactg

SEQ ID NO: 63233 - DNA, 120 bp, Homo sapiens
  misc_feature: 426 for SV(W|O) and mtDNA
gtacccaaatctgcttccccatgaaagaacagagaatagtttaaattagaatcttagctttgggtgctaatggtggagttaaagactttttctctgatttgtccttggaaaaaggttttc

SEQ ID NO: 63234 - DNA, 120 bp, Homo sapiens
  misc_feature: 426 for SV(W|O) and mtDNA
aaatctgcttccccatgaaagaacagagaatagtttaaattagaatcttagctttgggtgctaatggtggagttaaagactttttctctgatttgtccttggaaaaaggttttcatctcc

SEQ ID NO: 63235 - DNA, 120 bp, Homo sapiens
  misc_feature: 426 for SV(W|O) and mtDNA
ccccatgaaagaacagagaatagtttaaattagaatcttagctttgggtgctaatggtggagttaaagactttttctctgatttgtccttggaaaaaggttttcatctccggtttacaag

SEQ ID NO: 63236 - DNA, 120 bp, Homo sapiens
  misc_feature: 425 for SV(W|O) and mtDNA
ggtggtacccaaatctgcttccccatgaaagaacagagaatagtttaaattagaatcttagctttgggtgctaatggtggagttaaagactttttctctgatttgtccttggaaaaaggt

SEQ ID NO: 63237 - DNA, 120 bp, Homo sapiens
  misc_feature: 425 for SV(W|O) and mtDNA
gggtggtacccaaatctgcttccccatgaaagaacagagaatagtttaaattagaatcttagctttgggtgctaatggtggagttaaagactttttctctgatttgtccttggaaaaagg

SEQ ID NO: 63238 - DNA, 120 bp, Homo sapiens
  misc_feature: 425 for SV(W|O) and mtDNA
catgaaagaacagagaatagtttaaattagaatcttagctttgggtgctaatggtggagttaaagactttttctctgatttgtccttggaaaaaggttttcatctccggtttacaagact

SEQ ID NO: 63239 - DNA, 120 bp, Homo sapiens
  misc_feature: 424 for SV(W|O) and mtDNA
ctgcttccccatgaaagaacagagaatagtttaaattagaatcttagctttgggtgctaatggtggagttaaagactttttctctgatttgtccttggaaaaaggttttcatctccggtt

SEQ ID NO: 63240 - DNA, 120 bp, Homo sapiens
  misc_feature: 423 for SV(W|O) and mtDNA
cccatgaaagaacagagaatagtttaaattagaatcttagctttgggtgctaatggtggagttaaagactttttctctgatttgtccttggaaaaaggttttcatctccggtttacaaga

SEQ ID NO: 63241 - DNA, 120 bp, Homo sapiens
  misc_feature: 423 for SV(W|O) and mtDNA
aatctgcttccccatgaaagaacagagaatagtttaaattagaatcttagctttgggtgctaatggtggagttaaagactttttctctgatttgtccttggaaaaaggttttcatctccg

SEQ ID NO: 63242 - DNA, 120 bp, Homo sapiens
  misc_feature: 420 for SV(W|O) and mtDNA
ccatgaaagaacagagaatagtttaaattagaatcttagctttgggtgctaatggtggagttaaagactttttctctgatttgtccttggaaaaaggttttcatctccggtttacaagac

SEQ ID NO: 63243 - DNA, 120 bp, Homo sapiens
  misc_feature: 420 for SV(W|O) and mtDNA
caaatctgcttccccatgaaagaacagagaatagtttaaattagaatcttagctttgggtgctaatggtggagttaaagactttttctctgatttgtccttggaaaaaggttttcatctc

SEQ ID NO: 63244 - DNA, 120 bp, Homo sapiens
  misc_feature: 418 for SV(W|O) and mtDNA
tacccaaatctgcttccccatgaaagaacagagaatagtttaaattagaatcttagctttgggtgctaatggtggagttaaagactttttctctgatttgtccttggaaaaaggttttca

SEQ ID NO: 63245 - DNA, 120 bp, Homo sapiens
  misc_feature: 414 for SV(W|O) and mtDNA
ccaaatctgcttccccatgaaagaacagagaatagtttaaattagaatcttagctttgggtgctaatggtggagttaaagactttttctctgatttgtccttggaaaaaggttttcatct

SEQ ID NO: 63246 - DNA, 120 bp, Homo sapiens
  misc_feature: 414 for SV(W|O) and mtDNA
acccaaatctgcttccccatgaaagaacagagaatagtttaaattagaatcttagctttgggtgctaatggtggagttaaagactttttctctgatttgtccttggaaaaaggttttcat

SEQ ID NO: 63247 - DNA, 120 bp, Homo sapiens
  misc_feature: 411 for SV(W|O) and mtDNA
cccaaatctgcttccccatgaaagaacagagaatagtttaaattagaatcttagctttgggtgctaatggtggagttaaagactttttctctgatttgtccttggaaaaaggttttcatc

SEQ ID NO: 63248 - DNA, 120 bp, Homo sapiens; identical to SEQ ID NO: 47786
  misc_feature: 862 for SV(C|O) and 18S

SEQ ID NO: 63249 - DNA, 120 bp, Homo sapiens; identical to SEQ ID NO: 47789
  misc_feature: 860 for SV(C|O) and 18S

SEQ ID NO: 63250 - DNA, 120 bp, Homo sapiens; identical to SEQ ID NO: 47837
  misc_feature: 854 for SV(C|O) and 18S

SEQ ID NO: 63251 - DNA, 120 bp, Homo sapiens; identical to SEQ ID NO: 47799
  misc_feature: 849 for SV(C|O) and 18S

SEQ ID NO: 63252 - DNA, 120 bp, Homo sapiens; identical to SEQ ID NO: 47783
  misc_feature: 847 for SV(C|O) and 18S

SEQ ID NO: 63253 - DNA, 120 bp, Homo sapiens
  misc_feature: 843 for SV(C|O) and 18S
aactttaatatacgctattggagctggaattaccgcggctgctggcaccagacttgccctccaatggatcctcgttaaaggatttaaagtggactcattccaattacagggcctcgaaag

SEQ ID NO: 63254 - DNA, 120 bp, Homo sapiens
  misc_feature: 842 for SV(C|O) and 18S
tacgctattggagctggaattaccgcggctgctggcaccagacttgccctccaatggatcctcgttaaaggatttaaagtggactcattccaattacagggcctcgaaagagtcctgtat

SEQ ID NO: 63255 - DNA, 120 bp, Homo sapiens
  misc_feature: 841 for SV(C|O) and 18S
aagattaagccatgcatgtctaagtacgcacggccggtacagtgaaactgcgaatggctcattaaatcagttatggttcctttggtcgctcgctcctctcctacttggataactgtggta

SEQ ID NO: 63256 - DNA, 120 bp, Homo sapiens; identical to SEQ ID NO: 48040
  misc_feature: 840 for SV(C|O) and 18S

SEQ ID NO: 63257 - DNA, 120 bp, Homo sapiens
  misc_feature: 840 for SV(C|O) and 18S
ctagaattaccacagttatccaagtaggagaggagcgagcgaccaaaggaaccataactgatttaatgagccattcgcagtttcactgtaccggccgtgcgtacttagacatgcatggct

SEQ ID NO: 63258 - DNA, 120 bp, Homo sapiens
  misc_feature: 839 for SV(C|O) and 18S
caactttaatatacgctattggagctggaattaccgcggctgctggcaccagacttgccctccaatggatcctcgttaaaggatttaaagtggactcattccaattacagggcctcgaaa

SEQ ID NO: 63259 - DNA, 120 bp, Homo sapiens; identical to SEQ ID NO: 48031
  misc_feature: 839 for SV(C|O) and 18S

SEQ ID NO: 63260 - DNA, 120 bp, Homo sapiens; identical to SEQ ID NO: 47792
  misc_feature: 839 for SV(C|O) and 18S

SEQ ID NO: 63261 - DNA, 120 bp, Homo sapiens; identical to SEQ ID NO: 47796
  misc_feature: 839 for SV(C|O) and 18S

SEQ ID NO: 63262 - DNA, 120 bp, Homo sapiens
  misc_feature: 838 for SV(C|O) and 18S
tggttttcggaactgaggccatgattaagagggacggccgggggcattcgtattgcgccgctagaggtgaaattcttggaccggcgcaagacggaccagagcgaaagcatttgccaagaa

SEQ ID NO: 63263 - DNA, 120 bp, Homo sapiens
  misc_feature: 837 for SV(C|O) and 18S
tagaattaccacagttatccaagtaggagaggagcgagcgaccaaaggaaccataactgatttaatgagccattcgcagtttcactgtaccggccgtgcgtacttagacatgcatggctt

SEQ ID NO: 63264 - DNA, 120 bp, Homo sapiens
  misc_feature: 837 for SV(C|O) and 18S
atacgctattggagctggaattaccgcggctgctggcaccagacttgccctccaatggatcctcgttaaaggatttaaagtggactcattccaattacagggcctcgaaagagtcctgta

SEQ ID NO: 63265 - DNA, 120 bp, Homo sapiens; identical to SEQ ID NO: 47791
  misc_feature: 837 for SV(C|O) and 18S

SEQ ID NO: 63266 - DNA, 120 bp, Homo sapiens
  misc_feature: 837 for SV(C|O) and 18S
ggttttcggaactgaggccatgattaagagggacggccgggggcattcgtattgcgccgctagaggtgaaattcttggaccggcgcaagacggaccagagcgaaagcatttgccaagaat

SEQ ID NO: 63267 - DNA, 120 bp, Homo sapiens; identical to SEQ ID NO: 47788
  misc_feature: 837 for SV(C|O) and 18S

SEQ ID NO: 63268 - DNA, 120 bp, Homo sapiens; identical to SEQ ID NO: 47830
  misc_feature: 837 for SV(C|O) and 18S

SEQ ID NO: 63269 - DNA, 120 bp, Homo sapiens
  misc_feature: 836 for SV(C|O) and 18S
ctttaatatacgctattggagctggaattaccgcggctgctggcaccagacttgccctccaatggatcctcgttaaaggatttaaagtggactcattccaattacagggcctcgaaagag

SEQ ID NO: 63270 - DNA, 120 bp, Homo sapiens
  misc_feature: 835 for SV(C|O) and 18S
actttaatatacgctattggagctggaattaccgcggctgctggcaccagacttgccctccaatggatcctcgttaaaggatttaaagtggactcattccaattacagggcctcgaaaga

SEQ ID NO: 63271 - DNA, 120 bp, Homo sapiens; identical to SEQ ID NO: 47972
  misc_feature: 835 for SV(C|O) and 18S

SEQ ID NO: 63272 - DNA, 120 bp, Homo sapiens; identical to SEQ ID NO: 47811
  misc_feature: 834 for SV(C|O) and 18S

SEQ ID NO: 63273 - DNA, 120 bp, Homo sapiens; identical to SEQ ID NO: 47847
  misc_feature: 833 for SV(C|O) and 18S

SEQ ID NO: 63274 - DNA, 120 bp, Homo sapiens
  misc_feature: 832 for SV(C|O) and 18S
tttaatatacgctattggagctggaattaccgcggctgctggcaccagacttgccctccaatggatcctcgttaaaggatttaaagtggactcattccaattacagggcctcgaaagagt

SEQ ID NO: 63275 - DNA, 120 bp, Homo sapiens; identical to SEQ ID NO: 47810
  misc_feature: 832 for SV(C|O) and 18S

SEQ ID NO: 63276 - DNA, 120 bp, Homo sapiens; identical to SEQ ID NO: 47773
  misc_feature: 831 for SV(C|O) and 18S

SEQ ID NO: 63277 - DNA, 120 bp, Homo sapiens; identical to SEQ ID NO: 47765
  misc_feature: 831 for SV(C|O) and 18S

SEQ ID NO: 63278 - DNA, 120 bp, Homo sapiens
  misc_feature: 831 for SV(C|O) and 18S
tatacgctattggagctggaattaccgcggctgctggcaccagacttgccctccaatggatcctcgttaaaggatttaaagtggactcattccaattacagggcctcgaaagagtcctgt

SEQ ID NO: 63279 - DNA, 120 bp, Homo sapiens
  misc_feature: 830 for SV(C|O) and 18S
ttggttttcggaactgaggccatgattaagagggacggccgggggcattcgtattgcgccgctagaggtgaaattcttggaccggcgcaagacggaccagagcgaaagcatttgccaaga

SEQ ID NO: 63280 - DNA, 120 bp, Homo sapiens
  misc_feature: 829 for SV(C|O) and 18S
gttttcggaactgaggccatgattaagagggacggccgggggcattcgtattgcgccgctagaggtgaaattcttggaccggcgcaagacggaccagagcgaaagcatttgccaagaatg

SEQ ID NO: 63281 - DNA, 120 bp, Homo sapiens
  misc_feature: 828 for SV(C|O) and 18S
agattaagccatgcatgtctaagtacgcacggccggtacagtgaaactgcgaatggctcattaaatcagttatggttcctttggtcgctcgctcctctcctacttggataactgtggtaa

SEQ ID NO: 63282 - DNA, 120 bp, Homo sapiens; identical to SEQ ID NO: 47766
  misc_feature: 826 for SV(C|O) and 18S

SEQ ID NO: 63283 - DNA, 120 bp, Homo sapiens; identical to SEQ ID NO: 47794
  misc_feature: 826 for SV(C|O) and 18S

SEQ ID NO: 63284 - DNA, 120 bp, Homo sapiens
  misc_feature: 826 for SV(C|O) and 18S
gttggttttcggaactgaggccatgattaagagggacggccgggggcattcgtattgcgccgctagaggtgaaattcttggaccggcgcaagacggaccagagcgaaagcatttgccaag

SEQ ID NO: 63285 - DNA, 120 bp, Homo sapiens
  misc_feature: 826 for SV(C|O) and 18S
aaagattaagccatgcatgtctaagtacgcacggccggtacagtgaaactgcgaatggctcattaaatcagttatggttcctttggtcgctcgctcctctcctacttggataactgtggt

SEQ ID NO: 63286 - DNA, 120 bp, Homo sapiens
  misc_feature: 823 for SV(C|O) and 18S
ttttcggaactgaggccatgattaagagggacggccgggggcattcgtattgcgccgctagaggtgaaattcttggaccggcgcaagacggaccagagcgaaagcatttgccaagaatgt

SEQ ID NO: 63287 - DNA, 120 bp, Homo sapiens
  misc_feature: 823 for SV(C|O) and 18S
ttaatatacgctattggagctggaattaccgcggctgctggcaccagacttgccctccaatggatcctcgttaaaggatttaaagtggactcattccaattacagggcctcgaaagagtc

SEQ ID NO: 63288 - DNA, 120 bp, Homo sapiens
  misc_feature: 822 for SV(C|O) and 18S
ttggagctggaattaccgcggctgctggcaccagacttgccctccaatggatcctcgttaaaggatttaaagtggactcattccaattacagggcctcgaaagagtcctgtattgttatt

SEQ ID NO: 63289 - DNA, 120 bp, Homo sapiens
  misc_feature: 822 for SV(C|O) and 18S
ttagctctagaattaccacagttatccaagtaggagaggagcgagcgaccaaaggaaccataactgatttaatgagccattcgcagtttcactgtaccggccgtgcgtacttagacatgc

SEQ ID NO: 63290 - DNA, 120 bp, Homo sapiens; identical to SEQ ID NO: 47928
  misc_feature: 822 for SV(C|O) and 18S

SEQ ID NO: 63291 - DNA, 120 bp, Homo sapiens
  misc_feature: 822 for SV(C|O) and 18S
caaagattaagccatgcatgtctaagtacgcacggccggtacagtgaaactgcgaatggctcattaaatcagttatggttcctttggtcgctcgctcctctcctacttggataactgtgg

SEQ ID NO: 63292 - DNA, 120 bp, Homo sapiens
  misc_feature: 821 for SV(C|O) and 18S
ttgttggttttcggaactgaggccatgattaagagggacggccgggggcattcgtattgcgccgctagaggtgaaattcttggaccggcgcaagacggaccagagcgaaagcatttgcca

SEQ ID NO: 63293 - DNA, 120 bp, Homo sapiens
  misc_feature: 821 for SV(C|O) and 18S
atatacgctattggagctggaattaccgcggctgctggcaccagacttgccctccaatggatcctcgttaaaggatttaaagtggactcattccaattacagggcctcgaaagagtcctg

SEQ ID NO: 63294 - DNA, 120 bp, Homo sapiens
  misc_feature: 821 for SV(C|O) and 18S
attggagctggaattaccgcggctgctggcaccagacttgccctccaatggatcctcgttaaaggatttaaagtggactcattccaattacagggcctcgaaagagtcctgtattgttat

SEQ ID NO: 63295 - DNA, 120 bp, Homo sapiens
  misc_feature: 820 for SV(C|O) and 18S
tgttggttttcggaactgaggccatgattaagagggacggccgggggcattcgtattgcgccgctagaggtgaaattcttggaccggcgcaagacggaccagagcgaaagcatttgccaa

SEQ ID NO: 63296 - DNA, 120 bp, Homo sapiens
  misc_feature: 819 for SV(C|O) and 18S
agctctagaattaccacagttatccaagtaggagaggagcgagcgaccaaaggaaccataactgatttaatgagccattcgcagtttcactgtaccggccgtgcgtacttagacatgcat

SEQ ID NO: 63297 - DNA, 120 bp, Homo sapiens
  misc_feature: 818 for SV(C|O) and 18S
tctagaattaccacagttatccaagtaggagaggagcgagcgaccaaaggaaccataactgatttaatgagccattcgcagtttcactgtaccggccgtgcgtacttagacatgcatggc

SEQ ID NO: 63298 - DNA, 120 bp, Homo sapiens
  misc_feature: 817 for SV(C|O) and 18S
gctctagaattaccacagttatccaagtaggagaggagcgagcgaccaaaggaaccataactgatttaatgagccattcgcagtttcactgtaccggccgtgcgtacttagacatgcatg

SEQ ID NO: 63299 - DNA, 120 bp, Homo sapiens
  misc_feature: 817 for SV(C|O) and 18S
aatatacgctattggagctggaattaccgcggctgctggcaccagacttgccctccaatggatcctcgttaaaggatttaaagtggactcattccaattacagggcctcgaaagagtcct

SEQ ID NO: 63300 - DNA, 120 bp, Homo sapiens
  misc_feature: 815 for SV(C|O) and 18S
ctctagaattaccacagttatccaagtaggagaggagcgagcgaccaaaggaaccataactgatttaatgagccattcgcagtttcactgtaccggccgtgcgtacttagacatgcatgg

SEQ ID NO: 63301 - DNA, 120 bp, Homo sapiens; identical to SEQ ID NO: 47738
  misc_feature: 814 for SV(C|O) and 18S

SEQ ID NO: 63302 - DNA, 120 bp, Homo sapiens
  misc_feature: 814 for SV(C|O) and 18S
tttgttggttttcggaactgaggccatgattaagagggacggccgggggcattcgtattgcgccgctagaggtgaaattcttggaccggcgcaagacggaccagagcgaaagcatttgcc

SEQ ID NO: 63303 - DNA, 120 bp, Homo sapiens
  misc_feature: 814 for SV(C|O) and 18S
taatatacgctattggagctggaattaccgcggctgctggcaccagacttgccctccaatggatcctcgttaaaggatttaaagtggactcattccaattacagggcctcgaaagagtcc

SEQ ID NO: 63304 - DNA, 120 bp, Homo sapiens
  misc_feature: 814 for SV(C|O) and 18S
attagctctagaattaccacagttatccaagtaggagaggagcgagcgaccaaaggaaccataactgatttaatgagccattcgcagtttcactgtaccggccgtgcgtacttagacatg

SEQ ID NO: 63305 - DNA, 120 bp, Homo sapiens
  misc_feature: 813 for SV(C|O) and 18S
tttcggaactgaggccatgattaagagggacggccgggggcattcgtattgcgccgctagaggtgaaattcttggaccggcgcaagacggaccagagcgaaagcatttgccaagaatgtt

SEQ ID NO: 63306 - DNA, 120 bp, Homo sapiens
  misc_feature: 811 for SV(C|O) and 18S
aaagtcggaggttcgaagacgatcagataccgtcgtagttccgaccataaacgatgccgaccggcgatgcggcggcgttattcccatgacccgccgggcagcttccgggaaaccaaagtc

SEQ ID NO: 63307 - DNA, 120 bp, Homo sapiens
  misc_feature: 810 for SV(C|O) and 18S
tggagctggaattaccgcggctgctggcaccagacttgccctccaatggatcctcgttaaaggatttaaagtggactcattccaattacagggcctcgaaagagtcctgtattgttattt

SEQ ID NO: 63308 - DNA, 120 bp, Homo sapiens
  misc_feature: 810 for SV(C|O) and 18S
tagctctagaattaccacagttatccaagtaggagaggagcgagcgaccaaaggaaccataactgatttaatgagccattcgcagtttcactgtaccggccgtgcgtacttagacatgca

SEQ ID NO: 63309 - DNA, 120 bp, Homo sapiens
  misc_feature: 806 for SV(C|O) and 18S
gaggccatgattaagagggacggccgggggcattcgtattgcgccgctagaggtgaaattcttggaccggcgcaagacggaccagagcgaaagcatttgccaagaatgttttcattaatc

SEQ ID NO: 63310 - DNA, 120 bp, Homo sapiens
  misc_feature: 805 for SV(C|O) and 18S
tcaaagattaagccatgcatgtctaagtacgcacggccggtacagtgaaactgcgaatggctcattaaatcagttatggttcctttggtcgctcgctcctctcctacttggataactgtg

SEQ ID NO: 63311 - DNA, 120 bp, Homo sapiens
  misc_feature: 805 for SV(C|O) and 18S
attttgttggttttcggaactgaggccatgattaagagggacggccgggggcattcgtattgcgccgctagaggtgaaattcttggaccggcgcaagacggaccagagcgaaagcatttg

SEQ ID NO: 63312 - DNA, 120 bp, Homo sapiens
  misc_feature: 804 for SV(C|O) and 18S
ttttgttggttttcggaactgaggccatgattaagagggacggccgggggcattcgtattgcgccgctagaggtgaaattcttggaccggcgcaagacggaccagagcgaaagcatttgc

SEQ ID NO: 63313 - DNA, 120 bp, Homo sapiens
  misc_feature: 803 for SV(C|O) and 18S
ttcggaactgaggccatgattaagagggacggccgggggcattcgtattgcgccgctagaggtgaaattcttggaccggcgcaagacggaccagagcgaaagcatttgccaagaatgttt

SEQ ID NO: 63314 - DNA, 120 bp, Homo sapiens
  misc_feature: 803 for SV(C|O) and 18S
tattttgttggttttcggaactgaggccatgattaagagggacggccgggggcattcgtattgcgccgctagaggtgaaattcttggaccggcgcaagacggaccagagcgaaagcattt

SEQ ID NO: 63315 - DNA, 120 bp, Homo sapiens
  misc_feature: 803 for SV(C|O) and 18S
gaaagtcggaggttcgaagacgatcagataccgtcgtagttccgaccataaacgatgccgaccggcgatgcggcggcgttattcccatgacccgccgggcagcttccgggaaaccaaagt

SEQ ID NO: 63316 - DNA, 120 bp, Homo sapiens
  misc_feature: 802 for SV(C|O) and 18S
gtattagctctagaattaccacagttatccaagtaggagaggagcgagcgaccaaaggaaccataactgatttaatgagccattcgcagtttcactgtaccggccgtgcgtacttagaca

SEQ ID NO: 63317 - DNA, 120 bp, Homo sapiens
  misc_feature: 802 for SV(C|O) and 18S
tattagctctagaattaccacagttatccaagtaggagaggagcgagcgaccaaaggaaccataactgatttaatgagccattcgcagtttcactgtaccggccgtgcgtacttagacat

SEQ ID NO: 63318 - DNA, 120 bp, Homo sapiens
  misc_feature: 801 for SV(C|O) and 18S
tgaggccatgattaagagggacggccgggggcattcgtattgcgccgctagaggtgaaattcttggaccggcgcaagacggaccagagcgaaagcatttgccaagaatgttttcattaat

SEQ ID NO: 63319 - DNA, 120 bp, Homo sapiens
  misc_feature: 801 for SV(C|O) and 18S
ggaactgaggccatgattaagagggacggccgggggcattcgtattgcgccgctagaggtgaaattcttggaccggcgcaagacggaccagagcgaaagcatttgccaagaatgttttca

SEQ ID NO: 63320 - DNA, 120 bp, Homo sapiens
  misc_feature: 801 for SV(C|O) and 18S
actgaggccatgattaagagggacggccgggggcattcgtattgcgccgctagaggtgaaattcttggaccggcgcaagacggaccagagcgaaagcatttgccaagaatgttttcatta

SEQ ID NO: 63321 - DNA, 120 bp, Homo sapiens
  misc_feature: 801 for SV(C|O) and 18S
gaactgaggccatgattaagagggacggccgggggcattcgtattgcgccgctagaggtgaaattcttggaccggcgcaagacggaccagagcgaaagcatttgccaagaatgttttcat

SEQ ID NO: 63322 - DNA, 120 bp, Homo sapiens
  misc_feature: 801 for SV(C|O) and 18S
aactgaggccatgattaagagggacggccgggggcattcgtattgcgccgctagaggtgaaattcttggaccggcgcaagacggaccagagcgaaagcatttgccaagaatgttttcatt

SEQ ID NO: 63323 - DNA, 120 bp, Homo sapiens
  misc_feature: 800 for SV(C|O) and 18S
tcggaactgaggccatgattaagagggacggccgggggcattcgtattgcgccgctagaggtgaaattcttggaccggcgcaagacggaccagagcgaaagcatttgccaagaatgtttt

SEQ ID NO: 63324 - DNA, 120 bp, Homo sapiens; identical to SEQ ID NO: 47748
  misc_feature: 800 for SV(C|O) and 18S

SEQ ID NO: 63325 - DNA, 120 bp, Homo sapiens
  misc_feature: 799 for SV(C|O) and 18S
ggagctggaattaccgcggctgctggcaccagacttgccctccaatggatcctcgttaaaggatttaaagtggactcattccaattacagggcctcgaaagagtcctgtattgttatttt

SEQ ID NO: 63326 - DNA, 120 bp, Homo sapiens
  misc_feature: 796 for SV(C|O) and 18S
ctgaggccatgattaagagggacggccgggggcattcgtattgcgccgctagaggtgaaattcttggaccggcgcaagacggaccagagcgaaagcatttgccaagaatgttttcattaa

SEQ ID NO: 63327 - DNA, 120 bp, Homo sapiens
  misc_feature: 796 for SV(C|O) and 18S
aagaacgaaagtcggaggttcgaagacgatcagataccgtcgtagttccgaccataaacgatgccgaccggcgatgcggcggcgttattcccatgacccgccgggcagcttccgggaaac

SEQ ID NO: 63328 - DNA, 120 bp, Homo sapiens
  misc_feature: 796 for SV(C|O) and 18S
aagtcggaggttcgaagacgatcagataccgtcgtagttccgaccataaacgatgccgaccggcgatgcggcggcgttattcccatgacccgccgggcagcttccgggaaaccaaagtct

SEQ ID NO: 63329 - DNA, 120 bp, Homo sapiens
  misc_feature: 794 for SV(C|O) and 18S
atgtattagctctagaattaccacagttatccaagtaggagaggagcgagcgaccaaaggaaccataactgatttaatgagccattcgcagtttcactgtaccggccgtgcgtacttaga

SEQ ID NO: 63330 - DNA, 120 bp, Homo sapiens
  misc_feature: 793 for SV(C|O) and 18S
tctcaaagattaagccatgcatgtctaagtacgcacggccggtacagtgaaactgcgaatggctcattaaatcagttatggttcctttggtcgctcgctcctctcctacttggataactg

SEQ ID NO: 63331 - DNA, 120 bp, Homo sapiens
  misc_feature: 793 for SV(C|O) and 18S
agaacgaaagtcggaggttcgaagacgatcagataccgtcgtagttccgaccataaacgatgccgaccggcgatgcggcggcgttattcccatgacccgccgggcagcttccgggaaacc

SEQ ID NO: 63332 - DNA, 120 bp, Homo sapiens
  misc_feature: 793 for SV(C|O) and 18S
cgaaagtcggaggttcgaagacgatcagataccgtcgtagttccgaccataaacgatgccgaccggcgatgcggcggcgttattcccatgacccgccgggcagcttccgggaaaccaaag

SEQ ID NO: 63333 - DNA, 120 bp, Homo sapiens
  misc_feature: 793 for SV(C|O) and 18S
ctcaaagattaagccatgcatgtctaagtacgcacggccggtacagtgaaactgcgaatggctcattaaatcagttatggttcctttggtcgctcgctcctctcctacttggataactgt

SEQ ID NO: 63334 - DNA, 120 bp, Homo sapiens
  misc_feature: 792 for SV(C|O) and 18S
gaacgaaagtcggaggttcgaagacgatcagataccgtcgtagttccgaccataaacgatgccgaccggcgatgcggcggcgttattcccatgacccgccgggcagcttccgggaaacca

SEQ ID NO: 63335 - DNA, 120 bp, Homo sapiens
  misc_feature: 791 for SV(C|O) and 18S
tgtattagctctagaattaccacagttatccaagtaggagaggagcgagcgaccaaaggaaccataactgatttaatgagccattcgcagtttcactgtaccggccgtgcgtacttagac

SEQ ID NO: 63336 - DNA, 120 bp, Homo sapiens
  misc_feature: 790 for SV(C|O) and 18S
cggaactgaggccatgattaagagggacggccgggggcattcgtattgcgccgctagaggtgaaattcttggaccggcgcaagacggaccagagcgaaagcatttgccaagaatgttttc

SEQ ID NO: 63337 - DNA, 120 bp, Homo sapiens
  misc_feature: 790 for SV(C|O) and 18S
catgtattagctctagaattaccacagttatccaagtaggagaggagcgagcgaccaaaggaaccataactgatttaatgagccattcgcagtttcactgtaccggccgtgcgtacttag

SEQ ID NO: 63338 - DNA, 120 bp, Homo sapiens
  misc_feature: 790 for SV(C|O) and 18S
agtcggaggttcgaagacgatcagataccgtcgtagttccgaccataaacgatgccgaccggcgatgcggcggcgttattcccatgacccgccgggcagcttccgggaaaccaaagtctt

SEQ ID NO: 63339 - DNA, 120 bp, Homo sapiens
  misc_feature: 789 for SV(C|O) and 18S
gagctggaattaccgcggctgctggcaccagacttgccctccaatggatcctcgttaaaggatttaaagtggactcattccaattacagggcctcgaaagagtcctgtattgttattttt

SEQ ID NO: 63340 - DNA, 120 bp, Homo sapiens
  misc_feature: 788 for SV(C|O) and 18S
ctattttgttggttttcggaactgaggccatgattaagagggacggccgggggcattcgtattgcgccgctagaggtgaaattcttggaccggcgcaagacggaccagagcgaaagcatt

SEQ ID NO: 63341 - DNA, 120 bp, Homo sapiens
  misc_feature: 787 for SV(C|O) and 18S
acgaaagtcggaggttcgaagacgatcagataccgtcgtagttccgaccataaacgatgccgaccggcgatgcggcggcgttattcccatgacccgccgggcagcttccgggaaaccaaa

SEQ ID NO: 63342 - DNA, 120 bp, Homo sapiens
  misc_feature: 786 for SV(C|O) and 18S
aacgaaagtcggaggttcgaagacgatcagataccgtcgtagttccgaccataaacgatgccgaccggcgatgcggcggcgttattcccatgacccgccgggcagcttccgggaaaccaa

SEQ ID NO: 63343 - DNA, 120 bp, Homo sapiens; identical to SEQ ID NO: 47936
  misc_feature: 786 for SV(C|O) and 18S

SEQ ID NO: 63344 - DNA, 120 bp, Homo sapiens
  misc_feature: 785 for SV(C|O) and 18S
caagaacgaaagtcggaggttcgaagacgatcagataccgtcgtagttccgaccataaacgatgccgaccggcgatgcggcggcgttattcccatgacccgccgggcagcttccgggaaa

SEQ ID NO: 63345 - DNA, 120 bp, Homo sapiens
  misc_feature: 785 for SV(C|O) and 18S
atcaagaacgaaagtcggaggttcgaagacgatcagataccgtcgtagttccgaccataaacgatgccgaccggcgatgcggcggcgttattcccatgacccgccgggcagcttccggga

SEQ ID NO: 63346 - DNA, 120 bp, Homo sapiens
  misc_feature: 784 for SV(C|O) and 18S
tgtctcaaagattaagccatgcatgtctaagtacgcacggccggtacagtgaaactgcgaatggctcattaaatcagttatggttcctttggtcgctcgctcctctcctacttggataac

SEQ ID NO: 63347 - DNA, 120 bp, Homo sapiens
  misc_feature: 784 for SV(C|O) and 18S
gcatgtattagctctagaattaccacagttatccaagtaggagaggagcgagcgaccaaaggaaccataactgatttaatgagccattcgcagtttcactgtaccggccgtgcgtactta

SEQ ID NO: 63348 - DNA, 120 bp, Homo sapiens
  misc_feature: 784 for SV(C|O) and 18S
aatcaagaacgaaagtcggaggttcgaagacgatcagataccgtcgtagttccgaccataaacgatgccgaccggcgatgcggcggcgttattcccatgacccgccgggcagcttccggg

SEQ ID NO: 63349 - DNA, 120 bp, Homo sapiens
  misc_feature: 783 for SV(C|O) and 18S
aggccatgattaagagggacggccgggggcattcgtattgcgccgctagaggtgaaattcttggaccggcgcaagacggaccagagcgaaagcatttgccaagaatgttttcattaatca

SEQ ID NO: 63350 - DNA, 120 bp, Homo sapiens
  misc_feature: 783 for SV(C|O) and 18S
gtctcaaagattaagccatgcatgtctaagtacgcacggccggtacagtgaaactgcgaatggctcattaaatcagttatggttcctttggtcgctcgctcctctcctacttggataact

SEQ ID NO: 63351 - DNA, 120 bp, Homo sapiens
  misc_feature: 781 for SV(C|O) and 18S
taatcaagaacgaaagtcggaggttcgaagacgatcagataccgtcgtagttccgaccataaacgatgccgaccggcgatgcggcggcgttattcccatgacccgccgggcagcttccgg

SEQ ID NO: 63352 - DNA, 120 bp, Homo sapiens; identical to SEQ ID NO: 47762
  misc_feature: 781 for SV(C|O) and 18S

SEQ ID NO: 63353 - DNA, 120 bp, Homo sapiens
  misc_feature: 781 for SV(C|O) and 18S
cattaatcaagaacgaaagtcggaggttcgaagacgatcagataccgtcgtagttccgaccataaacgatgccgaccggcgatgcggcggcgttattcccatgacccgccgggcagcttc

SEQ ID NO: 63354 - DNA, 120 bp, Homo sapiens
  misc_feature: 780 for SV(C|O) and 18S
ggccatgattaagagggacggccgggggcattcgtattgcgccgctagaggtgaaattcttggaccggcgcaagacggaccagagcgaaagcatttgccaagaatgttttcattaatcaa

SEQ ID NO: 63355 - DNA, 120 bp, Homo sapiens
  misc_feature: 779 for SV(C|O) and 18S
tcaagaacgaaagtcggaggttcgaagacgatcagataccgtcgtagttccgaccataaacgatgccgaccggcgatgcggcggcgttattcccatgacccgccgggcagcttccgggaa

SEQ ID NO: 63356 - DNA, 120 bp, Homo sapiens; identical to SEQ ID NO: 48002
  misc_feature: 779 for SV(C|O) and 18S

SEQ ID NO: 63357 - DNA, 120 bp, Homo sapiens
  misc_feature: 779 for SV(C|O) and 18S
attaatcaagaacgaaagtcggaggttcgaagacgatcagataccgtcgtagttccgaccataaacgatgccgaccggcgatgcggcggcgttattcccatgacccgccgggcagcttcc

SEQ ID NO: 63358 - DNA, 120 bp, Homo sapiens
  misc_feature: 778 for SV(C|O) and 18S
ttgtctcaaagattaagccatgcatgtctaagtacgcacggccggtacagtgaaactgcgaatggctcattaaatcagttatggttcctttggtcgctcgctcctctcctacttggataa

SEQ ID NO: 63359 - DNA, 120 bp, Homo sapiens
  misc_feature: 778 for SV(C|O) and 18S
gtcggaggttcgaagacgatcagataccgtcgtagttccgaccataaacgatgccgaccggcgatgcggcggcgttattcccatgacccgccgggcagcttccgggaaaccaaagtcttt

SEQ ID NO: 63360 - DNA, 120 bp, Homo sapiens
  misc_feature: 777 for SV(C|O) and 18S
cttgtctcaaagattaagccatgcatgtctaagtacgcacggccggtacagtgaaactgcgaatggctcattaaatcagttatggttcctttggtcgctcgctcctctcctacttggata

SEQ ID NO: 63361 - DNA, 120 bp, Homo sapiens; identical to SEQ ID NO: 48072
  misc_feature: 777 for SV(C|O) and 18S

SEQ ID NO: 63362 - DNA, 120 bp, Homo sapiens; identical to SEQ ID NO: 48083
  misc_feature: 776 for SV(C|O) and 18S

SEQ ID NO: 63363 - DNA, 120 bp, Homo sapiens; identical to SEQ ID NO: 48045
  misc_feature: 775 for SV(C|O) and 18S

SEQ ID NO: 63364 - DNA, 120 bp, Homo sapiens
  misc_feature: 775 for SV(C|O) and 18S
ggcatgtattagctctagaattaccacagttatccaagtaggagaggagcgagcgaccaaaggaaccataactgatttaatgagccattcgcagtttcactgtaccggccgtgcgtactt

SEQ ID NO: 63365 - DNA, 120 bp, Homo sapiens
  misc_feature: 775 for SV(C|O) and 18S
gccatgattaagagggacggccgggggcattcgtattgcgccgctagaggtgaaattcttggaccggcgcaagacggaccagagcgaaagcatttgccaagaatgttttcattaatcaag

SEQ ID NO: 63366 - DNA, 120 bp, Homo sapiens; identical to SEQ ID NO: 47970
  misc_feature: 774 for SV(C|O) and 18S

SEQ ID NO: 63367 - DNA, 120 bp, Homo sapiens
  misc_feature: 773 for SV(C|O) and 18S
ttaatcaagaacgaaagtcggaggttcgaagacgatcagataccgtcgtagttccgaccataaacgatgccgaccggcgatgcggcggcgttattcccatgacccgccgggcagcttccg

SEQ ID NO: 63368 - DNA, 120 bp, Homo sapiens; identical to SEQ ID NO: 47969
  misc_feature: 773 for SV(C|O) and 18S

SEQ ID NO: 63369 - DNA, 120 bp, Homo sapiens
  misc_feature: 773 for SV(C|O) and 18S
gcttgtctcaaagattaagccatgcatgtctaagtacgcacggccggtacagtgaaactgcgaatggctcattaaatcagttatggttcctttggtcgctcgctcctctcctacttggat

SEQ ID NO: 63370 - DNA, 120 bp, Homo sapiens
  misc_feature: 773 for SV(C|O) and 18S
agacgatcagataccgtcgtagttccgaccataaacgatgccgaccggcgatgcggcggcgttattcccatgacccgccgggcagcttccgggaaaccaaagtctttgggttccgggggg

SEQ ID NO: 63371 - DNA, 120 bp, Homo sapiens
  misc_feature: 771 for SV(C|O) and 18S
agctggaattaccgcggctgctggcaccagacttgccctccaatggatcctcgttaaaggatttaaagtggactcattccaattacagggcctcgaaagagtcctgtattgttatttttc

SEQ ID NO: 63372 - DNA, 120 bp, Homo sapiens
  misc_feature: 767 for SV(C|O) and 18S
cggttctattttgttggttttcggaactgaggccatgattaagagggacggccgggggcattcgtattgcgccgctagaggtgaaattcttggaccggcgcaagacggaccagagcgaaa

SEQ ID NO: 63373 - DNA, 120 bp, Homo sapiens
  misc_feature: 767 for SV(C|O) and 18S
aagacgatcagataccgtcgtagttccgaccataaacgatgccgaccggcgatgcggcggcgttattcccatgacccgccgggcagcttccgggaaaccaaagtctttgggttccggggg

SEQ ID NO: 63374 - DNA, 120 bp, Homo sapiens
  misc_feature: 766 for SV(C|O) and 18S
tgcttgtctcaaagattaagccatgcatgtctaagtacgcacggccggtacagtgaaactgcgaatggctcattaaatcagttatggttcctttggtcgctcgctcctctcctacttgga

SEQ ID NO: 63375 - DNA, 120 bp, Homo sapiens
  misc_feature: 766 for SV(C|O) and 18S
cgaagacgatcagataccgtcgtagttccgaccataaacgatgccgaccggcgatgcggcggcgttattcccatgacccgccgggcagcttccgggaaaccaaagtctttgggttccggg

SEQ ID NO: 63376 - DNA, 120 bp, Homo sapiens; identical to SEQ ID NO: 47778
  misc_feature: 764 for SV(C|O) and 18S

SEQ ID NO: 63377 - DNA, 120 bp, Homo sapiens
  misc_feature: 764 for SV(C|O) and 18S
tctattttgttggttttcggaactgaggccatgattaagagggacggccgggggcattcgtattgcgccgctagaggtgaaattcttggaccggcgcaagacggaccagagcgaaagcat

SEQ ID NO: 63378 - DNA, 120 bp, Homo sapiens; identical to SEQ ID NO: 47971
  misc_feature: 764 for SV(C|O) and 18S

SEQ ID NO: 63379 - DNA, 120 bp, Homo sapiens
  misc_feature: 763 for SV(C|O) and 18S
cggcatgtattagctctagaattaccacagttatccaagtaggagaggagcgagcgaccaaaggaaccataactgatttaatgagccattcgcagtttcactgtaccggccgtgcgtact

SEQ ID NO: 63380 - DNA, 120 bp, Homo sapiens
  misc_feature: 762 for SV(C|O) and 18S
tcattaatcaagaacgaaagtcggaggttcgaagacgatcagataccgtcgtagttccgaccataaacgatgccgaccggcgatgcggcggcgttattcccatgacccgccgggcagctt

SEQ ID NO: 63381 - DNA, 120 bp, Homo sapiens
  misc_feature: 762 for SV(C|O) and 18S
gaagacgatcagataccgtcgtagttccgaccataaacgatgccgaccggcgatgcggcggcgttattcccatgacccgccgggcagcttccgggaaaccaaagtctttgggttccgggg

SEQ ID NO: 63382 - DNA, 120 bp, Homo sapiens; identical to SEQ ID NO: 47854
  misc_feature: 760 for SV(C|O) and 18S

SEQ ID NO: 63383 - DNA, 120 bp, Homo sapiens; identical to SEQ ID NO: 48106
  misc_feature: 760 for SV(C|O) and 18S

SEQ ID NO: 63384 - DNA, 120 bp, Homo sapiens
  misc_feature: 758 for SV(C|O) and 18S
ccatgattaagagggacggccgggggcattcgtattgcgccgctagaggtgaaattcttggaccggcgcaagacggaccagagcgaaagcatttgccaagaatgttttcattaatcaaga

SEQ ID NO: 63385 - DNA, 120 bp, Homo sapiens
  misc_feature: 757 for SV(C|O) and 18S
ttcattaatcaagaacgaaagtcggaggttcgaagacgatcagataccgtcgtagttccgaccataaacgatgccgaccggcgatgcggcggcgttattcccatgacccgccgggcagct

SEQ ID NO: 63386 - DNA, 120 bp, Homo sapiens
  misc_feature: 755 for SV(C|O) and 18S
gcggttctattttgttggttttcggaactgaggccatgattaagagggacggccgggggcattcgtattgcgccgctagaggtgaaattcttggaccggcgcaagacggaccagagcgaa

SEQ ID NO: 63387 - DNA, 120 bp, Homo sapiens
  misc_feature: 754 for SV(C|O) and 18S
ttctattttgttggttttcggaactgaggccatgattaagagggacggccgggggcattcgtattgcgccgctagaggtgaaattcttggaccggcgcaagacggaccagagcgaaagca

SEQ ID NO: 63388 - DNA, 120 bp, Homo sapiens
  misc_feature: 754 for SV(C|O) and 18S
taggaccgcggttctattttgttggttttcggaactgaggccatgattaagagggacggccgggggcattcgtattgcgccgctagaggtgaaattcttggaccggcgcaagacggacca

SEQ ID NO: 63389 - DNA, 120 bp, Homo sapiens; identical to SEQ ID NO: 47729
  misc_feature: 754 for SV(C|O) and 18S

SEQ ID NO: 63390 - DNA, 120 bp, Homo sapiens; identical to SEQ ID NO: 48214
  misc_feature: 753 for SV(C|O) and 18S

SEQ ID NO: 63391 - DNA, 120 bp, Homo sapiens; identical to SEQ ID NO: 47802
  misc_feature: 752 for SV(C|O) and 18S

SEQ ID NO: 63392 - DNA, 120 bp, Homo sapiens
  misc_feature: 752 for SV(C|O) and 18S
gctggaattaccgcggctgctggcaccagacttgccctccaatggatcctcgttaaaggatttaaagtggactcattccaattacagggcctcgaaagagtcctgtattgttatttttcg

SEQ ID NO: 63393 - DNA, 120 bp, Homo sapiens
  misc_feature: 751 for SV(C|O) and 18S
gaccgcggttctattttgttggttttcggaactgaggccatgattaagagggacggccgggggcattcgtattgcgccgctagaggtgaaattcttggaccggcgcaagacggaccagag

SEQ ID NO: 63394 - DNA, 120 bp, Homo sapiens
  misc_feature: 750 for SV(C|O) and 18S
accgcggttctattttgttggttttcggaactgaggccatgattaagagggacggccgggggcattcgtattgcgccgctagaggtgaaattcttggaccggcgcaagacggaccagagc

SEQ ID NO: 63395 - DNA, 120 bp, Homo sapiens
  misc_feature: 750 for SV(C|O) and 18S
ctggaattaccgcggctgctggcaccagacttgccctccaatggatcctcgttaaaggatttaaagtggactcattccaattacagggcctcgaaagagtcctgtattgttatttttcgt

SEQ ID NO: 63396 - DNA, 120 bp, Homo sapiens
  misc_feature: 747 for SV(C|O) and 18S
tcggcatgtattagctctagaattaccacagttatccaagtaggagaggagcgagcgaccaaaggaaccataactgatttaatgagccattcgcagtttcactgtaccggccgtgcgtac

SEQ ID NO: 63397 - DNA, 120 bp, Homo sapiens; identical to SEQ ID NO: 48099
  misc_feature: 747 for SV(C|O) and 18S

SEQ ID NO: 63398 - DNA, 120 bp, Homo sapiens
  misc_feature: 746 for SV(C|O) and 18S
tttcattaatcaagaacgaaagtcggaggttcgaagacgatcagataccgtcgtagttccgaccataaacgatgccgaccggcgatgcggcggcgttattcccatgacccgccgggcagc

SEQ ID NO: 63399 - DNA, 120 bp, Homo sapiens
  misc_feature: 746 for SV(C|O) and 18S
ggaccgcggttctattttgttggttttcggaactgaggccatgattaagagggacggccgggggcattcgtattgcgccgctagaggtgaaattcttggaccggcgcaagacggaccaga

SEQ ID NO: 63400 - DNA, 120 bp, Homo sapiens
  misc_feature: 746 for SV(C|O) and 18S
gtcggcatgtattagctctagaattaccacagttatccaagtaggagaggagcgagcgaccaaaggaaccataactgatttaatgagccattcgcagtttcactgtaccggccgtgcgta

SEQ ID NO: 63401 - DNA, 120 bp, Homo sapiens
  misc_feature: 746 for SV(C|O) and 18S
gttctattttgttggttttcggaactgaggccatgattaagagggacggccgggggcattcgtattgcgccgctagaggtgaaattcttggaccggcgcaagacggaccagagcgaaagc

SEQ ID NO: 63402 - DNA, 120 bp, Homo sapiens
  misc_feature: 745 for SV(C|O) and 18S
cgcggttctattttgttggttttcggaactgaggccatgattaagagggacggccgggggcattcgtattgcgccgctagaggtgaaattcttggaccggcgcaagacggaccagagcga

SEQ ID NO: 63403 - DNA, 120 bp, Homo sapiens; identical to SEQ ID NO: 47720
  misc_feature: 745 for SV(C|O) and 18S

SEQ ID NO: 63404 - DNA, 120 bp, Homo sapiens; identical to SEQ ID NO: 48277
  misc_feature: 744 for SV(C|O) and 18S

SEQ ID NO: 63405 - DNA, 120 bp, Homo sapiens
  misc_feature: 744 for SV(C|O) and 18S
ggttctattttgttggttttcggaactgaggccatgattaagagggacggccgggggcattcgtattgcgccgctagaggtgaaattcttggaccggcgcaagacggaccagagcgaaag

SEQ ID NO: 63406 - DNA, 120 bp, Homo sapiens
  misc_feature: 744 for SV(C|O) and 18S
aggaccgcggttctattttgttggttttcggaactgaggccatgattaagagggacggccgggggcattcgtattgcgccgctagaggtgaaattcttggaccggcgcaagacggaccag

SEQ ID NO: 63407 - DNA, 120 bp, Homo sapiens
  misc_feature: 743 for SV(C|O) and 18S
tggaattaccgcggctgctggcaccagacttgccctccaatggatcctcgttaaaggatttaaagtggactcattccaattacagggcctcgaaagagtcctgtattgttatttttcgtc

SEQ ID NO: 63408 - DNA, 120 bp, Homo sapiens; identical to SEQ ID NO: 48266
  misc_feature: 743 for SV(C|O) and 18S

SEQ ID NO: 63409 - DNA, 120 bp, Homo sapiens
  misc_feature: 743 for SV(C|O) and 18S
ccgcggctgctggcaccagacttgccctccaatggatcctcgttaaaggatttaaagtggactcattccaattacagggcctcgaaagagtcctgtattgttatttttcgtcactacctc

SEQ ID NO: 63410 - DNA, 120 bp, Homo sapiens; identical to SEQ ID NO: 48287
  misc_feature: 743 for SV(C|O) and 18S

SEQ ID NO: 63411 - DNA, 120 bp, Homo sapiens; identical to SEQ ID NO: 48000
  misc_feature: 742 for SV(C|O) and 18S

SEQ ID NO: 63412 - DNA, 120 bp, Homo sapiens
  misc_feature: 742 for SV(C|O) and 18S
gttttcattaatcaagaacgaaagtcggaggttcgaagacgatcagataccgtcgtagttccgaccataaacgatgccgaccggcgatgcggcggcgttattcccatgacccgccgggca

SEQ ID NO: 63413 - DNA, 120 bp, Homo sapiens; identical to SEQ ID NO: 47730
  misc_feature: 742 for SV(C|O) and 18S

SEQ ID NO: 63414 - DNA, 120 bp, Homo sapiens
  misc_feature: 741 for SV(C|O) and 18S
ttttcattaatcaagaacgaaagtcggaggttcgaagacgatcagataccgtcgtagttccgaccataaacgatgccgaccggcgatgcggcggcgttattcccatgacccgccgggcag

SEQ ID NO: 63415 - DNA, 120 bp, Homo sapiens
  misc_feature: 741 for SV(C|O) and 18S
catgattaagagggacggccgggggcattcgtattgcgccgctagaggtgaaattcttggaccggcgcaagacggaccagagcgaaagcatttgccaagaatgttttcattaatcaagaa

SEQ ID NO: 63416 - DNA, 120 bp, Homo sapiens
  misc_feature: 741 for SV(C|O) and 18S
ggaattaccgcggctgctggcaccagacttgccctccaatggatcctcgttaaaggatttaaagtggactcattccaattacagggcctcgaaagagtcctgtattgttatttttcgtca

SEQ ID NO: 63417 - DNA, 120 bp, Homo sapiens; identical to SEQ ID NO: 47690
  misc_feature: 741 for SV(C|O) and 18S

SEQ ID NO: 63418 - DNA, 120 bp, Homo sapiens
  misc_feature: 741 for SV(C|O) and 18S
ccgcggttctattttgttggttttcggaactgaggccatgattaagagggacggccgggggcattcgtattgcgccgctagaggtgaaattcttggaccggcgcaagacggaccagagcg

SEQ ID NO: 63419 - DNA, 120 bp, Homo sapiens
  misc_feature: 741 for SV(C|O) and 18S
aattaccgcggctgctggcaccagacttgccctccaatggatcctcgttaaaggatttaaagtggactcattccaattacagggcctcgaaagagtcctgtattgttatttttcgtcact

SEQ ID NO: 63420 - DNA, 120 bp, Homo sapiens; identical to SEQ ID NO: 48059
  misc_feature: 740 for SV(C|O) and 18S

SEQ ID NO: 63421 - DNA, 120 bp, Homo sapiens
  misc_feature: 739 for SV(C|O) and 18S
acgatcagataccgtcgtagttccgaccataaacgatgccgaccggcgatgcggcggcgttattcccatgacccgccgggcagcttccgggaaaccaaagtctttgggttccggggggag

SEQ ID NO: 63422 - DNA, 120 bp, Homo sapiens
  misc_feature: 738 for SV(C|O) and 18S
gacgatcagataccgtcgtagttccgaccataaacgatgccgaccggcgatgcggcggcgttattcccatgacccgccgggcagcttccgggaaaccaaagtctttgggttccgggggga

SEQ ID NO: 63423 - DNA, 120 bp, Homo sapiens; identical to SEQ ID NO: 48321
  misc_feature: 738 for SV(C|O) and 18S

SEQ ID NO: 63424 - DNA, 120 bp, Homo sapiens; identical to SEQ ID NO: 47973
  misc_feature: 738 for SV(C|O) and 18S

SEQ ID NO: 63425 - DNA, 120 bp, Homo sapiens
  misc_feature: 737 for SV(C|O) and 18S
aataggaccgcggttctattttgttggttttcggaactgaggccatgattaagagggacggccgggggcattcgtattgcgccgctagaggtgaaattcttggaccggcgcaagacggac

SEQ ID NO: 63426 - DNA, 120 bp, Homo sapiens; identical to SEQ ID NO: 47709
  misc_feature: 737 for SV(C|O) and 18S

SEQ ID NO: 63427 - DNA, 120 bp, Homo sapiens
  misc_feature: 736 for SV(C|O) and 18S
cggctgctggcaccagacttgccctccaatggatcctcgttaaaggatttaaagtggactcattccaattacagggcctcgaaagagtcctgtattgttatttttcgtcactacctcccc

SEQ ID NO: 63428 - DNA, 120 bp, Homo sapiens
  misc_feature: 736 for SV(C|O) and 18S
cgcggctgctggcaccagacttgccctccaatggatcctcgttaaaggatttaaagtggactcattccaattacagggcctcgaaagagtcctgtattgttatttttcgtcactacctcc

SEQ ID NO: 63429 - DNA, 120 bp, Homo sapiens; identical to SEQ ID NO: 47726
  misc_feature: 736 for SV(C|O) and 18S

SEQ ID NO: 63430 - DNA, 120 bp, Homo sapiens
  misc_feature: 735 for SV(C|O) and 18S
ataggaccgcggttctattttgttggttttcggaactgaggccatgattaagagggacggccgggggcattcgtattgcgccgctagaggtgaaattcttggaccggcgcaagacggacc

SEQ ID NO: 63431 - DNA, 120 bp, Homo sapiens; identical to SEQ ID NO: 47704
  misc_feature: 735 for SV(C|O) and 18S

SEQ ID NO: 63432 - DNA, 120 bp, Homo sapiens; identical to SEQ ID NO: 47707
  misc_feature: 735 for SV(C|O) and 18S

SEQ ID NO: 63433 - DNA, 120 bp, Homo sapiens
  misc_feature: 734 for SV(C|O) and 18S
gaattaccgcggctgctggcaccagacttgccctccaatggatcctcgttaaaggatttaaagtggactcattccaattacagggcctcgaaagagtcctgtattgttatttttcgtcac

SEQ ID NO: 63434 - DNA, 120 bp, Homo sapiens
  misc_feature: 734 for SV(C|O) and 18S
gcggctgctggcaccagacttgccctccaatggatcctcgttaaaggatttaaagtggactcattccaattacagggcctcgaaagagtcctgtattgttatttttcgtcactacctccc

SEQ ID NO: 63435 - DNA, 120 bp, Homo sapiens; identical to SEQ ID NO: 47703
  misc_feature: 734 for SV(C|O) and 18S

SEQ ID NO: 63436 - DNA, 120 bp, Homo sapiens; identical to SEQ ID NO: 47717
  misc_feature: 733 for SV(C|O) and 18S

SEQ ID NO: 63437 - DNA, 120 bp, Homo sapiens; identical to SEQ ID NO: 47818
  misc_feature: 733 for SV(C|O) and 18S

SEQ ID NO: 63438 - DNA, 120 bp, Homo sapiens; identical to SEQ ID NO: 47691
  misc_feature: 733 for SV(C|O) and 18S

SEQ ID NO: 63439 - DNA, 120 bp, Homo sapiens; identical to SEQ ID NO: 48246
  misc_feature: 732 for SV(C|O) and 18S

SEQ ID NO: 63440 - DNA, 120 bp, Homo sapiens
  misc_feature: 732 for SV(C|O) and 18S
ggagaggagcgagcgaccaaaggaaccataactgatttaatgagccattcgcagtttcactgtaccggccgtgcgtacttagacatgcatggcttaatctttgagacaagcatatgctac

SEQ ID NO: 63441 - DNA, 120 bp, Homo sapiens; identical to SEQ ID NO: 48160
  misc_feature: 732 for SV(C|O) and 18S

SEQ ID NO: 63442 - DNA, 120 bp, Homo sapiens; identical to SEQ ID NO: 47714
  misc_feature: 732 for SV(C|O) and 18S

SEQ ID NO: 63443 - DNA, 120 bp, Homo sapiens
  misc_feature: 732 for SV(C|O) and 18S
accgcggctgctggcaccagacttgccctccaatggatcctcgttaaaggatttaaagtggactcattccaattacagggcctcgaaagagtcctgtattgttatttttcgtcactacct

SEQ ID NO: 63444 - DNA, 120 bp, Homo sapiens
  misc_feature: 731 for SV(C|O) and 18S
gaataggaccgcggttctattttgttggttttcggaactgaggccatgattaagagggacggccgggggcattcgtattgcgccgctagaggtgaaattcttggaccggcgcaagacgga

SEQ ID NO: 63445 - DNA, 120 bp, Homo sapiens
  misc_feature: 730 for SV(C|O) and 18S
cgtcggcatgtattagctctagaattaccacagttatccaagtaggagaggagcgagcgaccaaaggaaccataactgatttaatgagccattcgcagtttcactgtaccggccgtgcgt

SEQ ID NO: 63446 - DNA, 120 bp, Homo sapiens; identical to SEQ ID NO: 47982
  misc_feature: 727 for SV(C|O) and 18S

SEQ ID NO: 63447 - DNA, 120 bp, Homo sapiens; identical to SEQ ID NO: 47722
  misc_feature: 727 for SV(C|O) and 18S

SEQ ID NO: 63448 - DNA, 120 bp, Homo sapiens
  misc_feature: 727 for SV(C|O) and 18S
gggcatcacagacctgttattgctcaatctcgggtggctgaacgccacttgtccctctaagaagttgggggacgccgaccgctcgggggtcgcgtaactagttagcatgccagagtctcg

SEQ ID NO: 63449 - DNA, 120 bp, Homo sapiens
  misc_feature: 727 for SV(C|O) and 18S
gagaggagcgagcgaccaaaggaaccataactgatttaatgagccattcgcagtttcactgtaccggccgtgcgtacttagacatgcatggcttaatctttgagacaagcatatgctact

SEQ ID NO: 63450 - DNA, 120 bp, Homo sapiens; identical to SEQ ID NO: 47715
  misc_feature: 726 for SV(C|O) and 18S

SEQ ID NO: 63451 - DNA, 120 bp, Homo sapiens; identical to SEQ ID NO: 48249
  misc_feature: 726 for SV(C|O) and 18S

SEQ ID NO: 63452 - DNA, 120 bp, Homo sapiens; identical to SEQ ID NO: 48190
  misc_feature: 726 for SV(C|O) and 18S

SEQ ID NO: 63453 - DNA, 120 bp, Homo sapiens
  misc_feature: 725 for SV(C|O) and 18S
attaccgcggctgctggcaccagacttgccctccaatggatcctcgttaaaggatttaaagtggactcattccaattacagggcctcgaaagagtcctgtattgttatttttcgtcacta

SEQ ID NO: 63454 - DNA, 120 bp, Homo sapiens; identical to SEQ ID NO: 47746
  misc_feature: 725 for SV(C|O) and 18S

SEQ ID NO: 63455 - DNA, 120 bp, Homo sapiens; identical to SEQ ID NO: 47727
  misc_feature: 724 for SV(C|O) and 18S

SEQ ID NO: 63456 - DNA, 120 bp, Homo sapiens; identical to SEQ ID NO: 47688
  misc_feature: 724 for SV(C|O) and 18S

SEQ ID NO: 63457 - DNA, 120 bp, Homo sapiens
  misc_feature: 724 for SV(C|O) and 18S
taatggaataggaccgcggttctattttgttggttttcggaactgaggccatgattaagagggacggccgggggcattcgtattgcgccgctagaggtgaaattcttggaccggcgcaag

SEQ ID NO: 63458 - DNA, 120 bp, Homo sapiens
  misc_feature: 724 for SV(C|O) and 18S
ggcatcacagacctgttattgctcaatctcgggtggctgaacgccacttgtccctctaagaagttgggggacgccgaccgctcgggggtcgcgtaactagttagcatgccagagtctcgt

SEQ ID NO: 63459 - DNA, 120 bp, Homo sapiens; identical to SEQ ID NO: 47855
  misc_feature: 724 for SV(C|O) and 18S

SEQ ID NO: 63460 - DNA, 120 bp, Homo sapiens
  misc_feature: 724 for SV(C|O) and 18S
atcacagacctgttattgctcaatctcgggtggctgaacgccacttgtccctctaagaagttgggggacgccgaccgctcgggggtcgcgtaactagttagcatgccagagtctcgttcg

SEQ ID NO: 63461 - DNA, 120 bp, Homo sapiens; identical to SEQ ID NO: 47719
  misc_feature: 723 for SV(C|O) and 18S

SEQ ID NO: 63462 - DNA, 120 bp, Homo sapiens; identical to SEQ ID NO: 47850
  misc_feature: 723 for SV(C|O) and 18S

SEQ ID NO: 63463 - DNA, 120 bp, Homo sapiens
  misc_feature: 723 for SV(C|O) and 18S
ggctgctggcaccagacttgccctccaatggatcctcgttaaaggatttaaagtggactcattccaattacagggcctcgaaagagtcctgtattgttatttttcgtcactacctccccg

SEQ ID NO: 63464 - DNA, 120 bp, Homo sapiens; identical to SEQ ID NO: 47731
  misc_feature: 722 for SV(C|O) and 18S

SEQ ID NO: 63465 - DNA, 120 bp, Homo sapiens
  misc_feature: 722 for SV(C|O) and 18S
taccgcggctgctggcaccagacttgccctccaatggatcctcgttaaaggatttaaagtggactcattccaattacagggcctcgaaagagtcctgtattgttatttttcgtcactacc

SEQ ID NO: 63466 - DNA, 120 bp, Homo sapiens; identical to SEQ ID NO: 48218
  misc_feature: 722 for SV(C|O) and 18S

SEQ ID NO: 63467 - DNA, 120 bp, Homo sapiens; identical to SEQ ID NO: 47693
  misc_feature: 722 for SV(C|O) and 18S

SEQ ID NO: 63468 - DNA, 120 bp, Homo sapiens
  misc_feature: 721 for SV(C|O) and 18S
catcacagacctgttattgctcaatctcgggtggctgaacgccacttgtccctctaagaagttgggggacgccgaccgctcgggggtcgcgtaactagttagcatgccagagtctcgttc

SEQ ID NO: 63469 - DNA, 120 bp, Homo sapiens; identical to SEQ ID NO: 47700
  misc_feature: 720 for SV(C|O) and 18S

SEQ ID NO: 63470 - DNA, 120 bp, Homo sapiens
  misc_feature: 720 for SV(C|O) and 18S
agaggagcgagcgaccaaaggaaccataactgatttaatgagccattcgcagtttcactgtaccggccgtgcgtacttagacatgcatggcttaatctttgagacaagcatatgctactg

SEQ ID NO: 63471 - DNA, 120 bp, Homo sapiens; identical to SEQ ID NO: 47743
  misc_feature: 719 for SV(C|O) and 18S

SEQ ID NO: 63472 - DNA, 120 bp, Homo sapiens
  misc_feature: 719 for SV(C|O) and 18S
ttaccgcggctgctggcaccagacttgccctccaatggatcctcgttaaaggatttaaagtggactcattccaattacagggcctcgaaagagtcctgtattgttatttttcgtcactac

SEQ ID NO: 63473 - DNA, 120 bp, Homo sapiens; identical to SEQ ID NO: 47698
  misc_feature: 718 for SV(C|O) and 18S

SEQ ID NO: 63474 - DNA, 120 bp, Homo sapiens; identical to SEQ ID NO: 47756
  misc_feature: 718 for SV(C|O) and 18S

SEQ ID NO: 63475 - DNA, 120 bp, Homo sapiens; identical to SEQ ID NO: 47745
  misc_feature: 718 for SV(C|O) and 18S

SEQ ID NO: 63476 - DNA, 120 bp, Homo sapiens
  misc_feature: 718 for SV(C|O) and 18S
aagggcatcacagacctgttattgctcaatctcgggtggctgaacgccacttgtccctctaagaagttgggggacgccgaccgctcgggggtcgcgtaactagttagcatgccagagtct

SEQ ID NO: 63477 - DNA, 120 bp, Homo sapiens; identical to SEQ ID NO: 48252
  misc_feature: 716 for SV(C|O) and 18S

SEQ ID NO: 63478 - DNA, 120 bp, Homo sapiens; identical to SEQ ID NO: 47859
  misc_feature: 716 for SV(C|O) and 18S

SEQ ID NO: 63479 - DNA, 120 bp, Homo sapiens; identical to SEQ ID NO: 47705
  misc_feature: 716 for SV(C|O) and 18S

SEQ ID NO: 63480 - DNA, 120 bp, Homo sapiens; identical to SEQ ID NO: 48420
  misc_feature: 716 for SV(C|O) and 18S

SEQ ID NO: 63481 - DNA, 120 bp, Homo sapiens
  misc_feature: 715 for SV(C|O) and 18S
taagggcatcacagacctgttattgctcaatctcgggtggctgaacgccacttgtccctctaagaagttgggggacgccgaccgctcgggggtcgcgtaactagttagcatgccagagtc

SEQ ID NO: 63482 - DNA, 120 bp, Homo sapiens; identical to SEQ ID NO: 47906
  misc_feature: 715 for SV(C|O) and 18S

SEQ ID NO: 63483 - DNA, 120 bp, Homo sapiens
  misc_feature: 715 for SV(C|O) and 18S
agggcatcacagacctgttattgctcaatctcgggtggctgaacgccacttgtccctctaagaagttgggggacgccgaccgctcgggggtcgcgtaactagttagcatgccagagtctc

SEQ ID NO: 63484 - DNA, 120 bp, Homo sapiens
  misc_feature: 715 for SV(C|O) and 18S
ctaagggcatcacagacctgttattgctcaatctcgggtggctgaacgccacttgtccctctaagaagttgggggacgccgaccgctcgggggtcgcgtaactagttagcatgccagagt

SEQ ID NO: 63485 - DNA, 120 bp, Homo sapiens; identical to SEQ ID NO: 48169
  misc_feature: 715 for SV(C|O) and 18S

SEQ ID NO: 63486 - DNA, 120 bp, Homo sapiens; identical to SEQ ID NO: 47770
  misc_feature: 715 for SV(C|O) and 18S

SEQ ID NO: 63487 - DNA, 120 bp, Homo sapiens; identical to SEQ ID NO: 47752
  misc_feature: 714 for SV(C|O) and 18S

SEQ ID NO: 63488 - DNA, 120 bp, Homo sapiens; identical to SEQ ID NO: 47711
  misc_feature: 714 for SV(C|O) and 18S

SEQ ID NO: 63489 - DNA, 120 bp, Homo sapiens
  misc_feature: 714 for SV(C|O) and 18S
gcatcacagacctgttattgctcaatctcgggtggctgaacgccacttgtccctctaagaagttgggggacgccgaccgctcgggggtcgcgtaactagttagcatgccagagtctcgtt

SEQ ID NO: 63490 - DNA, 120 bp, Homo sapiens; identical to SEQ ID NO: 47710
  misc_feature: 714 for SV(C|O) and 18S

SEQ ID NO: 63491 - DNA, 120 bp, Homo sapiens
  misc_feature: 713 for SV(C|O) and 18S
ataatggaataggaccgcggttctattttgttggttttcggaactgaggccatgattaagagggacggccgggggcattcgtattgcgccgctagaggtgaaattcttggaccggcgcaa

SEQ ID NO: 63492 - DNA, 120 bp, Homo sapiens
  misc_feature: 713 for SV(C|O) and 18S
gttcttgattaatgaaaacattcttggcaaatgctttcgctctggtccgtcttgcgccggtccaagaatttcacctctagcggcgcaatacgaatgcccccggccgtccctcttaatcat

SEQ ID NO: 63493 - DNA, 120 bp, Homo sapiens; identical to SEQ ID NO: 48181
  misc_feature: 713 for SV(C|O) and 18S

SEQ ID NO: 63494 - DNA, 120 bp, Homo sapiens
  misc_feature: 712 for SV(C|O) and 18S
aataatggaataggaccgcggttctattttgttggttttcggaactgaggccatgattaagagggacggccgggggcattcgtattgcgccgctagaggtgaaattcttggaccggcgca

SEQ ID NO: 63495 - DNA, 120 bp, Homo sapiens
  misc_feature: 712 for SV(C|O) and 18S
aatggaataggaccgcggttctattttgttggttttcggaactgaggccatgattaagagggacggccgggggcattcgtattgcgccgctagaggtgaaattcttggaccggcgcaaga

SEQ ID NO: 63496 - DNA, 120 bp, Homo sapiens
  misc_feature: 712 for SV(C|O) and 18S
ggaataggaccgcggttctattttgttggttttcggaactgaggccatgattaagagggacggccgggggcattcgtattgcgccgctagaggtgaaattcttggaccggcgcaagacgg

SEQ ID NO: 63497 - DNA, 120 bp, Homo sapiens; identical to SEQ ID NO: 48188
  misc_feature: 712 for SV(C|O) and 18S

SEQ ID NO: 63498 - DNA, 120 bp, Homo sapiens; identical to SEQ ID NO: 48407
  misc_feature: 712 for SV(C|O) and 18S

SEQ ID NO: 63499 - DNA, 120 bp, Homo sapiens
  misc_feature: 710 for SV(C|O) and 18S
tcacagacctgttattgctcaatctcgggtggctgaacgccacttgtccctctaagaagttgggggacgccgaccgctcgggggtcgcgtaactagttagcatgccagagtctcgttcgt

SEQ ID NO: 63500 - DNA, 120 bp, Homo sapiens; identical to SEQ ID NO: 47793
  misc_feature: 707 for SV(C|O) and 18S

SEQ ID NO: 63501 - DNA, 120 bp, Homo sapiens
  misc_feature: 707 for SV(C|O) and 18S
aggaataatggaataggaccgcggttctattttgttggttttcggaactgaggccatgattaagagggacggccgggggcattcgtattgcgccgctagaggtgaaattcttggaccggc

SEQ ID NO: 63502 - DNA, 120 bp, Homo sapiens; identical to SEQ ID NO: 47781
  misc_feature: 705 for SV(C|O) and 18S

SEQ ID NO: 63503 - DNA, 120 bp, Homo sapiens; identical to SEQ ID NO: 47869
  misc_feature: 705 for SV(C|O) and 18S

SEQ ID NO: 63504 - DNA, 120 bp, Homo sapiens
  misc_feature: 705 for SV(C|O) and 18S
gatcagataccgtcgtagttccgaccataaacgatgccgaccggcgatgcggcggcgttattcccatgacccgccgggcagcttccgggaaaccaaagtctttgggttccggggggagta

SEQ ID NO: 63505 - DNA, 120 bp, Homo sapiens
  misc_feature: 705 for SV(C|O) and 18S
cgatcagataccgtcgtagttccgaccataaacgatgccgaccggcgatgcggcggcgttattcccatgacccgccgggcagcttccgggaaaccaaagtctttgggttccggggggagt

SEQ ID NO: 63506 - DNA, 120 bp, Homo sapiens; identical to SEQ ID NO: 48263
  misc_feature: 703 for SV(C|O) and 18S

SEQ ID NO: 63507 - DNA, 120 bp, Homo sapiens
  misc_feature: 702 for SV(C|O) and 18S
tgctgcagttaaaaagctcgtagttggatcttgggagcgggcgggcggtccgccgcgaggcgagccaccgcccgtccccgccccttgcctctcggcgccccctcgatgctcttagctgag

SEQ ID NO: 63508 - DNA, 120 bp, Homo sapiens
  misc_feature: 702 for SV(C|O) and 18S
gcgagcgaccaaaggaaccataactgatttaatgagccattcgcagtttcactgtaccggccgtgcgtacttagacatgcatggcttaatctttgagacaagcatatgctactggcagga

SEQ ID NO: 63509 - DNA, 120 bp, Homo sapiens; identical to SEQ ID NO: 48254
  misc_feature: 702 for SV(C|O) and 18S

SEQ ID NO: 63510 - DNA, 120 bp, Homo sapiens; identical to SEQ ID NO: 48378
  misc_feature: 702 for SV(C|O) and 18S

SEQ ID NO: 63511 - DNA, 120 bp, Homo sapiens
  misc_feature: 702 for SV(C|O) and 18S
atcagataccgtcgtagttccgaccataaacgatgccgaccggcgatgcggcggcgttattcccatgacccgccgggcagcttccgggaaaccaaagtctttgggttccggggggagtat

SEQ ID NO: 63512 - DNA, 120 bp, Homo sapiens
  misc_feature: 701 for SV(C|O) and 18S
tggaataggaccgcggttctattttgttggttttcggaactgaggccatgattaagagggacggccgggggcattcgtattgcgccgctagaggtgaaattcttggaccggcgcaagacg

SEQ ID NO: 63513 - DNA, 120 bp, Homo sapiens
  misc_feature: 701 for SV(C|O) and 18S
tagatagtcaagttcgaccgtcttctcagcgctccgccagggccgtgggccgaccccggcggggccgatccgagggcctcactaaaccatccaatcggtagtagcgacgggcggtgtgta

SEQ ID NO: 63514 - DNA, 120 bp, Homo sapiens
  misc_feature: 700 for SV(C|O) and 18S
gctgctggcaccagacttgccctccaatggatcctcgttaaaggatttaaagtggactcattccaattacagggcctcgaaagagtcctgtattgttatttttcgtcactacctccccgg

SEQ ID NO: 63515 - DNA, 120 bp, Homo sapiens
  misc_feature: 700 for SV(C|O) and 18S
gaataatggaataggaccgcggttctattttgttggttttcggaactgaggccatgattaagagggacggccgggggcattcgtattgcgccgctagaggtgaaattcttggaccggcgc

SEQ ID NO: 63516 - DNA, 120 bp, Homo sapiens
  misc_feature: 700 for SV(C|O) and 18S
ctgtgatgcccttagatgtccggggctgcacgcgcgctacactgactggctcagcgtgtgcctaccctacgccggcaggcgcgggtaacccgttgaaccccattcgtgatggggatcggg

SEQ ID NO: 63517 - DNA, 120 bp, Homo sapiens
  misc_feature: 699 for SV(C|O) and 18S
cgagcgaccaaaggaaccataactgatttaatgagccattcgcagtttcactgtaccggccgtgcgtacttagacatgcatggcttaatctttgagacaagcatatgctactggcaggat

SEQ ID NO: 63518 - DNA, 120 bp, Homo sapiens; identical to SEQ ID NO: 47954
  misc_feature: 699 for SV(C|O) and 18S

SEQ ID NO: 63519 - DNA, 120 bp, Homo sapiens
  misc_feature: 698 for SV(C|O) and 18S
gttgctgcagttaaaaagctcgtagttggatcttgggagcgggcgggcggtccgccgcgaggcgagccaccgcccgtccccgccccttgcctctcggcgccccctcgatgctcttagctg

SEQ ID NO: 63520 - DNA, 120 bp, Homo sapiens
  misc_feature: 698 for SV(C|O) and 18S
atggaataggaccgcggttctattttgttggttttcggaactgaggccatgattaagagggacggccgggggcattcgtattgcgccgctagaggtgaaattcttggaccggcgcaagac

SEQ ID NO: 63521 - DNA, 120 bp, Homo sapiens; identical to SEQ ID NO: 48381
  misc_feature: 698 for SV(C|O) and 18S

SEQ ID NO: 63522 - DNA, 120 bp, Homo sapiens; identical to SEQ ID NO: 48243
  misc_feature: 698 for SV(C|O) and 18S

SEQ ID NO: 63523 - DNA, 120 bp, Homo sapiens
  misc_feature: 697 for SV(C|O) and 18S
tttttcgtcactacctccccgggtcgggagtgggtaatttgcgcgcctgctgccttccttggatgtggtagccgtttctcaggctccctctccggaatcgaaccctgattccccgtcacc

SEQ ID NO: 63524 - DNA, 120 bp, Homo sapiens
  misc_feature: 697 for SV(C|O) and 18S
ttgctgcagttaaaaagctcgtagttggatcttgggagcgggcgggcggtccgccgcgaggcgagccaccgcccgtccccgccccttgcctctcggcgccccctcgatgctcttagctga

SEQ ID NO: 63525 - DNA, 120 bp, Homo sapiens
  misc_feature: 697 for SV(C|O) and 18S
cgttcttgattaatgaaaacattcttggcaaatgctttcgctctggtccgtcttgcgccggtccaagaatttcacctctagcggcgcaatacgaatgcccccggccgtccctcttaatca

SEQ ID NO: 63526 - DNA, 120 bp, Homo sapiens; identical to SEQ ID NO: 47955
  misc_feature: 697 for SV(C|O) and 18S

SEQ ID NO: 63527 - DNA, 120 bp, Homo sapiens; identical to SEQ ID NO: 48304
  misc_feature: 697 for SV(C|O) and 18S

SEQ ID NO: 63528 - DNA, 120 bp, Homo sapiens
  misc_feature: 696 for SV(C|O) and 18S
agatagtcaagttcgaccgtcttctcagcgctccgccagggccgtgggccgaccccggcggggccgatccgagggcctcactaaaccatccaatcggtagtagcgacgggcggtgtgtac

SEQ ID NO: 63529 - DNA, 120 bp, Homo sapiens; identical to SEQ ID NO: 47800
  misc_feature: 695 for SV(C|O) and 18S

SEQ ID NO: 63530 - DNA, 120 bp, Homo sapiens
  misc_feature: 695 for SV(C|O) and 18S
ttatttttcgtcactacctccccgggtcgggagtgggtaatttgcgcgcctgctgccttccttggatgtggtagccgtttctcaggctccctctccggaatcgaaccctgattccccgtc

SEQ ID NO: 63531 - DNA, 120 bp, Homo sapiens; identical to SEQ ID NO: 47842
  misc_feature: 695 for SV(C|O) and 18S

SEQ ID NO: 63532 - DNA, 120 bp, Homo sapiens
  misc_feature: 694 for SV(C|O) and 18S
tttcgtcactacctccccgggtcgggagtgggtaatttgcgcgcctgctgccttccttggatgtggtagccgtttctcaggctccctctccggaatcgaaccctgattccccgtcacccg

SEQ ID NO: 63533 - DNA, 120 bp, Homo sapiens
  misc_feature: 694 for SV(C|O) and 18S
ggaataatggaataggaccgcggttctattttgttggttttcggaactgaggccatgattaagagggacggccgggggcattcgtattgcgccgctagaggtgaaattcttggaccggcg

SEQ ID NO: 63534 - DNA, 120 bp, Homo sapiens
  misc_feature: 694 for SV(C|O) and 18S
aggagcgagcgaccaaaggaaccataactgatttaatgagccattcgcagtttcactgtaccggccgtgcgtacttagacatgcatggcttaatctttgagacaagcatatgctactggc

SEQ ID NO: 63535 - DNA, 120 bp, Homo sapiens
  misc_feature: 694 for SV(C|O) and 18S
agcgagcgaccaaaggaaccataactgatttaatgagccattcgcagtttcactgtaccggccgtgcgtacttagacatgcatggcttaatctttgagacaagcatatgctactggcagg

SEQ ID NO: 63536 - DNA, 120 bp, Homo sapiens
  misc_feature: 694 for SV(C|O) and 18S
agttgctgcagttaaaaagctcgtagttggatcttgggagcgggcgggcggtccgccgcgaggcgagccaccgcccgtccccgccccttgcctctcggcgccccctcgatgctcttagct

SEQ ID NO: 63537 - DNA, 120 bp, Homo sapiens
  misc_feature: 693 for SV(C|O) and 18S
tctaagggcatcacagacctgttattgctcaatctcgggtggctgaacgccacttgtccctctaagaagttgggggacgccgaccgctcgggggtcgcgtaactagttagcatgccagag

SEQ ID NO: 63538 - DNA, 120 bp, Homo sapiens; identical to SEQ ID NO: 47978
  misc_feature: 693 for SV(C|O) and 18S

SEQ ID NO: 63539 - DNA, 120 bp, Homo sapiens
  misc_feature: 692 for SV(C|O) and 18S
cattaaatcagttatggttcctttggtcgctcgctcctctcctacttggataactgtggtaattctagagctaatacatgccgacgggcgctgacccccttcgcgggggggatgcgtgca

SEQ ID NO: 63540 - DNA, 120 bp, Homo sapiens; identical to SEQ ID NO: 47981
  misc_feature: 692 for SV(C|O) and 18S

SEQ ID NO: 63541 - DNA, 120 bp, Homo sapiens; identical to SEQ ID NO: 48209
  misc_feature: 692 for SV(C|O) and 18S

SEQ ID NO: 63542 - DNA, 120 bp, Homo sapiens; identical to SEQ ID NO: 48384
  misc_feature: 692 for SV(C|O) and 18S

SEQ ID NO: 63543 - DNA, 120 bp, Homo sapiens
  misc_feature: 692 for SV(C|O) and 18S
cagataccgtcgtagttccgaccataaacgatgccgaccggcgatgcggcggcgttattcccatgacccgccgggcagcttccgggaaaccaaagtctttgggttccggggggagtatgg

SEQ ID NO: 63544 - DNA, 120 bp, Homo sapiens
  misc_feature: 691 for SV(C|O) and 18S
ttttcgtcactacctccccgggtcgggagtgggtaatttgcgcgcctgctgccttccttggatgtggtagccgtttctcaggctccctctccggaatcgaaccctgattccccgtcaccc

SEQ ID NO: 63545 - DNA, 120 bp, Homo sapiens
  misc_feature: 691 for SV(C|O) and 18S
gaatggggttcaacgggttacccgcgcctgccggcgtagggtaggcacacgctgagccagtcagtgtagcgcgcgtgcagccccggacatctaagggcatcacagacctgttattgctca

SEQ ID NO: 63546 - DNA, 120 bp, Homo sapiens
  misc_feature: 691 for SV(C|O) and 18S
tcagataccgtcgtagttccgaccataaacgatgccgaccggcgatgcggcggcgttattcccatgacccgccgggcagcttccgggaaaccaaagtctttgggttccggggggagtatg

SEQ ID NO: 63547 - DNA, 120 bp, Homo sapiens; identical to SEQ ID NO: 48255
  misc_feature: 691 for SV(C|O) and 18S

SEQ ID NO: 63548 - DNA, 120 bp, Homo sapiens
  misc_feature: 691 for SV(C|O) and 18S
gaggagcgagcgaccaaaggaaccataactgatttaatgagccattcgcagtttcactgtaccggccgtgcgtacttagacatgcatggcttaatctttgagacaagcatatgctactgg

SEQ ID NO: 63549 - DNA, 120 bp, Homo sapiens; identical to SEQ ID NO: 48373
  misc_feature: 690 for SV(C|O) and 18S

SEQ ID NO: 63550 - DNA, 120 bp, Homo sapiens; identical to SEQ ID NO: 48476
  misc_feature: 690 for SV(C|O) and 18S

SEQ ID NO: 63551 - DNA, 120 bp, Homo sapiens
  misc_feature: 690 for SV(C|O) and 18S
gatagtcaagttcgaccgtcttctcagcgctccgccagggccgtgggccgaccccggcggggccgatccgagggcctcactaaaccatccaatcggtagtagcgacgggcggtgtgtaca

SEQ ID NO: 63552 - DNA, 120 bp, Homo sapiens
  misc_feature: 690 for SV(C|O) and 18S
gataccgtcgtagttccgaccataaacgatgccgaccggcgatgcggcggcgttattcccatgacccgccgggcagcttccgggaaaccaaagtctttgggttccggggggagtatggtt

SEQ ID NO: 63553 - DNA, 120 bp, Homo sapiens
  misc_feature: 690 for SV(C|O) and 18S
agataccgtcgtagttccgaccataaacgatgccgaccggcgatgcggcggcgttattcccatgacccgccgggcagcttccgggaaaccaaagtctttgggttccggggggagtatggt

SEQ ID NO: 63554 - DNA, 120 bp, Homo sapiens
  misc_feature: 688 for SV(C|O) and 18S
tatttttcgtcactacctccccgggtcgggagtgggtaatttgcgcgcctgctgccttccttggatgtggtagccgtttctcaggctccctctccggaatcgaaccctgattccccgtca

SEQ ID NO: 63555 - DNA, 120 bp, Homo sapiens; identical to SEQ ID NO: 48220
  misc_feature: 688 for SV(C|O) and 18S

SEQ ID NO: 63556 - DNA, 120 bp, Homo sapiens; identical to SEQ ID NO: 48556
  misc_feature: 688 for SV(C|O) and 18S

SEQ ID NO: 63557 - DNA, 120 bp, Homo sapiens
  misc_feature: 687 for SV(C|O) and 18S
atagtcaagttcgaccgtcttctcagcgctccgccagggccgtgggccgaccccggcggggccgatccgagggcctcactaaaccatccaatcggtagtagcgacgggcggtgtgtacaa

SEQ ID NO: 63558 - DNA, 120 bp, Homo sapiens
  misc_feature: 687 for SV(C|O) and 18S
ggagcgagcgaccaaaggaaccataactgatttaatgagccattcgcagtttcactgtaccggccgtgcgtacttagacatgcatggcttaatctttgagacaagcatatgctactggca

SEQ ID NO: 63559 - DNA, 120 bp, Homo sapiens
  misc_feature: 687 for SV(C|O) and 18S
atttttcgtcactacctccccgggtcgggagtgggtaatttgcgcgcctgctgccttccttggatgtggtagccgtttctcaggctccctctccggaatcgaaccctgattccccgtcac

SEQ ID NO: 63560 - DNA, 120 bp, Homo sapiens; identical to SEQ ID NO: 48070
  misc_feature: 687 for SV(C|O) and 18S

SEQ ID NO: 63561 - DNA, 120 bp, Homo sapiens
  misc_feature: 687 for SV(C|O) and 18S
gagcgaccaaaggaaccataactgatttaatgagccattcgcagtttcactgtaccggccgtgcgtacttagacatgcatggcttaatctttgagacaagcatatgctactggcaggatc

SEQ ID NO: 63562 - DNA, 120 bp, Homo sapiens; identical to SEQ ID NO: 47856
  misc_feature: 687 for SV(C|O) and 18S

SEQ ID NO: 63563 - DNA, 120 bp, Homo sapiens
  misc_feature: 686 for SV(C|O) and 18S
ttcgtcactacctccccgggtcgggagtgggtaatttgcgcgcctgctgccttccttggatgtggtagccgtttctcaggctccctctccggaatcgaaccctgattccccgtcacccgt

SEQ ID NO: 63564 - DNA, 120 bp, Homo sapiens
  misc_feature: 686 for SV(C|O) and 18S
agcgaccaaaggaaccataactgatttaatgagccattcgcagtttcactgtaccggccgtgcgtacttagacatgcatggcttaatctttgagacaagcatatgctactggcaggatca

SEQ ID NO: 63565 - DNA, 120 bp, Homo sapiens; identical to SEQ ID NO: 47983
  misc_feature: 686 for SV(C|O) and 18S

SEQ ID NO: 63566 - DNA, 120 bp, Homo sapiens; identical to SEQ ID NO: 48313
  misc_feature: 686 for SV(C|O) and 18S

SEQ ID NO: 63567 - DNA, 120 bp, Homo sapiens; identical to SEQ ID NO: 48441
  misc_feature: 685 for SV(C|O) and 18S

SEQ ID NO: 63568 - DNA, 120 bp, Homo sapiens
  misc_feature: 685 for SV(C|O) and 18S
tgtgatgcccttagatgtccggggctgcacgcgcgctacactgactggctcagcgtgtgcctaccctacgccggcaggcgcgggtaacccgttgaaccccattcgtgatggggatcgggg

SEQ ID NO: 63569 - DNA, 120 bp, Homo sapiens; identical to SEQ ID NO: 48012
  misc_feature: 685 for SV(C|O) and 18S

SEQ ID NO: 63570 - DNA, 120 bp, Homo sapiens
  misc_feature: 685 for SV(C|O) and 18S
taccgtcgtagttccgaccataaacgatgccgaccggcgatgcggcggcgttattcccatgacccgccgggcagcttccgggaaaccaaagtctttgggttccggggggagtatggttgc

SEQ ID NO: 63571 - DNA, 120 bp, Homo sapiens
  misc_feature: 685 for SV(C|O) and 18S
ctagatagtcaagttcgaccgtcttctcagcgctccgccagggccgtgggccgaccccggcggggccgatccgagggcctcactaaaccatccaatcggtagtagcgacgggcggtgtgt

SEQ ID NO: 63572 - DNA, 120 bp, Homo sapiens
  misc_feature: 685 for SV(C|O) and 18S
ataccgtcgtagttccgaccataaacgatgccgaccggcgatgcggcggcgttattcccatgacccgccgggcagcttccgggaaaccaaagtctttgggttccggggggagtatggttg

SEQ ID NO: 63573 - DNA, 120 bp, Homo sapiens
  misc_feature: 684 for SV(C|O) and 18S
ttttacttcctctagatagtcaagttcgaccgtcttctcagcgctccgccagggccgtgggccgaccccggcggggccgatccgagggcctcactaaaccatccaatcggtagtagcgac

SEQ ID NO: 63574 - DNA, 120 bp, Homo sapiens
  misc_feature: 684 for SV(C|O) and 18S
tagtcaagttcgaccgtcttctcagcgctccgccagggccgtgggccgaccccggcggggccgatccgagggcctcactaaaccatccaatcggtagtagcgacgggcggtgtgtacaaa

SEQ ID NO: 63575 - DNA, 120 bp, Homo sapiens
  misc_feature: 684 for SV(C|O) and 18S
ttaaagttgctgcagttaaaaagctcgtagttggatcttgggagcgggcgggcggtccgccgcgaggcgagccaccgcccgtccccgccccttgcctctcggcgccccctcgatgctctt

SEQ ID NO: 63576 - DNA, 120 bp, Homo sapiens
  misc_feature: 684 for SV(C|O) and 18S
tcgttcttgattaatgaaaacattcttggcaaatgctttcgctctggtccgtcttgcgccggtccaagaatttcacctctagcggcgcaatacgaatgcccccggccgtccctcttaatc

SEQ ID NO: 63577 - DNA, 120 bp, Homo sapiens
  misc_feature: 684 for SV(C|O) and 18S
gagcgagcgaccaaaggaaccataactgatttaatgagccattcgcagtttcactgtaccggccgtgcgtacttagacatgcatggcttaatctttgagacaagcatatgctactggcag

SEQ ID NO: 63578 - DNA, 120 bp, Homo sapiens
  misc_feature: 684 for SV(C|O) and 18S
agtcaagttcgaccgtcttctcagcgctccgccagggccgtgggccgaccccggcggggccgatccgagggcctcactaaaccatccaatcggtagtagcgacgggcggtgtgtacaaag

SEQ ID NO: 63579 - DNA, 120 bp, Homo sapiens
  misc_feature: 683 for SV(C|O) and 18S
caagttcgaccgtcttctcagcgctccgccagggccgtgggccgaccccggcggggccgatccgagggcctcactaaaccatccaatcggtagtagcgacgggcggtgtgtacaaagggc

SEQ ID NO: 63580 - DNA, 120 bp, Homo sapiens; identical to SEQ ID NO: 48315
  misc_feature: 683 for SV(C|O) and 18S

SEQ ID NO: 63581 - DNA, 120 bp, Homo sapiens; identical to SEQ ID NO: 48251
  misc_feature: 683 for SV(C|O) and 18S

SEQ ID NO: 63582 - DNA, 120 bp, Homo sapiens; identical to SEQ ID NO: 47846
  misc_feature: 682 for SV(C|O) and 18S

SEQ ID NO: 63583 - DNA, 120 bp, Homo sapiens
  misc_feature: 682 for SV(C|O) and 18S
tattgttatttttcgtcactacctccccgggtcgggagtgggtaatttgcgcgcctgctgccttccttggatgtggtagccgtttctcaggctccctctccggaatcgaaccctgattcc

SEQ ID NO: 63584 - DNA, 120 bp, Homo sapiens
  misc_feature: 682 for SV(C|O) and 18S
gttatttttcgtcactacctccccgggtcgggagtgggtaatttgcgcgcctgctgccttccttggatgtggtagccgtttctcaggctccctctccggaatcgaaccctgattccccgt

SEQ ID NO: 63585 - DNA, 120 bp, Homo sapiens
  misc_feature: 682 for SV(C|O) and 18S
acttttacttcctctagatagtcaagttcgaccgtcttctcagcgctccgccagggccgtgggccgaccccggcggggccgatccgagggcctcactaaaccatccaatcggtagtagcg

SEQ ID NO: 63586 - DNA, 120 bp, Homo sapiens
  misc_feature: 682 for SV(C|O) and 18S
atggggttcaacgggttacccgcgcctgccggcgtagggtaggcacacgctgagccagtcagtgtagcgcgcgtgcagccccggacatctaagggcatcacagacctgttattgctcaat

SEQ ID NO: 63587 - DNA, 120 bp, Homo sapiens; identical to SEQ ID NO: 48443
  misc_feature: 681 for SV(C|O) and 18S

SEQ ID NO: 63588 - DNA, 120 bp, Homo sapiens
  misc_feature: 681 for SV(C|O) and 18S
cactacctccccgggtcgggagtgggtaatttgcgcgcctgctgccttccttggatgtggtagccgtttctcaggctccctctccggaatcgaaccctgattccccgtcacccgtggtca

SEQ ID NO: 63589 - DNA, 120 bp, Homo sapiens; identical to SEQ ID NO: 48487
  misc_feature: 681 for SV(C|O) and 18S

SEQ ID NO: 63590 - DNA, 120 bp, Homo sapiens
  misc_feature: 680 for SV(C|O) and 18S
tttcgttcttgattaatgaaaacattcttggcaaatgctttcgctctggtccgtcttgcgccggtccaagaatttcacctctagcggcgcaatacgaatgcccccggccgtccctcttaa

SEQ ID NO: 63591 - DNA, 120 bp, Homo sapiens
  misc_feature: 680 for SV(C|O) and 18S
aatggggttcaacgggttacccgcgcctgccggcgtagggtaggcacacgctgagccagtcagtgtagcgcgcgtgcagccccggacatctaagggcatcacagacctgttattgctcaa

SEQ ID NO: 63592 - DNA, 120 bp, Homo sapiens
  misc_feature: 680 for SV(C|O) and 18S
ttcgttcttgattaatgaaaacattcttggcaaatgctttcgctctggtccgtcttgcgccggtccaagaatttcacctctagcggcgcaatacgaatgcccccggccgtccctcttaat

SEQ ID NO: 63593 - DNA, 120 bp, Homo sapiens
  misc_feature: 680 for SV(C|O) and 18S
tcactacctccccgggtcgggagtgggtaatttgcgcgcctgctgccttccttggatgtggtagccgtttctcaggctccctctccggaatcgaaccctgattccccgtcacccgtggtc

SEQ ID NO: 63594 - DNA, 120 bp, Homo sapiens; identical to SEQ ID NO: 48078
  misc_feature: 680 for SV(C|O) and 18S

SEQ ID NO: 63595 - DNA, 120 bp, Homo sapiens; identical to SEQ ID NO: 48063
  misc_feature: 680 for SV(C|O) and 18S

SEQ ID NO: 63596 - DNA, 120 bp, Homo sapiens
  misc_feature: 680 for SV(C|O) and 18S
attgttatttttcgtcactacctccccgggtcgggagtgggtaatttgcgcgcctgctgccttccttggatgtggtagccgtttctcaggctccctctccggaatcgaaccctgattccc

SEQ ID NO: 63597 - DNA, 120 bp, Homo sapiens
  misc_feature: 680 for SV(C|O) and 18S
ctgctggcaccagacttgccctccaatggatcctcgttaaaggatttaaagtggactcattccaattacagggcctcgaaagagtcctgtattgttatttttcgtcactacctccccggg

SEQ ID NO: 63598 - DNA, 120 bp, Homo sapiens; identical to SEQ ID NO: 48529
  misc_feature: 679 for SV(C|O) and 18S

SEQ ID NO: 63599 - DNA, 120 bp, Homo sapiens; identical to SEQ ID NO: 47829
  misc_feature: 679 for SV(C|O) and 18S

SEQ ID NO: 63600 - DNA, 120 bp, Homo sapiens; identical to SEQ ID NO: 48161
  misc_feature: 679 for SV(C|O) and 18S

SEQ ID NO: 63601 - DNA, 120 bp, Homo sapiens; identical to SEQ ID NO: 48051
  misc_feature: 679 for SV(C|O) and 18S

SEQ ID NO: 63602 - DNA, 120 bp, Homo sapiens; identical to SEQ ID NO: 48448
  misc_feature: 679 for SV(C|O) and 18S

SEQ ID NO: 63603 - DNA, 120 bp, Homo sapiens
  misc_feature: 678 for SV(C|O) and 18S
ttacttcctctagatagtcaagttcgaccgtcttctcagcgctccgccagggccgtgggccgaccccggcggggccgatccgagggcctcactaaaccatccaatcggtagtagcgacgg

SEQ ID NO: 63604 - DNA, 120 bp, Homo sapiens; identical to SEQ ID NO: 48111
  misc_feature: 678 for SV(C|O) and 18S

SEQ ID NO: 63605 - DNA, 120 bp, Homo sapiens
  misc_feature: 678 for SV(C|O) and 18S
taaagttgctgcagttaaaaagctcgtagttggatcttgggagcgggcgggcggtccgccgcgaggcgagccaccgcccgtccccgccccttgcctctcggcgccccctcgatgctctta

SEQ ID NO: 63606 - DNA, 120 bp, Homo sapiens
  misc_feature: 678 for SV(C|O) and 18S
cgaatggggttcaacgggttacccgcgcctgccggcgtagggtaggcacacgctgagccagtcagtgtagcgcgcgtgcagccccggacatctaagggcatcacagacctgttattgctc

SEQ ID NO: 63607 - DNA, 120 bp, Homo sapiens
  misc_feature: 678 for SV(C|O) and 18S
catctaagggcatcacagacctgttattgctcaatctcgggtggctgaacgccacttgtccctctaagaagttgggggacgccgaccgctcgggggtcgcgtaactagttagcatgccag

SEQ ID NO: 63608 - DNA, 120 bp, Homo sapiens
  misc_feature: 678 for SV(C|O) and 18S
atcacgaatggggttcaacgggttacccgcgcctgccggcgtagggtaggcacacgctgagccagtcagtgtagcgcgcgtgcagccccggacatctaagggcatcacagacctgttatt

SEQ ID NO: 63609 - DNA, 120 bp, Homo sapiens; identical to SEQ ID NO: 48641
  misc_feature: 677 for SV(C|O) and 18S

SEQ ID NO: 63610 - DNA, 120 bp, Homo sapiens
  misc_feature: 677 for SV(C|O) and 18S
tgatgcccttagatgtccggggctgcacgcgcgctacactgactggctcagcgtgtgcctaccctacgccggcaggcgcgggtaacccgttgaaccccattcgtgatggggatcggggat

SEQ ID NO: 63611 - DNA, 120 bp, Homo sapiens; identical to SEQ ID NO: 48050
  misc_feature: 677 for SV(C|O) and 18S

SEQ ID NO: 63612 - DNA, 120 bp, Homo sapiens; identical to SEQ ID NO: 48706
  misc_feature: 677 for SV(C|O) and 18S

SEQ ID NO: 63613 - DNA, 120 bp, Homo sapiens
  misc_feature: 677 for SV(C|O) and 18S
ctccccgggtcgggagtgggtaatttgcgcgcctgctgccttccttggatgtggtagccgtttctcaggctccctctccggaatcgaaccctgattccccgtcacccgtggtcaccatgg

SEQ ID NO: 63614 - DNA, 120 bp, Homo sapiens; identical to SEQ ID NO: 48309
  misc_feature: 676 for SV(C|O) and 18S

SEQ ID NO: 63615 - DNA, 120 bp, Homo sapiens
  misc_feature: 676 for SV(C|O) and 18S
gtcactacctccccgggtcgggagtgggtaatttgcgcgcctgctgccttccttggatgtggtagccgtttctcaggctccctctccggaatcgaaccctgattccccgtcacccgtggt

SEQ ID NO: 63616 - DNA, 120 bp, Homo sapiens
  misc_feature: 676 for SV(C|O) and 18S
attaaagttgctgcagttaaaaagctcgtagttggatcttgggagcgggcgggcggtccgccgcgaggcgagccaccgcccgtccccgccccttgcctctcggcgccccctcgatgctct

SEQ ID NO: 63617 - DNA, 120 bp, Homo sapiens
  misc_feature: 676 for SV(C|O) and 18S
acgaatggggttcaacgggttacccgcgcctgccggcgtagggtaggcacacgctgagccagtcagtgtagcgcgcgtgcagccccggacatctaagggcatcacagacctgttattgct

SEQ ID NO: 63618 - DNA, 120 bp, Homo sapiens
  misc_feature: 675 for SV(C|O) and 18S
agagggacggccgggggcattcgtattgcgccgctagaggtgaaattcttggaccggcgcaagacggaccagagcgaaagcatttgccaagaatgttttcattaatcaagaacgaaagtc

SEQ ID NO: 63619 - DNA, 120 bp, Homo sapiens
  misc_feature: 675 for SV(C|O) and 18S
acctccccgggtcgggagtgggtaatttgcgcgcctgctgccttccttggatgtggtagccgtttctcaggctccctctccggaatcgaaccctgattccccgtcacccgtggtcaccat

SEQ ID NO: 63620 - DNA, 120 bp, Homo sapiens
  misc_feature: 674 for SV(C|O) and 18S
ttgttatttttcgtcactacctccccgggtcgggagtgggtaatttgcgcgcctgctgccttccttggatgtggtagccgtttctcaggctccctctccggaatcgaaccctgattcccc

SEQ ID NO: 63621 - DNA, 120 bp, Homo sapiens
  misc_feature: 674 for SV(C|O) and 18S
atctaagggcatcacagacctgttattgctcaatctcgggtggctgaacgccacttgtccctctaagaagttgggggacgccgaccgctcgggggtcgcgtaactagttagcatgccaga

SEQ ID NO: 63622 - DNA, 120 bp, Homo sapiens
  misc_feature: 674 for SV(C|O) and 18S
gtgatgcccttagatgtccggggctgcacgcgcgctacactgactggctcagcgtgtgcctaccctacgccggcaggcgcgggtaacccgttgaaccccattcgtgatggggatcgggga

SEQ ID NO: 63623 - DNA, 120 bp, Homo sapiens
  misc_feature: 674 for SV(C|O) and 18S
cctgtattgttatttttcgtcactacctccccgggtcgggagtgggtaatttgcgcgcctgctgccttccttggatgtggtagccgtttctcaggctccctctccggaatcgaaccctga

SEQ ID NO: 63624 - DNA, 120 bp, Homo sapiens
  misc_feature: 674 for SV(C|O) and 18S
tcaagttcgaccgtcttctcagcgctccgccagggccgtgggccgaccccggcggggccgatccgagggcctcactaaaccatccaatcggtagtagcgacgggcggtgtgtacaaaggg

SEQ ID NO: 63625 - DNA, 120 bp, Homo sapiens; identical to SEQ ID NO: 47967
  misc_feature: 674 for SV(C|O) and 18S

SEQ ID NO: 63626 - DNA, 120 bp, Homo sapiens
  misc_feature: 674 for SV(C|O) and 18S
ggggttcaacgggttacccgcgcctgccggcgtagggtaggcacacgctgagccagtcagtgtagcgcgcgtgcagccccggacatctaagggcatcacagacctgttattgctcaatct

SEQ ID NO: 63627 - DNA, 120 bp, Homo sapiens
  misc_feature: 674 for SV(C|O) and 18S
aagttgctgcagttaaaaagctcgtagttggatcttgggagcgggcgggcggtccgccgcgaggcgagccaccgcccgtccccgccccttgcctctcggcgccccctcgatgctcttagc

SEQ ID NO: 63628 - DNA, 120 bp, Homo sapiens; identical to SEQ ID NO: 47893
  misc_feature: 674 for SV(C|O) and 18S

SEQ ID NO: 63629 - DNA, 120 bp, Homo sapiens
  misc_feature: 673 for SV(C|O) and 18S
gcgaccaaaggaaccataactgatttaatgagccattcgcagtttcactgtaccggccgtgcgtacttagacatgcatggcttaatctttgagacaagcatatgctactggcaggatcaa

SEQ ID NO: 63630 - DNA, 120 bp, Homo sapiens
  misc_feature: 673 for SV(C|O) and 18S
tacctccccgggtcgggagtgggtaatttgcgcgcctgctgccttccttggatgtggtagccgtttctcaggctccctctccggaatcgaaccctgattccccgtcacccgtggtcacca

SEQ ID NO: 63631 - DNA, 120 bp, Homo sapiens
  misc_feature: 673 for SV(C|O) and 18S
acatctaagggcatcacagacctgttattgctcaatctcgggtggctgaacgccacttgtccctctaagaagttgggggacgccgaccgctcgggggtcgcgtaactagttagcatgcca

SEQ ID NO: 63632 - DNA, 120 bp, Homo sapiens
  misc_feature: 673 for SV(C|O) and 18S
tgctggcaccagacttgccctccaatggatcctcgttaaaggatttaaagtggactcattccaattacagggcctcgaaagagtcctgtattgttatttttcgtcactacctccccgggt

SEQ ID NO: 63633 - DNA, 120 bp, Homo sapiens
  misc_feature: 673 for SV(C|O) and 18S
ctttcgttcttgattaatgaaaacattcttggcaaatgctttcgctctggtccgtcttgcgccggtccaagaatttcacctctagcggcgcaatacgaatgcccccggccgtccctctta

SEQ ID NO: 63634 - DNA, 120 bp, Homo sapiens; identical to SEQ ID NO: 47870
  misc_feature: 673 for SV(C|O) and 18S

SEQ ID NO: 63635 - DNA, 120 bp, Homo sapiens; identical to SEQ ID NO: 47851
  misc_feature: 673 for SV(C|O) and 18S

SEQ ID NO: 63636 - DNA, 120 bp, Homo sapiens
  misc_feature: 673 for SV(C|O) and 18S
aaagttgctgcagttaaaaagctcgtagttggatcttgggagcgggcgggcggtccgccgcgaggcgagccaccgcccgtccccgccccttgcctctcggcgccccctcgatgctcttag

SEQ ID NO: 63637 - DNA, 120 bp, Homo sapiens; identical to SEQ ID NO: 47898
  misc_feature: 673 for SV(C|O) and 18S

SEQ ID NO: 63638 - DNA, 120 bp, Homo sapiens; identical to SEQ ID NO: 47876
  misc_feature: 672 for SV(C|O) and 18S

SEQ ID NO: 63639 - DNA, 120 bp, Homo sapiens; identical to SEQ ID NO: 47964
  misc_feature: 672 for SV(C|O) and 18S

SEQ ID NO: 63640 - DNA, 120 bp, Homo sapiens
  misc_feature: 672 for SV(C|O) and 18S
cttttacttcctctagatagtcaagttcgaccgtcttctcagcgctccgccagggccgtgggccgaccccggcggggccgatccgagggcctcactaaaccatccaatcggtagtagcga

SEQ ID NO: 63641 - DNA, 120 bp, Homo sapiens; identical to SEQ ID NO: 47934
  misc_feature: 672 for SV(C|O) and 18S

SEQ ID NO: 63642 - DNA, 120 bp, Homo sapiens
  misc_feature: 672 for SV(C|O) and 18S
cacgaatggggttcaacgggttacccgcgcctgccggcgtagggtaggcacacgctgagccagtcagtgtagcgcgcgtgcagccccggacatctaagggcatcacagacctgttattgc

SEQ ID NO: 63643 - DNA, 120 bp, Homo sapiens; identical to SEQ ID NO: 47814
  misc_feature: 672 for SV(C|O) and 18S

SEQ ID NO: 63644 - DNA, 120 bp, Homo sapiens
  misc_feature: 672 for SV(C|O) and 18S
cctccccgggtcgggagtgggtaatttgcgcgcctgctgccttccttggatgtggtagccgtttctcaggctccctctccggaatcgaaccctgattccccgtcacccgtggtcaccatg

SEQ ID NO: 63645 - DNA, 120 bp, Homo sapiens; identical to SEQ ID NO: 48372
  misc_feature: 672 for SV(C|O) and 18S

SEQ ID NO: 63646 - DNA, 120 bp, Homo sapiens; identical to SEQ ID NO: 47772
  misc_feature: 671 for SV(C|O) and 18S

SEQ ID NO: 63647 - DNA, 120 bp, Homo sapiens
  misc_feature: 671 for SV(C|O) and 18S
gtcaagttcgaccgtcttctcagcgctccgccagggccgtgggccgaccccggcggggccgatccgagggcctcactaaaccatccaatcggtagtagcgacgggcggtgtgtacaaagg

SEQ ID NO: 63648 - DNA, 120 bp, Homo sapiens; identical to SEQ ID NO: 48093
  misc_feature: 671 for SV(C|O) and 18S

SEQ ID NO: 63649 - DNA, 120 bp, Homo sapiens
  misc_feature: 671 for SV(C|O) and 18S
actttcgttcttgattaatgaaaacattcttggcaaatgctttcgctctggtccgtcttgcgccggtccaagaatttcacctctagcggcgcaatacgaatgcccccggccgtccctctt

SEQ ID NO: 63650 - DNA, 120 bp, Homo sapiens
  misc_feature: 670 for SV(C|O) and 18S
tgttatttttcgtcactacctccccgggtcgggagtgggtaatttgcgcgcctgctgccttccttggatgtggtagccgtttctcaggctccctctccggaatcgaaccctgattccccg

SEQ ID NO: 63651 - DNA, 120 bp, Homo sapiens; identical to SEQ ID NO: 47933
  misc_feature: 670 for SV(C|O) and 18S

SEQ ID NO: 63652 - DNA, 120 bp, Homo sapiens
  misc_feature: 670 for SV(C|O) and 18S
gatgcccttagatgtccggggctgcacgcgcgctacactgactggctcagcgtgtgcctaccctacgccggcaggcgcgggtaacccgttgaaccccattcgtgatggggatcggggatt

SEQ ID NO: 63653 - DNA, 120 bp, Homo sapiens
  misc_feature: 669 for SV(C|O) and 18S
tgttacgacttttacttcctctagatagtcaagttcgaccgtcttctcagcgctccgccagggccgtgggccgaccccggcggggccgatccgagggcctcactaaaccatccaatcggt

SEQ ID NO: 63654 - DNA, 120 bp, Homo sapiens
  misc_feature: 669 for SV(C|O) and 18S
tccccgggtcgggagtgggtaatttgcgcgcctgctgccttccttggatgtggtagccgtttctcaggctccctctccggaatcgaaccctgattccccgtcacccgtggtcaccatggt

SEQ ID NO: 63655 - DNA, 120 bp, Homo sapiens
  misc_feature: 669 for SV(C|O) and 18S
tcacgaatggggttcaacgggttacccgcgcctgccggcgtagggtaggcacacgctgagccagtcagtgtagcgcgcgtgcagccccggacatctaagggcatcacagacctgttattg

SEQ ID NO: 63656 - DNA, 120 bp, Homo sapiens; identical to SEQ ID NO: 47839
  misc_feature: 669 for SV(C|O) and 18S

SEQ ID NO: 63657 - DNA, 120 bp, Homo sapiens; identical to SEQ ID NO: 47865
  misc_feature: 669 for SV(C|O) and 18S

SEQ ID NO: 63658 - DNA, 120 bp, Homo sapiens; identical to SEQ ID NO: 48338
  misc_feature: 669 for SV(C|O) and 18S

SEQ ID NO: 63659 - DNA, 120 bp, Homo sapiens
  misc_feature: 668 for SV(C|O) and 18S
tttacttcctctagatagtcaagttcgaccgtcttctcagcgctccgccagggccgtgggccgaccccggcggggccgatccgagggcctcactaaaccatccaatcggtagtagcgacg

SEQ ID NO: 63660 - DNA, 120 bp, Homo sapiens; identical to SEQ ID NO: 47891
  misc_feature: 668 for SV(C|O) and 18S

SEQ ID NO: 63661 - DNA, 120 bp, Homo sapiens
  misc_feature: 668 for SV(C|O) and 18S
cgaccaaaggaaccataactgatttaatgagccattcgcagtttcactgtaccggccgtgcgtacttagacatgcatggcttaatctttgagacaagcatatgctactggcaggatcaac

SEQ ID NO: 63662 - DNA, 120 bp, Homo sapiens
  misc_feature: 668 for SV(C|O) and 18S
gaccaaaggaaccataactgatttaatgagccattcgcagtttcactgtaccggccgtgcgtacttagacatgcatggcttaatctttgagacaagcatatgctactggcaggatcaacc

SEQ ID NO: 63663 - DNA, 120 bp, Homo sapiens
  misc_feature: 668 for SV(C|O) and 18S
ctacctccccgggtcgggagtgggtaatttgcgcgcctgctgccttccttggatgtggtagccgtttctcaggctccctctccggaatcgaaccctgattccccgtcacccgtggtcacc

SEQ ID NO: 63664 - DNA, 120 bp, Homo sapiens
  misc_feature: 668 for SV(C|O) and 18S
gggttcaacgggttacccgcgcctgccggcgtagggtaggcacacgctgagccagtcagtgtagcgcgcgtgcagccccggacatctaagggcatcacagacctgttattgctcaatctc

SEQ ID NO: 63665 - DNA, 120 bp, Homo sapiens
  misc_feature: 668 for SV(C|O) and 18S
gctggcaccagacttgccctccaatggatcctcgttaaaggatttaaagtggactcattccaattacagggcctcgaaagagtcctgtattgttatttttcgtcactacctccccgggtc

SEQ ID NO: 63666 - DNA, 120 bp, Homo sapiens; identical to SEQ ID NO: 47884
  misc_feature: 668 for SV(C|O) and 18S

SEQ ID NO: 63667 - DNA, 120 bp, Homo sapiens
  misc_feature: 667 for SV(C|O) and 18S
tttttcaaagtaaacgcttcgggccccgcgggacactcagctaagagcatcgagggggcgccgagaggcaaggggcggggacgggcggtggctcgcctcgcggcggaccgcccgcccgct

SEQ ID NO: 63668 - DNA, 120 bp, Homo sapiens
  misc_feature: 667 for SV(C|O) and 18S
tggggttcaacgggttacccgcgcctgccggcgtagggtaggcacacgctgagccagtcagtgtagcgcgcgtgcagccccggacatctaagggcatcacagacctgttattgctcaatc

SEQ ID NO: 63669 - DNA, 120 bp, Homo sapiens
  misc_feature: 667 for SV(C|O) and 18S
tcgtcactacctccccgggtcgggagtgggtaatttgcgcgcctgctgccttccttggatgtggtagccgtttctcaggctccctctccggaatcgaaccctgattccccgtcacccgtg

SEQ ID NO: 63670 - DNA, 120 bp, Homo sapiens; identical to SEQ ID NO: 48575
  misc_feature: 667 for SV(C|O) and 18S

SEQ ID NO: 63671 - DNA, 120 bp, Homo sapiens
  misc_feature: 666 for SV(C|O) and 18S
ttgttacgacttttacttcctctagatagtcaagttcgaccgtcttctcagcgctccgccagggccgtgggccgaccccggcggggccgatccgagggcctcactaaaccatccaatcgg

SEQ ID NO: 63672 - DNA, 120 bp, Homo sapiens; identical to SEQ ID NO: 47998
  misc_feature: 666 for SV(C|O) and 18S

SEQ ID NO: 63673 - DNA, 120 bp, Homo sapiens
  misc_feature: 666 for SV(C|O) and 18S
ttcaacgggttacccgcgcctgccggcgtagggtaggcacacgctgagccagtcagtgtagcgcgcgtgcagccccggacatctaagggcatcacagacctgttattgctcaatctcggg

SEQ ID NO: 63674 - DNA, 120 bp, Homo sapiens; identical to SEQ ID NO: 47926
  misc_feature: 666 for SV(C|O) and 18S

SEQ ID NO: 63675 - DNA, 120 bp, Homo sapiens; identical to SEQ ID NO: 48668
  misc_feature: 666 for SV(C|O) and 18S

SEQ ID NO: 63676 - DNA, 120 bp, Homo sapiens
  misc_feature: 665 for SV(C|O) and 18S
agttatggttcctttggtcgctcgctcctctcctacttggataactgtggtaattctagagctaatacatgccgacgggcgctgacccccttcgcgggggggatgcgtgcatttatcaga

SEQ ID NO: 63677 - DNA, 120 bp, Homo sapiens
  misc_feature: 665 for SV(C|O) and 18S
gtcgtagttccgaccataaacgatgccgaccggcgatgcggcggcgttattcccatgacccgccgggcagcttccgggaaaccaaagtctttgggttccggggggagtatggttgcaaag

SEQ ID NO: 63678 - DNA, 120 bp, Homo sapiens
  misc_feature: 665 for SV(C|O) and 18S
ggttcaacgggttacccgcgcctgccggcgtagggtaggcacacgctgagccagtcagtgtagcgcgcgtgcagccccggacatctaagggcatcacagacctgttattgctcaatctcg

SEQ ID NO: 63679 - DNA, 120 bp, Homo sapiens; identical to SEQ ID NO: 47808
  misc_feature: 664 for SV(C|O) and 18S

SEQ ID NO: 63680 - DNA, 120 bp, Homo sapiens
  misc_feature: 664 for SV(C|O) and 18S
tcattaaatcagttatggttcctttggtcgctcgctcctctcctacttggataactgtggtaattctagagctaatacatgccgacgggcgctgacccccttcgcgggggggatgcgtgc

SEQ ID NO: 63681 - DNA, 120 bp, Homo sapiens
  misc_feature: 664 for SV(C|O) and 18S
ccccgggtcgggagtgggtaatttgcgcgcctgctgccttccttggatgtggtagccgtttctcaggctccctctccggaatcgaaccctgattccccgtcacccgtggtcaccatggta

SEQ ID NO: 63682 - DNA, 120 bp, Homo sapiens
  misc_feature: 664 for SV(C|O) and 18S
gttatggttcctttggtcgctcgctcctctcctacttggataactgtggtaattctagagctaatacatgccgacgggcgctgacccccttcgcgggggggatgcgtgcatttatcagat

SEQ ID NO: 63683 - DNA, 120 bp, Homo sapiens
  misc_feature: 664 for SV(C|O) and 18S
cgtcactacctccccgggtcgggagtgggtaatttgcgcgcctgctgccttccttggatgtggtagccgtttctcaggctccctctccggaatcgaaccctgattccccgtcacccgtgg

SEQ ID NO: 63684 - DNA, 120 bp, Homo sapiens
  misc_feature: 663 for SV(C|O) and 18S
tggctcattaaatcagttatggttcctttggtcgctcgctcctctcctacttggataactgtggtaattctagagctaatacatgccgacgggcgctgacccccttcgcgggggggatgc

SEQ ID NO: 63685 - DNA, 120 bp, Homo sapiens
  misc_feature: 662 for SV(C|O) and 18S
ccgtcgtagttccgaccataaacgatgccgaccggcgatgcggcggcgttattcccatgacccgccgggcagcttccgggaaaccaaagtctttgggttccggggggagtatggttgcaa

SEQ ID NO: 63686 - DNA, 120 bp, Homo sapiens; identical to SEQ ID NO: 47699
  misc_feature: 662 for SV(C|O) and 18S

SEQ ID NO: 63687 - DNA, 120 bp, Homo sapiens; identical to SEQ ID NO: 47862
  misc_feature: 662 for SV(C|O) and 18S

SEQ ID NO: 63688 - DNA, 120 bp, Homo sapiens
  misc_feature: 662 for SV(C|O) and 18S
tcagttatggttcctttggtcgctcgctcctctcctacttggataactgtggtaattctagagctaatacatgccgacgggcgctgacccccttcgcgggggggatgcgtgcatttatca

SEQ ID NO: 63689 - DNA, 120 bp, Homo sapiens
  misc_feature: 662 for SV(C|O) and 18S
gttcaacgggttacccgcgcctgccggcgtagggtaggcacacgctgagccagtcagtgtagcgcgcgtgcagccccggacatctaagggcatcacagacctgttattgctcaatctcgg

SEQ ID NO: 63690 - DNA, 120 bp, Homo sapiens
  misc_feature: 662 for SV(C|O) and 18S
actacctccccgggtcgggagtgggtaatttgcgcgcctgctgccttccttggatgtggtagccgtttctcaggctccctctccggaatcgaaccctgattccccgtcacccgtggtcac

SEQ ID NO: 63691 - DNA, 120 bp, Homo sapiens; identical to SEQ ID NO: 47883
  misc_feature: 662 for SV(C|O) and 18S

SEQ ID NO: 63692 - DNA, 120 bp, Homo sapiens; identical to SEQ ID NO: 47840
  misc_feature: 662 for SV(C|O) and 18S

SEQ ID NO: 63693 - DNA, 120 bp, Homo sapiens
  misc_feature: 662 for SV(C|O) and 18S
atcagttatggttcctttggtcgctcgctcctctcctacttggataactgtggtaattctagagctaatacatgccgacgggcgctgacccccttcgcgggggggatgcgtgcatttatc

SEQ ID NO: 63694 - DNA, 120 bp, Homo sapiens
  misc_feature: 661 for SV(C|O) and 18S
cgtcgtagttccgaccataaacgatgccgaccggcgatgcggcggcgttattcccatgacccgccgggcagcttccgggaaaccaaagtctttgggttccggggggagtatggttgcaaa

SEQ ID NO: 63695 - DNA, 120 bp, Homo sapiens
  misc_feature: 661 for SV(C|O) and 18S
accaaaggaaccataactgatttaatgagccattcgcagtttcactgtaccggccgtgcgtacttagacatgcatggcttaatctttgagacaagcatatgctactggcaggatcaacca

SEQ ID NO: 63696 - DNA, 120 bp, Homo sapiens
  misc_feature: 661 for SV(C|O) and 18S
ccaaaggaaccataactgatttaatgagccattcgcagtttcactgtaccggccgtgcgtacttagacatgcatggcttaatctttgagacaagcatatgctactggcaggatcaaccag

SEQ ID NO: 63697 - DNA, 120 bp, Homo sapiens; identical to SEQ ID NO: 47844
  misc_feature: 661 for SV(C|O) and 18S

SEQ ID NO: 63698 - DNA, 120 bp, Homo sapiens
  misc_feature: 660 for SV(C|O) and 18S
accgtcgtagttccgaccataaacgatgccgaccggcgatgcggcggcgttattcccatgacccgccgggcagcttccgggaaaccaaagtctttgggttccggggggagtatggttgca

SEQ ID NO: 63699 - DNA, 120 bp, Homo sapiens; identical to SEQ ID NO: 48418
  misc_feature: 660 for SV(C|O) and 18S

SEQ ID NO: 63700 - DNA, 120 bp, Homo sapiens
  misc_feature: 660 for SV(C|O) and 18S
ctcattaaatcagttatggttcctttggtcgctcgctcctctcctacttggataactgtggtaattctagagctaatacatgccgacgggcgctgacccccttcgcgggggggatgcgtg

SEQ ID NO: 63701 - DNA, 120 bp, Homo sapiens; identical to SEQ ID NO: 47805
  misc_feature: 660 for SV(C|O) and 18S

SEQ ID NO: 63702 - DNA, 120 bp, Homo sapiens
  misc_feature: 660 for SV(C|O) and 18S
aatcagttatggttcctttggtcgctcgctcctctcctacttggataactgtggtaattctagagctaatacatgccgacgggcgctgacccccttcgcgggggggatgcgtgcatttat

SEQ ID NO: 63703 - DNA, 120 bp, Homo sapiens
  misc_feature: 659 for SV(C|O) and 18S
ttatggttcctttggtcgctcgctcctctcctacttggataactgtggtaattctagagctaatacatgccgacgggcgctgacccccttcgcgggggggatgcgtgcatttatcagatc

SEQ ID NO: 63704 - DNA, 120 bp, Homo sapiens; identical to SEQ ID NO: 48507
  misc_feature: 659 for SV(C|O) and 18S

SEQ ID NO: 63705 - DNA, 120 bp, Homo sapiens
  misc_feature: 659 for SV(C|O) and 18S
tcgtagttccgaccataaacgatgccgaccggcgatgcggcggcgttattcccatgacccgccgggcagcttccgggaaaccaaagtctttgggttccggggggagtatggttgcaaagc

SEQ ID NO: 63706 - DNA, 120 bp, Homo sapiens; identical to SEQ ID NO: 47939
  misc_feature: 659 for SV(C|O) and 18S

SEQ ID NO: 63707 - DNA, 120 bp, Homo sapiens
  misc_feature: 659 for SV(C|O) and 18S
caaaggaaccataactgatttaatgagccattcgcagtttcactgtaccggccgtgcgtacttagacatgcatggcttaatctttgagacaagcatatgctactggcaggatcaaccagg

SEQ ID NO: 63708 - DNA, 120 bp, Homo sapiens; identical to SEQ ID NO: 47947
  misc_feature: 659 for SV(C|O) and 18S

SEQ ID NO: 63709 - DNA, 120 bp, Homo sapiens
  misc_feature: 658 for SV(C|O) and 18S
ggctcattaaatcagttatggttcctttggtcgctcgctcctctcctacttggataactgtggtaattctagagctaatacatgccgacgggcgctgacccccttcgcgggggggatgcg

SEQ ID NO: 63710 - DNA, 120 bp, Homo sapiens; identical to SEQ ID NO: 48014
  misc_feature: 658 for SV(C|O) and 18S

SEQ ID NO: 63711 - DNA, 120 bp, Homo sapiens; identical to SEQ ID NO: 48071
  misc_feature: 657 for SV(C|O) and 18S

SEQ ID NO: 63712 - DNA, 120 bp, Homo sapiens; identical to SEQ ID NO: 47915
  misc_feature: 657 for SV(C|O) and 18S

SEQ ID NO: 63713 - DNA, 120 bp, Homo sapiens
  misc_feature: 656 for SV(C|O) and 18S
gggtcgggagtgggtaatttgcgcgcctgctgccttccttggatgtggtagccgtttctcaggctccctctccggaatcgaaccctgattccccgtcacccgtggtcaccatggtaggca

SEQ ID NO: 63714 - DNA, 120 bp, Homo sapiens
  misc_feature: 656 for SV(C|O) and 18S
tatggttcctttggtcgctcgctcctctcctacttggataactgtggtaattctagagctaatacatgccgacgggcgctgacccccttcgcgggggggatgcgtgcatttatcagatca

SEQ ID NO: 63715 - DNA, 120 bp, Homo sapiens
  misc_feature: 656 for SV(C|O) and 18S
tcctgtattgttatttttcgtcactacctccccgggtcgggagtgggtaatttgcgcgcctgctgccttccttggatgtggtagccgtttctcaggctccctctccggaatcgaaccctg

SEQ ID NO: 63716 - DNA, 120 bp, Homo sapiens
  misc_feature: 656 for SV(C|O) and 18S
cagttatggttcctttggtcgctcgctcctctcctacttggataactgtggtaattctagagctaatacatgccgacgggcgctgacccccttcgcgggggggatgcgtgcatttatcag

SEQ ID NO: 63717 - DNA, 120 bp, Homo sapiens
  misc_feature: 654 for SV(C|O) and 18S
tattaaagttgctgcagttaaaaagctcgtagttggatcttgggagcgggcgggcggtccgccgcgaggcgagccaccgcccgtccccgccccttgcctctcggcgccccctcgatgctc

SEQ ID NO: 63718 - DNA, 120 bp, Homo sapiens; identical to SEQ ID NO: 47888
  misc_feature: 654 for SV(C|O) and 18S

SEQ ID NO: 63719 - DNA, 120 bp, Homo sapiens; identical to SEQ ID NO: 47949
  misc_feature: 653 for SV(C|O) and 18S

SEQ ID NO: 63720 - DNA, 120 bp, Homo sapiens; identical to SEQ ID NO: 47768
  misc_feature: 653 for SV(C|O) and 18S

SEQ ID NO: 63721 - DNA, 120 bp, Homo sapiens; identical to SEQ ID NO: 47701
  misc_feature: 653 for SV(C|O) and 18S

SEQ ID NO: 63722 - DNA, 120 bp, Homo sapiens; identical to SEQ ID NO: 47697
  misc_feature: 653 for SV(C|O) and 18S

SEQ ID NO: 63723 - DNA, 120 bp, Homo sapiens; identical to SEQ ID NO: 47702
  misc_feature: 653 for SV(C|O) and 18S

SEQ ID NO: 63724 - DNA, 120 bp, Homo sapiens; identical to SEQ ID NO: 47872
  misc_feature: 652 for SV(C|O) and 18S

SEQ ID NO: 63725 - DNA, 120 bp, Homo sapiens; identical to SEQ ID NO: 48110
  misc_feature: 652 for SV(C|O) and 18S

SEQ ID NO: 63726 - DNA, 120 bp, Homo sapiens; identical to SEQ ID NO: 47895
  misc_feature: 652 for SV(C|O) and 18S

SEQ ID NO: 63727 - DNA, 120 bp, Homo sapiens
  misc_feature: 652 for SV(C|O) and 18S
tcaacgggttacccgcgcctgccggcgtagggtaggcacacgctgagccagtcagtgtagcgcgcgtgcagccccggacatctaagggcatcacagacctgttattgctcaatctcgggt

SEQ ID NO: 63728 - DNA, 120 bp, Homo sapiens
  misc_feature: 652 for SV(C|O) and 18S
gtcctgtattgttatttttcgtcactacctccccgggtcgggagtgggtaatttgcgcgcctgctgccttccttggatgtggtagccgtttctcaggctccctctccggaatcgaaccct

SEQ ID NO: 63729 - DNA, 120 bp, Homo sapiens
  misc_feature: 652 for SV(C|O) and 18S
gggcgggcggtccgccgcgaggcgagccaccgcccgtccccgccccttgcctctcggcgccccctcgatgctcttagctgagtgtcccgcggggcccgaagcgtttactttgaaaaaatt

SEQ ID NO: 63730 - DNA, 120 bp, Homo sapiens
  misc_feature: 652 for SV(C|O) and 18S
cccgggtcgggagtgggtaatttgcgcgcctgctgccttccttggatgtggtagccgtttctcaggctccctctccggaatcgaaccctgattccccgtcacccgtggtcaccatggtag

SEQ ID NO: 63731 - DNA, 120 bp, Homo sapiens; identical to SEQ ID NO: 47905
  misc_feature: 652 for SV(C|O) and 18S

SEQ ID NO: 63732 - DNA, 120 bp, Homo sapiens; identical to SEQ ID NO: 47953
  misc_feature: 651 for SV(C|O) and 18S

SEQ ID NO: 63733 - DNA, 120 bp, Homo sapiens; identical to SEQ ID NO: 48018
  misc_feature: 651 for SV(C|O) and 18S

SEQ ID NO: 63734 - DNA, 120 bp, Homo sapiens
  misc_feature: 651 for SV(C|O) and 18S
aatggctcattaaatcagttatggttcctttggtcgctcgctcctctcctacttggataactgtggtaattctagagctaatacatgccgacgggcgctgacccccttcgcgggggggat

SEQ ID NO: 63735 - DNA, 120 bp, Homo sapiens
  misc_feature: 650 for SV(C|O) and 18S
gttcctttggtcgctcgctcctctcctacttggataactgtggtaattctagagctaatacatgccgacgggcgctgacccccttcgcgggggggatgcgtgcatttatcagatcaaaac

SEQ ID NO: 63736 - DNA, 120 bp, Homo sapiens
  misc_feature: 650 for SV(C|O) and 18S
gctcattaaatcagttatggttcctttggtcgctcgctcctctcctacttggataactgtggtaattctagagctaatacatgccgacgggcgctgacccccttcgcgggggggatgcgt

SEQ ID NO: 63737 - DNA, 120 bp, Homo sapiens
  misc_feature: 650 for SV(C|O) and 18S
gagggacggccgggggcattcgtattgcgccgctagaggtgaaattcttggaccggcgcaagacggaccagagcgaaagcatttgccaagaatgttttcattaatcaagaacgaaagtcg

SEQ ID NO: 63738 - DNA, 120 bp, Homo sapiens
  misc_feature: 650 for SV(C|O) and 18S
ctgactggctcagcgtgtgcctaccctacgccggcaggcgcgggtaacccgttgaaccccattcgtgatggggatcggggattgcaattattccccatgaacgaggaattcccagtaagt

SEQ ID NO: 63739 - DNA, 120 bp, Homo sapiens
  misc_feature: 650 for SV(C|O) and 18S
cgtagttccgaccataaacgatgccgaccggcgatgcggcggcgttattcccatgacccgccgggcagcttccgggaaaccaaagtctttgggttccggggggagtatggttgcaaagct

SEQ ID NO: 63740 - DNA, 120 bp, Homo sapiens
  misc_feature: 650 for SV(C|O) and 18S
caccacccacggaatcgagaaagagctatcaatctgtcaatcctgtccgtgtccgggccgggtgaggtttcccgtgttgagtcaaattaagccgcaggctccactcctggtggtgccctt

SEQ ID NO: 63741 - DNA, 120 bp, Homo sapiens; identical to SEQ ID NO: 48082
  misc_feature: 649 for SV(C|O) and 18S

SEQ ID NO: 63742 - DNA, 120 bp, Homo sapiens; identical to SEQ ID NO: 47873
  misc_feature: 649 for SV(C|O) and 18S

SEQ ID NO: 63743 - DNA, 120 bp, Homo sapiens
  misc_feature: 649 for SV(C|O) and 18S
ggtcgggagtgggtaatttgcgcgcctgctgccttccttggatgtggtagccgtttctcaggctccctctccggaatcgaaccctgattccccgtcacccgtggtcaccatggtaggcac

SEQ ID NO: 63744 - DNA, 120 bp, Homo sapiens; identical to SEQ ID NO: 48001
  misc_feature: 649 for SV(C|O) and 18S

SEQ ID NO: 63745 - DNA, 120 bp, Homo sapiens; identical to SEQ ID NO: 47992
  misc_feature: 649 for SV(C|O) and 18S

SEQ ID NO: 63746 - DNA, 120 bp, Homo sapiens; identical to SEQ ID NO: 47713
  misc_feature: 649 for SV(C|O) and 18S

SEQ ID NO: 63747 - DNA, 120 bp, Homo sapiens
  misc_feature: 649 for SV(C|O) and 18S
ccaccacccacggaatcgagaaagagctatcaatctgtcaatcctgtccgtgtccgggccgggtgaggtttcccgtgttgagtcaaattaagccgcaggctccactcctggtggtgccct

SEQ ID NO: 63748 - DNA, 120 bp, Homo sapiens
  misc_feature: 649 for SV(C|O) and 18S
atggctcattaaatcagttatggttcctttggtcgctcgctcctctcctacttggataactgtggtaattctagagctaatacatgccgacgggcgctgacccccttcgcgggggggatg

SEQ ID NO: 63749 - DNA, 120 bp, Homo sapiens
  misc_feature: 648 for SV(C|O) and 18S
cactgactggctcagcgtgtgcctaccctacgccggcaggcgcgggtaacccgttgaaccccattcgtgatggggatcggggattgcaattattccccatgaacgaggaattcccagtaa

SEQ ID NO: 63750 - DNA, 120 bp, Homo sapiens; identical to SEQ ID NO: 48044
  misc_feature: 648 for SV(C|O) and 18S

SEQ ID NO: 63751 - DNA, 120 bp, Homo sapiens; identical to SEQ ID NO: 48150
  misc_feature: 648 for SV(C|O) and 18S

SEQ ID NO: 63752 - DNA, 120 bp, Homo sapiens; identical to SEQ ID NO: 48305
  misc_feature: 647 for SV(C|O) and 18S

SEQ ID NO: 63753 - DNA, 120 bp, Homo sapiens
  misc_feature: 647 for SV(C|O) and 18S
ttcctttggtcgctcgctcctctcctacttggataactgtggtaattctagagctaatacatgccgacgggcgctgacccccttcgcgggggggatgcgtgcatttatcagatcaaaacc

SEQ ID NO: 63754 - DNA, 120 bp, Homo sapiens; identical to SEQ ID NO: 47976
  misc_feature: 647 for SV(C|O) and 18S

SEQ ID NO: 63755 - DNA, 120 bp, Homo sapiens
  misc_feature: 647 for SV(C|O) and 18S
acactgactggctcagcgtgtgcctaccctacgccggcaggcgcgggtaacccgttgaaccccattcgtgatggggatcggggattgcaattattccccatgaacgaggaattcccagta

SEQ ID NO: 63756 - DNA, 120 bp, Homo sapiens
  misc_feature: 647 for SV(C|O) and 18S
gtcgggagtgggtaatttgcgcgcctgctgccttccttggatgtggtagccgtttctcaggctccctctccggaatcgaaccctgattccccgtcacccgtggtcaccatggtaggcacg

SEQ ID NO: 63757 - DNA, 120 bp, Homo sapiens
  misc_feature: 647 for SV(C|O) and 18S
gggaataacgccgccgcatcgccggtcggcatcgtttatggtcggaactacgacggtatctgatcgtcttcgaacctccgactttcgttcttgattaatgaaaacattcttggcaaatgc

SEQ ID NO: 63758 - DNA, 120 bp, Homo sapiens; identical to SEQ ID NO: 48162
  misc_feature: 647 for SV(C|O) and 18S

SEQ ID NO: 63759 - DNA, 120 bp, Homo sapiens
  misc_feature: 646 for SV(C|O) and 18S
ggttcctttggtcgctcgctcctctcctacttggataactgtggtaattctagagctaatacatgccgacgggcgctgacccccttcgcgggggggatgcgtgcatttatcagatcaaaa

SEQ ID NO: 63760 - DNA, 120 bp, Homo sapiens; identical to SEQ ID NO: 48043
  misc_feature: 646 for SV(C|O) and 18S

SEQ ID NO: 63761 - DNA, 120 bp, Homo sapiens
  misc_feature: 646 for SV(C|O) and 18S
tgactggctcagcgtgtgcctaccctacgccggcaggcgcgggtaacccgttgaaccccattcgtgatggggatcggggattgcaattattccccatgaacgaggaattcccagtaagtg

SEQ ID NO: 63762 - DNA, 120 bp, Homo sapiens; identical to SEQ ID NO: 47695
  misc_feature: 646 for SV(C|O) and 18S

SEQ ID NO: 63763 - DNA, 120 bp, Homo sapiens
  misc_feature: 646 for SV(C|O) and 18S
ggccgggggcattcgtattgcgccgctagaggtgaaattcttggaccggcgcaagacggaccagagcgaaagcatttgccaagaatgttttcattaatcaagaacgaaagtcggaggttc

SEQ ID NO: 63764 - DNA, 120 bp, Homo sapiens; identical to SEQ ID NO: 47908
  misc_feature: 646 for SV(C|O) and 18S

SEQ ID NO: 63765 - DNA, 120 bp, Homo sapiens; identical to SEQ ID NO: 48596
  misc_feature: 646 for SV(C|O) and 18S

SEQ ID NO: 63766 - DNA, 120 bp, Homo sapiens
  misc_feature: 646 for SV(C|O) and 18S
ccgggtcgggagtgggtaatttgcgcgcctgctgccttccttggatgtggtagccgtttctcaggctccctctccggaatcgaaccctgattccccgtcacccgtggtcaccatggtagg

SEQ ID NO: 63767 - DNA, 120 bp, Homo sapiens
  misc_feature: 646 for SV(C|O) and 18S
aaatcgctccaccaactaagaacggccatgcaccaccacccacggaatcgagaaagagctatcaatctgtcaatcctgtccgtgtccgggccgggtgaggtttcccgtgttgagtcaaat

SEQ ID NO: 63768 - DNA, 120 bp, Homo sapiens
  misc_feature: 646 for SV(C|O) and 18S
aatcgctccaccaactaagaacggccatgcaccaccacccacggaatcgagaaagagctatcaatctgtcaatcctgtccgtgtccgggccgggtgaggtttcccgtgttgagtcaaatt

SEQ ID NO: 63769 - DNA, 120 bp, Homo sapiens; identical to SEQ ID NO: 47827
  misc_feature: 645 for SV(C|O) and 18S

SEQ ID NO: 63770 - DNA, 120 bp, Homo sapiens; identical to SEQ ID NO: 47921
  misc_feature: 645 for SV(C|O) and 18S

SEQ ID NO: 63771 - DNA, 120 bp, Homo sapiens
  misc_feature: 645 for SV(C|O) and 18S
agtcctgtattgttatttttcgtcactacctccccgggtcgggagtgggtaatttgcgcgcctgctgccttccttggatgtggtagccgtttctcaggctccctctccggaatcgaaccc

SEQ ID NO: 63772 - DNA, 120 bp, Homo sapiens; identical to SEQ ID NO: 48042
  misc_feature: 644 for SV(C|O) and 18S

SEQ ID NO: 63773 - DNA, 120 bp, Homo sapiens
  misc_feature: 644 for SV(C|O) and 18S
tacactgactggctcagcgtgtgcctaccctacgccggcaggcgcgggtaacccgttgaaccccattcgtgatggggatcggggattgcaattattccccatgaacgaggaattcccagt

SEQ ID NO: 63774 - DNA, 120 bp, Homo sapiens; identical to SEQ ID NO: 47825
  misc_feature: 644 for SV(C|O) and 18S

SEQ ID NO: 63775 - DNA, 120 bp, Homo sapiens
  misc_feature: 644 for SV(C|O) and 18S
aaaggaaccataactgatttaatgagccattcgcagtttcactgtaccggccgtgcgtacttagacatgcatggcttaatctttgagacaagcatatgctactggcaggatcaaccaggt

SEQ ID NO: 63776 - DNA, 120 bp, Homo sapiens
  misc_feature: 643 for SV(C|O) and 18S
tcctttggtcgctcgctcctctcctacttggataactgtggtaattctagagctaatacatgccgacgggcgctgacccccttcgcgggggggatgcgtgcatttatcagatcaaaacca

SEQ ID NO: 63777 - DNA, 120 bp, Homo sapiens
  misc_feature: 643 for SV(C|O) and 18S
gtagttccgaccataaacgatgccgaccggcgatgcggcggcgttattcccatgacccgccgggcagcttccgggaaaccaaagtctttgggttccggggggagtatggttgcaaagctg

SEQ ID NO: 63778 - DNA, 120 bp, Homo sapiens; identical to SEQ ID NO: 48064
  misc_feature: 643 for SV(C|O) and 18S

SEQ ID NO: 63779 - DNA, 120 bp, Homo sapiens
  misc_feature: 643 for SV(C|O) and 18S
ggggggcgtgcgatcggcccgaggttatctagagtcaccaaagccgccggcgcccgccccccggccggggccggagaggggctgaccgggttggttttgatctgataaatgcacgcatcc

SEQ ID NO: 63780 - DNA, 120 bp, Homo sapiens
  misc_feature: 643 for SV(C|O) and 18S
cgaatggctcattaaatcagttatggttcctttggtcgctcgctcctctcctacttggataactgtggtaattctagagctaatacatgccgacgggcgctgacccccttcgcggggggg

SEQ ID NO: 63781 - DNA, 120 bp, Homo sapiens
  misc_feature: 642 for SV(C|O) and 18S
atggttcctttggtcgctcgctcctctcctacttggataactgtggtaattctagagctaatacatgccgacgggcgctgacccccttcgcgggggggatgcgtgcatttatcagatcaa

SEQ ID NO: 63782 - DNA, 120 bp, Homo sapiens; identical to SEQ ID NO: 48177
  misc_feature: 642 for SV(C|O) and 18S

SEQ ID NO: 63783 - DNA, 120 bp, Homo sapiens
  misc_feature: 642 for SV(C|O) and 18S
gaatggctcattaaatcagttatggttcctttggtcgctcgctcctctcctacttggataactgtggtaattctagagctaatacatgccgacgggcgctgacccccttcgcggggggga

SEQ ID NO: 63784 - DNA, 120 bp, Homo sapiens; identical to SEQ ID NO: 47991
  misc_feature: 642 for SV(C|O) and 18S

SEQ ID NO: 63785 - DNA, 120 bp, Homo sapiens; identical to SEQ ID NO: 47692
  misc_feature: 642 for SV(C|O) and 18S

SEQ ID NO: 63786 - DNA, 120 bp, Homo sapiens; identical to SEQ ID NO: 47868
  misc_feature: 642 for SV(C|O) and 18S

SEQ ID NO: 63787 - DNA, 120 bp, Homo sapiens
  misc_feature: 642 for SV(C|O) and 18S
agggacggccgggggcattcgtattgcgccgctagaggtgaaattcttggaccggcgcaagacggaccagagcgaaagcatttgccaagaatgttttcattaatcaagaacgaaagtcgg

SEQ ID NO: 63788 - DNA, 120 bp, Homo sapiens
  misc_feature: 641 for SV(C|O) and 18S
ttcttggaccggcgcaagacggaccagagcgaaagcatttgccaagaatgttttcattaatcaagaacgaaagtcggaggttcgaagacgatcagataccgtcgtagttccgaccataaa

SEQ ID NO: 63789 - DNA, 120 bp, Homo sapiens
  misc_feature: 641 for SV(C|O) and 18S
cctttggtcgctcgctcctctcctacttggataactgtggtaattctagagctaatacatgccgacgggcgctgacccccttcgcgggggggatgcgtgcatttatcagatcaaaaccaa

SEQ ID NO: 63790 - DNA, 120 bp, Homo sapiens
  misc_feature: 641 for SV(C|O) and 18S
actgactggctcagcgtgtgcctaccctacgccggcaggcgcgggtaacccgttgaaccccattcgtgatggggatcggggattgcaattattccccatgaacgaggaattcccagtaag

SEQ ID NO: 63791 - DNA, 120 bp, Homo sapiens; identical to SEQ ID NO: 47889
  misc_feature: 640 for SV(C|O) and 18S

SEQ ID NO: 63792 - DNA, 120 bp, Homo sapiens; identical to SEQ ID NO: 47877
  misc_feature: 640 for SV(C|O) and 18S

SEQ ID NO: 63793 - DNA, 120 bp, Homo sapiens
  misc_feature: 640 for SV(C|O) and 18S
ggcgtgcgatcggcccgaggttatctagagtcaccaaagccgccggcgcccgccccccggccggggccggagaggggctgaccgggttggttttgatctgataaatgcacgcatcccccc

SEQ ID NO: 63794 - DNA, 120 bp, Homo sapiens
  misc_feature: 640 for SV(C|O) and 18S
gggggcgtgcgatcggcccgaggttatctagagtcaccaaagccgccggcgcccgccccccggccggggccggagaggggctgaccgggttggttttgatctgataaatgcacgcatccc

SEQ ID NO: 63795 - DNA, 120 bp, Homo sapiens
  misc_feature: 640 for SV(C|O) and 18S
ggggcgtgcgatcggcccgaggttatctagagtcaccaaagccgccggcgcccgccccccggccggggccggagaggggctgaccgggttggttttgatctgataaatgcacgcatcccc

SEQ ID NO: 63796 - DNA, 120 bp, Homo sapiens
  misc_feature: 640 for SV(C|O) and 18S
accaccacccacggaatcgagaaagagctatcaatctgtcaatcctgtccgtgtccgggccgggtgaggtttcccgtgttgagtcaaattaagccgcaggctccactcctggtggtgccc

SEQ ID NO: 63797 - DNA, 120 bp, Homo sapiens; identical to SEQ ID NO: 48268
  misc_feature: 640 for SV(C|O) and 18S

SEQ ID NO: 63798 - DNA, 120 bp, Homo sapiens; identical to SEQ ID NO: 48592
  misc_feature: 640 for SV(C|O) and 18S

SEQ ID NO: 63799 - DNA, 120 bp, Homo sapiens; identical to SEQ ID NO: 48205
  misc_feature: 640 for SV(C|O) and 18S

SEQ ID NO: 63800 - DNA, 120 bp, Homo sapiens; identical to SEQ ID NO: 47886
  misc_feature: 639 for SV(C|O) and 18S

SEQ ID NO: 63801 - DNA, 120 bp, Homo sapiens; identical to SEQ ID NO: 48334
  misc_feature: 639 for SV(C|O) and 18S

SEQ ID NO: 63802 - DNA, 120 bp, Homo sapiens
  misc_feature: 639 for SV(C|O) and 18S
aactacgacggtatctgatcgtcttcgaacctccgactttcgttcttgattaatgaaaacattcttggcaaatgctttcgctctggtccgtcttgcgccggtccaagaatttcacctcta

SEQ ID NO: 63803 - DNA, 120 bp, Homo sapiens
  misc_feature: 639 for SV(C|O) and 18S
ggcgggcggtccgccgcgaggcgagccaccgcccgtccccgccccttgcctctcggcgccccctcgatgctcttagctgagtgtcccgcggggcccgaagcgtttactttgaaaaaatta

SEQ ID NO: 63804 - DNA, 120 bp, Homo sapiens
  misc_feature: 639 for SV(C|O) and 18S
gggcgtgcgatcggcccgaggttatctagagtcaccaaagccgccggcgcccgccccccggccggggccggagaggggctgaccgggttggttttgatctgataaatgcacgcatccccc

SEQ ID NO: 63805 - DNA, 120 bp, Homo sapiens
  misc_feature: 639 for SV(C|O) and 18S
gacatctaagggcatcacagacctgttattgctcaatctcgggtggctgaacgccacttgtccctctaagaagttgggggacgccgaccgctcgggggtcgcgtaactagttagcatgcc

SEQ ID NO: 63806 - DNA, 120 bp, Homo sapiens; identical to SEQ ID NO: 48039
  misc_feature: 639 for SV(C|O) and 18S

SEQ ID NO: 63807 - DNA, 120 bp, Homo sapiens
  misc_feature: 639 for SV(C|O) and 18S
gaactacgacggtatctgatcgtcttcgaacctccgactttcgttcttgattaatgaaaacattcttggcaaatgctttcgctctggtccgtcttgcgccggtccaagaatttcacctct

SEQ ID NO: 63808 - DNA, 120 bp, Homo sapiens; identical to SEQ ID NO: 47845
  misc_feature: 639 for SV(C|O) and 18S

SEQ ID NO: 63809 - DNA, 120 bp, Homo sapiens; identical to SEQ ID NO: 48142
  misc_feature: 638 for SV(C|O) and 18S

SEQ ID NO: 63810 - DNA, 120 bp, Homo sapiens
  misc_feature: 638 for SV(C|O) and 18S
gggacggccgggggcattcgtattgcgccgctagaggtgaaattcttggaccggcgcaagacggaccagagcgaaagcatttgccaagaatgttttcattaatcaagaacgaaagtcgga

SEQ ID NO: 63811 - DNA, 120 bp, Homo sapiens; identical to SEQ ID NO: 48087
  misc_feature: 638 for SV(C|O) and 18S

SEQ ID NO: 63812 - DNA, 120 bp, Homo sapiens
  misc_feature: 638 for SV(C|O) and 18S
cgggtcgggagtgggtaatttgcgcgcctgctgccttccttggatgtggtagccgtttctcaggctccctctccggaatcgaaccctgattccccgtcacccgtggtcaccatggtaggc

SEQ ID NO: 63813 - DNA, 120 bp, Homo sapiens
  misc_feature: 638 for SV(C|O) and 18S
gactggctcagcgtgtgcctaccctacgccggcaggcgcgggtaacccgttgaaccccattcgtgatggggatcggggattgcaattattccccatgaacgaggaattcccagtaagtgc

SEQ ID NO: 63814 - DNA, 120 bp, Homo sapiens; identical to SEQ ID NO: 48163
  misc_feature: 638 for SV(C|O) and 18S

SEQ ID NO: 63815 - DNA, 120 bp, Homo sapiens
  misc_feature: 638 for SV(C|O) and 18S
caacgggttacccgcgcctgccggcgtagggtaggcacacgctgagccagtcagtgtagcgcgcgtgcagccccggacatctaagggcatcacagacctgttattgctcaatctcgggtg

SEQ ID NO: 63816 - DNA, 120 bp, Homo sapiens
  misc_feature: 637 for SV(C|O) and 18S
tggttcctttggtcgctcgctcctctcctacttggataactgtggtaattctagagctaatacatgccgacgggcgctgacccccttcgcgggggggatgcgtgcatttatcagatcaaa

SEQ ID NO: 63817 - DNA, 120 bp, Homo sapiens
  misc_feature: 637 for SV(C|O) and 18S
caaatcgctccaccaactaagaacggccatgcaccaccacccacggaatcgagaaagagctatcaatctgtcaatcctgtccgtgtccgggccgggtgaggtttcccgtgttgagtcaaa

SEQ ID NO: 63818 - DNA, 120 bp, Homo sapiens
  misc_feature: 637 for SV(C|O) and 18S
ggaactacgacggtatctgatcgtcttcgaacctccgactttcgttcttgattaatgaaaacattcttggcaaatgctttcgctctggtccgtcttgcgccggtccaagaatttcacctc

SEQ ID NO: 63819 - DNA, 120 bp, Homo sapiens; identical to SEQ ID NO: 47935
  misc_feature: 637 for SV(C|O) and 18S

SEQ ID NO: 63820 - DNA, 120 bp, Homo sapiens; identical to SEQ ID NO: 47997
  misc_feature: 637 for SV(C|O) and 18S

SEQ ID NO: 63821 - DNA, 120 bp, Homo sapiens; identical to SEQ ID NO: 48030
  misc_feature: 636 for SV(C|O) and 18S

SEQ ID NO: 63822 - DNA, 120 bp, Homo sapiens; identical to SEQ ID NO: 47874
  misc_feature: 636 for SV(C|O) and 18S

SEQ ID NO: 63823 - DNA, 120 bp, Homo sapiens; identical to SEQ ID NO: 48504
  misc_feature: 636 for SV(C|O) and 18S

SEQ ID NO: 63824 - DNA, 120 bp, Homo sapiens
  misc_feature: 636 for SV(C|O) and 18S
tatattaaagttgctgcagttaaaaagctcgtagttggatcttgggagcgggcgggcggtccgccgcgaggcgagccaccgcccgtccccgccccttgcctctcggcgccccctcgatgc

SEQ ID NO: 63825 - DNA, 120 bp, Homo sapiens; identical to SEQ ID NO: 47914
  misc_feature: 636 for SV(C|O) and 18S

SEQ ID NO: 63826 - DNA, 120 bp, Homo sapiens; identical to SEQ ID NO: 47712
  misc_feature: 636 for SV(C|O) and 18S

SEQ ID NO: 63827 - DNA, 120 bp, Homo sapiens
  misc_feature: 636 for SV(C|O) and 18S
accacccacggaatcgagaaagagctatcaatctgtcaatcctgtccgtgtccgggccgggtgaggtttcccgtgttgagtcaaattaagccgcaggctccactcctggtggtgcccttc

SEQ ID NO: 63828 - DNA, 120 bp, Homo sapiens; identical to SEQ ID NO: 48426
  misc_feature: 636 for SV(C|O) and 18S

SEQ ID NO: 63829 - DNA, 120 bp, Homo sapiens
  misc_feature: 636 for SV(C|O) and 18S
atattaaagttgctgcagttaaaaagctcgtagttggatcttgggagcgggcgggcggtccgccgcgaggcgagccaccgcccgtccccgccccttgcctctcggcgccccctcgatgct

SEQ ID NO: 63830 - DNA, 120 bp, Homo sapiens; identical to SEQ ID NO: 48107
  misc_feature: 636 for SV(C|O) and 18S

SEQ ID NO: 63831 - DNA, 120 bp, Homo sapiens
  misc_feature: 635 for SV(C|O) and 18S
gagtcctgtattgttatttttcgtcactacctccccgggtcgggagtgggtaatttgcgcgcctgctgccttccttggatgtggtagccgtttctcaggctccctctccggaatcgaacc

SEQ ID NO: 63832 - DNA, 120 bp, Homo sapiens
  misc_feature: 635 for SV(C|O) and 18S
ggacggccgggggcattcgtattgcgccgctagaggtgaaattcttggaccggcgcaagacggaccagagcgaaagcatttgccaagaatgttttcattaatcaagaacgaaagtcggag

SEQ ID NO: 63833 - DNA, 120 bp, Homo sapiens
  misc_feature: 635 for SV(C|O) and 18S
ggaataacgccgccgcatcgccggtcggcatcgtttatggtcggaactacgacggtatctgatcgtcttcgaacctccgactttcgttcttgattaatgaaaacattcttggcaaatgct

SEQ ID NO: 63834 - DNA, 120 bp, Homo sapiens
  misc_feature: 635 for SV(C|O) and 18S
gccgggggcattcgtattgcgccgctagaggtgaaattcttggaccggcgcaagacggaccagagcgaaagcatttgccaagaatgttttcattaatcaagaacgaaagtcggaggttcg

SEQ ID NO: 63835 - DNA, 120 bp, Homo sapiens; identical to SEQ ID NO: 48419
  misc_feature: 635 for SV(C|O) and 18S

SEQ ID NO: 63836 - DNA, 120 bp, Homo sapiens
  misc_feature: 635 for SV(C|O) and 18S
ctacactgactggctcagcgtgtgcctaccctacgccggcaggcgcgggtaacccgttgaaccccattcgtgatggggatcggggattgcaattattccccatgaacgaggaattcccag

SEQ ID NO: 63837 - DNA, 120 bp, Homo sapiens; identical to SEQ ID NO: 47858
  misc_feature: 634 for SV(C|O) and 18S

SEQ ID NO: 63838 - DNA, 120 bp, Homo sapiens; identical to SEQ ID NO: 47974
  misc_feature: 634 for SV(C|O) and 18S

SEQ ID NO: 63839 - DNA, 120 bp, Homo sapiens
  misc_feature: 634 for SV(C|O) and 18S
aaggaaccataactgatttaatgagccattcgcagtttcactgtaccggccgtgcgtacttagacatgcatggcttaatctttgagacaagcatatgctactggcaggatcaaccaggta

SEQ ID NO: 63840 - DNA, 120 bp, Homo sapiens; identical to SEQ ID NO: 48271
  misc_feature: 634 for SV(C|O) and 18S

SEQ ID NO: 63841 - DNA, 120 bp, Homo sapiens
  misc_feature: 634 for SV(C|O) and 18S
aattacagggcctcgaaagagtcctgtattgttatttttcgtcactacctccccgggtcgggagtgggtaatttgcgcgcctgctgccttccttggatgtggtagccgtttctcaggctc

SEQ ID NO: 63842 - DNA, 120 bp, Homo sapiens
  misc_feature: 634 for SV(C|O) and 18S
agacaaatcgctccaccaactaagaacggccatgcaccaccacccacggaatcgagaaagagctatcaatctgtcaatcctgtccgtgtccgggccgggtgaggtttcccgtgttgagtc

SEQ ID NO: 63843 - DNA, 120 bp, Homo sapiens
  misc_feature: 634 for SV(C|O) and 18S
ccagacaaatcgctccaccaactaagaacggccatgcaccaccacccacggaatcgagaaagagctatcaatctgtcaatcctgtccgtgtccgggccgggtgaggtttcccgtgttgag

SEQ ID NO: 63844 - DNA, 120 bp, Homo sapiens
  misc_feature: 633 for SV(C|O) and 18S
acaaatcgctccaccaactaagaacggccatgcaccaccacccacggaatcgagaaagagctatcaatctgtcaatcctgtccgtgtccgggccgggtgaggtttcccgtgttgagtcaa

SEQ ID NO: 63845 - DNA, 120 bp, Homo sapiens
  misc_feature: 633 for SV(C|O) and 18S
tcgggagtgggtaatttgcgcgcctgctgccttccttggatgtggtagccgtttctcaggctccctctccggaatcgaaccctgattccccgtcacccgtggtcaccatggtaggcacgg

SEQ ID NO: 63846 - DNA, 120 bp, Homo sapiens
  misc_feature: 633 for SV(C|O) and 18S
gaataacgccgccgcatcgccggtcggcatcgtttatggtcggaactacgacggtatctgatcgtcttcgaacctccgactttcgttcttgattaatgaaaacattcttggcaaatgctt

SEQ ID NO: 63847 - DNA, 120 bp, Homo sapiens; identical to SEQ ID NO: 48399
  misc_feature: 633 for SV(C|O) and 18S

SEQ ID NO: 63848 - DNA, 120 bp, Homo sapiens
  misc_feature: 632 for SV(C|O) and 18S
caagatccaactacgagctttttaactgcagcaactttaatatacgctattggagctggaattaccgcggctgctggcaccagacttgccctccaatggatcctcgttaaaggatttaaa

SEQ ID NO: 63849 - DNA, 120 bp, Homo sapiens; identical to SEQ ID NO: 48359
  misc_feature: 632 for SV(C|O) and 18S

SEQ ID NO: 63850 - DNA, 120 bp, Homo sapiens
  misc_feature: 632 for SV(C|O) and 18S
gggcggtccgccgcgaggcgagccaccgcccgtccccgccccttgcctctcggcgccccctcgatgctcttagctgagtgtcccgcggggcccgaagcgtttactttgaaaaaattagag

SEQ ID NO: 63851 - DNA, 120 bp, Homo sapiens
  misc_feature: 632 for SV(C|O) and 18S
gatgcgtgcatttatcagatcaaaaccaacccggtcagcccctctccggccccggccggggggcgggcgccggcggctttggtgactctagataacctcgggccgatcgcacgccccccg

SEQ ID NO: 63852 - DNA, 120 bp, Homo sapiens
  misc_feature: 632 for SV(C|O) and 18S
gacggccgggggcattcgtattgcgccgctagaggtgaaattcttggaccggcgcaagacggaccagagcgaaagcatttgccaagaatgttttcattaatcaagaacgaaagtcggagg

SEQ ID NO: 63853 - DNA, 120 bp, Homo sapiens
  misc_feature: 632 for SV(C|O) and 18S
cgcacttactgggaattcctcgttcatggggaataattgcaatccccgatccccatcacgaatggggttcaacgggttacccgcgcctgccggcgtagggtaggcacacgctgagccagt

SEQ ID NO: 63854 - DNA, 120 bp, Homo sapiens
  misc_feature: 631 for SV(C|O) and 18S
ttatggtcggaactacgacggtatctgatcgtcttcgaacctccgactttcgttcttgattaatgaaaacattcttggcaaatgctttcgctctggtccgtcttgcgccggtccaagaat

SEQ ID NO: 63855 - DNA, 120 bp, Homo sapiens; identical to SEQ ID NO: 47894
  misc_feature: 631 for SV(C|O) and 18S

SEQ ID NO: 63856 - DNA, 120 bp, Homo sapiens; identical to SEQ ID NO: 48148
  misc_feature: 631 for SV(C|O) and 18S

SEQ ID NO: 63857 - DNA, 120 bp, Homo sapiens
  misc_feature: 631 for SV(C|O) and 18S
atcgctccaccaactaagaacggccatgcaccaccacccacggaatcgagaaagagctatcaatctgtcaatcctgtccgtgtccgggccgggtgaggtttcccgtgttgagtcaaatta

SEQ ID NO: 63858 - DNA, 120 bp, Homo sapiens
  misc_feature: 630 for SV(C|O) and 18S
agttccgaccataaacgatgccgaccggcgatgcggcggcgttattcccatgacccgccgggcagcttccgggaaaccaaagtctttgggttccggggggagtatggttgcaaagctgaa

SEQ ID NO: 63859 - DNA, 120 bp, Homo sapiens
  misc_feature: 630 for SV(C|O) and 18S
gacaaatcgctccaccaactaagaacggccatgcaccaccacccacggaatcgagaaagagctatcaatctgtcaatcctgtccgtgtccgggccgggtgaggtttcccgtgttgagtca

SEQ ID NO: 63860 - DNA, 120 bp, Homo sapiens; identical to SEQ ID NO: 47878
  misc_feature: 630 for SV(C|O) and 18S

SEQ ID NO: 63861 - DNA, 120 bp, Homo sapiens; identical to SEQ ID NO: 47959
  misc_feature: 630 for SV(C|O) and 18S

SEQ ID NO: 63862 - DNA, 120 bp, Homo sapiens
  misc_feature: 630 for SV(C|O) and 18S
gcgggcggtccgccgcgaggcgagccaccgcccgtccccgccccttgcctctcggcgccccctcgatgctcttagctgagtgtcccgcggggcccgaagcgtttactttgaaaaaattag

SEQ ID NO: 63863 - DNA, 120 bp, Homo sapiens
  misc_feature: 630 for SV(C|O) and 18S
cgggagtgggtaatttgcgcgcctgctgccttccttggatgtggtagccgtttctcaggctccctctccggaatcgaaccctgattccccgtcacccgtggtcaccatggtaggcacggc

SEQ ID NO: 63864 - DNA, 120 bp, Homo sapiens; identical to SEQ ID NO: 47890
  misc_feature: 629 for SV(C|O) and 18S

SEQ ID NO: 63865 - DNA, 120 bp, Homo sapiens; identical to SEQ ID NO: 48462
  misc_feature: 629 for SV(C|O) and 18S

SEQ ID NO: 63866 - DNA, 120 bp, Homo sapiens
  misc_feature: 629 for SV(C|O) and 18S
cccgcacttactgggaattcctcgttcatggggaataattgcaatccccgatccccatcacgaatggggttcaacgggttacccgcgcctgccggcgtagggtaggcacacgctgagcca

SEQ ID NO: 63867 - DNA, 120 bp, Homo sapiens
  misc_feature: 629 for SV(C|O) and 18S
tcttggaccggcgcaagacggaccagagcgaaagcatttgccaagaatgttttcattaatcaagaacgaaagtcggaggttcgaagacgatcagataccgtcgtagttccgaccataaac

SEQ ID NO: 63868 - DNA, 120 bp, Homo sapiens; identical to SEQ ID NO: 48578
  misc_feature: 629 for SV(C|O) and 18S

SEQ ID NO: 63869 - DNA, 120 bp, Homo sapiens
  misc_feature: 629 for SV(C|O) and 18S
aagatccaactacgagctttttaactgcagcaactttaatatacgctattggagctggaattaccgcggctgctggcaccagacttgccctccaatggatcctcgttaaaggatttaaag

SEQ ID NO: 63870 - DNA, 120 bp, Homo sapiens
  misc_feature: 629 for SV(C|O) and 18S
cggccgggggcattcgtattgcgccgctagaggtgaaattcttggaccggcgcaagacggaccagagcgaaagcatttgccaagaatgttttcattaatcaagaacgaaagtcggaggtt

SEQ ID NO: 63871 - DNA, 120 bp, Homo sapiens
  misc_feature: 629 for SV(C|O) and 18S
catgctaactagttacgcgacccccgagcggtcggcgtcccccaacttcttagagggacaagtggcgttcagccacccgagattgagcaataacaggtctgtgatgcccttagatgtccg

SEQ ID NO: 63872 - DNA, 120 bp, Homo sapiens; identical to SEQ ID NO: 47945
  misc_feature: 629 for SV(C|O) and 18S

SEQ ID NO: 63873 - DNA, 120 bp, Homo sapiens
  misc_feature: 629 for SV(C|O) and 18S
atgctaactagttacgcgacccccgagcggtcggcgtcccccaacttcttagagggacaagtggcgttcagccacccgagattgagcaataacaggtctgtgatgcccttagatgtccgg

SEQ ID NO: 63874 - DNA, 120 bp, Homo sapiens
  misc_feature: 629 for SV(C|O) and 18S
cagacaaatcgctccaccaactaagaacggccatgcaccaccacccacggaatcgagaaagagctatcaatctgtcaatcctgtccgtgtccgggccgggtgaggtttcccgtgttgagt

SEQ ID NO: 63875 - DNA, 120 bp, Homo sapiens
  misc_feature: 629 for SV(C|O) and 18S
caattacagggcctcgaaagagtcctgtattgttatttttcgtcactacctccccgggtcgggagtgggtaatttgcgcgcctgctgccttccttggatgtggtagccgtttctcaggct

SEQ ID NO: 63876 - DNA, 120 bp, Homo sapiens
  misc_feature: 628 for SV(C|O) and 18S
gagtgggtaatttgcgcgcctgctgccttccttggatgtggtagccgtttctcaggctccctctccggaatcgaaccctgattccccgtcacccgtggtcaccatggtaggcacggcgac

SEQ ID NO: 63877 - DNA, 120 bp, Homo sapiens
  misc_feature: 628 for SV(C|O) and 18S
attacagggcctcgaaagagtcctgtattgttatttttcgtcactacctccccgggtcgggagtgggtaatttgcgcgcctgctgccttccttggatgtggtagccgtttctcaggctcc

SEQ ID NO: 63878 - DNA, 120 bp, Homo sapiens; identical to SEQ ID NO: 48561
  misc_feature: 628 for SV(C|O) and 18S

SEQ ID NO: 63879 - DNA, 120 bp, Homo sapiens
  misc_feature: 627 for SV(C|O) and 18S
tccaccaactaagaacggccatgcaccaccacccacggaatcgagaaagagctatcaatctgtcaatcctgtccgtgtccgggccgggtgaggtttcccgtgttgagtcaaattaagccg

SEQ ID NO: 63880 - DNA, 120 bp, Homo sapiens
  misc_feature: 627 for SV(C|O) and 18S
tagttccgaccataaacgatgccgaccggcgatgcggcggcgttattcccatgacccgccgggcagcttccgggaaaccaaagtctttgggttccggggggagtatggttgcaaagctga

SEQ ID NO: 63881 - DNA, 120 bp, Homo sapiens
  misc_feature: 627 for SV(C|O) and 18S
gggagtgggtaatttgcgcgcctgctgccttccttggatgtggtagccgtttctcaggctccctctccggaatcgaaccctgattccccgtcacccgtggtcaccatggtaggcacggcg

SEQ ID NO: 63882 - DNA, 120 bp, Homo sapiens
  misc_feature: 627 for SV(C|O) and 18S
gggaattcctcgttcatggggaataattgcaatccccgatccccatcacgaatggggttcaacgggttacccgcgcctgccggcgtagggtaggcacacgctgagccagtcagtgtagcg

SEQ ID NO: 63883 - DNA, 120 bp, Homo sapiens; identical to SEQ ID NO: 48007
  misc_feature: 627 for SV(C|O) and 18S

SEQ ID NO: 63884 - DNA, 120 bp, Homo sapiens
  misc_feature: 627 for SV(C|O) and 18S
ccacccacggaatcgagaaagagctatcaatctgtcaatcctgtccgtgtccgggccgggtgaggtttcccgtgttgagtcaaattaagccgcaggctccactcctggtggtgcccttcc

SEQ ID NO: 63885 - DNA, 120 bp, Homo sapiens
  misc_feature: 627 for SV(C|O) and 18S
ctacgacggtatctgatcgtcttcgaacctccgactttcgttcttgattaatgaaaacattcttggcaaatgctttcgctctggtccgtcttgcgccggtccaagaatttcacctctagc

SEQ ID NO: 63886 - DNA, 120 bp, Homo sapiens
  misc_feature: 627 for SV(C|O) and 18S
ctggcaccagacttgccctccaatggatcctcgttaaaggatttaaagtggactcattccaattacagggcctcgaaagagtcctgtattgttatttttcgtcactacctccccgggtcg

SEQ ID NO: 63887 - DNA, 120 bp, Homo sapiens; identical to SEQ ID NO: 48440
  misc_feature: 627 for SV(C|O) and 18S

SEQ ID NO: 63888 - DNA, 120 bp, Homo sapiens
  misc_feature: 626 for SV(C|O) and 18S
ggagtgggtaatttgcgcgcctgctgccttccttggatgtggtagccgtttctcaggctccctctccggaatcgaaccctgattccccgtcacccgtggtcaccatggtaggcacggcga

SEQ ID NO: 63889 - DNA, 120 bp, Homo sapiens
  misc_feature: 626 for SV(C|O) and 18S
ccgggggcattcgtattgcgccgctagaggtgaaattcttggaccggcgcaagacggaccagagcgaaagcatttgccaagaatgttttcattaatcaagaacgaaagtcggaggttcga

SEQ ID NO: 63890 - DNA, 120 bp, Homo sapiens
  misc_feature: 626 for SV(C|O) and 18S
tatggtcggaactacgacggtatctgatcgtcttcgaacctccgactttcgttcttgattaatgaaaacattcttggcaaatgctttcgctctggtccgtcttgcgccggtccaagaatt

SEQ ID NO: 63891 - DNA, 120 bp, Homo sapiens
  misc_feature: 626 for SV(C|O) and 18S
actacgacggtatctgatcgtcttcgaacctccgactttcgttcttgattaatgaaaacattcttggcaaatgctttcgctctggtccgtcttgcgccggtccaagaatttcacctctag

SEQ ID NO: 63892 - DNA, 120 bp, Homo sapiens
  misc_feature: 626 for SV(C|O) and 18S
acggccgggggcattcgtattgcgccgctagaggtgaaattcttggaccggcgcaagacggaccagagcgaaagcatttgccaagaatgttttcattaatcaagaacgaaagtcggaggt

SEQ ID NO: 63893 - DNA, 120 bp, Homo sapiens; identical to SEQ ID NO: 48506
  misc_feature: 625 for SV(C|O) and 18S

SEQ ID NO: 63894 - DNA, 120 bp, Homo sapiens; identical to SEQ ID NO: 48103
  misc_feature: 625 for SV(C|O) and 18S

SEQ ID NO: 63895 - DNA, 120 bp, Homo sapiens; identical to SEQ ID NO: 48394
  misc_feature: 625 for SV(C|O) and 18S

SEQ ID NO: 63896 - DNA, 120 bp, Homo sapiens; identical to SEQ ID NO: 48509
  misc_feature: 625 for SV(C|O) and 18S

SEQ ID NO: 63897 - DNA, 120 bp, Homo sapiens
  misc_feature: 625 for SV(C|O) and 18S
cgctccaccaactaagaacggccatgcaccaccacccacggaatcgagaaagagctatcaatctgtcaatcctgtccgtgtccgggccgggtgaggtttcccgtgttgagtcaaattaag

SEQ ID NO: 63898 - DNA, 120 bp, Homo sapiens
  misc_feature: 625 for SV(C|O) and 18S
atggtcggaactacgacggtatctgatcgtcttcgaacctccgactttcgttcttgattaatgaaaacattcttggcaaatgctttcgctctggtccgtcttgcgccggtccaagaattt

SEQ ID NO: 63899 - DNA, 120 bp, Homo sapiens
  misc_feature: 625 for SV(C|O) and 18S
acggccatgcaccaccacccacggaatcgagaaagagctatcaatctgtcaatcctgtccgtgtccgggccgggtgaggtttcccgtgttgagtcaaattaagccgcaggctccactcct

SEQ ID NO: 63900 - DNA, 120 bp, Homo sapiens
  misc_feature: 624 for SV(C|O) and 18S
cgggcggtccgccgcgaggcgagccaccgcccgtccccgccccttgcctctcggcgccccctcgatgctcttagctgagtgtcccgcggggcccgaagcgtttactttgaaaaaattaga

SEQ ID NO: 63901 - DNA, 120 bp, Homo sapiens
  misc_feature: 624 for SV(C|O) and 18S
tacgacggtatctgatcgtcttcgaacctccgactttcgttcttgattaatgaaaacattcttggcaaatgctttcgctctggtccgtcttgcgccggtccaagaatttcacctctagcg

SEQ ID NO: 63902 - DNA, 120 bp, Homo sapiens
  misc_feature: 624 for SV(C|O) and 18S
ctttggtcgctcgctcctctcctacttggataactgtggtaattctagagctaatacatgccgacgggcgctgacccccttcgcgggggggatgcgtgcatttatcagatcaaaaccaac

SEQ ID NO: 63903 - DNA, 120 bp, Homo sapiens
  misc_feature: 624 for SV(C|O) and 18S
acccgcacttactgggaattcctcgttcatggggaataattgcaatccccgatccccatcacgaatggggttcaacgggttacccgcgcctgccggcgtagggtaggcacacgctgagcc

SEQ ID NO: 63904 - DNA, 120 bp, Homo sapiens; identical to SEQ ID NO: 47875
  misc_feature: 624 for SV(C|O) and 18S

SEQ ID NO: 63905 - DNA, 120 bp, Homo sapiens; identical to SEQ ID NO: 48598
  misc_feature: 624 for SV(C|O) and 18S

SEQ ID NO: 63906 - DNA, 120 bp, Homo sapiens; identical to SEQ ID NO: 47694
  misc_feature: 623 for SV(C|O) and 18S

SEQ ID NO: 63907 - DNA, 120 bp, Homo sapiens
  misc_feature: 623 for SV(C|O) and 18S
ccaagatccaactacgagctttttaactgcagcaactttaatatacgctattggagctggaattaccgcggctgctggcaccagacttgccctccaatggatcctcgttaaaggatttaa

SEQ ID NO: 63908 - DNA, 120 bp, Homo sapiens
  misc_feature: 623 for SV(C|O) and 18S
tggcaccagacttgccctccaatggatcctcgttaaaggatttaaagtggactcattccaattacagggcctcgaaagagtcctgtattgttatttttcgtcactacctccccgggtcgg

SEQ ID NO: 63909 - DNA, 120 bp, Homo sapiens
  misc_feature: 623 for SV(C|O) and 18S
agagtcctgtattgttatttttcgtcactacctccccgggtcgggagtgggtaatttgcgcgcctgctgccttccttggatgtggtagccgtttctcaggctccctctccggaatcgaac

SEQ ID NO: 63910 - DNA, 120 bp, Homo sapiens
  misc_feature: 623 for SV(C|O) and 18S
gctccaccaactaagaacggccatgcaccaccacccacggaatcgagaaagagctatcaatctgtcaatcctgtccgtgtccgggccgggtgaggtttcccgtgttgagtcaaattaagc

SEQ ID NO: 63911 - DNA, 120 bp, Homo sapiens; identical to SEQ ID NO: 47996
  misc_feature: 623 for SV(C|O) and 18S

SEQ ID NO: 63912 - DNA, 120 bp, Homo sapiens
  misc_feature: 623 for SV(C|O) and 18S
ccgcacttactgggaattcctcgttcatggggaataattgcaatccccgatccccatcacgaatggggttcaacgggttacccgcgcctgccggcgtagggtaggcacacgctgagccag

SEQ ID NO: 63913 - DNA, 120 bp, Homo sapiens
  misc_feature: 623 for SV(C|O) and 18S
cggccatgcaccaccacccacggaatcgagaaagagctatcaatctgtcaatcctgtccgtgtccgggccgggtgaggtttcccgtgttgagtcaaattaagccgcaggctccactcctg

SEQ ID NO: 63914 - DNA, 120 bp, Homo sapiens; identical to SEQ ID NO: 47922
  misc_feature: 623 for SV(C|O) and 18S

SEQ ID NO: 63915 - DNA, 120 bp, Homo sapiens; identical to SEQ ID NO: 47930
  misc_feature: 623 for SV(C|O) and 18S

SEQ ID NO: 63916 - DNA, 120 bp, Homo sapiens
  misc_feature: 622 for SV(C|O) and 18S
tggaccggcgcaagacggaccagagcgaaagcatttgccaagaatgttttcattaatcaagaacgaaagtcggaggttcgaagacgatcagataccgtcgtagttccgaccataaacgat

SEQ ID NO: 63917 - DNA, 120 bp, Homo sapiens; identical to SEQ ID NO: 47689
  misc_feature: 622 for SV(C|O) and 18S

SEQ ID NO: 63918 - DNA, 120 bp, Homo sapiens; identical to SEQ ID NO: 47927
  misc_feature: 622 for SV(C|O) and 18S

SEQ ID NO: 63919 - DNA, 120 bp, Homo sapiens
  misc_feature: 622 for SV(C|O) and 18S
ccaccaactaagaacggccatgcaccaccacccacggaatcgagaaagagctatcaatctgtcaatcctgtccgtgtccgggccgggtgaggtttcccgtgttgagtcaaattaagccgc

SEQ ID NO: 63920 - DNA, 120 bp, Homo sapiens; identical to SEQ ID NO: 48501
  misc_feature: 622 for SV(C|O) and 18S

SEQ ID NO: 63921 - DNA, 120 bp, Homo sapiens
  misc_feature: 622 for SV(C|O) and 18S
aataacgccgccgcatcgccggtcggcatcgtttatggtcggaactacgacggtatctgatcgtcttcgaacctccgactttcgttcttgattaatgaaaacattcttggcaaatgcttt

SEQ ID NO: 63922 - DNA, 120 bp, Homo sapiens
  misc_feature: 621 for SV(C|O) and 18S
tcgctccaccaactaagaacggccatgcaccaccacccacggaatcgagaaagagctatcaatctgtcaatcctgtccgtgtccgggccgggtgaggtttcccgtgttgagtcaaattaa

SEQ ID NO: 63923 - DNA, 120 bp, Homo sapiens; identical to SEQ ID NO: 47923
  misc_feature: 621 for SV(C|O) and 18S

SEQ ID NO: 63924 - DNA, 120 bp, Homo sapiens; identical to SEQ ID NO: 48486
  misc_feature: 621 for SV(C|O) and 18S

SEQ ID NO: 63925 - DNA, 120 bp, Homo sapiens; identical to SEQ ID NO: 48603
  misc_feature: 621 for SV(C|O) and 18S

SEQ ID NO: 63926 - DNA, 120 bp, Homo sapiens; identical to SEQ ID NO: 48464
  misc_feature: 621 for SV(C|O) and 18S

SEQ ID NO: 63927 - DNA, 120 bp, Homo sapiens; identical to SEQ ID NO: 48491
  misc_feature: 621 for SV(C|O) and 18S

SEQ ID NO: 63928 - DNA, 120 bp, Homo sapiens
  misc_feature: 621 for SV(C|O) and 18S
aacgggttacccgcgcctgccggcgtagggtaggcacacgctgagccagtcagtgtagcgcgcgtgcagccccggacatctaagggcatcacagacctgttattgctcaatctcgggtgg

SEQ ID NO: 63929 - DNA, 120 bp, Homo sapiens; identical to SEQ ID NO: 48385
  misc_feature: 620 for SV(C|O) and 18S

SEQ ID NO: 63930 - DNA, 120 bp, Homo sapiens
  misc_feature: 620 for SV(C|O) and 18S
gcgtgcgatcggcccgaggttatctagagtcaccaaagccgccggcgcccgccccccggccggggccggagaggggctgaccgggttggttttgatctgataaatgcacgcatccccccc

SEQ ID NO: 63931 - DNA, 120 bp, Homo sapiens; identical to SEQ ID NO: 48528
  misc_feature: 620 for SV(C|O) and 18S

SEQ ID NO: 63932 - DNA, 120 bp, Homo sapiens
  misc_feature: 620 for SV(C|O) and 18S
aagtggactcattccaattacagggcctcgaaagagtcctgtattgttatttttcgtcactacctccccgggtcgggagtgggtaatttgcgcgcctgctgccttccttggatgtggtag

SEQ ID NO: 63933 - DNA, 120 bp, Homo sapiens; identical to SEQ ID NO: 48416
  misc_feature: 620 for SV(C|O) and 18S

SEQ ID NO: 63934 - DNA, 120 bp, Homo sapiens
  misc_feature: 619 for SV(C|O) and 18S
cgggggcattcgtattgcgccgctagaggtgaaattcttggaccggcgcaagacggaccagagcgaaagcatttgccaagaatgttttcattaatcaagaacgaaagtcggaggttcgaa

SEQ ID NO: 63935 - DNA, 120 bp, Homo sapiens; identical to SEQ ID NO: 48170
  misc_feature: 619 for SV(C|O) and 18S

SEQ ID NO: 63936 - DNA, 120 bp, Homo sapiens
  misc_feature: 619 for SV(C|O) and 18S
ttacagggcctcgaaagagtcctgtattgttatttttcgtcactacctccccgggtcgggagtgggtaatttgcgcgcctgctgccttccttggatgtggtagccgtttctcaggctccc

SEQ ID NO: 63937 - DNA, 120 bp, Homo sapiens; identical to SEQ ID NO: 47864
  misc_feature: 619 for SV(C|O) and 18S

SEQ ID NO: 63938 - DNA, 120 bp, Homo sapiens; identical to SEQ ID NO: 48377
  misc_feature: 619 for SV(C|O) and 18S

SEQ ID NO: 63939 - DNA, 120 bp, Homo sapiens
  misc_feature: 619 for SV(C|O) and 18S
gtcggaactacgacggtatctgatcgtcttcgaacctccgactttcgttcttgattaatgaaaacattcttggcaaatgctttcgctctggtccgtcttgcgccggtccaagaatttcac

SEQ ID NO: 63940 - DNA, 120 bp, Homo sapiens; identical to SEQ ID NO: 48551
  misc_feature: 619 for SV(C|O) and 18S

SEQ ID NO: 63941 - DNA, 120 bp, Homo sapiens
  misc_feature: 619 for SV(C|O) and 18S
agtggactcattccaattacagggcctcgaaagagtcctgtattgttatttttcgtcactacctccccgggtcgggagtgggtaatttgcgcgcctgctgccttccttggatgtggtagc

SEQ ID NO: 63942 - DNA, 120 bp, Homo sapiens
  misc_feature: 619 for SV(C|O) and 18S
cggaactacgacggtatctgatcgtcttcgaacctccgactttcgttcttgattaatgaaaacattcttggcaaatgctttcgctctggtccgtcttgcgccggtccaagaatttcacct

SEQ ID NO: 63943 - DNA, 120 bp, Homo sapiens; identical to SEQ ID NO: 48414
  misc_feature: 619 for SV(C|O) and 18S

SEQ ID NO: 63944 - DNA, 120 bp, Homo sapiens; identical to SEQ ID NO: 48599
  misc_feature: 618 for SV(C|O) and 18S

SEQ ID NO: 63945 - DNA, 120 bp, Homo sapiens
  misc_feature: 618 for SV(C|O) and 18S
tgctaactagttacgcgacccccgagcggtcggcgtcccccaacttcttagagggacaagtggcgttcagccacccgagattgagcaataacaggtctgtgatgcccttagatgtccggg

SEQ ID NO: 63946 - DNA, 120 bp, Homo sapiens; identical to SEQ ID NO: 48538
  misc_feature: 618 for SV(C|O) and 18S

SEQ ID NO: 63947 - DNA, 120 bp, Homo sapiens
  misc_feature: 618 for SV(C|O) and 18S
tcggaactacgacggtatctgatcgtcttcgaacctccgactttcgttcttgattaatgaaaacattcttggcaaatgctttcgctctggtccgtcttgcgccggtccaagaatttcacc

SEQ ID NO: 63948 - DNA, 120 bp, Homo sapiens
  misc_feature: 618 for SV(C|O) and 18S
ctccaccaactaagaacggccatgcaccaccacccacggaatcgagaaagagctatcaatctgtcaatcctgtccgtgtccgggccgggtgaggtttcccgtgttgagtcaaattaagcc

SEQ ID NO: 63949 - DNA, 120 bp, Homo sapiens; identical to SEQ ID NO: 48638
  misc_feature: 618 for SV(C|O) and 18S

SEQ ID NO: 63950 - DNA, 120 bp, Homo sapiens
  misc_feature: 618 for SV(C|O) and 18S
cacacgctgagccagtcagtgtagcgcgcgtgcagccccggacatctaagggcatcacagacctgttattgctcaatctcgggtggctgaacgccacttgtccctctaagaagttggggg

SEQ ID NO: 63951 - DNA, 120 bp, Homo sapiens; identical to SEQ ID NO: 47909
  misc_feature: 617 for SV(C|O) and 18S

SEQ ID NO: 63952 - DNA, 120 bp, Homo sapiens
  misc_feature: 617 for SV(C|O) and 18S
gcacacgctgagccagtcagtgtagcgcgcgtgcagccccggacatctaagggcatcacagacctgttattgctcaatctcgggtggctgaacgccacttgtccctctaagaagttgggg

SEQ ID NO: 63953 - DNA, 120 bp, Homo sapiens; identical to SEQ ID NO: 48439
  misc_feature: 617 for SV(C|O) and 18S

SEQ ID NO: 63954 - DNA, 120 bp, Homo sapiens
  misc_feature: 616 for SV(C|O) and 18S
gttccgaccataaacgatgccgaccggcgatgcggcggcgttattcccatgacccgccgggcagcttccgggaaaccaaagtctttgggttccggggggagtatggttgcaaagctgaaa

SEQ ID NO: 63955 - DNA, 120 bp, Homo sapiens
  misc_feature: 616 for SV(C|O) and 18S
ttgctcaatctcgggtggctgaacgccacttgtccctctaagaagttgggggacgccgaccgctcgggggtcgcgtaactagttagcatgccagagtctcgttcgttatcggaattaacc

SEQ ID NO: 63956 - DNA, 120 bp, Homo sapiens
  misc_feature: 616 for SV(C|O) and 18S
aagagtcctgtattgttatttttcgtcactacctccccgggtcgggagtgggtaatttgcgcgcctgctgccttccttggatgtggtagccgtttctcaggctccctctccggaatcgaa

SEQ ID NO: 63957 - DNA, 120 bp, Homo sapiens; identical to SEQ ID NO: 48316
  misc_feature: 616 for SV(C|O) and 18S

SEQ ID NO: 63958 - DNA, 120 bp, Homo sapiens
  misc_feature: 616 for SV(C|O) and 18S
acacgctgagccagtcagtgtagcgcgcgtgcagccccggacatctaagggcatcacagacctgttattgctcaatctcgggtggctgaacgccacttgtccctctaagaagttggggga

SEQ ID NO: 63959 - DNA, 120 bp, Homo sapiens
  misc_feature: 616 for SV(C|O) and 18S
taggcacacgctgagccagtcagtgtagcgcgcgtgcagccccggacatctaagggcatcacagacctgttattgctcaatctcgggtggctgaacgccacttgtccctctaagaagttg

SEQ ID NO: 63960 - DNA, 120 bp, Homo sapiens
  misc_feature: 616 for SV(C|O) and 18S
gggggcattcgtattgcgccgctagaggtgaaattcttggaccggcgcaagacggaccagagcgaaagcatttgccaagaatgttttcattaatcaagaacgaaagtcggaggttcgaag

SEQ ID NO: 63961 - DNA, 120 bp, Homo sapiens
  misc_feature: 616 for SV(C|O) and 18S
ggccatgcaccaccacccacggaatcgagaaagagctatcaatctgtcaatcctgtccgtgtccgggccgggtgaggtttcccgtgttgagtcaaattaagccgcaggctccactcctgg

SEQ ID NO: 63962 - DNA, 120 bp, Homo sapiens
  misc_feature: 616 for SV(C|O) and 18S
aacggccatgcaccaccacccacggaatcgagaaagagctatcaatctgtcaatcctgtccgtgtccgggccgggtgaggtttcccgtgttgagtcaaattaagccgcaggctccactcc

SEQ ID NO: 63963 - DNA, 120 bp, Homo sapiens; identical to SEQ ID NO: 48135
  misc_feature: 616 for SV(C|O) and 18S

SEQ ID NO: 63964 - DNA, 120 bp, Homo sapiens; identical to SEQ ID NO: 47993
  misc_feature: 616 for SV(C|O) and 18S

SEQ ID NO: 63965 - DNA, 120 bp, Homo sapiens
  misc_feature: 616 for SV(C|O) and 18S
acgggttacccgcgcctgccggcgtagggtaggcacacgctgagccagtcagtgtagcgcgcgtgcagccccggacatctaagggcatcacagacctgttattgctcaatctcgggtggc

SEQ ID NO: 63966 - DNA, 120 bp, Homo sapiens
  misc_feature: 616 for SV(C|O) and 18S
cttggaccggcgcaagacggaccagagcgaaagcatttgccaagaatgttttcattaatcaagaacgaaagtcggaggttcgaagacgatcagataccgtcgtagttccgaccataaacg

SEQ ID NO: 63967 - DNA, 120 bp, Homo sapiens; identical to SEQ ID NO: 48117
  misc_feature: 615 for SV(C|O) and 18S

SEQ ID NO: 63968 - DNA, 120 bp, Homo sapiens
  misc_feature: 615 for SV(C|O) and 18S
ccgttcttagttggtggagcgatttgtctggttaattccgataacgaacgagactctggcatgctaactagttacgcgacccccgagcggtcggcgtcccccaacttcttagagggacaa

SEQ ID NO: 63969 - DNA, 120 bp, Homo sapiens
  misc_feature: 615 for SV(C|O) and 18S
ttggaccggcgcaagacggaccagagcgaaagcatttgccaagaatgttttcattaatcaagaacgaaagtcggaggttcgaagacgatcagataccgtcgtagttccgaccataaacga

SEQ ID NO: 63970 - DNA, 120 bp, Homo sapiens
  misc_feature: 615 for SV(C|O) and 18S
caccaactaagaacggccatgcaccaccacccacggaatcgagaaagagctatcaatctgtcaatcctgtccgtgtccgggccgggtgaggtttcccgtgttgagtcaaattaagccgca

SEQ ID NO: 63971 - DNA, 120 bp, Homo sapiens
  misc_feature: 615 for SV(C|O) and 18S
attgctcaatctcgggtggctgaacgccacttgtccctctaagaagttgggggacgccgaccgctcgggggtcgcgtaactagttagcatgccagagtctcgttcgttatcggaattaac

SEQ ID NO: 63972 - DNA, 120 bp, Homo sapiens
  misc_feature: 615 for SV(C|O) and 18S
ggccgttcttagttggtggagcgatttgtctggttaattccgataacgaacgagactctggcatgctaactagttacgcgacccccgagcggtcggcgtcccccaacttcttagagggac

SEQ ID NO: 63973 - DNA, 120 bp, Homo sapiens; identical to SEQ ID NO: 48524
  misc_feature: 615 for SV(C|O) and 18S

SEQ ID NO: 63974 - DNA, 120 bp, Homo sapiens; identical to SEQ ID NO: 47929
  misc_feature: 615 for SV(C|O) and 18S

SEQ ID NO: 63975 - DNA, 120 bp, Homo sapiens; identical to SEQ ID NO: 48510
  misc_feature: 615 for SV(C|O) and 18S

SEQ ID NO: 63976 - DNA, 120 bp, Homo sapiens
  misc_feature: 615 for SV(C|O) and 18S
acgacggtatctgatcgtcttcgaacctccgactttcgttcttgattaatgaaaacattcttggcaaatgctttcgctctggtccgtcttgcgccggtccaagaatttcacctctagcgg

SEQ ID NO: 63977 - DNA, 120 bp, Homo sapiens
  misc_feature: 615 for SV(C|O) and 18S
aggcacacgctgagccagtcagtgtagcgcgcgtgcagccccggacatctaagggcatcacagacctgttattgctcaatctcgggtggctgaacgccacttgtccctctaagaagttgg

SEQ ID NO: 63978 - DNA, 120 bp, Homo sapiens; identical to SEQ ID NO: 48597
  misc_feature: 615 for SV(C|O) and 18S

SEQ ID NO: 63979 - DNA, 120 bp, Homo sapiens
  misc_feature: 614 for SV(C|O) and 18S
ttccgaccataaacgatgccgaccggcgatgcggcggcgttattcccatgacccgccgggcagcttccgggaaaccaaagtctttgggttccggggggagtatggttgcaaagctgaaac

SEQ ID NO: 63980 - DNA, 120 bp, Homo sapiens
  misc_feature: 614 for SV(C|O) and 18S
attccaattacagggcctcgaaagagtcctgtattgttatttttcgtcactacctccccgggtcgggagtgggtaatttgcgcgcctgctgccttccttggatgtggtagccgtttctca

SEQ ID NO: 63981 - DNA, 120 bp, Homo sapiens
  misc_feature: 614 for SV(C|O) and 18S
tcattccaattacagggcctcgaaagagtcctgtattgttatttttcgtcactacctccccgggtcgggagtgggtaatttgcgcgcctgctgccttccttggatgtggtagccgtttct

SEQ ID NO: 63982 - DNA, 120 bp, Homo sapiens; identical to SEQ ID NO: 48058
  misc_feature: 614 for SV(C|O) and 18S

SEQ ID NO: 63983 - DNA, 120 bp, Homo sapiens
  misc_feature: 614 for SV(C|O) and 18S
gtggactcattccaattacagggcctcgaaagagtcctgtattgttatttttcgtcactacctccccgggtcgggagtgggtaatttgcgcgcctgctgccttccttggatgtggtagcc

SEQ ID NO: 63984 - DNA, 120 bp, Homo sapiens
  misc_feature: 614 for SV(C|O) and 18S
gtatattaaagttgctgcagttaaaaagctcgtagttggatcttgggagcgggcgggcggtccgccgcgaggcgagccaccgcccgtccccgccccttgcctctcggcgccccctcgatg

SEQ ID NO: 63985 - DNA, 120 bp, Homo sapiens
  misc_feature: 614 for SV(C|O) and 18S
gacccgcacttactgggaattcctcgttcatggggaataattgcaatccccgatccccatcacgaatggggttcaacgggttacccgcgcctgccggcgtagggtaggcacacgctgagc

SEQ ID NO: 63986 - DNA, 120 bp, Homo sapiens
  misc_feature: 614 for SV(C|O) and 18S
cgggttacccgcgcctgccggcgtagggtaggcacacgctgagccagtcagtgtagcgcgcgtgcagccccggacatctaagggcatcacagacctgttattgctcaatctcgggtggct

SEQ ID NO: 63987 - DNA, 120 bp, Homo sapiens; identical to SEQ ID NO: 48432
  misc_feature: 614 for SV(C|O) and 18S

SEQ ID NO: 63988 - DNA, 120 bp, Homo sapiens
  misc_feature: 613 for SV(C|O) and 18S
ttggtcgctcgctcctctcctacttggataactgtggtaattctagagctaatacatgccgacgggcgctgacccccttcgcgggggggatgcgtgcatttatcagatcaaaaccaaccc

SEQ ID NO: 63989 - DNA, 120 bp, Homo sapiens
  misc_feature: 613 for SV(C|O) and 18S
agggtaggcacacgctgagccagtcagtgtagcgcgcgtgcagccccggacatctaagggcatcacagacctgttattgctcaatctcgggtggctgaacgccacttgtccctctaagaa

SEQ ID NO: 63990 - DNA, 120 bp, Homo sapiens
  misc_feature: 613 for SV(C|O) and 18S
ttccaattacagggcctcgaaagagtcctgtattgttatttttcgtcactacctccccgggtcgggagtgggtaatttgcgcgcctgctgccttccttggatgtggtagccgtttctcag

SEQ ID NO: 63991 - DNA, 120 bp, Homo sapiens
  misc_feature: 613 for SV(C|O) and 18S
gccgttcttagttggtggagcgatttgtctggttaattccgataacgaacgagactctggcatgctaactagttacgcgacccccgagcggtcggcgtcccccaacttcttagagggaca

SEQ ID NO: 63992 - DNA, 120 bp, Homo sapiens; identical to SEQ ID NO: 48602
  misc_feature: 613 for SV(C|O) and 18S

SEQ ID NO: 63993 - DNA, 120 bp, Homo sapiens
  misc_feature: 613 for SV(C|O) and 18S
gtaggcacacgctgagccagtcagtgtagcgcgcgtgcagccccggacatctaagggcatcacagacctgttattgctcaatctcgggtggctgaacgccacttgtccctctaagaagtt

SEQ ID NO: 63994 - DNA, 120 bp, Homo sapiens
  misc_feature: 613 for SV(C|O) and 18S
gggtaggcacacgctgagccagtcagtgtagcgcgcgtgcagccccggacatctaagggcatcacagacctgttattgctcaatctcgggtggctgaacgccacttgtccctctaagaag

SEQ ID NO: 63995 - DNA, 120 bp, Homo sapiens
  misc_feature: 613 for SV(C|O) and 18S
gcatttatcagatcaaaaccaacccggtcagcccctctccggccccggccggggggcgggcgccggcggctttggtgactctagataacctcgggccgatcgcacgccccccgtggcggc

SEQ ID NO: 63996 - DNA, 120 bp, Homo sapiens; identical to SEQ ID NO: 48438
  misc_feature: 613 for SV(C|O) and 18S

SEQ ID NO: 63997 - DNA, 120 bp, Homo sapiens; identical to SEQ ID NO: 48092
  misc_feature: 613 for SV(C|O) and 18S

SEQ ID NO: 63998 - DNA, 120 bp, Homo sapiens
  misc_feature: 613 for SV(C|O) and 18S
cacccacggaatcgagaaagagctatcaatctgtcaatcctgtccgtgtccgggccgggtgaggtttcccgtgttgagtcaaattaagccgcaggctccactcctggtggtgcccttccg

SEQ ID NO: 63999 - DNA, 120 bp, Homo sapiens; identical to SEQ ID NO: 48325
  misc_feature: 612 for SV(C|O) and 18S

SEQ ID NO: 64000 - DNA, 120 bp, Homo sapiens
  misc_feature: 612 for SV(C|O) and 18S
ggtcggaactacgacggtatctgatcgtcttcgaacctccgactttcgttcttgattaatgaaaacattcttggcaaatgctttcgctctggtccgtcttgcgccggtccaagaatttca

SEQ ID NO: 64001 - DNA, 120 bp, Homo sapiens
  misc_feature: 612 for SV(C|O) and 18S
cgaccataaacgatgccgaccggcgatgcggcggcgttattcccatgacccgccgggcagcttccgggaaaccaaagtctttgggttccggggggagtatggttgcaaagctgaaactta

SEQ ID NO: 64002 - DNA, 120 bp, Homo sapiens
  misc_feature: 612 for SV(C|O) and 18S
ggtaggcacacgctgagccagtcagtgtagcgcgcgtgcagccccggacatctaagggcatcacagacctgttattgctcaatctcgggtggctgaacgccacttgtccctctaagaagt

SEQ ID NO: 64003 - DNA, 120 bp, Homo sapiens; identical to SEQ ID NO: 48508
  misc_feature: 612 for SV(C|O) and 18S

SEQ ID NO: 64004 - DNA, 120 bp, Homo sapiens
  misc_feature: 611 for SV(C|O) and 18S
tgctcaatctcgggtggctgaacgccacttgtccctctaagaagttgggggacgccgaccgctcgggggtcgcgtaactagttagcatgccagagtctcgttcgttatcggaattaacca

SEQ ID NO: 64005 - DNA, 120 bp, Homo sapiens
  misc_feature: 611 for SV(C|O) and 18S
tgcatttatcagatcaaaaccaacccggtcagcccctctccggccccggccggggggcgggcgccggcggctttggtgactctagataacctcgggccgatcgcacgccccccgtggcgg

SEQ ID NO: 64006 - DNA, 120 bp, Homo sapiens
  misc_feature: 611 for SV(C|O) and 18S
tccgaccataaacgatgccgaccggcgatgcggcggcgttattcccatgacccgccgggcagcttccgggaaaccaaagtctttgggttccggggggagtatggttgcaaagctgaaact

SEQ ID NO: 64007 - DNA, 120 bp, Homo sapiens
  misc_feature: 611 for SV(C|O) and 18S
cacgctgagccagtcagtgtagcgcgcgtgcagccccggacatctaagggcatcacagacctgttattgctcaatctcgggtggctgaacgccacttgtccctctaagaagttgggggac

SEQ ID NO: 64008 - DNA, 120 bp, Homo sapiens
  misc_feature: 611 for SV(C|O) and 18S
gtatctgatcgtcttcgaacctccgactttcgttcttgattaatgaaaacattcttggcaaatgctttcgctctggtccgtcttgcgccggtccaagaatttcacctctagcggcgcaat

SEQ ID NO: 64009 - DNA, 120 bp, Homo sapiens; identical to SEQ ID NO: 48544
  misc_feature: 611 for SV(C|O) and 18S

SEQ ID NO: 64010 - DNA, 120 bp, Homo sapiens; identical to SEQ ID NO: 48498
  misc_feature: 611 for SV(C|O) and 18S

SEQ ID NO: 64011 - DNA, 120 bp, Homo sapiens
  misc_feature: 610 for SV(C|O) and 18S
tttggtcgctcgctcctctcctacttggataactgtggtaattctagagctaatacatgccgacgggcgctgacccccttcgcgggggggatgcgtgcatttatcagatcaaaaccaacc

SEQ ID NO: 64012 - DNA, 120 bp, Homo sapiens
  misc_feature: 610 for SV(C|O) and 18S
tggactcattccaattacagggcctcgaaagagtcctgtattgttatttttcgtcactacctccccgggtcgggagtgggtaatttgcgcgcctgctgccttccttggatgtggtagccg

SEQ ID NO: 64013 - DNA, 120 bp, Homo sapiens
  misc_feature: 610 for SV(C|O) and 18S
accagacaaatcgctccaccaactaagaacggccatgcaccaccacccacggaatcgagaaagagctatcaatctgtcaatcctgtccgtgtccgggccgggtgaggtttcccgtgttga

SEQ ID NO: 64014 - DNA, 120 bp, Homo sapiens
  misc_feature: 610 for SV(C|O) and 18S
tacagggcctcgaaagagtcctgtattgttatttttcgtcactacctccccgggtcgggagtgggtaatttgcgcgcctgctgccttccttggatgtggtagccgtttctcaggctccct

SEQ ID NO: 64015 - DNA, 120 bp, Homo sapiens
  misc_feature: 609 for SV(C|O) and 18S
gaccataaacgatgccgaccggcgatgcggcggcgttattcccatgacccgccgggcagcttccgggaaaccaaagtctttgggttccggggggagtatggttgcaaagctgaaacttaa

SEQ ID NO: 64016 - DNA, 120 bp, Homo sapiens
  misc_feature: 609 for SV(C|O) and 18S
tggtcgctcgctcctctcctacttggataactgtggtaattctagagctaatacatgccgacgggcgctgacccccttcgcgggggggatgcgtgcatttatcagatcaaaaccaacccg

SEQ ID NO: 64017 - DNA, 120 bp, Homo sapiens; identical to SEQ ID NO: 48571
  misc_feature: 609 for SV(C|O) and 18S

SEQ ID NO: 64018 - DNA, 120 bp, Homo sapiens; identical to SEQ ID NO: 48601
  misc_feature: 609 for SV(C|O) and 18S

SEQ ID NO: 64019 - DNA, 120 bp, Homo sapiens; identical to SEQ ID NO: 48192
  misc_feature: 609 for SV(C|O) and 18S

SEQ ID NO: 64020 - DNA, 120 bp, Homo sapiens; identical to SEQ ID NO: 48422
  misc_feature: 609 for SV(C|O) and 18S

SEQ ID NO: 64021 - DNA, 120 bp, Homo sapiens
  misc_feature: 609 for SV(C|O) and 18S
ggcaccagacttgccctccaatggatcctcgttaaaggatttaaagtggactcattccaattacagggcctcgaaagagtcctgtattgttatttttcgtcactacctccccgggtcggg

SEQ ID NO: 64022 - DNA, 120 bp, Homo sapiens
  misc_feature: 609 for SV(C|O) and 18S
ggcacacgctgagccagtcagtgtagcgcgcgtgcagccccggacatctaagggcatcacagacctgttattgctcaatctcgggtggctgaacgccacttgtccctctaagaagttggg

SEQ ID NO: 64023 - DNA, 120 bp, Homo sapiens; identical to SEQ ID NO: 48525
  misc_feature: 609 for SV(C|O) and 18S

SEQ ID NO: 64024 - DNA, 120 bp, Homo sapiens; identical to SEQ ID NO: 48607
  misc_feature: 608 for SV(C|O) and 18S

SEQ ID NO: 64025 - DNA, 120 bp, Homo sapiens; identical to SEQ ID NO: 48445
  misc_feature: 608 for SV(C|O) and 18S

SEQ ID NO: 64026 - DNA, 120 bp, Homo sapiens
  misc_feature: 608 for SV(C|O) and 18S
tagcggcgcaatacgaatgcccccggccgtccctcttaatcatggcctcagttccgaaaaccaacaaaatagaaccgcggtcctattccattattcctagctgcggtatccaggcggctc

SEQ ID NO: 64027 - DNA, 120 bp, Homo sapiens; identical to SEQ ID NO: 48027
  misc_feature: 608 for SV(C|O) and 18S

SEQ ID NO: 64028 - DNA, 120 bp, Homo sapiens
  misc_feature: 608 for SV(C|O) and 18S
aaagtggactcattccaattacagggcctcgaaagagtcctgtattgttatttttcgtcactacctccccgggtcgggagtgggtaatttgcgcgcctgctgccttccttggatgtggta

SEQ ID NO: 64029 - DNA, 120 bp, Homo sapiens; identical to SEQ ID NO: 47892
  misc_feature: 608 for SV(C|O) and 18S

SEQ ID NO: 64030 - DNA, 120 bp, Homo sapiens
  misc_feature: 608 for SV(C|O) and 18S
cattccaattacagggcctcgaaagagtcctgtattgttatttttcgtcactacctccccgggtcgggagtgggtaatttgcgcgcctgctgccttccttggatgtggtagccgtttctc

SEQ ID NO: 64031 - DNA, 120 bp, Homo sapiens
  misc_feature: 608 for SV(C|O) and 18S
gacggtatctgatcgtcttcgaacctccgactttcgttcttgattaatgaaaacattcttggcaaatgctttcgctctggtccgtcttgcgccggtccaagaatttcacctctagcggcg

SEQ ID NO: 64032 - DNA, 120 bp, Homo sapiens
  misc_feature: 608 for SV(C|O) and 18S
cccgaggttatctagagtcaccaaagccgccggcgcccgccccccggccggggccggagaggggctgaccgggttggttttgatctgataaatgcacgcatcccccccgcgaagggggtc

SEQ ID NO: 64033 - DNA, 120 bp, Homo sapiens
  misc_feature: 608 for SV(C|O) and 18S
ccaactaagaacggccatgcaccaccacccacggaatcgagaaagagctatcaatctgtcaatcctgtccgtgtccgggccgggtgaggtttcccgtgttgagtcaaattaagccgcagg

SEQ ID NO: 64034 - DNA, 120 bp, Homo sapiens
  misc_feature: 607 for SV(C|O) and 18S
tggccgttcttagttggtggagcgatttgtctggttaattccgataacgaacgagactctggcatgctaactagttacgcgacccccgagcggtcggcgtcccccaacttcttagaggga

SEQ ID NO: 64035 - DNA, 120 bp, Homo sapiens; identical to SEQ ID NO: 48290
  misc_feature: 607 for SV(C|O) and 18S

SEQ ID NO: 64036 - DNA, 120 bp, Homo sapiens; identical to SEQ ID NO: 47902
  misc_feature: 607 for SV(C|O) and 18S

SEQ ID NO: 64037 - DNA, 120 bp, Homo sapiens
  misc_feature: 607 for SV(C|O) and 18S
tcgaaagagtcctgtattgttatttttcgtcactacctccccgggtcgggagtgggtaatttgcgcgcctgctgccttccttggatgtggtagccgtttctcaggctccctctccggaat

SEQ ID NO: 64038 - DNA, 120 bp, Homo sapiens
  misc_feature: 607 for SV(C|O) and 18S
tccaattacagggcctcgaaagagtcctgtattgttatttttcgtcactacctccccgggtcgggagtgggtaatttgcgcgcctgctgccttccttggatgtggtagccgtttctcagg

SEQ ID NO: 64039 - DNA, 120 bp, Homo sapiens
  misc_feature: 607 for SV(C|O) and 18S
gctaactagttacgcgacccccgagcggtcggcgtcccccaacttcttagagggacaagtggcgttcagccacccgagattgagcaataacaggtctgtgatgcccttagatgtccgggg

SEQ ID NO: 64040 - DNA, 120 bp, Homo sapiens
  misc_feature: 607 for SV(C|O) and 18S
gaacggccatgcaccaccacccacggaatcgagaaagagctatcaatctgtcaatcctgtccgtgtccgggccgggtgaggtttcccgtgttgagtcaaattaagccgcaggctccactc

SEQ ID NO: 64041 - DNA, 120 bp, Homo sapiens; identical to SEQ ID NO: 47739
  misc_feature: 607 for SV(C|O) and 18S

SEQ ID NO: 64042 - DNA, 120 bp, Homo sapiens
  misc_feature: 607 for SV(C|O) and 18S
aaccagacaaatcgctccaccaactaagaacggccatgcaccaccacccacggaatcgagaaagagctatcaatctgtcaatcctgtccgtgtccgggccgggtgaggtttcccgtgttg

SEQ ID NO: 64043 - DNA, 120 bp, Homo sapiens; identical to SEQ ID NO: 48233
  misc_feature: 606 for SV(C|O) and 18S

SEQ ID NO: 64044 - DNA, 120 bp, Homo sapiens
  misc_feature: 606 for SV(C|O) and 18S
ggtatctgatcgtcttcgaacctccgactttcgttcttgattaatgaaaacattcttggcaaatgctttcgctctggtccgtcttgcgccggtccaagaatttcacctctagcggcgcaa

SEQ ID NO: 64045 - DNA, 120 bp, Homo sapiens; identical to SEQ ID NO: 48245
  misc_feature: 606 for SV(C|O) and 18S

SEQ ID NO: 64046 - DNA, 120 bp, Homo sapiens; identical to SEQ ID NO: 48171
  misc_feature: 606 for SV(C|O) and 18S

SEQ ID NO: 64047 - DNA, 120 bp, Homo sapiens; identical to SEQ ID NO: 47863
  misc_feature: 606 for SV(C|O) and 18S

SEQ ID NO: 64048 - DNA, 120 bp, Homo sapiens
  misc_feature: 606 for SV(C|O) and 18S
aaagagtcctgtattgttatttttcgtcactacctccccgggtcgggagtgggtaatttgcgcgcctgctgccttccttggatgtggtagccgtttctcaggctccctctccggaatcga

SEQ ID NO: 64049 - DNA, 120 bp, Homo sapiens; identical to SEQ ID NO: 48342
  misc_feature: 606 for SV(C|O) and 18S

SEQ ID NO: 64050 - DNA, 120 bp, Homo sapiens
  misc_feature: 606 for SV(C|O) and 18S
ggcggtccgccgcgaggcgagccaccgcccgtccccgccccttgcctctcggcgccccctcgatgctcttagctgagtgtcccgcggggcccgaagcgtttactttgaaaaaattagagt

SEQ ID NO: 64051 - DNA, 120 bp, Homo sapiens
  misc_feature: 606 for SV(C|O) and 18S
ggaccggcgcaagacggaccagagcgaaagcatttgccaagaatgttttcattaatcaagaacgaaagtcggaggttcgaagacgatcagataccgtcgtagttccgaccataaacgatg

SEQ ID NO: 64052 - DNA, 120 bp, Homo sapiens; identical to SEQ ID NO: 48459
  misc_feature: 606 for SV(C|O) and 18S

SEQ ID NO: 64053 - DNA, 120 bp, Homo sapiens
  misc_feature: 606 for SV(C|O) and 18S
ctaactagttacgcgacccccgagcggtcggcgtcccccaacttcttagagggacaagtggcgttcagccacccgagattgagcaataacaggtctgtgatgcccttagatgtccggggc

SEQ ID NO: 64054 - DNA, 120 bp, Homo sapiens; identical to SEQ ID NO: 48073
  misc_feature: 606 for SV(C|O) and 18S

SEQ ID NO: 64055 - DNA, 120 bp, Homo sapiens
  misc_feature: 606 for SV(C|O) and 18S
ataacgccgccgcatcgccggtcggcatcgtttatggtcggaactacgacggtatctgatcgtcttcgaacctccgactttcgttcttgattaatgaaaacattcttggcaaatgctttc

SEQ ID NO: 64056 - DNA, 120 bp, Homo sapiens
  misc_feature: 606 for SV(C|O) and 18S
gaaagagtcctgtattgttatttttcgtcactacctccccgggtcgggagtgggtaatttgcgcgcctgctgccttccttggatgtggtagccgtttctcaggctccctctccggaatcg

SEQ ID NO: 64057 - DNA, 120 bp, Homo sapiens
  misc_feature: 606 for SV(C|O) and 18S
ctcattccaattacagggcctcgaaagagtcctgtattgttatttttcgtcactacctccccgggtcgggagtgggtaatttgcgcgcctgctgccttccttggatgtggtagccgtttc

SEQ ID NO: 64058 - DNA, 120 bp, Homo sapiens
  misc_feature: 605 for SV(C|O) and 18S
tttaaagtggactcattccaattacagggcctcgaaagagtcctgtattgttatttttcgtcactacctccccgggtcgggagtgggtaatttgcgcgcctgctgccttccttggatgtg

SEQ ID NO: 64059 - DNA, 120 bp, Homo sapiens
  misc_feature: 605 for SV(C|O) and 18S
tatctgatcgtcttcgaacctccgactttcgttcttgattaatgaaaacattcttggcaaatgctttcgctctggtccgtcttgcgccggtccaagaatttcacctctagcggcgcaata

SEQ ID NO: 64060 - DNA, 120 bp, Homo sapiens; identical to SEQ ID NO: 48279
  misc_feature: 605 for SV(C|O) and 18S

SEQ ID NO: 64061 - DNA, 120 bp, Homo sapiens
  misc_feature: 605 for SV(C|O) and 18S
ggggccggagaggggctgaccgggttggttttgatctgataaatgcacgcatcccccccgcgaagggggtcagcgcccgtcggcatgtattagctctagaattaccacagttatccaagt

SEQ ID NO: 64062 - DNA, 120 bp, Homo sapiens
  misc_feature: 605 for SV(C|O) and 18S
ccaattacagggcctcgaaagagtcctgtattgttatttttcgtcactacctccccgggtcgggagtgggtaatttgcgcgcctgctgccttccttggatgtggtagccgtttctcaggc

SEQ ID NO: 64063 - DNA, 120 bp, Homo sapiens; identical to SEQ ID NO: 47867
  misc_feature: 605 for SV(C|O) and 18S

SEQ ID NO: 64064 - DNA, 120 bp, Homo sapiens; identical to SEQ ID NO: 48632
  misc_feature: 605 for SV(C|O) and 18S

SEQ ID NO: 64065 - DNA, 120 bp, Homo sapiens
  misc_feature: 604 for SV(C|O) and 18S
gggttacccgcgcctgccggcgtagggtaggcacacgctgagccagtcagtgtagcgcgcgtgcagccccggacatctaagggcatcacagacctgttattgctcaatctcgggtggctg

SEQ ID NO: 64066 - DNA, 120 bp, Homo sapiens
  misc_feature: 604 for SV(C|O) and 18S
ggactcattccaattacagggcctcgaaagagtcctgtattgttatttttcgtcactacctccccgggtcgggagtgggtaatttgcgcgcctgctgccttccttggatgtggtagccgt

SEQ ID NO: 64067 - DNA, 120 bp, Homo sapiens
  misc_feature: 604 for SV(C|O) and 18S
atgcgtgcatttatcagatcaaaaccaacccggtcagcccctctccggccccggccggggggcgggcgccggcggctttggtgactctagataacctcgggccgatcgcacgccccccgt

SEQ ID NO: 64068 - DNA, 120 bp, Homo sapiens
  misc_feature: 604 for SV(C|O) and 18S
acccacggaatcgagaaagagctatcaatctgtcaatcctgtccgtgtccgggccgggtgaggtttcccgtgttgagtcaaattaagccgcaggctccactcctggtggtgcccttccgt

SEQ ID NO: 64069 - DNA, 120 bp, Homo sapiens; identical to SEQ ID NO: 48221
  misc_feature: 603 for SV(C|O) and 18S

SEQ ID NO: 64070 - DNA, 120 bp, Homo sapiens
  misc_feature: 603 for SV(C|O) and 18S
ttagagtgttcaaagcaggcccgagccgcctggataccgcagctaggaataatggaataggaccgcggttctattttgttggttttcggaactgaggccatgattaagagggacggccgg

SEQ ID NO: 64071 - DNA, 120 bp, Homo sapiens; identical to SEQ ID NO: 48207
  misc_feature: 603 for SV(C|O) and 18S

SEQ ID NO: 64072 - DNA, 120 bp, Homo sapiens; identical to SEQ ID NO: 47696
  misc_feature: 603 for SV(C|O) and 18S

SEQ ID NO: 64073 - DNA, 120 bp, Homo sapiens
  misc_feature: 603 for SV(C|O) and 18S
ggtcgctcgctcctctcctacttggataactgtggtaattctagagctaatacatgccgacgggcgctgacccccttcgcgggggggatgcgtgcatttatcagatcaaaaccaacccgg

SEQ ID NO: 64074 - DNA, 120 bp, Homo sapiens; identical to SEQ ID NO: 48398
  misc_feature: 603 for SV(C|O) and 18S

SEQ ID NO: 64075 - DNA, 120 bp, Homo sapiens
  misc_feature: 603 for SV(C|O) and 18S
acagggcctcgaaagagtcctgtattgttatttttcgtcactacctccccgggtcgggagtgggtaatttgcgcgcctgctgccttccttggatgtggtagccgtttctcaggctccctc

SEQ ID NO: 64076 - DNA, 120 bp, Homo sapiens
  misc_feature: 603 for SV(C|O) and 18S
ccgaccataaacgatgccgaccggcgatgcggcggcgttattcccatgacccgccgggcagcttccgggaaaccaaagtctttgggttccggggggagtatggttgcaaagctgaaactt

SEQ ID NO: 64077 - DNA, 120 bp, Homo sapiens
  misc_feature: 602 for SV(C|O) and 18S
ttatgacccgcacttactgggaattcctcgttcatggggaataattgcaatccccgatccccatcacgaatggggttcaacgggttacccgcgcctgccggcgtagggtaggcacacgct

SEQ ID NO: 64078 - DNA, 120 bp, Homo sapiens; identical to SEQ ID NO: 47942
  misc_feature: 602 for SV(C|O) and 18S

SEQ ID NO: 64079 - DNA, 120 bp, Homo sapiens
  misc_feature: 602 for SV(C|O) and 18S
gggccggagaggggctgaccgggttggttttgatctgataaatgcacgcatcccccccgcgaagggggtcagcgcccgtcggcatgtattagctctagaattaccacagttatccaagta

SEQ ID NO: 64080 - DNA, 120 bp, Homo sapiens; identical to SEQ ID NO: 48533
  misc_feature: 602 for SV(C|O) and 18S

SEQ ID NO: 64081 - DNA, 120 bp, Homo sapiens
  misc_feature: 602 for SV(C|O) and 18S
cgacggtatctgatcgtcttcgaacctccgactttcgttcttgattaatgaaaacattcttggcaaatgctttcgctctggtccgtcttgcgccggtccaagaatttcacctctagcggc

SEQ ID NO: 64082 - DNA, 120 bp, Homo sapiens
  misc_feature: 602 for SV(C|O) and 18S
atggccgttcttagttggtggagcgatttgtctggttaattccgataacgaacgagactctggcatgctaactagttacgcgacccccgagcggtcggcgtcccccaacttcttagaggg

SEQ ID NO: 64083 - DNA, 120 bp, Homo sapiens; identical to SEQ ID NO: 48546
  misc_feature: 602 for SV(C|O) and 18S

SEQ ID NO: 64084 - DNA, 120 bp, Homo sapiens
  misc_feature: 601 for SV(C|O) and 18S
ttaaagtggactcattccaattacagggcctcgaaagagtcctgtattgttatttttcgtcactacctccccgggtcgggagtgggtaatttgcgcgcctgctgccttccttggatgtgg

SEQ ID NO: 64085 - DNA, 120 bp, Homo sapiens
  misc_feature: 601 for SV(C|O) and 18S
cctcgaaagagtcctgtattgttatttttcgtcactacctccccgggtcgggagtgggtaatttgcgcgcctgctgccttccttggatgtggtagccgtttctcaggctccctctccgga

SEQ ID NO: 64086 - DNA, 120 bp, Homo sapiens
  misc_feature: 601 for SV(C|O) and 18S
cgaaagagtcctgtattgttatttttcgtcactacctccccgggtcgggagtgggtaatttgcgcgcctgctgccttccttggatgtggtagccgtttctcaggctccctctccggaatc

SEQ ID NO: 64087 - DNA, 120 bp, Homo sapiens; identical to SEQ ID NO: 47776
  misc_feature: 601 for SV(C|O) and 18S

SEQ ID NO: 64088 - DNA, 120 bp, Homo sapiens
  misc_feature: 601 for SV(C|O) and 18S
cagggcctcgaaagagtcctgtattgttatttttcgtcactacctccccgggtcgggagtgggtaatttgcgcgcctgctgccttccttggatgtggtagccgtttctcaggctccctct

SEQ ID NO: 64089 - DNA, 120 bp, Homo sapiens; identical to SEQ ID NO: 47749
  misc_feature: 601 for SV(C|O) and 18S

SEQ ID NO: 64090 - DNA, 120 bp, Homo sapiens; identical to SEQ ID NO: 47849
  misc_feature: 600 for SV(C|O) and 18S

SEQ ID NO: 64091 - DNA, 120 bp, Homo sapiens
  misc_feature: 600 for SV(C|O) and 18S
ctcgaaagagtcctgtattgttatttttcgtcactacctccccgggtcgggagtgggtaatttgcgcgcctgctgccttccttggatgtggtagccgtttctcaggctccctctccggaa

SEQ ID NO: 64092 - DNA, 120 bp, Homo sapiens
  misc_feature: 600 for SV(C|O) and 18S
tggtcggaactacgacggtatctgatcgtcttcgaacctccgactttcgttcttgattaatgaaaacattcttggcaaatgctttcgctctggtccgtcttgcgccggtccaagaatttc

SEQ ID NO: 64093 - DNA, 120 bp, Homo sapiens
  misc_feature: 600 for SV(C|O) and 18S
tgacccgcacttactgggaattcctcgttcatggggaataattgcaatccccgatccccatcacgaatggggttcaacgggttacccgcgcctgccggcgtagggtaggcacacgctgag

SEQ ID NO: 64094 - DNA, 120 bp, Homo sapiens; identical to SEQ ID NO: 48878
  misc_feature: 600 for SV(C|O) and 18S

SEQ ID NO: 64095 - DNA, 120 bp, Homo sapiens; identical to SEQ ID NO: 47819
  misc_feature: 600 for SV(C|O) and 18S

SEQ ID NO: 64096 - DNA, 120 bp, Homo sapiens
  misc_feature: 600 for SV(C|O) and 18S
acggtatctgatcgtcttcgaacctccgactttcgttcttgattaatgaaaacattcttggcaaatgctttcgctctggtccgtcttgcgccggtccaagaatttcacctctagcggcgc

SEQ ID NO: 64097 - DNA, 120 bp, Homo sapiens; identical to SEQ ID NO: 48474
  misc_feature: 600 for SV(C|O) and 18S

SEQ ID NO: 64098 - DNA, 120 bp, Homo sapiens
  misc_feature: 599 for SV(C|O) and 18S
ttaaccagacaaatcgctccaccaactaagaacggccatgcaccaccacccacggaatcgagaaagagctatcaatctgtcaatcctgtccgtgtccgggccgggtgaggtttcccgtgt

SEQ ID NO: 64099 - DNA, 120 bp, Homo sapiens; identical to SEQ ID NO: 48262
  misc_feature: 599 for SV(C|O) and 18S

SEQ ID NO: 64100 - DNA, 120 bp, Homo sapiens; identical to SEQ ID NO: 48264
  misc_feature: 599 for SV(C|O) and 18S

SEQ ID NO: 64101 - DNA, 120 bp, Homo sapiens; identical to SEQ ID NO: 47784
  misc_feature: 599 for SV(C|O) and 18S

SEQ ID NO: 64102 - DNA, 120 bp, Homo sapiens; identical to SEQ ID NO: 47790
  misc_feature: 599 for SV(C|O) and 18S

SEQ ID NO: 64103 - DNA, 120 bp, Homo sapiens; identical to SEQ ID NO: 47913
  misc_feature: 599 for SV(C|O) and 18S

SEQ ID NO: 64104 - DNA, 120 bp, Homo sapiens
  misc_feature: 599 for SV(C|O) and 18S
gtgcatttatcagatcaaaaccaacccggtcagcccctctccggccccggccggggggcgggcgccggcggctttggtgactctagataacctcgggccgatcgcacgccccccgtggcg

SEQ ID NO: 64105 - DNA, 120 bp, Homo sapiens
  misc_feature: 599 for SV(C|O) and 18S
gtcgctcgctcctctcctacttggataactgtggtaattctagagctaatacatgccgacgggcgctgacccccttcgcgggggggatgcgtgcatttatcagatcaaaaccaacccggt

SEQ ID NO: 64106 - DNA, 120 bp, Homo sapiens; identical to SEQ ID NO: 47785
  misc_feature: 599 for SV(C|O) and 18S

SEQ ID NO: 64107 - DNA, 120 bp, Homo sapiens; identical to SEQ ID NO: 48090
  misc_feature: 599 for SV(C|O) and 18S

SEQ ID NO: 64108 - DNA, 120 bp, Homo sapiens
  misc_feature: 599 for SV(C|O) and 18S
gactcattccaattacagggcctcgaaagagtcctgtattgttatttttcgtcactacctccccgggtcgggagtgggtaatttgcgcgcctgctgccttccttggatgtggtagccgtt

SEQ ID NO: 64109 - DNA, 120 bp, Homo sapiens; identical to SEQ ID NO: 48175
  misc_feature: 599 for SV(C|O) and 18S

SEQ ID NO: 64110 - DNA, 120 bp, Homo sapiens
  misc_feature: 599 for SV(C|O) and 18S
acgctgagccagtcagtgtagcgcgcgtgcagccccggacatctaagggcatcacagacctgttattgctcaatctcgggtggctgaacgccacttgtccctctaagaagttgggggacg

SEQ ID NO: 64111 - DNA, 120 bp, Homo sapiens
  misc_feature: 599 for SV(C|O) and 18S
cgtatattaaagttgctgcagttaaaaagctcgtagttggatcttgggagcgggcgggcggtccgccgcgaggcgagccaccgcccgtccccgccccttgcctctcggcgccccctcgat

SEQ ID NO: 64112 - DNA, 120 bp, Homo sapiens; identical to SEQ ID NO: 48433
  misc_feature: 599 for SV(C|O) and 18S

SEQ ID NO: 64113 - DNA, 120 bp, Homo sapiens; identical to SEQ ID NO: 48165
  misc_feature: 598 for SV(C|O) and 18S

SEQ ID NO: 64114 - DNA, 120 bp, Homo sapiens; identical to SEQ ID NO: 48222
  misc_feature: 598 for SV(C|O) and 18S

SEQ ID NO: 64115 - DNA, 120 bp, Homo sapiens
  misc_feature: 598 for SV(C|O) and 18S
taactagttacgcgacccccgagcggtcggcgtcccccaacttcttagagggacaagtggcgttcagccacccgagattgagcaataacaggtctgtgatgcccttagatgtccggggct

SEQ ID NO: 64116 - DNA, 120 bp, Homo sapiens; identical to SEQ ID NO: 48216
  misc_feature: 598 for SV(C|O) and 18S

SEQ ID NO: 64117 - DNA, 120 bp, Homo sapiens
  misc_feature: 598 for SV(C|O) and 18S
gttcaaagcaggcccgagccgcctggataccgcagctaggaataatggaataggaccgcggttctattttgttggttttcggaactgaggccatgattaagagggacggccgggggcatt

SEQ ID NO: 64118 - DNA, 120 bp, Homo sapiens; identical to SEQ ID NO: 47795
  misc_feature: 598 for SV(C|O) and 18S

SEQ ID NO: 64119 - DNA, 120 bp, Homo sapiens
  misc_feature: 598 for SV(C|O) and 18S
cgctgagccagtcagtgtagcgcgcgtgcagccccggacatctaagggcatcacagacctgttattgctcaatctcgggtggctgaacgccacttgtccctctaagaagttgggggacgc

SEQ ID NO: 64120 - DNA, 120 bp, Homo sapiens; identical to SEQ ID NO: 48900
  misc_feature: 598 for SV(C|O) and 18S

SEQ ID NO: 64121 - DNA, 120 bp, Homo sapiens; identical to SEQ ID NO: 48568
  misc_feature: 598 for SV(C|O) and 18S

SEQ ID NO: 64122 - DNA, 120 bp, Homo sapiens
  misc_feature: 598 for SV(C|O) and 18S
catttatcagatcaaaaccaacccggtcagcccctctccggccccggccggggggcgggcgccggcggctttggtgactctagataacctcgggccgatcgcacgccccccgtggcggcg

SEQ ID NO: 64123 - DNA, 120 bp, Homo sapiens
  misc_feature: 598 for SV(C|O) and 18S
actcattccaattacagggcctcgaaagagtcctgtattgttatttttcgtcactacctccccgggtcgggagtgggtaatttgcgcgcctgctgccttccttggatgtggtagccgttt

SEQ ID NO: 64124 - DNA, 120 bp, Homo sapiens; identical to SEQ ID NO: 47853
  misc_feature: 597 for SV(C|O) and 18S

SEQ ID NO: 64125 - DNA, 120 bp, Homo sapiens
  misc_feature: 597 for SV(C|O) and 18S
ggttacccgcgcctgccggcgtagggtaggcacacgctgagccagtcagtgtagcgcgcgtgcagccccggacatctaagggcatcacagacctgttattgctcaatctcgggtggctga

SEQ ID NO: 64126 - DNA, 120 bp, Homo sapiens
  misc_feature: 597 for SV(C|O) and 18S
tagagtgttcaaagcaggcccgagccgcctggataccgcagctaggaataatggaataggaccgcggttctattttgttggttttcggaactgaggccatgattaagagggacggccggg

SEQ ID NO: 64127 - DNA, 120 bp, Homo sapiens
  misc_feature: 597 for SV(C|O) and 18S
taaccagacaaatcgctccaccaactaagaacggccatgcaccaccacccacggaatcgagaaagagctatcaatctgtcaatcctgtccgtgtccgggccgggtgaggtttcccgtgtt

SEQ ID NO: 64128 - DNA, 120 bp, Homo sapiens
  misc_feature: 597 for SV(C|O) and 18S
gggcctcgaaagagtcctgtattgttatttttcgtcactacctccccgggtcgggagtgggtaatttgcgcgcctgctgccttccttggatgtggtagccgtttctcaggctccctctcc

SEQ ID NO: 64129 - DNA, 120 bp, Homo sapiens; identical to SEQ ID NO: 48274
  misc_feature: 597 for SV(C|O) and 18S

SEQ ID NO: 64130 - DNA, 120 bp, Homo sapiens
  misc_feature: 597 for SV(C|O) and 18S
gcccgaggttatctagagtcaccaaagccgccggcgcccgccccccggccggggccggagaggggctgaccgggttggttttgatctgataaatgcacgcatcccccccgcgaagggggt

SEQ ID NO: 64131 - DNA, 120 bp, Homo sapiens; identical to SEQ ID NO: 48013
  misc_feature: 597 for SV(C|O) and 18S

SEQ ID NO: 64132 - DNA, 120 bp, Homo sapiens; identical to SEQ ID NO: 47924
  misc_feature: 596 for SV(C|O) and 18S

SEQ ID NO: 64133 - DNA, 120 bp, Homo sapiens
  misc_feature: 596 for SV(C|O) and 18S
taaagtggactcattccaattacagggcctcgaaagagtcctgtattgttatttttcgtcactacctccccgggtcgggagtgggtaatttgcgcgcctgctgccttccttggatgtggt

SEQ ID NO: 64134 - DNA, 120 bp, Homo sapiens
  misc_feature: 596 for SV(C|O) and 18S
atctgatcgtcttcgaacctccgactttcgttcttgattaatgaaaacattcttggcaaatgctttcgctctggtccgtcttgcgccggtccaagaatttcacctctagcggcgcaatac

SEQ ID NO: 64135 - DNA, 120 bp, Homo sapiens; identical to SEQ ID NO: 48677
  misc_feature: 596 for SV(C|O) and 18S

SEQ ID NO: 64136 - DNA, 120 bp, Homo sapiens
  misc_feature: 596 for SV(C|O) and 18S
atttaaagtggactcattccaattacagggcctcgaaagagtcctgtattgttatttttcgtcactacctccccgggtcgggagtgggtaatttgcgcgcctgctgccttccttggatgt

SEQ ID NO: 64137 - DNA, 120 bp, Homo sapiens
  misc_feature: 596 for SV(C|O) and 18S
aagcaggcccgagccgcctggataccgcagctaggaataatggaataggaccgcggttctattttgttggttttcggaactgaggccatgattaagagggacggccgggggcattcgtat

SEQ ID NO: 64138 - DNA, 120 bp, Homo sapiens
  misc_feature: 595 for SV(C|O) and 18S
ccgaggttatctagagtcaccaaagccgccggcgcccgccccccggccggggccggagaggggctgaccgggttggttttgatctgataaatgcacgcatcccccccgcgaagggggtca

SEQ ID NO: 64139 - DNA, 120 bp, Homo sapiens
  misc_feature: 595 for SV(C|O) and 18S
tcgctcgctcctctcctacttggataactgtggtaattctagagctaatacatgccgacgggcgctgacccccttcgcgggggggatgcgtgcatttatcagatcaaaaccaacccggtc

SEQ ID NO: 64140 - DNA, 120 bp, Homo sapiens
  misc_feature: 595 for SV(C|O) and 18S
agagtgttcaaagcaggcccgagccgcctggataccgcagctaggaataatggaataggaccgcggttctattttgttggttttcggaactgaggccatgattaagagggacggccgggg

SEQ ID NO: 64141 - DNA, 120 bp, Homo sapiens
  misc_feature: 595 for SV(C|O) and 18S
caaagcaggcccgagccgcctggataccgcagctaggaataatggaataggaccgcggttctattttgttggttttcggaactgaggccatgattaagagggacggccgggggcattcgt

SEQ ID NO: 64142 - DNA, 120 bp, Homo sapiens; identical to SEQ ID NO: 47917
  misc_feature: 594 for SV(C|O) and 18S

SEQ ID NO: 64143 - DNA, 120 bp, Homo sapiens; identical to SEQ ID NO: 47861
  misc_feature: 594 for SV(C|O) and 18S

SEQ ID NO: 64144 - DNA, 120 bp, Homo sapiens
  misc_feature: 594 for SV(C|O) and 18S
tgcgtgcatttatcagatcaaaaccaacccggtcagcccctctccggccccggccggggggcgggcgccggcggctttggtgactctagataacctcgggccgatcgcacgccccccgtg

SEQ ID NO: 64145 - DNA, 120 bp, Homo sapiens
  misc_feature: 594 for SV(C|O) and 18S
cggtatctgatcgtcttcgaacctccgactttcgttcttgattaatgaaaacattcttggcaaatgctttcgctctggtccgtcttgcgccggtccaagaatttcacctctagcggcgca

SEQ ID NO: 64146 - DNA, 120 bp, Homo sapiens
  misc_feature: 594 for SV(C|O) and 18S
gcaccagacttgccctccaatggatcctcgttaaaggatttaaagtggactcattccaattacagggcctcgaaagagtcctgtattgttatttttcgtcactacctccccgggtcggga

SEQ ID NO: 64147 - DNA, 120 bp, Homo sapiens
  misc_feature: 594 for SV(C|O) and 18S
gtagggtaggcacacgctgagccagtcagtgtagcgcgcgtgcagccccggacatctaagggcatcacagacctgttattgctcaatctcgggtggctgaacgccacttgtccctctaag

SEQ ID NO: 64148 - DNA, 120 bp, Homo sapiens; identical to SEQ ID NO: 48134
  misc_feature: 594 for SV(C|O) and 18S

SEQ ID NO: 64149 - DNA, 120 bp, Homo sapiens
  misc_feature: 594 for SV(C|O) and 18S
gctgagccagtcagtgtagcgcgcgtgcagccccggacatctaagggcatcacagacctgttattgctcaatctcgggtggctgaacgccacttgtccctctaagaagttgggggacgcc

SEQ ID NO: 64150 - DNA, 120 bp, Homo sapiens
  misc_feature: 594 for SV(C|O) and 18S
cgtgcatttatcagatcaaaaccaacccggtcagcccctctccggccccggccggggggcgggcgccggcggctttggtgactctagataacctcgggccgatcgcacgccccccgtggc

SEQ ID NO: 64151 - DNA, 120 bp, Homo sapiens
  misc_feature: 594 for SV(C|O) and 18S
agggcctcgaaagagtcctgtattgttatttttcgtcactacctccccgggtcgggagtgggtaatttgcgcgcctgctgccttccttggatgtggtagccgtttctcaggctccctctc

SEQ ID NO: 64152 - DNA, 120 bp, Homo sapiens; identical to SEQ ID NO: 47787
  misc_feature: 594 for SV(C|O) and 18S

SEQ ID NO: 64153 - DNA, 120 bp, Homo sapiens
  misc_feature: 594 for SV(C|O) and 18S
agcaggcccgagccgcctggataccgcagctaggaataatggaataggaccgcggttctattttgttggttttcggaactgaggccatgattaagagggacggccgggggcattcgtatt

SEQ ID NO: 64154 - DNA, 120 bp, Homo sapiens
  misc_feature: 593 for SV(C|O) and 18S
tagggtaggcacacgctgagccagtcagtgtagcgcgcgtgcagccccggacatctaagggcatcacagacctgttattgctcaatctcgggtggctgaacgccacttgtccctctaaga

SEQ ID NO: 64155 - DNA, 120 bp, Homo sapiens
  misc_feature: 593 for SV(C|O) and 18S
ataaacgatgccgaccggcgatgcggcggcgttattcccatgacccgccgggcagcttccgggaaaccaaagtctttgggttccggggggagtatggttgcaaagctgaaacttaaagga

SEQ ID NO: 64156 - DNA, 120 bp, Homo sapiens; identical to SEQ ID NO: 48573
  misc_feature: 593 for SV(C|O) and 18S

SEQ ID NO: 64157 - DNA, 120 bp, Homo sapiens
  misc_feature: 593 for SV(C|O) and 18S
cccaagatccaactacgagctttttaactgcagcaactttaatatacgctattggagctggaattaccgcggctgctggcaccagacttgccctccaatggatcctcgttaaaggattta

SEQ ID NO: 64158 - DNA, 120 bp, Homo sapiens
  misc_feature: 593 for SV(C|O) and 18S
gtcggcatcgtttatggtcggaactacgacggtatctgatcgtcttcgaacctccgactttcgttcttgattaatgaaaacattcttggcaaatgctttcgctctggtccgtcttgcgcc

SEQ ID NO: 64159 - DNA, 120 bp, Homo sapiens; identical to SEQ ID NO: 48700
  misc_feature: 593 for SV(C|O) and 18S

SEQ ID NO: 64160 - DNA, 120 bp, Homo sapiens; identical to SEQ ID NO: 48543
  misc_feature: 593 for SV(C|O) and 18S

SEQ ID NO: 64161 - DNA, 120 bp, Homo sapiens
  misc_feature: 593 for SV(C|O) and 18S
gccgccgcatcgccggtcggcatcgtttatggtcggaactacgacggtatctgatcgtcttcgaacctccgactttcgttcttgattaatgaaaacattcttggcaaatgctttcgctct

SEQ ID NO: 64162 - DNA, 120 bp, Homo sapiens; identical to SEQ ID NO: 47801
  misc_feature: 593 for SV(C|O) and 18S

SEQ ID NO: 64163 - DNA, 120 bp, Homo sapiens; identical to SEQ ID NO: 48132
  misc_feature: 593 for SV(C|O) and 18S

SEQ ID NO: 64164 - DNA, 120 bp, Homo sapiens
  misc_feature: 592 for SV(C|O) and 18S
accataaacgatgccgaccggcgatgcggcggcgttattcccatgacccgccgggcagcttccgggaaaccaaagtctttgggttccggggggagtatggttgcaaagctgaaacttaaa

SEQ ID NO: 64165 - DNA, 120 bp, Homo sapiens; identical to SEQ ID NO: 47919
  misc_feature: 592 for SV(C|O) and 18S

SEQ ID NO: 64166 - DNA, 120 bp, Homo sapiens
  misc_feature: 592 for SV(C|O) and 18S
aaagcaggcccgagccgcctggataccgcagctaggaataatggaataggaccgcggttctattttgttggttttcggaactgaggccatgattaagagggacggccgggggcattcgta

SEQ ID NO: 64167 - DNA, 120 bp, Homo sapiens; identical to SEQ ID NO: 48293
  misc_feature: 592 for SV(C|O) and 18S

SEQ ID NO: 64168 - DNA, 120 bp, Homo sapiens; identical to SEQ ID NO: 48130
  misc_feature: 592 for SV(C|O) and 18S

SEQ ID NO: 64169 - DNA, 120 bp, Homo sapiens; identical to SEQ ID NO: 47721
  misc_feature: 592 for SV(C|O) and 18S

SEQ ID NO: 64170 - DNA, 120 bp, Homo sapiens; identical to SEQ ID NO: 48312
  misc_feature: 592 for SV(C|O) and 18S

SEQ ID NO: 64171 - DNA, 120 bp, Homo sapiens
  misc_feature: 592 for SV(C|O) and 18S
gctcgctcctctcctacttggataactgtggtaattctagagctaatacatgccgacgggcgctgacccccttcgcgggggggatgcgtgcatttatcagatcaaaaccaacccggtcag

SEQ ID NO: 64172 - DNA, 120 bp, Homo sapiens; identical to SEQ ID NO: 47804
  misc_feature: 592 for SV(C|O) and 18S

SEQ ID NO: 64173 - DNA, 120 bp, Homo sapiens
  misc_feature: 592 for SV(C|O) and 18S
gcctcgaaagagtcctgtattgttatttttcgtcactacctccccgggtcgggagtgggtaatttgcgcgcctgctgccttccttggatgtggtagccgtttctcaggctccctctccgg

SEQ ID NO: 64174 - DNA, 120 bp, Homo sapiens; identical to SEQ ID NO: 48023
  misc_feature: 592 for SV(C|O) and 18S

SEQ ID NO: 64175 - DNA, 120 bp, Homo sapiens; identical to SEQ ID NO: 48273
  misc_feature: 592 for SV(C|O) and 18S

SEQ ID NO: 64176 - DNA, 120 bp, Homo sapiens
  misc_feature: 592 for SV(C|O) and 18S
cgtgcgatcggcccgaggttatctagagtcaccaaagccgccggcgcccgccccccggccggggccggagaggggctgaccgggttggttttgatctgataaatgcacgcatcccccccg

SEQ ID NO: 64177 - DNA, 120 bp, Homo sapiens
  misc_feature: 592 for SV(C|O) and 18S
cataaacgatgccgaccggcgatgcggcggcgttattcccatgacccgccgggcagcttccgggaaaccaaagtctttgggttccggggggagtatggttgcaaagctgaaacttaaagg

SEQ ID NO: 64178 - DNA, 120 bp, Homo sapiens
  misc_feature: 592 for SV(C|O) and 18S
catggccgttcttagttggtggagcgatttgtctggttaattccgataacgaacgagactctggcatgctaactagttacgcgacccccgagcggtcggcgtcccccaacttcttagagg

SEQ ID NO: 64179 - DNA, 120 bp, Homo sapiens; identical to SEQ ID NO: 48333
  misc_feature: 592 for SV(C|O) and 18S

SEQ ID NO: 64180 - DNA, 120 bp, Homo sapiens
  misc_feature: 591 for SV(C|O) and 18S
ggggcattcgtattgcgccgctagaggtgaaattcttggaccggcgcaagacggaccagagcgaaagcatttgccaagaatgttttcattaatcaagaacgaaagtcggaggttcgaaga

SEQ ID NO: 64181 - DNA, 120 bp, Homo sapiens; identical to SEQ ID NO: 47803
  misc_feature: 591 for SV(C|O) and 18S

SEQ ID NO: 64182 - DNA, 120 bp, Homo sapiens
  misc_feature: 591 for SV(C|O) and 18S
gcatcgtttatggtcggaactacgacggtatctgatcgtcttcgaacctccgactttcgttcttgattaatgaaaacattcttggcaaatgctttcgctctggtccgtcttgcgccggtc

SEQ ID NO: 64183 - DNA, 120 bp, Homo sapiens
  misc_feature: 591 for SV(C|O) and 18S
ccataaacgatgccgaccggcgatgcggcggcgttattcccatgacccgccgggcagcttccgggaaaccaaagtctttgggttccggggggagtatggttgcaaagctgaaacttaaag

SEQ ID NO: 64184 - DNA, 120 bp, Homo sapiens; identical to SEQ ID NO: 48211
  misc_feature: 591 for SV(C|O) and 18S

SEQ ID NO: 64185 - DNA, 120 bp, Homo sapiens; identical to SEQ ID NO: 48284
  misc_feature: 591 for SV(C|O) and 18S

SEQ ID NO: 64186 - DNA, 120 bp, Homo sapiens; identical to SEQ ID NO: 48665
  misc_feature: 591 for SV(C|O) and 18S

SEQ ID NO: 64187 - DNA, 120 bp, Homo sapiens
  misc_feature: 590 for SV(C|O) and 18S
ttcaaagcaggcccgagccgcctggataccgcagctaggaataatggaataggaccgcggttctattttgttggttttcggaactgaggccatgattaagagggacggccgggggcattc

SEQ ID NO: 64188 - DNA, 120 bp, Homo sapiens; identical to SEQ ID NO: 48159
  misc_feature: 590 for SV(C|O) and 18S

SEQ ID NO: 64189 - DNA, 120 bp, Homo sapiens
  misc_feature: 590 for SV(C|O) and 18S
tatgacccgcacttactgggaattcctcgttcatggggaataattgcaatccccgatccccatcacgaatggggttcaacgggttacccgcgcctgccggcgtagggtaggcacacgctg

SEQ ID NO: 64190 - DNA, 120 bp, Homo sapiens
  misc_feature: 590 for SV(C|O) and 18S
taacgccgccgcatcgccggtcggcatcgtttatggtcggaactacgacggtatctgatcgtcttcgaacctccgactttcgttcttgattaatgaaaacattcttggcaaatgctttcg

SEQ ID NO: 64191 - DNA, 120 bp, Homo sapiens
  misc_feature: 590 for SV(C|O) and 18S
gttatctagagtcaccaaagccgccggcgcccgccccccggccggggccggagaggggctgaccgggttggttttgatctgataaatgcacgcatcccccccgcgaagggggtcagcgcc

SEQ ID NO: 64192 - DNA, 120 bp, Homo sapiens; identical to SEQ ID NO: 47820
  misc_feature: 590 for SV(C|O) and 18S

SEQ ID NO: 64193 - DNA, 120 bp, Homo sapiens
  misc_feature: 590 for SV(C|O) and 18S
ggcctcgaaagagtcctgtattgttatttttcgtcactacctccccgggtcgggagtgggtaatttgcgcgcctgctgccttccttggatgtggtagccgtttctcaggctccctctccg

SEQ ID NO: 64194 - DNA, 120 bp, Homo sapiens
  misc_feature: 590 for SV(C|O) and 18S
gcatggccgttcttagttggtggagcgatttgtctggttaattccgataacgaacgagactctggcatgctaactagttacgcgacccccgagcggtcggcgtcccccaacttcttagag

SEQ ID NO: 64195 - DNA, 120 bp, Homo sapiens
  misc_feature: 589 for SV(C|O) and 18S
gtgcgatcggcccgaggttatctagagtcaccaaagccgccggcgcccgccccccggccggggccggagaggggctgaccgggttggttttgatctgataaatgcacgcatcccccccgc

SEQ ID NO: 64196 - DNA, 120 bp, Homo sapiens
  misc_feature: 589 for SV(C|O) and 18S
ggttatctagagtcaccaaagccgccggcgcccgccccccggccggggccggagaggggctgaccgggttggttttgatctgataaatgcacgcatcccccccgcgaagggggtcagcgc

SEQ ID NO: 64197 - DNA, 120 bp, Homo sapiens
  misc_feature: 589 for SV(C|O) and 18S
ggtcggcatcgtttatggtcggaactacgacggtatctgatcgtcttcgaacctccgactttcgttcttgattaatgaaaacattcttggcaaatgctttcgctctggtccgtcttgcgc

SEQ ID NO: 64198 - DNA, 120 bp, Homo sapiens
  misc_feature: 589 for SV(C|O) and 18S
aacgccgccgcatcgccggtcggcatcgtttatggtcggaactacgacggtatctgatcgtcttcgaacctccgactttcgttcttgattaatgaaaacattcttggcaaatgctttcgc

SEQ ID NO: 64199 - DNA, 120 bp, Homo sapiens; identical to SEQ ID NO: 48028
  misc_feature: 589 for SV(C|O) and 18S

SEQ ID NO: 64200 - DNA, 120 bp, Homo sapiens; identical to SEQ ID NO: 48727
  misc_feature: 589 for SV(C|O) and 18S

SEQ ID NO: 64201 - DNA, 120 bp, Homo sapiens
  misc_feature: 589 for SV(C|O) and 18S
cggggccggagaggggctgaccgggttggttttgatctgataaatgcacgcatcccccccgcgaagggggtcagcgcccgtcggcatgtattagctctagaattaccacagttatccaag

SEQ ID NO: 64202 - DNA, 120 bp, Homo sapiens
  misc_feature: 589 for SV(C|O) and 18S
ctgagccagtcagtgtagcgcgcgtgcagccccggacatctaagggcatcacagacctgttattgctcaatctcgggtggctgaacgccacttgtccctctaagaagttgggggacgccg

SEQ ID NO: 64203 - DNA, 120 bp, Homo sapiens
  misc_feature: 589 for SV(C|O) and 18S
cgaggttatctagagtcaccaaagccgccggcgcccgccccccggccggggccggagaggggctgaccgggttggttttgatctgataaatgcacgcatcccccccgcgaagggggtcag

SEQ ID NO: 64204 - DNA, 120 bp, Homo sapiens; identical to SEQ ID NO: 47852
  misc_feature: 589 for SV(C|O) and 18S

SEQ ID NO: 64205 - DNA, 120 bp, Homo sapiens
  misc_feature: 589 for SV(C|O) and 18S
agcggcgcaatacgaatgcccccggccgtccctcttaatcatggcctcagttccgaaaaccaacaaaatagaaccgcggtcctattccattattcctagctgcggtatccaggcggctcg

SEQ ID NO: 64206 - DNA, 120 bp, Homo sapiens; identical to SEQ ID NO: 47990
  misc_feature: 589 for SV(C|O) and 18S

SEQ ID NO: 64207 - DNA, 120 bp, Homo sapiens
  misc_feature: 589 for SV(C|O) and 18S
aactagttacgcgacccccgagcggtcggcgtcccccaacttcttagagggacaagtggcgttcagccacccgagattgagcaataacaggtctgtgatgcccttagatgtccggggctg

SEQ ID NO: 64208 - DNA, 120 bp, Homo sapiens; identical to SEQ ID NO: 48035
  misc_feature: 589 for SV(C|O) and 18S

SEQ ID NO: 64209 - DNA, 120 bp, Homo sapiens
  misc_feature: 588 for SV(C|O) and 18S
tgcgatcggcccgaggttatctagagtcaccaaagccgccggcgcccgccccccggccggggccggagaggggctgaccgggttggttttgatctgataaatgcacgcatcccccccgcg

SEQ ID NO: 64210 - DNA, 120 bp, Homo sapiens; identical to SEQ ID NO: 47754
  misc_feature: 588 for SV(C|O) and 18S

SEQ ID NO: 64211 - DNA, 120 bp, Homo sapiens; identical to SEQ ID NO: 47821
  misc_feature: 588 for SV(C|O) and 18S

SEQ ID NO: 64212 - DNA, 120 bp, Homo sapiens
  misc_feature: 588 for SV(C|O) and 18S
gcgtgcatttatcagatcaaaaccaacccggtcagcccctctccggccccggccggggggcgggcgccggcggctttggtgactctagataacctcgggccgatcgcacgccccccgtgg

SEQ ID NO: 64213 - DNA, 120 bp, Homo sapiens
  misc_feature: 588 for SV(C|O) and 18S
gcggtccgccgcgaggcgagccaccgcccgtccccgccccttgcctctcggcgccccctcgatgctcttagctgagtgtcccgcggggcccgaagcgtttactttgaaaaaattagagtg

SEQ ID NO: 64214 - DNA, 120 bp, Homo sapiens
  misc_feature: 588 for SV(C|O) and 18S
gcggcgcaatacgaatgcccccggccgtccctcttaatcatggcctcagttccgaaaaccaacaaaatagaaccgcggtcctattccattattcctagctgcggtatccaggcggctcgg

SEQ ID NO: 64215 - DNA, 120 bp, Homo sapiens; identical to SEQ ID NO: 48540
  misc_feature: 587 for SV(C|O) and 18S

SEQ ID NO: 64216 - DNA, 120 bp, Homo sapiens
  misc_feature: 587 for SV(C|O) and 18S
tatctagagtcaccaaagccgccggcgcccgccccccggccggggccggagaggggctgaccgggttggttttgatctgataaatgcacgcatcccccccgcgaagggggtcagcgcccg

SEQ ID NO: 64217 - DNA, 120 bp, Homo sapiens
  misc_feature: 587 for SV(C|O) and 18S
cagatcaaaaccaacccggtcagcccctctccggccccggccggggggcgggcgccggcggctttggtgactctagataacctcgggccgatcgcacgccccccgtggcggcgacgaccc

SEQ ID NO: 64218 - DNA, 120 bp, Homo sapiens; identical to SEQ ID NO: 48113
  misc_feature: 587 for SV(C|O) and 18S

SEQ ID NO: 64219 - DNA, 120 bp, Homo sapiens
  misc_feature: 587 for SV(C|O) and 18S
ggcccgaggttatctagagtcaccaaagccgccggcgcccgccccccggccggggccggagaggggctgaccgggttggttttgatctgataaatgcacgcatcccccccgcgaaggggg

SEQ ID NO: 64220 - DNA, 120 bp, Homo sapiens
  misc_feature: 587 for SV(C|O) and 18S
agtgttcaaagcaggcccgagccgcctggataccgcagctaggaataatggaataggaccgcggttctattttgttggttttcggaactgaggccatgattaagagggacggccgggggc

SEQ ID NO: 64221 - DNA, 120 bp, Homo sapiens
  misc_feature: 587 for SV(C|O) and 18S
ctgccggcgtagggtaggcacacgctgagccagtcagtgtagcgcgcgtgcagccccggacatctaagggcatcacagacctgttattgctcaatctcgggtggctgaacgccacttgtc

SEQ ID NO: 64222 - DNA, 120 bp, Homo sapiens
  misc_feature: 587 for SV(C|O) and 18S
acgccgccgcatcgccggtcggcatcgtttatggtcggaactacgacggtatctgatcgtcttcgaacctccgactttcgttcttgattaatgaaaacattcttggcaaatgctttcgct

SEQ ID NO: 64223 - DNA, 120 bp, Homo sapiens; identical to SEQ ID NO: 47961
  misc_feature: 586 for SV(C|O) and 18S

SEQ ID NO: 64224 - DNA, 120 bp, Homo sapiens
  misc_feature: 586 for SV(C|O) and 18S
ttatctagagtcaccaaagccgccggcgcccgccccccggccggggccggagaggggctgaccgggttggttttgatctgataaatgcacgcatcccccccgcgaagggggtcagcgccc

SEQ ID NO: 64225 - DNA, 120 bp, Homo sapiens
  misc_feature: 586 for SV(C|O) and 18S
tgttcaaagcaggcccgagccgcctggataccgcagctaggaataatggaataggaccgcggttctattttgttggttttcggaactgaggccatgattaagagggacggccgggggcat

SEQ ID NO: 64226 - DNA, 120 bp, Homo sapiens
  misc_feature: 586 for SV(C|O) and 18S
gggcattcgtattgcgccgctagaggtgaaattcttggaccggcgcaagacggaccagagcgaaagcatttgccaagaatgttttcattaatcaagaacgaaagtcggaggttcgaagac

SEQ ID NO: 64227 - DNA, 120 bp, Homo sapiens
  misc_feature: 586 for SV(C|O) and 18S
gaggttatctagagtcaccaaagccgccggcgcccgccccccggccggggccggagaggggctgaccgggttggttttgatctgataaatgcacgcatcccccccgcgaagggggtcagc

SEQ ID NO: 64228 - DNA, 120 bp, Homo sapiens
  misc_feature: 586 for SV(C|O) and 18S
gctcaatctcgggtggctgaacgccacttgtccctctaagaagttgggggacgccgaccgctcgggggtcgcgtaactagttagcatgccagagtctcgttcgttatcggaattaaccag

SEQ ID NO: 64229 - DNA, 120 bp, Homo sapiens
  misc_feature: 586 for SV(C|O) and 18S
caccagacttgccctccaatggatcctcgttaaaggatttaaagtggactcattccaattacagggcctcgaaagagtcctgtattgttatttttcgtcactacctccccgggtcgggag

SEQ ID NO: 64230 - DNA, 120 bp, Homo sapiens
  misc_feature: 586 for SV(C|O) and 18S
ccgccgcatcgccggtcggcatcgtttatggtcggaactacgacggtatctgatcgtcttcgaacctccgactttcgttcttgattaatgaaaacattcttggcaaatgctttcgctctg

SEQ ID NO: 64231 - DNA, 120 bp, Homo sapiens; identical to SEQ ID NO: 47912
  misc_feature: 585 for SV(C|O) and 18S

SEQ ID NO: 64232 - DNA, 120 bp, Homo sapiens
  misc_feature: 585 for SV(C|O) and 18S
cgctcgctcctctcctacttggataactgtggtaattctagagctaatacatgccgacgggcgctgacccccttcgcgggggggatgcgtgcatttatcagatcaaaaccaacccggtca

SEQ ID NO: 64233 - DNA, 120 bp, Homo sapiens
  misc_feature: 585 for SV(C|O) and 18S
ccggagaggggctgaccgggttggttttgatctgataaatgcacgcatcccccccgcgaagggggtcagcgcccgtcggcatgtattagctctagaattaccacagttatccaagtagga

SEQ ID NO: 64234 - DNA, 120 bp, Homo sapiens; identical to SEQ ID NO: 48019
  misc_feature: 585 for SV(C|O) and 18S

SEQ ID NO: 64235 - DNA, 120 bp, Homo sapiens; identical to SEQ ID NO: 47832
  misc_feature: 585 for SV(C|O) and 18S

SEQ ID NO: 64236 - DNA, 120 bp, Homo sapiens
  misc_feature: 585 for SV(C|O) and 18S
cggagaggggctgaccgggttggttttgatctgataaatgcacgcatcccccccgcgaagggggtcagcgcccgtcggcatgtattagctctagaattaccacagttatccaagtaggag

SEQ ID NO: 64237 - DNA, 120 bp, Homo sapiens
  misc_feature: 584 for SV(C|O) and 18S
ccggggccggagaggggctgaccgggttggttttgatctgataaatgcacgcatcccccccgcgaagggggtcagcgcccgtcggcatgtattagctctagaattaccacagttatccaa

SEQ ID NO: 64238 - DNA, 120 bp, Homo sapiens
  misc_feature: 584 for SV(C|O) and 18S
taaacgatgccgaccggcgatgcggcggcgttattcccatgacccgccgggcagcttccgggaaaccaaagtctttgggttccggggggagtatggttgcaaagctgaaacttaaaggaa

SEQ ID NO: 64239 - DNA, 120 bp, Homo sapiens
  misc_feature: 584 for SV(C|O) and 18S
gttacccgcgcctgccggcgtagggtaggcacacgctgagccagtcagtgtagcgcgcgtgcagccccggacatctaagggcatcacagacctgttattgctcaatctcgggtggctgaa

SEQ ID NO: 64240 - DNA, 120 bp, Homo sapiens
  misc_feature: 584 for SV(C|O) and 18S
atttatcagatcaaaaccaacccggtcagcccctctccggccccggccggggggcgggcgccggcggctttggtgactctagataacctcgggccgatcgcacgccccccgtggcggcga

SEQ ID NO: 64241 - DNA, 120 bp, Homo sapiens; identical to SEQ ID NO: 48069
  misc_feature: 584 for SV(C|O) and 18S

SEQ ID NO: 64242 - DNA, 120 bp, Homo sapiens; identical to SEQ ID NO: 48406
  misc_feature: 584 for SV(C|O) and 18S

SEQ ID NO: 64243 - DNA, 120 bp, Homo sapiens
  misc_feature: 584 for SV(C|O) and 18S
gccggagaggggctgaccgggttggttttgatctgataaatgcacgcatcccccccgcgaagggggtcagcgcccgtcggcatgtattagctctagaattaccacagttatccaagtagg

SEQ ID NO: 64244 - DNA, 120 bp, Homo sapiens; identical to SEQ ID NO: 48184
  misc_feature: 584 for SV(C|O) and 18S

SEQ ID NO: 64245 - DNA, 120 bp, Homo sapiens
  misc_feature: 584 for SV(C|O) and 18S
gatcggcccgaggttatctagagtcaccaaagccgccggcgcccgccccccggccggggccggagaggggctgaccgggttggttttgatctgataaatgcacgcatcccccccgcgaag

SEQ ID NO: 64246 - DNA, 120 bp, Homo sapiens
  misc_feature: 584 for SV(C|O) and 18S
aaacgatgccgaccggcgatgcggcggcgttattcccatgacccgccgggcagcttccgggaaaccaaagtctttgggttccggggggagtatggttgcaaagctgaaacttaaaggaat

SEQ ID NO: 64247 - DNA, 120 bp, Homo sapiens
  misc_feature: 583 for SV(C|O) and 18S
tttatcagatcaaaaccaacccggtcagcccctctccggccccggccggggggcgggcgccggcggctttggtgactctagataacctcgggccgatcgcacgccccccgtggcggcgac

SEQ ID NO: 64248 - DNA, 120 bp, Homo sapiens
  misc_feature: 583 for SV(C|O) and 18S
tcccaagatccaactacgagctttttaactgcagcaactttaatatacgctattggagctggaattaccgcggctgctggcaccagacttgccctccaatggatcctcgttaaaggattt

SEQ ID NO: 64249 - DNA, 120 bp, Homo sapiens
  misc_feature: 583 for SV(C|O) and 18S
tcaaagcaggcccgagccgcctggataccgcagctaggaataatggaataggaccgcggttctattttgttggttttcggaactgaggccatgattaagagggacggccgggggcattcg

SEQ ID NO: 64250 - DNA, 120 bp, Homo sapiens; identical to SEQ ID NO: 48469
  misc_feature: 583 for SV(C|O) and 18S

SEQ ID NO: 64251 - DNA, 120 bp, Homo sapiens; identical to SEQ ID NO: 48496
  misc_feature: 583 for SV(C|O) and 18S

SEQ ID NO: 64252 - DNA, 120 bp, Homo sapiens; identical to SEQ ID NO: 48343
  misc_feature: 583 for SV(C|O) and 18S

SEQ ID NO: 64253 - DNA, 120 bp, Homo sapiens
  misc_feature: 583 for SV(C|O) and 18S
ggccggagaggggctgaccgggttggttttgatctgataaatgcacgcatcccccccgcgaagggggtcagcgcccgtcggcatgtattagctctagaattaccacagttatccaagtag

SEQ ID NO: 64254 - DNA, 120 bp, Homo sapiens; identical to SEQ ID NO: 48715
  misc_feature: 583 for SV(C|O) and 18S

SEQ ID NO: 64255 - DNA, 120 bp, Homo sapiens
  misc_feature: 583 for SV(C|O) and 18S
gagtgttcaaagcaggcccgagccgcctggataccgcagctaggaataatggaataggaccgcggttctattttgttggttttcggaactgaggccatgattaagagggacggccggggg

SEQ ID NO: 64256 - DNA, 120 bp, Homo sapiens; identical to SEQ ID NO: 47944
  misc_feature: 583 for SV(C|O) and 18S

SEQ ID NO: 64257 - DNA, 120 bp, Homo sapiens
  misc_feature: 583 for SV(C|O) and 18S
cgccgccgcatcgccggtcggcatcgtttatggtcggaactacgacggtatctgatcgtcttcgaacctccgactttcgttcttgattaatgaaaacattcttggcaaatgctttcgctc

SEQ ID NO: 64258 - DNA, 120 bp, Homo sapiens; identical to SEQ ID NO: 48563
  misc_feature: 582 for SV(C|O) and 18S

SEQ ID NO: 64259 - DNA, 120 bp, Homo sapiens
  misc_feature: 582 for SV(C|O) and 18S
gtgttcaaagcaggcccgagccgcctggataccgcagctaggaataatggaataggaccgcggttctattttgttggttttcggaactgaggccatgattaagagggacggccgggggca

SEQ ID NO: 64260 - DNA, 120 bp, Homo sapiens
  misc_feature: 582 for SV(C|O) and 18S
ctcaatctcgggtggctgaacgccacttgtccctctaagaagttgggggacgccgaccgctcgggggtcgcgtaactagttagcatgccagagtctcgttcgttatcggaattaaccaga

SEQ ID NO: 64261 - DNA, 120 bp, Homo sapiens; identical to SEQ ID NO: 48829
  misc_feature: 582 for SV(C|O) and 18S

SEQ ID NO: 64262 - DNA, 120 bp, Homo sapiens
  misc_feature: 582 for SV(C|O) and 18S
atgacccgcacttactgggaattcctcgttcatggggaataattgcaatccccgatccccatcacgaatggggttcaacgggttacccgcgcctgccggcgtagggtaggcacacgctga

SEQ ID NO: 64263 - DNA, 120 bp, Homo sapiens
  misc_feature: 582 for SV(C|O) and 18S
tcagatcaaaaccaacccggtcagcccctctccggccccggccggggggcgggcgccggcggctttggtgactctagataacctcgggccgatcgcacgccccccgtggcggcgacgacc

SEQ ID NO: 64264 - DNA, 120 bp, Homo sapiens
  misc_feature: 582 for SV(C|O) and 18S
gggtggctgaacgccacttgtccctctaagaagttgggggacgccgaccgctcgggggtcgcgtaactagttagcatgccagagtctcgttcgttatcggaattaaccagacaaatcgct

SEQ ID NO: 64265 - DNA, 120 bp, Homo sapiens
  misc_feature: 582 for SV(C|O) and 18S
gccgcatcgccggtcggcatcgtttatggtcggaactacgacggtatctgatcgtcttcgaacctccgactttcgttcttgattaatgaaaacattcttggcaaatgctttcgctctggt

SEQ ID NO: 64266 - DNA, 120 bp, Homo sapiens; identical to SEQ ID NO: 48492
  misc_feature: 581 for SV(C|O) and 18S

SEQ ID NO: 64267 - DNA, 120 bp, Homo sapiens
  misc_feature: 581 for SV(C|O) and 18S
tgggtggtggtgcatggccgttcttagttggtggagcgatttgtctggttaattccgataacgaacgagactctggcatgctaactagttacgcgacccccgagcggtcggcgtccccca

SEQ ID NO: 64268 - DNA, 120 bp, Homo sapiens
  misc_feature: 581 for SV(C|O) and 18S
tcaatctcgggtggctgaacgccacttgtccctctaagaagttgggggacgccgaccgctcgggggtcgcgtaactagttagcatgccagagtctcgttcgttatcggaattaaccagac

SEQ ID NO: 64269 - DNA, 120 bp, Homo sapiens
  misc_feature: 581 for SV(C|O) and 18S
gatttaaagtggactcattccaattacagggcctcgaaagagtcctgtattgttatttttcgtcactacctccccgggtcgggagtgggtaatttgcgcgcctgctgccttccttggatg

SEQ ID NO: 64270 - DNA, 120 bp, Homo sapiens
  misc_feature: 581 for SV(C|O) and 18S
gatcgtcttcgaacctccgactttcgttcttgattaatgaaaacattcttggcaaatgctttcgctctggtccgtcttgcgccggtccaagaatttcacctctagcggcgcaatacgaat

SEQ ID NO: 64271 - DNA, 120 bp, Homo sapiens
  misc_feature: 581 for SV(C|O) and 18S
ccggccggggccggagaggggctgaccgggttggttttgatctgataaatgcacgcatcccccccgcgaagggggtcagcgcccgtcggcatgtattagctctagaattaccacagttat

SEQ ID NO: 64272 - DNA, 120 bp, Homo sapiens; identical to SEQ ID NO: 48731
  misc_feature: 581 for SV(C|O) and 18S

SEQ ID NO: 64273 - DNA, 120 bp, Homo sapiens; identical to SEQ ID NO: 48053
  misc_feature: 580 for SV(C|O) and 18S

SEQ ID NO: 64274 - DNA, 120 bp, Homo sapiens
  misc_feature: 580 for SV(C|O) and 18S
gccggggccggagaggggctgaccgggttggttttgatctgataaatgcacgcatcccccccgcgaagggggtcagcgcccgtcggcatgtattagctctagaattaccacagttatcca

SEQ ID NO: 64275 - DNA, 120 bp, Homo sapiens; identical to SEQ ID NO: 48166
  misc_feature: 580 for SV(C|O) and 18S

SEQ ID NO: 64276 - DNA, 120 bp, Homo sapiens
  misc_feature: 580 for SV(C|O) and 18S
cggcccgaggttatctagagtcaccaaagccgccggcgcccgccccccggccggggccggagaggggctgaccgggttggttttgatctgataaatgcacgcatcccccccgcgaagggg

SEQ ID NO: 64277 - DNA, 120 bp, Homo sapiens
  misc_feature: 579 for SV(C|O) and 18S
cgatcggcccgaggttatctagagtcaccaaagccgccggcgcccgccccccggccggggccggagaggggctgaccgggttggttttgatctgataaatgcacgcatcccccccgcgaa

SEQ ID NO: 64278 - DNA, 120 bp, Homo sapiens
  misc_feature: 579 for SV(C|O) and 18S
atctagagtcaccaaagccgccggcgcccgccccccggccggggccggagaggggctgaccgggttggttttgatctgataaatgcacgcatcccccccgcgaagggggtcagcgcccgt

SEQ ID NO: 64279 - DNA, 120 bp, Homo sapiens; identical to SEQ ID NO: 48259
  misc_feature: 578 for SV(C|O) and 18S

SEQ ID NO: 64280 - DNA, 120 bp, Homo sapiens
  misc_feature: 578 for SV(C|O) and 18S
caatctcgggtggctgaacgccacttgtccctctaagaagttgggggacgccgaccgctcgggggtcgcgtaactagttagcatgccagagtctcgttcgttatcggaattaaccagaca

SEQ ID NO: 64281 - DNA, 120 bp, Homo sapiens
  misc_feature: 578 for SV(C|O) and 18S
agatcaaaaccaacccggtcagcccctctccggccccggccggggggcgggcgccggcggctttggtgactctagataacctcgggccgatcgcacgccccccgtggcggcgacgaccca

SEQ ID NO: 64282 - DNA, 120 bp, Homo sapiens
  misc_feature: 578 for SV(C|O) and 18S
tctgatcgtcttcgaacctccgactttcgttcttgattaatgaaaacattcttggcaaatgctttcgctctggtccgtcttgcgccggtccaagaatttcacctctagcggcgcaatacg

SEQ ID NO: 64283 - DNA, 120 bp, Homo sapiens
  misc_feature: 578 for SV(C|O) and 18S
tcggcatcgtttatggtcggaactacgacggtatctgatcgtcttcgaacctccgactttcgttcttgattaatgaaaacattcttggcaaatgctttcgctctggtccgtcttgcgccg

SEQ ID NO: 64284 - DNA, 120 bp, Homo sapiens
  misc_feature: 578 for SV(C|O) and 18S
atcagatcaaaaccaacccggtcagcccctctccggccccggccggggggcgggcgccggcggctttggtgactctagataacctcgggccgatcgcacgccccccgtggcggcgacgac

SEQ ID NO: 64285 - DNA, 120 bp, Homo sapiens; identical to SEQ ID NO: 47807
  misc_feature: 578 for SV(C|O) and 18S

SEQ ID NO: 64286 - DNA, 120 bp, Homo sapiens; identical to SEQ ID NO: 48108
  misc_feature: 578 for SV(C|O) and 18S

SEQ ID NO: 64287 - DNA, 120 bp, Homo sapiens; identical to SEQ ID NO: 47815
  misc_feature: 577 for SV(C|O) and 18S

SEQ ID NO: 64288 - DNA, 120 bp, Homo sapiens; identical to SEQ ID NO: 48537
  misc_feature: 577 for SV(C|O) and 18S

SEQ ID NO: 64289 - DNA, 120 bp, Homo sapiens
  misc_feature: 577 for SV(C|O) and 18S
ggccggggccggagaggggctgaccgggttggttttgatctgataaatgcacgcatcccccccgcgaagggggtcagcgcccgtcggcatgtattagctctagaattaccacagttatcc

SEQ ID NO: 64290 - DNA, 120 bp, Homo sapiens
  misc_feature: 577 for SV(C|O) and 18S
ggcatcgtttatggtcggaactacgacggtatctgatcgtcttcgaacctccgactttcgttcttgattaatgaaaacattcttggcaaatgctttcgctctggtccgtcttgcgccggt

SEQ ID NO: 64291 - DNA, 120 bp, Homo sapiens; identical to SEQ ID NO: 48081
  misc_feature: 577 for SV(C|O) and 18S

SEQ ID NO: 64292 - DNA, 120 bp, Homo sapiens; identical to SEQ ID NO: 48535
  misc_feature: 577 for SV(C|O) and 18S

SEQ ID NO: 64293 - DNA, 120 bp, Homo sapiens
  misc_feature: 577 for SV(C|O) and 18S
cggcgcaatacgaatgcccccggccgtccctcttaatcatggcctcagttccgaaaaccaacaaaatagaaccgcggtcctattccattattcctagctgcggtatccaggcggctcggg

SEQ ID NO: 64294 - DNA, 120 bp, Homo sapiens
  misc_feature: 577 for SV(C|O) and 18S
cctgccggcgtagggtaggcacacgctgagccagtcagtgtagcgcgcgtgcagccccggacatctaagggcatcacagacctgttattgctcaatctcgggtggctgaacgccacttgt

SEQ ID NO: 64295 - DNA, 120 bp, Homo sapiens
  misc_feature: 577 for SV(C|O) and 18S
aacgatgccgaccggcgatgcggcggcgttattcccatgacccgccgggcagcttccgggaaaccaaagtctttgggttccggggggagtatggttgcaaagctgaaacttaaaggaatt

SEQ ID NO: 64296 - DNA, 120 bp, Homo sapiens
  misc_feature: 576 for SV(C|O) and 18S
tgccggcgtagggtaggcacacgctgagccagtcagtgtagcgcgcgtgcagccccggacatctaagggcatcacagacctgttattgctcaatctcgggtggctgaacgccacttgtcc

SEQ ID NO: 64297 - DNA, 120 bp, Homo sapiens
  misc_feature: 576 for SV(C|O) and 18S
tgagccagtcagtgtagcgcgcgtgcagccccggacatctaagggcatcacagacctgttattgctcaatctcgggtggctgaacgccacttgtccctctaagaagttgggggacgccga

SEQ ID NO: 64298 - DNA, 120 bp, Homo sapiens; identical to SEQ ID NO: 48141
  misc_feature: 576 for SV(C|O) and 18S

SEQ ID NO: 64299 - DNA, 120 bp, Homo sapiens
  misc_feature: 576 for SV(C|O) and 18S
tcaaaaccaacccggtcagcccctctccggccccggccggggggcgggcgccggcggctttggtgactctagataacctcgggccgatcgcacgccccccgtggcggcgacgacccattc

SEQ ID NO: 64300 - DNA, 120 bp, Homo sapiens
  misc_feature: 576 for SV(C|O) and 18S
gagccagtcagtgtagcgcgcgtgcagccccggacatctaagggcatcacagacctgttattgctcaatctcgggtggctgaacgccacttgtccctctaagaagttgggggacgccgac

SEQ ID NO: 64301 - DNA, 120 bp, Homo sapiens
  misc_feature: 576 for SV(C|O) and 18S
ggtggctgaacgccacttgtccctctaagaagttgggggacgccgaccgctcgggggtcgcgtaactagttagcatgccagagtctcgttcgttatcggaattaaccagacaaatcgctc

SEQ ID NO: 64302 - DNA, 120 bp, Homo sapiens
  misc_feature: 576 for SV(C|O) and 18S
agccagtcagtgtagcgcgcgtgcagccccggacatctaagggcatcacagacctgttattgctcaatctcgggtggctgaacgccacttgtccctctaagaagttgggggacgccgacc

SEQ ID NO: 64303 - DNA, 120 bp, Homo sapiens
  misc_feature: 576 for SV(C|O) and 18S
ggcgtagggtaggcacacgctgagccagtcagtgtagcgcgcgtgcagccccggacatctaagggcatcacagacctgttattgctcaatctcgggtggctgaacgccacttgtccctct

SEQ ID NO: 64304 - DNA, 120 bp, Homo sapiens
  misc_feature: 576 for SV(C|O) and 18S
ccggtcggcatcgtttatggtcggaactacgacggtatctgatcgtcttcgaacctccgactttcgttcttgattaatgaaaacattcttggcaaatgctttcgctctggtccgtcttgc

SEQ ID NO: 64305 - DNA, 120 bp, Homo sapiens
  misc_feature: 576 for SV(C|O) and 18S
cggccggggccggagaggggctgaccgggttggttttgatctgataaatgcacgcatcccccccgcgaagggggtcagcgcccgtcggcatgtattagctctagaattaccacagttatc

SEQ ID NO: 64306 - DNA, 120 bp, Homo sapiens
  misc_feature: 576 for SV(C|O) and 18S
ccgcatcgccggtcggcatcgtttatggtcggaactacgacggtatctgatcgtcttcgaacctccgactttcgttcttgattaatgaaaacattcttggcaaatgctttcgctctggtc

SEQ ID NO: 64307 - DNA, 120 bp, Homo sapiens; identical to SEQ ID NO: 48004
  misc_feature: 576 for SV(C|O) and 18S

SEQ ID NO: 64308 - DNA, 120 bp, Homo sapiens
  misc_feature: 576 for SV(C|O) and 18S
atcggcccgaggttatctagagtcaccaaagccgccggcgcccgccccccggccggggccggagaggggctgaccgggttggttttgatctgataaatgcacgcatcccccccgcgaagg

SEQ ID NO: 64309 - DNA, 120 bp, Homo sapiens; identical to SEQ ID NO: 48863
  misc_feature: 576 for SV(C|O) and 18S

SEQ ID NO: 64310 - DNA, 120 bp, Homo sapiens
  misc_feature: 575 for SV(C|O) and 18S
cgtagggtaggcacacgctgagccagtcagtgtagcgcgcgtgcagccccggacatctaagggcatcacagacctgttattgctcaatctcgggtggctgaacgccacttgtccctctaa

SEQ ID NO: 64311 - DNA, 120 bp, Homo sapiens; identical to SEQ ID NO: 48521
  misc_feature: 575 for SV(C|O) and 18S

SEQ ID NO: 64312 - DNA, 120 bp, Homo sapiens
  misc_feature: 575 for SV(C|O) and 18S
tcggcccgaggttatctagagtcaccaaagccgccggcgcccgccccccggccggggccggagaggggctgaccgggttggttttgatctgataaatgcacgcatcccccccgcgaaggg

SEQ ID NO: 64313 - DNA, 120 bp, Homo sapiens
  misc_feature: 575 for SV(C|O) and 18S
tcgccggtcggcatcgtttatggtcggaactacgacggtatctgatcgtcttcgaacctccgactttcgttcttgattaatgaaaacattcttggcaaatgctttcgctctggtccgtct

SEQ ID NO: 64314 - DNA, 120 bp, Homo sapiens; identical to SEQ ID NO: 47816
  misc_feature: 575 for SV(C|O) and 18S

SEQ ID NO: 64315 - DNA, 120 bp, Homo sapiens; identical to SEQ ID NO: 48553
  misc_feature: 575 for SV(C|O) and 18S

SEQ ID NO: 64316 - DNA, 120 bp, Homo sapiens
  misc_feature: 575 for SV(C|O) and 18S
aggttatctagagtcaccaaagccgccggcgcccgccccccggccggggccggagaggggctgaccgggttggttttgatctgataaatgcacgcatcccccccgcgaagggggtcagcg

SEQ ID NO: 64317 - DNA, 120 bp, Homo sapiens; identical to SEQ ID NO: 48484
  misc_feature: 574 for SV(C|O) and 18S

SEQ ID NO: 64318 - DNA, 120 bp, Homo sapiens
  misc_feature: 574 for SV(C|O) and 18S
tgcatggccgttcttagttggtggagcgatttgtctggttaattccgataacgaacgagactctggcatgctaactagttacgcgacccccgagcggtcggcgtcccccaacttcttaga

SEQ ID NO: 64319 - DNA, 120 bp, Homo sapiens
  misc_feature: 574 for SV(C|O) and 18S
tctagagtcaccaaagccgccggcgcccgccccccggccggggccggagaggggctgaccgggttggttttgatctgataaatgcacgcatcccccccgcgaagggggtcagcgcccgtc

SEQ ID NO: 64320 - DNA, 120 bp, Homo sapiens; identical to SEQ ID NO: 48796
  misc_feature: 574 for SV(C|O) and 18S

SEQ ID NO: 64321 - DNA, 120 bp, Homo sapiens
  misc_feature: 574 for SV(C|O) and 18S
tcgctcctctcctacttggataactgtggtaattctagagctaatacatgccgacgggcgctgacccccttcgcgggggggatgcgtgcatttatcagatcaaaaccaacccggtcagcc

SEQ ID NO: 64322 - DNA, 120 bp, Homo sapiens
  misc_feature: 574 for SV(C|O) and 18S
aggatttaaagtggactcattccaattacagggcctcgaaagagtcctgtattgttatttttcgtcactacctccccgggtcgggagtgggtaatttgcgcgcctgctgccttccttgga

SEQ ID NO: 64323 - DNA, 120 bp, Homo sapiens
  misc_feature: 574 for SV(C|O) and 18S
cgatgccgaccggcgatgcggcggcgttattcccatgacccgccgggcagcttccgggaaaccaaagtctttgggttccggggggagtatggttgcaaagctgaaacttaaaggaattga

SEQ ID NO: 64324 - DNA, 120 bp, Homo sapiens
  misc_feature: 574 for SV(C|O) and 18S
ggtggtggtgcatggccgttcttagttggtggagcgatttgtctggttaattccgataacgaacgagactctggcatgctaactagttacgcgacccccgagcggtcggcgtcccccaac

SEQ ID NO: 64325 - DNA, 120 bp, Homo sapiens
  misc_feature: 574 for SV(C|O) and 18S
gtgggtggtggtgcatggccgttcttagttggtggagcgatttgtctggttaattccgataacgaacgagactctggcatgctaactagttacgcgacccccgagcggtcggcgtccccc

SEQ ID NO: 64326 - DNA, 120 bp, Homo sapiens
  misc_feature: 574 for SV(C|O) and 18S
gtgcatggccgttcttagttggtggagcgatttgtctggttaattccgataacgaacgagactctggcatgctaactagttacgcgacccccgagcggtcggcgtcccccaacttcttag

SEQ ID NO: 64327 - DNA, 120 bp, Homo sapiens
  misc_feature: 574 for SV(C|O) and 18S
agtcagtgtagcgcgcgtgcagccccggacatctaagggcatcacagacctgttattgctcaatctcgggtggctgaacgccacttgtccctctaagaagttgggggacgccgaccgctc

SEQ ID NO: 64328 - DNA, 120 bp, Homo sapiens
  misc_feature: 574 for SV(C|O) and 18S
atcaaaaccaacccggtcagcccctctccggccccggccggggggcgggcgccggcggctttggtgactctagataacctcgggccgatcgcacgccccccgtggcggcgacgacccatt

SEQ ID NO: 64329 - DNA, 120 bp, Homo sapiens; identical to SEQ ID NO: 48557
  misc_feature: 574 for SV(C|O) and 18S

SEQ ID NO: 64330 - DNA, 120 bp, Homo sapiens
  misc_feature: 573 for SV(C|O) and 18S
gggtggtggtgcatggccgttcttagttggtggagcgatttgtctggttaattccgataacgaacgagactctggcatgctaactagttacgcgacccccgagcggtcggcgtcccccaa

SEQ ID NO: 64331 - DNA, 120 bp, Homo sapiens
  misc_feature: 573 for SV(C|O) and 18S
gtggctgaacgccacttgtccctctaagaagttgggggacgccgaccgctcgggggtcgcgtaactagttagcatgccagagtctcgttcgttatcggaattaaccagacaaatcgctcc

SEQ ID NO: 64332 - DNA, 120 bp, Homo sapiens
  misc_feature: 573 for SV(C|O) and 18S
cgccgcatcgccggtcggcatcgtttatggtcggaactacgacggtatctgatcgtcttcgaacctccgactttcgttcttgattaatgaaaacattcttggcaaatgctttcgctctgg

SEQ ID NO: 64333 - DNA, 120 bp, Homo sapiens
  misc_feature: 572 for SV(C|O) and 18S
tgatcgtcttcgaacctccgactttcgttcttgattaatgaaaacattcttggcaaatgctttcgctctggtccgtcttgcgccggtccaagaatttcacctctagcggcgcaatacgaa

SEQ ID NO: 64334 - DNA, 120 bp, Homo sapiens; identical to SEQ ID NO: 48017
  misc_feature: 572 for SV(C|O) and 18S

SEQ ID NO: 64335 - DNA, 120 bp, Homo sapiens; identical to SEQ ID NO: 48008
  misc_feature: 572 for SV(C|O) and 18S

SEQ ID NO: 64336 - DNA, 120 bp, Homo sapiens; identical to SEQ ID NO: 48219
  misc_feature: 572 for SV(C|O) and 18S

SEQ ID NO: 64337 - DNA, 120 bp, Homo sapiens
  misc_feature: 572 for SV(C|O) and 18S
gatcaaaaccaacccggtcagcccctctccggccccggccggggggcgggcgccggcggctttggtgactctagataacctcgggccgatcgcacgccccccgtggcggcgacgacccat

SEQ ID NO: 64338 - DNA, 120 bp, Homo sapiens
  misc_feature: 572 for SV(C|O) and 18S
cggtcggcatcgtttatggtcggaactacgacggtatctgatcgtcttcgaacctccgactttcgttcttgattaatgaaaacattcttggcaaatgctttcgctctggtccgtcttgcg

SEQ ID NO: 64339 - DNA, 120 bp, Homo sapiens
  misc_feature: 572 for SV(C|O) and 18S
atcgtcttcgaacctccgactttcgttcttgattaatgaaaacattcttggcaaatgctttcgctctggtccgtcttgcgccggtccaagaatttcacctctagcggcgcaatacgaatg

SEQ ID NO: 64340 - DNA, 120 bp, Homo sapiens; identical to SEQ ID NO: 48225
  misc_feature: 571 for SV(C|O) and 18S

SEQ ID NO: 64341 - DNA, 120 bp, Homo sapiens; identical to SEQ ID NO: 48227
  misc_feature: 571 for SV(C|O) and 18S

SEQ ID NO: 64342 - DNA, 120 bp, Homo sapiens
  misc_feature: 571 for SV(C|O) and 18S
gtggtggtgcatggccgttcttagttggtggagcgatttgtctggttaattccgataacgaacgagactctggcatgctaactagttacgcgacccccgagcggtcggcgtcccccaact

SEQ ID NO: 64343 - DNA, 120 bp, Homo sapiens; identical to SEQ ID NO: 48850
  misc_feature: 571 for SV(C|O) and 18S

SEQ ID NO: 64344 - DNA, 120 bp, Homo sapiens
  misc_feature: 571 for SV(C|O) and 18S
gctcctctcctacttggataactgtggtaattctagagctaatacatgccgacgggcgctgacccccttcgcgggggggatgcgtgcatttatcagatcaaaaccaacccggtcagcccc

SEQ ID NO: 64345 - DNA, 120 bp, Homo sapiens; identical to SEQ ID NO: 48643
  misc_feature: 571 for SV(C|O) and 18S

SEQ ID NO: 64346 - DNA, 120 bp, Homo sapiens
  misc_feature: 571 for SV(C|O) and 18S
cgcatcgccggtcggcatcgtttatggtcggaactacgacggtatctgatcgtcttcgaacctccgactttcgttcttgattaatgaaaacattcttggcaaatgctttcgctctggtcc

SEQ ID NO: 64347 - DNA, 120 bp, Homo sapiens
  misc_feature: 571 for SV(C|O) and 18S
gccggtcggcatcgtttatggtcggaactacgacggtatctgatcgtcttcgaacctccgactttcgttcttgattaatgaaaacattcttggcaaatgctttcgctctggtccgtcttg

SEQ ID NO: 64348 - DNA, 120 bp, Homo sapiens; identical to SEQ ID NO: 48516
  misc_feature: 571 for SV(C|O) and 18S

SEQ ID NO: 64349 - DNA, 120 bp, Homo sapiens; identical to SEQ ID NO: 47833
  misc_feature: 571 for SV(C|O) and 18S

SEQ ID NO: 64350 - DNA, 120 bp, Homo sapiens
  misc_feature: 571 for SV(C|O) and 18S
ctcctctcctacttggataactgtggtaattctagagctaatacatgccgacgggcgctgacccccttcgcgggggggatgcgtgcatttatcagatcaaaaccaacccggtcagcccct

SEQ ID NO: 64351 - DNA, 120 bp, Homo sapiens
  misc_feature: 571 for SV(C|O) and 18S
cgccggtcggcatcgtttatggtcggaactacgacggtatctgatcgtcttcgaacctccgactttcgttcttgattaatgaaaacattcttggcaaatgctttcgctctggtccgtctt

SEQ ID NO: 64352 - DNA, 120 bp, Homo sapiens
  misc_feature: 570 for SV(C|O) and 18S
tggtgcatggccgttcttagttggtggagcgatttgtctggttaattccgataacgaacgagactctggcatgctaactagttacgcgacccccgagcggtcggcgtcccccaacttctt

SEQ ID NO: 64353 - DNA, 120 bp, Homo sapiens; identical to SEQ ID NO: 48411
  misc_feature: 570 for SV(C|O) and 18S

SEQ ID NO: 64354 - DNA, 120 bp, Homo sapiens
  misc_feature: 570 for SV(C|O) and 18S
ggcattcgtattgcgccgctagaggtgaaattcttggaccggcgcaagacggaccagagcgaaagcatttgccaagaatgttttcattaatcaagaacgaaagtcggaggttcgaagacg

SEQ ID NO: 64355 - DNA, 120 bp, Homo sapiens; identical to SEQ ID NO: 47725
  misc_feature: 570 for SV(C|O) and 18S

SEQ ID NO: 64356 - DNA, 120 bp, Homo sapiens; identical to SEQ ID NO: 48126
  misc_feature: 570 for SV(C|O) and 18S

SEQ ID NO: 64357 - DNA, 120 bp, Homo sapiens
  misc_feature: 570 for SV(C|O) and 18S
ccagacttgccctccaatggatcctcgttaaaggatttaaagtggactcattccaattacagggcctcgaaagagtcctgtattgttatttttcgtcactacctccccgggtcgggagtg

SEQ ID NO: 64358 - DNA, 120 bp, Homo sapiens
  misc_feature: 569 for SV(C|O) and 18S
ctgatcgtcttcgaacctccgactttcgttcttgattaatgaaaacattcttggcaaatgctttcgctctggtccgtcttgcgccggtccaagaatttcacctctagcggcgcaatacga

SEQ ID NO: 64359 - DNA, 120 bp, Homo sapiens
  misc_feature: 569 for SV(C|O) and 18S
cccggccggggccggagaggggctgaccgggttggttttgatctgataaatgcacgcatcccccccgcgaagggggtcagcgcccgtcggcatgtattagctctagaattaccacagtta

SEQ ID NO: 64360 - DNA, 120 bp, Homo sapiens
  misc_feature: 569 for SV(C|O) and 18S
ccgtgggccgaccccggcggggccgatccgagggcctcactaaaccatccaatcggtagtagcgacgggcggtgtgtacaaagggcagggacttaatcaacgcaagcttatgacccgcac

SEQ ID NO: 64361 - DNA, 120 bp, Homo sapiens
  misc_feature: 569 for SV(C|O) and 18S
cgctcctctcctacttggataactgtggtaattctagagctaatacatgccgacgggcgctgacccccttcgcgggggggatgcgtgcatttatcagatcaaaaccaacccggtcagccc

SEQ ID NO: 64362 - DNA, 120 bp, Homo sapiens
  misc_feature: 569 for SV(C|O) and 18S
cgggtggctgaacgccacttgtccctctaagaagttgggggacgccgaccgctcgggggtcgcgtaactagttagcatgccagagtctcgttcgttatcggaattaaccagacaaatcgc

SEQ ID NO: 64363 - DNA, 120 bp, Homo sapiens
  misc_feature: 569 for SV(C|O) and 18S
atcgccggtcggcatcgtttatggtcggaactacgacggtatctgatcgtcttcgaacctccgactttcgttcttgattaatgaaaacattcttggcaaatgctttcgctctggtccgtc

SEQ ID NO: 64364 - DNA, 120 bp, Homo sapiens
  misc_feature: 568 for SV(C|O) and 18S
ttatcagatcaaaaccaacccggtcagcccctctccggccccggccggggggcgggcgccggcggctttggtgactctagataacctcgggccgatcgcacgccccccgtggcggcgacg

SEQ ID NO: 64365 - DNA, 120 bp, Homo sapiens
  misc_feature: 568 for SV(C|O) and 18S
tggctgaacgccacttgtccctctaagaagttgggggacgccgaccgctcgggggtcgcgtaactagttagcatgccagagtctcgttcgttatcggaattaaccagacaaatcgctcca

SEQ ID NO: 64366 - DNA, 120 bp, Homo sapiens; identical to SEQ ID NO: 47806
  misc_feature: 568 for SV(C|O) and 18S

SEQ ID NO: 64367 - DNA, 120 bp, Homo sapiens; identical to SEQ ID NO: 47838
  misc_feature: 568 for SV(C|O) and 18S

SEQ ID NO: 64368 - DNA, 120 bp, Homo sapiens
  misc_feature: 568 for SV(C|O) and 18S
ggtgcatggccgttcttagttggtggagcgatttgtctggttaattccgataacgaacgagactctggcatgctaactagttacgcgacccccgagcggtcggcgtcccccaacttctta

SEQ ID NO: 64369 - DNA, 120 bp, Homo sapiens
  misc_feature: 568 for SV(C|O) and 18S
gtggtgcatggccgttcttagttggtggagcgatttgtctggttaattccgataacgaacgagactctggcatgctaactagttacgcgacccccgagcggtcggcgtcccccaacttct

SEQ ID NO: 64370 - DNA, 120 bp, Homo sapiens
  misc_feature: 568 for SV(C|O) and 18S
ggctgaacgccacttgtccctctaagaagttgggggacgccgaccgctcgggggtcgcgtaactagttagcatgccagagtctcgttcgttatcggaattaaccagacaaatcgctccac

SEQ ID NO: 64371 - DNA, 120 bp, Homo sapiens
  misc_feature: 568 for SV(C|O) and 18S
gtcaattcctttaagtttcagctttgcaaccatactccccccggaacccaaagactttggtttcccggaagctgcccggcgggtcatgggaataacgccgccgcatcgccggtcggcatc

SEQ ID NO: 64372 - DNA, 120 bp, Homo sapiens
  misc_feature: 568 for SV(C|O) and 18S
gccagtcagtgtagcgcgcgtgcagccccggacatctaagggcatcacagacctgttattgctcaatctcgggtggctgaacgccacttgtccctctaagaagttgggggacgccgaccg

SEQ ID NO: 64373 - DNA, 120 bp, Homo sapiens; identical to SEQ ID NO: 48490
  misc_feature: 568 for SV(C|O) and 18S

SEQ ID NO: 64374 - DNA, 120 bp, Homo sapiens; identical to SEQ ID NO: 48005
  misc_feature: 568 for SV(C|O) and 18S

SEQ ID NO: 64375 - DNA, 120 bp, Homo sapiens
  misc_feature: 568 for SV(C|O) and 18S
aaaggatttaaagtggactcattccaattacagggcctcgaaagagtcctgtattgttatttttcgtcactacctccccgggtcgggagtgggtaatttgcgcgcctgctgccttccttg

SEQ ID NO: 64376 - DNA, 120 bp, Homo sapiens
  misc_feature: 568 for SV(C|O) and 18S
accagacttgccctccaatggatcctcgttaaaggatttaaagtggactcattccaattacagggcctcgaaagagtcctgtattgttatttttcgtcactacctccccgggtcgggagt

SEQ ID NO: 64377 - DNA, 120 bp, Homo sapiens; identical to SEQ ID NO: 48679
  misc_feature: 567 for SV(C|O) and 18S

SEQ ID NO: 64378 - DNA, 120 bp, Homo sapiens; identical to SEQ ID NO: 48423
  misc_feature: 567 for SV(C|O) and 18S

SEQ ID NO: 64379 - DNA, 120 bp, Homo sapiens
  misc_feature: 567 for SV(C|O) and 18S
ggtcagcccctctccggccccggccggggggcgggcgccggcggctttggtgactctagataacctcgggccgatcgcacgccccccgtggcggcgacgacccattcgaacgtctgccct

SEQ ID NO: 64380 - DNA, 120 bp, Homo sapiens
  misc_feature: 567 for SV(C|O) and 18S
cggtcagcccctctccggccccggccggggggcgggcgccggcggctttggtgactctagataacctcgggccgatcgcacgccccccgtggcggcgacgacccattcgaacgtctgccc

SEQ ID NO: 64381 - DNA, 120 bp, Homo sapiens
  misc_feature: 567 for SV(C|O) and 18S
ctcgctcctctcctacttggataactgtggtaattctagagctaatacatgccgacgggcgctgacccccttcgcgggggggatgcgtgcatttatcagatcaaaaccaacccggtcagc

SEQ ID NO: 64382 - DNA, 120 bp, Homo sapiens
  misc_feature: 567 for SV(C|O) and 18S
gcgcctgccggcgtagggtaggcacacgctgagccagtcagtgtagcgcgcgtgcagccccggacatctaagggcatcacagacctgttattgctcaatctcgggtggctgaacgccact

SEQ ID NO: 64383 - DNA, 120 bp, Homo sapiens
  misc_feature: 567 for SV(C|O) and 18S
gcctgccggcgtagggtaggcacacgctgagccagtcagtgtagcgcgcgtgcagccccggacatctaagggcatcacagacctgttattgctcaatctcgggtggctgaacgccacttg

SEQ ID NO: 64384 - DNA, 120 bp, Homo sapiens
  misc_feature: 567 for SV(C|O) and 18S
cggcatcgtttatggtcggaactacgacggtatctgatcgtcttcgaacctccgactttcgttcttgattaatgaaaacattcttggcaaatgctttcgctctggtccgtcttgcgccgg

SEQ ID NO: 64385 - DNA, 120 bp, Homo sapiens
  misc_feature: 567 for SV(C|O) and 18S
aaggatttaaagtggactcattccaattacagggcctcgaaagagtcctgtattgttatttttcgtcactacctccccgggtcgggagtgggtaatttgcgcgcctgctgccttccttgg

SEQ ID NO: 64386 - DNA, 120 bp, Homo sapiens; identical to SEQ ID NO: 48513
  misc_feature: 566 for SV(C|O) and 18S

SEQ ID NO: 64387 - DNA, 120 bp, Homo sapiens; identical to SEQ ID NO: 47900
  misc_feature: 566 for SV(C|O) and 18S

SEQ ID NO: 64388 - DNA, 120 bp, Homo sapiens
  misc_feature: 566 for SV(C|O) and 18S
gcgtatattaaagttgctgcagttaaaaagctcgtagttggatcttgggagcgggcgggcggtccgccgcgaggcgagccaccgcccgtccccgccccttgcctctcggcgccccctcga

SEQ ID NO: 64389 - DNA, 120 bp, Homo sapiens
  misc_feature: 566 for SV(C|O) and 18S
gcgtagggtaggcacacgctgagccagtcagtgtagcgcgcgtgcagccccggacatctaagggcatcacagacctgttattgctcaatctcgggtggctgaacgccacttgtccctcta

SEQ ID NO: 64390 - DNA, 120 bp, Homo sapiens
  misc_feature: 566 for SV(C|O) and 18S
cagacttgccctccaatggatcctcgttaaaggatttaaagtggactcattccaattacagggcctcgaaagagtcctgtattgttatttttcgtcactacctccccgggtcgggagtgg

SEQ ID NO: 64391 - DNA, 120 bp, Homo sapiens; identical to SEQ ID NO: 48582
  misc_feature: 565 for SV(C|O) and 18S

SEQ ID NO: 64392 - DNA, 120 bp, Homo sapiens; identical to SEQ ID NO: 48375
  misc_feature: 565 for SV(C|O) and 18S

SEQ ID NO: 64393 - DNA, 120 bp, Homo sapiens; identical to SEQ ID NO: 48636
  misc_feature: 565 for SV(C|O) and 18S

SEQ ID NO: 64394 - DNA, 120 bp, Homo sapiens
  misc_feature: 565 for SV(C|O) and 18S
gtcagtgtagcgcgcgtgcagccccggacatctaagggcatcacagacctgttattgctcaatctcgggtggctgaacgccacttgtccctctaagaagttgggggacgccgaccgctcg

SEQ ID NO: 64395 - DNA, 120 bp, Homo sapiens; identical to SEQ ID NO: 48095
  misc_feature: 565 for SV(C|O) and 18S

SEQ ID NO: 64396 - DNA, 120 bp, Homo sapiens; identical to SEQ ID NO: 48868
  misc_feature: 565 for SV(C|O) and 18S

SEQ ID NO: 64397 - DNA, 120 bp, Homo sapiens
  misc_feature: 565 for SV(C|O) and 18S
ggatttaaagtggactcattccaattacagggcctcgaaagagtcctgtattgttatttttcgtcactacctccccgggtcgggagtgggtaatttgcgcgcctgctgccttccttggat

SEQ ID NO: 64398 - DNA, 120 bp, Homo sapiens
  misc_feature: 565 for SV(C|O) and 18S
gacttgccctccaatggatcctcgttaaaggatttaaagtggactcattccaattacagggcctcgaaagagtcctgtattgttatttttcgtcactacctccccgggtcgggagtgggt

SEQ ID NO: 64399 - DNA, 120 bp, Homo sapiens
  misc_feature: 565 for SV(C|O) and 18S
cgtcaattcctttaagtttcagctttgcaaccatactccccccggaacccaaagactttggtttcccggaagctgcccggcgggtcatgggaataacgccgccgcatcgccggtcggcat

SEQ ID NO: 64400 - DNA, 120 bp, Homo sapiens; identical to SEQ ID NO: 48862
  misc_feature: 565 for SV(C|O) and 18S

SEQ ID NO: 64401 - DNA, 120 bp, Homo sapiens
  misc_feature: 565 for SV(C|O) and 18S
agcgtatattaaagttgctgcagttaaaaagctcgtagttggatcttgggagcgggcgggcggtccgccgcgaggcgagccaccgcccgtccccgccccttgcctctcggcgccccctcg

SEQ ID NO: 64402 - DNA, 120 bp, Homo sapiens
  misc_feature: 565 for SV(C|O) and 18S
agacttgccctccaatggatcctcgttaaaggatttaaagtggactcattccaattacagggcctcgaaagagtcctgtattgttatttttcgtcactacctccccgggtcgggagtggg

SEQ ID NO: 64403 - DNA, 120 bp, Homo sapiens
  misc_feature: 565 for SV(C|O) and 18S
cagtcagtgtagcgcgcgtgcagccccggacatctaagggcatcacagacctgttattgctcaatctcgggtggctgaacgccacttgtccctctaagaagttgggggacgccgaccgct

SEQ ID NO: 64404 - DNA, 120 bp, Homo sapiens; identical to SEQ ID NO: 48067
  misc_feature: 564 for SV(C|O) and 18S

SEQ ID NO: 64405 - DNA, 120 bp, Homo sapiens
  misc_feature: 564 for SV(C|O) and 18S
tcgtcttcgaacctccgactttcgttcttgattaatgaaaacattcttggcaaatgctttcgctctggtccgtcttgcgccggtccaagaatttcacctctagcggcgcaatacgaatgc

SEQ ID NO: 64406 - DNA, 120 bp, Homo sapiens
  misc_feature: 564 for SV(C|O) and 18S
tatcagatcaaaaccaacccggtcagcccctctccggccccggccggggggcgggcgccggcggctttggtgactctagataacctcgggccgatcgcacgccccccgtggcggcgacga

SEQ ID NO: 64407 - DNA, 120 bp, Homo sapiens
  misc_feature: 564 for SV(C|O) and 18S
aaaaccaacccggtcagcccctctccggccccggccggggggcgggcgccggcggctttggtgactctagataacctcgggccgatcgcacgccccccgtggcggcgacgacccattcga

SEQ ID NO: 64408 - DNA, 120 bp, Homo sapiens
  misc_feature: 564 for SV(C|O) and 18S
ccagtcagtgtagcgcgcgtgcagccccggacatctaagggcatcacagacctgttattgctcaatctcgggtggctgaacgccacttgtccctctaagaagttgggggacgccgaccgc

SEQ ID NO: 64409 - DNA, 120 bp, Homo sapiens; identical to SEQ ID NO: 48033
  misc_feature: 564 for SV(C|O) and 18S

SEQ ID NO: 64410 - DNA, 120 bp, Homo sapiens
  misc_feature: 564 for SV(C|O) and 18S
ctagagtcaccaaagccgccggcgcccgccccccggccggggccggagaggggctgaccgggttggttttgatctgataaatgcacgcatcccccccgcgaagggggtcagcgcccgtcg

SEQ ID NO: 64411 - DNA, 120 bp, Homo sapiens
  misc_feature: 564 for SV(C|O) and 18S
cgtgggccgaccccggcggggccgatccgagggcctcactaaaccatccaatcggtagtagcgacgggcggtgtgtacaaagggcagggacttaatcaacgcaagcttatgacccgcact

SEQ ID NO: 64412 - DNA, 120 bp, Homo sapiens
  misc_feature: 563 for SV(C|O) and 18S
tggtggtgcatggccgttcttagttggtggagcgatttgtctggttaattccgataacgaacgagactctggcatgctaactagttacgcgacccccgagcggtcggcgtcccccaactt

SEQ ID NO: 64413 - DNA, 120 bp, Homo sapiens
  misc_feature: 563 for SV(C|O) and 18S
ggtggtgcatggccgttcttagttggtggagcgatttgtctggttaattccgataacgaacgagactctggcatgctaactagttacgcgacccccgagcggtcggcgtcccccaacttc

SEQ ID NO: 64414 - DNA, 120 bp, Homo sapiens; identical to SEQ ID NO: 48565
  misc_feature: 563 for SV(C|O) and 18S

SEQ ID NO: 64415 - DNA, 120 bp, Homo sapiens; identical to SEQ ID NO: 47885
  misc_feature: 563 for SV(C|O) and 18S

SEQ ID NO: 64416 - DNA, 120 bp, Homo sapiens
  misc_feature: 563 for SV(C|O) and 18S
ccccggccggggccggagaggggctgaccgggttggttttgatctgataaatgcacgcatcccccccgcgaagggggtcagcgcccgtcggcatgtattagctctagaattaccacagtt

SEQ ID NO: 64417 - DNA, 120 bp, Homo sapiens
  misc_feature: 563 for SV(C|O) and 18S
catcgccggtcggcatcgtttatggtcggaactacgacggtatctgatcgtcttcgaacctccgactttcgttcttgattaatgaaaacattcttggcaaatgctttcgctctggtccgt

SEQ ID NO: 64418 - DNA, 120 bp, Homo sapiens
  misc_feature: 563 for SV(C|O) and 18S
acgatgccgaccggcgatgcggcggcgttattcccatgacccgccgggcagcttccgggaaaccaaagtctttgggttccggggggagtatggttgcaaagctgaaacttaaaggaattg

SEQ ID NO: 64419 - DNA, 120 bp, Homo sapiens
  misc_feature: 562 for SV(C|O) and 18S
ttacccgcgcctgccggcgtagggtaggcacacgctgagccagtcagtgtagcgcgcgtgcagccccggacatctaagggcatcacagacctgttattgctcaatctcgggtggctgaac

SEQ ID NO: 64420 - DNA, 120 bp, Homo sapiens; identical to SEQ ID NO: 48367
  misc_feature: 562 for SV(C|O) and 18S

SEQ ID NO: 64421 - DNA, 120 bp, Homo sapiens; identical to SEQ ID NO: 47841
  misc_feature: 562 for SV(C|O) and 18S

SEQ ID NO: 64422 - DNA, 120 bp, Homo sapiens
  misc_feature: 562 for SV(C|O) and 18S
ccggtcagcccctctccggccccggccggggggcgggcgccggcggctttggtgactctagataacctcgggccgatcgcacgccccccgtggcggcgacgacccattcgaacgtctgcc

SEQ ID NO: 64423 - DNA, 120 bp, Homo sapiens
  misc_feature: 562 for SV(C|O) and 18S
gcatcgccggtcggcatcgtttatggtcggaactacgacggtatctgatcgtcttcgaacctccgactttcgttcttgattaatgaaaacattcttggcaaatgctttcgctctggtccg

SEQ ID NO: 64424 - DNA, 120 bp, Homo sapiens
  misc_feature: 562 for SV(C|O) and 18S
cggcgtagggtaggcacacgctgagccagtcagtgtagcgcgcgtgcagccccggacatctaagggcatcacagacctgttattgctcaatctcgggtggctgaacgccacttgtccctc

SEQ ID NO: 64425 - DNA, 120 bp, Homo sapiens
  misc_feature: 562 for SV(C|O) and 18S
caaaaccaacccggtcagcccctctccggccccggccggggggcgggcgccggcggctttggtgactctagataacctcgggccgatcgcacgccccccgtggcggcgacgacccattcg

SEQ ID NO: 64426 - DNA, 120 bp, Homo sapiens; identical to SEQ ID NO: 47764
  misc_feature: 561 for SV(C|O) and 18S

SEQ ID NO: 64427 - DNA, 120 bp, Homo sapiens
  misc_feature: 561 for SV(C|O) and 18S
gcgatcggcccgaggttatctagagtcaccaaagccgccggcgcccgccccccggccggggccggagaggggctgaccgggttggttttgatctgataaatgcacgcatcccccccgcga

SEQ ID NO: 64428 - DNA, 120 bp, Homo sapiens; identical to SEQ ID NO: 47966
  misc_feature: 561 for SV(C|O) and 18S

SEQ ID NO: 64429 - DNA, 120 bp, Homo sapiens
  misc_feature: 561 for SV(C|O) and 18S
acttgccctccaatggatcctcgttaaaggatttaaagtggactcattccaattacagggcctcgaaagagtcctgtattgttatttttcgtcactacctccccgggtcgggagtgggta

SEQ ID NO: 64430 - DNA, 120 bp, Homo sapiens; identical to SEQ ID NO: 47828
  misc_feature: 561 for SV(C|O) and 18S

SEQ ID NO: 64431 - DNA, 120 bp, Homo sapiens
  misc_feature: 561 for SV(C|O) and 18S
cccccggccggggccggagaggggctgaccgggttggttttgatctgataaatgcacgcatcccccccgcgaagggggtcagcgcccgtcggcatgtattagctctagaattaccacagt

SEQ ID NO: 64432 - DNA, 120 bp, Homo sapiens
  misc_feature: 560 for SV(C|O) and 18S
aaaccaacccggtcagcccctctccggccccggccggggggcgggcgccggcggctttggtgactctagataacctcgggccgatcgcacgccccccgtggcggcgacgacccattcgaa

SEQ ID NO: 64433 - DNA, 120 bp, Homo sapiens; identical to SEQ ID NO: 48076
  misc_feature: 560 for SV(C|O) and 18S

SEQ ID NO: 64434 - DNA, 120 bp, Homo sapiens
  misc_feature: 560 for SV(C|O) and 18S
agcttccgggaaaccaaagtctttgggttccggggggagtatggttgcaaagctgaaacttaaaggaattgacggaagggcaccaccaggagtggagcctgcggcttaatttgactcaac

SEQ ID NO: 64435 - DNA, 120 bp, Homo sapiens
  misc_feature: 560 for SV(C|O) and 18S
cgcgcctgccggcgtagggtaggcacacgctgagccagtcagtgtagcgcgcgtgcagccccggacatctaagggcatcacagacctgttattgctcaatctcgggtggctgaacgccac

SEQ ID NO: 64436 - DNA, 120 bp, Homo sapiens; identical to SEQ ID NO: 48856
  misc_feature: 560 for SV(C|O) and 18S

SEQ ID NO: 64437 - DNA, 120 bp, Homo sapiens
  misc_feature: 560 for SV(C|O) and 18S
cccgcgcctgccggcgtagggtaggcacacgctgagccagtcagtgtagcgcgcgtgcagccccggacatctaagggcatcacagacctgttattgctcaatctcgggtggctgaacgcc

SEQ ID NO: 64438 - DNA, 120 bp, Homo sapiens; identical to SEQ ID NO: 48702
  misc_feature: 560 for SV(C|O) and 18S

SEQ ID NO: 64439 - DNA, 120 bp, Homo sapiens; identical to SEQ ID NO: 48144
  misc_feature: 560 for SV(C|O) and 18S

SEQ ID NO: 64440 - DNA, 120 bp, Homo sapiens
  misc_feature: 559 for SV(C|O) and 18S
ccgtcaattcctttaagtttcagctttgcaaccatactccccccggaacccaaagactttggtttcccggaagctgcccggcgggtcatgggaataacgccgccgcatcgccggtcggca

SEQ ID NO: 64441 - DNA, 120 bp, Homo sapiens; identical to SEQ ID NO: 48772
  misc_feature: 559 for SV(C|O) and 18S

SEQ ID NO: 64442 - DNA, 120 bp, Homo sapiens
  misc_feature: 558 for SV(C|O) and 18S
gcttccgggaaaccaaagtctttgggttccggggggagtatggttgcaaagctgaaacttaaaggaattgacggaagggcaccaccaggagtggagcctgcggcttaatttgactcaaca

SEQ ID NO: 64443 - DNA, 120 bp, Homo sapiens
  misc_feature: 558 for SV(C|O) and 18S
gccccccggccggggccggagaggggctgaccgggttggttttgatctgataaatgcacgcatcccccccgcgaagggggtcagcgcccgtcggcatgtattagctctagaattaccaca

SEQ ID NO: 64444 - DNA, 120 bp, Homo sapiens; identical to SEQ ID NO: 48593
  misc_feature: 558 for SV(C|O) and 18S

SEQ ID NO: 64445 - DNA, 120 bp, Homo sapiens
  misc_feature: 558 for SV(C|O) and 18S
tagggcagacgttcgaatgggtcgtcgccgccacggggggcgtgcgatcggcccgaggttatctagagtcaccaaagccgccggcgcccgccccccggccggggccggagaggggctgac

SEQ ID NO: 64446 - DNA, 120 bp, Homo sapiens
  misc_feature: 558 for SV(C|O) and 18S
tagcgtatattaaagttgctgcagttaaaaagctcgtagttggatcttgggagcgggcgggcggtccgccgcgaggcgagccaccgcccgtccccgccccttgcctctcggcgccccctc

SEQ ID NO: 64447 - DNA, 120 bp, Homo sapiens
  misc_feature: 558 for SV(C|O) and 18S
cgccccccggccggggccggagaggggctgaccgggttggttttgatctgataaatgcacgcatcccccccgcgaagggggtcagcgcccgtcggcatgtattagctctagaattaccac

SEQ ID NO: 64448 - DNA, 120 bp, Homo sapiens; identical to SEQ ID NO: 48530
  misc_feature: 558 for SV(C|O) and 18S

SEQ ID NO: 64449 - DNA, 120 bp, Homo sapiens; identical to SEQ ID NO: 48574
  misc_feature: 557 for SV(C|O) and 18S

SEQ ID NO: 64450 - DNA, 120 bp, Homo sapiens; identical to SEQ ID NO: 48995
  misc_feature: 557 for SV(C|O) and 18S

SEQ ID NO: 64451 - DNA, 120 bp, Homo sapiens
  misc_feature: 557 for SV(C|O) and 18S
cttccgggaaaccaaagtctttgggttccggggggagtatggttgcaaagctgaaacttaaaggaattgacggaagggcaccaccaggagtggagcctgcggcttaatttgactcaacac

SEQ ID NO: 64452 - DNA, 120 bp, Homo sapiens; identical to SEQ ID NO: 47742
  misc_feature: 557 for SV(C|O) and 18S

SEQ ID NO: 64453 - DNA, 120 bp, Homo sapiens; identical to SEQ ID NO: 48329
  misc_feature: 557 for SV(C|O) and 18S

SEQ ID NO: 64454 - DNA, 120 bp, Homo sapiens
  misc_feature: 557 for SV(C|O) and 18S
ccggcgtagggtaggcacacgctgagccagtcagtgtagcgcgcgtgcagccccggacatctaagggcatcacagacctgttattgctcaatctcgggtggctgaacgccacttgtccct

SEQ ID NO: 64455 - DNA, 120 bp, Homo sapiens; identical to SEQ ID NO: 48930
  misc_feature: 557 for SV(C|O) and 18S

SEQ ID NO: 64456 - DNA, 120 bp, Homo sapiens; identical to SEQ ID NO: 48792
  misc_feature: 556 for SV(C|O) and 18S

SEQ ID NO: 64457 - DNA, 120 bp, Homo sapiens; identical to SEQ ID NO: 48129
  misc_feature: 556 for SV(C|O) and 18S

SEQ ID NO: 64458 - DNA, 120 bp, Homo sapiens
  misc_feature: 556 for SV(C|O) and 18S
ggtttcccgtgttgagtcaaattaagccgcaggctccactcctggtggtgcccttccgtcaattcctttaagtttcagctttgcaaccatactccccccggaacccaaagactttggttt

SEQ ID NO: 64459 - DNA, 120 bp, Homo sapiens; identical to SEQ ID NO: 47757
  misc_feature: 556 for SV(C|O) and 18S

SEQ ID NO: 64460 - DNA, 120 bp, Homo sapiens
  misc_feature: 556 for SV(C|O) and 18S
aggtttcccgtgttgagtcaaattaagccgcaggctccactcctggtggtgcccttccgtcaattcctttaagtttcagctttgcaaccatactccccccggaacccaaagactttggtt

SEQ ID NO: 64461 - DNA, 120 bp, Homo sapiens
  misc_feature: 555 for SV(C|O) and 18S
tgaggtttcccgtgttgagtcaaattaagccgcaggctccactcctggtggtgcccttccgtcaattcctttaagtttcagctttgcaaccatactccccccggaacccaaagactttgg

SEQ ID NO: 64462 - DNA, 120 bp, Homo sapiens; identical to SEQ ID NO: 47771
  misc_feature: 555 for SV(C|O) and 18S

SEQ ID NO: 64463 - DNA, 120 bp, Homo sapiens; identical to SEQ ID NO: 48151
  misc_feature: 555 for SV(C|O) and 18S

SEQ ID NO: 64464 - DNA, 120 bp, Homo sapiens
  misc_feature: 555 for SV(C|O) and 18S
acccgcgcctgccggcgtagggtaggcacacgctgagccagtcagtgtagcgcgcgtgcagccccggacatctaagggcatcacagacctgttattgctcaatctcgggtggctgaacgc

SEQ ID NO: 64465 - DNA, 120 bp, Homo sapiens
  misc_feature: 555 for SV(C|O) and 18S
ctagagctaatacatgccgacgggcgctgacccccttcgcgggggggatgcgtgcatttatcagatcaaaaccaacccggtcagcccctctccggccccggccggggggcgggcgccggc

SEQ ID NO: 64466 - DNA, 120 bp, Homo sapiens
  misc_feature: 555 for SV(C|O) and 18S
cgcctgccggcgtagggtaggcacacgctgagccagtcagtgtagcgcgcgtgcagccccggacatctaagggcatcacagacctgttattgctcaatctcgggtggctgaacgccactt

SEQ ID NO: 64467 - DNA, 120 bp, Homo sapiens
  misc_feature: 554 for SV(C|O) and 18S
ttccgggaaaccaaagtctttgggttccggggggagtatggttgcaaagctgaaacttaaaggaattgacggaagggcaccaccaggagtggagcctgcggcttaatttgactcaacacg

SEQ ID NO: 64468 - DNA, 120 bp, Homo sapiens
  misc_feature: 554 for SV(C|O) and 18S
ccgcgcctgccggcgtagggtaggcacacgctgagccagtcagtgtagcgcgcgtgcagccccggacatctaagggcatcacagacctgttattgctcaatctcgggtggctgaacgcca

SEQ ID NO: 64469 - DNA, 120 bp, Homo sapiens
  misc_feature: 554 for SV(C|O) and 18S
tcccgtgttgagtcaaattaagccgcaggctccactcctggtggtgcccttccgtcaattcctttaagtttcagctttgcaaccatactccccccggaacccaaagactttggtttcccg

SEQ ID NO: 64470 - DNA, 120 bp, Homo sapiens
  misc_feature: 554 for SV(C|O) and 18S
attctagagctaatacatgccgacgggcgctgacccccttcgcgggggggatgcgtgcatttatcagatcaaaaccaacccggtcagcccctctccggccccggccggggggcgggcgcc

SEQ ID NO: 64471 - DNA, 120 bp, Homo sapiens
  misc_feature: 554 for SV(C|O) and 18S
cccggtcagcccctctccggccccggccggggggcgggcgccggcggctttggtgactctagataacctcgggccgatcgcacgccccccgtggcggcgacgacccattcgaacgtctgc

SEQ ID NO: 64472 - DNA, 120 bp, Homo sapiens; identical to SEQ ID NO: 47960
  misc_feature: 554 for SV(C|O) and 18S

SEQ ID NO: 64473 - DNA, 120 bp, Homo sapiens; identical to SEQ ID NO: 48447
  misc_feature: 554 for SV(C|O) and 18S

SEQ ID NO: 64474 - DNA, 120 bp, Homo sapiens
  misc_feature: 553 for SV(C|O) and 18S
tccgtcaattcctttaagtttcagctttgcaaccatactccccccggaacccaaagactttggtttcccggaagctgcccggcgggtcatgggaataacgccgccgcatcgccggtcggc

SEQ ID NO: 64475 - DNA, 120 bp, Homo sapiens; identical to SEQ ID NO: 48097
  misc_feature: 553 for SV(C|O) and 18S

SEQ ID NO: 64476 - DNA, 120 bp, Homo sapiens
  misc_feature: 553 for SV(C|O) and 18S
gccgacgggcgctgacccccttcgcgggggggatgcgtgcatttatcagatcaaaaccaacccggtcagcccctctccggccccggccggggggcgggcgccggcggctttggtgactct

SEQ ID NO: 64477 - DNA, 120 bp, Homo sapiens
  misc_feature: 552 for SV(C|O) and 18S
ccgccccccggccggggccggagaggggctgaccgggttggttttgatctgataaatgcacgcatcccccccgcgaagggggtcagcgcccgtcggcatgtattagctctagaattacca

SEQ ID NO: 64478 - DNA, 120 bp, Homo sapiens
  misc_feature: 552 for SV(C|O) and 18S
atagggcagacgttcgaatgggtcgtcgccgccacggggggcgtgcgatcggcccgaggttatctagagtcaccaaagccgccggcgcccgccccccggccggggccggagaggggctga

SEQ ID NO: 64479 - DNA, 120 bp, Homo sapiens
  misc_feature: 552 for SV(C|O) and 18S
ccgacgggcgctgacccccttcgcgggggggatgcgtgcatttatcagatcaaaaccaacccggtcagcccctctccggccccggccggggggcgggcgccggcggctttggtgactcta

SEQ ID NO: 64480 - DNA, 120 bp, Homo sapiens; identical to SEQ ID NO: 48831
  misc_feature: 552 for SV(C|O) and 18S

SEQ ID NO: 64481 - DNA, 120 bp, Homo sapiens
  misc_feature: 552 for SV(C|O) and 18S
gaggtttcccgtgttgagtcaaattaagccgcaggctccactcctggtggtgcccttccgtcaattcctttaagtttcagctttgcaaccatactccccccggaacccaaagactttggt

SEQ ID NO: 64482 - DNA, 120 bp, Homo sapiens
  misc_feature: 552 for SV(C|O) and 18S
ccccccggccggggccggagaggggctgaccgggttggttttgatctgataaatgcacgcatcccccccgcgaagggggtcagcgcccgtcggcatgtattagctctagaattaccacag

SEQ ID NO: 64483 - DNA, 120 bp, Homo sapiens
  misc_feature: 551 for SV(C|O) and 18S
cttgccctccaatggatcctcgttaaaggatttaaagtggactcattccaattacagggcctcgaaagagtcctgtattgttatttttcgtcactacctccccgggtcgggagtgggtaa

SEQ ID NO: 64484 - DNA, 120 bp, Homo sapiens; identical to SEQ ID NO: 48736
  misc_feature: 551 for SV(C|O) and 18S

SEQ ID NO: 64485 - DNA, 120 bp, Homo sapiens; identical to SEQ ID NO: 48075
  misc_feature: 551 for SV(C|O) and 18S

SEQ ID NO: 64486 - DNA, 120 bp, Homo sapiens; identical to SEQ ID NO: 48467
  misc_feature: 551 for SV(C|O) and 18S

SEQ ID NO: 64487 - DNA, 120 bp, Homo sapiens; identical to SEQ ID NO: 47987
  misc_feature: 551 for SV(C|O) and 18S

SEQ ID NO: 64488 - DNA, 120 bp, Homo sapiens; identical to SEQ ID NO: 48860
  misc_feature: 551 for SV(C|O) and 18S

SEQ ID NO: 64489 - DNA, 120 bp, Homo sapiens
  misc_feature: 551 for SV(C|O) and 18S
ccttccgtcaattcctttaagtttcagctttgcaaccatactccccccggaacccaaagactttggtttcccggaagctgcccggcgggtcatgggaataacgccgccgcatcgccggtc

SEQ ID NO: 64490 - DNA, 120 bp, Homo sapiens; identical to SEQ ID NO: 47994
  misc_feature: 551 for SV(C|O) and 18S

SEQ ID NO: 64491 - DNA, 120 bp, Homo sapiens
  misc_feature: 551 for SV(C|O) and 18S
atagcgtatattaaagttgctgcagttaaaaagctcgtagttggatcttgggagcgggcgggcggtccgccgcgaggcgagccaccgcccgtccccgccccttgcctctcggcgccccct

SEQ ID NO: 64492 - DNA, 120 bp, Homo sapiens
  misc_feature: 550 for SV(C|O) and 18S
acatgccgacgggcgctgacccccttcgcgggggggatgcgtgcatttatcagatcaaaaccaacccggtcagcccctctccggccccggccggggggcgggcgccggcggctttggtga

SEQ ID NO: 64493 - DNA, 120 bp, Homo sapiens
  misc_feature: 550 for SV(C|O) and 18S
tacatgccgacgggcgctgacccccttcgcgggggggatgcgtgcatttatcagatcaaaaccaacccggtcagcccctctccggccccggccggggggcgggcgccggcggctttggtg

SEQ ID NO: 64494 - DNA, 120 bp, Homo sapiens
  misc_feature: 550 for SV(C|O) and 18S
gtttcccgtgttgagtcaaattaagccgcaggctccactcctggtggtgcccttccgtcaattcctttaagtttcagctttgcaaccatactccccccggaacccaaagactttggtttc

SEQ ID NO: 64495 - DNA, 120 bp, Homo sapiens
  misc_feature: 550 for SV(C|O) and 18S
atgccgacgggcgctgacccccttcgcgggggggatgcgtgcatttatcagatcaaaaccaacccggtcagcccctctccggccccggccggggggcgggcgccggcggctttggtgact

SEQ ID NO: 64496 - DNA, 120 bp, Homo sapiens
  misc_feature: 550 for SV(C|O) and 18S
aacccggtcagcccctctccggccccggccggggggcgggcgccggcggctttggtgactctagataacctcgggccgatcgcacgccccccgtggcggcgacgacccattcgaacgtct

SEQ ID NO: 64497 - DNA, 120 bp, Homo sapiens
  misc_feature: 549 for SV(C|O) and 18S
ttctagagctaatacatgccgacgggcgctgacccccttcgcgggggggatgcgtgcatttatcagatcaaaaccaacccggtcagcccctctccggccccggccggggggcgggcgccg

SEQ ID NO: 64498 - DNA, 120 bp, Homo sapiens
  misc_feature: 548 for SV(C|O) and 18S
ttccgtcaattcctttaagtttcagctttgcaaccatactccccccggaacccaaagactttggtttcccggaagctgcccggcgggtcatgggaataacgccgccgcatcgccggtcgg

SEQ ID NO: 64499 - DNA, 120 bp, Homo sapiens; identical to SEQ ID NO: 48762
  misc_feature: 548 for SV(C|O) and 18S

SEQ ID NO: 64500 - DNA, 120 bp, Homo sapiens; identical to SEQ ID NO: 48932
  misc_feature: 548 for SV(C|O) and 18S

SEQ ID NO: 64501 - DNA, 120 bp, Homo sapiens
  misc_feature: 548 for SV(C|O) and 18S
tacccgcgcctgccggcgtagggtaggcacacgctgagccagtcagtgtagcgcgcgtgcagccccggacatctaagggcatcacagacctgttattgctcaatctcgggtggctgaacg

SEQ ID NO: 64502 - DNA, 120 bp, Homo sapiens; identical to SEQ ID NO: 48876
  misc_feature: 547 for SV(C|O) and 18S

SEQ ID NO: 64503 - DNA, 120 bp, Homo sapiens
  misc_feature: 547 for SV(C|O) and 18S
tgccgacgggcgctgacccccttcgcgggggggatgcgtgcatttatcagatcaaaaccaacccggtcagcccctctccggccccggccggggggcgggcgccggcggctttggtgactc

SEQ ID NO: 64504 - DNA, 120 bp, Homo sapiens
  misc_feature: 547 for SV(C|O) and 18S
tgatagggcagacgttcgaatgggtcgtcgccgccacggggggcgtgcgatcggcccgaggttatctagagtcaccaaagccgccggcgcccgccccccggccggggccggagaggggct

SEQ ID NO: 64505 - DNA, 120 bp, Homo sapiens
  misc_feature: 547 for SV(C|O) and 18S
gtgggccgaccccggcggggccgatccgagggcctcactaaaccatccaatcggtagtagcgacgggcggtgtgtacaaagggcagggacttaatcaacgcaagcttatgacccgcactt

SEQ ID NO: 64506 - DNA, 120 bp, Homo sapiens
  misc_feature: 547 for SV(C|O) and 18S
catgccgacgggcgctgacccccttcgcgggggggatgcgtgcatttatcagatcaaaaccaacccggtcagcccctctccggccccggccggggggcgggcgccggcggctttggtgac

SEQ ID NO: 64507 - DNA, 120 bp, Homo sapiens
  misc_feature: 546 for SV(C|O) and 18S
tcagtgtagcgcgcgtgcagccccggacatctaagggcatcacagacctgttattgctcaatctcgggtggctgaacgccacttgtccctctaagaagttgggggacgccgaccgctcgg

SEQ ID NO: 64508 - DNA, 120 bp, Homo sapiens
  misc_feature: 546 for SV(C|O) and 18S
aatagcgtatattaaagttgctgcagttaaaaagctcgtagttggatcttgggagcgggcgggcggtccgccgcgaggcgagccaccgcccgtccccgccccttgcctctcggcgccccc

SEQ ID NO: 64509 - DNA, 120 bp, Homo sapiens
  misc_feature: 546 for SV(C|O) and 18S
cgtgggtggtggtgcatggccgttcttagttggtggagcgatttgtctggttaattccgataacgaacgagactctggcatgctaactagttacgcgacccccgagcggtcggcgtcccc

SEQ ID NO: 64510 - DNA, 120 bp, Homo sapiens; identical to SEQ ID NO: 48785
  misc_feature: 545 for SV(C|O) and 18S

SEQ ID NO: 64511 - DNA, 120 bp, Homo sapiens
  misc_feature: 545 for SV(C|O) and 18S
gcgcccgccccccggccggggccggagaggggctgaccgggttggttttgatctgataaatgcacgcatcccccccgcgaagggggtcagcgcccgtcggcatgtattagctctagaatt

SEQ ID NO: 64512 - DNA, 120 bp, Homo sapiens
  misc_feature: 545 for SV(C|O) and 18S
cttccgtcaattcctttaagtttcagctttgcaaccatactccccccggaacccaaagactttggtttcccggaagctgcccggcgggtcatgggaataacgccgccgcatcgccggtcg

SEQ ID NO: 64513 - DNA, 120 bp, Homo sapiens
  misc_feature: 544 for SV(C|O) and 18S
tttcccgtgttgagtcaaattaagccgcaggctccactcctggtggtgcccttccgtcaattcctttaagtttcagctttgcaaccatactccccccggaacccaaagactttggtttcc

SEQ ID NO: 64514 - DNA, 120 bp, Homo sapiens; identical to SEQ ID NO: 48778
  misc_feature: 544 for SV(C|O) and 18S

SEQ ID NO: 64515 - DNA, 120 bp, Homo sapiens; identical to SEQ ID NO: 48935
  misc_feature: 544 for SV(C|O) and 18S

SEQ ID NO: 64516 - DNA, 120 bp, Homo sapiens; identical to SEQ ID NO: 48782
  misc_feature: 544 for SV(C|O) and 18S

SEQ ID NO: 64517 - DNA, 120 bp, Homo sapiens; identical to SEQ ID NO: 48183
  misc_feature: 544 for SV(C|O) and 18S

SEQ ID NO: 64518 - DNA, 120 bp, Homo sapiens; identical to SEQ ID NO: 48121
  misc_feature: 544 for SV(C|O) and 18S

SEQ ID NO: 64519 - DNA, 120 bp, Homo sapiens; identical to SEQ ID NO: 48231
  misc_feature: 544 for SV(C|O) and 18S

SEQ ID NO: 64520 - DNA, 120 bp, Homo sapiens
  misc_feature: 544 for SV(C|O) and 18S
acccggtcagcccctctccggccccggccggggggcgggcgccggcggctttggtgactctagataacctcgggccgatcgcacgccccccgtggcggcgacgacccattcgaacgtctg

SEQ ID NO: 64521 - DNA, 120 bp, Homo sapiens; identical to SEQ ID NO: 48909
  misc_feature: 543 for SV(C|O) and 18S

SEQ ID NO: 64522 - DNA, 120 bp, Homo sapiens
  misc_feature: 543 for SV(C|O) and 18S
tctagagctaatacatgccgacgggcgctgacccccttcgcgggggggatgcgtgcatttatcagatcaaaaccaacccggtcagcccctctccggccccggccggggggcgggcgccgg

SEQ ID NO: 64523 - DNA, 120 bp, Homo sapiens
  misc_feature: 543 for SV(C|O) and 18S
gccggcgtagggtaggcacacgctgagccagtcagtgtagcgcgcgtgcagccccggacatctaagggcatcacagacctgttattgctcaatctcgggtggctgaacgccacttgtccc

SEQ ID NO: 64524 - DNA, 120 bp, Homo sapiens; identical to SEQ ID NO: 48102
  misc_feature: 543 for SV(C|O) and 18S

SEQ ID NO: 64525 - DNA, 120 bp, Homo sapiens
  misc_feature: 543 for SV(C|O) and 18S
cccttccgtcaattcctttaagtttcagctttgcaaccatactccccccggaacccaaagactttggtttcccggaagctgcccggcgggtcatgggaataacgccgccgcatcgccggt

SEQ ID NO: 64526 - DNA, 120 bp, Homo sapiens; identical to SEQ ID NO: 48713
  misc_feature: 542 for SV(C|O) and 18S

SEQ ID NO: 64527 - DNA, 120 bp, Homo sapiens
  misc_feature: 542 for SV(C|O) and 18S
ccgtgttgagtcaaattaagccgcaggctccactcctggtggtgcccttccgtcaattcctttaagtttcagctttgcaaccatactccccccggaacccaaagactttggtttcccgga

SEQ ID NO: 64528 - DNA, 120 bp, Homo sapiens; identical to SEQ ID NO: 48777
  misc_feature: 542 for SV(C|O) and 18S

SEQ ID NO: 64529 - DNA, 120 bp, Homo sapiens
  misc_feature: 542 for SV(C|O) and 18S
atacatgccgacgggcgctgacccccttcgcgggggggatgcgtgcatttatcagatcaaaaccaacccggtcagcccctctccggccccggccggggggcgggcgccggcggctttggt

SEQ ID NO: 64530 - DNA, 120 bp, Homo sapiens
  misc_feature: 541 for SV(C|O) and 18S
cccgtgttgagtcaaattaagccgcaggctccactcctggtggtgcccttccgtcaattcctttaagtttcagctttgcaaccatactccccccggaacccaaagactttggtttcccgg

SEQ ID NO: 64531 - DNA, 120 bp, Homo sapiens; identical to SEQ ID NO: 48942
  misc_feature: 541 for SV(C|O) and 18S

SEQ ID NO: 64532 - DNA, 120 bp, Homo sapiens; identical to SEQ ID NO: 48881
  misc_feature: 540 for SV(C|O) and 18S

SEQ ID NO: 64533 - DNA, 120 bp, Homo sapiens; identical to SEQ ID NO: 48769
  misc_feature: 540 for SV(C|O) and 18S

SEQ ID NO: 64534 - DNA, 120 bp, Homo sapiens
  misc_feature: 540 for SV(C|O) and 18S
aaccaacccggtcagcccctctccggccccggccggggggcgggcgccggcggctttggtgactctagataacctcgggccgatcgcacgccccccgtggcggcgacgacccattcgaac

SEQ ID NO: 64535 - DNA, 120 bp, Homo sapiens
  misc_feature: 540 for SV(C|O) and 18S
gtggtgcccttccgtcaattcctttaagtttcagctttgcaaccatactccccccggaacccaaagactttggtttcccggaagctgcccggcgggtcatgggaataacgccgccgcatc

SEQ ID NO: 64536 - DNA, 120 bp, Homo sapiens
  misc_feature: 540 for SV(C|O) and 18S
caatagcgtatattaaagttgctgcagttaaaaagctcgtagttggatcttgggagcgggcgggcggtccgccgcgaggcgagccaccgcccgtccccgccccttgcctctcggcgcccc

SEQ ID NO: 64537 - DNA, 120 bp, Homo sapiens
  misc_feature: 540 for SV(C|O) and 18S
gatagggcagacgttcgaatgggtcgtcgccgccacggggggcgtgcgatcggcccgaggttatctagagtcaccaaagccgccggcgcccgccccccggccggggccggagaggggctg

SEQ ID NO: 64538 - DNA, 120 bp, Homo sapiens; identical to SEQ ID NO: 48590
  misc_feature: 540 for SV(C|O) and 18S

SEQ ID NO: 64539 - DNA, 120 bp, Homo sapiens
  misc_feature: 539 for SV(C|O) and 18S
ttcccgtgttgagtcaaattaagccgcaggctccactcctggtggtgcccttccgtcaattcctttaagtttcagctttgcaaccatactccccccggaacccaaagactttggtttccc

SEQ ID NO: 64540 - DNA, 120 bp, Homo sapiens
  misc_feature: 539 for SV(C|O) and 18S
ttaatcaacgcaagcttatgacccgcacttactgggaattcctcgttcatggggaataattgcaatccccgatccccatcacgaatggggttcaacgggttacccgcgcctgccggcgta

SEQ ID NO: 64541 - DNA, 120 bp, Homo sapiens; identical to SEQ ID NO: 49019
  misc_feature: 539 for SV(C|O) and 18S

SEQ ID NO: 64542 - DNA, 120 bp, Homo sapiens
  misc_feature: 539 for SV(C|O) and 18S
tggtggtgcccttccgtcaattcctttaagtttcagctttgcaaccatactccccccggaacccaaagactttggtttcccggaagctgcccggcgggtcatgggaataacgccgccgca

SEQ ID NO: 64543 - DNA, 120 bp, Homo sapiens; identical to SEQ ID NO: 48749
  misc_feature: 539 for SV(C|O) and 18S

SEQ ID NO: 64544 - DNA, 120 bp, Homo sapiens; identical to SEQ ID NO: 48164
  misc_feature: 539 for SV(C|O) and 18S

SEQ ID NO: 64545 - DNA, 120 bp, Homo sapiens; identical to SEQ ID NO: 48261
  misc_feature: 539 for SV(C|O) and 18S

SEQ ID NO: 64546 - DNA, 120 bp, Homo sapiens; identical to SEQ ID NO: 48927
  misc_feature: 539 for SV(C|O) and 18S

SEQ ID NO: 64547 - DNA, 120 bp, Homo sapiens
  misc_feature: 539 for SV(C|O) and 18S
tagagctaatacatgccgacgggcgctgacccccttcgcgggggggatgcgtgcatttatcagatcaaaaccaacccggtcagcccctctccggccccggccggggggcgggcgccggcg

SEQ ID NO: 64548 - DNA, 120 bp, Homo sapiens
  misc_feature: 539 for SV(C|O) and 18S
gccctccaatggatcctcgttaaaggatttaaagtggactcattccaattacagggcctcgaaagagtcctgtattgttatttttcgtcactacctccccgggtcgggagtgggtaattt

SEQ ID NO: 64549 - DNA, 120 bp, Homo sapiens; identical to SEQ ID NO: 48536
  misc_feature: 538 for SV(C|O) and 18S

SEQ ID NO: 64550 - DNA, 120 bp, Homo sapiens; identical to SEQ ID NO: 48564
  misc_feature: 538 for SV(C|O) and 18S

SEQ ID NO: 64551 - DNA, 120 bp, Homo sapiens
  misc_feature: 538 for SV(C|O) and 18S
ggtggtgcccttccgtcaattcctttaagtttcagctttgcaaccatactccccccggaacccaaagactttggtttcccggaagctgcccggcgggtcatgggaataacgccgccgcat

SEQ ID NO: 64552 - DNA, 120 bp, Homo sapiens
  misc_feature: 538 for SV(C|O) and 18S
cctccaatggatcctcgttaaaggatttaaagtggactcattccaattacagggcctcgaaagagtcctgtattgttatttttcgtcactacctccccgggtcgggagtgggtaatttgc

SEQ ID NO: 64553 - DNA, 120 bp, Homo sapiens
  misc_feature: 538 for SV(C|O) and 18S
ctccaatggatcctcgttaaaggatttaaagtggactcattccaattacagggcctcgaaagagtcctgtattgttatttttcgtcactacctccccgggtcgggagtgggtaatttgcg

SEQ ID NO: 64554 - DNA, 120 bp, Homo sapiens
  misc_feature: 538 for SV(C|O) and 18S
agttgatagggcagacgttcgaatgggtcgtcgccgccacggggggcgtgcgatcggcccgaggttatctagagtcaccaaagccgccggcgcccgccccccggccggggccggagaggg

SEQ ID NO: 64555 - DNA, 120 bp, Homo sapiens; identical to SEQ ID NO: 48185
  misc_feature: 537 for SV(C|O) and 18S

SEQ ID NO: 64556 - DNA, 120 bp, Homo sapiens; identical to SEQ ID NO: 48855
  misc_feature: 537 for SV(C|O) and 18S

SEQ ID NO: 64557 - DNA, 120 bp, Homo sapiens; identical to SEQ ID NO: 49027
  misc_feature: 537 for SV(C|O) and 18S

SEQ ID NO: 64558 - DNA, 120 bp, Homo sapiens
  misc_feature: 537 for SV(C|O) and 18S
aatacatgccgacgggcgctgacccccttcgcgggggggatgcgtgcatttatcagatcaaaaccaacccggtcagcccctctccggccccggccggggggcgggcgccggcggctttgg

SEQ ID NO: 64559 - DNA, 120 bp, Homo sapiens
  misc_feature: 536 for SV(C|O) and 18S
ttgccctccaatggatcctcgttaaaggatttaaagtggactcattccaattacagggcctcgaaagagtcctgtattgttatttttcgtcactacctccccgggtcgggagtgggtaat

SEQ ID NO: 64560 - DNA, 120 bp, Homo sapiens
  misc_feature: 536 for SV(C|O) and 18S
tgccctccaatggatcctcgttaaaggatttaaagtggactcattccaattacagggcctcgaaagagtcctgtattgttatttttcgtcactacctccccgggtcgggagtgggtaatt

SEQ ID NO: 64561 - DNA, 120 bp, Homo sapiens
  misc_feature: 536 for SV(C|O) and 18S
taatacatgccgacgggcgctgacccccttcgcgggggggatgcgtgcatttatcagatcaaaaccaacccggtcagcccctctccggccccggccggggggcgggcgccggcggctttg

SEQ ID NO: 64562 - DNA, 120 bp, Homo sapiens
  misc_feature: 536 for SV(C|O) and 18S
agagctaatacatgccgacgggcgctgacccccttcgcgggggggatgcgtgcatttatcagatcaaaaccaacccggtcagcccctctccggccccggccggggggcgggcgccggcgg

SEQ ID NO: 64563 - DNA, 120 bp, Homo sapiens
  misc_feature: 535 for SV(C|O) and 18S
gttgatagggcagacgttcgaatgggtcgtcgccgccacggggggcgtgcgatcggcccgaggttatctagagtcaccaaagccgccggcgcccgccccccggccggggccggagagggg

SEQ ID NO: 64564 - DNA, 120 bp, Homo sapiens
  misc_feature: 535 for SV(C|O) and 18S
gggccgaccccggcggggccgatccgagggcctcactaaaccatccaatcggtagtagcgacgggcggtgtgtacaaagggcagggacttaatcaacgcaagcttatgacccgcacttac

SEQ ID NO: 64565 - DNA, 120 bp, Homo sapiens
  misc_feature: 535 for SV(C|O) and 18S
ctggtggtgcccttccgtcaattcctttaagtttcagctttgcaaccatactccccccggaacccaaagactttggtttcccggaagctgcccggcgggtcatgggaataacgccgccgc

SEQ ID NO: 64566 - DNA, 120 bp, Homo sapiens
  misc_feature: 535 for SV(C|O) and 18S
gagctaatacatgccgacgggcgctgacccccttcgcgggggggatgcgtgcatttatcagatcaaaaccaacccggtcagcccctctccggccccggccggggggcgggcgccggcggc

SEQ ID NO: 64567 - DNA, 120 bp, Homo sapiens
  misc_feature: 535 for SV(C|O) and 18S
aaagttgatagggcagacgttcgaatgggtcgtcgccgccacggggggcgtgcgatcggcccgaggttatctagagtcaccaaagccgccggcgcccgccccccggccggggccggagag

SEQ ID NO: 64568 - DNA, 120 bp, Homo sapiens
  misc_feature: 535 for SV(C|O) and 18S
cctggtggtgcccttccgtcaattcctttaagtttcagctttgcaaccatactccccccggaacccaaagactttggtttcccggaagctgcccggcgggtcatgggaataacgccgccg

SEQ ID NO: 64569 - DNA, 120 bp, Homo sapiens
  misc_feature: 534 for SV(C|O) and 18S
tgggccgaccccggcggggccgatccgagggcctcactaaaccatccaatcggtagtagcgacgggcggtgtgtacaaagggcagggacttaatcaacgcaagcttatgacccgcactta

SEQ ID NO: 64570 - DNA, 120 bp, Homo sapiens
  misc_feature: 534 for SV(C|O) and 18S
ccgtgggtggtggtgcatggccgttcttagttggtggagcgatttgtctggttaattccgataacgaacgagactctggcatgctaactagttacgcgacccccgagcggtcggcgtccc

SEQ ID NO: 64571 - DNA, 120 bp, Homo sapiens
  misc_feature: 534 for SV(C|O) and 18S
ggccgaccccggcggggccgatccgagggcctcactaaaccatccaatcggtagtagcgacgggcggtgtgtacaaagggcagggacttaatcaacgcaagcttatgacccgcacttact

SEQ ID NO: 64572 - DNA, 120 bp, Homo sapiens; identical to SEQ ID NO: 48938
  misc_feature: 534 for SV(C|O) and 18S

SEQ ID NO: 64573 - DNA, 120 bp, Homo sapiens
  misc_feature: 534 for SV(C|O) and 18S
cttaatcaacgcaagcttatgacccgcacttactgggaattcctcgttcatggggaataattgcaatccccgatccccatcacgaatggggttcaacgggttacccgcgcctgccggcgt

SEQ ID NO: 64574 - DNA, 120 bp, Homo sapiens; identical to SEQ ID NO: 48820
  misc_feature: 534 for SV(C|O) and 18S

SEQ ID NO: 64575 - DNA, 120 bp, Homo sapiens
  misc_feature: 534 for SV(C|O) and 18S
accaacccggtcagcccctctccggccccggccggggggcgggcgccggcggctttggtgactctagataacctcgggccgatcgcacgccccccgtggcggcgacgacccattcgaacg

SEQ ID NO: 64576 - DNA, 120 bp, Homo sapiens
  misc_feature: 534 for SV(C|O) and 18S
aagttgatagggcagacgttcgaatgggtcgtcgccgccacggggggcgtgcgatcggcccgaggttatctagagtcaccaaagccgccggcgcccgccccccggccggggccggagagg

SEQ ID NO: 64577 - DNA, 120 bp, Homo sapiens; identical to SEQ ID NO: 48548
  misc_feature: 533 for SV(C|O) and 18S

SEQ ID NO: 64578 - DNA, 120 bp, Homo sapiens
  misc_feature: 533 for SV(C|O) and 18S
ccctcgatgctcttagctgagtgtcccgcggggcccgaagcgtttactttgaaaaaattagagtgttcaaagcaggcccgagccgcctggataccgcagctaggaataatggaataggac

SEQ ID NO: 64579 - DNA, 120 bp, Homo sapiens
  misc_feature: 533 for SV(C|O) and 18S
gaggatccattggagggcaagtctggtgccagcagccgcggtaattccagctccaatagcgtatattaaagttgctgcagttaaaaagctcgtagttggatcttgggagcgggcgggcgg

SEQ ID NO: 64580 - DNA, 120 bp, Homo sapiens; identical to SEQ ID NO: 48810
  misc_feature: 533 for SV(C|O) and 18S

SEQ ID NO: 64581 - DNA, 120 bp, Homo sapiens; identical to SEQ ID NO: 48288
  misc_feature: 532 for SV(C|O) and 18S

SEQ ID NO: 64582 - DNA, 120 bp, Homo sapiens; identical to SEQ ID NO: 48834
  misc_feature: 532 for SV(C|O) and 18S

SEQ ID NO: 64583 - DNA, 120 bp, Homo sapiens; identical to SEQ ID NO: 48969
  misc_feature: 532 for SV(C|O) and 18S

SEQ ID NO: 64584 - DNA, 120 bp, Homo sapiens; identical to SEQ ID NO: 49016
  misc_feature: 532 for SV(C|O) and 18S

SEQ ID NO: 64585 - DNA, 120 bp, Homo sapiens
  misc_feature: 532 for SV(C|O) and 18S
ctaatacatgccgacgggcgctgacccccttcgcgggggggatgcgtgcatttatcagatcaaaaccaacccggtcagcccctctccggccccggccggggggcgggcgccggcggcttt

SEQ ID NO: 64586 - DNA, 120 bp, Homo sapiens; identical to SEQ ID NO: 48920
  misc_feature: 532 for SV(C|O) and 18S

SEQ ID NO: 64587 - DNA, 120 bp, Homo sapiens; identical to SEQ ID NO: 48961
  misc_feature: 532 for SV(C|O) and 18S

SEQ ID NO: 64588 - DNA, 120 bp, Homo sapiens; identical to SEQ ID NO: 48611
  misc_feature: 531 for SV(C|O) and 18S

SEQ ID NO: 64589 - DNA, 120 bp, Homo sapiens
  misc_feature: 531 for SV(C|O) and 18S
tggtgcccttccgtcaattcctttaagtttcagctttgcaaccatactccccccggaacccaaagactttggtttcccggaagctgcccggcgggtcatgggaataacgccgccgcatcg

SEQ ID NO: 64590 - DNA, 120 bp, Homo sapiens
  misc_feature: 531 for SV(C|O) and 18S
tgcccttccgtcaattcctttaagtttcagctttgcaaccatactccccccggaacccaaagactttggtttcccggaagctgcccggcgggtcatgggaataacgccgccgcatcgccg

SEQ ID NO: 64591 - DNA, 120 bp, Homo sapiens
  misc_feature: 531 for SV(C|O) and 18S
gcccgccccccggccggggccggagaggggctgaccgggttggttttgatctgataaatgcacgcatcccccccgcgaagggggtcagcgcccgtcggcatgtattagctctagaattac

SEQ ID NO: 64592 - DNA, 120 bp, Homo sapiens
  misc_feature: 531 for SV(C|O) and 18S
gcccttccgtcaattcctttaagtttcagctttgcaaccatactccccccggaacccaaagactttggtttcccggaagctgcccggcgggtcatgggaataacgccgccgcatcgccgg

SEQ ID NO: 64593 - DNA, 120 bp, Homo sapiens
  misc_feature: 531 for SV(C|O) and 18S
caacccggtcagcccctctccggccccggccggggggcgggcgccggcggctttggtgactctagataacctcgggccgatcgcacgccccccgtggcggcgacgacccattcgaacgtc

SEQ ID NO: 64594 - DNA, 120 bp, Homo sapiens
  misc_feature: 531 for SV(C|O) and 18S
aaccctgattccccgtcacccgtggtcaccatggtaggcacggcgactaccatcgaaagttgatagggcagacgttcgaatgggtcgtcgccgccacggggggcgtgcgatcggcccgag

SEQ ID NO: 64595 - DNA, 120 bp, Homo sapiens
  misc_feature: 531 for SV(C|O) and 18S
aggatccattggagggcaagtctggtgccagcagccgcggtaattccagctccaatagcgtatattaaagttgctgcagttaaaaagctcgtagttggatcttgggagcgggcgggcggt

SEQ ID NO: 64596 - DNA, 120 bp, Homo sapiens
  misc_feature: 530 for SV(C|O) and 18S
ttgatagggcagacgttcgaatgggtcgtcgccgccacggggggcgtgcgatcggcccgaggttatctagagtcaccaaagccgccggcgcccgccccccggccggggccggagaggggc

SEQ ID NO: 64597 - DNA, 120 bp, Homo sapiens
  misc_feature: 530 for SV(C|O) and 18S
gccgaccccggcggggccgatccgagggcctcactaaaccatccaatcggtagtagcgacgggcggtgtgtacaaagggcagggacttaatcaacgcaagcttatgacccgcacttactg

SEQ ID NO: 64598 - DNA, 120 bp, Homo sapiens; identical to SEQ ID NO: 48224
  misc_feature: 530 for SV(C|O) and 18S

SEQ ID NO: 64599 - DNA, 120 bp, Homo sapiens
  misc_feature: 530 for SV(C|O) and 18S
ccaacccggtcagcccctctccggccccggccggggggcgggcgccggcggctttggtgactctagataacctcgggccgatcgcacgccccccgtggcggcgacgacccattcgaacgt

SEQ ID NO: 64600 - DNA, 120 bp, Homo sapiens
  misc_feature: 530 for SV(C|O) and 18S
atgacccgccgggcagcttccgggaaaccaaagtctttgggttccggggggagtatggttgcaaagctgaaacttaaaggaattgacggaagggcaccaccaggagtggagcctgcggct

SEQ ID NO: 64601 - DNA, 120 bp, Homo sapiens; identical to SEQ ID NO: 48985
  misc_feature: 529 for SV(C|O) and 18S

SEQ ID NO: 64602 - DNA, 120 bp, Homo sapiens; identical to SEQ ID NO: 49012
  misc_feature: 529 for SV(C|O) and 18S

SEQ ID NO: 64603 - DNA, 120 bp, Homo sapiens; identical to SEQ ID NO: 48949
  misc_feature: 529 for SV(C|O) and 18S

SEQ ID NO: 64604 - DNA, 120 bp, Homo sapiens
  misc_feature: 529 for SV(C|O) and 18S
cgcccgccccccggccggggccggagaggggctgaccgggttggttttgatctgataaatgcacgcatcccccccgcgaagggggtcagcgcccgtcggcatgtattagctctagaatta

SEQ ID NO: 64605 - DNA, 120 bp, Homo sapiens; identical to SEQ ID NO: 48825
  misc_feature: 529 for SV(C|O) and 18S

SEQ ID NO: 64606 - DNA, 120 bp, Homo sapiens; identical to SEQ ID NO: 48962
  misc_feature: 529 for SV(C|O) and 18S

SEQ ID NO: 64607 - DNA, 120 bp, Homo sapiens; identical to SEQ ID NO: 48975
  misc_feature: 529 for SV(C|O) and 18S

SEQ ID NO: 64608 - DNA, 120 bp, Homo sapiens; identical to SEQ ID NO: 48176
  misc_feature: 529 for SV(C|O) and 18S

SEQ ID NO: 64609 - DNA, 120 bp, Homo sapiens; identical to SEQ ID NO: 49001
  misc_feature: 528 for SV(C|O) and 18S

SEQ ID NO: 64610 - DNA, 120 bp, Homo sapiens
  misc_feature: 528 for SV(C|O) and 18S
cgaggatccattggagggcaagtctggtgccagcagccgcggtaattccagctccaatagcgtatattaaagttgctgcagttaaaaagctcgtagttggatcttgggagcgggcgggcg

SEQ ID NO: 64611 - DNA, 120 bp, Homo sapiens
  misc_feature: 528 for SV(C|O) and 18S
agctaatacatgccgacgggcgctgacccccttcgcgggggggatgcgtgcatttatcagatcaaaaccaacccggtcagcccctctccggccccggccggggggcgggcgccggcggct

SEQ ID NO: 64612 - DNA, 120 bp, Homo sapiens
  misc_feature: 527 for SV(C|O) and 18S
tccgtgggtggtggtgcatggccgttcttagttggtggagcgatttgtctggttaattccgataacgaacgagactctggcatgctaactagttacgcgacccccgagcggtcggcgtcc

SEQ ID NO: 64613 - DNA, 120 bp, Homo sapiens
  misc_feature: 527 for SV(C|O) and 18S
gtgcccttccgtcaattcctttaagtttcagctttgcaaccatactccccccggaacccaaagactttggtttcccggaagctgcccggcgggtcatgggaataacgccgccgcatcgcc

SEQ ID NO: 64614 - DNA, 120 bp, Homo sapiens
  misc_feature: 527 for SV(C|O) and 18S
agggacttaatcaacgcaagcttatgacccgcacttactgggaattcctcgttcatggggaataattgcaatccccgatccccatcacgaatggggttcaacgggttacccgcgcctgcc

SEQ ID NO: 64615 - DNA, 120 bp, Homo sapiens
  misc_feature: 527 for SV(C|O) and 18S
ggatccattggagggcaagtctggtgccagcagccgcggtaattccagctccaatagcgtatattaaagttgctgcagttaaaaagctcgtagttggatcttgggagcgggcgggcggtc

SEQ ID NO: 64616 - DNA, 120 bp, Homo sapiens; identical to SEQ ID NO: 48125
  misc_feature: 527 for SV(C|O) and 18S

SEQ ID NO: 64617 - DNA, 120 bp, Homo sapiens; identical to SEQ ID NO: 48853
  misc_feature: 527 for SV(C|O) and 18S

SEQ ID NO: 64618 - DNA, 120 bp, Homo sapiens
  misc_feature: 527 for SV(C|O) and 18S
acttaatcaacgcaagcttatgacccgcacttactgggaattcctcgttcatggggaataattgcaatccccgatccccatcacgaatggggttcaacgggttacccgcgcctgccggcg

SEQ ID NO: 64619 - DNA, 120 bp, Homo sapiens
  misc_feature: 527 for SV(C|O) and 18S
ccctccaatggatcctcgttaaaggatttaaagtggactcattccaattacagggcctcgaaagagtcctgtattgttatttttcgtcactacctccccgggtcgggagtgggtaatttg

SEQ ID NO: 64620 - DNA, 120 bp, Homo sapiens
  misc_feature: 526 for SV(C|O) and 18S
gaaagttgatagggcagacgttcgaatgggtcgtcgccgccacggggggcgtgcgatcggcccgaggttatctagagtcaccaaagccgccggcgcccgccccccggccggggccggaga

SEQ ID NO: 64621 - DNA, 120 bp, Homo sapiens; identical to SEQ ID NO: 48840
  misc_feature: 526 for SV(C|O) and 18S

SEQ ID NO: 64622 - DNA, 120 bp, Homo sapiens
  misc_feature: 526 for SV(C|O) and 18S
ggtgcccttccgtcaattcctttaagtttcagctttgcaaccatactccccccggaacccaaagactttggtttcccggaagctgcccggcgggtcatgggaataacgccgccgcatcgc

SEQ ID NO: 64623 - DNA, 120 bp, Homo sapiens
  misc_feature: 526 for SV(C|O) and 18S
cccgccccccggccggggccggagaggggctgaccgggttggttttgatctgataaatgcacgcatcccccccgcgaagggggtcagcgcccgtcggcatgtattagctctagaattacc

SEQ ID NO: 64624 - DNA, 120 bp, Homo sapiens
  misc_feature: 526 for SV(C|O) and 18S
gggacttaatcaacgcaagcttatgacccgcacttactgggaattcctcgttcatggggaataattgcaatccccgatccccatcacgaatggggttcaacgggttacccgcgcctgccg

SEQ ID NO: 64625 - DNA, 120 bp, Homo sapiens; identical to SEQ ID NO: 48360
  misc_feature: 526 for SV(C|O) and 18S

SEQ ID NO: 64626 - DNA, 120 bp, Homo sapiens; identical to SEQ ID NO: 49013
  misc_feature: 526 for SV(C|O) and 18S

SEQ ID NO: 64627 - DNA, 120 bp, Homo sapiens
  misc_feature: 526 for SV(C|O) and 18S
acgaggatccattggagggcaagtctggtgccagcagccgcggtaattccagctccaatagcgtatattaaagttgctgcagttaaaaagctcgtagttggatcttgggagcgggcgggc

SEQ ID NO: 64628 - DNA, 120 bp, Homo sapiens
  misc_feature: 525 for SV(C|O) and 18S
tgacccgccgggcagcttccgggaaaccaaagtctttgggttccggggggagtatggttgcaaagctgaaacttaaaggaattgacggaagggcaccaccaggagtggagcctgcggctt

SEQ ID NO: 64629 - DNA, 120 bp, Homo sapiens; identical to SEQ ID NO: 49022
  misc_feature: 525 for SV(C|O) and 18S

SEQ ID NO: 64630 - DNA, 120 bp, Homo sapiens
  misc_feature: 525 for SV(C|O) and 18S
gctaatacatgccgacgggcgctgacccccttcgcgggggggatgcgtgcatttatcagatcaaaaccaacccggtcagcccctctccggccccggccggggggcgggcgccggcggctt

SEQ ID NO: 64631 - DNA, 120 bp, Homo sapiens
  misc_feature: 525 for SV(C|O) and 18S
cccggcggggccgatccgagggcctcactaaaccatccaatcggtagtagcgacgggcggtgtgtacaaagggcagggacttaatcaacgcaagcttatgacccgcacttactgggaatt

SEQ ID NO: 64632 - DNA, 120 bp, Homo sapiens; identical to SEQ ID NO: 48314
  misc_feature: 525 for SV(C|O) and 18S

SEQ ID NO: 64633 - DNA, 120 bp, Homo sapiens; identical to SEQ ID NO: 48234
  misc_feature: 524 for SV(C|O) and 18S

SEQ ID NO: 64634 - DNA, 120 bp, Homo sapiens; identical to SEQ ID NO: 48167
  misc_feature: 524 for SV(C|O) and 18S

SEQ ID NO: 64635 - DNA, 120 bp, Homo sapiens; identical to SEQ ID NO: 48098
  misc_feature: 524 for SV(C|O) and 18S

SEQ ID NO: 64636 - DNA, 120 bp, Homo sapiens; identical to SEQ ID NO: 48974
  misc_feature: 524 for SV(C|O) and 18S

SEQ ID NO: 64637 - DNA, 120 bp, Homo sapiens; identical to SEQ ID NO: 48758
  misc_feature: 524 for SV(C|O) and 18S

SEQ ID NO: 64638 - DNA, 120 bp, Homo sapiens
  misc_feature: 523 for SV(C|O) and 18S
ttccgtgggtggtggtgcatggccgttcttagttggtggagcgatttgtctggttaattccgataacgaacgagactctggcatgctaactagttacgcgacccccgagcggtcggcgtc

SEQ ID NO: 64639 - DNA, 120 bp, Homo sapiens; identical to SEQ ID NO: 48289
  misc_feature: 523 for SV(C|O) and 18S

SEQ ID NO: 64640 - DNA, 120 bp, Homo sapiens; identical to SEQ ID NO: 48147
  misc_feature: 523 for SV(C|O) and 18S

SEQ ID NO: 64641 - DNA, 120 bp, Homo sapiens; identical to SEQ ID NO: 48131
  misc_feature: 523 for SV(C|O) and 18S

SEQ ID NO: 64642 - DNA, 120 bp, Homo sapiens
  misc_feature: 523 for SV(C|O) and 18S
gaaggcagcaggcgcgcaaattacccactcccgacccggggaggtagtgacgaaaaataacaatacaggactctttcgaggccctgtaattggaatgagtccactttaaatcctttaacg

SEQ ID NO: 64643 - DNA, 120 bp, Homo sapiens; identical to SEQ ID NO: 48620
  misc_feature: 522 for SV(C|O) and 18S

SEQ ID NO: 64644 - DNA, 120 bp, Homo sapiens
  misc_feature: 522 for SV(C|O) and 18S
tcctggtggtgcccttccgtcaattcctttaagtttcagctttgcaaccatactccccccggaacccaaagactttggtttcccggaagctgcccggcgggtcatgggaataacgccgcc

SEQ ID NO: 64645 - DNA, 120 bp, Homo sapiens
  misc_feature: 522 for SV(C|O) and 18S
ccatcgaaagttgatagggcagacgttcgaatgggtcgtcgccgccacggggggcgtgcgatcggcccgaggttatctagagtcaccaaagccgccggcgcccgccccccggccggggcc

SEQ ID NO: 64646 - DNA, 120 bp, Homo sapiens; identical to SEQ ID NO: 48472
  misc_feature: 522 for SV(C|O) and 18S

SEQ ID NO: 64647 - DNA, 120 bp, Homo sapiens; identical to SEQ ID NO: 48286
  misc_feature: 522 for SV(C|O) and 18S

SEQ ID NO: 64648 - DNA, 120 bp, Homo sapiens
  misc_feature: 521 for SV(C|O) and 18S
cccctcgatgctcttagctgagtgtcccgcggggcccgaagcgtttactttgaaaaaattagagtgttcaaagcaggcccgagccgcctggataccgcagctaggaataatggaatagga

SEQ ID NO: 64649 - DNA, 120 bp, Homo sapiens
  misc_feature: 521 for SV(C|O) and 18S
ggcggggccgatccgagggcctcactaaaccatccaatcggtagtagcgacgggcggtgtgtacaaagggcagggacttaatcaacgcaagcttatgacccgcacttactgggaattcct

SEQ ID NO: 64650 - DNA, 120 bp, Homo sapiens
  misc_feature: 521 for SV(C|O) and 18S
aggcagcaggcgcgcaaattacccactcccgacccggggaggtagtgacgaaaaataacaatacaggactctttcgaggccctgtaattggaatgagtccactttaaatcctttaacgag

SEQ ID NO: 64651 - DNA, 120 bp, Homo sapiens; identical to SEQ ID NO: 48308
  misc_feature: 520 for SV(C|O) and 18S

SEQ ID NO: 64652 - DNA, 120 bp, Homo sapiens; identical to SEQ ID NO: 48800
  misc_feature: 520 for SV(C|O) and 18S

SEQ ID NO: 64653 - DNA, 120 bp, Homo sapiens
  misc_feature: 520 for SV(C|O) and 18S
gatccattggagggcaagtctggtgccagcagccgcggtaattccagctccaatagcgtatattaaagttgctgcagttaaaaagctcgtagttggatcttgggagcgggcgggcggtcc

SEQ ID NO: 64654 - DNA, 120 bp, Homo sapiens
  misc_feature: 520 for SV(C|O) and 18S
catcgaaagttgatagggcagacgttcgaatgggtcgtcgccgccacggggggcgtgcgatcggcccgaggttatctagagtcaccaaagccgccggcgcccgccccccggccggggccg

SEQ ID NO: 64655 - DNA, 120 bp, Homo sapiens
  misc_feature: 520 for SV(C|O) and 18S
ccaatggatcctcgttaaaggatttaaagtggactcattccaattacagggcctcgaaagagtcctgtattgttatttttcgtcactacctccccgggtcgggagtgggtaatttgcgcg

SEQ ID NO: 64656 - DNA, 120 bp, Homo sapiens; identical to SEQ ID NO: 48244
  misc_feature: 520 for SV(C|O) and 18S

SEQ ID NO: 64657 - DNA, 120 bp, Homo sapiens; identical to SEQ ID NO: 48468
  misc_feature: 519 for SV(C|O) and 18S

SEQ ID NO: 64658 - DNA, 120 bp, Homo sapiens
  misc_feature: 519 for SV(C|O) and 18S
gacccgccgggcagcttccgggaaaccaaagtctttgggttccggggggagtatggttgcaaagctgaaacttaaaggaattgacggaagggcaccaccaggagtggagcctgcggctta

SEQ ID NO: 64659 - DNA, 120 bp, Homo sapiens
  misc_feature: 519 for SV(C|O) and 18S
cctcgatgctcttagctgagtgtcccgcggggcccgaagcgtttactttgaaaaaattagagtgttcaaagcaggcccgagccgcctggataccgcagctaggaataatggaataggacc

SEQ ID NO: 64660 - DNA, 120 bp, Homo sapiens
  misc_feature: 519 for SV(C|O) and 18S
ccaatagcgtatattaaagttgctgcagttaaaaagctcgtagttggatcttgggagcgggcgggcggtccgccgcgaggcgagccaccgcccgtccccgccccttgcctctcggcgccc

SEQ ID NO: 64661 - DNA, 120 bp, Homo sapiens; identical to SEQ ID NO: 48588
  misc_feature: 519 for SV(C|O) and 18S

SEQ ID NO: 64662 - DNA, 120 bp, Homo sapiens; identical to SEQ ID NO: 48883
  misc_feature: 519 for SV(C|O) and 18S

SEQ ID NO: 64663 - DNA, 120 bp, Homo sapiens; identical to SEQ ID NO: 48168
  misc_feature: 519 for SV(C|O) and 18S

SEQ ID NO: 64664 - DNA, 120 bp, Homo sapiens; identical to SEQ ID NO: 48589
  misc_feature: 519 for SV(C|O) and 18S

SEQ ID NO: 64665 - DNA, 120 bp, Homo sapiens; identical to SEQ ID NO: 48606
  misc_feature: 519 for SV(C|O) and 18S

SEQ ID NO: 64666 - DNA, 120 bp, Homo sapiens; identical to SEQ ID NO: 48874
  misc_feature: 518 for SV(C|O) and 18S

SEQ ID NO: 64667 - DNA, 120 bp, Homo sapiens; identical to SEQ ID NO: 48898
  misc_feature: 518 for SV(C|O) and 18S

SEQ ID NO: 64668 - DNA, 120 bp, Homo sapiens
  misc_feature: 518 for SV(C|O) and 18S
ggacttaatcaacgcaagcttatgacccgcacttactgggaattcctcgttcatggggaataattgcaatccccgatccccatcacgaatggggttcaacgggttacccgcgcctgccgg

SEQ ID NO: 64669 - DNA, 120 bp, Homo sapiens
  misc_feature: 518 for SV(C|O) and 18S
caatggatcctcgttaaaggatttaaagtggactcattccaattacagggcctcgaaagagtcctgtattgttatttttcgtcactacctccccgggtcgggagtgggtaatttgcgcgc

SEQ ID NO: 64670 - DNA, 120 bp, Homo sapiens
  misc_feature: 518 for SV(C|O) and 18S
ccgaccccggcggggccgatccgagggcctcactaaaccatccaatcggtagtagcgacgggcggtgtgtacaaagggcagggacttaatcaacgcaagcttatgacccgcacttactgg

SEQ ID NO: 64671 - DNA, 120 bp, Homo sapiens
  misc_feature: 518 for SV(C|O) and 18S
attccgtgggtggtggtgcatggccgttcttagttggtggagcgatttgtctggttaattccgataacgaacgagactctggcatgctaactagttacgcgacccccgagcggtcggcgt

SEQ ID NO: 64672 - DNA, 120 bp, Homo sapiens; identical to SEQ ID NO: 48581
  misc_feature: 517 for SV(C|O) and 18S

SEQ ID NO: 64673 - DNA, 120 bp, Homo sapiens; identical to SEQ ID NO: 48124
  misc_feature: 517 for SV(C|O) and 18S

SEQ ID NO: 64674 - DNA, 120 bp, Homo sapiens; identical to SEQ ID NO: 49021
  misc_feature: 517 for SV(C|O) and 18S

SEQ ID NO: 64675 - DNA, 120 bp, Homo sapiens; identical to SEQ ID NO: 48096
  misc_feature: 517 for SV(C|O) and 18S

SEQ ID NO: 64676 - DNA, 120 bp, Homo sapiens
  misc_feature: 517 for SV(C|O) and 18S
ccggcggggccgatccgagggcctcactaaaccatccaatcggtagtagcgacgggcggtgtgtacaaagggcagggacttaatcaacgcaagcttatgacccgcacttactgggaattc

SEQ ID NO: 64677 - DNA, 120 bp, Homo sapiens; identical to SEQ ID NO: 48689
  misc_feature: 517 for SV(C|O) and 18S

SEQ ID NO: 64678 - DNA, 120 bp, Homo sapiens; identical to SEQ ID NO: 48545
  misc_feature: 517 for SV(C|O) and 18S

SEQ ID NO: 64679 - DNA, 120 bp, Homo sapiens
  misc_feature: 517 for SV(C|O) and 18S
cgaaagttgatagggcagacgttcgaatgggtcgtcgccgccacggggggcgtgcgatcggcccgaggttatctagagtcaccaaagccgccggcgcccgccccccggccggggccggag

SEQ ID NO: 64680 - DNA, 120 bp, Homo sapiens
  misc_feature: 517 for SV(C|O) and 18S
cggcgttattcccatgacccgccgggcagcttccgggaaaccaaagtctttgggttccggggggagtatggttgcaaagctgaaacttaaaggaattgacggaagggcaccaccaggagt

SEQ ID NO: 64681 - DNA, 120 bp, Homo sapiens
  misc_feature: 516 for SV(C|O) and 18S
gaaccctgattccccgtcacccgtggtcaccatggtaggcacggcgactaccatcgaaagttgatagggcagacgttcgaatgggtcgtcgccgccacggggggcgtgcgatcggcccga

SEQ ID NO: 64682 - DNA, 120 bp, Homo sapiens
  misc_feature: 516 for SV(C|O) and 18S
ctcgatgctcttagctgagtgtcccgcggggcccgaagcgtttactttgaaaaaattagagtgttcaaagcaggcccgagccgcctggataccgcagctaggaataatggaataggaccg

SEQ ID NO: 64683 - DNA, 120 bp, Homo sapiens
  misc_feature: 516 for SV(C|O) and 18S
atcgaaagttgatagggcagacgttcgaatgggtcgtcgccgccacggggggcgtgcgatcggcccgaggttatctagagtcaccaaagccgccggcgcccgccccccggccggggccgg

SEQ ID NO: 64684 - DNA, 120 bp, Homo sapiens; identical to SEQ ID NO: 48475
  misc_feature: 515 for SV(C|O) and 18S

SEQ ID NO: 64685 - DNA, 120 bp, Homo sapiens; identical to SEQ ID NO: 48488
  misc_feature: 515 for SV(C|O) and 18S

SEQ ID NO: 64686 - DNA, 120 bp, Homo sapiens
  misc_feature: 515 for SV(C|O) and 18S
gacttaatcaacgcaagcttatgacccgcacttactgggaattcctcgttcatggggaataattgcaatccccgatccccatcacgaatggggttcaacgggttacccgcgcctgccggc

SEQ ID NO: 64687 - DNA, 120 bp, Homo sapiens
  misc_feature: 515 for SV(C|O) and 18S
accatcgaaagttgatagggcagacgttcgaatgggtcgtcgccgccacggggggcgtgcgatcggcccgaggttatctagagtcaccaaagccgccggcgcccgccccccggccggggc

SEQ ID NO: 64688 - DNA, 120 bp, Homo sapiens; identical to SEQ ID NO: 48517
  misc_feature: 515 for SV(C|O) and 18S

SEQ ID NO: 64689 - DNA, 120 bp, Homo sapiens
  misc_feature: 515 for SV(C|O) and 18S
atccattggagggcaagtctggtgccagcagccgcggtaattccagctccaatagcgtatattaaagttgctgcagttaaaaagctcgtagttggatcttgggagcgggcgggcggtccg

SEQ ID NO: 64690 - DNA, 120 bp, Homo sapiens
  misc_feature: 515 for SV(C|O) and 18S
accctgattccccgtcacccgtggtcaccatggtaggcacggcgactaccatcgaaagttgatagggcagacgttcgaatgggtcgtcgccgccacggggggcgtgcgatcggcccgagg

SEQ ID NO: 64691 - DNA, 120 bp, Homo sapiens; identical to SEQ ID NO: 49026
  misc_feature: 515 for SV(C|O) and 18S

SEQ ID NO: 64692 - DNA, 120 bp, Homo sapiens; identical to SEQ ID NO: 48998
  misc_feature: 515 for SV(C|O) and 18S

SEQ ID NO: 64693 - DNA, 120 bp, Homo sapiens
  misc_feature: 514 for SV(C|O) and 18S
tcgaaagttgatagggcagacgttcgaatgggtcgtcgccgccacggggggcgtgcgatcggcccgaggttatctagagtcaccaaagccgccggcgcccgccccccggccggggccgga

SEQ ID NO: 64694 - DNA, 120 bp, Homo sapiens
  misc_feature: 514 for SV(C|O) and 18S
gcagcaggcgcgcaaattacccactcccgacccggggaggtagtgacgaaaaataacaatacaggactctttcgaggccctgtaattggaatgagtccactttaaatcctttaacgagga

SEQ ID NO: 64695 - DNA, 120 bp, Homo sapiens; identical to SEQ ID NO: 48705
  misc_feature: 514 for SV(C|O) and 18S

SEQ ID NO: 64696 - DNA, 120 bp, Homo sapiens; identical to SEQ ID NO: 48291
  misc_feature: 513 for SV(C|O) and 18S

SEQ ID NO: 64697 - DNA, 120 bp, Homo sapiens
  misc_feature: 513 for SV(C|O) and 18S
gcggggccgatccgagggcctcactaaaccatccaatcggtagtagcgacgggcggtgtgtacaaagggcagggacttaatcaacgcaagcttatgacccgcacttactgggaattcctc

SEQ ID NO: 64698 - DNA, 120 bp, Homo sapiens
  misc_feature: 513 for SV(C|O) and 18S
cgaaccctgattccccgtcacccgtggtcaccatggtaggcacggcgactaccatcgaaagttgatagggcagacgttcgaatgggtcgtcgccgccacggggggcgtgcgatcggcccg

SEQ ID NO: 64699 - DNA, 120 bp, Homo sapiens
  misc_feature: 513 for SV(C|O) and 18S
ccccctcgatgctcttagctgagtgtcccgcggggcccgaagcgtttactttgaaaaaattagagtgttcaaagcaggcccgagccgcctggataccgcagctaggaataatggaatagg

SEQ ID NO: 64700 - DNA, 120 bp, Homo sapiens; identical to SEQ ID NO: 48435
  misc_feature: 512 for SV(C|O) and 18S

SEQ ID NO: 64701 - DNA, 120 bp, Homo sapiens; identical to SEQ ID NO: 48444
  misc_feature: 512 for SV(C|O) and 18S

SEQ ID NO: 64702 - DNA, 120 bp, Homo sapiens; identical to SEQ ID NO: 48463
  misc_feature: 512 for SV(C|O) and 18S

SEQ ID NO: 64703 - DNA, 120 bp, Homo sapiens; identical to SEQ ID NO: 48336
  misc_feature: 512 for SV(C|O) and 18S

SEQ ID NO: 64704 - DNA, 120 bp, Homo sapiens
  misc_feature: 512 for SV(C|O) and 18S
ccccggcggggccgatccgagggcctcactaaaccatccaatcggtagtagcgacgggcggtgtgtacaaagggcagggacttaatcaacgcaagcttatgacccgcacttactgggaat

SEQ ID NO: 64705 - DNA, 120 bp, Homo sapiens; identical to SEQ ID NO: 48140
  misc_feature: 511 for SV(C|O) and 18S

SEQ ID NO: 64706 - DNA, 120 bp, Homo sapiens
  misc_feature: 511 for SV(C|O) and 18S
aaggcagcaggcgcgcaaattacccactcccgacccggggaggtagtgacgaaaaataacaatacaggactctttcgaggccctgtaattggaatgagtccactttaaatcctttaacga

SEQ ID NO: 64707 - DNA, 120 bp, Homo sapiens
  misc_feature: 511 for SV(C|O) and 18S
gaccccggcggggccgatccgagggcctcactaaaccatccaatcggtagtagcgacgggcggtgtgtacaaagggcagggacttaatcaacgcaagcttatgacccgcacttactggga

SEQ ID NO: 64708 - DNA, 120 bp, Homo sapiens
  misc_feature: 511 for SV(C|O) and 18S
ccattggagggcaagtctggtgccagcagccgcggtaattccagctccaatagcgtatattaaagttgctgcagttaaaaagctcgtagttggatcttgggagcgggcgggcggtccgcc

SEQ ID NO: 64709 - DNA, 120 bp, Homo sapiens; identical to SEQ ID NO: 48690
  misc_feature: 511 for SV(C|O) and 18S

SEQ ID NO: 64710 - DNA, 120 bp, Homo sapiens
  misc_feature: 510 for SV(C|O) and 18S
accccggcggggccgatccgagggcctcactaaaccatccaatcggtagtagcgacgggcggtgtgtacaaagggcagggacttaatcaacgcaagcttatgacccgcacttactgggaa

SEQ ID NO: 64711 - DNA, 120 bp, Homo sapiens
  misc_feature: 510 for SV(C|O) and 18S
tctcaggctccctctccggaatcgaaccctgattccccgtcacccgtggtcaccatggtaggcacggcgactaccatcgaaagttgatagggcagacgttcgaatgggtcgtcgccgcca

SEQ ID NO: 64712 - DNA, 120 bp, Homo sapiens; identical to SEQ ID NO: 48376
  misc_feature: 510 for SV(C|O) and 18S

SEQ ID NO: 64713 - DNA, 120 bp, Homo sapiens; identical to SEQ ID NO: 48452
  misc_feature: 510 for SV(C|O) and 18S

SEQ ID NO: 64714 - DNA, 120 bp, Homo sapiens
  misc_feature: 510 for SV(C|O) and 18S
ggcagcaggcgcgcaaattacccactcccgacccggggaggtagtgacgaaaaataacaatacaggactctttcgaggccctgtaattggaatgagtccactttaaatcctttaacgagg

SEQ ID NO: 64715 - DNA, 120 bp, Homo sapiens; identical to SEQ ID NO: 48337
  misc_feature: 510 for SV(C|O) and 18S

SEQ ID NO: 64716 - DNA, 120 bp, Homo sapiens; identical to SEQ ID NO: 48567
  misc_feature: 510 for SV(C|O) and 18S

SEQ ID NO: 64717 - DNA, 120 bp, Homo sapiens; identical to SEQ ID NO: 48302
  misc_feature: 510 for SV(C|O) and 18S

SEQ ID NO: 64718 - DNA, 120 bp, Homo sapiens; identical to SEQ ID NO: 48397
  misc_feature: 509 for SV(C|O) and 18S

SEQ ID NO: 64719 - DNA, 120 bp, Homo sapiens; identical to SEQ ID NO: 48257
  misc_feature: 509 for SV(C|O) and 18S

SEQ ID NO: 64720 - DNA, 120 bp, Homo sapiens; identical to SEQ ID NO: 48295
  misc_feature: 509 for SV(C|O) and 18S

SEQ ID NO: 64721 - DNA, 120 bp, Homo sapiens; identical to SEQ ID NO: 48428
  misc_feature: 508 for SV(C|O) and 18S

SEQ ID NO: 64722 - DNA, 120 bp, Homo sapiens; identical to SEQ ID NO: 48442
  misc_feature: 508 for SV(C|O) and 18S

SEQ ID NO: 64723 - DNA, 120 bp, Homo sapiens; identical to SEQ ID NO: 48693
  misc_feature: 508 for SV(C|O) and 18S

SEQ ID NO: 64724 - DNA, 120 bp, Homo sapiens; identical to SEQ ID NO: 48594
  misc_feature: 508 for SV(C|O) and 18S

SEQ ID NO: 64725 - DNA, 120 bp, Homo sapiens
  misc_feature: 508 for SV(C|O) and 18S
tccattggagggcaagtctggtgccagcagccgcggtaattccagctccaatagcgtatattaaagttgctgcagttaaaaagctcgtagttggatcttgggagcgggcgggcggtccgc

SEQ ID NO: 64726 - DNA, 120 bp, Homo sapiens
  misc_feature: 508 for SV(C|O) and 18S
cggcggggccgatccgagggcctcactaaaccatccaatcggtagtagcgacgggcggtgtgtacaaagggcagggacttaatcaacgcaagcttatgacccgcacttactgggaattcc

SEQ ID NO: 64727 - DNA, 120 bp, Homo sapiens; identical to SEQ ID NO: 48242
  misc_feature: 508 for SV(C|O) and 18S

SEQ ID NO: 64728 - DNA, 120 bp, Homo sapiens; identical to SEQ ID NO: 48196
  misc_feature: 508 for SV(C|O) and 18S

SEQ ID NO: 64729 - DNA, 120 bp, Homo sapiens; identical to SEQ ID NO: 48340
  misc_feature: 507 for SV(C|O) and 18S

SEQ ID NO: 64730 - DNA, 120 bp, Homo sapiens; identical to SEQ ID NO: 48502
  misc_feature: 507 for SV(C|O) and 18S

SEQ ID NO: 64731 - DNA, 120 bp, Homo sapiens
  misc_feature: 507 for SV(C|O) and 18S
ttctcaggctccctctccggaatcgaaccctgattccccgtcacccgtggtcaccatggtaggcacggcgactaccatcgaaagttgatagggcagacgttcgaatgggtcgtcgccgcc

SEQ ID NO: 64732 - DNA, 120 bp, Homo sapiens
  misc_feature: 507 for SV(C|O) and 18S
tcgatgctcttagctgagtgtcccgcggggcccgaagcgtttactttgaaaaaattagagtgttcaaagcaggcccgagccgcctggataccgcagctaggaataatggaataggaccgc

SEQ ID NO: 64733 - DNA, 120 bp, Homo sapiens
  misc_feature: 507 for SV(C|O) and 18S
tccctctccggaatcgaaccctgattccccgtcacccgtggtcaccatggtaggcacggcgactaccatcgaaagttgatagggcagacgttcgaatgggtcgtcgccgccacggggggc

SEQ ID NO: 64734 - DNA, 120 bp, Homo sapiens
  misc_feature: 507 for SV(C|O) and 18S
gttccgaaaaccaacaaaatagaaccgcggtcctattccattattcctagctgcggtatccaggcggctcgggcctgctttgaacactctaattttttcaaagtaaacgcttcgggcccc

SEQ ID NO: 64735 - DNA, 120 bp, Homo sapiens; identical to SEQ ID NO: 48708
  misc_feature: 507 for SV(C|O) and 18S

SEQ ID NO: 64736 - DNA, 120 bp, Homo sapiens; identical to SEQ ID NO: 48526
  misc_feature: 507 for SV(C|O) and 18S

SEQ ID NO: 64737 - DNA, 120 bp, Homo sapiens
  misc_feature: 507 for SV(C|O) and 18S
cgattccgtgggtggtggtgcatggccgttcttagttggtggagcgatttgtctggttaattccgataacgaacgagactctggcatgctaactagttacgcgacccccgagcggtcggc

SEQ ID NO: 64738 - DNA, 120 bp, Homo sapiens
  misc_feature: 507 for SV(C|O) and 18S
gccccctcgatgctcttagctgagtgtcccgcggggcccgaagcgtttactttgaaaaaattagagtgttcaaagcaggcccgagccgcctggataccgcagctaggaataatggaatag

SEQ ID NO: 64739 - DNA, 120 bp, Homo sapiens; identical to SEQ ID NO: 48403
  misc_feature: 506 for SV(C|O) and 18S

SEQ ID NO: 64740 - DNA, 120 bp, Homo sapiens; identical to SEQ ID NO: 48404
  misc_feature: 506 for SV(C|O) and 18S

SEQ ID NO: 64741 - DNA, 120 bp, Homo sapiens; identical to SEQ ID NO: 48662
  misc_feature: 506 for SV(C|O) and 18S

SEQ ID NO: 64742 - DNA, 120 bp, Homo sapiens
  misc_feature: 506 for SV(C|O) and 18S
tcgaaccctgattccccgtcacccgtggtcaccatggtaggcacggcgactaccatcgaaagttgatagggcagacgttcgaatgggtcgtcgccgccacggggggcgtgcgatcggccc

SEQ ID NO: 64743 - DNA, 120 bp, Homo sapiens; identical to SEQ ID NO: 48199
  misc_feature: 506 for SV(C|O) and 18S

SEQ ID NO: 64744 - DNA, 120 bp, Homo sapiens; identical to SEQ ID NO: 48667
  misc_feature: 506 for SV(C|O) and 18S

SEQ ID NO: 64745 - DNA, 120 bp, Homo sapiens; identical to SEQ ID NO: 48388
  misc_feature: 506 for SV(C|O) and 18S

SEQ ID NO: 64746 - DNA, 120 bp, Homo sapiens
  misc_feature: 505 for SV(C|O) and 18S
caggcgcgcaaattacccactcccgacccggggaggtagtgacgaaaaataacaatacaggactctttcgaggccctgtaattggaatgagtccactttaaatcctttaacgaggatcca

SEQ ID NO: 64747 - DNA, 120 bp, Homo sapiens; identical to SEQ ID NO: 48520
  misc_feature: 505 for SV(C|O) and 18S

SEQ ID NO: 64748 - DNA, 120 bp, Homo sapiens
  misc_feature: 505 for SV(C|O) and 18S
ggtatccaggcggctcgggcctgctttgaacactctaattttttcaaagtaaacgcttcgggccccgcgggacactcagctaagagcatcgagggggcgccgagaggcaaggggcgggga

SEQ ID NO: 64749 - DNA, 120 bp, Homo sapiens; identical to SEQ ID NO: 48660
  misc_feature: 505 for SV(C|O) and 18S

SEQ ID NO: 64750 - DNA, 120 bp, Homo sapiens
  misc_feature: 505 for SV(C|O) and 18S
acgaggaattcccagtaagtgcgggtcataagcttgcgttgattaagtccctgccctttgtacacaccgcccgtcgctactaccgattggatggtttagtgaggccctcggatcggcccc

SEQ ID NO: 64751 - DNA, 120 bp, Homo sapiens; identical to SEQ ID NO: 48085
  misc_feature: 505 for SV(C|O) and 18S

SEQ ID NO: 64752 - DNA, 120 bp, Homo sapiens
  misc_feature: 505 for SV(C|O) and 18S
ctcgattccgtgggtggtggtgcatggccgttcttagttggtggagcgatttgtctggttaattccgataacgaacgagactctggcatgctaactagttacgcgacccccgagcggtcg

SEQ ID NO: 64753 - DNA, 120 bp, Homo sapiens
  misc_feature: 505 for SV(C|O) and 18S
cgaccccggcggggccgatccgagggcctcactaaaccatccaatcggtagtagcgacgggcggtgtgtacaaagggcagggacttaatcaacgcaagcttatgacccgcacttactggg

SEQ ID NO: 64754 - DNA, 120 bp, Homo sapiens; identical to SEQ ID NO: 48613
  misc_feature: 504 for SV(C|O) and 18S

SEQ ID NO: 64755 - DNA, 120 bp, Homo sapiens
  misc_feature: 504 for SV(C|O) and 18S
taccatcgaaagttgatagggcagacgttcgaatgggtcgtcgccgccacggggggcgtgcgatcggcccgaggttatctagagtcaccaaagccgccggcgcccgccccccggccgggg

SEQ ID NO: 64756 - DNA, 120 bp, Homo sapiens
  misc_feature: 504 for SV(C|O) and 18S
ggctccctctccggaatcgaaccctgattccccgtcacccgtggtcaccatggtaggcacggcgactaccatcgaaagttgatagggcagacgttcgaatgggtcgtcgccgccacgggg

SEQ ID NO: 64757 - DNA, 120 bp, Homo sapiens; identical to SEQ ID NO: 48809
  misc_feature: 504 for SV(C|O) and 18S

SEQ ID NO: 64758 - DNA, 120 bp, Homo sapiens
  misc_feature: 504 for SV(C|O) and 18S
gattccgtgggtggtggtgcatggccgttcttagttggtggagcgatttgtctggttaattccgataacgaacgagactctggcatgctaactagttacgcgacccccgagcggtcggcg

SEQ ID NO: 64759 - DNA, 120 bp, Homo sapiens
  misc_feature: 504 for SV(C|O) and 18S
gatgctcttagctgagtgtcccgcggggcccgaagcgtttactttgaaaaaattagagtgttcaaagcaggcccgagccgcctggataccgcagctaggaataatggaataggaccgcgg

SEQ ID NO: 64760 - DNA, 120 bp, Homo sapiens
  misc_feature: 503 for SV(C|O) and 18S
tttctcaggctccctctccggaatcgaaccctgattccccgtcacccgtggtcaccatggtaggcacggcgactaccatcgaaagttgatagggcagacgttcgaatgggtcgtcgccgc

SEQ ID NO: 64761 - DNA, 120 bp, Homo sapiens; identical to SEQ ID NO: 48623
  misc_feature: 503 for SV(C|O) and 18S

SEQ ID NO: 64762 - DNA, 120 bp, Homo sapiens; identical to SEQ ID NO: 48374
  misc_feature: 503 for SV(C|O) and 18S

SEQ ID NO: 64763 - DNA, 120 bp, Homo sapiens; identical to SEQ ID NO: 48584
  misc_feature: 503 for SV(C|O) and 18S

SEQ ID NO: 64764 - DNA, 120 bp, Homo sapiens
  misc_feature: 503 for SV(C|O) and 18S
ctcaggctccctctccggaatcgaaccctgattccccgtcacccgtggtcaccatggtaggcacggcgactaccatcgaaagttgatagggcagacgttcgaatgggtcgtcgccgccac

SEQ ID NO: 64765 - DNA, 120 bp, Homo sapiens; identical to SEQ ID NO: 48699
  misc_feature: 503 for SV(C|O) and 18S

SEQ ID NO: 64766 - DNA, 120 bp, Homo sapiens; identical to SEQ ID NO: 48157
  misc_feature: 502 for SV(C|O) and 18S

SEQ ID NO: 64767 - DNA, 120 bp, Homo sapiens; identical to SEQ ID NO: 48839
  misc_feature: 502 for SV(C|O) and 18S

SEQ ID NO: 64768 - DNA, 120 bp, Homo sapiens; identical to SEQ ID NO: 48586
  misc_feature: 502 for SV(C|O) and 18S

SEQ ID NO: 64769 - DNA, 120 bp, Homo sapiens
  misc_feature: 502 for SV(C|O) and 18S
gtatccaggcggctcgggcctgctttgaacactctaattttttcaaagtaaacgcttcgggccccgcgggacactcagctaagagcatcgagggggcgccgagaggcaaggggcggggac

SEQ ID NO: 64770 - DNA, 120 bp, Homo sapiens
  misc_feature: 502 for SV(C|O) and 18S
gctccctctccggaatcgaaccctgattccccgtcacccgtggtcaccatggtaggcacggcgactaccatcgaaagttgatagggcagacgttcgaatgggtcgtcgccgccacggggg

SEQ ID NO: 64771 - DNA, 120 bp, Homo sapiens; identical to SEQ ID NO: 49028
  misc_feature: 502 for SV(C|O) and 18S

SEQ ID NO: 64772 - DNA, 120 bp, Homo sapiens
  misc_feature: 502 for SV(C|O) and 18S
ctccctctccggaatcgaaccctgattccccgtcacccgtggtcaccatggtaggcacggcgactaccatcgaaagttgatagggcagacgttcgaatgggtcgtcgccgccacgggggg

SEQ ID NO: 64773 - DNA, 120 bp, Homo sapiens; identical to SEQ ID NO: 48301
  misc_feature: 502 for SV(C|O) and 18S

SEQ ID NO: 64774 - DNA, 120 bp, Homo sapiens
  misc_feature: 502 for SV(C|O) and 18S
aggctccctctccggaatcgaaccctgattccccgtcacccgtggtcaccatggtaggcacggcgactaccatcgaaagttgatagggcagacgttcgaatgggtcgtcgccgccacggg

SEQ ID NO: 64775 - DNA, 120 bp, Homo sapiens
  misc_feature: 502 for SV(C|O) and 18S
atgctcttagctgagtgtcccgcggggcccgaagcgtttactttgaaaaaattagagtgttcaaagcaggcccgagccgcctggataccgcagctaggaataatggaataggaccgcggt

SEQ ID NO: 64776 - DNA, 120 bp, Homo sapiens; identical to SEQ ID NO: 48894
  misc_feature: 501 for SV(C|O) and 18S

SEQ ID NO: 64777 - DNA, 120 bp, Homo sapiens; identical to SEQ ID NO: 48652
  misc_feature: 501 for SV(C|O) and 18S

SEQ ID NO: 64778 - DNA, 120 bp, Homo sapiens; identical to SEQ ID NO: 48200
  misc_feature: 501 for SV(C|O) and 18S

SEQ ID NO: 64779 - DNA, 120 bp, Homo sapiens
  misc_feature: 501 for SV(C|O) and 18S
atcgaaccctgattccccgtcacccgtggtcaccatggtaggcacggcgactaccatcgaaagttgatagggcagacgttcgaatgggtcgtcgccgccacggggggcgtgcgatcggcc

SEQ ID NO: 64780 - DNA, 120 bp, Homo sapiens
  misc_feature: 501 for SV(C|O) and 18S
attggagggcaagtctggtgccagcagccgcggtaattccagctccaatagcgtatattaaagttgctgcagttaaaaagctcgtagttggatcttgggagcgggcgggcggtccgccgc

SEQ ID NO: 64781 - DNA, 120 bp, Homo sapiens; identical to SEQ ID NO: 48323
  misc_feature: 501 for SV(C|O) and 18S

SEQ ID NO: 64782 - DNA, 120 bp, Homo sapiens; identical to SEQ ID NO: 48645
  misc_feature: 501 for SV(C|O) and 18S

SEQ ID NO: 64783 - DNA, 120 bp, Homo sapiens; identical to SEQ ID NO: 48712
  misc_feature: 501 for SV(C|O) and 18S

SEQ ID NO: 64784 - DNA, 120 bp, Homo sapiens
  misc_feature: 501 for SV(C|O) and 18S
atcggggattgcaattattccccatgaacgaggaattcccagtaagtgcgggtcataagcttgcgttgattaagtccctgccctttgtacacaccgcccgtcgctactaccgattggatg

SEQ ID NO: 64785 - DNA, 120 bp, Homo sapiens
  misc_feature: 500 for SV(C|O) and 18S
tgctcttagctgagtgtcccgcggggcccgaagcgtttactttgaaaaaattagagtgttcaaagcaggcccgagccgcctggataccgcagctaggaataatggaataggaccgcggtt

SEQ ID NO: 64786 - DNA, 120 bp, Homo sapiens; identical to SEQ ID NO: 48625
  misc_feature: 500 for SV(C|O) and 18S

SEQ ID NO: 64787 - DNA, 120 bp, Homo sapiens; identical to SEQ ID NO: 48680
  misc_feature: 500 for SV(C|O) and 18S

SEQ ID NO: 64788 - DNA, 120 bp, Homo sapiens; identical to SEQ ID NO: 48247
  misc_feature: 500 for SV(C|O) and 18S

SEQ ID NO: 64789 - DNA, 120 bp, Homo sapiens; identical to SEQ ID NO: 48587
  misc_feature: 500 for SV(C|O) and 18S

SEQ ID NO: 64790 - DNA, 120 bp, Homo sapiens; identical to SEQ ID NO: 48605
  misc_feature: 500 for SV(C|O) and 18S

SEQ ID NO: 64791 - DNA, 120 bp, Homo sapiens
  misc_feature: 500 for SV(C|O) and 18S
cattggagggcaagtctggtgccagcagccgcggtaattccagctccaatagcgtatattaaagttgctgcagttaaaaagctcgtagttggatcttgggagcgggcgggcggtccgccg

SEQ ID NO: 64792 - DNA, 120 bp, Homo sapiens
  misc_feature: 500 for SV(C|O) and 18S
cgatgctcttagctgagtgtcccgcggggcccgaagcgtttactttgaaaaaattagagtgttcaaagcaggcccgagccgcctggataccgcagctaggaataatggaataggaccgcg

SEQ ID NO: 64793 - DNA, 120 bp, Homo sapiens
  misc_feature: 500 for SV(C|O) and 18S
atggggatcggggattgcaattattccccatgaacgaggaattcccagtaagtgcgggtcataagcttgcgttgattaagtccctgccctttgtacacaccgcccgtcgctactaccgat

SEQ ID NO: 64794 - DNA, 120 bp, Homo sapiens
  misc_feature: 499 for SV(C|O) and 18S
ggcgccccctcgatgctcttagctgagtgtcccgcggggcccgaagcgtttactttgaaaaaattagagtgttcaaagcaggcccgagccgcctggataccgcagctaggaataatggaa

SEQ ID NO: 64795 - DNA, 120 bp, Homo sapiens; identical to SEQ ID NO: 48945
  misc_feature: 499 for SV(C|O) and 18S

SEQ ID NO: 64796 - DNA, 120 bp, Homo sapiens; identical to SEQ ID NO: 48583
  misc_feature: 499 for SV(C|O) and 18S

SEQ ID NO: 64797 - DNA, 120 bp, Homo sapiens; identical to SEQ ID NO: 48549
  misc_feature: 499 for SV(C|O) and 18S

SEQ ID NO: 64798 - DNA, 120 bp, Homo sapiens; identical to SEQ ID NO: 48248
  misc_feature: 499 for SV(C|O) and 18S

SEQ ID NO: 64799 - DNA, 120 bp, Homo sapiens; identical to SEQ ID NO: 48678
  misc_feature: 498 for SV(C|O) and 18S

SEQ ID NO: 64800 - DNA, 120 bp, Homo sapiens; identical to SEQ ID NO: 48704
  misc_feature: 498 for SV(C|O) and 18S

SEQ ID NO: 64801 - DNA, 120 bp, Homo sapiens
  misc_feature: 498 for SV(C|O) and 18S
tggggatcggggattgcaattattccccatgaacgaggaattcccagtaagtgcgggtcataagcttgcgttgattaagtccctgccctttgtacacaccgcccgtcgctactaccgatt

SEQ ID NO: 64802 - DNA, 120 bp, Homo sapiens; identical to SEQ ID NO: 48357
  misc_feature: 498 for SV(C|O) and 18S

SEQ ID NO: 64803 - DNA, 120 bp, Homo sapiens
  misc_feature: 498 for SV(C|O) and 18S
cgccccctcgatgctcttagctgagtgtcccgcggggcccgaagcgtttactttgaaaaaattagagtgttcaaagcaggcccgagccgcctggataccgcagctaggaataatggaata

SEQ ID NO: 64804 - DNA, 120 bp, Homo sapiens
  misc_feature: 498 for SV(C|O) and 18S
aacgaggaattcccagtaagtgcgggtcataagcttgcgttgattaagtccctgccctttgtacacaccgcccgtcgctactaccgattggatggtttagtgaggccctcggatcggccc

SEQ ID NO: 64805 - DNA, 120 bp, Homo sapiens
  misc_feature: 498 for SV(C|O) and 18S
gaacgaggaattcccagtaagtgcgggtcataagcttgcgttgattaagtccctgccctttgtacacaccgcccgtcgctactaccgattggatggtttagtgaggccctcggatcggcc

SEQ ID NO: 64806 - DNA, 120 bp, Homo sapiens; identical to SEQ ID NO: 48489
  misc_feature: 498 for SV(C|O) and 18S

SEQ ID NO: 64807 - DNA, 120 bp, Homo sapiens; identical to SEQ ID NO: 48661
  misc_feature: 498 for SV(C|O) and 18S

SEQ ID NO: 64808 - DNA, 120 bp, Homo sapiens
  misc_feature: 498 for SV(C|O) and 18S
gactaccatcgaaagttgatagggcagacgttcgaatgggtcgtcgccgccacggggggcgtgcgatcggcccgaggttatctagagtcaccaaagccgccggcgcccgccccccggccg

SEQ ID NO: 64809 - DNA, 120 bp, Homo sapiens; identical to SEQ ID NO: 48977
  misc_feature: 498 for SV(C|O) and 18S

SEQ ID NO: 64810 - DNA, 120 bp, Homo sapiens; identical to SEQ ID NO: 48965
  misc_feature: 498 for SV(C|O) and 18S

SEQ ID NO: 64811 - DNA, 120 bp, Homo sapiens; identical to SEQ ID NO: 48350
  misc_feature: 498 for SV(C|O) and 18S

SEQ ID NO: 64812 - DNA, 120 bp, Homo sapiens
  misc_feature: 497 for SV(C|O) and 18S
ccgccccttgcctctcggcgccccctcgatgctcttagctgagtgtcccgcggggcccgaagcgtttactttgaaaaaattagagtgttcaaagcaggcccgagccgcctggataccgca

SEQ ID NO: 64813 - DNA, 120 bp, Homo sapiens
  misc_feature: 497 for SV(C|O) and 18S
tctaccttacctacctggttgatcctgccagtagcatatgcttgtctcaaagattaagccatgcatgtctaagtacgcacggccggtacagtgaaactgcgaatggctcattaaatcagt

SEQ ID NO: 64814 - DNA, 120 bp, Homo sapiens
  misc_feature: 497 for SV(C|O) and 18S
tcgattccgtgggtggtggtgcatggccgttcttagttggtggagcgatttgtctggttaattccgataacgaacgagactctggcatgctaactagttacgcgacccccgagcggtcgg

SEQ ID NO: 64815 - DNA, 120 bp, Homo sapiens
  misc_feature: 497 for SV(C|O) and 18S
ccgttgaaccccattcgtgatggggatcggggattgcaattattccccatgaacgaggaattcccagtaagtgcgggtcataagcttgcgttgattaagtccctgccctttgtacacacc

SEQ ID NO: 64816 - DNA, 120 bp, Homo sapiens; identical to SEQ ID NO: 48458
  misc_feature: 497 for SV(C|O) and 18S

SEQ ID NO: 64817 - DNA, 120 bp, Homo sapiens; identical to SEQ ID NO: 48555
  misc_feature: 497 for SV(C|O) and 18S

SEQ ID NO: 64818 - DNA, 120 bp, Homo sapiens
  misc_feature: 496 for SV(C|O) and 18S
ttagctgagtgtcccgcggggcccgaagcgtttactttgaaaaaattagagtgttcaaagcaggcccgagccgcctggataccgcagctaggaataatggaataggaccgcggttctatt

SEQ ID NO: 64819 - DNA, 120 bp, Homo sapiens
  misc_feature: 496 for SV(C|O) and 18S
tccaatagcgtatattaaagttgctgcagttaaaaagctcgtagttggatcttgggagcgggcgggcggtccgccgcgaggcgagccaccgcccgtccccgccccttgcctctcggcgcc

SEQ ID NO: 64820 - DNA, 120 bp, Homo sapiens
  misc_feature: 496 for SV(C|O) and 18S
taacctcgggccgatcgcacgccccccgtggcggcgacgacccattcgaacgtctgccctatcaactttcgatggtagtcgccgtgcctaccatggtgaccacgggtgacggggaatcag

SEQ ID NO: 64821 - DNA, 120 bp, Homo sapiens; identical to SEQ ID NO: 48684
  misc_feature: 496 for SV(C|O) and 18S

SEQ ID NO: 64822 - DNA, 120 bp, Homo sapiens
  misc_feature: 496 for SV(C|O) and 18S
gctcttagctgagtgtcccgcggggcccgaagcgtttactttgaaaaaattagagtgttcaaagcaggcccgagccgcctggataccgcagctaggaataatggaataggaccgcggttc

SEQ ID NO: 64823 - DNA, 120 bp, Homo sapiens; identical to SEQ ID NO: 48457
  misc_feature: 495 for SV(C|O) and 18S

SEQ ID NO: 64824 - DNA, 120 bp, Homo sapiens; identical to SEQ ID NO: 48907
  misc_feature: 495 for SV(C|O) and 18S

SEQ ID NO: 64825 - DNA, 120 bp, Homo sapiens; identical to SEQ ID NO: 48710
  misc_feature: 495 for SV(C|O) and 18S

SEQ ID NO: 64826 - DNA, 120 bp, Homo sapiens
  misc_feature: 495 for SV(C|O) and 18S
cttagctgagtgtcccgcggggcccgaagcgtttactttgaaaaaattagagtgttcaaagcaggcccgagccgcctggataccgcagctaggaataatggaataggaccgcggttctat

SEQ ID NO: 64827 - DNA, 120 bp, Homo sapiens
  misc_feature: 495 for SV(C|O) and 18S
cggtatccaggcggctcgggcctgctttgaacactctaattttttcaaagtaaacgcttcgggccccgcgggacactcagctaagagcatcgagggggcgccgagaggcaaggggcgggg

SEQ ID NO: 64828 - DNA, 120 bp, Homo sapiens
  misc_feature: 495 for SV(C|O) and 18S
aacctcgggccgatcgcacgccccccgtggcggcgacgacccattcgaacgtctgccctatcaactttcgatggtagtcgccgtgcctaccatggtgaccacgggtgacggggaatcagg

SEQ ID NO: 64829 - DNA, 120 bp, Homo sapiens
  misc_feature: 495 for SV(C|O) and 18S
actaccatcgaaagttgatagggcagacgttcgaatgggtcgtcgccgccacggggggcgtgcgatcggcccgaggttatctagagtcaccaaagccgccggcgcccgccccccggccgg

SEQ ID NO: 64830 - DNA, 120 bp, Homo sapiens
  misc_feature: 494 for SV(C|O) and 18S
tcaggctccctctccggaatcgaaccctgattccccgtcacccgtggtcaccatggtaggcacggcgactaccatcgaaagttgatagggcagacgttcgaatgggtcgtcgccgccacg

SEQ ID NO: 64831 - DNA, 120 bp, Homo sapiens; identical to SEQ ID NO: 48642
  misc_feature: 494 for SV(C|O) and 18S

SEQ ID NO: 64832 - DNA, 120 bp, Homo sapiens
  misc_feature: 494 for SV(C|O) and 18S
acctcgggccgatcgcacgccccccgtggcggcgacgacccattcgaacgtctgccctatcaactttcgatggtagtcgccgtgcctaccatggtgaccacgggtgacggggaatcaggg

SEQ ID NO: 64833 - DNA, 120 bp, Homo sapiens
  misc_feature: 493 for SV(C|O) and 18S
gcaggcgcgcaaattacccactcccgacccggggaggtagtgacgaaaaataacaatacaggactctttcgaggccctgtaattggaatgagtccactttaaatcctttaacgaggatcc

SEQ ID NO: 64834 - DNA, 120 bp, Homo sapiens; identical to SEQ ID NO: 48771
  misc_feature: 493 for SV(C|O) and 18S

SEQ ID NO: 64835 - DNA, 120 bp, Homo sapiens; identical to SEQ ID NO: 48497
  misc_feature: 493 for SV(C|O) and 18S

SEQ ID NO: 64836 - DNA, 120 bp, Homo sapiens; identical to SEQ ID NO: 48698
  misc_feature: 492 for SV(C|O) and 18S

SEQ ID NO: 64837 - DNA, 120 bp, Homo sapiens; identical to SEQ ID NO: 48939
  misc_feature: 492 for SV(C|O) and 18S

SEQ ID NO: 64838 - DNA, 120 bp, Homo sapiens
  misc_feature: 492 for SV(C|O) and 18S
ccctctccggaatcgaaccctgattccccgtcacccgtggtcaccatggtaggcacggcgactaccatcgaaagttgatagggcagacgttcgaatgggtcgtcgccgccacggggggcg

SEQ ID NO: 64839 - DNA, 120 bp, Homo sapiens
  misc_feature: 491 for SV(C|O) and 18S
acccgttgaaccccattcgtgatggggatcggggattgcaattattccccatgaacgaggaattcccagtaagtgcgggtcataagcttgcgttgattaagtccctgccctttgtacaca

SEQ ID NO: 64840 - DNA, 120 bp, Homo sapiens; identical to SEQ ID NO: 48365
  misc_feature: 491 for SV(C|O) and 18S

SEQ ID NO: 64841 - DNA, 120 bp, Homo sapiens
  misc_feature: 491 for SV(C|O) and 18S
tcggggattgcaattattccccatgaacgaggaattcccagtaagtgcgggtcataagcttgcgttgattaagtccctgccctttgtacacaccgcccgtcgctactaccgattggatgg

SEQ ID NO: 64842 - DNA, 120 bp, Homo sapiens
  misc_feature: 491 for SV(C|O) and 18S
cccgttgaaccccattcgtgatggggatcggggattgcaattattccccatgaacgaggaattcccagtaagtgcgggtcataagcttgcgttgattaagtccctgccctttgtacacac

SEQ ID NO: 64843 - DNA, 120 bp, Homo sapiens
  misc_feature: 491 for SV(C|O) and 18S
ctaccatcgaaagttgatagggcagacgttcgaatgggtcgtcgccgccacggggggcgtgcgatcggcccgaggttatctagagtcaccaaagccgccggcgcccgccccccggccggg

SEQ ID NO: 64844 - DNA, 120 bp, Homo sapiens; identical to SEQ ID NO: 48729
  misc_feature: 491 for SV(C|O) and 18S

SEQ ID NO: 64845 - DNA, 120 bp, Homo sapiens
  misc_feature: 490 for SV(C|O) and 18S
ataacctcgggccgatcgcacgccccccgtggcggcgacgacccattcgaacgtctgccctatcaactttcgatggtagtcgccgtgcctaccatggtgaccacgggtgacggggaatca

SEQ ID NO: 64846 - DNA, 120 bp, Homo sapiens
  misc_feature: 490 for SV(C|O) and 18S
tcttagctgagtgtcccgcggggcccgaagcgtttactttgaaaaaattagagtgttcaaagcaggcccgagccgcctggataccgcagctaggaataatggaataggaccgcggttcta

SEQ ID NO: 64847 - DNA, 120 bp, Homo sapiens; identical to SEQ ID NO: 48503
  misc_feature: 490 for SV(C|O) and 18S

SEQ ID NO: 64848 - DNA, 120 bp, Homo sapiens
  misc_feature: 490 for SV(C|O) and 18S
gcgccccctcgatgctcttagctgagtgtcccgcggggcccgaagcgtttactttgaaaaaattagagtgttcaaagcaggcccgagccgcctggataccgcagctaggaataatggaat

SEQ ID NO: 64849 - DNA, 120 bp, Homo sapiens; identical to SEQ ID NO: 48534
  misc_feature: 490 for SV(C|O) and 18S

SEQ ID NO: 64850 - DNA, 120 bp, Homo sapiens
  misc_feature: 490 for SV(C|O) and 18S
ctctaccttacctacctggttgatcctgccagtagcatatgcttgtctcaaagattaagccatgcatgtctaagtacgcacggccggtacagtgaaactgcgaatggctcattaaatcag

SEQ ID NO: 64851 - DNA, 120 bp, Homo sapiens
  misc_feature: 490 for SV(C|O) and 18S
caggctccctctccggaatcgaaccctgattccccgtcacccgtggtcaccatggtaggcacggcgactaccatcgaaagttgatagggcagacgttcgaatgggtcgtcgccgccacgg

SEQ ID NO: 64852 - DNA, 120 bp, Homo sapiens
  misc_feature: 489 for SV(C|O) and 18S
tgaaccccattcgtgatggggatcggggattgcaattattccccatgaacgaggaattcccagtaagtgcgggtcataagcttgcgttgattaagtccctgccctttgtacacaccgccc

SEQ ID NO: 64853 - DNA, 120 bp, Homo sapiens
  misc_feature: 489 for SV(C|O) and 18S
cgactaccatcgaaagttgatagggcagacgttcgaatgggtcgtcgccgccacggggggcgtgcgatcggcccgaggttatctagagtcaccaaagccgccggcgcccgccccccggcc

SEQ ID NO: 64854 - DNA, 120 bp, Homo sapiens
  misc_feature: 489 for SV(C|O) and 18S
aatcgaaccctgattccccgtcacccgtggtcaccatggtaggcacggcgactaccatcgaaagttgatagggcagacgttcgaatgggtcgtcgccgccacggggggcgtgcgatcggc

SEQ ID NO: 64855 - DNA, 120 bp, Homo sapiens
  misc_feature: 489 for SV(C|O) and 18S
ctcttagctgagtgtcccgcggggcccgaagcgtttactttgaaaaaattagagtgttcaaagcaggcccgagccgcctggataccgcagctaggaataatggaataggaccgcggttct

SEQ ID NO: 64856 - DNA, 120 bp, Homo sapiens; identical to SEQ ID NO: 48824
  misc_feature: 488 for SV(C|O) and 18S

SEQ ID NO: 64857 - DNA, 120 bp, Homo sapiens
  misc_feature: 487 for SV(C|O) and 18S
tgaacgaggaattcccagtaagtgcgggtcataagcttgcgttgattaagtccctgccctttgtacacaccgcccgtcgctactaccgattggatggtttagtgaggccctcggatcggc

SEQ ID NO: 64858 - DNA, 120 bp, Homo sapiens; identical to SEQ ID NO: 48480
  misc_feature: 487 for SV(C|O) and 18S

SEQ ID NO: 64859 - DNA, 120 bp, Homo sapiens
  misc_feature: 487 for SV(C|O) and 18S
cccattcgtgatggggatcggggattgcaattattccccatgaacgaggaattcccagtaagtgcgggtcataagcttgcgttgattaagtccctgccctttgtacacaccgcccgtcgc

SEQ ID NO: 64860 - DNA, 120 bp, Homo sapiens; identical to SEQ ID NO: 48791
  misc_feature: 486 for SV(C|O) and 18S

SEQ ID NO: 64861 - DNA, 120 bp, Homo sapiens
  misc_feature: 486 for SV(C|O) and 18S
tatccaggcggctcgggcctgctttgaacactctaattttttcaaagtaaacgcttcgggccccgcgggacactcagctaagagcatcgagggggcgccgagaggcaaggggcggggacg

SEQ ID NO: 64862 - DNA, 120 bp, Homo sapiens
  misc_feature: 486 for SV(C|O) and 18S
taactgatttaatgagccattcgcagtttcactgtaccggccgtgcgtacttagacatgcatggcttaatctttgagacaagcatatgctactggcaggatcaaccaggtaggtaaggta

SEQ ID NO: 64863 - DNA, 120 bp, Homo sapiens; identical to SEQ ID NO: 48733
  misc_feature: 486 for SV(C|O) and 18S

SEQ ID NO: 64864 - DNA, 120 bp, Homo sapiens
  misc_feature: 486 for SV(C|O) and 18S
cgttgaaccccattcgtgatggggatcggggattgcaattattccccatgaacgaggaattcccagtaagtgcgggtcataagcttgcgttgattaagtccctgccctttgtacacaccg

SEQ ID NO: 64865 - DNA, 120 bp, Homo sapiens
  misc_feature: 486 for SV(C|O) and 18S
ccattcgtgatggggatcggggattgcaattattccccatgaacgaggaattcccagtaagtgcgggtcataagcttgcgttgattaagtccctgccctttgtacacaccgcccgtcgct

SEQ ID NO: 64866 - DNA, 120 bp, Homo sapiens
  misc_feature: 485 for SV(C|O) and 18S
ttggagggcaagtctggtgccagcagccgcggtaattccagctccaatagcgtatattaaagttgctgcagttaaaaagctcgtagttggatcttgggagcgggcgggcggtccgccgcg

SEQ ID NO: 64867 - DNA, 120 bp, Homo sapiens
  misc_feature: 485 for SV(C|O) and 18S
ttgaaccccattcgtgatggggatcggggattgcaattattccccatgaacgaggaattcccagtaagtgcgggtcataagcttgcgttgattaagtccctgccctttgtacacaccgcc

SEQ ID NO: 64868 - DNA, 120 bp, Homo sapiens; identical to SEQ ID NO: 48685
  misc_feature: 485 for SV(C|O) and 18S

SEQ ID NO: 64869 - DNA, 120 bp, Homo sapiens
  misc_feature: 485 for SV(C|O) and 18S
cctctccggaatcgaaccctgattccccgtcacccgtggtcaccatggtaggcacggcgactaccatcgaaagttgatagggcagacgttcgaatgggtcgtcgccgccacggggggcgt

SEQ ID NO: 64870 - DNA, 120 bp, Homo sapiens; identical to SEQ ID NO: 48415
  misc_feature: 485 for SV(C|O) and 18S

SEQ ID NO: 64871 - DNA, 120 bp, Homo sapiens
  misc_feature: 484 for SV(C|O) and 18S
gttgaaccccattcgtgatggggatcggggattgcaattattccccatgaacgaggaattcccagtaagtgcgggtcataagcttgcgttgattaagtccctgccctttgtacacaccgc

SEQ ID NO: 64872 - DNA, 120 bp, Homo sapiens
  misc_feature: 484 for SV(C|O) and 18S
catgaacgaggaattcccagtaagtgcgggtcataagcttgcgttgattaagtccctgccctttgtacacaccgcccgtcgctactaccgattggatggtttagtgaggccctcggatcg

SEQ ID NO: 64873 - DNA, 120 bp, Homo sapiens; identical to SEQ ID NO: 48317
  misc_feature: 483 for SV(C|O) and 18S

SEQ ID NO: 64874 - DNA, 120 bp, Homo sapiens
  misc_feature: 483 for SV(C|O) and 18S
gatggggatcggggattgcaattattccccatgaacgaggaattcccagtaagtgcgggtcataagcttgcgttgattaagtccctgccctttgtacacaccgcccgtcgctactaccga

SEQ ID NO: 64875 - DNA, 120 bp, Homo sapiens
  misc_feature: 483 for SV(C|O) and 18S
tagctgagtgtcccgcggggcccgaagcgtttactttgaaaaaattagagtgttcaaagcaggcccgagccgcctggataccgcagctaggaataatggaataggaccgcggttctattt

SEQ ID NO: 64876 - DNA, 120 bp, Homo sapiens
  misc_feature: 483 for SV(C|O) and 18S
ggggatcggggattgcaattattccccatgaacgaggaattcccagtaagtgcgggtcataagcttgcgttgattaagtccctgccctttgtacacaccgcccgtcgctactaccgattg

SEQ ID NO: 64877 - DNA, 120 bp, Homo sapiens; identical to SEQ ID NO: 48819
  misc_feature: 483 for SV(C|O) and 18S

SEQ ID NO: 64878 - DNA, 120 bp, Homo sapiens; identical to SEQ ID NO: 48773
  misc_feature: 482 for SV(C|O) and 18S

SEQ ID NO: 64879 - DNA, 120 bp, Homo sapiens
  misc_feature: 482 for SV(C|O) and 18S
tgagtgtcccgcggggcccgaagcgtttactttgaaaaaattagagtgttcaaagcaggcccgagccgcctggataccgcagctaggaataatggaataggaccgcggttctattttgtt

SEQ ID NO: 64880 - DNA, 120 bp, Homo sapiens
  misc_feature: 482 for SV(C|O) and 18S
ggatcggggattgcaattattccccatgaacgaggaattcccagtaagtgcgggtcataagcttgcgttgattaagtccctgccctttgtacacaccgcccgtcgctactaccgattgga

SEQ ID NO: 64881 - DNA, 120 bp, Homo sapiens
  misc_feature: 482 for SV(C|O) and 18S
gatcggggattgcaattattccccatgaacgaggaattcccagtaagtgcgggtcataagcttgcgttgattaagtccctgccctttgtacacaccgcccgtcgctactaccgattggat

SEQ ID NO: 64882 - DNA, 120 bp, Homo sapiens
  misc_feature: 482 for SV(C|O) and 18S
aactgatttaatgagccattcgcagtttcactgtaccggccgtgcgtacttagacatgcatggcttaatctttgagacaagcatatgctactggcaggatcaaccaggtaggtaaggtag

SEQ ID NO: 64883 - DNA, 120 bp, Homo sapiens
  misc_feature: 482 for SV(C|O) and 18S
ccagctccaatagcgtatattaaagttgctgcagttaaaaagctcgtagttggatcttgggagcgggcgggcggtccgccgcgaggcgagccaccgcccgtccccgccccttgcctctcg

SEQ ID NO: 64884 - DNA, 120 bp, Homo sapiens
  misc_feature: 482 for SV(C|O) and 18S
agctgagtgtcccgcggggcccgaagcgtttactttgaaaaaattagagtgttcaaagcaggcccgagccgcctggataccgcagctaggaataatggaataggaccgcggttctatttt

SEQ ID NO: 64885 - DNA, 120 bp, Homo sapiens; identical to SEQ ID NO: 49000
  misc_feature: 481 for SV(C|O) and 18S

SEQ ID NO: 64886 - DNA, 120 bp, Homo sapiens; identical to SEQ ID NO: 48331
  misc_feature: 481 for SV(C|O) and 18S

SEQ ID NO: 64887 - DNA, 120 bp, Homo sapiens; identical to SEQ ID NO: 48552
  misc_feature: 481 for SV(C|O) and 18S

SEQ ID NO: 64888 - DNA, 120 bp, Homo sapiens; identical to SEQ ID NO: 48832
  misc_feature: 481 for SV(C|O) and 18S

SEQ ID NO: 64889 - DNA, 120 bp, Homo sapiens; identical to SEQ ID NO: 48793
  misc_feature: 481 for SV(C|O) and 18S

SEQ ID NO: 64890 - DNA, 120 bp, Homo sapiens
  misc_feature: 480 for SV(C|O) and 18S
tgatggggatcggggattgcaattattccccatgaacgaggaattcccagtaagtgcgggtcataagcttgcgttgattaagtccctgccctttgtacacaccgcccgtcgctactaccg

SEQ ID NO: 64891 - DNA, 120 bp, Homo sapiens
  misc_feature: 480 for SV(C|O) and 18S
tccagctccaatagcgtatattaaagttgctgcagttaaaaagctcgtagttggatcttgggagcgggcgggcggtccgccgcgaggcgagccaccgcccgtccccgccccttgcctctc

SEQ ID NO: 64892 - DNA, 120 bp, Homo sapiens
  misc_feature: 480 for SV(C|O) and 18S
gaatcgaaccctgattccccgtcacccgtggtcaccatggtaggcacggcgactaccatcgaaagttgatagggcagacgttcgaatgggtcgtcgccgccacggggggcgtgcgatcgg

SEQ ID NO: 64893 - DNA, 120 bp, Homo sapiens
  misc_feature: 479 for SV(C|O) and 18S
gcgactaccatcgaaagttgatagggcagacgttcgaatgggtcgtcgccgccacggggggcgtgcgatcggcccgaggttatctagagtcaccaaagccgccggcgcccgccccccggc

SEQ ID NO: 64894 - DNA, 120 bp, Homo sapiens; identical to SEQ ID NO: 48527
  misc_feature: 479 for SV(C|O) and 18S

SEQ ID NO: 64895 - DNA, 120 bp, Homo sapiens
  misc_feature: 479 for SV(C|O) and 18S
ctctccggaatcgaaccctgattccccgtcacccgtggtcaccatggtaggcacggcgactaccatcgaaagttgatagggcagacgttcgaatgggtcgtcgccgccacggggggcgtg

SEQ ID NO: 64896 - DNA, 120 bp, Homo sapiens; identical to SEQ ID NO: 49023
  misc_feature: 478 for SV(C|O) and 18S

SEQ ID NO: 64897 - DNA, 120 bp, Homo sapiens; identical to SEQ ID NO: 48760
  misc_feature: 478 for SV(C|O) and 18S

SEQ ID NO: 64898 - DNA, 120 bp, Homo sapiens; identical to SEQ ID NO: 48465
  misc_feature: 478 for SV(C|O) and 18S

SEQ ID NO: 64899 - DNA, 120 bp, Homo sapiens
  misc_feature: 478 for SV(C|O) and 18S
atgaacgaggaattcccagtaagtgcgggtcataagcttgcgttgattaagtccctgccctttgtacacaccgcccgtcgctactaccgattggatggtttagtgaggccctcggatcgg

SEQ ID NO: 64900 - DNA, 120 bp, Homo sapiens
  misc_feature: 477 for SV(C|O) and 18S
ttcgtgatggggatcggggattgcaattattccccatgaacgaggaattcccagtaagtgcgggtcataagcttgcgttgattaagtccctgccctttgtacacaccgcccgtcgctact

SEQ ID NO: 64901 - DNA, 120 bp, Homo sapiens; identical to SEQ ID NO: 48768
  misc_feature: 477 for SV(C|O) and 18S

SEQ ID NO: 64902 - DNA, 120 bp, Homo sapiens
  misc_feature: 477 for SV(C|O) and 18S
ctccaatagcgtatattaaagttgctgcagttaaaaagctcgtagttggatcttgggagcgggcgggcggtccgccgcgaggcgagccaccgcccgtccccgccccttgcctctcggcgc

SEQ ID NO: 64903 - DNA, 120 bp, Homo sapiens
  misc_feature: 477 for SV(C|O) and 18S
gaaccccattcgtgatggggatcggggattgcaattattccccatgaacgaggaattcccagtaagtgcgggtcataagcttgcgttgattaagtccctgccctttgtacacaccgcccg

SEQ ID NO: 64904 - DNA, 120 bp, Homo sapiens
  misc_feature: 476 for SV(C|O) and 18S
cattcgtgatggggatcggggattgcaattattccccatgaacgaggaattcccagtaagtgcgggtcataagcttgcgttgattaagtccctgccctttgtacacaccgcccgtcgcta

SEQ ID NO: 64905 - DNA, 120 bp, Homo sapiens; identical to SEQ ID NO: 48908
  misc_feature: 476 for SV(C|O) and 18S

SEQ ID NO: 64906 - DNA, 120 bp, Homo sapiens; identical to SEQ ID NO: 49029
  misc_feature: 476 for SV(C|O) and 18S

SEQ ID NO: 64907 - DNA, 120 bp, Homo sapiens
  misc_feature: 476 for SV(C|O) and 18S
accccattcgtgatggggatcggggattgcaattattccccatgaacgaggaattcccagtaagtgcgggtcataagcttgcgttgattaagtccctgccctttgtacacaccgcccgtc

SEQ ID NO: 64908 - DNA, 120 bp, Homo sapiens; identical to SEQ ID NO: 48914
  misc_feature: 476 for SV(C|O) and 18S

SEQ ID NO: 64909 - DNA, 120 bp, Homo sapiens; identical to SEQ ID NO: 48847
  misc_feature: 475 for SV(C|O) and 18S

SEQ ID NO: 64910 - DNA, 120 bp, Homo sapiens
  misc_feature: 475 for SV(C|O) and 18S
gggatcggggattgcaattattccccatgaacgaggaattcccagtaagtgcgggtcataagcttgcgttgattaagtccctgccctttgtacacaccgcccgtcgctactaccgattgg

SEQ ID NO: 64911 - DNA, 120 bp, Homo sapiens
  misc_feature: 475 for SV(C|O) and 18S
ggcgactaccatcgaaagttgatagggcagacgttcgaatgggtcgtcgccgccacggggggcgtgcgatcggcccgaggttatctagagtcaccaaagccgccggcgcccgccccccgg

SEQ ID NO: 64912 - DNA, 120 bp, Homo sapiens
  misc_feature: 475 for SV(C|O) and 18S
aaccccattcgtgatggggatcggggattgcaattattccccatgaacgaggaattcccagtaagtgcgggtcataagcttgcgttgattaagtccctgccctttgtacacaccgcccgt

SEQ ID NO: 64913 - DNA, 120 bp, Homo sapiens
  misc_feature: 474 for SV(C|O) and 18S
gtgatggggatcggggattgcaattattccccatgaacgaggaattcccagtaagtgcgggtcataagcttgcgttgattaagtccctgccctttgtacacaccgcccgtcgctactacc

SEQ ID NO: 64914 - DNA, 120 bp, Homo sapiens; identical to SEQ ID NO: 48784
  misc_feature: 474 for SV(C|O) and 18S

SEQ ID NO: 64915 - DNA, 120 bp, Homo sapiens
  misc_feature: 473 for SV(C|O) and 18S
tccggaatcgaaccctgattccccgtcacccgtggtcaccatggtaggcacggcgactaccatcgaaagttgatagggcagacgttcgaatgggtcgtcgccgccacggggggcgtgcga

SEQ ID NO: 64916 - DNA, 120 bp, Homo sapiens
  misc_feature: 473 for SV(C|O) and 18S
cgtgatggggatcggggattgcaattattccccatgaacgaggaattcccagtaagtgcgggtcataagcttgcgttgattaagtccctgccctttgtacacaccgcccgtcgctactac

SEQ ID NO: 64917 - DNA, 120 bp, Homo sapiens
  misc_feature: 473 for SV(C|O) and 18S
atccaggcggctcgggcctgctttgaacactctaattttttcaaagtaaacgcttcgggccccgcgggacactcagctaagagcatcgagggggcgccgagaggcaaggggcggggacgg

SEQ ID NO: 64918 - DNA, 120 bp, Homo sapiens
  misc_feature: 473 for SV(C|O) and 18S
cccatgaacgaggaattcccagtaagtgcgggtcataagcttgcgttgattaagtccctgccctttgtacacaccgcccgtcgctactaccgattggatggtttagtgaggccctcggat

SEQ ID NO: 64919 - DNA, 120 bp, Homo sapiens
  misc_feature: 472 for SV(C|O) and 18S
attcgtgatggggatcggggattgcaattattccccatgaacgaggaattcccagtaagtgcgggtcataagcttgcgttgattaagtccctgccctttgtacacaccgcccgtcgctac

SEQ ID NO: 64920 - DNA, 120 bp, Homo sapiens
  misc_feature: 471 for SV(C|O) and 18S
tctccggaatcgaaccctgattccccgtcacccgtggtcaccatggtaggcacggcgactaccatcgaaagttgatagggcagacgttcgaatgggtcgtcgccgccacggggggcgtgc

SEQ ID NO: 64921 - DNA, 120 bp, Homo sapiens; identical to SEQ ID NO: 48629
  misc_feature: 471 for SV(C|O) and 18S

SEQ ID NO: 64922 - DNA, 120 bp, Homo sapiens
  misc_feature: 470 for SV(C|O) and 18S
gctgagtgtcccgcggggcccgaagcgtttactttgaaaaaattagagtgttcaaagcaggcccgagccgcctggataccgcagctaggaataatggaataggaccgcggttctattttg

SEQ ID NO: 64923 - DNA, 120 bp, Homo sapiens; identical to SEQ ID NO: 49015
  misc_feature: 470 for SV(C|O) and 18S

SEQ ID NO: 64924 - DNA, 120 bp, Homo sapiens
  misc_feature: 469 for SV(C|O) and 18S
ccatgaacgaggaattcccagtaagtgcgggtcataagcttgcgttgattaagtccctgccctttgtacacaccgcccgtcgctactaccgattggatggtttagtgaggccctcggatc

SEQ ID NO: 64925 - DNA, 120 bp, Homo sapiens
  misc_feature: 469 for SV(C|O) and 18S
ctccggaatcgaaccctgattccccgtcacccgtggtcaccatggtaggcacggcgactaccatcgaaagttgatagggcagacgttcgaatgggtcgtcgccgccacggggggcgtgcg

SEQ ID NO: 64926 - DNA, 120 bp, Homo sapiens; identical to SEQ ID NO: 49018
  misc_feature: 469 for SV(C|O) and 18S

SEQ ID NO: 64927 - DNA, 120 bp, Homo sapiens
  misc_feature: 468 for SV(C|O) and 18S
tcgtgatggggatcggggattgcaattattccccatgaacgaggaattcccagtaagtgcgggtcataagcttgcgttgattaagtccctgccctttgtacacaccgcccgtcgctacta

SEQ ID NO: 64928 - DNA, 120 bp, Homo sapiens; identical to SEQ ID NO: 48655
  misc_feature: 467 for SV(C|O) and 18S

SEQ ID NO: 64929 - DNA, 120 bp, Homo sapiens; identical to SEQ ID NO: 48823
  misc_feature: 467 for SV(C|O) and 18S

SEQ ID NO: 64930 - DNA, 120 bp, Homo sapiens; identical to SEQ ID NO: 48770
  misc_feature: 467 for SV(C|O) and 18S

SEQ ID NO: 64931 - DNA, 120 bp, Homo sapiens
  misc_feature: 467 for SV(C|O) and 18S
acggcgactaccatcgaaagttgatagggcagacgttcgaatgggtcgtcgccgccacggggggcgtgcgatcggcccgaggttatctagagtcaccaaagccgccggcgcccgcccccc

SEQ ID NO: 64932 - DNA, 120 bp, Homo sapiens
  misc_feature: 466 for SV(C|O) and 18S
tgtcccgcggggcccgaagcgtttactttgaaaaaattagagtgttcaaagcaggcccgagccgcctggataccgcagctaggaataatggaataggaccgcggttctattttgttggtt

SEQ ID NO: 64933 - DNA, 120 bp, Homo sapiens; identical to SEQ ID NO: 48818
  misc_feature: 466 for SV(C|O) and 18S

SEQ ID NO: 64934 - DNA, 120 bp, Homo sapiens; identical to SEQ ID NO: 48864
  misc_feature: 466 for SV(C|O) and 18S

SEQ ID NO: 64935 - DNA, 120 bp, Homo sapiens; identical to SEQ ID NO: 48787
  misc_feature: 464 for SV(C|O) and 18S

SEQ ID NO: 64936 - DNA, 120 bp, Homo sapiens; identical to SEQ ID NO: 48836
  misc_feature: 464 for SV(C|O) and 18S

SEQ ID NO: 64937 - DNA, 120 bp, Homo sapiens
  misc_feature: 464 for SV(C|O) and 18S
agctccaatagcgtatattaaagttgctgcagttaaaaagctcgtagttggatcttgggagcgggcgggcggtccgccgcgaggcgagccaccgcccgtccccgccccttgcctctcggc

SEQ ID NO: 64938 - DNA, 120 bp, Homo sapiens; identical to SEQ ID NO: 48430
  misc_feature: 464 for SV(C|O) and 18S

SEQ ID NO: 64939 - DNA, 120 bp, Homo sapiens; identical to SEQ ID NO: 48532
  misc_feature: 463 for SV(C|O) and 18S

SEQ ID NO: 64940 - DNA, 120 bp, Homo sapiens
  misc_feature: 462 for SV(C|O) and 18S
attccagctccaatagcgtatattaaagttgctgcagttaaaaagctcgtagttggatcttgggagcgggcgggcggtccgccgcgaggcgagccaccgcccgtccccgccccttgcctc

SEQ ID NO: 64941 - DNA, 120 bp, Homo sapiens
  misc_feature: 460 for SV(C|O) and 18S
gtgtcccgcggggcccgaagcgtttactttgaaaaaattagagtgttcaaagcaggcccgagccgcctggataccgcagctaggaataatggaataggaccgcggttctattttgttggt

SEQ ID NO: 64942 - DNA, 120 bp, Homo sapiens; identical to SEQ ID NO: 48917
  misc_feature: 459 for SV(C|O) and 18S

SEQ ID NO: 64943 - DNA, 120 bp, Homo sapiens; identical to SEQ ID NO: 48875
  misc_feature: 459 for SV(C|O) and 18S

SEQ ID NO: 64944 - DNA, 120 bp, Homo sapiens; identical to SEQ ID NO: 48505
  misc_feature: 458 for SV(C|O) and 18S

SEQ ID NO: 64945 - DNA, 120 bp, Homo sapiens; identical to SEQ ID NO: 48879
  misc_feature: 458 for SV(C|O) and 18S

SEQ ID NO: 64946 - DNA, 120 bp, Homo sapiens
  misc_feature: 458 for SV(C|O) and 18S
cagctccaatagcgtatattaaagttgctgcagttaaaaagctcgtagttggatcttgggagcgggcgggcggtccgccgcgaggcgagccaccgcccgtccccgccccttgcctctcgg

SEQ ID NO: 64947 - DNA, 120 bp, Homo sapiens
  misc_feature: 458 for SV(C|O) and 18S
aattccagctccaatagcgtatattaaagttgctgcagttaaaaagctcgtagttggatcttgggagcgggcgggcggtccgccgcgaggcgagccaccgcccgtccccgccccttgcct

SEQ ID NO: 64948 - DNA, 120 bp, Homo sapiens; identical to SEQ ID NO: 48830
  misc_feature: 457 for SV(C|O) and 18S

SEQ ID NO: 64949 - DNA, 120 bp, Homo sapiens; identical to SEQ ID NO: 48635
  misc_feature: 457 for SV(C|O) and 18S

SEQ ID NO: 64950 - DNA, 120 bp, Homo sapiens
  misc_feature: 457 for SV(C|O) and 18S
gctccaatagcgtatattaaagttgctgcagttaaaaagctcgtagttggatcttgggagcgggcgggcggtccgccgcgaggcgagccaccgcccgtccccgccccttgcctctcggcg

SEQ ID NO: 64951 - DNA, 120 bp, Homo sapiens
  misc_feature: 457 for SV(C|O) and 18S
cggcgactaccatcgaaagttgatagggcagacgttcgaatgggtcgtcgccgccacggggggcgtgcgatcggcccgaggttatctagagtcaccaaagccgccggcgcccgccccccg

SEQ ID NO: 64952 - DNA, 120 bp, Homo sapiens
  misc_feature: 454 for SV(C|O) and 18S
cacggcgactaccatcgaaagttgatagggcagacgttcgaatgggtcgtcgccgccacggggggcgtgcgatcggcccgaggttatctagagtcaccaaagccgccggcgcccgccccc

SEQ ID NO: 64953 - DNA, 120 bp, Homo sapiens; identical to SEQ ID NO: 48924
  misc_feature: 453 for SV(C|O) and 18S

SEQ ID NO: 64954 - DNA, 120 bp, Homo sapiens; identical to SEQ ID NO: 48547
  misc_feature: 450 for SV(C|O) and 18S

SEQ ID NO: 64955 - DNA, 120 bp, Homo sapiens; identical to SEQ ID NO: 48886
  misc_feature: 449 for SV(C|O) and 18S

SEQ ID NO: 64956 - DNA, 120 bp, Homo sapiens; identical to SEQ ID NO: 48615
  misc_feature: 449 for SV(C|O) and 18S

SEQ ID NO: 64957 - DNA, 120 bp, Homo sapiens; identical to SEQ ID NO: 48936
  misc_feature: 449 for SV(C|O) and 18S

SEQ ID NO: 64958 - DNA, 120 bp, Homo sapiens; identical to SEQ ID NO: 48943
  misc_feature: 449 for SV(C|O) and 18S

SEQ ID NO: 64959 - DNA, 120 bp, Homo sapiens; identical to SEQ ID NO: 48925
  misc_feature: 448 for SV(C|O) and 18S

SEQ ID NO: 64960 - DNA, 120 bp, Homo sapiens; identical to SEQ ID NO: 48481
  misc_feature: 447 for SV(C|O) and 18S

SEQ ID NO: 64961 - DNA, 120 bp, Homo sapiens; identical to SEQ ID NO: 48946
  misc_feature: 446 for SV(C|O) and 18S

SEQ ID NO: 64962 - DNA, 120 bp, Homo sapiens
  misc_feature: 446 for SV(C|O) and 18S
gcacggcgactaccatcgaaagttgatagggcagacgttcgaatgggtcgtcgccgccacggggggcgtgcgatcggcccgaggttatctagagtcaccaaagccgccggcgcccgcccc

SEQ ID NO: 64963 - DNA, 120 bp, Homo sapiens; identical to SEQ ID NO: 48572
  misc_feature: 442 for SV(C|O) and 18S

SEQ ID NO: 64964 - DNA, 120 bp, Homo sapiens; identical to SEQ ID NO: 48948
  misc_feature: 442 for SV(C|O) and 18S

SEQ ID NO: 64965 - DNA, 120 bp, Homo sapiens
  misc_feature: 442 for SV(C|O) and 18S
taattccagctccaatagcgtatattaaagttgctgcagttaaaaagctcgtagttggatcttgggagcgggcgggcggtccgccgcgaggcgagccaccgcccgtccccgccccttgcc

SEQ ID NO: 64966 - DNA, 120 bp, Homo sapiens; identical to SEQ ID NO: 48595
  misc_feature: 442 for SV(C|O) and 18S

SEQ ID NO: 64967 - DNA, 120 bp, Homo sapiens; identical to SEQ ID NO: 48624
  misc_feature: 441 for SV(C|O) and 18S

SEQ ID NO: 64968 - DNA, 120 bp, Homo sapiens
  misc_feature: 440 for SV(C|O) and 18S
ggcacggcgactaccatcgaaagttgatagggcagacgttcgaatgggtcgtcgccgccacggggggcgtgcgatcggcccgaggttatctagagtcaccaaagccgccggcgcccgccc

SEQ ID NO: 64969 - DNA, 120 bp, Homo sapiens; identical to SEQ ID NO: 48984
  misc_feature: 437 for SV(C|O) and 18S

SEQ ID NO: 64970 - DNA, 120 bp, Homo sapiens
  misc_feature: 433 for SV(C|O) and 18S
aggcacggcgactaccatcgaaagttgatagggcagacgttcgaatgggtcgtcgccgccacggggggcgtgcgatcggcccgaggttatctagagtcaccaaagccgccggcgcccgcc

SEQ ID NO: 64971 - DNA, 120 bp, Homo sapiens
  misc_feature: 429 for SV(C|O) and 18S
tggtgccagcagccgcggtaattccagctccaatagcgtatattaaagttgctgcagttaaaaagctcgtagttggatcttgggagcgggcgggcggtccgccgcgaggcgagccaccgc

SEQ ID NO: 64972 - DNA, 120 bp, Homo sapiens
  misc_feature: 429 for SV(C|O) and 18S
ctggtgccagcagccgcggtaattccagctccaatagcgtatattaaagttgctgcagttaaaaagctcgtagttggatcttgggagcgggcgggcggtccgccgcgaggcgagccaccg

SEQ ID NO: 64973 - DNA, 120 bp, Homo sapiens; identical to SEQ ID NO: 49030
  misc_feature: 428 for SV(C|O) and 18S

SEQ ID NO: 64974 - DNA, 120 bp, Homo sapiens
  misc_feature: 426 for SV(C|O) and 18S
taggcacggcgactaccatcgaaagttgatagggcagacgttcgaatgggtcgtcgccgccacggggggcgtgcgatcggcccgaggttatctagagtcaccaaagccgccggcgcccgc

SEQ ID NO: 64975 - DNA, 120 bp, Homo sapiens
  misc_feature: 426 for SV(C|O) and 18S
gtaattccagctccaatagcgtatattaaagttgctgcagttaaaaagctcgtagttggatcttgggagcgggcgggcggtccgccgcgaggcgagccaccgcccgtccccgccccttgc

SEQ ID NO: 64976 - DNA, 120 bp, Homo sapiens
  misc_feature: 422 for SV(C|O) and 18S
ggtgccagcagccgcggtaattccagctccaatagcgtatattaaagttgctgcagttaaaaagctcgtagttggatcttgggagcgggcgggcggtccgccgcgaggcgagccaccgcc

SEQ ID NO: 64977 - DNA, 120 bp, Homo sapiens; identical to SEQ ID NO: 48996
  misc_feature: 422 for SV(C|O) and 18S

SEQ ID NO: 64978 - DNA, 120 bp, Homo sapiens
  misc_feature: 421 for SV(C|O) and 18S
ggtaattccagctccaatagcgtatattaaagttgctgcagttaaaaagctcgtagttggatcttgggagcgggcgggcggtccgccgcgaggcgagccaccgcccgtccccgccccttg

SEQ ID NO: 64979 - DNA, 120 bp, Homo sapiens
  misc_feature: 419 for SV(C|O) and 18S
gtaggcacggcgactaccatcgaaagttgatagggcagacgttcgaatgggtcgtcgccgccacggggggcgtgcgatcggcccgaggttatctagagtcaccaaagccgccggcgcccg

SEQ ID NO: 64980 - DNA, 120 bp, Homo sapiens; identical to SEQ ID NO: 49024
  misc_feature: 419 for SV(C|O) and 18S

SEQ ID NO: 64981 - DNA, 120 bp, Homo sapiens; identical to SEQ ID NO: 48988
  misc_feature: 416 for SV(C|O) and 18S

SEQ ID NO: 64982 - DNA, 120 bp, Homo sapiens; identical to SEQ ID NO: 49032
  misc_feature: 600 for SV(C|O) and 5.8S

SEQ ID NO: 64983 - DNA, 120 bp, Homo sapiens; identical to SEQ ID NO: 49031
  misc_feature: 593 for SV(C|O) and 5.8S

SEQ ID NO: 64984 - DNA, 120 bp, Homo sapiens; identical to SEQ ID NO: 49033
  misc_feature: 593 for SV(C|O) and 5.8S

SEQ ID NO: 64985 - DNA, 120 bp, Homo sapiens; identical to SEQ ID NO: 49037
  misc_feature: 572 for SV(C|O) and 5.8S

SEQ ID NO: 64986 - DNA, 120 bp, Homo sapiens
  misc_feature: 571 for SV(C|O) and 5.8S
cagctagctgcgagaattaatgtgaattgcaggacacattgatcatcgacacttcgaacgcacttgcggccccgggttcctcccggggctacgcctgtctgagcgtcgcttgccgatcaa

SEQ ID NO: 64987 - DNA, 120 bp, Homo sapiens
  misc_feature: 568 for SV(C|O) and 5.8S
cctcgtacgactcttagcggtggatcactcggctcgtgcgtcgatgaagaacgcagctagctgcgagaattaatgtgaattgcaggacacattgatcatcgacacttcgaacgcacttgc

SEQ ID NO: 64988 - DNA, 120 bp, Homo sapiens
  misc_feature: 566 for SV(C|O) and 5.8S
gacctcgtacgactcttagcggtggatcactcggctcgtgcgtcgatgaagaacgcagctagctgcgagaattaatgtgaattgcaggacacattgatcatcgacacttcgaacgcactt

SEQ ID NO: 64989 - DNA, 120 bp, Homo sapiens
  misc_feature: 566 for SV(C|O) and 5.8S
acctcgtacgactcttagcggtggatcactcggctcgtgcgtcgatgaagaacgcagctagctgcgagaattaatgtgaattgcaggacacattgatcatcgacacttcgaacgcacttg

SEQ ID NO: 64990 - DNA, 120 bp, Homo sapiens
  misc_feature: 564 for SV(C|O) and 5.8S
cgacctcgtacgactcttagcggtggatcactcggctcgtgcgtcgatgaagaacgcagctagctgcgagaattaatgtgaattgcaggacacattgatcatcgacacttcgaacgcact

SEQ ID NO: 64991 - DNA, 120 bp, Homo sapiens; identical to SEQ ID NO: 49035
  misc_feature: 560 for SV(C|O) and 5.8S

SEQ ID NO: 64992 - DNA, 120 bp, Homo sapiens
  misc_feature: 558 for SV(C|O) and 5.8S
atcgacctcgtacgactcttagcggtggatcactcggctcgtgcgtcgatgaagaacgcagctagctgcgagaattaatgtgaattgcaggacacattgatcatcgacacttcgaacgca

SEQ ID NO: 64993 - DNA, 120 bp, Homo sapiens
  misc_feature: 555 for SV(C|O) and 5.8S
tcgacctcgtacgactcttagcggtggatcactcggctcgtgcgtcgatgaagaacgcagctagctgcgagaattaatgtgaattgcaggacacattgatcatcgacacttcgaacgcac

SEQ ID NO: 64994 - DNA, 120 bp, Homo sapiens; identical to SEQ ID NO: 49039
  misc_feature: 553 for SV(C|O) and 5.8S

SEQ ID NO: 64995 - DNA, 120 bp, Homo sapiens
  misc_feature: 552 for SV(C|O) and 5.8S
cgtacgactcttagcggtggatcactcggctcgtgcgtcgatgaagaacgcagctagctgcgagaattaatgtgaattgcaggacacattgatcatcgacacttcgaacgcacttgcggc

SEQ ID NO: 64996 - DNA, 120 bp, Homo sapiens
  misc_feature: 551 for SV(C|O) and 5.8S
tcgtacgactcttagcggtggatcactcggctcgtgcgtcgatgaagaacgcagctagctgcgagaattaatgtgaattgcaggacacattgatcatcgacacttcgaacgcacttgcgg

SEQ ID NO: 64997 - DNA, 120 bp, Homo sapiens
  misc_feature: 549 for SV(C|O) and 5.8S
tacgactcttagcggtggatcactcggctcgtgcgtcgatgaagaacgcagctagctgcgagaattaatgtgaattgcaggacacattgatcatcgacacttcgaacgcacttgcggccc

SEQ ID NO: 64998 - DNA, 120 bp, Homo sapiens
  misc_feature: 548 for SV(C|O) and 5.8S
acgactcttagcggtggatcactcggctcgtgcgtcgatgaagaacgcagctagctgcgagaattaatgtgaattgcaggacacattgatcatcgacacttcgaacgcacttgcggcccc

SEQ ID NO: 64999 - DNA, 120 bp, Homo sapiens; identical to SEQ ID NO: 49061
  misc_feature: 548 for SV(C|O) and 5.8S

SEQ ID NO: 65000 - DNA, 120 bp, Homo sapiens; identical to SEQ ID NO: 49041
  misc_feature: 546 for SV(C|O) and 5.8S

SEQ ID NO: 65001 - DNA, 120 bp, Homo sapiens
  misc_feature: 545 for SV(C|O) and 5.8S
gtacgactcttagcggtggatcactcggctcgtgcgtcgatgaagaacgcagctagctgcgagaattaatgtgaattgcaggacacattgatcatcgacacttcgaacgcacttgcggcc

SEQ ID NO: 65002 - DNA, 120 bp, Homo sapiens
  misc_feature: 540 for SV(C|O) and 5.8S
gaacccggggccgcaagtgcgttcgaagtgtcgatgatcaatgtgtcctgcaattcacattaattctcgcagctagctgcgttcttcatcgacgcacgagccgagtgatccaccgctaag

SEQ ID NO: 65003 - DNA, 120 bp, Homo sapiens; identical to SEQ ID NO: 49036
  misc_feature: 537 for SV(C|O) and 5.8S

SEQ ID NO: 65004 - DNA, 120 bp, Homo sapiens; identical to SEQ ID NO: 49044
  misc_feature: 536 for SV(C|O) and 5.8S

SEQ ID NO: 65005 - DNA, 120 bp, Homo sapiens; identical to SEQ ID NO: 49042
  misc_feature: 533 for SV(C|O) and 5.8S

SEQ ID NO: 65006 - DNA, 120 bp, Homo sapiens; identical to SEQ ID NO: 49043
  misc_feature: 533 for SV(C|O) and 5.8S

SEQ ID NO: 65007 - DNA, 120 bp, Homo sapiens
  misc_feature: 530 for SV(C|O) and 5.8S
gggaggaacccggggccgcaagtgcgttcgaagtgtcgatgatcaatgtgtcctgcaattcacattaattctcgcagctagctgcgttcttcatcgacgcacgagccgagtgatccaccg

SEQ ID NO: 65008 - DNA, 120 bp, Homo sapiens
  misc_feature: 530 for SV(C|O) and 5.8S
cgactcttagcggtggatcactcggctcgtgcgtcgatgaagaacgcagctagctgcgagaattaatgtgaattgcaggacacattgatcatcgacacttcgaacgcacttgcggccccg

SEQ ID NO: 65009 - DNA, 120 bp, Homo sapiens
  misc_feature: 527 for SV(C|O) and 5.8S
cgggaggaacccggggccgcaagtgcgttcgaagtgtcgatgatcaatgtgtcctgcaattcacattaattctcgcagctagctgcgttcttcatcgacgcacgagccgagtgatccacc

SEQ ID NO: 65010 - DNA, 120 bp, Homo sapiens; identical to SEQ ID NO: 49050
  misc_feature: 527 for SV(C|O) and 5.8S

SEQ ID NO: 65011 - DNA, 120 bp, Homo sapiens
  misc_feature: 525 for SV(C|O) and 5.8S
gactcttagcggtggatcactcggctcgtgcgtcgatgaagaacgcagctagctgcgagaattaatgtgaattgcaggacacattgatcatcgacacttcgaacgcacttgcggccccgg

SEQ ID NO: 65012 - DNA, 120 bp, Homo sapiens
  misc_feature: 524 for SV(C|O) and 5.8S
acccggggccgcaagtgcgttcgaagtgtcgatgatcaatgtgtcctgcaattcacattaattctcgcagctagctgcgttcttcatcgacgcacgagccgagtgatccaccgctaagag

SEQ ID NO: 65013 - DNA, 120 bp, Homo sapiens; identical to SEQ ID NO: 49047
  misc_feature: 523 for SV(C|O) and 5.8S

SEQ ID NO: 65014 - DNA, 120 bp, Homo sapiens
  misc_feature: 523 for SV(C|O) and 5.8S
aacccggggccgcaagtgcgttcgaagtgtcgatgatcaatgtgtcctgcaattcacattaattctcgcagctagctgcgttcttcatcgacgcacgagccgagtgatccaccgctaaga

SEQ ID NO: 65015 - DNA, 120 bp, Homo sapiens
  misc_feature: 522 for SV(C|O) and 5.8S
aggaacccggggccgcaagtgcgttcgaagtgtcgatgatcaatgtgtcctgcaattcacattaattctcgcagctagctgcgttcttcatcgacgcacgagccgagtgatccaccgcta

SEQ ID NO: 65016 - DNA, 120 bp, Homo sapiens
  misc_feature: 522 for SV(C|O) and 5.8S
actcttagcggtggatcactcggctcgtgcgtcgatgaagaacgcagctagctgcgagaattaatgtgaattgcaggacacattgatcatcgacacttcgaacgcacttgcggccccggg

SEQ ID NO: 65017 - DNA, 120 bp, Homo sapiens
  misc_feature: 521 for SV(C|O) and 5.8S
ggaggaacccggggccgcaagtgcgttcgaagtgtcgatgatcaatgtgtcctgcaattcacattaattctcgcagctagctgcgttcttcatcgacgcacgagccgagtgatccaccgc

SEQ ID NO: 65018 - DNA, 120 bp, Homo sapiens; identical to SEQ ID NO: 49060
  misc_feature: 521 for SV(C|O) and 5.8S

SEQ ID NO: 65019 - DNA, 120 bp, Homo sapiens; identical to SEQ ID NO: 49052
  misc_feature: 518 for SV(C|O) and 5.8S

SEQ ID NO: 65020 - DNA, 120 bp, Homo sapiens
  misc_feature: 733 for SV(C|O) and 28S
cacgttcgtggggaacctggcgctaaaccattcgtagacgacctgcttctgggtcggggtttcgtacgtagcagagcagctccctcgctgcgatctattgaaagtcagccctcgacacaa

SEQ ID NO: 65021 - DNA, 120 bp, Homo sapiens
  misc_feature: 729 for SV(C|O) and 28S
gttcgtggggaacctggcgctaaaccattcgtagacgacctgcttctgggtcggggtttcgtacgtagcagagcagctccctcgctgcgatctattgaaagtcagccctcgacacaaggg

SEQ ID NO: 65022 - DNA, 120 bp, Homo sapiens
  misc_feature: 729 for SV(C|O) and 28S
acgttcgtggggaacctggcgctaaaccattcgtagacgacctgcttctgggtcggggtttcgtacgtagcagagcagctccctcgctgcgatctattgaaagtcagccctcgacacaag

SEQ ID NO: 65023 - DNA, 120 bp, Homo sapiens
  misc_feature: 723 for SV(C|O) and 28S
ttcgtggggaacctggcgctaaaccattcgtagacgacctgcttctgggtcggggtttcgtacgtagcagagcagctccctcgctgcgatctattgaaagtcagccctcgacacaagggt

SEQ ID NO: 65024 - DNA, 120 bp, Homo sapiens
  misc_feature: 719 for SV(C|O) and 28S
tcgtggggaacctggcgctaaaccattcgtagacgacctgcttctgggtcggggtttcgtacgtagcagagcagctccctcgctgcgatctattgaaagtcagccctcgacacaagggtt

SEQ ID NO: 65025 - DNA, 120 bp, Homo sapiens
  misc_feature: 719 for SV(C|O) and 28S
cgttcgtggggaacctggcgctaaaccattcgtagacgacctgcttctgggtcggggtttcgtacgtagcagagcagctccctcgctgcgatctattgaaagtcagccctcgacacaagg

SEQ ID NO: 65026 - DNA, 120 bp, Homo sapiens; identical to SEQ ID NO: 50822
  misc_feature: 713 for SV(C|O) and 28S

SEQ ID NO: 65027 - DNA, 120 bp, Homo sapiens
  misc_feature: 712 for SV(C|O) and 28S
gcacgttcgtggggaacctggcgctaaaccattcgtagacgacctgcttctgggtcggggtttcgtacgtagcagagcagctccctcgctgcgatctattgaaagtcagccctcgacaca

SEQ ID NO: 65028 - DNA, 120 bp, Homo sapiens; identical to SEQ ID NO: 50784
  misc_feature: 712 for SV(C|O) and 28S

SEQ ID NO: 65029 - DNA, 120 bp, Homo sapiens; identical to SEQ ID NO: 50913
  misc_feature: 710 for SV(C|O) and 28S

SEQ ID NO: 65030 - DNA, 120 bp, Homo sapiens; identical to SEQ ID NO: 50930
  misc_feature: 707 for SV(C|O) and 28S

SEQ ID NO: 65031 - DNA, 120 bp, Homo sapiens; identical to SEQ ID NO: 50971
  misc_feature: 705 for SV(C|O) and 28S

SEQ ID NO: 65032 - DNA, 120 bp, Homo sapiens; identical to SEQ ID NO: 50881
  misc_feature: 704 for SV(C|O) and 28S

SEQ ID NO: 65033 - DNA, 120 bp, Homo sapiens; identical to SEQ ID NO: 50910
  misc_feature: 704 for SV(C|O) and 28S

SEQ ID NO: 65034 - DNA, 120 bp, Homo sapiens
  misc_feature: 703 for SV(C|O) and 28S
ccgcacgttcgtggggaacctggcgctaaaccattcgtagacgacctgcttctgggtcggggtttcgtacgtagcagagcagctccctcgctgcgatctattgaaagtcagccctcgaca

SEQ ID NO: 65035 - DNA, 120 bp, Homo sapiens
  misc_feature: 703 for SV(C|O) and 28S
accgcacgttcgtggggaacctggcgctaaaccattcgtagacgacctgcttctgggtcggggtttcgtacgtagcagagcagctccctcgctgcgatctattgaaagtcagccctcgac

SEQ ID NO: 65036 - DNA, 120 bp, Homo sapiens
  misc_feature: 701 for SV(C|O) and 28S
cgtggggaacctggcgctaaaccattcgtagacgacctgcttctgggtcggggtttcgtacgtagcagagcagctccctcgctgcgatctattgaaagtcagccctcgacacaagggttt

SEQ ID NO: 65037 - DNA, 120 bp, Homo sapiens
  misc_feature: 700 for SV(C|O) and 28S
cgcacgttcgtggggaacctggcgctaaaccattcgtagacgacctgcttctgggtcggggtttcgtacgtagcagagcagctccctcgctgcgatctattgaaagtcagccctcgacac

SEQ ID NO: 65038 - DNA, 120 bp, Homo sapiens
  misc_feature: 700 for SV(C|O) and 28S
cgcaccgcacgttcgtggggaacctggcgctaaaccattcgtagacgacctgcttctgggtcggggtttcgtacgtagcagagcagctccctcgctgcgatctattgaaagtcagccctc

SEQ ID NO: 65039 - DNA, 120 bp, Homo sapiens; identical to SEQ ID NO: 51004
  misc_feature: 699 for SV(C|O) and 28S

SEQ ID NO: 65040 - DNA, 120 bp, Homo sapiens
  misc_feature: 697 for SV(C|O) and 28S
gcaccgcacgttcgtggggaacctggcgctaaaccattcgtagacgacctgcttctgggtcggggtttcgtacgtagcagagcagctccctcgctgcgatctattgaaagtcagccctcg

SEQ ID NO: 65041 - DNA, 120 bp, Homo sapiens; identical to SEQ ID NO: 51007
  misc_feature: 695 for SV(C|O) and 28S

SEQ ID NO: 65042 - DNA, 120 bp, Homo sapiens
  misc_feature: 692 for SV(C|O) and 28S
ctgatgatgtgttgttgccatggtaatcctgctcagtacgagaggaaccgcaggttcagacatttggtgtatgtgcttggctgaggagccaatggggcgaagctaccatctgtgggatta

SEQ ID NO: 65043 - DNA, 120 bp, Homo sapiens
  misc_feature: 691 for SV(C|O) and 28S
gtggggaacctggcgctaaaccattcgtagacgacctgcttctgggtcggggtttcgtacgtagcagagcagctccctcgctgcgatctattgaaagtcagccctcgacacaagggtttg

SEQ ID NO: 65044 - DNA, 120 bp, Homo sapiens
  misc_feature: 687 for SV(C|O) and 28S
ttttcaactttcccttacggtacttgttgactatcggtctcgtgccggtatttagccttagatggagtttaccacccgctttgggctgcattcccaagcaacccgactccgggaagaccc

SEQ ID NO: 65045 - DNA, 120 bp, Homo sapiens
  misc_feature: 687 for SV(C|O) and 28S
agttcttttcaactttcccttacggtacttgttgactatcggtctcgtgccggtatttagccttagatggagtttaccacccgctttgggctgcattcccaagcaacccgactccgggaa

SEQ ID NO: 65046 - DNA, 120 bp, Homo sapiens
  misc_feature: 685 for SV(C|O) and 28S
aagttcttttcaactttcccttacggtacttgttgactatcggtctcgtgccggtatttagccttagatggagtttaccacccgctttgggctgcattcccaagcaacccgactccggga

SEQ ID NO: 65047 - DNA, 120 bp, Homo sapiens
  misc_feature: 683 for SV(C|O) and 28S
cttttcaactttcccttacggtacttgttgactatcggtctcgtgccggtatttagccttagatggagtttaccacccgctttgggctgcattcccaagcaacccgactccgggaagacc

SEQ ID NO: 65048 - DNA, 120 bp, Homo sapiens
  misc_feature: 682 for SV(C|O) and 28S
ttcaactttcccttacggtacttgttgactatcggtctcgtgccggtatttagccttagatggagtttaccacccgctttgggctgcattcccaagcaacccgactccgggaagacccgg

SEQ ID NO: 65049 - DNA, 120 bp, Homo sapiens
  misc_feature: 682 for SV(C|O) and 28S
tctctcttcaaagttcttttcaactttcccttacggtacttgttgactatcggtctcgtgccggtatttagccttagatggagtttaccacccgctttgggctgcattcccaagcaaccc

SEQ ID NO: 65050 - DNA, 120 bp, Homo sapiens
  misc_feature: 682 for SV(C|O) and 28S
ggtacttgttgactatcggtctcgtgccggtatttagccttagatggagtttaccacccgctttgggctgcattcccaagcaacccgactccgggaagacccgggcccggcgcgccgggg

SEQ ID NO: 65051 - DNA, 120 bp, Homo sapiens
  misc_feature: 682 for SV(C|O) and 28S
ggggaacctggcgctaaaccattcgtagacgacctgcttctgggtcggggtttcgtacgtagcagagcagctccctcgctgcgatctattgaaagtcagccctcgacacaagggtttgtc

SEQ ID NO: 65052 - DNA, 120 bp, Homo sapiens
  misc_feature: 682 for SV(C|O) and 28S
aactttcccttacggtacttgttgactatcggtctcgtgccggtatttagccttagatggagtttaccacccgctttgggctgcattcccaagcaacccgactccgggaagacccgggcc

SEQ ID NO: 65053 - DNA, 120 bp, Homo sapiens
  misc_feature: 681 for SV(C|O) and 28S
tggggaacctggcgctaaaccattcgtagacgacctgcttctgggtcggggtttcgtacgtagcagagcagctccctcgctgcgatctattgaaagtcagccctcgacacaagggtttgt

SEQ ID NO: 65054 - DNA, 120 bp, Homo sapiens
  misc_feature: 681 for SV(C|O) and 28S
tgatgatgtgttgttgccatggtaatcctgctcagtacgagaggaaccgcaggttcagacatttggtgtatgtgcttggctgaggagccaatggggcgaagctaccatctgtgggattat

SEQ ID NO: 65055 - DNA, 120 bp, Homo sapiens
  misc_feature: 681 for SV(C|O) and 28S
ctctctcttcaaagttcttttcaactttcccttacggtacttgttgactatcggtctcgtgccggtatttagccttagatggagtttaccacccgctttgggctgcattcccaagcaacc

SEQ ID NO: 65056 - DNA, 120 bp, Homo sapiens
  misc_feature: 680 for SV(C|O) and 28S
ttcttttcaactttcccttacggtacttgttgactatcggtctcgtgccggtatttagccttagatggagtttaccacccgctttgggctgcattcccaagcaacccgactccgggaaga

SEQ ID NO: 65057 - DNA, 120 bp, Homo sapiens
  misc_feature: 680 for SV(C|O) and 28S
actctctcttcaaagttcttttcaactttcccttacggtacttgttgactatcggtctcgtgccggtatttagccttagatggagtttaccacccgctttgggctgcattcccaagcaac

SEQ ID NO: 65058 - DNA, 120 bp, Homo sapiens
  misc_feature: 679 for SV(C|O) and 28S
tcttttcaactttcccttacggtacttgttgactatcggtctcgtgccggtatttagccttagatggagtttaccacccgctttgggctgcattcccaagcaacccgactccgggaagac

SEQ ID NO: 65059 - DNA, 120 bp, Homo sapiens
  misc_feature: 679 for SV(C|O) and 28S
gtacttgttgactatcggtctcgtgccggtatttagccttagatggagtttaccacccgctttgggctgcattcccaagcaacccgactccgggaagacccgggcccggcgcgccggggg

SEQ ID NO: 65060 - DNA, 120 bp, Homo sapiens
  misc_feature: 679 for SV(C|O) and 28S
aaagttcttttcaactttcccttacggtacttgttgactatcggtctcgtgccggtatttagccttagatggagtttaccacccgctttgggctgcattcccaagcaacccgactccggg

SEQ ID NO: 65061 - DNA, 120 bp, Homo sapiens
  misc_feature: 676 for SV(C|O) and 28S
atgatgtgttgttgccatggtaatcctgctcagtacgagaggaaccgcaggttcagacatttggtgtatgtgcttggctgaggagccaatggggcgaagctaccatctgtgggattatga

SEQ ID NO: 65062 - DNA, 120 bp, Homo sapiens
  misc_feature: 676 for SV(C|O) and 28S
caactttcccttacggtacttgttgactatcggtctcgtgccggtatttagccttagatggagtttaccacccgctttgggctgcattcccaagcaacccgactccgggaagacccgggc

SEQ ID NO: 65063 - DNA, 120 bp, Homo sapiens
  misc_feature: 676 for SV(C|O) and 28S
actgatgatgtgttgttgccatggtaatcctgctcagtacgagaggaaccgcaggttcagacatttggtgtatgtgcttggctgaggagccaatggggcgaagctaccatctgtgggatt

SEQ ID NO: 65064 - DNA, 120 bp, Homo sapiens
  misc_feature: 675 for SV(C|O) and 28S
aactctctcttcaaagttcttttcaactttcccttacggtacttgttgactatcggtctcgtgccggtatttagccttagatggagtttaccacccgctttgggctgcattcccaagcaa

SEQ ID NO: 65065 - DNA, 120 bp, Homo sapiens
  misc_feature: 675 for SV(C|O) and 28S
tcaactttcccttacggtacttgttgactatcggtctcgtgccggtatttagccttagatggagtttaccacccgctttgggctgcattcccaagcaacccgactccgggaagacccggg

SEQ ID NO: 65066 - DNA, 120 bp, Homo sapiens
  misc_feature: 675 for SV(C|O) and 28S
gggaacctggcgctaaaccattcgtagacgacctgcttctgggtcggggtttcgtacgtagcagagcagctccctcgctgcgatctattgaaagtcagccctcgacacaagggtttgtcc

SEQ ID NO: 65067 - DNA, 120 bp, Homo sapiens
  misc_feature: 674 for SV(C|O) and 28S
tttcaactttcccttacggtacttgttgactatcggtctcgtgccggtatttagccttagatggagtttaccacccgctttgggctgcattcccaagcaacccgactccgggaagacccg

SEQ ID NO: 65068 - DNA, 120 bp, Homo sapiens
  misc_feature: 674 for SV(C|O) and 28S
tgatgtgttgttgccatggtaatcctgctcagtacgagaggaaccgcaggttcagacatttggtgtatgtgcttggctgaggagccaatggggcgaagctaccatctgtgggattatgac

SEQ ID NO: 65069 - DNA, 120 bp, Homo sapiens
  misc_feature: 673 for SV(C|O) and 28S
aggatcaaaaagcgacgtcgctatgaacgcttggccgccacaagccagttatccctgtggtaacttttctgacacctcctgcttaaaacccaaaaggtcagaaggatcgtgaggccccgc

SEQ ID NO: 65070 - DNA, 120 bp, Homo sapiens
  misc_feature: 672 for SV(C|O) and 28S
gatcaaaaagcgacgtcgctatgaacgcttggccgccacaagccagttatccctgtggtaacttttctgacacctcctgcttaaaacccaaaaggtcagaaggatcgtgaggccccgctt

SEQ ID NO: 65071 - DNA, 120 bp, Homo sapiens
  misc_feature: 672 for SV(C|O) and 28S
acggtacttgttgactatcggtctcgtgccggtatttagccttagatggagtttaccacccgctttgggctgcattcccaagcaacccgactccgggaagacccgggcccggcgcgccgg

SEQ ID NO: 65072 - DNA, 120 bp, Homo sapiens
  misc_feature: 671 for SV(C|O) and 28S
tactgatgatgtgttgttgccatggtaatcctgctcagtacgagaggaaccgcaggttcagacatttggtgtatgtgcttggctgaggagccaatggggcgaagctaccatctgtgggat

SEQ ID NO: 65073 - DNA, 120 bp, Homo sapiens
  misc_feature: 671 for SV(C|O) and 28S
gttcttttcaactttcccttacggtacttgttgactatcggtctcgtgccggtatttagccttagatggagtttaccacccgctttgggctgcattcccaagcaacccgactccgggaag

SEQ ID NO: 65074 - DNA, 120 bp, Homo sapiens
  misc_feature: 671 for SV(C|O) and 28S
atcaaaaagcgacgtcgctatgaacgcttggccgccacaagccagttatccctgtggtaacttttctgacacctcctgcttaaaacccaaaaggtcagaaggatcgtgaggccccgcttt

SEQ ID NO: 65075 - DNA, 120 bp, Homo sapiens
  misc_feature: 670 for SV(C|O) and 28S
cggtacttgttgactatcggtctcgtgccggtatttagccttagatggagtttaccacccgctttgggctgcattcccaagcaacccgactccgggaagacccgggcccggcgcgccggg

SEQ ID NO: 65076 - DNA, 120 bp, Homo sapiens; identical to SEQ ID NO: 49172
  misc_feature: 669 for SV(C|O) and 28S

SEQ ID NO: 65077 - DNA, 120 bp, Homo sapiens
  misc_feature: 668 for SV(C|O) and 28S
gtgttgttgccatggtaatcctgctcagtacgagaggaaccgcaggttcagacatttggtgtatgtgcttggctgaggagccaatggggcgaagctaccatctgtgggattatgactgaa

SEQ ID NO: 65078 - DNA, 120 bp, Homo sapiens
  misc_feature: 668 for SV(C|O) and 28S
gaactctctcttcaaagttcttttcaactttcccttacggtacttgttgactatcggtctcgtgccggtatttagccttagatggagtttaccacccgctttgggctgcattcccaagca

SEQ ID NO: 65079 - DNA, 120 bp, Homo sapiens; identical to SEQ ID NO: 49210
  misc_feature: 668 for SV(C|O) and 28S

SEQ ID NO: 65080 - DNA, 120 bp, Homo sapiens
  misc_feature: 668 for SV(C|O) and 28S
actttcccttacggtacttgttgactatcggtctcgtgccggtatttagccttagatggagtttaccacccgctttgggctgcattcccaagcaacccgactccgggaagacccgggccc

SEQ ID NO: 65081 - DNA, 120 bp, Homo sapiens
  misc_feature: 668 for SV(C|O) and 28S
ctctcttcaaagttcttttcaactttcccttacggtacttgttgactatcggtctcgtgccggtatttagccttagatggagtttaccacccgctttgggctgcattcccaagcaacccg

SEQ ID NO: 65082 - DNA, 120 bp, Homo sapiens
  misc_feature: 667 for SV(C|O) and 28S
caaaaagcgacgtcgctatgaacgcttggccgccacaagccagttatccctgtggtaacttttctgacacctcctgcttaaaacccaaaaggtcagaaggatcgtgaggccccgctttca

SEQ ID NO: 65083 - DNA, 120 bp, Homo sapiens
  misc_feature: 667 for SV(C|O) and 28S
ctactgatgatgtgttgttgccatggtaatcctgctcagtacgagaggaaccgcaggttcagacatttggtgtatgtgcttggctgaggagccaatggggcgaagctaccatctgtggga

SEQ ID NO: 65084 - DNA, 120 bp, Homo sapiens
  misc_feature: 667 for SV(C|O) and 28S
ggatcaaaaagcgacgtcgctatgaacgcttggccgccacaagccagttatccctgtggtaacttttctgacacctcctgcttaaaacccaaaaggtcagaaggatcgtgaggccccgct

SEQ ID NO: 65085 - DNA, 120 bp, Homo sapiens
  misc_feature: 667 for SV(C|O) and 28S
ccctactgatgatgtgttgttgccatggtaatcctgctcagtacgagaggaaccgcaggttcagacatttggtgtatgtgcttggctgaggagccaatggggcgaagctaccatctgtgg

SEQ ID NO: 65086 - DNA, 120 bp, Homo sapiens
  misc_feature: 666 for SV(C|O) and 28S
tgttgttgccatggtaatcctgctcagtacgagaggaaccgcaggttcagacatttggtgtatgtgcttggctgaggagccaatggggcgaagctaccatctgtgggattatgactgaac

SEQ ID NO: 65087 - DNA, 120 bp, Homo sapiens; identical to SEQ ID NO: 50890
  misc_feature: 666 for SV(C|O) and 28S

SEQ ID NO: 65088 - DNA, 120 bp, Homo sapiens
  misc_feature: 666 for SV(C|O) and 28S
gaaggatcaaaaagcgacgtcgctatgaacgcttggccgccacaagccagttatccctgtggtaacttttctgacacctcctgcttaaaacccaaaaggtcagaaggatcgtgaggcccc

SEQ ID NO: 65089 - DNA, 120 bp, Homo sapiens; identical to SEQ ID NO: 50987
  misc_feature: 666 for SV(C|O) and 28S

SEQ ID NO: 65090 - DNA, 120 bp, Homo sapiens
  misc_feature: 666 for SV(C|O) and 28S
cctactgatgatgtgttgttgccatggtaatcctgctcagtacgagaggaaccgcaggttcagacatttggtgtatgtgcttggctgaggagccaatggggcgaagctaccatctgtggg

SEQ ID NO: 65091 - DNA, 120 bp, Homo sapiens
  misc_feature: 666 for SV(C|O) and 28S
atgtgttgttgccatggtaatcctgctcagtacgagaggaaccgcaggttcagacatttggtgtatgtgcttggctgaggagccaatggggcgaagctaccatctgtgggattatgactg

SEQ ID NO: 65092 - DNA, 120 bp, Homo sapiens
  misc_feature: 665 for SV(C|O) and 28S
gtgaagcagaattcaccaagcgttggattgttcacccactaatagggaacgtgagctgggtttagaccgtcgtgagacaggttagttttaccctactgatgatgtgttgttgccatggta

SEQ ID NO: 65093 - DNA, 120 bp, Homo sapiens
  misc_feature: 665 for SV(C|O) and 28S
gatgatgtgttgttgccatggtaatcctgctcagtacgagaggaaccgcaggttcagacatttggtgtatgtgcttggctgaggagccaatggggcgaagctaccatctgtgggattatg

SEQ ID NO: 65094 - DNA, 120 bp, Homo sapiens; identical to SEQ ID NO: 49240
  misc_feature: 665 for SV(C|O) and 28S

SEQ ID NO: 65095 - DNA, 120 bp, Homo sapiens
  misc_feature: 664 for SV(C|O) and 28S
ttgaactctctcttcaaagttcttttcaactttcccttacggtacttgttgactatcggtctcgtgccggtatttagccttagatggagtttaccacccgctttgggctgcattcccaag

SEQ ID NO: 65096 - DNA, 120 bp, Homo sapiens
  misc_feature: 664 for SV(C|O) and 28S
tgaactctctcttcaaagttcttttcaactttcccttacggtacttgttgactatcggtctcgtgccggtatttagccttagatggagtttaccacccgctttgggctgcattcccaagc

SEQ ID NO: 65097 - DNA, 120 bp, Homo sapiens
  misc_feature: 664 for SV(C|O) and 28S
tcttcaaagttcttttcaactttcccttacggtacttgttgactatcggtctcgtgccggtatttagccttagatggagtttaccacccgctttgggctgcattcccaagcaacccgact

SEQ ID NO: 65098 - DNA, 120 bp, Homo sapiens
  misc_feature: 664 for SV(C|O) and 28S
tcaaaaagcgacgtcgctatgaacgcttggccgccacaagccagttatccctgtggtaacttttctgacacctcctgcttaaaacccaaaaggtcagaaggatcgtgaggccccgctttc

SEQ ID NO: 65099 - DNA, 120 bp, Homo sapiens
  misc_feature: 664 for SV(C|O) and 28S
caaagttcttttcaactttcccttacggtacttgttgactatcggtctcgtgccggtatttagccttagatggagtttaccacccgctttgggctgcattcccaagcaacccgactccgg

SEQ ID NO: 65100 - DNA, 120 bp, Homo sapiens
  misc_feature: 663 for SV(C|O) and 28S
tgtgttgttgccatggtaatcctgctcagtacgagaggaaccgcaggttcagacatttggtgtatgtgcttggctgaggagccaatggggcgaagctaccatctgtgggattatgactga

SEQ ID NO: 65101 - DNA, 120 bp, Homo sapiens
  misc_feature: 663 for SV(C|O) and 28S
gaagcagaattcaccaagcgttggattgttcacccactaatagggaacgtgagctgggtttagaccgtcgtgagacaggttagttttaccctactgatgatgtgttgttgccatggtaat

SEQ ID NO: 65102 - DNA, 120 bp, Homo sapiens; identical to SEQ ID NO: 49320
  misc_feature: 663 for SV(C|O) and 28S

SEQ ID NO: 65103 - DNA, 120 bp, Homo sapiens; identical to SEQ ID NO: 50888
  misc_feature: 662 for SV(C|O) and 28S

SEQ ID NO: 65104 - DNA, 120 bp, Homo sapiens
  misc_feature: 662 for SV(C|O) and 28S
ctcttcaaagttcttttcaactttcccttacggtacttgttgactatcggtctcgtgccggtatttagccttagatggagtttaccacccgctttgggctgcattcccaagcaacccgac

SEQ ID NO: 65105 - DNA, 120 bp, Homo sapiens
  misc_feature: 662 for SV(C|O) and 28S
gatgtgttgttgccatggtaatcctgctcagtacgagaggaaccgcaggttcagacatttggtgtatgtgcttggctgaggagccaatggggcgaagctaccatctgtgggattatgact

SEQ ID NO: 65106 - DNA, 120 bp, Homo sapiens
  misc_feature: 662 for SV(C|O) and 28S
ctttcccttacggtacttgttgactatcggtctcgtgccggtatttagccttagatggagtttaccacccgctttgggctgcattcccaagcaacccgactccgggaagacccgggcccg

SEQ ID NO: 65107 - DNA, 120 bp, Homo sapiens; identical to SEQ ID NO: 49180
  misc_feature: 662 for SV(C|O) and 28S

SEQ ID NO: 65108 - DNA, 120 bp, Homo sapiens; identical to SEQ ID NO: 49505
  misc_feature: 662 for SV(C|O) and 28S

SEQ ID NO: 65109 - DNA, 120 bp, Homo sapiens
  misc_feature: 661 for SV(C|O) and 28S
ttcaaagttcttttcaactttcccttacggtacttgttgactatcggtctcgtgccggtatttagccttagatggagtttaccacccgctttgggctgcattcccaagcaacccgactcc

SEQ ID NO: 65110 - DNA, 120 bp, Homo sapiens
  misc_feature: 661 for SV(C|O) and 28S
gttgttgccatggtaatcctgctcagtacgagaggaaccgcaggttcagacatttggtgtatgtgcttggctgaggagccaatggggcgaagctaccatctgtgggattatgactgaacg

SEQ ID NO: 65111 - DNA, 120 bp, Homo sapiens; identical to SEQ ID NO: 50967
  misc_feature: 661 for SV(C|O) and 28S

SEQ ID NO: 65112 - DNA, 120 bp, Homo sapiens; identical to SEQ ID NO: 51111
  misc_feature: 660 for SV(C|O) and 28S

SEQ ID NO: 65113 - DNA, 120 bp, Homo sapiens
  misc_feature: 660 for SV(C|O) and 28S
cttgaactctctcttcaaagttcttttcaactttcccttacggtacttgttgactatcggtctcgtgccggtatttagccttagatggagtttaccacccgctttgggctgcattcccaa

SEQ ID NO: 65114 - DNA, 120 bp, Homo sapiens; identical to SEQ ID NO: 50939
  misc_feature: 660 for SV(C|O) and 28S

SEQ ID NO: 65115 - DNA, 120 bp, Homo sapiens
  misc_feature: 660 for SV(C|O) and 28S
tgaagcagaattcaccaagcgttggattgttcacccactaatagggaacgtgagctgggtttagaccgtcgtgagacaggttagttttaccctactgatgatgtgttgttgccatggtaa

SEQ ID NO: 65116 - DNA, 120 bp, Homo sapiens
  misc_feature: 659 for SV(C|O) and 28S
tacggtacttgttgactatcggtctcgtgccggtatttagccttagatggagtttaccacccgctttgggctgcattcccaagcaacccgactccgggaagacccgggcccggcgcgccg

SEQ ID NO: 65117 - DNA, 120 bp, Homo sapiens; identical to SEQ ID NO: 50882
  misc_feature: 659 for SV(C|O) and 28S

SEQ ID NO: 65118 - DNA, 120 bp, Homo sapiens; identical to SEQ ID NO: 49232
  misc_feature: 659 for SV(C|O) and 28S

SEQ ID NO: 65119 - DNA, 120 bp, Homo sapiens
  misc_feature: 658 for SV(C|O) and 28S
tgttgccatggtaatcctgctcagtacgagaggaaccgcaggttcagacatttggtgtatgtgcttggctgaggagccaatggggcgaagctaccatctgtgggattatgactgaacgcc

SEQ ID NO: 65120 - DNA, 120 bp, Homo sapiens
  misc_feature: 658 for SV(C|O) and 28S
tctcttcaaagttcttttcaactttcccttacggtacttgttgactatcggtctcgtgccggtatttagccttagatggagtttaccacccgctttgggctgcattcccaagcaacccga

SEQ ID NO: 65121 - DNA, 120 bp, Homo sapiens
  misc_feature: 658 for SV(C|O) and 28S
gttgccatggtaatcctgctcagtacgagaggaaccgcaggttcagacatttggtgtatgtgcttggctgaggagccaatggggcgaagctaccatctgtgggattatgactgaacgcct

SEQ ID NO: 65122 - DNA, 120 bp, Homo sapiens
  misc_feature: 658 for SV(C|O) and 28S
aaaaagcgacgtcgctatgaacgcttggccgccacaagccagttatccctgtggtaacttttctgacacctcctgcttaaaacccaaaaggtcagaaggatcgtgaggccccgctttcac

SEQ ID NO: 65123 - DNA, 120 bp, Homo sapiens; identical to SEQ ID NO: 50974
  misc_feature: 657 for SV(C|O) and 28S

SEQ ID NO: 65124 - DNA, 120 bp, Homo sapiens
  misc_feature: 657 for SV(C|O) and 28S
ggaacctggcgctaaaccattcgtagacgacctgcttctgggtcggggtttcgtacgtagcagagcagctccctcgctgcgatctattgaaagtcagccctcgacacaagggtttgtccg

SEQ ID NO: 65125 - DNA, 120 bp, Homo sapiens; identical to SEQ ID NO: 49231
  misc_feature: 657 for SV(C|O) and 28S

SEQ ID NO: 65126 - DNA, 120 bp, Homo sapiens; identical to SEQ ID NO: 49311
  misc_feature: 657 for SV(C|O) and 28S

SEQ ID NO: 65127 - DNA, 120 bp, Homo sapiens
  misc_feature: 656 for SV(C|O) and 28S
tgtgaagcagaattcaccaagcgttggattgttcacccactaatagggaacgtgagctgggtttagaccgtcgtgagacaggttagttttaccctactgatgatgtgttgttgccatggt

SEQ ID NO: 65128 - DNA, 120 bp, Homo sapiens
  misc_feature: 656 for SV(C|O) and 28S
cgaaggatcaaaaagcgacgtcgctatgaacgcttggccgccacaagccagttatccctgtggtaacttttctgacacctcctgcttaaaacccaaaaggtcagaaggatcgtgaggccc

SEQ ID NO: 65129 - DNA, 120 bp, Homo sapiens
  misc_feature: 656 for SV(C|O) and 28S
atcgaaggatcaaaaagcgacgtcgctatgaacgcttggccgccacaagccagttatccctgtggtaacttttctgacacctcctgcttaaaacccaaaaggtcagaaggatcgtgaggc

SEQ ID NO: 65130 - DNA, 120 bp, Homo sapiens
  misc_feature: 656 for SV(C|O) and 28S
aagcagaattcaccaagcgttggattgttcacccactaatagggaacgtgagctgggtttagaccgtcgtgagacaggttagttttaccctactgatgatgtgttgttgccatggtaatc

SEQ ID NO: 65131 - DNA, 120 bp, Homo sapiens
  misc_feature: 656 for SV(C|O) and 28S
cttcaaagttcttttcaactttcccttacggtacttgttgactatcggtctcgtgccggtatttagccttagatggagtttaccacccgctttgggctgcattcccaagcaacccgactc

SEQ ID NO: 65132 - DNA, 120 bp, Homo sapiens; identical to SEQ ID NO: 49277
  misc_feature: 656 for SV(C|O) and 28S

SEQ ID NO: 65133 - DNA, 120 bp, Homo sapiens; identical to SEQ ID NO: 49278
  misc_feature: 656 for SV(C|O) and 28S

SEQ ID NO: 65134 - DNA, 120 bp, Homo sapiens; identical to SEQ ID NO: 49147
  misc_feature: 655 for SV(C|O) and 28S

SEQ ID NO: 65135 - DNA, 120 bp, Homo sapiens
  misc_feature: 655 for SV(C|O) and 28S
ttgccatggtaatcctgctcagtacgagaggaaccgcaggttcagacatttggtgtatgtgcttggctgaggagccaatggggcgaagctaccatctgtgggattatgactgaacgcctc

SEQ ID NO: 65136 - DNA, 120 bp, Homo sapiens; identical to SEQ ID NO: 49883
  misc_feature: 655 for SV(C|O) and 28S

SEQ ID NO: 65137 - DNA, 120 bp, Homo sapiens
  misc_feature: 655 for SV(C|O) and 28S
aaggatcaaaaagcgacgtcgctatgaacgcttggccgccacaagccagttatccctgtggtaacttttctgacacctcctgcttaaaacccaaaaggtcagaaggatcgtgaggccccg

SEQ ID NO: 65138 - DNA, 120 bp, Homo sapiens
  misc_feature: 655 for SV(C|O) and 28S
catcgaaggatcaaaaagcgacgtcgctatgaacgcttggccgccacaagccagttatccctgtggtaacttttctgacacctcctgcttaaaacccaaaaggtcagaaggatcgtgagg

SEQ ID NO: 65139 - DNA, 120 bp, Homo sapiens; identical to SEQ ID NO: 49234
  misc_feature: 655 for SV(C|O) and 28S

SEQ ID NO: 65140 - DNA, 120 bp, Homo sapiens
  misc_feature: 654 for SV(C|O) and 28S
ttgttgccatggtaatcctgctcagtacgagaggaaccgcaggttcagacatttggtgtatgtgcttggctgaggagccaatggggcgaagctaccatctgtgggattatgactgaacgc

SEQ ID NO: 65141 - DNA, 120 bp, Homo sapiens; identical to SEQ ID NO: 51093
  misc_feature: 654 for SV(C|O) and 28S

SEQ ID NO: 65142 - DNA, 120 bp, Homo sapiens; identical to SEQ ID NO: 49211
  misc_feature: 654 for SV(C|O) and 28S

SEQ ID NO: 65143 - DNA, 120 bp, Homo sapiens; identical to SEQ ID NO: 51096
  misc_feature: 654 for SV(C|O) and 28S

SEQ ID NO: 65144 - DNA, 120 bp, Homo sapiens; identical to SEQ ID NO: 50233
  misc_feature: 654 for SV(C|O) and 28S

SEQ ID NO: 65145 - DNA, 120 bp, Homo sapiens
  misc_feature: 653 for SV(C|O) and 28S
agttttaccctactgatgatgtgttgttgccatggtaatcctgctcagtacgagaggaaccgcaggttcagacatttggtgtatgtgcttggctgaggagccaatggggcgaagctacca

SEQ ID NO: 65146 - DNA, 120 bp, Homo sapiens
  misc_feature: 653 for SV(C|O) and 28S
tcccttacggtacttgttgactatcggtctcgtgccggtatttagccttagatggagtttaccacccgctttgggctgcattcccaagcaacccgactccgggaagacccgggcccggcg

SEQ ID NO: 65147 - DNA, 120 bp, Homo sapiens; identical to SEQ ID NO: 49215
  misc_feature: 653 for SV(C|O) and 28S

SEQ ID NO: 65148 - DNA, 120 bp, Homo sapiens
  misc_feature: 653 for SV(C|O) and 28S
ccttacggtacttgttgactatcggtctcgtgccggtatttagccttagatggagtttaccacccgctttgggctgcattcccaagcaacccgactccgggaagacccgggcccggcgcg

SEQ ID NO: 65149 - DNA, 120 bp, Homo sapiens; identical to SEQ ID NO: 50254
  misc_feature: 653 for SV(C|O) and 28S

SEQ ID NO: 65150 - DNA, 120 bp, Homo sapiens
  misc_feature: 652 for SV(C|O) and 28S
ttacggtacttgttgactatcggtctcgtgccggtatttagccttagatggagtttaccacccgctttgggctgcattcccaagcaacccgactccgggaagacccgggcccggcgcgcc

SEQ ID NO: 65151 - DNA, 120 bp, Homo sapiens; identical to SEQ ID NO: 50949
  misc_feature: 652 for SV(C|O) and 28S

SEQ ID NO: 65152 - DNA, 120 bp, Homo sapiens
  misc_feature: 652 for SV(C|O) and 28S
tcaaagttcttttcaactttcccttacggtacttgttgactatcggtctcgtgccggtatttagccttagatggagtttaccacccgctttgggctgcattcccaagcaacccgactccg

SEQ ID NO: 65153 - DNA, 120 bp, Homo sapiens
  misc_feature: 652 for SV(C|O) and 28S
catggtaatcctgctcagtacgagaggaaccgcaggttcagacatttggtgtatgtgcttggctgaggagccaatggggcgaagctaccatctgtgggattatgactgaacgcctctaag

SEQ ID NO: 65154 - DNA, 120 bp, Homo sapiens
  misc_feature: 651 for SV(C|O) and 28S
tttcccttacggtacttgttgactatcggtctcgtgccggtatttagccttagatggagtttaccacccgctttgggctgcattcccaagcaacccgactccgggaagacccgggcccgg

SEQ ID NO: 65155 - DNA, 120 bp, Homo sapiens; identical to SEQ ID NO: 49592
  misc_feature: 651 for SV(C|O) and 28S

SEQ ID NO: 65156 - DNA, 120 bp, Homo sapiens
  misc_feature: 651 for SV(C|O) and 28S
cccttacggtacttgttgactatcggtctcgtgccggtatttagccttagatggagtttaccacccgctttgggctgcattcccaagcaacccgactccgggaagacccgggcccggcgc

SEQ ID NO: 65157 - DNA, 120 bp, Homo sapiens
  misc_feature: 650 for SV(C|O) and 28S
tcttgaactctctcttcaaagttcttttcaactttcccttacggtacttgttgactatcggtctcgtgccggtatttagccttagatggagtttaccacccgctttgggctgcattccca

SEQ ID NO: 65158 - DNA, 120 bp, Homo sapiens
  misc_feature: 650 for SV(C|O) and 28S
tcgaaggatcaaaaagcgacgtcgctatgaacgcttggccgccacaagccagttatccctgtggtaacttttctgacacctcctgcttaaaacccaaaaggtcagaaggatcgtgaggcc

SEQ ID NO: 65159 - DNA, 120 bp, Homo sapiens
  misc_feature: 650 for SV(C|O) and 28S
tagttttaccctactgatgatgtgttgttgccatggtaatcctgctcagtacgagaggaaccgcaggttcagacatttggtgtatgtgcttggctgaggagccaatggggcgaagctacc

SEQ ID NO: 65160 - DNA, 120 bp, Homo sapiens
  misc_feature: 650 for SV(C|O) and 28S
acgaatacagaccgtgaaagcggggcctcacgatccttctgaccttttgggttttaagcaggaggtgtcagaaaagttaccacagggataactggcttgtggcggccaagcgttcatagc

SEQ ID NO: 65161 - DNA, 120 bp, Homo sapiens; identical to SEQ ID NO: 49732
  misc_feature: 650 for SV(C|O) and 28S

SEQ ID NO: 65162 - DNA, 120 bp, Homo sapiens; identical to SEQ ID NO: 49519
  misc_feature: 649 for SV(C|O) and 28S

SEQ ID NO: 65163 - DNA, 120 bp, Homo sapiens; identical to SEQ ID NO: 49309
  misc_feature: 649 for SV(C|O) and 28S

SEQ ID NO: 65164 - DNA, 120 bp, Homo sapiens
  misc_feature: 649 for SV(C|O) and 28S
gttttaccctactgatgatgtgttgttgccatggtaatcctgctcagtacgagaggaaccgcaggttcagacatttggtgtatgtgcttggctgaggagccaatggggcgaagctaccat

SEQ ID NO: 65165 - DNA, 120 bp, Homo sapiens
  misc_feature: 649 for SV(C|O) and 28S
gaacctggcgctaaaccattcgtagacgacctgcttctgggtcggggtttcgtacgtagcagagcagctccctcgctgcgatctattgaaagtcagccctcgacacaagggtttgtccgc

SEQ ID NO: 65166 - DNA, 120 bp, Homo sapiens
  misc_feature: 649 for SV(C|O) and 28S
gccctcttgaactctctcttcaaagttcttttcaactttcccttacggtacttgttgactatcggtctcgtgccggtatttagccttagatggagtttaccacccgctttgggctgcatt

SEQ ID NO: 65167 - DNA, 120 bp, Homo sapiens
  misc_feature: 649 for SV(C|O) and 28S
aaaagcgacgtcgctatgaacgcttggccgccacaagccagttatccctgtggtaacttttctgacacctcctgcttaaaacccaaaaggtcagaaggatcgtgaggccccgctttcacg

SEQ ID NO: 65168 - DNA, 120 bp, Homo sapiens; identical to SEQ ID NO: 51069
  misc_feature: 648 for SV(C|O) and 28S

SEQ ID NO: 65169 - DNA, 120 bp, Homo sapiens
  misc_feature: 648 for SV(C|O) and 28S
tctgaacctgcggttcctctcgtactgagcaggattaccatggcaacaacacatcatcagtagggtaaaactaacctgtctcacgacggtctaaacccagctcacgttccctattagtgg

SEQ ID NO: 65170 - DNA, 120 bp, Homo sapiens
  misc_feature: 648 for SV(C|O) and 28S
acatcgaaggatcaaaaagcgacgtcgctatgaacgcttggccgccacaagccagttatccctgtggtaacttttctgacacctcctgcttaaaacccaaaaggtcagaaggatcgtgag

SEQ ID NO: 65171 - DNA, 120 bp, Homo sapiens
  misc_feature: 647 for SV(C|O) and 28S
ttcccttacggtacttgttgactatcggtctcgtgccggtatttagccttagatggagtttaccacccgctttgggctgcattcccaagcaacccgactccgggaagacccgggcccggc

SEQ ID NO: 65172 - DNA, 120 bp, Homo sapiens
  misc_feature: 647 for SV(C|O) and 28S
tggtaatcctgctcagtacgagaggaaccgcaggttcagacatttggtgtatgtgcttggctgaggagccaatggggcgaagctaccatctgtgggattatgactgaacgcctctaagtc

SEQ ID NO: 65173 - DNA, 120 bp, Homo sapiens
  misc_feature: 647 for SV(C|O) and 28S
tgccatggtaatcctgctcagtacgagaggaaccgcaggttcagacatttggtgtatgtgcttggctgaggagccaatggggcgaagctaccatctgtgggattatgactgaacgcctct

SEQ ID NO: 65174 - DNA, 120 bp, Homo sapiens
  misc_feature: 647 for SV(C|O) and 28S
aacctggcgctaaaccattcgtagacgacctgcttctgggtcggggtttcgtacgtagcagagcagctccctcgctgcgatctattgaaagtcagccctcgacacaagggtttgtccgcg

SEQ ID NO: 65175 - DNA, 120 bp, Homo sapiens
  misc_feature: 646 for SV(C|O) and 28S
ttagttttaccctactgatgatgtgttgttgccatggtaatcctgctcagtacgagaggaaccgcaggttcagacatttggtgtatgtgcttggctgaggagccaatggggcgaagctac

SEQ ID NO: 65176 - DNA, 120 bp, Homo sapiens; identical to SEQ ID NO: 49265
  misc_feature: 646 for SV(C|O) and 28S

SEQ ID NO: 65177 - DNA, 120 bp, Homo sapiens
  misc_feature: 646 for SV(C|O) and 28S
tacgaatacagaccgtgaaagcggggcctcacgatccttctgaccttttgggttttaagcaggaggtgtcagaaaagttaccacagggataactggcttgtggcggccaagcgttcatag

SEQ ID NO: 65178 - DNA, 120 bp, Homo sapiens; identical to SEQ ID NO: 49920
  misc_feature: 646 for SV(C|O) and 28S

SEQ ID NO: 65179 - DNA, 120 bp, Homo sapiens
  misc_feature: 646 for SV(C|O) and 28S
ctcttgaactctctcttcaaagttcttttcaactttcccttacggtacttgttgactatcggtctcgtgccggtatttagccttagatggagtttaccacccgctttgggctgcattccc

SEQ ID NO: 65180 - DNA, 120 bp, Homo sapiens; identical to SEQ ID NO: 49851
  misc_feature: 646 for SV(C|O) and 28S

SEQ ID NO: 65181 - DNA, 120 bp, Homo sapiens; identical to SEQ ID NO: 50089
  misc_feature: 645 for SV(C|O) and 28S

SEQ ID NO: 65182 - DNA, 120 bp, Homo sapiens
  misc_feature: 645 for SV(C|O) and 28S
ctgaacctgcggttcctctcgtactgagcaggattaccatggcaacaacacatcatcagtagggtaaaactaacctgtctcacgacggtctaaacccagctcacgttccctattagtggg

SEQ ID NO: 65183 - DNA, 120 bp, Homo sapiens; identical to SEQ ID NO: 50114
  misc_feature: 645 for SV(C|O) and 28S

SEQ ID NO: 65184 - DNA, 120 bp, Homo sapiens; identical to SEQ ID NO: 49518
  misc_feature: 644 for SV(C|O) and 28S

SEQ ID NO: 65185 - DNA, 120 bp, Homo sapiens; identical to SEQ ID NO: 49254
  misc_feature: 644 for SV(C|O) and 28S

SEQ ID NO: 65186 - DNA, 120 bp, Homo sapiens; identical to SEQ ID NO: 49235
  misc_feature: 644 for SV(C|O) and 28S

SEQ ID NO: 65187 - DNA, 120 bp, Homo sapiens
  misc_feature: 644 for SV(C|O) and 28S
gacatcgaaggatcaaaaagcgacgtcgctatgaacgcttggccgccacaagccagttatccctgtggtaacttttctgacacctcctgcttaaaacccaaaaggtcagaaggatcgtga

SEQ ID NO: 65188 - DNA, 120 bp, Homo sapiens; identical to SEQ ID NO: 50131
  misc_feature: 644 for SV(C|O) and 28S

SEQ ID NO: 65189 - DNA, 120 bp, Homo sapiens
  misc_feature: 644 for SV(C|O) and 28S
cttacggtacttgttgactatcggtctcgtgccggtatttagccttagatggagtttaccacccgctttgggctgcattcccaagcaacccgactccgggaagacccgggcccggcgcgc

SEQ ID NO: 65190 - DNA, 120 bp, Homo sapiens; identical to SEQ ID NO: 51013
  misc_feature: 644 for SV(C|O) and 28S

SEQ ID NO: 65191 - DNA, 120 bp, Homo sapiens; identical to SEQ ID NO: 49459
  misc_feature: 643 for SV(C|O) and 28S

SEQ ID NO: 65192 - DNA, 120 bp, Homo sapiens; identical to SEQ ID NO: 49238
  misc_feature: 643 for SV(C|O) and 28S

SEQ ID NO: 65193 - DNA, 120 bp, Homo sapiens; identical to SEQ ID NO: 50704
  misc_feature: 643 for SV(C|O) and 28S

SEQ ID NO: 65194 - DNA, 120 bp, Homo sapiens
  misc_feature: 643 for SV(C|O) and 28S
cctcttgaactctctcttcaaagttcttttcaactttcccttacggtacttgttgactatcggtctcgtgccggtatttagccttagatggagtttaccacccgctttgggctgcattcc

SEQ ID NO: 65195 - DNA, 120 bp, Homo sapiens; identical to SEQ ID NO: 49190
  misc_feature: 643 for SV(C|O) and 28S

SEQ ID NO: 65196 - DNA, 120 bp, Homo sapiens
  misc_feature: 643 for SV(C|O) and 28S
atggtaatcctgctcagtacgagaggaaccgcaggttcagacatttggtgtatgtgcttggctgaggagccaatggggcgaagctaccatctgtgggattatgactgaacgcctctaagt

SEQ ID NO: 65197 - DNA, 120 bp, Homo sapiens; identical to SEQ ID NO: 49295
  misc_feature: 642 for SV(C|O) and 28S

SEQ ID NO: 65198 - DNA, 120 bp, Homo sapiens; identical to SEQ ID NO: 49256
  misc_feature: 642 for SV(C|O) and 28S

SEQ ID NO: 65199 - DNA, 120 bp, Homo sapiens
  misc_feature: 642 for SV(C|O) and 28S
agcagaattcaccaagcgttggattgttcacccactaatagggaacgtgagctgggtttagaccgtcgtgagacaggttagttttaccctactgatgatgtgttgttgccatggtaatcc

SEQ ID NO: 65200 - DNA, 120 bp, Homo sapiens
  misc_feature: 641 for SV(C|O) and 28S
ccatggtaatcctgctcagtacgagaggaaccgcaggttcagacatttggtgtatgtgcttggctgaggagccaatggggcgaagctaccatctgtgggattatgactgaacgcctctaa

SEQ ID NO: 65201 - DNA, 120 bp, Homo sapiens
  misc_feature: 641 for SV(C|O) and 28S
ccctcttgaactctctcttcaaagttcttttcaactttcccttacggtacttgttgactatcggtctcgtgccggtatttagccttagatggagtttaccacccgctttgggctgcattc

SEQ ID NO: 65202 - DNA, 120 bp, Homo sapiens; identical to SEQ ID NO: 51024
  misc_feature: 641 for SV(C|O) and 28S

SEQ ID NO: 65203 - DNA, 120 bp, Homo sapiens; identical to SEQ ID NO: 50989
  misc_feature: 641 for SV(C|O) and 28S

SEQ ID NO: 65204 - DNA, 120 bp, Homo sapiens; identical to SEQ ID NO: 51067
  misc_feature: 641 for SV(C|O) and 28S

SEQ ID NO: 65205 - DNA, 120 bp, Homo sapiens
  misc_feature: 640 for SV(C|O) and 28S
gccatggtaatcctgctcagtacgagaggaaccgcaggttcagacatttggtgtatgtgcttggctgaggagccaatggggcgaagctaccatctgtgggattatgactgaacgcctcta

SEQ ID NO: 65206 - DNA, 120 bp, Homo sapiens
  misc_feature: 640 for SV(C|O) and 28S
aatgtctgaacctgcggttcctctcgtactgagcaggattaccatggcaacaacacatcatcagtagggtaaaactaacctgtctcacgacggtctaaacccagctcacgttccctatta

SEQ ID NO: 65207 - DNA, 120 bp, Homo sapiens
  misc_feature: 640 for SV(C|O) and 28S
ggttagttttaccctactgatgatgtgttgttgccatggtaatcctgctcagtacgagaggaaccgcaggttcagacatttggtgtatgtgcttggctgaggagccaatggggcgaagct

SEQ ID NO: 65208 - DNA, 120 bp, Homo sapiens
  misc_feature: 639 for SV(C|O) and 28S
gtctgaacctgcggttcctctcgtactgagcaggattaccatggcaacaacacatcatcagtagggtaaaactaacctgtctcacgacggtctaaacccagctcacgttccctattagtg

SEQ ID NO: 65209 - DNA, 120 bp, Homo sapiens
  misc_feature: 639 for SV(C|O) and 28S
gagggagctgctctgctacgtacgaaaccccgacccagaagcaggtcgtctacgaatggtttagcgccaggttccccacgaacgtgcggtgcgtgacgggcgagggggcggccgcctttc

SEQ ID NO: 65210 - DNA, 120 bp, Homo sapiens
  misc_feature: 637 for SV(C|O) and 28S
aatcctgctcagtacgagaggaaccgcaggttcagacatttggtgtatgtgcttggctgaggagccaatggggcgaagctaccatctgtgggattatgactgaacgcctctaagtcagaa

SEQ ID NO: 65211 - DNA, 120 bp, Homo sapiens
  misc_feature: 637 for SV(C|O) and 28S
tgaacctgcggttcctctcgtactgagcaggattaccatggcaacaacacatcatcagtagggtaaaactaacctgtctcacgacggtctaaacccagctcacgttccctattagtgggt

SEQ ID NO: 65212 - DNA, 120 bp, Homo sapiens
  misc_feature: 637 for SV(C|O) and 28S
agggagctgctctgctacgtacgaaaccccgacccagaagcaggtcgtctacgaatggtttagcgccaggttccccacgaacgtgcggtgcgtgacgggcgagggggcggccgcctttcc

SEQ ID NO: 65213 - DNA, 120 bp, Homo sapiens
  misc_feature: 636 for SV(C|O) and 28S
tgagacaggttagttttaccctactgatgatgtgttgttgccatggtaatcctgctcagtacgagaggaaccgcaggttcagacatttggtgtatgtgcttggctgaggagccaatgggg

SEQ ID NO: 65214 - DNA, 120 bp, Homo sapiens
  misc_feature: 636 for SV(C|O) and 28S
ggtaatcctgctcagtacgagaggaaccgcaggttcagacatttggtgtatgtgcttggctgaggagccaatggggcgaagctaccatctgtgggattatgactgaacgcctctaagtca

SEQ ID NO: 65215 - DNA, 120 bp, Homo sapiens
  misc_feature: 636 for SV(C|O) and 28S
aggttagttttaccctactgatgatgtgttgttgccatggtaatcctgctcagtacgagaggaaccgcaggttcagacatttggtgtatgtgcttggctgaggagccaatggggcgaagc

SEQ ID NO: 65216 - DNA, 120 bp, Homo sapiens
  misc_feature: 636 for SV(C|O) and 28S
atgtctgaacctgcggttcctctcgtactgagcaggattaccatggcaacaacacatcatcagtagggtaaaactaacctgtctcacgacggtctaaacccagctcacgttccctattag

SEQ ID NO: 65217 - DNA, 120 bp, Homo sapiens; identical to SEQ ID NO: 49306
  misc_feature: 636 for SV(C|O) and 28S

SEQ ID NO: 65218 - DNA, 120 bp, Homo sapiens
  misc_feature: 636 for SV(C|O) and 28S
cagaattcaccaagcgttggattgttcacccactaatagggaacgtgagctgggtttagaccgtcgtgagacaggttagttttaccctactgatgatgtgttgttgccatggtaatcctg

SEQ ID NO: 65219 - DNA, 120 bp, Homo sapiens; identical to SEQ ID NO: 50982
  misc_feature: 636 for SV(C|O) and 28S

SEQ ID NO: 65220 - DNA, 120 bp, Homo sapiens; identical to SEQ ID NO: 50817
  misc_feature: 635 for SV(C|O) and 28S

SEQ ID NO: 65221 - DNA, 120 bp, Homo sapiens
  misc_feature: 635 for SV(C|O) and 28S
gtaatcctgctcagtacgagaggaaccgcaggttcagacatttggtgtatgtgcttggctgaggagccaatggggcgaagctaccatctgtgggattatgactgaacgcctctaagtcag

SEQ ID NO: 65222 - DNA, 120 bp, Homo sapiens; identical to SEQ ID NO: 49605
  misc_feature: 635 for SV(C|O) and 28S

SEQ ID NO: 65223 - DNA, 120 bp, Homo sapiens; identical to SEQ ID NO: 49332
  misc_feature: 634 for SV(C|O) and 28S

SEQ ID NO: 65224 - DNA, 120 bp, Homo sapiens
  misc_feature: 634 for SV(C|O) and 28S
gagacaggttagttttaccctactgatgatgtgttgttgccatggtaatcctgctcagtacgagaggaaccgcaggttcagacatttggtgtatgtgcttggctgaggagccaatggggc

SEQ ID NO: 65225 - DNA, 120 bp, Homo sapiens
  misc_feature: 633 for SV(C|O) and 28S
gttagttttaccctactgatgatgtgttgttgccatggtaatcctgctcagtacgagaggaaccgcaggttcagacatttggtgtatgtgcttggctgaggagccaatggggcgaagcta

SEQ ID NO: 65226 - DNA, 120 bp, Homo sapiens; identical to SEQ ID NO: 49261
  misc_feature: 633 for SV(C|O) and 28S

SEQ ID NO: 65227 - DNA, 120 bp, Homo sapiens; identical to SEQ ID NO: 49293
  misc_feature: 633 for SV(C|O) and 28S

SEQ ID NO: 65228 - DNA, 120 bp, Homo sapiens
  misc_feature: 633 for SV(C|O) and 28S
caggttagttttaccctactgatgatgtgttgttgccatggtaatcctgctcagtacgagaggaaccgcaggttcagacatttggtgtatgtgcttggctgaggagccaatggggcgaag

SEQ ID NO: 65229 - DNA, 120 bp, Homo sapiens
  misc_feature: 632 for SV(C|O) and 28S
gcagaattcaccaagcgttggattgttcacccactaatagggaacgtgagctgggtttagaccgtcgtgagacaggttagttttaccctactgatgatgtgttgttgccatggtaatcct

SEQ ID NO: 65230 - DNA, 120 bp, Homo sapiens; identical to SEQ ID NO: 49184
  misc_feature: 632 for SV(C|O) and 28S

SEQ ID NO: 65231 - DNA, 120 bp, Homo sapiens; identical to SEQ ID NO: 50981
  misc_feature: 632 for SV(C|O) and 28S

SEQ ID NO: 65232 - DNA, 120 bp, Homo sapiens
  misc_feature: 632 for SV(C|O) and 28S
gaattcaccaagcgttggattgttcacccactaatagggaacgtgagctgggtttagaccgtcgtgagacaggttagttttaccctactgatgatgtgttgttgccatggtaatcctgct

SEQ ID NO: 65233 - DNA, 120 bp, Homo sapiens; identical to SEQ ID NO: 51045
  misc_feature: 632 for SV(C|O) and 28S

SEQ ID NO: 65234 - DNA, 120 bp, Homo sapiens; identical to SEQ ID NO: 49297
  misc_feature: 631 for SV(C|O) and 28S

SEQ ID NO: 65235 - DNA, 120 bp, Homo sapiens; identical to SEQ ID NO: 49312
  misc_feature: 631 for SV(C|O) and 28S

SEQ ID NO: 65236 - DNA, 120 bp, Homo sapiens; identical to SEQ ID NO: 51020
  misc_feature: 630 for SV(C|O) and 28S

SEQ ID NO: 65237 - DNA, 120 bp, Homo sapiens
  misc_feature: 630 for SV(C|O) and 28S
aattcaccaagcgttggattgttcacccactaatagggaacgtgagctgggtttagaccgtcgtgagacaggttagttttaccctactgatgatgtgttgttgccatggtaatcctgctc

SEQ ID NO: 65238 - DNA, 120 bp, Homo sapiens; identical to SEQ ID NO: 49853
  misc_feature: 629 for SV(C|O) and 28S

SEQ ID NO: 65239 - DNA, 120 bp, Homo sapiens
  misc_feature: 629 for SV(C|O) and 28S
acaggttagttttaccctactgatgatgtgttgttgccatggtaatcctgctcagtacgagaggaaccgcaggttcagacatttggtgtatgtgcttggctgaggagccaatggggcgaa

SEQ ID NO: 65240 - DNA, 120 bp, Homo sapiens
  misc_feature: 629 for SV(C|O) and 28S
ccttggtccgtgtttcaagacgggtcgggtgggtagccgacgtcgccgccgaccccgtgcgctcgctccgccgtccccctcttcgggggacgcgcgcgtggccccgagagaacctccccc

SEQ ID NO: 65241 - DNA, 120 bp, Homo sapiens; identical to SEQ ID NO: 49375
  misc_feature: 629 for SV(C|O) and 28S

SEQ ID NO: 65242 - DNA, 120 bp, Homo sapiens
  misc_feature: 629 for SV(C|O) and 28S
gaacctgcggttcctctcgtactgagcaggattaccatggcaacaacacatcatcagtagggtaaaactaacctgtctcacgacggtctaaacccagctcacgttccctattagtgggtg

SEQ ID NO: 65243 - DNA, 120 bp, Homo sapiens
  misc_feature: 629 for SV(C|O) and 28S
cgccctcttgaactctctcttcaaagttcttttcaactttcccttacggtacttgttgactatcggtctcgtgccggtatttagccttagatggagtttaccacccgctttgggctgcat

SEQ ID NO: 65244 - DNA, 120 bp, Homo sapiens
  misc_feature: 629 for SV(C|O) and 28S
atcctgctcagtacgagaggaaccgcaggttcagacatttggtgtatgtgcttggctgaggagccaatggggcgaagctaccatctgtgggattatgactgaacgcctctaagtcagaat

SEQ ID NO: 65245 - DNA, 120 bp, Homo sapiens
  misc_feature: 628 for SV(C|O) and 28S
tgtctgaacctgcggttcctctcgtactgagcaggattaccatggcaacaacacatcatcagtagggtaaaactaacctgtctcacgacggtctaaacccagctcacgttccctattagt

SEQ ID NO: 65246 - DNA, 120 bp, Homo sapiens
  misc_feature: 628 for SV(C|O) and 28S
gccgacatcgaaggatcaaaaagcgacgtcgctatgaacgcttggccgccacaagccagttatccctgtggtaacttttctgacacctcctgcttaaaacccaaaaggtcagaaggatcg

SEQ ID NO: 65247 - DNA, 120 bp, Homo sapiens
  misc_feature: 628 for SV(C|O) and 28S
agaattcaccaagcgttggattgttcacccactaatagggaacgtgagctgggtttagaccgtcgtgagacaggttagttttaccctactgatgatgtgttgttgccatggtaatcctgc

SEQ ID NO: 65248 - DNA, 120 bp, Homo sapiens; identical to SEQ ID NO: 49342
  misc_feature: 628 for SV(C|O) and 28S

SEQ ID NO: 65249 - DNA, 120 bp, Homo sapiens; identical to SEQ ID NO: 49321
  misc_feature: 627 for SV(C|O) and 28S

SEQ ID NO: 65250 - DNA, 120 bp, Homo sapiens
  misc_feature: 627 for SV(C|O) and 28S
attcaccaagcgttggattgttcacccactaatagggaacgtgagctgggtttagaccgtcgtgagacaggttagttttaccctactgatgatgtgttgttgccatggtaatcctgctca

SEQ ID NO: 65251 - DNA, 120 bp, Homo sapiens
  misc_feature: 627 for SV(C|O) and 28S
gacaggttagttttaccctactgatgatgtgttgttgccatggtaatcctgctcagtacgagaggaaccgcaggttcagacatttggtgtatgtgcttggctgaggagccaatggggcga

SEQ ID NO: 65252 - DNA, 120 bp, Homo sapiens
  misc_feature: 627 for SV(C|O) and 28S
tccttggtccgtgtttcaagacgggtcgggtgggtagccgacgtcgccgccgaccccgtgcgctcgctccgccgtccccctcttcgggggacgcgcgcgtggccccgagagaacctcccc

SEQ ID NO: 65253 - DNA, 120 bp, Homo sapiens
  misc_feature: 626 for SV(C|O) and 28S
acctgcggttcctctcgtactgagcaggattaccatggcaacaacacatcatcagtagggtaaaactaacctgtctcacgacggtctaaacccagctcacgttccctattagtgggtgaa

SEQ ID NO: 65254 - DNA, 120 bp, Homo sapiens; identical to SEQ ID NO: 49181
  misc_feature: 626 for SV(C|O) and 28S

SEQ ID NO: 65255 - DNA, 120 bp, Homo sapiens
  misc_feature: 626 for SV(C|O) and 28S
gtgagacaggttagttttaccctactgatgatgtgttgttgccatggtaatcctgctcagtacgagaggaaccgcaggttcagacatttggtgtatgtgcttggctgaggagccaatggg

SEQ ID NO: 65256 - DNA, 120 bp, Homo sapiens; identical to SEQ ID NO: 49347
  misc_feature: 625 for SV(C|O) and 28S

SEQ ID NO: 65257 - DNA, 120 bp, Homo sapiens
  misc_feature: 625 for SV(C|O) and 28S
taatcctgctcagtacgagaggaaccgcaggttcagacatttggtgtatgtgcttggctgaggagccaatggggcgaagctaccatctgtgggattatgactgaacgcctctaagtcaga

SEQ ID NO: 65258 - DNA, 120 bp, Homo sapiens; identical to SEQ ID NO: 51047
  misc_feature: 625 for SV(C|O) and 28S

SEQ ID NO: 65259 - DNA, 120 bp, Homo sapiens; identical to SEQ ID NO: 49186
  misc_feature: 625 for SV(C|O) and 28S

SEQ ID NO: 65260 - DNA, 120 bp, Homo sapiens; identical to SEQ ID NO: 49572
  misc_feature: 625 for SV(C|O) and 28S

SEQ ID NO: 65261 - DNA, 120 bp, Homo sapiens
  misc_feature: 625 for SV(C|O) and 28S
cttggtccgtgtttcaagacgggtcgggtgggtagccgacgtcgccgccgaccccgtgcgctcgctccgccgtccccctcttcgggggacgcgcgcgtggccccgagagaacctcccccg

SEQ ID NO: 65262 - DNA, 120 bp, Homo sapiens; identical to SEQ ID NO: 50653
  misc_feature: 625 for SV(C|O) and 28S

SEQ ID NO: 65263 - DNA, 120 bp, Homo sapiens
  misc_feature: 625 for SV(C|O) and 28S
agacaggttagttttaccctactgatgatgtgttgttgccatggtaatcctgctcagtacgagaggaaccgcaggttcagacatttggtgtatgtgcttggctgaggagccaatggggcg

SEQ ID NO: 65264 - DNA, 120 bp, Homo sapiens
  misc_feature: 624 for SV(C|O) and 28S
ttggtccgtgtttcaagacgggtcgggtgggtagccgacgtcgccgccgaccccgtgcgctcgctccgccgtccccctcttcgggggacgcgcgcgtggccccgagagaacctcccccgg

SEQ ID NO: 65265 - DNA, 120 bp, Homo sapiens; identical to SEQ ID NO: 49929
  misc_feature: 624 for SV(C|O) and 28S

SEQ ID NO: 65266 - DNA, 120 bp, Homo sapiens
  misc_feature: 624 for SV(C|O) and 28S
aacctgcggttcctctcgtactgagcaggattaccatggcaacaacacatcatcagtagggtaaaactaacctgtctcacgacggtctaaacccagctcacgttccctattagtgggtga

SEQ ID NO: 65267 - DNA, 120 bp, Homo sapiens; identical to SEQ ID NO: 49643
  misc_feature: 624 for SV(C|O) and 28S

SEQ ID NO: 65268 - DNA, 120 bp, Homo sapiens; identical to SEQ ID NO: 49532
  misc_feature: 623 for SV(C|O) and 28S

SEQ ID NO: 65269 - DNA, 120 bp, Homo sapiens
  misc_feature: 623 for SV(C|O) and 28S
cctgcggttcctctcgtactgagcaggattaccatggcaacaacacatcatcagtagggtaaaactaacctgtctcacgacggtctaaacccagctcacgttccctattagtgggtgaac

SEQ ID NO: 65270 - DNA, 120 bp, Homo sapiens; identical to SEQ ID NO: 49717
  misc_feature: 623 for SV(C|O) and 28S

SEQ ID NO: 65271 - DNA, 120 bp, Homo sapiens
  misc_feature: 623 for SV(C|O) and 28S
cgacatcgaaggatcaaaaagcgacgtcgctatgaacgcttggccgccacaagccagttatccctgtggtaacttttctgacacctcctgcttaaaacccaaaaggtcagaaggatcgtg

SEQ ID NO: 65272 - DNA, 120 bp, Homo sapiens; identical to SEQ ID NO: 49214
  misc_feature: 622 for SV(C|O) and 28S

SEQ ID NO: 65273 - DNA, 120 bp, Homo sapiens; identical to SEQ ID NO: 49357
  misc_feature: 622 for SV(C|O) and 28S

SEQ ID NO: 65274 - DNA, 120 bp, Homo sapiens; identical to SEQ ID NO: 49869
  misc_feature: 622 for SV(C|O) and 28S

SEQ ID NO: 65275 - DNA, 120 bp, Homo sapiens; identical to SEQ ID NO: 49296
  misc_feature: 622 for SV(C|O) and 28S

SEQ ID NO: 65276 - DNA, 120 bp, Homo sapiens; identical to SEQ ID NO: 49380
  misc_feature: 621 for SV(C|O) and 28S

SEQ ID NO: 65277 - DNA, 120 bp, Homo sapiens
  misc_feature: 621 for SV(C|O) and 28S
tggtccgtgtttcaagacgggtcgggtgggtagccgacgtcgccgccgaccccgtgcgctcgctccgccgtccccctcttcgggggacgcgcgcgtggccccgagagaacctcccccggg

SEQ ID NO: 65278 - DNA, 120 bp, Homo sapiens
  misc_feature: 621 for SV(C|O) and 28S
ctccttggtccgtgtttcaagacgggtcgggtgggtagccgacgtcgccgccgaccccgtgcgctcgctccgccgtccccctcttcgggggacgcgcgcgtggccccgagagaacctccc

SEQ ID NO: 65279 - DNA, 120 bp, Homo sapiens
  misc_feature: 621 for SV(C|O) and 28S
acctggcgctaaaccattcgtagacgacctgcttctgggtcggggtttcgtacgtagcagagcagctccctcgctgcgatctattgaaagtcagccctcgacacaagggtttgtccgcgc

SEQ ID NO: 65280 - DNA, 120 bp, Homo sapiens; identical to SEQ ID NO: 49504
  misc_feature: 621 for SV(C|O) and 28S

SEQ ID NO: 65281 - DNA, 120 bp, Homo sapiens
  misc_feature: 621 for SV(C|O) and 28S
ccgacatcgaaggatcaaaaagcgacgtcgctatgaacgcttggccgccacaagccagttatccctgtggtaacttttctgacacctcctgcttaaaacccaaaaggtcagaaggatcgt

SEQ ID NO: 65282 - DNA, 120 bp, Homo sapiens; identical to SEQ ID NO: 49225
  misc_feature: 620 for SV(C|O) and 28S

SEQ ID NO: 65283 - DNA, 120 bp, Homo sapiens; identical to SEQ ID NO: 50860
  misc_feature: 620 for SV(C|O) and 28S

SEQ ID NO: 65284 - DNA, 120 bp, Homo sapiens; identical to SEQ ID NO: 49355
  misc_feature: 620 for SV(C|O) and 28S

SEQ ID NO: 65285 - DNA, 120 bp, Homo sapiens; identical to SEQ ID NO: 50931
  misc_feature: 620 for SV(C|O) and 28S

SEQ ID NO: 65286 - DNA, 120 bp, Homo sapiens; identical to SEQ ID NO: 49523
  misc_feature: 620 for SV(C|O) and 28S

SEQ ID NO: 65287 - DNA, 120 bp, Homo sapiens; identical to SEQ ID NO: 49455
  misc_feature: 620 for SV(C|O) and 28S

SEQ ID NO: 65288 - DNA, 120 bp, Homo sapiens; identical to SEQ ID NO: 49604
  misc_feature: 620 for SV(C|O) and 28S

SEQ ID NO: 65289 - DNA, 120 bp, Homo sapiens; identical to SEQ ID NO: 49193
  misc_feature: 620 for SV(C|O) and 28S

SEQ ID NO: 65290 - DNA, 120 bp, Homo sapiens; identical to SEQ ID NO: 49270
  misc_feature: 619 for SV(C|O) and 28S

SEQ ID NO: 65291 - DNA, 120 bp, Homo sapiens; identical to SEQ ID NO: 49567
  misc_feature: 619 for SV(C|O) and 28S

SEQ ID NO: 65292 - DNA, 120 bp, Homo sapiens; identical to SEQ ID NO: 49626
  misc_feature: 619 for SV(C|O) and 28S

SEQ ID NO: 65293 - DNA, 120 bp, Homo sapiens; identical to SEQ ID NO: 51012
  misc_feature: 619 for SV(C|O) and 28S

SEQ ID NO: 65294 - DNA, 120 bp, Homo sapiens; identical to SEQ ID NO: 49230
  misc_feature: 619 for SV(C|O) and 28S

SEQ ID NO: 65295 - DNA, 120 bp, Homo sapiens; identical to SEQ ID NO: 50966
  misc_feature: 619 for SV(C|O) and 28S

SEQ ID NO: 65296 - DNA, 120 bp, Homo sapiens; identical to SEQ ID NO: 49378
  misc_feature: 618 for SV(C|O) and 28S

SEQ ID NO: 65297 - DNA, 120 bp, Homo sapiens; identical to SEQ ID NO: 49675
  misc_feature: 618 for SV(C|O) and 28S

SEQ ID NO: 65298 - DNA, 120 bp, Homo sapiens; identical to SEQ ID NO: 49189
  misc_feature: 618 for SV(C|O) and 28S

SEQ ID NO: 65299 - DNA, 120 bp, Homo sapiens; identical to SEQ ID NO: 49660
  misc_feature: 618 for SV(C|O) and 28S

SEQ ID NO: 65300 - DNA, 120 bp, Homo sapiens; identical to SEQ ID NO: 49852
  misc_feature: 618 for SV(C|O) and 28S

SEQ ID NO: 65301 - DNA, 120 bp, Homo sapiens; identical to SEQ ID NO: 49565
  misc_feature: 617 for SV(C|O) and 28S

SEQ ID NO: 65302 - DNA, 120 bp, Homo sapiens; identical to SEQ ID NO: 49286
  misc_feature: 617 for SV(C|O) and 28S

SEQ ID NO: 65303 - DNA, 120 bp, Homo sapiens; identical to SEQ ID NO: 49669
  misc_feature: 617 for SV(C|O) and 28S

SEQ ID NO: 65304 - DNA, 120 bp, Homo sapiens; identical to SEQ ID NO: 49324
  misc_feature: 617 for SV(C|O) and 28S

SEQ ID NO: 65305 - DNA, 120 bp, Homo sapiens; identical to SEQ ID NO: 49668
  misc_feature: 616 for SV(C|O) and 28S

SEQ ID NO: 65306 - DNA, 120 bp, Homo sapiens
  misc_feature: 616 for SV(C|O) and 28S
tgataggaagagccgacatcgaaggatcaaaaagcgacgtcgctatgaacgcttggccgccacaagccagttatccctgtggtaacttttctgacacctcctgcttaaaacccaaaaggt

SEQ ID NO: 65307 - DNA, 120 bp, Homo sapiens
  misc_feature: 616 for SV(C|O) and 28S
caccaagcgttggattgttcacccactaatagggaacgtgagctgggtttagaccgtcgtgagacaggttagttttaccctactgatgatgtgttgttgccatggtaatcctgctcagta

SEQ ID NO: 65308 - DNA, 120 bp, Homo sapiens; identical to SEQ ID NO: 49191
  misc_feature: 616 for SV(C|O) and 28S

SEQ ID NO: 65309 - DNA, 120 bp, Homo sapiens; identical to SEQ ID NO: 50953
  misc_feature: 616 for SV(C|O) and 28S

SEQ ID NO: 65310 - DNA, 120 bp, Homo sapiens; identical to SEQ ID NO: 49646
  misc_feature: 616 for SV(C|O) and 28S

SEQ ID NO: 65311 - DNA, 120 bp, Homo sapiens; identical to SEQ ID NO: 49781
  misc_feature: 615 for SV(C|O) and 28S

SEQ ID NO: 65312 - DNA, 120 bp, Homo sapiens; identical to SEQ ID NO: 49677
  misc_feature: 615 for SV(C|O) and 28S

SEQ ID NO: 65313 - DNA, 120 bp, Homo sapiens; identical to SEQ ID NO: 50850
  misc_feature: 615 for SV(C|O) and 28S

SEQ ID NO: 65314 - DNA, 120 bp, Homo sapiens; identical to SEQ ID NO: 50854
  misc_feature: 615 for SV(C|O) and 28S

SEQ ID NO: 65315 - DNA, 120 bp, Homo sapiens; identical to SEQ ID NO: 49178
  misc_feature: 615 for SV(C|O) and 28S

SEQ ID NO: 65316 - DNA, 120 bp, Homo sapiens; identical to SEQ ID NO: 51051
  misc_feature: 615 for SV(C|O) and 28S

SEQ ID NO: 65317 - DNA, 120 bp, Homo sapiens; identical to SEQ ID NO: 49257
  misc_feature: 614 for SV(C|O) and 28S

SEQ ID NO: 65318 - DNA, 120 bp, Homo sapiens; identical to SEQ ID NO: 49744
  misc_feature: 614 for SV(C|O) and 28S

SEQ ID NO: 65319 - DNA, 120 bp, Homo sapiens; identical to SEQ ID NO: 49349
  misc_feature: 614 for SV(C|O) and 28S

SEQ ID NO: 65320 - DNA, 120 bp, Homo sapiens
  misc_feature: 614 for SV(C|O) and 28S
agccgacatcgaaggatcaaaaagcgacgtcgctatgaacgcttggccgccacaagccagttatccctgtggtaacttttctgacacctcctgcttaaaacccaaaaggtcagaaggatc

SEQ ID NO: 65321 - DNA, 120 bp, Homo sapiens; identical to SEQ ID NO: 49346
  misc_feature: 613 for SV(C|O) and 28S

SEQ ID NO: 65322 - DNA, 120 bp, Homo sapiens
  misc_feature: 613 for SV(C|O) and 28S
ataggaagagccgacatcgaaggatcaaaaagcgacgtcgctatgaacgcttggccgccacaagccagttatccctgtggtaacttttctgacacctcctgcttaaaacccaaaaggtca

SEQ ID NO: 65323 - DNA, 120 bp, Homo sapiens
  misc_feature: 613 for SV(C|O) and 28S
accaagcgttggattgttcacccactaatagggaacgtgagctgggtttagaccgtcgtgagacaggttagttttaccctactgatgatgtgttgttgccatggtaatcctgctcagtac

SEQ ID NO: 65324 - DNA, 120 bp, Homo sapiens; identical to SEQ ID NO: 50390
  misc_feature: 613 for SV(C|O) and 28S

SEQ ID NO: 65325 - DNA, 120 bp, Homo sapiens
  misc_feature: 613 for SV(C|O) and 28S
actccttggtccgtgtttcaagacgggtcgggtgggtagccgacgtcgccgccgaccccgtgcgctcgctccgccgtccccctcttcgggggacgcgcgcgtggccccgagagaacctcc

SEQ ID NO: 65326 - DNA, 120 bp, Homo sapiens; identical to SEQ ID NO: 49884
  misc_feature: 613 for SV(C|O) and 28S

SEQ ID NO: 65327 - DNA, 120 bp, Homo sapiens
  misc_feature: 613 for SV(C|O) and 28S
aagagccgacatcgaaggatcaaaaagcgacgtcgctatgaacgcttggccgccacaagccagttatccctgtggtaacttttctgacacctcctgcttaaaacccaaaaggtcagaagg

SEQ ID NO: 65328 - DNA, 120 bp, Homo sapiens
  misc_feature: 612 for SV(C|O) and 28S
ttcaccaagcgttggattgttcacccactaatagggaacgtgagctgggtttagaccgtcgtgagacaggttagttttaccctactgatgatgtgttgttgccatggtaatcctgctcag

SEQ ID NO: 65329 - DNA, 120 bp, Homo sapiens
  misc_feature: 612 for SV(C|O) and 28S
gataggaagagccgacatcgaaggatcaaaaagcgacgtcgctatgaacgcttggccgccacaagccagttatccctgtggtaacttttctgacacctcctgcttaaaacccaaaaggtc

SEQ ID NO: 65330 - DNA, 120 bp, Homo sapiens; identical to SEQ ID NO: 50845
  misc_feature: 612 for SV(C|O) and 28S

SEQ ID NO: 65331 - DNA, 120 bp, Homo sapiens
  misc_feature: 612 for SV(C|O) and 28S
cctggcgctaaaccattcgtagacgacctgcttctgggtcggggtttcgtacgtagcagagcagctccctcgctgcgatctattgaaagtcagccctcgacacaagggtttgtccgcgcg

SEQ ID NO: 65332 - DNA, 120 bp, Homo sapiens
  misc_feature: 611 for SV(C|O) and 28S
ggaagagccgacatcgaaggatcaaaaagcgacgtcgctatgaacgcttggccgccacaagccagttatccctgtggtaacttttctgacacctcctgcttaaaacccaaaaggtcagaa

SEQ ID NO: 65333 - DNA, 120 bp, Homo sapiens; identical to SEQ ID NO: 49649
  misc_feature: 611 for SV(C|O) and 28S

SEQ ID NO: 65334 - DNA, 120 bp, Homo sapiens
  misc_feature: 611 for SV(C|O) and 28S
aggaagagccgacatcgaaggatcaaaaagcgacgtcgctatgaacgcttggccgccacaagccagttatccctgtggtaacttttctgacacctcctgcttaaaacccaaaaggtcaga

SEQ ID NO: 65335 - DNA, 120 bp, Homo sapiens; identical to SEQ ID NO: 49601
  misc_feature: 611 for SV(C|O) and 28S

SEQ ID NO: 65336 - DNA, 120 bp, Homo sapiens
  misc_feature: 611 for SV(C|O) and 28S
gcgagggagctgctctgctacgtacgaaaccccgacccagaagcaggtcgtctacgaatggtttagcgccaggttccccacgaacgtgcggtgcgtgacgggcgagggggcggccgcctt

SEQ ID NO: 65337 - DNA, 120 bp, Homo sapiens
  misc_feature: 611 for SV(C|O) and 28S
gaagagccgacatcgaaggatcaaaaagcgacgtcgctatgaacgcttggccgccacaagccagttatccctgtggtaacttttctgacacctcctgcttaaaacccaaaaggtcagaag

SEQ ID NO: 65338 - DNA, 120 bp, Homo sapiens
  misc_feature: 611 for SV(C|O) and 28S
cgtgagacaggttagttttaccctactgatgatgtgttgttgccatggtaatcctgctcagtacgagaggaaccgcaggttcagacatttggtgtatgtgcttggctgaggagccaatgg

SEQ ID NO: 65339 - DNA, 120 bp, Homo sapiens; identical to SEQ ID NO: 50846
  misc_feature: 611 for SV(C|O) and 28S

SEQ ID NO: 65340 - DNA, 120 bp, Homo sapiens; identical to SEQ ID NO: 49148
  misc_feature: 611 for SV(C|O) and 28S

SEQ ID NO: 65341 - DNA, 120 bp, Homo sapiens; identical to SEQ ID NO: 49780
  misc_feature: 610 for SV(C|O) and 28S

SEQ ID NO: 65342 - DNA, 120 bp, Homo sapiens; identical to SEQ ID NO: 49761
  misc_feature: 610 for SV(C|O) and 28S

SEQ ID NO: 65343 - DNA, 120 bp, Homo sapiens
  misc_feature: 610 for SV(C|O) and 28S
agagccgacatcgaaggatcaaaaagcgacgtcgctatgaacgcttggccgccacaagccagttatccctgtggtaacttttctgacacctcctgcttaaaacccaaaaggtcagaagga

SEQ ID NO: 65344 - DNA, 120 bp, Homo sapiens; identical to SEQ ID NO: 49333
  misc_feature: 610 for SV(C|O) and 28S

SEQ ID NO: 65345 - DNA, 120 bp, Homo sapiens; identical to SEQ ID NO: 50871
  misc_feature: 610 for SV(C|O) and 28S

SEQ ID NO: 65346 - DNA, 120 bp, Homo sapiens; identical to SEQ ID NO: 49706
  misc_feature: 610 for SV(C|O) and 28S

SEQ ID NO: 65347 - DNA, 120 bp, Homo sapiens
  misc_feature: 609 for SV(C|O) and 28S
cgtggcgcaatgaaggtgaaggccggcgcgctcgccggccgaggtgggatcccgaggcctctccagtccgccgagggcgcaccaccggcccgtctcgcccgccgcgccggggaggtggag

SEQ ID NO: 65348 - DNA, 120 bp, Homo sapiens; identical to SEQ ID NO: 49784
  misc_feature: 609 for SV(C|O) and 28S

SEQ ID NO: 65349 - DNA, 120 bp, Homo sapiens; identical to SEQ ID NO: 51052
  misc_feature: 609 for SV(C|O) and 28S

SEQ ID NO: 65350 - DNA, 120 bp, Homo sapiens; identical to SEQ ID NO: 49598
  misc_feature: 609 for SV(C|O) and 28S

SEQ ID NO: 65351 - DNA, 120 bp, Homo sapiens; identical to SEQ ID NO: 49741
  misc_feature: 608 for SV(C|O) and 28S

SEQ ID NO: 65352 - DNA, 120 bp, Homo sapiens; identical to SEQ ID NO: 49158
  misc_feature: 608 for SV(C|O) and 28S

SEQ ID NO: 65353 - DNA, 120 bp, Homo sapiens; identical to SEQ ID NO: 50343
  misc_feature: 608 for SV(C|O) and 28S

SEQ ID NO: 65354 - DNA, 120 bp, Homo sapiens; identical to SEQ ID NO: 49489
  misc_feature: 608 for SV(C|O) and 28S

SEQ ID NO: 65355 - DNA, 120 bp, Homo sapiens
  misc_feature: 607 for SV(C|O) and 28S
tcaccaagcgttggattgttcacccactaatagggaacgtgagctgggtttagaccgtcgtgagacaggttagttttaccctactgatgatgtgttgttgccatggtaatcctgctcagt

SEQ ID NO: 65356 - DNA, 120 bp, Homo sapiens; identical to SEQ ID NO: 49947
  misc_feature: 607 for SV(C|O) and 28S

SEQ ID NO: 65357 - DNA, 120 bp, Homo sapiens; identical to SEQ ID NO: 49209
  misc_feature: 607 for SV(C|O) and 28S

SEQ ID NO: 65358 - DNA, 120 bp, Homo sapiens
  misc_feature: 607 for SV(C|O) and 28S
gtggcgcaatgaaggtgaaggccggcgcgctcgccggccgaggtgggatcccgaggcctctccagtccgccgagggcgcaccaccggcccgtctcgcccgccgcgccggggaggtggagc

SEQ ID NO: 65359 - DNA, 120 bp, Homo sapiens
  misc_feature: 607 for SV(C|O) and 28S
gtcgtgagacaggttagttttaccctactgatgatgtgttgttgccatggtaatcctgctcagtacgagaggaaccgcaggttcagacatttggtgtatgtgcttggctgaggagccaat

SEQ ID NO: 65360 - DNA, 120 bp, Homo sapiens; identical to SEQ ID NO: 49319
  misc_feature: 607 for SV(C|O) and 28S

SEQ ID NO: 65361 - DNA, 120 bp, Homo sapiens; identical to SEQ ID NO: 51503
  misc_feature: 606 for SV(C|O) and 28S

SEQ ID NO: 65362 - DNA, 120 bp, Homo sapiens; identical to SEQ ID NO: 50908
  misc_feature: 606 for SV(C|O) and 28S

SEQ ID NO: 65363 - DNA, 120 bp, Homo sapiens; identical to SEQ ID NO: 49493
  misc_feature: 606 for SV(C|O) and 28S

SEQ ID NO: 65364 - DNA, 120 bp, Homo sapiens; identical to SEQ ID NO: 49288
  misc_feature: 606 for SV(C|O) and 28S

SEQ ID NO: 65365 - DNA, 120 bp, Homo sapiens; identical to SEQ ID NO: 49621
  misc_feature: 606 for SV(C|O) and 28S

SEQ ID NO: 65366 - DNA, 120 bp, Homo sapiens
  misc_feature: 606 for SV(C|O) and 28S
cgagggagctgctctgctacgtacgaaaccccgacccagaagcaggtcgtctacgaatggtttagcgccaggttccccacgaacgtgcggtgcgtgacgggcgagggggcggccgccttt

SEQ ID NO: 65367 - DNA, 120 bp, Homo sapiens; identical to SEQ ID NO: 49653
  misc_feature: 605 for SV(C|O) and 28S

SEQ ID NO: 65368 - DNA, 120 bp, Homo sapiens
  misc_feature: 605 for SV(C|O) and 28S
tactgaaaatcaagatcaagcgagcttttgcccttctgctccacgggaggtttctgtcctccctgagctcgccttaggacacctgcgttaccgtttgacaggtgtaccgccccagtcaaa

SEQ ID NO: 65369 - DNA, 120 bp, Homo sapiens; identical to SEQ ID NO: 49416
  misc_feature: 605 for SV(C|O) and 28S

SEQ ID NO: 65370 - DNA, 120 bp, Homo sapiens; identical to SEQ ID NO: 49588
  misc_feature: 605 for SV(C|O) and 28S

SEQ ID NO: 65371 - DNA, 120 bp, Homo sapiens; identical to SEQ ID NO: 49551
  misc_feature: 605 for SV(C|O) and 28S

SEQ ID NO: 65372 - DNA, 120 bp, Homo sapiens; identical to SEQ ID NO: 49792
  misc_feature: 605 for SV(C|O) and 28S

SEQ ID NO: 65373 - DNA, 120 bp, Homo sapiens
  misc_feature: 605 for SV(C|O) and 28S
ggtccgtgtttcaagacgggtcgggtgggtagccgacgtcgccgccgaccccgtgcgctcgctccgccgtccccctcttcgggggacgcgcgcgtggccccgagagaacctcccccgggc

SEQ ID NO: 65374 - DNA, 120 bp, Homo sapiens; identical to SEQ ID NO: 49368
  misc_feature: 605 for SV(C|O) and 28S

SEQ ID NO: 65375 - DNA, 120 bp, Homo sapiens
  misc_feature: 605 for SV(C|O) and 28S
ctggcgctaaaccattcgtagacgacctgcttctgggtcggggtttcgtacgtagcagagcagctccctcgctgcgatctattgaaagtcagccctcgacacaagggtttgtccgcgcgc

SEQ ID NO: 65376 - DNA, 120 bp, Homo sapiens; identical to SEQ ID NO: 50960
  misc_feature: 605 for SV(C|O) and 28S

SEQ ID NO: 65377 - DNA, 120 bp, Homo sapiens; identical to SEQ ID NO: 50809
  misc_feature: 604 for SV(C|O) and 28S

SEQ ID NO: 65378 - DNA, 120 bp, Homo sapiens; identical to SEQ ID NO: 49338
  misc_feature: 604 for SV(C|O) and 28S

SEQ ID NO: 65379 - DNA, 120 bp, Homo sapiens; identical to SEQ ID NO: 49492
  misc_feature: 604 for SV(C|O) and 28S

SEQ ID NO: 65380 - DNA, 120 bp, Homo sapiens; identical to SEQ ID NO: 50837
  misc_feature: 604 for SV(C|O) and 28S

SEQ ID NO: 65381 - DNA, 120 bp, Homo sapiens
  misc_feature: 604 for SV(C|O) and 28S
gactccttggtccgtgtttcaagacgggtcgggtgggtagccgacgtcgccgccgaccccgtgcgctcgctccgccgtccccctcttcgggggacgcgcgcgtggccccgagagaacctc

SEQ ID NO: 65382 - DNA, 120 bp, Homo sapiens; identical to SEQ ID NO: 49462
  misc_feature: 604 for SV(C|O) and 28S

SEQ ID NO: 65383 - DNA, 120 bp, Homo sapiens; identical to SEQ ID NO: 49506
  misc_feature: 604 for SV(C|O) and 28S

SEQ ID NO: 65384 - DNA, 120 bp, Homo sapiens
  misc_feature: 603 for SV(C|O) and 28S
cgtcgtgagacaggttagttttaccctactgatgatgtgttgttgccatggtaatcctgctcagtacgagaggaaccgcaggttcagacatttggtgtatgtgcttggctgaggagccaa

SEQ ID NO: 65385 - DNA, 120 bp, Homo sapiens; identical to SEQ ID NO: 49491
  misc_feature: 603 for SV(C|O) and 28S

SEQ ID NO: 65386 - DNA, 120 bp, Homo sapiens; identical to SEQ ID NO: 50887
  misc_feature: 603 for SV(C|O) and 28S

SEQ ID NO: 65387 - DNA, 120 bp, Homo sapiens; identical to SEQ ID NO: 49570
  misc_feature: 603 for SV(C|O) and 28S

SEQ ID NO: 65388 - DNA, 120 bp, Homo sapiens
  misc_feature: 603 for SV(C|O) and 28S
ctgaaaatcaagatcaagcgagcttttgcccttctgctccacgggaggtttctgtcctccctgagctcgccttaggacacctgcgttaccgtttgacaggtgtaccgccccagtcaaact

SEQ ID NO: 65389 - DNA, 120 bp, Homo sapiens; identical to SEQ ID NO: 49419
  misc_feature: 602 for SV(C|O) and 28S

SEQ ID NO: 65390 - DNA, 120 bp, Homo sapiens
  misc_feature: 602 for SV(C|O) and 28S
tggcgcaatgaaggtgaaggccggcgcgctcgccggccgaggtgggatcccgaggcctctccagtccgccgagggcgcaccaccggcccgtctcgcccgccgcgccggggaggtggagca

SEQ ID NO: 65391 - DNA, 120 bp, Homo sapiens
  misc_feature: 602 for SV(C|O) and 28S
taggaagagccgacatcgaaggatcaaaaagcgacgtcgctatgaacgcttggccgccacaagccagttatccctgtggtaacttttctgacacctcctgcttaaaacccaaaaggtcag

SEQ ID NO: 65392 - DNA, 120 bp, Homo sapiens; identical to SEQ ID NO: 50827
  misc_feature: 602 for SV(C|O) and 28S

SEQ ID NO: 65393 - DNA, 120 bp, Homo sapiens
  misc_feature: 602 for SV(C|O) and 28S
gtccgtgtttcaagacgggtcgggtgggtagccgacgtcgccgccgaccccgtgcgctcgctccgccgtccccctcttcgggggacgcgcgcgtggccccgagagaacctcccccgggcc

SEQ ID NO: 65394 - DNA, 120 bp, Homo sapiens; identical to SEQ ID NO: 50746
  misc_feature: 602 for SV(C|O) and 28S

SEQ ID NO: 65395 - DNA, 120 bp, Homo sapiens
  misc_feature: 602 for SV(C|O) and 28S
aaatcaagatcaagcgagcttttgcccttctgctccacgggaggtttctgtcctccctgagctcgccttaggacacctgcgttaccgtttgacaggtgtaccgccccagtcaaactcccc

SEQ ID NO: 65396 - DNA, 120 bp, Homo sapiens; identical to SEQ ID NO: 50636
  misc_feature: 602 for SV(C|O) and 28S

SEQ ID NO: 65397 - DNA, 120 bp, Homo sapiens
  misc_feature: 602 for SV(C|O) and 28S
gaaaatcaagatcaagcgagcttttgcccttctgctccacgggaggtttctgtcctccctgagctcgccttaggacacctgcgttaccgtttgacaggtgtaccgccccagtcaaactcc

SEQ ID NO: 65398 - DNA, 120 bp, Homo sapiens; identical to SEQ ID NO: 49549
  misc_feature: 602 for SV(C|O) and 28S

SEQ ID NO: 65399 - DNA, 120 bp, Homo sapiens; identical to SEQ ID NO: 49710
  misc_feature: 601 for SV(C|O) and 28S

SEQ ID NO: 65400 - DNA, 120 bp, Homo sapiens; identical to SEQ ID NO: 49445
  misc_feature: 601 for SV(C|O) and 28S

SEQ ID NO: 65401 - DNA, 120 bp, Homo sapiens; identical to SEQ ID NO: 49829
  misc_feature: 601 for SV(C|O) and 28S

SEQ ID NO: 65402 - DNA, 120 bp, Homo sapiens; identical to SEQ ID NO: 49159
  misc_feature: 601 for SV(C|O) and 28S

SEQ ID NO: 65403 - DNA, 120 bp, Homo sapiens
  misc_feature: 601 for SV(C|O) and 28S
actgaaaatcaagatcaagcgagcttttgcccttctgctccacgggaggtttctgtcctccctgagctcgccttaggacacctgcgttaccgtttgacaggtgtaccgccccagtcaaac

SEQ ID NO: 65404 - DNA, 120 bp, Homo sapiens; identical to SEQ ID NO: 49812
  misc_feature: 601 for SV(C|O) and 28S

SEQ ID NO: 65405 - DNA, 120 bp, Homo sapiens; identical to SEQ ID NO: 49736
  misc_feature: 601 for SV(C|O) and 28S

SEQ ID NO: 65406 - DNA, 120 bp, Homo sapiens; identical to SEQ ID NO: 49404
  misc_feature: 600 for SV(C|O) and 28S

SEQ ID NO: 65407 - DNA, 120 bp, Homo sapiens
  misc_feature: 600 for SV(C|O) and 28S
ttgatccttcgatgtcggctcttcctatcattgtgaagcagaattcaccaagcgttggattgttcacccactaatagggaacgtgagctgggtttagaccgtcgtgagacaggttagttt

SEQ ID NO: 65408 - DNA, 120 bp, Homo sapiens
  misc_feature: 600 for SV(C|O) and 28S
tgaatggatgaacgagattcccactgtccctacctactatccagcgaaaccacagccaagggaacgggcttggcggaatcagcggggaaagaagaccctgttgagcttgactctagtctg

SEQ ID NO: 65409 - DNA, 120 bp, Homo sapiens
  misc_feature: 600 for SV(C|O) and 28S
tcgtgagacaggttagttttaccctactgatgatgtgttgttgccatggtaatcctgctcagtacgagaggaaccgcaggttcagacatttggtgtatgtgcttggctgaggagccaatg

SEQ ID NO: 65410 - DNA, 120 bp, Homo sapiens; identical to SEQ ID NO: 49715
  misc_feature: 600 for SV(C|O) and 28S

SEQ ID NO: 65411 - DNA, 120 bp, Homo sapiens
  misc_feature: 600 for SV(C|O) and 28S
aaaatcaagatcaagcgagcttttgcccttctgctccacgggaggtttctgtcctccctgagctcgccttaggacacctgcgttaccgtttgacaggtgtaccgccccagtcaaactccc

SEQ ID NO: 65412 - DNA, 120 bp, Homo sapiens
  misc_feature: 600 for SV(C|O) and 28S
aatgataggaagagccgacatcgaaggatcaaaaagcgacgtcgctatgaacgcttggccgccacaagccagttatccctgtggtaacttttctgacacctcctgcttaaaacccaaaag

SEQ ID NO: 65413 - DNA, 120 bp, Homo sapiens; identical to SEQ ID NO: 49217
  misc_feature: 600 for SV(C|O) and 28S

SEQ ID NO: 65414 - DNA, 120 bp, Homo sapiens
  misc_feature: 600 for SV(C|O) and 28S
catctaattagtgacgcgcatgaatggatgaacgagattcccactgtccctacctactatccagcgaaaccacagccaagggaacgggcttggcggaatcagcggggaaagaagaccctg

SEQ ID NO: 65415 - DNA, 120 bp, Homo sapiens
  misc_feature: 600 for SV(C|O) and 28S
atgaatggatgaacgagattcccactgtccctacctactatccagcgaaaccacagccaagggaacgggcttggcggaatcagcggggaaagaagaccctgttgagcttgactctagtct

SEQ ID NO: 65416 - DNA, 120 bp, Homo sapiens; identical to SEQ ID NO: 50761
  misc_feature: 600 for SV(C|O) and 28S

SEQ ID NO: 65417 - DNA, 120 bp, Homo sapiens; identical to SEQ ID NO: 49313
  misc_feature: 599 for SV(C|O) and 28S

SEQ ID NO: 65418 - DNA, 120 bp, Homo sapiens
  misc_feature: 599 for SV(C|O) and 28S
tttgatccttcgatgtcggctcttcctatcattgtgaagcagaattcaccaagcgttggattgttcacccactaatagggaacgtgagctgggtttagaccgtcgtgagacaggttagtt

SEQ ID NO: 65419 - DNA, 120 bp, Homo sapiens
  misc_feature: 599 for SV(C|O) and 28S
ggcgcaatgaaggtgaaggccggcgcgctcgccggccgaggtgggatcccgaggcctctccagtccgccgagggcgcaccaccggcccgtctcgcccgccgcgccggggaggtggagcac

SEQ ID NO: 65420 - DNA, 120 bp, Homo sapiens
  misc_feature: 599 for SV(C|O) and 28S
atgataggaagagccgacatcgaaggatcaaaaagcgacgtcgctatgaacgcttggccgccacaagccagttatccctgtggtaacttttctgacacctcctgcttaaaacccaaaagg

SEQ ID NO: 65421 - DNA, 120 bp, Homo sapiens; identical to SEQ ID NO: 49345
  misc_feature: 599 for SV(C|O) and 28S

SEQ ID NO: 65422 - DNA, 120 bp, Homo sapiens; identical to SEQ ID NO: 49624
  misc_feature: 598 for SV(C|O) and 28S

SEQ ID NO: 65423 - DNA, 120 bp, Homo sapiens; identical to SEQ ID NO: 49584
  misc_feature: 598 for SV(C|O) and 28S

SEQ ID NO: 65424 - DNA, 120 bp, Homo sapiens; identical to SEQ ID NO: 51028
  misc_feature: 598 for SV(C|O) and 28S

SEQ ID NO: 65425 - DNA, 120 bp, Homo sapiens; identical to SEQ ID NO: 49471
  misc_feature: 598 for SV(C|O) and 28S

SEQ ID NO: 65426 - DNA, 120 bp, Homo sapiens
  misc_feature: 598 for SV(C|O) and 28S
gagccgacatcgaaggatcaaaaagcgacgtcgctatgaacgcttggccgccacaagccagttatccctgtggtaacttttctgacacctcctgcttaaaacccaaaaggtcagaaggat

SEQ ID NO: 65427 - DNA, 120 bp, Homo sapiens; identical to SEQ ID NO: 50035
  misc_feature: 598 for SV(C|O) and 28S

SEQ ID NO: 65428 - DNA, 120 bp, Homo sapiens; identical to SEQ ID NO: 50973
  misc_feature: 598 for SV(C|O) and 28S

SEQ ID NO: 65429 - DNA, 120 bp, Homo sapiens; identical to SEQ ID NO: 49568
  misc_feature: 597 for SV(C|O) and 28S

SEQ ID NO: 65430 - DNA, 120 bp, Homo sapiens
  misc_feature: 597 for SV(C|O) and 28S
tcatctaattagtgacgcgcatgaatggatgaacgagattcccactgtccctacctactatccagcgaaaccacagccaagggaacgggcttggcggaatcagcggggaaagaagaccct

SEQ ID NO: 65431 - DNA, 120 bp, Homo sapiens; identical to SEQ ID NO: 49602
  misc_feature: 597 for SV(C|O) and 28S

SEQ ID NO: 65432 - DNA, 120 bp, Homo sapiens
  misc_feature: 597 for SV(C|O) and 28S
agactccttggtccgtgtttcaagacgggtcgggtgggtagccgacgtcgccgccgaccccgtgcgctcgctccgccgtccccctcttcgggggacgcgcgcgtggccccgagagaacct

SEQ ID NO: 65433 - DNA, 120 bp, Homo sapiens
  misc_feature: 596 for SV(C|O) and 28S
tttaagcaggaggtgtcagaaaagttaccacagggataactggcttgtggcggccaagcgttcatagcgacgtcgctttttgatccttcgatgtcggctcttcctatcattgtgaagcag

SEQ ID NO: 65434 - DNA, 120 bp, Homo sapiens; identical to SEQ ID NO: 49560
  misc_feature: 596 for SV(C|O) and 28S

SEQ ID NO: 65435 - DNA, 120 bp, Homo sapiens; identical to SEQ ID NO: 49815
  misc_feature: 596 for SV(C|O) and 28S

SEQ ID NO: 65436 - DNA, 120 bp, Homo sapiens; identical to SEQ ID NO: 50793
  misc_feature: 596 for SV(C|O) and 28S

SEQ ID NO: 65437 - DNA, 120 bp, Homo sapiens
  misc_feature: 595 for SV(C|O) and 28S
taagcaggaggtgtcagaaaagttaccacagggataactggcttgtggcggccaagcgttcatagcgacgtcgctttttgatccttcgatgtcggctcttcctatcattgtgaagcagaa

SEQ ID NO: 65438 - DNA, 120 bp, Homo sapiens; identical to SEQ ID NO: 49331
  misc_feature: 595 for SV(C|O) and 28S

SEQ ID NO: 65439 - DNA, 120 bp, Homo sapiens; identical to SEQ ID NO: 50505
  misc_feature: 595 for SV(C|O) and 28S

SEQ ID NO: 65440 - DNA, 120 bp, Homo sapiens; identical to SEQ ID NO: 49810
  misc_feature: 595 for SV(C|O) and 28S

SEQ ID NO: 65441 - DNA, 120 bp, Homo sapiens
  misc_feature: 595 for SV(C|O) and 28S
tccgtgtttcaagacgggtcgggtgggtagccgacgtcgccgccgaccccgtgcgctcgctccgccgtccccctcttcgggggacgcgcgcgtggccccgagagaacctcccccgggccc

SEQ ID NO: 65442 - DNA, 120 bp, Homo sapiens; identical to SEQ ID NO: 50826
  misc_feature: 595 for SV(C|O) and 28S

SEQ ID NO: 65443 - DNA, 120 bp, Homo sapiens; identical to SEQ ID NO: 49627
  misc_feature: 595 for SV(C|O) and 28S

SEQ ID NO: 65444 - DNA, 120 bp, Homo sapiens; identical to SEQ ID NO: 49252
  misc_feature: 595 for SV(C|O) and 28S

SEQ ID NO: 65445 - DNA, 120 bp, Homo sapiens; identical to SEQ ID NO: 49224
  misc_feature: 595 for SV(C|O) and 28S

SEQ ID NO: 65446 - DNA, 120 bp, Homo sapiens; identical to SEQ ID NO: 49622
  misc_feature: 595 for SV(C|O) and 28S

SEQ ID NO: 65447 - DNA, 120 bp, Homo sapiens; identical to SEQ ID NO: 50020
  misc_feature: 595 for SV(C|O) and 28S

SEQ ID NO: 65448 - DNA, 120 bp, Homo sapiens; identical to SEQ ID NO: 49271
  misc_feature: 594 for SV(C|O) and 28S

SEQ ID NO: 65449 - DNA, 120 bp, Homo sapiens; identical to SEQ ID NO: 49398
  misc_feature: 594 for SV(C|O) and 28S

SEQ ID NO: 65450 - DNA, 120 bp, Homo sapiens
  misc_feature: 594 for SV(C|O) and 28S
tgaaaatcaagatcaagcgagcttttgcccttctgctccacgggaggtttctgtcctccctgagctcgccttaggacacctgcgttaccgtttgacaggtgtaccgccccagtcaaactc

SEQ ID NO: 65451 - DNA, 120 bp, Homo sapiens; identical to SEQ ID NO: 50781
  misc_feature: 594 for SV(C|O) and 28S

SEQ ID NO: 65452 - DNA, 120 bp, Homo sapiens
  misc_feature: 594 for SV(C|O) and 28S
gaaggtgaaggccggcgcgctcgccggccgaggtgggatcccgaggcctctccagtccgccgagggcgcaccaccggcccgtctcgcccgccgcgccggggaggtggagcacgagcgcac

SEQ ID NO: 65453 - DNA, 120 bp, Homo sapiens; identical to SEQ ID NO: 49438
  misc_feature: 594 for SV(C|O) and 28S

SEQ ID NO: 65454 - DNA, 120 bp, Homo sapiens; identical to SEQ ID NO: 50028
  misc_feature: 594 for SV(C|O) and 28S

SEQ ID NO: 65455 - DNA, 120 bp, Homo sapiens; identical to SEQ ID NO: 49965
  misc_feature: 594 for SV(C|O) and 28S

SEQ ID NO: 65456 - DNA, 120 bp, Homo sapiens; identical to SEQ ID NO: 50484
  misc_feature: 594 for SV(C|O) and 28S

SEQ ID NO: 65457 - DNA, 120 bp, Homo sapiens; identical to SEQ ID NO: 49581
  misc_feature: 593 for SV(C|O) and 28S

SEQ ID NO: 65458 - DNA, 120 bp, Homo sapiens; identical to SEQ ID NO: 49855
  misc_feature: 593 for SV(C|O) and 28S

SEQ ID NO: 65459 - DNA, 120 bp, Homo sapiens
  misc_feature: 593 for SV(C|O) and 28S
tgaaggtgaaggccggcgcgctcgccggccgaggtgggatcccgaggcctctccagtccgccgagggcgcaccaccggcccgtctcgcccgccgcgccggggaggtggagcacgagcgca

SEQ ID NO: 65460 - DNA, 120 bp, Homo sapiens
  misc_feature: 593 for SV(C|O) and 28S
tagactccttggtccgtgtttcaagacgggtcgggtgggtagccgacgtcgccgccgaccccgtgcgctcgctccgccgtccccctcttcgggggacgcgcgcgtggccccgagagaacc

SEQ ID NO: 65461 - DNA, 120 bp, Homo sapiens
  misc_feature: 593 for SV(C|O) and 28S
caatgaaggtgaaggccggcgcgctcgccggccgaggtgggatcccgaggcctctccagtccgccgagggcgcaccaccggcccgtctcgcccgccgcgccggggaggtggagcacgagc

SEQ ID NO: 65462 - DNA, 120 bp, Homo sapiens
  misc_feature: 593 for SV(C|O) and 28S
aaagttgaaaagaactttgaagagagagttcaagagggcgtgaaaccgttaagaggtaaacgggtggggtccgcgcagtccgcccggaggattcaacccggcggcgggtccggccgtgtc

SEQ ID NO: 65463 - DNA, 120 bp, Homo sapiens
  misc_feature: 593 for SV(C|O) and 28S
agttgaaaagaactttgaagagagagttcaagagggcgtgaaaccgttaagaggtaaacgggtggggtccgcgcagtccgcccggaggattcaacccggcggcgggtccggccgtgtcgg

SEQ ID NO: 65464 - DNA, 120 bp, Homo sapiens; identical to SEQ ID NO: 49699
  misc_feature: 592 for SV(C|O) and 28S

SEQ ID NO: 65465 - DNA, 120 bp, Homo sapiens
  misc_feature: 592 for SV(C|O) and 28S
ttaagcaggaggtgtcagaaaagttaccacagggataactggcttgtggcggccaagcgttcatagcgacgtcgctttttgatccttcgatgtcggctcttcctatcattgtgaagcaga

SEQ ID NO: 65466 - DNA, 120 bp, Homo sapiens; identical to SEQ ID NO: 49264
  misc_feature: 592 for SV(C|O) and 28S

SEQ ID NO: 65467 - DNA, 120 bp, Homo sapiens; identical to SEQ ID NO: 50044
  misc_feature: 592 for SV(C|O) and 28S

SEQ ID NO: 65468 - DNA, 120 bp, Homo sapiens; identical to SEQ ID NO: 50347
  misc_feature: 592 for SV(C|O) and 28S

SEQ ID NO: 65469 - DNA, 120 bp, Homo sapiens; identical to SEQ ID NO: 50786
  misc_feature: 592 for SV(C|O) and 28S

SEQ ID NO: 65470 - DNA, 120 bp, Homo sapiens; identical to SEQ ID NO: 50868
  misc_feature: 592 for SV(C|O) and 28S

SEQ ID NO: 65471 - DNA, 120 bp, Homo sapiens
  misc_feature: 591 for SV(C|O) and 28S
aatcaagatcaagcgagcttttgcccttctgctccacgggaggtttctgtcctccctgagctcgccttaggacacctgcgttaccgtttgacaggtgtaccgccccagtcaaactcccca

SEQ ID NO: 65472 - DNA, 120 bp, Homo sapiens; identical to SEQ ID NO: 50736
  misc_feature: 591 for SV(C|O) and 28S

SEQ ID NO: 65473 - DNA, 120 bp, Homo sapiens; identical to SEQ ID NO: 50055
  misc_feature: 591 for SV(C|O) and 28S

SEQ ID NO: 65474 - DNA, 120 bp, Homo sapiens; identical to SEQ ID NO: 49533
  misc_feature: 591 for SV(C|O) and 28S

SEQ ID NO: 65475 - DNA, 120 bp, Homo sapiens; identical to SEQ ID NO: 49910
  misc_feature: 591 for SV(C|O) and 28S

SEQ ID NO: 65476 - DNA, 120 bp, Homo sapiens; identical to SEQ ID NO: 49440
  misc_feature: 591 for SV(C|O) and 28S

SEQ ID NO: 65477 - DNA, 120 bp, Homo sapiens; identical to SEQ ID NO: 49635
  misc_feature: 591 for SV(C|O) and 28S

SEQ ID NO: 65478 - DNA, 120 bp, Homo sapiens; identical to SEQ ID NO: 50727
  misc_feature: 591 for SV(C|O) and 28S

SEQ ID NO: 65479 - DNA, 120 bp, Homo sapiens; identical to SEQ ID NO: 49434
  misc_feature: 591 for SV(C|O) and 28S

SEQ ID NO: 65480 - DNA, 120 bp, Homo sapiens
  misc_feature: 590 for SV(C|O) and 28S
ttttaagcaggaggtgtcagaaaagttaccacagggataactggcttgtggcggccaagcgttcatagcgacgtcgctttttgatccttcgatgtcggctcttcctatcattgtgaagca

SEQ ID NO: 65481 - DNA, 120 bp, Homo sapiens; identical to SEQ ID NO: 49540
  misc_feature: 590 for SV(C|O) and 28S

SEQ ID NO: 65482 - DNA, 120 bp, Homo sapiens
  misc_feature: 590 for SV(C|O) and 28S
gttgaaaagaactttgaagagagagttcaagagggcgtgaaaccgttaagaggtaaacgggtggggtccgcgcagtccgcccggaggattcaacccggcggcgggtccggccgtgtcggc

SEQ ID NO: 65483 - DNA, 120 bp, Homo sapiens; identical to SEQ ID NO: 50092
  misc_feature: 590 for SV(C|O) and 28S

SEQ ID NO: 65484 - DNA, 120 bp, Homo sapiens; identical to SEQ ID NO: 49429
  misc_feature: 590 for SV(C|O) and 28S

SEQ ID NO: 65485 - DNA, 120 bp, Homo sapiens
  misc_feature: 590 for SV(C|O) and 28S
gggggacggcggagcgagcgcacggggtcggcggcgacgtcggctacccacccgacccgtcttgaaacacggaccaaggagtctaacacgtgcgcgagtcgggggctcgcacgaaagccg

SEQ ID NO: 65486 - DNA, 120 bp, Homo sapiens
  misc_feature: 590 for SV(C|O) and 28S
ggggacggcggagcgagcgcacggggtcggcggcgacgtcggctacccacccgacccgtcttgaaacacggaccaaggagtctaacacgtgcgcgagtcgggggctcgcacgaaagccgc

SEQ ID NO: 65487 - DNA, 120 bp, Homo sapiens; identical to SEQ ID NO: 50312
  misc_feature: 590 for SV(C|O) and 28S

SEQ ID NO: 65488 - DNA, 120 bp, Homo sapiens; identical to SEQ ID NO: 50807
  misc_feature: 589 for SV(C|O) and 28S

SEQ ID NO: 65489 - DNA, 120 bp, Homo sapiens; identical to SEQ ID NO: 49226
  misc_feature: 589 for SV(C|O) and 28S

SEQ ID NO: 65490 - DNA, 120 bp, Homo sapiens; identical to SEQ ID NO: 50955
  misc_feature: 589 for SV(C|O) and 28S

SEQ ID NO: 65491 - DNA, 120 bp, Homo sapiens; identical to SEQ ID NO: 49904
  misc_feature: 589 for SV(C|O) and 28S

SEQ ID NO: 65492 - DNA, 120 bp, Homo sapiens; identical to SEQ ID NO: 50255
  misc_feature: 589 for SV(C|O) and 28S

SEQ ID NO: 65493 - DNA, 120 bp, Homo sapiens; identical to SEQ ID NO: 49600
  misc_feature: 589 for SV(C|O) and 28S

SEQ ID NO: 65494 - DNA, 120 bp, Homo sapiens; identical to SEQ ID NO: 49959
  misc_feature: 589 for SV(C|O) and 28S

SEQ ID NO: 65495 - DNA, 120 bp, Homo sapiens; identical to SEQ ID NO: 49923
  misc_feature: 589 for SV(C|O) and 28S

SEQ ID NO: 65496 - DNA, 120 bp, Homo sapiens
  misc_feature: 589 for SV(C|O) and 28S
atgaaggtgaaggccggcgcgctcgccggccgaggtgggatcccgaggcctctccagtccgccgagggcgcaccaccggcccgtctcgcccgccgcgccggggaggtggagcacgagcgc

SEQ ID NO: 65497 - DNA, 120 bp, Homo sapiens; identical to SEQ ID NO: 50252
  misc_feature: 589 for SV(C|O) and 28S

SEQ ID NO: 65498 - DNA, 120 bp, Homo sapiens; identical to SEQ ID NO: 49886
  misc_feature: 589 for SV(C|O) and 28S

SEQ ID NO: 65499 - DNA, 120 bp, Homo sapiens
  misc_feature: 589 for SV(C|O) and 28S
aacgcaggtgtcctaaggcgagctcagggaggacagaaacctcccgtggagcagaagggcaaaagctcgcttgatcttgattttcagtacgaatacagaccgtgaaagcggggcctcacg

SEQ ID NO: 65500 - DNA, 120 bp, Homo sapiens; identical to SEQ ID NO: 50759
  misc_feature: 589 for SV(C|O) and 28S

SEQ ID NO: 65501 - DNA, 120 bp, Homo sapiens
  misc_feature: 588 for SV(C|O) and 28S
ttagactccttggtccgtgtttcaagacgggtcgggtgggtagccgacgtcgccgccgaccccgtgcgctcgctccgccgtccccctcttcgggggacgcgcgcgtggccccgagagaac

SEQ ID NO: 65502 - DNA, 120 bp, Homo sapiens
  misc_feature: 588 for SV(C|O) and 28S
cgcaatgaaggtgaaggccggcgcgctcgccggccgaggtgggatcccgaggcctctccagtccgccgagggcgcaccaccggcccgtctcgcccgccgcgccggggaggtggagcacga

SEQ ID NO: 65503 - DNA, 120 bp, Homo sapiens
  misc_feature: 588 for SV(C|O) and 28S
atcaagatcaagcgagcttttgcccttctgctccacgggaggtttctgtcctccctgagctcgccttaggacacctgcgttaccgtttgacaggtgtaccgccccagtcaaactccccac

SEQ ID NO: 65504 - DNA, 120 bp, Homo sapiens; identical to SEQ ID NO: 50030
  misc_feature: 588 for SV(C|O) and 28S

SEQ ID NO: 65505 - DNA, 120 bp, Homo sapiens; identical to SEQ ID NO: 50093
  misc_feature: 588 for SV(C|O) and 28S

SEQ ID NO: 65506 - DNA, 120 bp, Homo sapiens
  misc_feature: 588 for SV(C|O) and 28S
gcaatgaaggtgaaggccggcgcgctcgccggccgaggtgggatcccgaggcctctccagtccgccgagggcgcaccaccggcccgtctcgcccgccgcgccggggaggtggagcacgag

SEQ ID NO: 65507 - DNA, 120 bp, Homo sapiens
  misc_feature: 588 for SV(C|O) and 28S
catgaatggatgaacgagattcccactgtccctacctactatccagcgaaaccacagccaagggaacgggcttggcggaatcagcggggaaagaagaccctgttgagcttgactctagtc

SEQ ID NO: 65508 - DNA, 120 bp, Homo sapiens
  misc_feature: 588 for SV(C|O) and 28S
aattagtgacgcgcatgaatggatgaacgagattcccactgtccctacctactatccagcgaaaccacagccaagggaacgggcttggcggaatcagcggggaaagaagaccctgttgag

SEQ ID NO: 65509 - DNA, 120 bp, Homo sapiens; identical to SEQ ID NO: 49817
  misc_feature: 587 for SV(C|O) and 28S

SEQ ID NO: 65510 - DNA, 120 bp, Homo sapiens; identical to SEQ ID NO: 49877
  misc_feature: 587 for SV(C|O) and 28S

SEQ ID NO: 65511 - DNA, 120 bp, Homo sapiens; identical to SEQ ID NO: 50565
  misc_feature: 587 for SV(C|O) and 28S

SEQ ID NO: 65512 - DNA, 120 bp, Homo sapiens
  misc_feature: 587 for SV(C|O) and 28S
acgcgcatgaatggatgaacgagattcccactgtccctacctactatccagcgaaaccacagccaagggaacgggcttggcggaatcagcggggaaagaagaccctgttgagcttgactc

SEQ ID NO: 65513 - DNA, 120 bp, Homo sapiens
  misc_feature: 587 for SV(C|O) and 28S
aatgaaggtgaaggccggcgcgctcgccggccgaggtgggatcccgaggcctctccagtccgccgagggcgcaccaccggcccgtctcgcccgccgcgccggggaggtggagcacgagcg

SEQ ID NO: 65514 - DNA, 120 bp, Homo sapiens
  misc_feature: 586 for SV(C|O) and 28S
ccgtcgtgagacaggttagttttaccctactgatgatgtgttgttgccatggtaatcctgctcagtacgagaggaaccgcaggttcagacatttggtgtatgtgcttggctgaggagcca

SEQ ID NO: 65515 - DNA, 120 bp, Homo sapiens; identical to SEQ ID NO: 51139
  misc_feature: 586 for SV(C|O) and 28S

SEQ ID NO: 65516 - DNA, 120 bp, Homo sapiens; identical to SEQ ID NO: 50026
  misc_feature: 586 for SV(C|O) and 28S

SEQ ID NO: 65517 - DNA, 120 bp, Homo sapiens; identical to SEQ ID NO: 49468
  misc_feature: 586 for SV(C|O) and 28S

SEQ ID NO: 65518 - DNA, 120 bp, Homo sapiens; identical to SEQ ID NO: 49276
  misc_feature: 586 for SV(C|O) and 28S

SEQ ID NO: 65519 - DNA, 120 bp, Homo sapiens; identical to SEQ ID NO: 49925
  misc_feature: 586 for SV(C|O) and 28S

SEQ ID NO: 65520 - DNA, 120 bp, Homo sapiens; identical to SEQ ID NO: 49968
  misc_feature: 586 for SV(C|O) and 28S

SEQ ID NO: 65521 - DNA, 120 bp, Homo sapiens; identical to SEQ ID NO: 51116
  misc_feature: 586 for SV(C|O) and 28S

SEQ ID NO: 65522 - DNA, 120 bp, Homo sapiens; identical to SEQ ID NO: 50710
  misc_feature: 586 for SV(C|O) and 28S

SEQ ID NO: 65523 - DNA, 120 bp, Homo sapiens; identical to SEQ ID NO: 49316
  misc_feature: 585 for SV(C|O) and 28S

SEQ ID NO: 65524 - DNA, 120 bp, Homo sapiens
  misc_feature: 585 for SV(C|O) and 28S
gggacggcggagcgagcgcacggggtcggcggcgacgtcggctacccacccgacccgtcttgaaacacggaccaaggagtctaacacgtgcgcgagtcgggggctcgcacgaaagccgcc

SEQ ID NO: 65525 - DNA, 120 bp, Homo sapiens
  misc_feature: 585 for SV(C|O) and 28S
agggggacggcggagcgagcgcacggggtcggcggcgacgtcggctacccacccgacccgtcttgaaacacggaccaaggagtctaacacgtgcgcgagtcgggggctcgcacgaaagcc

SEQ ID NO: 65526 - DNA, 120 bp, Homo sapiens; identical to SEQ ID NO: 50933
  misc_feature: 585 for SV(C|O) and 28S

SEQ ID NO: 65527 - DNA, 120 bp, Homo sapiens; identical to SEQ ID NO: 50366
  misc_feature: 585 for SV(C|O) and 28S

SEQ ID NO: 65528 - DNA, 120 bp, Homo sapiens
  misc_feature: 585 for SV(C|O) and 28S
aagttgaaaagaactttgaagagagagttcaagagggcgtgaaaccgttaagaggtaaacgggtggggtccgcgcagtccgcccggaggattcaacccggcggcgggtccggccgtgtcg

SEQ ID NO: 65529 - DNA, 120 bp, Homo sapiens; identical to SEQ ID NO: 49457
  misc_feature: 585 for SV(C|O) and 28S

SEQ ID NO: 65530 - DNA, 120 bp, Homo sapiens
  misc_feature: 584 for SV(C|O) and 28S
tttagaccgtcgtgagacaggttagttttaccctactgatgatgtgttgttgccatggtaatcctgctcagtacgagaggaaccgcaggttcagacatttggtgtatgtgcttggctgag

SEQ ID NO: 65531 - DNA, 120 bp, Homo sapiens
  misc_feature: 584 for SV(C|O) and 28S
tagaccgtcgtgagacaggttagttttaccctactgatgatgtgttgttgccatggtaatcctgctcagtacgagaggaaccgcaggttcagacatttggtgtatgtgcttggctgagga

SEQ ID NO: 65532 - DNA, 120 bp, Homo sapiens; identical to SEQ ID NO: 49522
  misc_feature: 584 for SV(C|O) and 28S

SEQ ID NO: 65533 - DNA, 120 bp, Homo sapiens; identical to SEQ ID NO: 50302
  misc_feature: 584 for SV(C|O) and 28S

SEQ ID NO: 65534 - DNA, 120 bp, Homo sapiens; identical to SEQ ID NO: 51070
  misc_feature: 584 for SV(C|O) and 28S

SEQ ID NO: 65535 - DNA, 120 bp, Homo sapiens; identical to SEQ ID NO: 49994
  misc_feature: 584 for SV(C|O) and 28S

SEQ ID NO: 65536 - DNA, 120 bp, Homo sapiens; identical to SEQ ID NO: 49430
  misc_feature: 584 for SV(C|O) and 28S

SEQ ID NO: 65537 - DNA, 120 bp, Homo sapiens
  misc_feature: 584 for SV(C|O) and 28S
agaccgtcgtgagacaggttagttttaccctactgatgatgtgttgttgccatggtaatcctgctcagtacgagaggaaccgcaggttcagacatttggtgtatgtgcttggctgaggag

SEQ ID NO: 65538 - DNA, 120 bp, Homo sapiens
  misc_feature: 584 for SV(C|O) and 28S
cgcatgaatggatgaacgagattcccactgtccctacctactatccagcgaaaccacagccaagggaacgggcttggcggaatcagcggggaaagaagaccctgttgagcttgactctag

SEQ ID NO: 65539 - DNA, 120 bp, Homo sapiens; identical to SEQ ID NO: 49849
  misc_feature: 584 for SV(C|O) and 28S

SEQ ID NO: 65540 - DNA, 120 bp, Homo sapiens; identical to SEQ ID NO: 50806
  misc_feature: 584 for SV(C|O) and 28S

SEQ ID NO: 65541 - DNA, 120 bp, Homo sapiens; identical to SEQ ID NO: 49827
  misc_feature: 583 for SV(C|O) and 28S

SEQ ID NO: 65542 - DNA, 120 bp, Homo sapiens; identical to SEQ ID NO: 49988
  misc_feature: 583 for SV(C|O) and 28S

SEQ ID NO: 65543 - DNA, 120 bp, Homo sapiens
  misc_feature: 583 for SV(C|O) and 28S
cacgtgttagactccttggtccgtgtttcaagacgggtcgggtgggtagccgacgtcgccgccgaccccgtgcgctcgctccgccgtccccctcttcgggggacgcgcgcgtggccccga

SEQ ID NO: 65544 - DNA, 120 bp, Homo sapiens; identical to SEQ ID NO: 49272
  misc_feature: 583 for SV(C|O) and 28S

SEQ ID NO: 65545 - DNA, 120 bp, Homo sapiens; identical to SEQ ID NO: 50058
  misc_feature: 583 for SV(C|O) and 28S

SEQ ID NO: 65546 - DNA, 120 bp, Homo sapiens; identical to SEQ ID NO: 49401
  misc_feature: 583 for SV(C|O) and 28S

SEQ ID NO: 65547 - DNA, 120 bp, Homo sapiens
  misc_feature: 583 for SV(C|O) and 28S
gcgcaatgaaggtgaaggccggcgcgctcgccggccgaggtgggatcccgaggcctctccagtccgccgagggcgcaccaccggcccgtctcgcccgccgcgccggggaggtggagcacg

SEQ ID NO: 65548 - DNA, 120 bp, Homo sapiens
  misc_feature: 583 for SV(C|O) and 28S
ccgtgtttcaagacgggtcgggtgggtagccgacgtcgccgccgaccccgtgcgctcgctccgccgtccccctcttcgggggacgcgcgcgtggccccgagagaacctcccccgggcccg

SEQ ID NO: 65549 - DNA, 120 bp, Homo sapiens; identical to SEQ ID NO: 49864
  misc_feature: 582 for SV(C|O) and 28S

SEQ ID NO: 65550 - DNA, 120 bp, Homo sapiens
  misc_feature: 582 for SV(C|O) and 28S
gcgcatgaatggatgaacgagattcccactgtccctacctactatccagcgaaaccacagccaagggaacgggcttggcggaatcagcggggaaagaagaccctgttgagcttgactcta

SEQ ID NO: 65551 - DNA, 120 bp, Homo sapiens; identical to SEQ ID NO: 50792
  misc_feature: 582 for SV(C|O) and 28S

SEQ ID NO: 65552 - DNA, 120 bp, Homo sapiens; identical to SEQ ID NO: 51031
  misc_feature: 582 for SV(C|O) and 28S

SEQ ID NO: 65553 - DNA, 120 bp, Homo sapiens
  misc_feature: 582 for SV(C|O) and 28S
gcatgaatggatgaacgagattcccactgtccctacctactatccagcgaaaccacagccaagggaacgggcttggcggaatcagcggggaaagaagaccctgttgagcttgactctagt

SEQ ID NO: 65554 - DNA, 120 bp, Homo sapiens
  misc_feature: 582 for SV(C|O) and 28S
aagatcaagcgagcttttgcccttctgctccacgggaggtttctgtcctccctgagctcgccttaggacacctgcgttaccgtttgacaggtgtaccgccccagtcaaactccccacctg

SEQ ID NO: 65555 - DNA, 120 bp, Homo sapiens
  misc_feature: 582 for SV(C|O) and 28S
caagatcaagcgagcttttgcccttctgctccacgggaggtttctgtcctccctgagctcgccttaggacacctgcgttaccgtttgacaggtgtaccgccccagtcaaactccccacct

SEQ ID NO: 65556 - DNA, 120 bp, Homo sapiens; identical to SEQ ID NO: 49874
  misc_feature: 582 for SV(C|O) and 28S

SEQ ID NO: 65557 - DNA, 120 bp, Homo sapiens
  misc_feature: 581 for SV(C|O) and 28S
tcaagcgagcttttgcccttctgctccacgggaggtttctgtcctccctgagctcgccttaggacacctgcgttaccgtttgacaggtgtaccgccccagtcaaactccccacctggcac

SEQ ID NO: 65558 - DNA, 120 bp, Homo sapiens
  misc_feature: 581 for SV(C|O) and 28S
tcaagatcaagcgagcttttgcccttctgctccacgggaggtttctgtcctccctgagctcgccttaggacacctgcgttaccgtttgacaggtgtaccgccccagtcaaactccccacc

SEQ ID NO: 65559 - DNA, 120 bp, Homo sapiens; identical to SEQ ID NO: 49978
  misc_feature: 581 for SV(C|O) and 28S

SEQ ID NO: 65560 - DNA, 120 bp, Homo sapiens; identical to SEQ ID NO: 50911
  misc_feature: 581 for SV(C|O) and 28S

SEQ ID NO: 65561 - DNA, 120 bp, Homo sapiens
  misc_feature: 581 for SV(C|O) and 28S
gacgcgcatgaatggatgaacgagattcccactgtccctacctactatccagcgaaaccacagccaagggaacgggcttggcggaatcagcggggaaagaagaccctgttgagcttgact

SEQ ID NO: 65562 - DNA, 120 bp, Homo sapiens; identical to SEQ ID NO: 49984
  misc_feature: 581 for SV(C|O) and 28S

SEQ ID NO: 65563 - DNA, 120 bp, Homo sapiens; identical to SEQ ID NO: 49647
  misc_feature: 581 for SV(C|O) and 28S

SEQ ID NO: 65564 - DNA, 120 bp, Homo sapiens
  misc_feature: 581 for SV(C|O) and 28S
aaggtgaaggccggcgcgctcgccggccgaggtgggatcccgaggcctctccagtccgccgagggcgcaccaccggcccgtctcgcccgccgcgccggggaggtggagcacgagcgcacg

SEQ ID NO: 65565 - DNA, 120 bp, Homo sapiens
  misc_feature: 581 for SV(C|O) and 28S
agatcaagcgagcttttgcccttctgctccacgggaggtttctgtcctccctgagctcgccttaggacacctgcgttaccgtttgacaggtgtaccgccccagtcaaactccccacctgg

SEQ ID NO: 65566 - DNA, 120 bp, Homo sapiens
  misc_feature: 581 for SV(C|O) and 28S
aggtgaaggccggcgcgctcgccggccgaggtgggatcccgaggcctctccagtccgccgagggcgcaccaccggcccgtctcgcccgccgcgccggggaggtggagcacgagcgcacgt

SEQ ID NO: 65567 - DNA, 120 bp, Homo sapiens
  misc_feature: 580 for SV(C|O) and 28S
ttagaccgtcgtgagacaggttagttttaccctactgatgatgtgttgttgccatggtaatcctgctcagtacgagaggaaccgcaggttcagacatttggtgtatgtgcttggctgagg

SEQ ID NO: 65568 - DNA, 120 bp, Homo sapiens
  misc_feature: 580 for SV(C|O) and 28S
taattagtgacgcgcatgaatggatgaacgagattcccactgtccctacctactatccagcgaaaccacagccaagggaacgggcttggcggaatcagcggggaaagaagaccctgttga

SEQ ID NO: 65569 - DNA, 120 bp, Homo sapiens
  misc_feature: 580 for SV(C|O) and 28S
tagtgacgcgcatgaatggatgaacgagattcccactgtccctacctactatccagcgaaaccacagccaagggaacgggcttggcggaatcagcggggaaagaagaccctgttgagctt

SEQ ID NO: 65570 - DNA, 120 bp, Homo sapiens
  misc_feature: 580 for SV(C|O) and 28S
gtcatctaattagtgacgcgcatgaatggatgaacgagattcccactgtccctacctactatccagcgaaaccacagccaagggaacgggcttggcggaatcagcggggaaagaagaccc

SEQ ID NO: 65571 - DNA, 120 bp, Homo sapiens; identical to SEQ ID NO: 50894
  misc_feature: 580 for SV(C|O) and 28S

SEQ ID NO: 65572 - DNA, 120 bp, Homo sapiens
  misc_feature: 580 for SV(C|O) and 28S
cgcgcatgaatggatgaacgagattcccactgtccctacctactatccagcgaaaccacagccaagggaacgggcttggcggaatcagcggggaaagaagaccctgttgagcttgactct

SEQ ID NO: 65573 - DNA, 120 bp, Homo sapiens
  misc_feature: 579 for SV(C|O) and 28S
gttagactccttggtccgtgtttcaagacgggtcgggtgggtagccgacgtcgccgccgaccccgtgcgctcgctccgccgtccccctcttcgggggacgcgcgcgtggccccgagagaa

SEQ ID NO: 65574 - DNA, 120 bp, Homo sapiens
  misc_feature: 579 for SV(C|O) and 28S
tgttagactccttggtccgtgtttcaagacgggtcgggtgggtagccgacgtcgccgccgaccccgtgcgctcgctccgccgtccccctcttcgggggacgcgcgcgtggccccgagaga

SEQ ID NO: 65575 - DNA, 120 bp, Homo sapiens; identical to SEQ ID NO: 51053
  misc_feature: 579 for SV(C|O) and 28S

SEQ ID NO: 65576 - DNA, 120 bp, Homo sapiens; identical to SEQ ID NO: 50619
  misc_feature: 579 for SV(C|O) and 28S

SEQ ID NO: 65577 - DNA, 120 bp, Homo sapiens
  misc_feature: 579 for SV(C|O) and 28S
attagtgacgcgcatgaatggatgaacgagattcccactgtccctacctactatccagcgaaaccacagccaagggaacgggcttggcggaatcagcggggaaagaagaccctgttgagc

SEQ ID NO: 65578 - DNA, 120 bp, Homo sapiens; identical to SEQ ID NO: 50016
  misc_feature: 579 for SV(C|O) and 28S

SEQ ID NO: 65579 - DNA, 120 bp, Homo sapiens; identical to SEQ ID NO: 49861
  misc_feature: 579 for SV(C|O) and 28S

SEQ ID NO: 65580 - DNA, 120 bp, Homo sapiens
  misc_feature: 578 for SV(C|O) and 28S
gcgggtggtaaactccatctaaggctaaataccggcacgagaccgatagtcaacaagtaccgtaagggaaagttgaaaagaactttgaagagagagttcaagagggcgtgaaaccgttaa

SEQ ID NO: 65581 - DNA, 120 bp, Homo sapiens; identical to SEQ ID NO: 51003
  misc_feature: 578 for SV(C|O) and 28S

SEQ ID NO: 65582 - DNA, 120 bp, Homo sapiens; identical to SEQ ID NO: 50043
  misc_feature: 578 for SV(C|O) and 28S

SEQ ID NO: 65583 - DNA, 120 bp, Homo sapiens
  misc_feature: 578 for SV(C|O) and 28S
accgtcgtgagacaggttagttttaccctactgatgatgtgttgttgccatggtaatcctgctcagtacgagaggaaccgcaggttcagacatttggtgtatgtgcttggctgaggagcc

SEQ ID NO: 65584 - DNA, 120 bp, Homo sapiens
  misc_feature: 578 for SV(C|O) and 28S
gagggggacggcggagcgagcgcacggggtcggcggcgacgtcggctacccacccgacccgtcttgaaacacggaccaaggagtctaacacgtgcgcgagtcgggggctcgcacgaaagc

SEQ ID NO: 65585 - DNA, 120 bp, Homo sapiens; identical to SEQ ID NO: 50375
  misc_feature: 578 for SV(C|O) and 28S

SEQ ID NO: 65586 - DNA, 120 bp, Homo sapiens; identical to SEQ ID NO: 50828
  misc_feature: 578 for SV(C|O) and 28S

SEQ ID NO: 65587 - DNA, 120 bp, Homo sapiens
  misc_feature: 577 for SV(C|O) and 28S
aagagggggacggcggagcgagcgcacggggtcggcggcgacgtcggctacccacccgacccgtcttgaaacacggaccaaggagtctaacacgtgcgcgagtcgggggctcgcacgaaa

SEQ ID NO: 65588 - DNA, 120 bp, Homo sapiens; identical to SEQ ID NO: 50983
  misc_feature: 577 for SV(C|O) and 28S

SEQ ID NO: 65589 - DNA, 120 bp, Homo sapiens
  misc_feature: 577 for SV(C|O) and 28S
ttagtgacgcgcatgaatggatgaacgagattcccactgtccctacctactatccagcgaaaccacagccaagggaacgggcttggcggaatcagcggggaaagaagaccctgttgagct

SEQ ID NO: 65590 - DNA, 120 bp, Homo sapiens; identical to SEQ ID NO: 50874
  misc_feature: 577 for SV(C|O) and 28S

SEQ ID NO: 65591 - DNA, 120 bp, Homo sapiens
  misc_feature: 577 for SV(C|O) and 28S
cgtgttagactccttggtccgtgtttcaagacgggtcgggtgggtagccgacgtcgccgccgaccccgtgcgctcgctccgccgtccccctcttcgggggacgcgcgcgtggccccgaga

SEQ ID NO: 65592 - DNA, 120 bp, Homo sapiens
  misc_feature: 577 for SV(C|O) and 28S
cgtgtttcaagacgggtcgggtgggtagccgacgtcgccgccgaccccgtgcgctcgctccgccgtccccctcttcgggggacgcgcgcgtggccccgagagaacctcccccgggcccga

SEQ ID NO: 65593 - DNA, 120 bp, Homo sapiens
  misc_feature: 577 for SV(C|O) and 28S
cggcacgagaccgatagtcaacaagtaccgtaagggaaagttgaaaagaactttgaagagagagttcaagagggcgtgaaaccgttaagaggtaaacgggtggggtccgcgcagtccgcc

SEQ ID NO: 65594 - DNA, 120 bp, Homo sapiens
  misc_feature: 577 for SV(C|O) and 28S
gaccgtcgtgagacaggttagttttaccctactgatgatgtgttgttgccatggtaatcctgctcagtacgagaggaaccgcaggttcagacatttggtgtatgtgcttggctgaggagc

SEQ ID NO: 65595 - DNA, 120 bp, Homo sapiens; identical to SEQ ID NO: 51032
  misc_feature: 577 for SV(C|O) and 28S

SEQ ID NO: 65596 - DNA, 120 bp, Homo sapiens; identical to SEQ ID NO: 50121
  misc_feature: 577 for SV(C|O) and 28S

SEQ ID NO: 65597 - DNA, 120 bp, Homo sapiens
  misc_feature: 577 for SV(C|O) and 28S
caagcgagcttttgcccttctgctccacgggaggtttctgtcctccctgagctcgccttaggacacctgcgttaccgtttgacaggtgtaccgccccagtcaaactccccacctggcact

SEQ ID NO: 65598 - DNA, 120 bp, Homo sapiens; identical to SEQ ID NO: 49974
  misc_feature: 576 for SV(C|O) and 28S

SEQ ID NO: 65599 - DNA, 120 bp, Homo sapiens; identical to SEQ ID NO: 50863
  misc_feature: 576 for SV(C|O) and 28S

SEQ ID NO: 65600 - DNA, 120 bp, Homo sapiens; identical to SEQ ID NO: 50015
  misc_feature: 576 for SV(C|O) and 28S

SEQ ID NO: 65601 - DNA, 120 bp, Homo sapiens; identical to SEQ ID NO: 50844
  misc_feature: 576 for SV(C|O) and 28S

SEQ ID NO: 65602 - DNA, 120 bp, Homo sapiens; identical to SEQ ID NO: 49413
  misc_feature: 576 for SV(C|O) and 28S

SEQ ID NO: 65603 - DNA, 120 bp, Homo sapiens
  misc_feature: 576 for SV(C|O) and 28S
acgtgttagactccttggtccgtgtttcaagacgggtcgggtgggtagccgacgtcgccgccgaccccgtgcgctcgctccgccgtccccctcttcgggggacgcgcgcgtggccccgag

SEQ ID NO: 65604 - DNA, 120 bp, Homo sapiens; identical to SEQ ID NO: 49967
  misc_feature: 576 for SV(C|O) and 28S

SEQ ID NO: 65605 - DNA, 120 bp, Homo sapiens; identical to SEQ ID NO: 50284
  misc_feature: 576 for SV(C|O) and 28S

SEQ ID NO: 65606 - DNA, 120 bp, Homo sapiens; identical to SEQ ID NO: 49940
  misc_feature: 575 for SV(C|O) and 28S

SEQ ID NO: 65607 - DNA, 120 bp, Homo sapiens
  misc_feature: 575 for SV(C|O) and 28S
atcaagcgagcttttgcccttctgctccacgggaggtttctgtcctccctgagctcgccttaggacacctgcgttaccgtttgacaggtgtaccgccccagtcaaactccccacctggca

SEQ ID NO: 65608 - DNA, 120 bp, Homo sapiens; identical to SEQ ID NO: 50876
  misc_feature: 575 for SV(C|O) and 28S

SEQ ID NO: 65609 - DNA, 120 bp, Homo sapiens
  misc_feature: 575 for SV(C|O) and 28S
cgcacgtgttagactccttggtccgtgtttcaagacgggtcgggtgggtagccgacgtcgccgccgaccccgtgcgctcgctccgccgtccccctcttcgggggacgcgcgcgtggcccc

SEQ ID NO: 65610 - DNA, 120 bp, Homo sapiens
  misc_feature: 575 for SV(C|O) and 28S
ggcacgagaccgatagtcaacaagtaccgtaagggaaagttgaaaagaactttgaagagagagttcaagagggcgtgaaaccgttaagaggtaaacgggtggggtccgcgcagtccgccc

SEQ ID NO: 65611 - DNA, 120 bp, Homo sapiens
  misc_feature: 575 for SV(C|O) and 28S
cggcggagcgagcgcacggggtcggcggcgacgtcggctacccacccgacccgtcttgaaacacggaccaaggagtctaacacgtgcgcgagtcgggggctcgcacgaaagccgccgtgg

SEQ ID NO: 65612 - DNA, 120 bp, Homo sapiens; identical to SEQ ID NO: 50403
  misc_feature: 575 for SV(C|O) and 28S

SEQ ID NO: 65613 - DNA, 120 bp, Homo sapiens; identical to SEQ ID NO: 51040
  misc_feature: 575 for SV(C|O) and 28S

SEQ ID NO: 65614 - DNA, 120 bp, Homo sapiens; identical to SEQ ID NO: 50021
  misc_feature: 574 for SV(C|O) and 28S

SEQ ID NO: 65615 - DNA, 120 bp, Homo sapiens; identical to SEQ ID NO: 50100
  misc_feature: 574 for SV(C|O) and 28S

SEQ ID NO: 65616 - DNA, 120 bp, Homo sapiens; identical to SEQ ID NO: 50861
  misc_feature: 574 for SV(C|O) and 28S

SEQ ID NO: 65617 - DNA, 120 bp, Homo sapiens
  misc_feature: 574 for SV(C|O) and 28S
tgaaaagaactttgaagagagagttcaagagggcgtgaaaccgttaagaggtaaacgggtggggtccgcgcagtccgcccggaggattcaacccggcggcgggtccggccgtgtcggcgg

SEQ ID NO: 65618 - DNA, 120 bp, Homo sapiens; identical to SEQ ID NO: 50883
  misc_feature: 574 for SV(C|O) and 28S

SEQ ID NO: 65619 - DNA, 120 bp, Homo sapiens
  misc_feature: 574 for SV(C|O) and 28S
gtgttagactccttggtccgtgtttcaagacgggtcgggtgggtagccgacgtcgccgccgaccccgtgcgctcgctccgccgtccccctcttcgggggacgcgcgcgtggccccgagag

SEQ ID NO: 65620 - DNA, 120 bp, Homo sapiens
  misc_feature: 574 for SV(C|O) and 28S
actttgaaggccgaagtggagaagggttccatgtgaacagcagttgaacatgggtcagtcggtcctgagagatgggcgagcgccgttccgaagggacgggcgatggcctccgttgccctc

SEQ ID NO: 65621 - DNA, 120 bp, Homo sapiens; identical to SEQ ID NO: 49069
  misc_feature: 573 for SV(C|O) and 28S

SEQ ID NO: 65622 - DNA, 120 bp, Homo sapiens
  misc_feature: 573 for SV(C|O) and 28S
tcgcagcgagggagctgctctgctacgtacgaaaccccgacccagaagcaggtcgtctacgaatggtttagcgccaggttccccacgaacgtgcggtgcgtgacgggcgagggggcggcc

SEQ ID NO: 65623 - DNA, 120 bp, Homo sapiens
  misc_feature: 573 for SV(C|O) and 28S
gtgtttcaagacgggtcgggtgggtagccgacgtcgccgccgaccccgtgcgctcgctccgccgtccccctcttcgggggacgcgcgcgtggccccgagagaacctcccccgggcccgac

SEQ ID NO: 65624 - DNA, 120 bp, Homo sapiens; identical to SEQ ID NO: 50091
  misc_feature: 573 for SV(C|O) and 28S

SEQ ID NO: 65625 - DNA, 120 bp, Homo sapiens
  misc_feature: 573 for SV(C|O) and 28S
ggtgaaggccggcgcgctcgccggccgaggtgggatcccgaggcctctccagtccgccgagggcgcaccaccggcccgtctcgcccgccgcgccggggaggtggagcacgagcgcacgtg

SEQ ID NO: 65626 - DNA, 120 bp, Homo sapiens
  misc_feature: 573 for SV(C|O) and 28S
aaaagaactttgaagagagagttcaagagggcgtgaaaccgttaagaggtaaacgggtggggtccgcgcagtccgcccggaggattcaacccggcggcgggtccggccgtgtcggcggcc

SEQ ID NO: 65627 - DNA, 120 bp, Homo sapiens; identical to SEQ ID NO: 49981
  misc_feature: 573 for SV(C|O) and 28S

SEQ ID NO: 65628 - DNA, 120 bp, Homo sapiens; identical to SEQ ID NO: 50239
  misc_feature: 573 for SV(C|O) and 28S

SEQ ID NO: 65629 - DNA, 120 bp, Homo sapiens
  misc_feature: 573 for SV(C|O) and 28S
aagtggagaagggttccatgtgaacagcagttgaacatgggtcagtcggtcctgagagatgggcgagcgccgttccgaagggacgggcgatggcctccgttgccctcggccgatcgaaag

SEQ ID NO: 65630 - DNA, 120 bp, Homo sapiens; identical to SEQ ID NO: 50858
  misc_feature: 573 for SV(C|O) and 28S

SEQ ID NO: 65631 - DNA, 120 bp, Homo sapiens; identical to SEQ ID NO: 49871
  misc_feature: 573 for SV(C|O) and 28S

SEQ ID NO: 65632 - DNA, 120 bp, Homo sapiens; identical to SEQ ID NO: 49488
  misc_feature: 573 for SV(C|O) and 28S

SEQ ID NO: 65633 - DNA, 120 bp, Homo sapiens
  misc_feature: 572 for SV(C|O) and 28S
tgacgcgcatgaatggatgaacgagattcccactgtccctacctactatccagcgaaaccacagccaagggaacgggcttggcggaatcagcggggaaagaagaccctgttgagcttgac

SEQ ID NO: 65634 - DNA, 120 bp, Homo sapiens
  misc_feature: 572 for SV(C|O) and 28S
aaagaactttgaagagagagttcaagagggcgtgaaaccgttaagaggtaaacgggtggggtccgcgcagtccgcccggaggattcaacccggcggcgggtccggccgtgtcggcggccc

SEQ ID NO: 65635 - DNA, 120 bp, Homo sapiens
  misc_feature: 572 for SV(C|O) and 28S
gatcaagcgagcttttgcccttctgctccacgggaggtttctgtcctccctgagctcgccttaggacacctgcgttaccgtttgacaggtgtaccgccccagtcaaactccccacctggc

SEQ ID NO: 65636 - DNA, 120 bp, Homo sapiens; identical to SEQ ID NO: 50095
  misc_feature: 572 for SV(C|O) and 28S

SEQ ID NO: 65637 - DNA, 120 bp, Homo sapiens
  misc_feature: 572 for SV(C|O) and 28S
agagggggacggcggagcgagcgcacggggtcggcggcgacgtcggctacccacccgacccgtcttgaaacacggaccaaggagtctaacacgtgcgcgagtcgggggctcgcacgaaag

SEQ ID NO: 65638 - DNA, 120 bp, Homo sapiens; identical to SEQ ID NO: 49072
  misc_feature: 571 for SV(C|O) and 28S

SEQ ID NO: 65639 - DNA, 120 bp, Homo sapiens
  misc_feature: 571 for SV(C|O) and 28S
ttgaaaagaactttgaagagagagttcaagagggcgtgaaaccgttaagaggtaaacgggtggggtccgcgcagtccgcccggaggattcaacccggcggcgggtccggccgtgtcggcg

SEQ ID NO: 65640 - DNA, 120 bp, Homo sapiens; identical to SEQ ID NO: 49866
  misc_feature: 571 for SV(C|O) and 28S

SEQ ID NO: 65641 - DNA, 120 bp, Homo sapiens; identical to SEQ ID NO: 50371
  misc_feature: 571 for SV(C|O) and 28S

SEQ ID NO: 65642 - DNA, 120 bp, Homo sapiens; identical to SEQ ID NO: 49237
  misc_feature: 571 for SV(C|O) and 28S

SEQ ID NO: 65643 - DNA, 120 bp, Homo sapiens; identical to SEQ ID NO: 50101
  misc_feature: 571 for SV(C|O) and 28S

SEQ ID NO: 65644 - DNA, 120 bp, Homo sapiens; identical to SEQ ID NO: 50633
  misc_feature: 571 for SV(C|O) and 28S

SEQ ID NO: 65645 - DNA, 120 bp, Homo sapiens; identical to SEQ ID NO: 50059
  misc_feature: 571 for SV(C|O) and 28S

SEQ ID NO: 65646 - DNA, 120 bp, Homo sapiens; identical to SEQ ID NO: 51126
  misc_feature: 571 for SV(C|O) and 28S

SEQ ID NO: 65647 - DNA, 120 bp, Homo sapiens; identical to SEQ ID NO: 49340
  misc_feature: 571 for SV(C|O) and 28S

SEQ ID NO: 65648 - DNA, 120 bp, Homo sapiens; identical to SEQ ID NO: 49937
  misc_feature: 571 for SV(C|O) and 28S

SEQ ID NO: 65649 - DNA, 120 bp, Homo sapiens; identical to SEQ ID NO: 49403
  misc_feature: 571 for SV(C|O) and 28S

SEQ ID NO: 65650 - DNA, 120 bp, Homo sapiens; identical to SEQ ID NO: 49907
  misc_feature: 570 for SV(C|O) and 28S

SEQ ID NO: 65651 - DNA, 120 bp, Homo sapiens
  misc_feature: 570 for SV(C|O) and 28S
gcgcacgtgttagactccttggtccgtgtttcaagacgggtcgggtgggtagccgacgtcgccgccgaccccgtgcgctcgctccgccgtccccctcttcgggggacgcgcgcgtggccc

SEQ ID NO: 65652 - DNA, 120 bp, Homo sapiens
  misc_feature: 570 for SV(C|O) and 28S
gaaaagaactttgaagagagagttcaagagggcgtgaaaccgttaagaggtaaacgggtggggtccgcgcagtccgcccggaggattcaacccggcggcgggtccggccgtgtcggcggc

SEQ ID NO: 65653 - DNA, 120 bp, Homo sapiens; identical to SEQ ID NO: 51042
  misc_feature: 570 for SV(C|O) and 28S

SEQ ID NO: 65654 - DNA, 120 bp, Homo sapiens; identical to SEQ ID NO: 49953
  misc_feature: 570 for SV(C|O) and 28S

SEQ ID NO: 65655 - DNA, 120 bp, Homo sapiens
  misc_feature: 570 for SV(C|O) and 28S
aagaactttgaagagagagttcaagagggcgtgaaaccgttaagaggtaaacgggtggggtccgcgcagtccgcccggaggattcaacccggcggcgggtccggccgtgtcggcggcccg

SEQ ID NO: 65656 - DNA, 120 bp, Homo sapiens; identical to SEQ ID NO: 51095
  misc_feature: 570 for SV(C|O) and 28S

SEQ ID NO: 65657 - DNA, 120 bp, Homo sapiens; identical to SEQ ID NO: 49299
  misc_feature: 570 for SV(C|O) and 28S

SEQ ID NO: 65658 - DNA, 120 bp, Homo sapiens
  misc_feature: 570 for SV(C|O) and 28S
agtgacgcgcatgaatggatgaacgagattcccactgtccctacctactatccagcgaaaccacagccaagggaacgggcttggcggaatcagcggggaaagaagaccctgttgagcttg

SEQ ID NO: 65659 - DNA, 120 bp, Homo sapiens
  misc_feature: 570 for SV(C|O) and 28S
aactttgaaggccgaagtggagaagggttccatgtgaacagcagttgaacatgggtcagtcggtcctgagagatgggcgagcgccgttccgaagggacgggcgatggcctccgttgccct

SEQ ID NO: 65660 - DNA, 120 bp, Homo sapiens
  misc_feature: 569 for SV(C|O) and 28S
gaagtggagaagggttccatgtgaacagcagttgaacatgggtcagtcggtcctgagagatgggcgagcgccgttccgaagggacgggcgatggcctccgttgccctcggccgatcgaaa

SEQ ID NO: 65661 - DNA, 120 bp, Homo sapiens; identical to SEQ ID NO: 50040
  misc_feature: 569 for SV(C|O) and 28S

SEQ ID NO: 65662 - DNA, 120 bp, Homo sapiens; identical to SEQ ID NO: 50506
  misc_feature: 569 for SV(C|O) and 28S

SEQ ID NO: 65663 - DNA, 120 bp, Homo sapiens
  misc_feature: 569 for SV(C|O) and 28S
gaactttgaaggccgaagtggagaagggttccatgtgaacagcagttgaacatgggtcagtcggtcctgagagatgggcgagcgccgttccgaagggacgggcgatggcctccgttgccc

SEQ ID NO: 65664 - DNA, 120 bp, Homo sapiens
  misc_feature: 569 for SV(C|O) and 28S
gcacgtgttagactccttggtccgtgtttcaagacgggtcgggtgggtagccgacgtcgccgccgaccccgtgcgctcgctccgccgtccccctcttcgggggacgcgcgcgtggccccg

SEQ ID NO: 65665 - DNA, 120 bp, Homo sapiens; identical to SEQ ID NO: 50177
  misc_feature: 569 for SV(C|O) and 28S

SEQ ID NO: 65666 - DNA, 120 bp, Homo sapiens; identical to SEQ ID NO: 51159
  misc_feature: 569 for SV(C|O) and 28S

SEQ ID NO: 65667 - DNA, 120 bp, Homo sapiens; identical to SEQ ID NO: 49590
  misc_feature: 568 for SV(C|O) and 28S

SEQ ID NO: 65668 - DNA, 120 bp, Homo sapiens; identical to SEQ ID NO: 50610
  misc_feature: 568 for SV(C|O) and 28S

SEQ ID NO: 65669 - DNA, 120 bp, Homo sapiens
  misc_feature: 568 for SV(C|O) and 28S
ataccggcacgagaccgatagtcaacaagtaccgtaagggaaagttgaaaagaactttgaagagagagttcaagagggcgtgaaaccgttaagaggtaaacgggtggggtccgcgcagtc

SEQ ID NO: 65670 - DNA, 120 bp, Homo sapiens; identical to SEQ ID NO: 49247
  misc_feature: 568 for SV(C|O) and 28S

SEQ ID NO: 65671 - DNA, 120 bp, Homo sapiens; identical to SEQ ID NO: 50879
  misc_feature: 567 for SV(C|O) and 28S

SEQ ID NO: 65672 - DNA, 120 bp, Homo sapiens; identical to SEQ ID NO: 50701
  misc_feature: 567 for SV(C|O) and 28S

SEQ ID NO: 65673 - DNA, 120 bp, Homo sapiens
  misc_feature: 567 for SV(C|O) and 28S
taccggcacgagaccgatagtcaacaagtaccgtaagggaaagttgaaaagaactttgaagagagagttcaagagggcgtgaaaccgttaagaggtaaacgggtggggtccgcgcagtcc

SEQ ID NO: 65674 - DNA, 120 bp, Homo sapiens; identical to SEQ ID NO: 49245
  misc_feature: 567 for SV(C|O) and 28S

SEQ ID NO: 65675 - DNA, 120 bp, Homo sapiens
  misc_feature: 567 for SV(C|O) and 28S
ggacggcggagcgagcgcacggggtcggcggcgacgtcggctacccacccgacccgtcttgaaacacggaccaaggagtctaacacgtgcgcgagtcgggggctcgcacgaaagccgccg

SEQ ID NO: 65676 - DNA, 120 bp, Homo sapiens; identical to SEQ ID NO: 49081
  misc_feature: 567 for SV(C|O) and 28S

SEQ ID NO: 65677 - DNA, 120 bp, Homo sapiens
  misc_feature: 567 for SV(C|O) and 28S
aagcgagcttttgcccttctgctccacgggaggtttctgtcctccctgagctcgccttaggacacctgcgttaccgtttgacaggtgtaccgccccagtcaaactccccacctggcactg

SEQ ID NO: 65678 - DNA, 120 bp, Homo sapiens
  misc_feature: 567 for SV(C|O) and 28S
acggcggagcgagcgcacggggtcggcggcgacgtcggctacccacccgacccgtcttgaaacacggaccaaggagtctaacacgtgcgcgagtcgggggctcgcacgaaagccgccgtg

SEQ ID NO: 65679 - DNA, 120 bp, Homo sapiens; identical to SEQ ID NO: 50135
  misc_feature: 567 for SV(C|O) and 28S

SEQ ID NO: 65680 - DNA, 120 bp, Homo sapiens; identical to SEQ ID NO: 49998
  misc_feature: 566 for SV(C|O) and 28S

SEQ ID NO: 65681 - DNA, 120 bp, Homo sapiens
  misc_feature: 566 for SV(C|O) and 28S
tgtttcaagacgggtcgggtgggtagccgacgtcgccgccgaccccgtgcgctcgctccgccgtccccctcttcgggggacgcgcgcgtggccccgagagaacctcccccgggcccgacg

SEQ ID NO: 65682 - DNA, 120 bp, Homo sapiens
  misc_feature: 566 for SV(C|O) and 28S
tctttgtgaagggcagggcgccctggaatgggttcgccccgagagaggggcccgtgccttggaaagcgtcgcggttccggcggcgtccggtgagctctcgctggcccttgaaaatccggg

SEQ ID NO: 65683 - DNA, 120 bp, Homo sapiens; identical to SEQ ID NO: 50329
  misc_feature: 566 for SV(C|O) and 28S

SEQ ID NO: 65684 - DNA, 120 bp, Homo sapiens
  misc_feature: 566 for SV(C|O) and 28S
agcttttgcccttctgctccacgggaggtttctgtcctccctgagctcgccttaggacacctgcgttaccgtttgacaggtgtaccgccccagtcaaactccccacctggcactgtcccc

SEQ ID NO: 65685 - DNA, 120 bp, Homo sapiens
  misc_feature: 566 for SV(C|O) and 28S
agaactttgaaggccgaagtggagaagggttccatgtgaacagcagttgaacatgggtcagtcggtcctgagagatgggcgagcgccgttccgaagggacgggcgatggcctccgttgcc

SEQ ID NO: 65686 - DNA, 120 bp, Homo sapiens; identical to SEQ ID NO: 50902
  misc_feature: 566 for SV(C|O) and 28S

SEQ ID NO: 65687 - DNA, 120 bp, Homo sapiens; identical to SEQ ID NO: 49926
  misc_feature: 566 for SV(C|O) and 28S

SEQ ID NO: 65688 - DNA, 120 bp, Homo sapiens; identical to SEQ ID NO: 49802
  misc_feature: 566 for SV(C|O) and 28S

SEQ ID NO: 65689 - DNA, 120 bp, Homo sapiens; identical to SEQ ID NO: 49096
  misc_feature: 565 for SV(C|O) and 28S

SEQ ID NO: 65690 - DNA, 120 bp, Homo sapiens
  misc_feature: 565 for SV(C|O) and 28S
tccttatcccgaagttacggatccggcttgccgacttcccttacctacattgttccaacatgccagaggctgttcaccttggagacctgctgcggatatgggtacggcccggcgcgagat

SEQ ID NO: 65691 - DNA, 120 bp, Homo sapiens
  misc_feature: 565 for SV(C|O) and 28S
gaaggccggcgcgctcgccggccgaggtgggatcccgaggcctctccagtccgccgagggcgcaccaccggcccgtctcgcccgccgcgccggggaggtggagcacgagcgcacgtgtta

SEQ ID NO: 65692 - DNA, 120 bp, Homo sapiens
  misc_feature: 565 for SV(C|O) and 28S
ggcggagcgagcgcacggggtcggcggcgacgtcggctacccacccgacccgtcttgaaacacggaccaaggagtctaacacgtgcgcgagtcgggggctcgcacgaaagccgccgtggc

SEQ ID NO: 65693 - DNA, 120 bp, Homo sapiens
  misc_feature: 565 for SV(C|O) and 28S
ccggcacgagaccgatagtcaacaagtaccgtaagggaaagttgaaaagaactttgaagagagagttcaagagggcgtgaaaccgttaagaggtaaacgggtggggtccgcgcagtccgc

SEQ ID NO: 65694 - DNA, 120 bp, Homo sapiens
  misc_feature: 565 for SV(C|O) and 28S
aaggccggcgcgctcgccggccgaggtgggatcccgaggcctctccagtccgccgagggcgcaccaccggcccgtctcgcccgccgcgccggggaggtggagcacgagcgcacgtgttag

SEQ ID NO: 65695 - DNA, 120 bp, Homo sapiens; identical to SEQ ID NO: 50019
  misc_feature: 565 for SV(C|O) and 28S

SEQ ID NO: 65696 - DNA, 120 bp, Homo sapiens; identical to SEQ ID NO: 49314
  misc_feature: 564 for SV(C|O) and 28S

SEQ ID NO: 65697 - DNA, 120 bp, Homo sapiens; identical to SEQ ID NO: 49315
  misc_feature: 564 for SV(C|O) and 28S

SEQ ID NO: 65698 - DNA, 120 bp, Homo sapiens; identical to SEQ ID NO: 50219
  misc_feature: 564 for SV(C|O) and 28S

SEQ ID NO: 65699 - DNA, 120 bp, Homo sapiens; identical to SEQ ID NO: 49076
  misc_feature: 564 for SV(C|O) and 28S

SEQ ID NO: 65700 - DNA, 120 bp, Homo sapiens; identical to SEQ ID NO: 49064
  misc_feature: 563 for SV(C|O) and 28S

SEQ ID NO: 65701 - DNA, 120 bp, Homo sapiens; identical to SEQ ID NO: 50285
  misc_feature: 563 for SV(C|O) and 28S

SEQ ID NO: 65702 - DNA, 120 bp, Homo sapiens; identical to SEQ ID NO: 50225
  misc_feature: 563 for SV(C|O) and 28S

SEQ ID NO: 65703 - DNA, 120 bp, Homo sapiens
  misc_feature: 563 for SV(C|O) and 28S
gtttcaagacgggtcgggtgggtagccgacgtcgccgccgaccccgtgcgctcgctccgccgtccccctcttcgggggacgcgcgcgtggccccgagagaacctcccccgggcccgacgg

SEQ ID NO: 65704 - DNA, 120 bp, Homo sapiens; identical to SEQ ID NO: 50382
  misc_feature: 563 for SV(C|O) and 28S

SEQ ID NO: 65705 - DNA, 120 bp, Homo sapiens
  misc_feature: 563 for SV(C|O) and 28S
aataccggcacgagaccgatagtcaacaagtaccgtaagggaaagttgaaaagaactttgaagagagagttcaagagggcgtgaaaccgttaagaggtaaacgggtggggtccgcgcagt

SEQ ID NO: 65706 - DNA, 120 bp, Homo sapiens; identical to SEQ ID NO: 49957
  misc_feature: 562 for SV(C|O) and 28S

SEQ ID NO: 65707 - DNA, 120 bp, Homo sapiens
  misc_feature: 562 for SV(C|O) and 28S
tgaaggccggcgcgctcgccggccgaggtgggatcccgaggcctctccagtccgccgagggcgcaccaccggcccgtctcgcccgccgcgccggggaggtggagcacgagcgcacgtgtt

SEQ ID NO: 65708 - DNA, 120 bp, Homo sapiens; identical to SEQ ID NO: 49945
  misc_feature: 562 for SV(C|O) and 28S

SEQ ID NO: 65709 - DNA, 120 bp, Homo sapiens; identical to SEQ ID NO: 50922
  misc_feature: 562 for SV(C|O) and 28S

SEQ ID NO: 65710 - DNA, 120 bp, Homo sapiens; identical to SEQ ID NO: 50110
  misc_feature: 562 for SV(C|O) and 28S

SEQ ID NO: 65711 - DNA, 120 bp, Homo sapiens; identical to SEQ ID NO: 49326
  misc_feature: 562 for SV(C|O) and 28S

SEQ ID NO: 65712 - DNA, 120 bp, Homo sapiens
  misc_feature: 562 for SV(C|O) and 28S
gagcttttgcccttctgctccacgggaggtttctgtcctccctgagctcgccttaggacacctgcgttaccgtttgacaggtgtaccgccccagtcaaactccccacctggcactgtccc

SEQ ID NO: 65713 - DNA, 120 bp, Homo sapiens
  misc_feature: 562 for SV(C|O) and 28S
cagcaggtctccaaggtgaacagcctctggcatgttggaacaatgtaggtaagggaagtcggcaagccggatccgtaacttcgggataaggattggctctaagggctgggtcggtcgggc

SEQ ID NO: 65714 - DNA, 120 bp, Homo sapiens
  misc_feature: 562 for SV(C|O) and 28S
gacggcggagcgagcgcacggggtcggcggcgacgtcggctacccacccgacccgtcttgaaacacggaccaaggagtctaacacgtgcgcgagtcgggggctcgcacgaaagccgccgt

SEQ ID NO: 65715 - DNA, 120 bp, Homo sapiens
  misc_feature: 561 for SV(C|O) and 28S
atccttatcccgaagttacggatccggcttgccgacttcccttacctacattgttccaacatgccagaggctgttcaccttggagacctgctgcggatatgggtacggcccggcgcgaga

SEQ ID NO: 65716 - DNA, 120 bp, Homo sapiens
  misc_feature: 561 for SV(C|O) and 28S
gtgaaggccggcgcgctcgccggccgaggtgggatcccgaggcctctccagtccgccgagggcgcaccaccggcccgtctcgcccgccgcgccggggaggtggagcacgagcgcacgtgt

SEQ ID NO: 65717 - DNA, 120 bp, Homo sapiens
  misc_feature: 561 for SV(C|O) and 28S
gcacggggtcggcggcgacgtcggctacccacccgacccgtcttgaaacacggaccaaggagtctaacacgtgcgcgagtcgggggctcgcacgaaagccgccgtggcgcaatgaaggtg

SEQ ID NO: 65718 - DNA, 120 bp, Homo sapiens
  misc_feature: 561 for SV(C|O) and 28S
ctttgtgaagggcagggcgccctggaatgggttcgccccgagagaggggcccgtgccttggaaagcgtcgcggttccggcggcgtccggtgagctctcgctggcccttgaaaatccgggg

SEQ ID NO: 65719 - DNA, 120 bp, Homo sapiens
  misc_feature: 561 for SV(C|O) and 28S
ccttatcccgaagttacggatccggcttgccgacttcccttacctacattgttccaacatgccagaggctgttcaccttggagacctgctgcggatatgggtacggcccggcgcgagatt

SEQ ID NO: 65720 - DNA, 120 bp, Homo sapiens
  misc_feature: 561 for SV(C|O) and 28S
agcgagcttttgcccttctgctccacgggaggtttctgtcctccctgagctcgccttaggacacctgcgttaccgtttgacaggtgtaccgccccagtcaaactccccacctggcactgt

SEQ ID NO: 65721 - DNA, 120 bp, Homo sapiens; identical to SEQ ID NO: 50151
  misc_feature: 560 for SV(C|O) and 28S

SEQ ID NO: 65722 - DNA, 120 bp, Homo sapiens; identical to SEQ ID NO: 50235
  misc_feature: 560 for SV(C|O) and 28S

SEQ ID NO: 65723 - DNA, 120 bp, Homo sapiens
  misc_feature: 560 for SV(C|O) and 28S
gtgacgcgcatgaatggatgaacgagattcccactgtccctacctactatccagcgaaaccacagccaagggaacgggcttggcggaatcagcggggaaagaagaccctgttgagcttga

SEQ ID NO: 65724 - DNA, 120 bp, Homo sapiens; identical to SEQ ID NO: 50200
  misc_feature: 560 for SV(C|O) and 28S

SEQ ID NO: 65725 - DNA, 120 bp, Homo sapiens
  misc_feature: 560 for SV(C|O) and 28S
agtggagaagggttccatgtgaacagcagttgaacatgggtcagtcggtcctgagagatgggcgagcgccgttccgaagggacgggcgatggcctccgttgccctcggccgatcgaaagg

SEQ ID NO: 65726 - DNA, 120 bp, Homo sapiens; identical to SEQ ID NO: 49082
  misc_feature: 560 for SV(C|O) and 28S

SEQ ID NO: 65727 - DNA, 120 bp, Homo sapiens
  misc_feature: 559 for SV(C|O) and 28S
ttttgcccttctgctccacgggaggtttctgtcctccctgagctcgccttaggacacctgcgttaccgtttgacaggtgtaccgccccagtcaaactccccacctggcactgtccccgga

SEQ ID NO: 65728 - DNA, 120 bp, Homo sapiens
  misc_feature: 559 for SV(C|O) and 28S
tttgcccttctgctccacgggaggtttctgtcctccctgagctcgccttaggacacctgcgttaccgtttgacaggtgtaccgccccagtcaaactccccacctggcactgtccccggag

SEQ ID NO: 65729 - DNA, 120 bp, Homo sapiens; identical to SEQ ID NO: 50940
  misc_feature: 559 for SV(C|O) and 28S

SEQ ID NO: 65730 - DNA, 120 bp, Homo sapiens; identical to SEQ ID NO: 49373
  misc_feature: 559 for SV(C|O) and 28S

SEQ ID NO: 65731 - DNA, 120 bp, Homo sapiens
  misc_feature: 559 for SV(C|O) and 28S
cgtcatctaattagtgacgcgcatgaatggatgaacgagattcccactgtccctacctactatccagcgaaaccacagccaagggaacgggcttggcggaatcagcggggaaagaagacc

SEQ ID NO: 65732 - DNA, 120 bp, Homo sapiens; identical to SEQ ID NO: 50566
  misc_feature: 559 for SV(C|O) and 28S

SEQ ID NO: 65733 - DNA, 120 bp, Homo sapiens; identical to SEQ ID NO: 50174
  misc_feature: 559 for SV(C|O) and 28S

SEQ ID NO: 65734 - DNA, 120 bp, Homo sapiens; identical to SEQ ID NO: 51092
  misc_feature: 559 for SV(C|O) and 28S

SEQ ID NO: 65735 - DNA, 120 bp, Homo sapiens
  misc_feature: 559 for SV(C|O) and 28S
gcagcaggtctccaaggtgaacagcctctggcatgttggaacaatgtaggtaagggaagtcggcaagccggatccgtaacttcgggataaggattggctctaagggctgggtcggtcggg

SEQ ID NO: 65736 - DNA, 120 bp, Homo sapiens
  misc_feature: 559 for SV(C|O) and 28S
aatccttatcccgaagttacggatccggcttgccgacttcccttacctacattgttccaacatgccagaggctgttcaccttggagacctgctgcggatatgggtacggcccggcgcgag

SEQ ID NO: 65737 - DNA, 120 bp, Homo sapiens; identical to SEQ ID NO: 50667
  misc_feature: 559 for SV(C|O) and 28S

SEQ ID NO: 65738 - DNA, 120 bp, Homo sapiens; identical to SEQ ID NO: 49900
  misc_feature: 559 for SV(C|O) and 28S

SEQ ID NO: 65739 - DNA, 120 bp, Homo sapiens; identical to SEQ ID NO: 50037
  misc_feature: 558 for SV(C|O) and 28S

SEQ ID NO: 65740 - DNA, 120 bp, Homo sapiens
  misc_feature: 558 for SV(C|O) and 28S
acggggtcggcggcgacgtcggctacccacccgacccgtcttgaaacacggaccaaggagtctaacacgtgcgcgagtcgggggctcgcacgaaagccgccgtggcgcaatgaaggtgaa

SEQ ID NO: 65741 - DNA, 120 bp, Homo sapiens; identical to SEQ ID NO: 50794
  misc_feature: 558 for SV(C|O) and 28S

SEQ ID NO: 65742 - DNA, 120 bp, Homo sapiens; identical to SEQ ID NO: 49930
  misc_feature: 558 for SV(C|O) and 28S

SEQ ID NO: 65743 - DNA, 120 bp, Homo sapiens; identical to SEQ ID NO: 49975
  misc_feature: 558 for SV(C|O) and 28S

SEQ ID NO: 65744 - DNA, 120 bp, Homo sapiens; identical to SEQ ID NO: 49077
  misc_feature: 558 for SV(C|O) and 28S

SEQ ID NO: 65745 - DNA, 120 bp, Homo sapiens; identical to SEQ ID NO: 49745
  misc_feature: 558 for SV(C|O) and 28S

SEQ ID NO: 65746 - DNA, 120 bp, Homo sapiens; identical to SEQ ID NO: 50340
  misc_feature: 558 for SV(C|O) and 28S

SEQ ID NO: 65747 - DNA, 120 bp, Homo sapiens
  misc_feature: 558 for SV(C|O) and 28S
cttatcccgaagttacggatccggcttgccgacttcccttacctacattgttccaacatgccagaggctgttcaccttggagacctgctgcggatatgggtacggcccggcgcgagattt

SEQ ID NO: 65748 - DNA, 120 bp, Homo sapiens
  misc_feature: 558 for SV(C|O) and 28S
aggccggcgcgctcgccggccgaggtgggatcccgaggcctctccagtccgccgagggcgcaccaccggcccgtctcgcccgccgcgccggggaggtggagcacgagcgcacgtgttagg

SEQ ID NO: 65749 - DNA, 120 bp, Homo sapiens
  misc_feature: 558 for SV(C|O) and 28S
aggtcggacgaccgatttgcacgtcaggaccgctacggacctccaccagagtttcctctggcttcgccctgcccaggcatagttcaccatctttcgggtcctaacacgtgcgctcgtgct

SEQ ID NO: 65750 - DNA, 120 bp, Homo sapiens; identical to SEQ ID NO: 50808
  misc_feature: 557 for SV(C|O) and 28S

SEQ ID NO: 65751 - DNA, 120 bp, Homo sapiens; identical to SEQ ID NO: 49725
  misc_feature: 557 for SV(C|O) and 28S

SEQ ID NO: 65752 - DNA, 120 bp, Homo sapiens; identical to SEQ ID NO: 50661
  misc_feature: 557 for SV(C|O) and 28S

SEQ ID NO: 65753 - DNA, 120 bp, Homo sapiens; identical to SEQ ID NO: 50068
  misc_feature: 557 for SV(C|O) and 28S

SEQ ID NO: 65754 - DNA, 120 bp, Homo sapiens
  misc_feature: 557 for SV(C|O) and 28S
gtctccaaggtgaacagcctctggcatgttggaacaatgtaggtaagggaagtcggcaagccggatccgtaacttcgggataaggattggctctaagggctgggtcggtcgggctggggc

SEQ ID NO: 65755 - DNA, 120 bp, Homo sapiens; identical to SEQ ID NO: 49094
  misc_feature: 557 for SV(C|O) and 28S

SEQ ID NO: 65756 - DNA, 120 bp, Homo sapiens
  misc_feature: 557 for SV(C|O) and 28S
gcggagcgagcgcacggggtcggcggcgacgtcggctacccacccgacccgtcttgaaacacggaccaaggagtctaacacgtgcgcgagtcgggggctcgcacgaaagccgccgtggcg

SEQ ID NO: 65757 - DNA, 120 bp, Homo sapiens; identical to SEQ ID NO: 49101
  misc_feature: 557 for SV(C|O) and 28S

SEQ ID NO: 65758 - DNA, 120 bp, Homo sapiens; identical to SEQ ID NO: 49318
  misc_feature: 557 for SV(C|O) and 28S

SEQ ID NO: 65759 - DNA, 120 bp, Homo sapiens
  misc_feature: 557 for SV(C|O) and 28S
aaataccggcacgagaccgatagtcaacaagtaccgtaagggaaagttgaaaagaactttgaagagagagttcaagagggcgtgaaaccgttaagaggtaaacgggtggggtccgcgcag

SEQ ID NO: 65760 - DNA, 120 bp, Homo sapiens; identical to SEQ ID NO: 50293
  misc_feature: 556 for SV(C|O) and 28S

SEQ ID NO: 65761 - DNA, 120 bp, Homo sapiens; identical to SEQ ID NO: 49227
  misc_feature: 556 for SV(C|O) and 28S

SEQ ID NO: 65762 - DNA, 120 bp, Homo sapiens
  misc_feature: 556 for SV(C|O) and 28S
tggagaagggttccatgtgaacagcagttgaacatgggtcagtcggtcctgagagatgggcgagcgccgttccgaagggacgggcgatggcctccgttgccctcggccgatcgaaaggga

SEQ ID NO: 65763 - DNA, 120 bp, Homo sapiens
  misc_feature: 556 for SV(C|O) and 28S
taaataccggcacgagaccgatagtcaacaagtaccgtaagggaaagttgaaaagaactttgaagagagagttcaagagggcgtgaaaccgttaagaggtaaacgggtggggtccgcgca

SEQ ID NO: 65764 - DNA, 120 bp, Homo sapiens
  misc_feature: 556 for SV(C|O) and 28S
cacggggtcggcggcgacgtcggctacccacccgacccgtcttgaaacacggaccaaggagtctaacacgtgcgcgagtcgggggctcgcacgaaagccgccgtggcgcaatgaaggtga

SEQ ID NO: 65765 - DNA, 120 bp, Homo sapiens; identical to SEQ ID NO: 50012
  misc_feature: 556 for SV(C|O) and 28S

SEQ ID NO: 65766 - DNA, 120 bp, Homo sapiens; identical to SEQ ID NO: 50470
  misc_feature: 556 for SV(C|O) and 28S

SEQ ID NO: 65767 - DNA, 120 bp, Homo sapiens; identical to SEQ ID NO: 50190
  misc_feature: 556 for SV(C|O) and 28S

SEQ ID NO: 65768 - DNA, 120 bp, Homo sapiens; identical to SEQ ID NO: 49087
  misc_feature: 556 for SV(C|O) and 28S

SEQ ID NO: 65769 - DNA, 120 bp, Homo sapiens; identical to SEQ ID NO: 50228
  misc_feature: 556 for SV(C|O) and 28S

SEQ ID NO: 65770 - DNA, 120 bp, Homo sapiens; identical to SEQ ID NO: 51050
  misc_feature: 556 for SV(C|O) and 28S

SEQ ID NO: 65771 - DNA, 120 bp, Homo sapiens; identical to SEQ ID NO: 49063
  misc_feature: 556 for SV(C|O) and 28S

SEQ ID NO: 65772 - DNA, 120 bp, Homo sapiens; identical to SEQ ID NO: 49394
  misc_feature: 555 for SV(C|O) and 28S

SEQ ID NO: 65773 - DNA, 120 bp, Homo sapiens
  misc_feature: 555 for SV(C|O) and 28S
gtggagaagggttccatgtgaacagcagttgaacatgggtcagtcggtcctgagagatgggcgagcgccgttccgaagggacgggcgatggcctccgttgccctcggccgatcgaaaggg

SEQ ID NO: 65774 - DNA, 120 bp, Homo sapiens; identical to SEQ ID NO: 50029
  misc_feature: 555 for SV(C|O) and 28S

SEQ ID NO: 65775 - DNA, 120 bp, Homo sapiens
  misc_feature: 555 for SV(C|O) and 28S
gcttttgcccttctgctccacgggaggtttctgtcctccctgagctcgccttaggacacctgcgttaccgtttgacaggtgtaccgccccagtcaaactccccacctggcactgtccccg

SEQ ID NO: 65776 - DNA, 120 bp, Homo sapiens; identical to SEQ ID NO: 50096
  misc_feature: 555 for SV(C|O) and 28S

SEQ ID NO: 65777 - DNA, 120 bp, Homo sapiens
  misc_feature: 555 for SV(C|O) and 28S
gagaagggttccatgtgaacagcagttgaacatgggtcagtcggtcctgagagatgggcgagcgccgttccgaagggacgggcgatggcctccgttgccctcggccgatcgaaagggagt

SEQ ID NO: 65778 - DNA, 120 bp, Homo sapiens
  misc_feature: 555 for SV(C|O) and 28S
accggcacgagaccgatagtcaacaagtaccgtaagggaaagttgaaaagaactttgaagagagagttcaagagggcgtgaaaccgttaagaggtaaacgggtggggtccgcgcagtccg

SEQ ID NO: 65779 - DNA, 120 bp, Homo sapiens
  misc_feature: 554 for SV(C|O) and 28S
tttgtgaagggcagggcgccctggaatgggttcgccccgagagaggggcccgtgccttggaaagcgtcgcggttccggcggcgtccggtgagctctcgctggcccttgaaaatccggggg

SEQ ID NO: 65780 - DNA, 120 bp, Homo sapiens; identical to SEQ ID NO: 50802
  misc_feature: 554 for SV(C|O) and 28S

SEQ ID NO: 65781 - DNA, 120 bp, Homo sapiens
  misc_feature: 554 for SV(C|O) and 28S
gaagagggggacggcggagcgagcgcacggggtcggcggcgacgtcggctacccacccgacccgtcttgaaacacggaccaaggagtctaacacgtgcgcgagtcgggggctcgcacgaa

SEQ ID NO: 65782 - DNA, 120 bp, Homo sapiens; identical to SEQ ID NO: 50424
  misc_feature: 554 for SV(C|O) and 28S

SEQ ID NO: 65783 - DNA, 120 bp, Homo sapiens
  misc_feature: 554 for SV(C|O) and 28S
gcaggtctccaaggtgaacagcctctggcatgttggaacaatgtaggtaagggaagtcggcaagccggatccgtaacttcgggataaggattggctctaagggctgggtcggtcgggctg

SEQ ID NO: 65784 - DNA, 120 bp, Homo sapiens
  misc_feature: 554 for SV(C|O) and 28S
gagaactttgaaggccgaagtggagaagggttccatgtgaacagcagttgaacatgggtcagtcggtcctgagagatgggcgagcgccgttccgaagggacgggcgatggcctccgttgc

SEQ ID NO: 65785 - DNA, 120 bp, Homo sapiens; identical to SEQ ID NO: 50567
  misc_feature: 554 for SV(C|O) and 28S

SEQ ID NO: 65786 - DNA, 120 bp, Homo sapiens; identical to SEQ ID NO: 50282
  misc_feature: 554 for SV(C|O) and 28S

SEQ ID NO: 65787 - DNA, 120 bp, Homo sapiens; identical to SEQ ID NO: 50602
  misc_feature: 554 for SV(C|O) and 28S

SEQ ID NO: 65788 - DNA, 120 bp, Homo sapiens
  misc_feature: 554 for SV(C|O) and 28S
agcaggtctccaaggtgaacagcctctggcatgttggaacaatgtaggtaagggaagtcggcaagccggatccgtaacttcgggataaggattggctctaagggctgggtcggtcgggct

SEQ ID NO: 65789 - DNA, 120 bp, Homo sapiens; identical to SEQ ID NO: 49329
  misc_feature: 553 for SV(C|O) and 28S

SEQ ID NO: 65790 - DNA, 120 bp, Homo sapiens; identical to SEQ ID NO: 50038
  misc_feature: 553 for SV(C|O) and 28S

SEQ ID NO: 65791 - DNA, 120 bp, Homo sapiens
  misc_feature: 553 for SV(C|O) and 28S
ggagaagggttccatgtgaacagcagttgaacatgggtcagtcggtcctgagagatgggcgagcgccgttccgaagggacgggcgatggcctccgttgccctcggccgatcgaaagggag

SEQ ID NO: 65792 - DNA, 120 bp, Homo sapiens; identical to SEQ ID NO: 50381
  misc_feature: 553 for SV(C|O) and 28S

SEQ ID NO: 65793 - DNA, 120 bp, Homo sapiens
  misc_feature: 553 for SV(C|O) and 28S
aggtctccaaggtgaacagcctctggcatgttggaacaatgtaggtaagggaagtcggcaagccggatccgtaacttcgggataaggattggctctaagggctgggtcggtcgggctggg

SEQ ID NO: 65794 - DNA, 120 bp, Homo sapiens
  misc_feature: 552 for SV(C|O) and 28S
ttgcccttctgctccacgggaggtttctgtcctccctgagctcgccttaggacacctgcgttaccgtttgacaggtgtaccgccccagtcaaactccccacctggcactgtccccggagc

SEQ ID NO: 65795 - DNA, 120 bp, Homo sapiens; identical to SEQ ID NO: 50564
  misc_feature: 552 for SV(C|O) and 28S

SEQ ID NO: 65796 - DNA, 120 bp, Homo sapiens
  misc_feature: 552 for SV(C|O) and 28S
ggggtcggcggcgacgtcggctacccacccgacccgtcttgaaacacggaccaaggagtctaacacgtgcgcgagtcgggggctcgcacgaaagccgccgtggcgcaatgaaggtgaagg

SEQ ID NO: 65797 - DNA, 120 bp, Homo sapiens; identical to SEQ ID NO: 49857
  misc_feature: 552 for SV(C|O) and 28S

SEQ ID NO: 65798 - DNA, 120 bp, Homo sapiens; identical to SEQ ID NO: 49098
  misc_feature: 552 for SV(C|O) and 28S

SEQ ID NO: 65799 - DNA, 120 bp, Homo sapiens; identical to SEQ ID NO: 49983
  misc_feature: 552 for SV(C|O) and 28S

SEQ ID NO: 65800 - DNA, 120 bp, Homo sapiens; identical to SEQ ID NO: 49089
  misc_feature: 552 for SV(C|O) and 28S

SEQ ID NO: 65801 - DNA, 120 bp, Homo sapiens
  misc_feature: 551 for SV(C|O) and 28S
tcttttctttgtgaagggcagggcgccctggaatgggttcgccccgagagaggggcccgtgccttggaaagcgtcgcggttccggcggcgtccggtgagctctcgctggcccttgaaaat

SEQ ID NO: 65802 - DNA, 120 bp, Homo sapiens; identical to SEQ ID NO: 50146
  misc_feature: 551 for SV(C|O) and 28S

SEQ ID NO: 65803 - DNA, 120 bp, Homo sapiens
  misc_feature: 551 for SV(C|O) and 28S
caatccttatcccgaagttacggatccggcttgccgacttcccttacctacattgttccaacatgccagaggctgttcaccttggagacctgctgcggatatgggtacggcccggcgcga

SEQ ID NO: 65804 - DNA, 120 bp, Homo sapiens; identical to SEQ ID NO: 49108
  misc_feature: 551 for SV(C|O) and 28S

SEQ ID NO: 65805 - DNA, 120 bp, Homo sapiens; identical to SEQ ID NO: 49868
  misc_feature: 551 for SV(C|O) and 28S

SEQ ID NO: 65806 - DNA, 120 bp, Homo sapiens; identical to SEQ ID NO: 50136
  misc_feature: 551 for SV(C|O) and 28S

SEQ ID NO: 65807 - DNA, 120 bp, Homo sapiens
  misc_feature: 551 for SV(C|O) and 28S
gcgagcttttgcccttctgctccacgggaggtttctgtcctccctgagctcgccttaggacacctgcgttaccgtttgacaggtgtaccgccccagtcaaactccccacctggcactgtc

SEQ ID NO: 65808 - DNA, 120 bp, Homo sapiens
  misc_feature: 551 for SV(C|O) and 28S
agaagggttccatgtgaacagcagttgaacatgggtcagtcggtcctgagagatgggcgagcgccgttccgaagggacgggcgatggcctccgttgccctcggccgatcgaaagggagtc

SEQ ID NO: 65809 - DNA, 120 bp, Homo sapiens; identical to SEQ ID NO: 49936
  misc_feature: 551 for SV(C|O) and 28S

SEQ ID NO: 65810 - DNA, 120 bp, Homo sapiens; identical to SEQ ID NO: 49927
  misc_feature: 551 for SV(C|O) and 28S

SEQ ID NO: 65811 - DNA, 120 bp, Homo sapiens; identical to SEQ ID NO: 50157
  misc_feature: 551 for SV(C|O) and 28S

SEQ ID NO: 65812 - DNA, 120 bp, Homo sapiens
  misc_feature: 551 for SV(C|O) and 28S
cggggtcggcggcgacgtcggctacccacccgacccgtcttgaaacacggaccaaggagtctaacacgtgcgcgagtcgggggctcgcacgaaagccgccgtggcgcaatgaaggtgaag

SEQ ID NO: 65813 - DNA, 120 bp, Homo sapiens; identical to SEQ ID NO: 50482
  misc_feature: 551 for SV(C|O) and 28S

SEQ ID NO: 65814 - DNA, 120 bp, Homo sapiens; identical to SEQ ID NO: 49099
  misc_feature: 551 for SV(C|O) and 28S

SEQ ID NO: 65815 - DNA, 120 bp, Homo sapiens
  misc_feature: 550 for SV(C|O) and 28S
ttctttgtgaagggcagggcgccctggaatgggttcgccccgagagaggggcccgtgccttggaaagcgtcgcggttccggcggcgtccggtgagctctcgctggcccttgaaaatccgg

SEQ ID NO: 65816 - DNA, 120 bp, Homo sapiens; identical to SEQ ID NO: 49890
  misc_feature: 550 for SV(C|O) and 28S

SEQ ID NO: 65817 - DNA, 120 bp, Homo sapiens; identical to SEQ ID NO: 49100
  misc_feature: 550 for SV(C|O) and 28S

SEQ ID NO: 65818 - DNA, 120 bp, Homo sapiens; identical to SEQ ID NO: 49111
  misc_feature: 550 for SV(C|O) and 28S

SEQ ID NO: 65819 - DNA, 120 bp, Homo sapiens
  misc_feature: 550 for SV(C|O) and 28S
gctaaataccggcacgagaccgatagtcaacaagtaccgtaagggaaagttgaaaagaactttgaagagagagttcaagagggcgtgaaaccgttaagaggtaaacgggtggggtccgcg

SEQ ID NO: 65820 - DNA, 120 bp, Homo sapiens
  misc_feature: 550 for SV(C|O) and 28S
caggtctccaaggtgaacagcctctggcatgttggaacaatgtaggtaagggaagtcggcaagccggatccgtaacttcgggataaggattggctctaagggctgggtcggtcgggctgg

SEQ ID NO: 65821 - DNA, 120 bp, Homo sapiens
  misc_feature: 550 for SV(C|O) and 28S
agccccgcggacgctacgccgcgacgagtaggagggccgctgcggtgagccttgaagcctagggcgcgggcccgggtggagccgccgcaggtgcagatcttggtggtagtagcaaatatt

SEQ ID NO: 65822 - DNA, 120 bp, Homo sapiens
  misc_feature: 549 for SV(C|O) and 28S
ttgtgaagggcagggcgccctggaatgggttcgccccgagagaggggcccgtgccttggaaagcgtcgcggttccggcggcgtccggtgagctctcgctggcccttgaaaatccggggga

SEQ ID NO: 65823 - DNA, 120 bp, Homo sapiens; identical to SEQ ID NO: 50603
  misc_feature: 549 for SV(C|O) and 28S

SEQ ID NO: 65824 - DNA, 120 bp, Homo sapiens; identical to SEQ ID NO: 50561
  misc_feature: 549 for SV(C|O) and 28S

SEQ ID NO: 65825 - DNA, 120 bp, Homo sapiens; identical to SEQ ID NO: 50555
  misc_feature: 549 for SV(C|O) and 28S

SEQ ID NO: 65826 - DNA, 120 bp, Homo sapiens; identical to SEQ ID NO: 50256
  misc_feature: 549 for SV(C|O) and 28S

SEQ ID NO: 65827 - DNA, 120 bp, Homo sapiens
  misc_feature: 549 for SV(C|O) and 28S
cgcgcacgtgttagactccttggtccgtgtttcaagacgggtcgggtgggtagccgacgtcgccgccgaccccgtgcgctcgctccgccgtccccctcttcgggggacgcgcgcgtggcc

SEQ ID NO: 65828 - DNA, 120 bp, Homo sapiens
  misc_feature: 549 for SV(C|O) and 28S
cgagcttttgcccttctgctccacgggaggtttctgtcctccctgagctcgccttaggacacctgcgttaccgtttgacaggtgtaccgccccagtcaaactccccacctggcactgtcc

SEQ ID NO: 65829 - DNA, 120 bp, Homo sapiens
  misc_feature: 549 for SV(C|O) and 28S
ccaggtcggacgaccgatttgcacgtcaggaccgctacggacctccaccagagtttcctctggcttcgccctgcccaggcatagttcaccatctttcgggtcctaacacgtgcgctcgtg

SEQ ID NO: 65830 - DNA, 120 bp, Homo sapiens; identical to SEQ ID NO: 49740
  misc_feature: 548 for SV(C|O) and 28S

SEQ ID NO: 65831 - DNA, 120 bp, Homo sapiens; identical to SEQ ID NO: 49876
  misc_feature: 548 for SV(C|O) and 28S

SEQ ID NO: 65832 - DNA, 120 bp, Homo sapiens; identical to SEQ ID NO: 50834
  misc_feature: 548 for SV(C|O) and 28S

SEQ ID NO: 65833 - DNA, 120 bp, Homo sapiens; identical to SEQ ID NO: 49918
  misc_feature: 548 for SV(C|O) and 28S

SEQ ID NO: 65834 - DNA, 120 bp, Homo sapiens; identical to SEQ ID NO: 50426
  misc_feature: 548 for SV(C|O) and 28S

SEQ ID NO: 65835 - DNA, 120 bp, Homo sapiens; identical to SEQ ID NO: 49867
  misc_feature: 548 for SV(C|O) and 28S

SEQ ID NO: 65836 - DNA, 120 bp, Homo sapiens; identical to SEQ ID NO: 50342
  misc_feature: 548 for SV(C|O) and 28S

SEQ ID NO: 65837 - DNA, 120 bp, Homo sapiens; identical to SEQ ID NO: 50319
  misc_feature: 548 for SV(C|O) and 28S

SEQ ID NO: 65838 - DNA, 120 bp, Homo sapiens; identical to SEQ ID NO: 50354
  misc_feature: 548 for SV(C|O) and 28S

SEQ ID NO: 65839 - DNA, 120 bp, Homo sapiens; identical to SEQ ID NO: 49629
  misc_feature: 548 for SV(C|O) and 28S

SEQ ID NO: 65840 - DNA, 120 bp, Homo sapiens; identical to SEQ ID NO: 50654
  misc_feature: 548 for SV(C|O) and 28S

SEQ ID NO: 65841 - DNA, 120 bp, Homo sapiens; identical to SEQ ID NO: 49942
  misc_feature: 547 for SV(C|O) and 28S

SEQ ID NO: 65842 - DNA, 120 bp, Homo sapiens; identical to SEQ ID NO: 49625
  misc_feature: 547 for SV(C|O) and 28S

SEQ ID NO: 65843 - DNA, 120 bp, Homo sapiens; identical to SEQ ID NO: 49892
  misc_feature: 547 for SV(C|O) and 28S

SEQ ID NO: 65844 - DNA, 120 bp, Homo sapiens; identical to SEQ ID NO: 49961
  misc_feature: 547 for SV(C|O) and 28S

SEQ ID NO: 65845 - DNA, 120 bp, Homo sapiens
  misc_feature: 547 for SV(C|O) and 28S
gctgattccgccaagcccgttcccttggctgtggtttcgctggatagtaggtagggacagtgggaatctcgttcatccattcatgcgcgtcactaattagatgacgaggcatttggctac

SEQ ID NO: 65846 - DNA, 120 bp, Homo sapiens
  misc_feature: 547 for SV(C|O) and 28S
ggtctccaaggtgaacagcctctggcatgttggaacaatgtaggtaagggaagtcggcaagccggatccgtaacttcgggataaggattggctctaagggctgggtcggtcgggctgggg

SEQ ID NO: 65847 - DNA, 120 bp, Homo sapiens
  misc_feature: 547 for SV(C|O) and 28S
caggtcggacgaccgatttgcacgtcaggaccgctacggacctccaccagagtttcctctggcttcgccctgcccaggcatagttcaccatctttcgggtcctaacacgtgcgctcgtgc

SEQ ID NO: 65848 - DNA, 120 bp, Homo sapiens
  misc_feature: 547 for SV(C|O) and 28S
ctagatggttcgattagtctttcgcccctatacccaggtcggacgaccgatttgcacgtcaggaccgctacggacctccaccagagtttcctctggcttcgccctgcccaggcatagttc

SEQ ID NO: 65849 - DNA, 120 bp, Homo sapiens
  misc_feature: 547 for SV(C|O) and 28S
cgagaactttgaaggccgaagtggagaagggttccatgtgaacagcagttgaacatgggtcagtcggtcctgagagatgggcgagcgccgttccgaagggacgggcgatggcctccgttg

SEQ ID NO: 65850 - DNA, 120 bp, Homo sapiens
  misc_feature: 547 for SV(C|O) and 28S
agagccaatccttatcccgaagttacggatccggcttgccgacttcccttacctacattgttccaacatgccagaggctgttcaccttggagacctgctgcggatatgggtacggcccgg

SEQ ID NO: 65851 - DNA, 120 bp, Homo sapiens
  misc_feature: 546 for SV(C|O) and 28S
ctcttttctttgtgaagggcagggcgccctggaatgggttcgccccgagagaggggcccgtgccttggaaagcgtcgcggttccggcggcgtccggtgagctctcgctggcccttgaaaa

SEQ ID NO: 65852 - DNA, 120 bp, Homo sapiens; identical to SEQ ID NO: 49085
  misc_feature: 546 for SV(C|O) and 28S

SEQ ID NO: 65853 - DNA, 120 bp, Homo sapiens; identical to SEQ ID NO: 49125
  misc_feature: 546 for SV(C|O) and 28S

SEQ ID NO: 65854 - DNA, 120 bp, Homo sapiens; identical to SEQ ID NO: 49838
  misc_feature: 546 for SV(C|O) and 28S

SEQ ID NO: 65855 - DNA, 120 bp, Homo sapiens
  misc_feature: 546 for SV(C|O) and 28S
tactagatggttcgattagtctttcgcccctatacccaggtcggacgaccgatttgcacgtcaggaccgctacggacctccaccagagtttcctctggcttcgccctgcccaggcatagt

SEQ ID NO: 65856 - DNA, 120 bp, Homo sapiens; identical to SEQ ID NO: 50595
  misc_feature: 546 for SV(C|O) and 28S

SEQ ID NO: 65857 - DNA, 120 bp, Homo sapiens; identical to SEQ ID NO: 49062
  misc_feature: 546 for SV(C|O) and 28S

SEQ ID NO: 65858 - DNA, 120 bp, Homo sapiens
  misc_feature: 546 for SV(C|O) and 28S
gattccgccaagcccgttcccttggctgtggtttcgctggatagtaggtagggacagtgggaatctcgttcatccattcatgcgcgtcactaattagatgacgaggcatttggctacctt

SEQ ID NO: 65859 - DNA, 120 bp, Homo sapiens; identical to SEQ ID NO: 49935
  misc_feature: 546 for SV(C|O) and 28S

SEQ ID NO: 65860 - DNA, 120 bp, Homo sapiens; identical to SEQ ID NO: 50383
  misc_feature: 546 for SV(C|O) and 28S

SEQ ID NO: 65861 - DNA, 120 bp, Homo sapiens
  misc_feature: 546 for SV(C|O) and 28S
acgagaactttgaaggccgaagtggagaagggttccatgtgaacagcagttgaacatgggtcagtcggtcctgagagatgggcgagcgccgttccgaagggacgggcgatggcctccgtt

SEQ ID NO: 65862 - DNA, 120 bp, Homo sapiens
  misc_feature: 545 for SV(C|O) and 28S
tttctttgtgaagggcagggcgccctggaatgggttcgccccgagagaggggcccgtgccttggaaagcgtcgcggttccggcggcgtccggtgagctctcgctggcccttgaaaatccg

SEQ ID NO: 65863 - DNA, 120 bp, Homo sapiens; identical to SEQ ID NO: 49065
  misc_feature: 545 for SV(C|O) and 28S

SEQ ID NO: 65864 - DNA, 120 bp, Homo sapiens
  misc_feature: 545 for SV(C|O) and 28S
tgtgaagggcagggcgccctggaatgggttcgccccgagagaggggcccgtgccttggaaagcgtcgcggttccggcggcgtccggtgagctctcgctggcccttgaaaatccgggggag

SEQ ID NO: 65865 - DNA, 120 bp, Homo sapiens
  misc_feature: 545 for SV(C|O) and 28S
tagatggttcgattagtctttcgcccctatacccaggtcggacgaccgatttgcacgtcaggaccgctacggacctccaccagagtttcctctggcttcgccctgcccaggcatagttca

SEQ ID NO: 65866 - DNA, 120 bp, Homo sapiens; identical to SEQ ID NO: 50042
  misc_feature: 545 for SV(C|O) and 28S

SEQ ID NO: 65867 - DNA, 120 bp, Homo sapiens
  misc_feature: 545 for SV(C|O) and 28S
tccccgctgattccgccaagcccgttcccttggctgtggtttcgctggatagtaggtagggacagtgggaatctcgttcatccattcatgcgcgtcactaattagatgacgaggcatttg

SEQ ID NO: 65868 - DNA, 120 bp, Homo sapiens; identical to SEQ ID NO: 49103
  misc_feature: 545 for SV(C|O) and 28S

SEQ ID NO: 65869 - DNA, 120 bp, Homo sapiens; identical to SEQ ID NO: 50811
  misc_feature: 545 for SV(C|O) and 28S

SEQ ID NO: 65870 - DNA, 120 bp, Homo sapiens
  misc_feature: 545 for SV(C|O) and 28S
gttcgattagtctttcgcccctatacccaggtcggacgaccgatttgcacgtcaggaccgctacggacctccaccagagtttcctctggcttcgccctgcccaggcatagttcaccatct

SEQ ID NO: 65871 - DNA, 120 bp, Homo sapiens; identical to SEQ ID NO: 50800
  misc_feature: 545 for SV(C|O) and 28S

SEQ ID NO: 65872 - DNA, 120 bp, Homo sapiens; identical to SEQ ID NO: 50223
  misc_feature: 545 for SV(C|O) and 28S

SEQ ID NO: 65873 - DNA, 120 bp, Homo sapiens
  misc_feature: 545 for SV(C|O) and 28S
cccaggtcggacgaccgatttgcacgtcaggaccgctacggacctccaccagagtttcctctggcttcgccctgcccaggcatagttcaccatctttcgggtcctaacacgtgcgctcgt

SEQ ID NO: 65874 - DNA, 120 bp, Homo sapiens; identical to SEQ ID NO: 49067
  misc_feature: 545 for SV(C|O) and 28S

SEQ ID NO: 65875 - DNA, 120 bp, Homo sapiens; identical to SEQ ID NO: 49070
  misc_feature: 545 for SV(C|O) and 28S

SEQ ID NO: 65876 - DNA, 120 bp, Homo sapiens
  misc_feature: 544 for SV(C|O) and 28S
ggctccgcggcgctgccgtatcgttccgcctgggcgggattctgacttagaggcgttcagtcataatcccacagatggtagcttcgccccattggctcctcagccaagcacatacaccaa

SEQ ID NO: 65877 - DNA, 120 bp, Homo sapiens; identical to SEQ ID NO: 50915
  misc_feature: 544 for SV(C|O) and 28S

SEQ ID NO: 65878 - DNA, 120 bp, Homo sapiens; identical to SEQ ID NO: 50408
  misc_feature: 544 for SV(C|O) and 28S

SEQ ID NO: 65879 - DNA, 120 bp, Homo sapiens; identical to SEQ ID NO: 49066
  misc_feature: 544 for SV(C|O) and 28S

SEQ ID NO: 65880 - DNA, 120 bp, Homo sapiens; identical to SEQ ID NO: 49447
  misc_feature: 544 for SV(C|O) and 28S

SEQ ID NO: 65881 - DNA, 120 bp, Homo sapiens
  misc_feature: 544 for SV(C|O) and 28S
gaggctccgcggcgctgccgtatcgttccgcctgggcgggattctgacttagaggcgttcagtcataatcccacagatggtagcttcgccccattggctcctcagccaagcacatacacc

SEQ ID NO: 65882 - DNA, 120 bp, Homo sapiens; identical to SEQ ID NO: 50577
  misc_feature: 544 for SV(C|O) and 28S

SEQ ID NO: 65883 - DNA, 120 bp, Homo sapiens
  misc_feature: 544 for SV(C|O) and 28S
cttttctttgtgaagggcagggcgccctggaatgggttcgccccgagagaggggcccgtgccttggaaagcgtcgcggttccggcggcgtccggtgagctctcgctggcccttgaaaatc

SEQ ID NO: 65884 - DNA, 120 bp, Homo sapiens; identical to SEQ ID NO: 50531
  misc_feature: 544 for SV(C|O) and 28S

SEQ ID NO: 65885 - DNA, 120 bp, Homo sapiens
  misc_feature: 544 for SV(C|O) and 28S
ccaatccttatcccgaagttacggatccggcttgccgacttcccttacctacattgttccaacatgccagaggctgttcaccttggagacctgctgcggatatgggtacggcccggcgcg

SEQ ID NO: 65886 - DNA, 120 bp, Homo sapiens; identical to SEQ ID NO: 50419
  misc_feature: 544 for SV(C|O) and 28S

SEQ ID NO: 65887 - DNA, 120 bp, Homo sapiens; identical to SEQ ID NO: 50062
  misc_feature: 544 for SV(C|O) and 28S

SEQ ID NO: 65888 - DNA, 120 bp, Homo sapiens
  misc_feature: 544 for SV(C|O) and 28S
actagatggttcgattagtctttcgcccctatacccaggtcggacgaccgatttgcacgtcaggaccgctacggacctccaccagagtttcctctggcttcgccctgcccaggcatagtt

SEQ ID NO: 65889 - DNA, 120 bp, Homo sapiens
  misc_feature: 543 for SV(C|O) and 28S
tttcaagacgggtcgggtgggtagccgacgtcgccgccgaccccgtgcgctcgctccgccgtccccctcttcgggggacgcgcgcgtggccccgagagaacctcccccgggcccgacggc

SEQ ID NO: 65890 - DNA, 120 bp, Homo sapiens
  misc_feature: 543 for SV(C|O) and 28S
aggctccgcggcgctgccgtatcgttccgcctgggcgggattctgacttagaggcgttcagtcataatcccacagatggtagcttcgccccattggctcctcagccaagcacatacacca

SEQ ID NO: 65891 - DNA, 120 bp, Homo sapiens; identical to SEQ ID NO: 50118
  misc_feature: 543 for SV(C|O) and 28S

SEQ ID NO: 65892 - DNA, 120 bp, Homo sapiens
  misc_feature: 543 for SV(C|O) and 28S
ggttcgattagtctttcgcccctatacccaggtcggacgaccgatttgcacgtcaggaccgctacggacctccaccagagtttcctctggcttcgccctgcccaggcatagttcaccatc

SEQ ID NO: 65893 - DNA, 120 bp, Homo sapiens
  misc_feature: 543 for SV(C|O) and 28S
gagccaatccttatcccgaagttacggatccggcttgccgacttcccttacctacattgttccaacatgccagaggctgttcaccttggagacctgctgcggatatgggtacggcccggc

SEQ ID NO: 65894 - DNA, 120 bp, Homo sapiens
  misc_feature: 543 for SV(C|O) and 28S
gccccgcggacgctacgccgcgacgagtaggagggccgctgcggtgagccttgaagcctagggcgcgggcccgggtggagccgccgcaggtgcagatcttggtggtagtagcaaatattc

SEQ ID NO: 65895 - DNA, 120 bp, Homo sapiens; identical to SEQ ID NO: 50018
  misc_feature: 543 for SV(C|O) and 28S

SEQ ID NO: 65896 - DNA, 120 bp, Homo sapiens; identical to SEQ ID NO: 50638
  misc_feature: 543 for SV(C|O) and 28S

SEQ ID NO: 65897 - DNA, 120 bp, Homo sapiens
  misc_feature: 543 for SV(C|O) and 28S
ctcgcgcacgtgttagactccttggtccgtgtttcaagacgggtcgggtgggtagccgacgtcgccgccgaccccgtgcgctcgctccgccgtccccctcttcgggggacgcgcgcgtgg

SEQ ID NO: 65898 - DNA, 120 bp, Homo sapiens
  misc_feature: 543 for SV(C|O) and 28S
agccaatccttatcccgaagttacggatccggcttgccgacttcccttacctacattgttccaacatgccagaggctgttcaccttggagacctgctgcggatatgggtacggcccggcg

SEQ ID NO: 65899 - DNA, 120 bp, Homo sapiens; identical to SEQ ID NO: 50599
  misc_feature: 543 for SV(C|O) and 28S

SEQ ID NO: 65900 - DNA, 120 bp, Homo sapiens
  misc_feature: 543 for SV(C|O) and 28S
ccctatacccaggtcggacgaccgatttgcacgtcaggaccgctacggacctccaccagagtttcctctggcttcgccctgcccaggcatagttcaccatctttcgggtcctaacacgtg

SEQ ID NO: 65901 - DNA, 120 bp, Homo sapiens
  misc_feature: 542 for SV(C|O) and 28S
ttttctttgtgaagggcagggcgccctggaatgggttcgccccgagagaggggcccgtgccttggaaagcgtcgcggttccggcggcgtccggtgagctctcgctggcccttgaaaatcc

SEQ ID NO: 65902 - DNA, 120 bp, Homo sapiens; identical to SEQ ID NO: 50000
  misc_feature: 542 for SV(C|O) and 28S

SEQ ID NO: 65903 - DNA, 120 bp, Homo sapiens; identical to SEQ ID NO: 51163
  misc_feature: 542 for SV(C|O) and 28S

SEQ ID NO: 65904 - DNA, 120 bp, Homo sapiens
  misc_feature: 542 for SV(C|O) and 28S
cgcggacgctacgccgcgacgagtaggagggccgctgcggtgagccttgaagcctagggcgcgggcccgggtggagccgccgcaggtgcagatcttggtggtagtagcaaatattcaaac

SEQ ID NO: 65905 - DNA, 120 bp, Homo sapiens; identical to SEQ ID NO: 50739
  misc_feature: 542 for SV(C|O) and 28S

SEQ ID NO: 65906 - DNA, 120 bp, Homo sapiens; identical to SEQ ID NO: 49528
  misc_feature: 542 for SV(C|O) and 28S

SEQ ID NO: 65907 - DNA, 120 bp, Homo sapiens; identical to SEQ ID NO: 49873
  misc_feature: 542 for SV(C|O) and 28S

SEQ ID NO: 65908 - DNA, 120 bp, Homo sapiens
  misc_feature: 541 for SV(C|O) and 28S
ccgcggacgctacgccgcgacgagtaggagggccgctgcggtgagccttgaagcctagggcgcgggcccgggtggagccgccgcaggtgcagatcttggtggtagtagcaaatattcaaa

SEQ ID NO: 65909 - DNA, 120 bp, Homo sapiens; identical to SEQ ID NO: 49778
  misc_feature: 541 for SV(C|O) and 28S

SEQ ID NO: 65910 - DNA, 120 bp, Homo sapiens
  misc_feature: 541 for SV(C|O) and 28S
ccccgcggacgctacgccgcgacgagtaggagggccgctgcggtgagccttgaagcctagggcgcgggcccgggtggagccgccgcaggtgcagatcttggtggtagtagcaaatattca

SEQ ID NO: 65911 - DNA, 120 bp, Homo sapiens; identical to SEQ ID NO: 49074
  misc_feature: 541 for SV(C|O) and 28S

SEQ ID NO: 65912 - DNA, 120 bp, Homo sapiens; identical to SEQ ID NO: 50467
  misc_feature: 541 for SV(C|O) and 28S

SEQ ID NO: 65913 - DNA, 120 bp, Homo sapiens; identical to SEQ ID NO: 49960
  misc_feature: 541 for SV(C|O) and 28S

SEQ ID NO: 65914 - DNA, 120 bp, Homo sapiens; identical to SEQ ID NO: 50011
  misc_feature: 541 for SV(C|O) and 28S

SEQ ID NO: 65915 - DNA, 120 bp, Homo sapiens; identical to SEQ ID NO: 49949
  misc_feature: 541 for SV(C|O) and 28S

SEQ ID NO: 65916 - DNA, 120 bp, Homo sapiens; identical to SEQ ID NO: 50031
  misc_feature: 541 for SV(C|O) and 28S

SEQ ID NO: 65917 - DNA, 120 bp, Homo sapiens
  misc_feature: 541 for SV(C|O) and 28S
cttttgcccttctgctccacgggaggtttctgtcctccctgagctcgccttaggacacctgcgttaccgtttgacaggtgtaccgccccagtcaaactccccacctggcactgtccccgg

SEQ ID NO: 65918 - DNA, 120 bp, Homo sapiens; identical to SEQ ID NO: 49092
  misc_feature: 541 for SV(C|O) and 28S

SEQ ID NO: 65919 - DNA, 120 bp, Homo sapiens; identical to SEQ ID NO: 49805
  misc_feature: 540 for SV(C|O) and 28S

SEQ ID NO: 65920 - DNA, 120 bp, Homo sapiens; identical to SEQ ID NO: 49153
  misc_feature: 540 for SV(C|O) and 28S

SEQ ID NO: 65921 - DNA, 120 bp, Homo sapiens
  misc_feature: 540 for SV(C|O) and 28S
tcgcccctatacccaggtcggacgaccgatttgcacgtcaggaccgctacggacctccaccagagtttcctctggcttcgccctgcccaggcatagttcaccatctttcgggtcctaaca

SEQ ID NO: 65922 - DNA, 120 bp, Homo sapiens
  misc_feature: 540 for SV(C|O) and 28S
tggttcgattagtctttcgcccctatacccaggtcggacgaccgatttgcacgtcaggaccgctacggacctccaccagagtttcctctggcttcgccctgcccaggcatagttcaccat

SEQ ID NO: 65923 - DNA, 120 bp, Homo sapiens
  misc_feature: 540 for SV(C|O) and 28S
tctccaaggtgaacagcctctggcatgttggaacaatgtaggtaagggaagtcggcaagccggatccgtaacttcgggataaggattggctctaagggctgggtcggtcgggctggggcg

SEQ ID NO: 65924 - DNA, 120 bp, Homo sapiens
  misc_feature: 540 for SV(C|O) and 28S
cgctgattccgccaagcccgttcccttggctgtggtttcgctggatagtaggtagggacagtgggaatctcgttcatccattcatgcgcgtcactaattagatgacgaggcatttggcta

SEQ ID NO: 65925 - DNA, 120 bp, Homo sapiens; identical to SEQ ID NO: 50774
  misc_feature: 540 for SV(C|O) and 28S

SEQ ID NO: 65926 - DNA, 120 bp, Homo sapiens; identical to SEQ ID NO: 50705
  misc_feature: 540 for SV(C|O) and 28S

SEQ ID NO: 65927 - DNA, 120 bp, Homo sapiens
  misc_feature: 540 for SV(C|O) and 28S
ctaaataccggcacgagaccgatagtcaacaagtaccgtaagggaaagttgaaaagaactttgaagagagagttcaagagggcgtgaaaccgttaagaggtaaacgggtggggtccgcgc

SEQ ID NO: 65928 - DNA, 120 bp, Homo sapiens; identical to SEQ ID NO: 49603
  misc_feature: 540 for SV(C|O) and 28S

SEQ ID NO: 65929 - DNA, 120 bp, Homo sapiens; identical to SEQ ID NO: 49477
  misc_feature: 540 for SV(C|O) and 28S

SEQ ID NO: 65930 - DNA, 120 bp, Homo sapiens; identical to SEQ ID NO: 50277
  misc_feature: 539 for SV(C|O) and 28S

SEQ ID NO: 65931 - DNA, 120 bp, Homo sapiens; identical to SEQ ID NO: 50052
  misc_feature: 539 for SV(C|O) and 28S

SEQ ID NO: 65932 - DNA, 120 bp, Homo sapiens
  misc_feature: 539 for SV(C|O) and 28S
agatggttcgattagtctttcgcccctatacccaggtcggacgaccgatttgcacgtcaggaccgctacggacctccaccagagtttcctctggcttcgccctgcccaggcatagttcac

SEQ ID NO: 65933 - DNA, 120 bp, Homo sapiens; identical to SEQ ID NO: 50036
  misc_feature: 539 for SV(C|O) and 28S

SEQ ID NO: 65934 - DNA, 120 bp, Homo sapiens
  misc_feature: 538 for SV(C|O) and 28S
atggttcgattagtctttcgcccctatacccaggtcggacgaccgatttgcacgtcaggaccgctacggacctccaccagagtttcctctggcttcgccctgcccaggcatagttcacca

SEQ ID NO: 65935 - DNA, 120 bp, Homo sapiens
  misc_feature: 538 for SV(C|O) and 28S
tgattccgccaagcccgttcccttggctgtggtttcgctggatagtaggtagggacagtgggaatctcgttcatccattcatgcgcgtcactaattagatgacgaggcatttggctacct

SEQ ID NO: 65936 - DNA, 120 bp, Homo sapiens; identical to SEQ ID NO: 50352
  misc_feature: 538 for SV(C|O) and 28S

SEQ ID NO: 65937 - DNA, 120 bp, Homo sapiens
  misc_feature: 538 for SV(C|O) and 28S
cacatggaacccttctccacttcggccttcaaagttctcgtttgaatatttgctactaccaccaagatctgcacctgcggcggctccacccgggcccgcgccctaggcttcaaggctcac

SEQ ID NO: 65938 - DNA, 120 bp, Homo sapiens
  misc_feature: 538 for SV(C|O) and 28S
ggctaaataccggcacgagaccgatagtcaacaagtaccgtaagggaaagttgaaaagaactttgaagagagagttcaagagggcgtgaaaccgttaagaggtaaacgggtggggtccgc

SEQ ID NO: 65939 - DNA, 120 bp, Homo sapiens
  misc_feature: 538 for SV(C|O) and 28S
gcggcgctgccgtatcgttccgcctgggcgggattctgacttagaggcgttcagtcataatcccacagatggtagcttcgccccattggctcctcagccaagcacatacaccaaatgtct

SEQ ID NO: 65940 - DNA, 120 bp, Homo sapiens
  misc_feature: 538 for SV(C|O) and 28S
gccaatccttatcccgaagttacggatccggcttgccgacttcccttacctacattgttccaacatgccagaggctgttcaccttggagacctgctgcggatatgggtacggcccggcgc

SEQ ID NO: 65941 - DNA, 120 bp, Homo sapiens
  misc_feature: 538 for SV(C|O) and 28S
cctatacccaggtcggacgaccgatttgcacgtcaggaccgctacggacctccaccagagtttcctctggcttcgccctgcccaggcatagttcaccatctttcgggtcctaacacgtgc

SEQ ID NO: 65942 - DNA, 120 bp, Homo sapiens
  misc_feature: 538 for SV(C|O) and 28S
ctatacccaggtcggacgaccgatttgcacgtcaggaccgctacggacctccaccagagtttcctctggcttcgccctgcccaggcatagttcaccatctttcgggtcctaacacgtgcg

SEQ ID NO: 65943 - DNA, 120 bp, Homo sapiens; identical to SEQ ID NO: 50449
  misc_feature: 538 for SV(C|O) and 28S

SEQ ID NO: 65944 - DNA, 120 bp, Homo sapiens
  misc_feature: 537 for SV(C|O) and 28S
gctccgcggcgctgccgtatcgttccgcctgggcgggattctgacttagaggcgttcagtcataatcccacagatggtagcttcgccccattggctcctcagccaagcacatacaccaaa

SEQ ID NO: 65945 - DNA, 120 bp, Homo sapiens; identical to SEQ ID NO: 50386
  misc_feature: 537 for SV(C|O) and 28S

SEQ ID NO: 65946 - DNA, 120 bp, Homo sapiens; identical to SEQ ID NO: 50722
  misc_feature: 537 for SV(C|O) and 28S

SEQ ID NO: 65947 - DNA, 120 bp, Homo sapiens; identical to SEQ ID NO: 50198
  misc_feature: 537 for SV(C|O) and 28S

SEQ ID NO: 65948 - DNA, 120 bp, Homo sapiens
  misc_feature: 537 for SV(C|O) and 28S
tcgcgcacgtgttagactccttggtccgtgtttcaagacgggtcgggtgggtagccgacgtcgccgccgaccccgtgcgctcgctccgccgtccccctcttcgggggacgcgcgcgtggc

SEQ ID NO: 65949 - DNA, 120 bp, Homo sapiens; identical to SEQ ID NO: 49770
  misc_feature: 537 for SV(C|O) and 28S

SEQ ID NO: 65950 - DNA, 120 bp, Homo sapiens
  misc_feature: 537 for SV(C|O) and 28S
gttcccttggctgtggtttcgctggatagtaggtagggacagtgggaatctcgttcatccattcatgcgcgtcactaattagatgacgaggcatttggctaccttaagagagtcatagtt

SEQ ID NO: 65951 - DNA, 120 bp, Homo sapiens; identical to SEQ ID NO: 50702
  misc_feature: 537 for SV(C|O) and 28S

SEQ ID NO: 65952 - DNA, 120 bp, Homo sapiens
  misc_feature: 537 for SV(C|O) and 28S
aaggctaaataccggcacgagaccgatagtcaacaagtaccgtaagggaaagttgaaaagaactttgaagagagagttcaagagggcgtgaaaccgttaagaggtaaacgggtggggtcc

SEQ ID NO: 65953 - DNA, 120 bp, Homo sapiens
  misc_feature: 537 for SV(C|O) and 28S
cccgctgattccgccaagcccgttcccttggctgtggtttcgctggatagtaggtagggacagtgggaatctcgttcatccattcatgcgcgtcactaattagatgacgaggcatttggc

SEQ ID NO: 65954 - DNA, 120 bp, Homo sapiens; identical to SEQ ID NO: 50500
  misc_feature: 537 for SV(C|O) and 28S

SEQ ID NO: 65955 - DNA, 120 bp, Homo sapiens
  misc_feature: 537 for SV(C|O) and 28S
acccaggtcggacgaccgatttgcacgtcaggaccgctacggacctccaccagagtttcctctggcttcgccctgcccaggcatagttcaccatctttcgggtcctaacacgtgcgctcg

SEQ ID NO: 65956 - DNA, 120 bp, Homo sapiens
  misc_feature: 537 for SV(C|O) and 28S
ccccgctgattccgccaagcccgttcccttggctgtggtttcgctggatagtaggtagggacagtgggaatctcgttcatccattcatgcgcgtcactaattagatgacgaggcatttgg

SEQ ID NO: 65957 - DNA, 120 bp, Homo sapiens; identical to SEQ ID NO: 50570
  misc_feature: 536 for SV(C|O) and 28S

SEQ ID NO: 65958 - DNA, 120 bp, Homo sapiens
  misc_feature: 536 for SV(C|O) and 28S
cctacattgttccaacatgccagaggctgttcaccttggagacctgctgcggatatgggtacggcccggcgcgagatttacaccctctcccccggattttcaagggccagcgagagctca

SEQ ID NO: 65959 - DNA, 120 bp, Homo sapiens; identical to SEQ ID NO: 49484
  misc_feature: 536 for SV(C|O) and 28S

SEQ ID NO: 65960 - DNA, 120 bp, Homo sapiens
  misc_feature: 536 for SV(C|O) and 28S
ctgattccgccaagcccgttcccttggctgtggtttcgctggatagtaggtagggacagtgggaatctcgttcatccattcatgcgcgtcactaattagatgacgaggcatttggctacc

SEQ ID NO: 65961 - DNA, 120 bp, Homo sapiens
  misc_feature: 536 for SV(C|O) and 28S
ctccaaggtgaacagcctctggcatgttggaacaatgtaggtaagggaagtcggcaagccggatccgtaacttcgggataaggattggctctaagggctgggtcggtcgggctggggcgc

SEQ ID NO: 65962 - DNA, 120 bp, Homo sapiens; identical to SEQ ID NO: 50755
  misc_feature: 536 for SV(C|O) and 28S

SEQ ID NO: 65963 - DNA, 120 bp, Homo sapiens; identical to SEQ ID NO: 50645
  misc_feature: 536 for SV(C|O) and 28S

SEQ ID NO: 65964 - DNA, 120 bp, Homo sapiens
  misc_feature: 536 for SV(C|O) and 28S
cgcggcgctgccgtatcgttccgcctgggcgggattctgacttagaggcgttcagtcataatcccacagatggtagcttcgccccattggctcctcagccaagcacatacaccaaatgtc

SEQ ID NO: 65965 - DNA, 120 bp, Homo sapiens
  misc_feature: 536 for SV(C|O) and 28S
ccgctgattccgccaagcccgttcccttggctgtggtttcgctggatagtaggtagggacagtgggaatctcgttcatccattcatgcgcgtcactaattagatgacgaggcatttggct

SEQ ID NO: 65966 - DNA, 120 bp, Homo sapiens
  misc_feature: 536 for SV(C|O) and 28S
actcgcgcacgtgttagactccttggtccgtgtttcaagacgggtcgggtgggtagccgacgtcgccgccgaccccgtgcgctcgctccgccgtccccctcttcgggggacgcgcgcgtg

SEQ ID NO: 65967 - DNA, 120 bp, Homo sapiens
  misc_feature: 535 for SV(C|O) and 28S
cccgcggacgctacgccgcgacgagtaggagggccgctgcggtgagccttgaagcctagggcgcgggcccgggtggagccgccgcaggtgcagatcttggtggtagtagcaaatattcaa

SEQ ID NO: 65968 - DNA, 120 bp, Homo sapiens; identical to SEQ ID NO: 50160
  misc_feature: 535 for SV(C|O) and 28S

SEQ ID NO: 65969 - DNA, 120 bp, Homo sapiens; identical to SEQ ID NO: 49408
  misc_feature: 535 for SV(C|O) and 28S

SEQ ID NO: 65970 - DNA, 120 bp, Homo sapiens
  misc_feature: 535 for SV(C|O) and 28S
tagagccaatccttatcccgaagttacggatccggcttgccgacttcccttacctacattgttccaacatgccagaggctgttcaccttggagacctgctgcggatatgggtacggcccg

SEQ ID NO: 65971 - DNA, 120 bp, Homo sapiens; identical to SEQ ID NO: 49428
  misc_feature: 535 for SV(C|O) and 28S

SEQ ID NO: 65972 - DNA, 120 bp, Homo sapiens
  misc_feature: 535 for SV(C|O) and 28S
tacccaggtcggacgaccgatttgcacgtcaggaccgctacggacctccaccagagtttcctctggcttcgccctgcccaggcatagttcaccatctttcgggtcctaacacgtgcgctc

SEQ ID NO: 65973 - DNA, 120 bp, Homo sapiens
  misc_feature: 535 for SV(C|O) and 28S
gatggttcgattagtctttcgcccctatacccaggtcggacgaccgatttgcacgtcaggaccgctacggacctccaccagagtttcctctggcttcgccctgcccaggcatagttcacc

SEQ ID NO: 65974 - DNA, 120 bp, Homo sapiens; identical to SEQ ID NO: 50218
  misc_feature: 535 for SV(C|O) and 28S

SEQ ID NO: 65975 - DNA, 120 bp, Homo sapiens; identical to SEQ ID NO: 49104
  misc_feature: 535 for SV(C|O) and 28S

SEQ ID NO: 65976 - DNA, 120 bp, Homo sapiens; identical to SEQ ID NO: 49305
  misc_feature: 535 for SV(C|O) and 28S

SEQ ID NO: 65977 - DNA, 120 bp, Homo sapiens
  misc_feature: 535 for SV(C|O) and 28S
catggaacccttctccacttcggccttcaaagttctcgtttgaatatttgctactaccaccaagatctgcacctgcggcggctccacccgggcccgcgccctaggcttcaaggctcaccg

SEQ ID NO: 65978 - DNA, 120 bp, Homo sapiens
  misc_feature: 535 for SV(C|O) and 28S
aggctaaataccggcacgagaccgatagtcaacaagtaccgtaagggaaagttgaaaagaactttgaagagagagttcaagagggcgtgaaaccgttaagaggtaaacgggtggggtccg

SEQ ID NO: 65979 - DNA, 120 bp, Homo sapiens
  misc_feature: 535 for SV(C|O) and 28S
ccgcggcgctgccgtatcgttccgcctgggcgggattctgacttagaggcgttcagtcataatcccacagatggtagcttcgccccattggctcctcagccaagcacatacaccaaatgt

SEQ ID NO: 65980 - DNA, 120 bp, Homo sapiens; identical to SEQ ID NO: 50022
  misc_feature: 534 for SV(C|O) and 28S

SEQ ID NO: 65981 - DNA, 120 bp, Homo sapiens
  misc_feature: 534 for SV(C|O) and 28S
ttagagccaatccttatcccgaagttacggatccggcttgccgacttcccttacctacattgttccaacatgccagaggctgttcaccttggagacctgctgcggatatgggtacggccc

SEQ ID NO: 65982 - DNA, 120 bp, Homo sapiens; identical to SEQ ID NO: 49118
  misc_feature: 534 for SV(C|O) and 28S

SEQ ID NO: 65983 - DNA, 120 bp, Homo sapiens; identical to SEQ ID NO: 50145
  misc_feature: 534 for SV(C|O) and 28S

SEQ ID NO: 65984 - DNA, 120 bp, Homo sapiens; identical to SEQ ID NO: 51225
  misc_feature: 534 for SV(C|O) and 28S

SEQ ID NO: 65985 - DNA, 120 bp, Homo sapiens; identical to SEQ ID NO: 50607
  misc_feature: 534 for SV(C|O) and 28S

SEQ ID NO: 65986 - DNA, 120 bp, Homo sapiens; identical to SEQ ID NO: 51155
  misc_feature: 534 for SV(C|O) and 28S

SEQ ID NO: 65987 - DNA, 120 bp, Homo sapiens
  misc_feature: 534 for SV(C|O) and 28S
gcccctatacccaggtcggacgaccgatttgcacgtcaggaccgctacggacctccaccagagtttcctctggcttcgccctgcccaggcatagttcaccatctttcgggtcctaacacg

SEQ ID NO: 65988 - DNA, 120 bp, Homo sapiens
  misc_feature: 534 for SV(C|O) and 28S
gaagggttccatgtgaacagcagttgaacatgggtcagtcggtcctgagagatgggcgagcgccgttccgaagggacgggcgatggcctccgttgccctcggccgatcgaaagggagtcg

SEQ ID NO: 65989 - DNA, 120 bp, Homo sapiens
  misc_feature: 534 for SV(C|O) and 28S
cggcgctgccgtatcgttccgcctgggcgggattctgacttagaggcgttcagtcataatcccacagatggtagcttcgccccattggctcctcagccaagcacatacaccaaatgtctg

SEQ ID NO: 65990 - DNA, 120 bp, Homo sapiens; identical to SEQ ID NO: 49213
  misc_feature: 534 for SV(C|O) and 28S

SEQ ID NO: 65991 - DNA, 120 bp, Homo sapiens
  misc_feature: 533 for SV(C|O) and 28S
ggccgaggtgggatcccgaggcctctccagtccgccgagggcgcaccaccggcccgtctcgcccgccgcgccggggaggtggagcacgagcgcacgtgttaggacccgaaagatggtgaa

SEQ ID NO: 65992 - DNA, 120 bp, Homo sapiens; identical to SEQ ID NO: 49420
  misc_feature: 533 for SV(C|O) and 28S

SEQ ID NO: 65993 - DNA, 120 bp, Homo sapiens; identical to SEQ ID NO: 50714
  misc_feature: 533 for SV(C|O) and 28S

SEQ ID NO: 65994 - DNA, 120 bp, Homo sapiens; identical to SEQ ID NO: 50659
  misc_feature: 533 for SV(C|O) and 28S

SEQ ID NO: 65995 - DNA, 120 bp, Homo sapiens; identical to SEQ ID NO: 50078
  misc_feature: 533 for SV(C|O) and 28S

SEQ ID NO: 65996 - DNA, 120 bp, Homo sapiens; identical to SEQ ID NO: 50103
  misc_feature: 533 for SV(C|O) and 28S

SEQ ID NO: 65997 - DNA, 120 bp, Homo sapiens
  misc_feature: 533 for SV(C|O) and 28S
taaggctaaataccggcacgagaccgatagtcaacaagtaccgtaagggaaagttgaaaagaactttgaagagagagttcaagagggcgtgaaaccgttaagaggtaaacgggtggggtc

SEQ ID NO: 65998 - DNA, 120 bp, Homo sapiens; identical to SEQ ID NO: 49512
  misc_feature: 533 for SV(C|O) and 28S

SEQ ID NO: 65999 - DNA, 120 bp, Homo sapiens; identical to SEQ ID NO: 51145
  misc_feature: 533 for SV(C|O) and 28S

SEQ ID NO: 66000 - DNA, 120 bp, Homo sapiens; identical to SEQ ID NO: 51173
  misc_feature: 533 for SV(C|O) and 28S

SEQ ID NO: 66001 - DNA, 120 bp, Homo sapiens
  misc_feature: 533 for SV(C|O) and 28S
atggaacccttctccacttcggccttcaaagttctcgtttgaatatttgctactaccaccaagatctgcacctgcggcggctccacccgggcccgcgccctaggcttcaaggctcaccgc

SEQ ID NO: 66002 - DNA, 120 bp, Homo sapiens
  misc_feature: 533 for SV(C|O) and 28S
gcccttctgctccacgggaggtttctgtcctccctgagctcgccttaggacacctgcgttaccgtttgacaggtgtaccgccccagtcaaactccccacctggcactgtccccggagcgg

SEQ ID NO: 66003 - DNA, 120 bp, Homo sapiens; identical to SEQ ID NO: 50643
  misc_feature: 533 for SV(C|O) and 28S

SEQ ID NO: 66004 - DNA, 120 bp, Homo sapiens
  misc_feature: 533 for SV(C|O) and 28S
aaccagctactagatggttcgattagtctttcgcccctatacccaggtcggacgaccgatttgcacgtcaggaccgctacggacctccaccagagtttcctctggcttcgccctgcccag

SEQ ID NO: 66005 - DNA, 120 bp, Homo sapiens
  misc_feature: 533 for SV(C|O) and 28S
atacccaggtcggacgaccgatttgcacgtcaggaccgctacggacctccaccagagtttcctctggcttcgccctgcccaggcatagttcaccatctttcgggtcctaacacgtgcgct

SEQ ID NO: 66006 - DNA, 120 bp, Homo sapiens
  misc_feature: 532 for SV(C|O) and 28S
tacctacattgttccaacatgccagaggctgttcaccttggagacctgctgcggatatgggtacggcccggcgcgagatttacaccctctcccccggattttcaagggccagcgagagct

SEQ ID NO: 66007 - DNA, 120 bp, Homo sapiens
  misc_feature: 532 for SV(C|O) and 28S
attccgccaagcccgttcccttggctgtggtttcgctggatagtaggtagggacagtgggaatctcgttcatccattcatgcgcgtcactaattagatgacgaggcatttggctacctta

SEQ ID NO: 66008 - DNA, 120 bp, Homo sapiens; identical to SEQ ID NO: 49131
  misc_feature: 532 for SV(C|O) and 28S

SEQ ID NO: 66009 - DNA, 120 bp, Homo sapiens
  misc_feature: 532 for SV(C|O) and 28S
acatggaacccttctccacttcggccttcaaagttctcgtttgaatatttgctactaccaccaagatctgcacctgcggcggctccacccgggcccgcgccctaggcttcaaggctcacc

SEQ ID NO: 66010 - DNA, 120 bp, Homo sapiens
  misc_feature: 532 for SV(C|O) and 28S
gggggggcggcggcgcctcgtccagccgcggcgcgcgcccagccccgcttcgcgccccagcccgaccgacccagcccttagagccaatccttatcccgaagttacggatccggcttgccg

SEQ ID NO: 66011 - DNA, 120 bp, Homo sapiens
  misc_feature: 532 for SV(C|O) and 28S
gggcggcggcgcctcgtccagccgcggcgcgcgcccagccccgcttcgcgccccagcccgaccgacccagcccttagagccaatccttatcccgaagttacggatccggcttgccgactt

SEQ ID NO: 66012 - DNA, 120 bp, Homo sapiens; identical to SEQ ID NO: 49962
  misc_feature: 532 for SV(C|O) and 28S

SEQ ID NO: 66013 - DNA, 120 bp, Homo sapiens; identical to SEQ ID NO: 50220
  misc_feature: 532 for SV(C|O) and 28S

SEQ ID NO: 66014 - DNA, 120 bp, Homo sapiens
  misc_feature: 532 for SV(C|O) and 28S
ctccgcggcgctgccgtatcgttccgcctgggcgggattctgacttagaggcgttcagtcataatcccacagatggtagcttcgccccattggctcctcagccaagcacatacaccaaat

SEQ ID NO: 66015 - DNA, 120 bp, Homo sapiens; identical to SEQ ID NO: 50074
  misc_feature: 532 for SV(C|O) and 28S

SEQ ID NO: 66016 - DNA, 120 bp, Homo sapiens
  misc_feature: 531 for SV(C|O) and 28S
tctcttttctttgtgaagggcagggcgccctggaatgggttcgccccgagagaggggcccgtgccttggaaagcgtcgcggttccggcggcgtccggtgagctctcgctggcccttgaaa

SEQ ID NO: 66017 - DNA, 120 bp, Homo sapiens; identical to SEQ ID NO: 50700
  misc_feature: 531 for SV(C|O) and 28S

SEQ ID NO: 66018 - DNA, 120 bp, Homo sapiens
  misc_feature: 531 for SV(C|O) and 28S
tgcccttctgctccacgggaggtttctgtcctccctgagctcgccttaggacacctgcgttaccgtttgacaggtgtaccgccccagtcaaactccccacctggcactgtccccggagcg

SEQ ID NO: 66019 - DNA, 120 bp, Homo sapiens; identical to SEQ ID NO: 50836
  misc_feature: 531 for SV(C|O) and 28S

SEQ ID NO: 66020 - DNA, 120 bp, Homo sapiens
  misc_feature: 531 for SV(C|O) and 28S
cgcccctatacccaggtcggacgaccgatttgcacgtcaggaccgctacggacctccaccagagtttcctctggcttcgccctgcccaggcatagttcaccatctttcgggtcctaacac

SEQ ID NO: 66021 - DNA, 120 bp, Homo sapiens
  misc_feature: 531 for SV(C|O) and 28S
ctctagtctggcacggtgaagagacatgagaggtgtagaataagtgggaggcccccggcgcccccccggtgtccccgcgaggggcccggggcggggtccgccggccctgcgggccgccgg

SEQ ID NO: 66022 - DNA, 120 bp, Homo sapiens; identical to SEQ ID NO: 50535
  misc_feature: 531 for SV(C|O) and 28S

SEQ ID NO: 66023 - DNA, 120 bp, Homo sapiens
  misc_feature: 531 for SV(C|O) and 28S
ctagtctggcacggtgaagagacatgagaggtgtagaataagtgggaggcccccggcgcccccccggtgtccccgcgaggggcccggggcggggtccgccggccctgcgggccgccggtg

SEQ ID NO: 66024 - DNA, 120 bp, Homo sapiens; identical to SEQ ID NO: 50813
  misc_feature: 531 for SV(C|O) and 28S

SEQ ID NO: 66025 - DNA, 120 bp, Homo sapiens
  misc_feature: 530 for SV(C|O) and 28S
ccgaggctccgcggcgctgccgtatcgttccgcctgggcgggattctgacttagaggcgttcagtcataatcccacagatggtagcttcgccccattggctcctcagccaagcacataca

SEQ ID NO: 66026 - DNA, 120 bp, Homo sapiens
  misc_feature: 530 for SV(C|O) and 28S
tggaacccttctccacttcggccttcaaagttctcgtttgaatatttgctactaccaccaagatctgcacctgcggcggctccacccgggcccgcgccctaggcttcaaggctcaccgca

SEQ ID NO: 66027 - DNA, 120 bp, Homo sapiens
  misc_feature: 530 for SV(C|O) and 28S
tcacatggaacccttctccacttcggccttcaaagttctcgtttgaatatttgctactaccaccaagatctgcacctgcggcggctccacccgggcccgcgccctaggcttcaaggctca

SEQ ID NO: 66028 - DNA, 120 bp, Homo sapiens; identical to SEQ ID NO: 50713
  misc_feature: 530 for SV(C|O) and 28S

SEQ ID NO: 66029 - DNA, 120 bp, Homo sapiens
  misc_feature: 530 for SV(C|O) and 28S
tccgcggcgctgccgtatcgttccgcctgggcgggattctgacttagaggcgttcagtcataatcccacagatggtagcttcgccccattggctcctcagccaagcacatacaccaaatg

SEQ ID NO: 66030 - DNA, 120 bp, Homo sapiens
  misc_feature: 530 for SV(C|O) and 28S
tatacccaggtcggacgaccgatttgcacgtcaggaccgctacggacctccaccagagtttcctctggcttcgccctgcccaggcatagttcaccatctttcgggtcctaacacgtgcgc

SEQ ID NO: 66031 - DNA, 120 bp, Homo sapiens
  misc_feature: 530 for SV(C|O) and 28S
cgaggctccgcggcgctgccgtatcgttccgcctgggcgggattctgacttagaggcgttcagtcataatcccacagatggtagcttcgccccattggctcctcagccaagcacatacac

SEQ ID NO: 66032 - DNA, 120 bp, Homo sapiens; identical to SEQ ID NO: 49130
  misc_feature: 530 for SV(C|O) and 28S

SEQ ID NO: 66033 - DNA, 120 bp, Homo sapiens
  misc_feature: 530 for SV(C|O) and 28S
ccttagagccaatccttatcccgaagttacggatccggcttgccgacttcccttacctacattgttccaacatgccagaggctgttcaccttggagacctgctgcggatatgggtacggc

SEQ ID NO: 66034 - DNA, 120 bp, Homo sapiens; identical to SEQ ID NO: 50927
  misc_feature: 530 for SV(C|O) and 28S

SEQ ID NO: 66035 - DNA, 120 bp, Homo sapiens
  misc_feature: 529 for SV(C|O) and 28S
tccaaggtgaacagcctctggcatgttggaacaatgtaggtaagggaagtcggcaagccggatccgtaacttcgggataaggattggctctaagggctgggtcggtcgggctggggcgcg

SEQ ID NO: 66036 - DNA, 120 bp, Homo sapiens
  misc_feature: 529 for SV(C|O) and 28S
cttagagccaatccttatcccgaagttacggatccggcttgccgacttcccttacctacattgttccaacatgccagaggctgttcaccttggagacctgctgcggatatgggtacggcc

SEQ ID NO: 66037 - DNA, 120 bp, Homo sapiens; identical to SEQ ID NO: 49634
  misc_feature: 529 for SV(C|O) and 28S

SEQ ID NO: 66038 - DNA, 120 bp, Homo sapiens; identical to SEQ ID NO: 50738
  misc_feature: 529 for SV(C|O) and 28S

SEQ ID NO: 66039 - DNA, 120 bp, Homo sapiens
  misc_feature: 529 for SV(C|O) and 28S
ccagctactagatggttcgattagtctttcgcccctatacccaggtcggacgaccgatttgcacgtcaggaccgctacggacctccaccagagtttcctctggcttcgccctgcccaggc

SEQ ID NO: 66040 - DNA, 120 bp, Homo sapiens; identical to SEQ ID NO: 49704
  misc_feature: 529 for SV(C|O) and 28S

SEQ ID NO: 66041 - DNA, 120 bp, Homo sapiens; identical to SEQ ID NO: 50893
  misc_feature: 529 for SV(C|O) and 28S

SEQ ID NO: 66042 - DNA, 120 bp, Homo sapiens; identical to SEQ ID NO: 50048
  misc_feature: 529 for SV(C|O) and 28S

SEQ ID NO: 66043 - DNA, 120 bp, Homo sapiens; identical to SEQ ID NO: 50741
  misc_feature: 529 for SV(C|O) and 28S

SEQ ID NO: 66044 - DNA, 120 bp, Homo sapiens
  misc_feature: 529 for SV(C|O) and 28S
aagggttccatgtgaacagcagttgaacatgggtcagtcggtcctgagagatgggcgagcgccgttccgaagggacgggcgatggcctccgttgccctcggccgatcgaaagggagtcgg

SEQ ID NO: 66045 - DNA, 120 bp, Homo sapiens; identical to SEQ ID NO: 49972
  misc_feature: 528 for SV(C|O) and 28S

SEQ ID NO: 66046 - DNA, 120 bp, Homo sapiens; identical to SEQ ID NO: 50317
  misc_feature: 528 for SV(C|O) and 28S

SEQ ID NO: 66047 - DNA, 120 bp, Homo sapiens; identical to SEQ ID NO: 49358
  misc_feature: 528 for SV(C|O) and 28S

SEQ ID NO: 66048 - DNA, 120 bp, Homo sapiens; identical to SEQ ID NO: 50990
  misc_feature: 528 for SV(C|O) and 28S

SEQ ID NO: 66049 - DNA, 120 bp, Homo sapiens; identical to SEQ ID NO: 49674
  misc_feature: 527 for SV(C|O) and 28S

SEQ ID NO: 66050 - DNA, 120 bp, Homo sapiens
  misc_feature: 527 for SV(C|O) and 28S
gggggcggcggcgcctcgtccagccgcggcgcgcgcccagccccgcttcgcgccccagcccgaccgacccagcccttagagccaatccttatcccgaagttacggatccggcttgccgac

SEQ ID NO: 66051 - DNA, 120 bp, Homo sapiens
  misc_feature: 527 for SV(C|O) and 28S
gctgccgtatcgttccgcctgggcgggattctgacttagaggcgttcagtcataatcccacagatggtagcttcgccccattggctcctcagccaagcacatacaccaaatgtctgaacc

SEQ ID NO: 66052 - DNA, 120 bp, Homo sapiens
  misc_feature: 527 for SV(C|O) and 28S
ggggcggcggcgcctcgtccagccgcggcgcgcgcccagccccgcttcgcgccccagcccgaccgacccagcccttagagccaatccttatcccgaagttacggatccggcttgccgact

SEQ ID NO: 66053 - DNA, 120 bp, Homo sapiens
  misc_feature: 527 for SV(C|O) and 28S
cttctgctccacgggaggtttctgtcctccctgagctcgccttaggacacctgcgttaccgtttgacaggtgtaccgccccagtcaaactccccacctggcactgtccccggagcgggtc

SEQ ID NO: 66054 - DNA, 120 bp, Homo sapiens; identical to SEQ ID NO: 49383
  misc_feature: 527 for SV(C|O) and 28S

SEQ ID NO: 66055 - DNA, 120 bp, Homo sapiens
  misc_feature: 527 for SV(C|O) and 28S
accagctactagatggttcgattagtctttcgcccctatacccaggtcggacgaccgatttgcacgtcaggaccgctacggacctccaccagagtttcctctggcttcgccctgcccagg

SEQ ID NO: 66056 - DNA, 120 bp, Homo sapiens
  misc_feature: 527 for SV(C|O) and 28S
cccttctgctccacgggaggtttctgtcctccctgagctcgccttaggacacctgcgttaccgtttgacaggtgtaccgccccagtcaaactccccacctggcactgtccccggagcggg

SEQ ID NO: 66057 - DNA, 120 bp, Homo sapiens; identical to SEQ ID NO: 50150
  misc_feature: 526 for SV(C|O) and 28S

SEQ ID NO: 66058 - DNA, 120 bp, Homo sapiens; identical to SEQ ID NO: 50543
  misc_feature: 526 for SV(C|O) and 28S

SEQ ID NO: 66059 - DNA, 120 bp, Homo sapiens; identical to SEQ ID NO: 50331
  misc_feature: 526 for SV(C|O) and 28S

SEQ ID NO: 66060 - DNA, 120 bp, Homo sapiens
  misc_feature: 526 for SV(C|O) and 28S
cccgaagagggggacggcggagcgagcgcacggggtcggcggcgacgtcggctacccacccgacccgtcttgaaacacggaccaaggagtctaacacgtgcgcgagtcgggggctcgcac

SEQ ID NO: 66061 - DNA, 120 bp, Homo sapiens; identical to SEQ ID NO: 49171
  misc_feature: 526 for SV(C|O) and 28S

SEQ ID NO: 66062 - DNA, 120 bp, Homo sapiens; identical to SEQ ID NO: 50770
  misc_feature: 526 for SV(C|O) and 28S

SEQ ID NO: 66063 - DNA, 120 bp, Homo sapiens
  misc_feature: 526 for SV(C|O) and 28S
acgcgcgcgtcccccgaagagggggacggcggagcgagcgcacggggtcggcggcgacgtcggctacccacccgacccgtcttgaaacacggaccaaggagtctaacacgtgcgcgagtc

SEQ ID NO: 66064 - DNA, 120 bp, Homo sapiens; identical to SEQ ID NO: 50948
  misc_feature: 526 for SV(C|O) and 28S

SEQ ID NO: 66065 - DNA, 120 bp, Homo sapiens
  misc_feature: 525 for SV(C|O) and 28S
gtctggcacggtgaagagacatgagaggtgtagaataagtgggaggcccccggcgcccccccggtgtccccgcgaggggcccggggcggggtccgccggccctgcgggccgccggtgaaa

SEQ ID NO: 66066 - DNA, 120 bp, Homo sapiens; identical to SEQ ID NO: 50683
  misc_feature: 525 for SV(C|O) and 28S

SEQ ID NO: 66067 - DNA, 120 bp, Homo sapiens
  misc_feature: 525 for SV(C|O) and 28S
cgaagagggggacggcggagcgagcgcacggggtcggcggcgacgtcggctacccacccgacccgtcttgaaacacggaccaaggagtctaacacgtgcgcgagtcgggggctcgcacga

SEQ ID NO: 66068 - DNA, 120 bp, Homo sapiens
  misc_feature: 525 for SV(C|O) and 28S
ggggggcggcggcgcctcgtccagccgcggcgcgcgcccagccccgcttcgcgccccagcccgaccgacccagcccttagagccaatccttatcccgaagttacggatccggcttgccga

SEQ ID NO: 66069 - DNA, 120 bp, Homo sapiens
  misc_feature: 525 for SV(C|O) and 28S
ggcggcggcgcctcgtccagccgcggcgcgcgcccagccccgcttcgcgccccagcccgaccgacccagcccttagagccaatccttatcccgaagttacggatccggcttgccgacttc

SEQ ID NO: 66070 - DNA, 120 bp, Homo sapiens
  misc_feature: 525 for SV(C|O) and 28S
ctgccgtatcgttccgcctgggcgggattctgacttagaggcgttcagtcataatcccacagatggtagcttcgccccattggctcctcagccaagcacatacaccaaatgtctgaacct

SEQ ID NO: 66071 - DNA, 120 bp, Homo sapiens
  misc_feature: 525 for SV(C|O) and 28S
ccgaggtgggatcccgaggcctctccagtccgccgagggcgcaccaccggcccgtctcgcccgccgcgccggggaggtggagcacgagcgcacgtgttaggacccgaaagatggtgaact

SEQ ID NO: 66072 - DNA, 120 bp, Homo sapiens; identical to SEQ ID NO: 49623
  misc_feature: 525 for SV(C|O) and 28S

SEQ ID NO: 66073 - DNA, 120 bp, Homo sapiens
  misc_feature: 525 for SV(C|O) and 28S
cccctatacccaggtcggacgaccgatttgcacgtcaggaccgctacggacctccaccagagtttcctctggcttcgccctgcccaggcatagttcaccatctttcgggtcctaacacgt

SEQ ID NO: 66074 - DNA, 120 bp, Homo sapiens; identical to SEQ ID NO: 51151
  misc_feature: 524 for SV(C|O) and 28S

SEQ ID NO: 66075 - DNA, 120 bp, Homo sapiens; identical to SEQ ID NO: 49175
  misc_feature: 524 for SV(C|O) and 28S

SEQ ID NO: 66076 - DNA, 120 bp, Homo sapiens
  misc_feature: 524 for SV(C|O) and 28S
ttccgccaagcccgttcccttggctgtggtttcgctggatagtaggtagggacagtgggaatctcgttcatccattcatgcgcgtcactaattagatgacgaggcatttggctaccttaa

SEQ ID NO: 66077 - DNA, 120 bp, Homo sapiens
  misc_feature: 524 for SV(C|O) and 28S
agtctggcacggtgaagagacatgagaggtgtagaataagtgggaggcccccggcgcccccccggtgtccccgcgaggggcccggggcggggtccgccggccctgcgggccgccggtgaa

SEQ ID NO: 66078 - DNA, 120 bp, Homo sapiens; identical to SEQ ID NO: 49169
  misc_feature: 524 for SV(C|O) and 28S

SEQ ID NO: 66079 - DNA, 120 bp, Homo sapiens
  misc_feature: 524 for SV(C|O) and 28S
ggcgctgccgtatcgttccgcctgggcgggattctgacttagaggcgttcagtcataatcccacagatggtagcttcgccccattggctcctcagccaagcacatacaccaaatgtctga

SEQ ID NO: 66080 - DNA, 120 bp, Homo sapiens
  misc_feature: 524 for SV(C|O) and 28S
cgctgccgtatcgttccgcctgggcgggattctgacttagaggcgttcagtcataatcccacagatggtagcttcgccccattggctcctcagccaagcacatacaccaaatgtctgaac

SEQ ID NO: 66081 - DNA, 120 bp, Homo sapiens; identical to SEQ ID NO: 49610
  misc_feature: 524 for SV(C|O) and 28S

SEQ ID NO: 66082 - DNA, 120 bp, Homo sapiens; identical to SEQ ID NO: 50687
  misc_feature: 524 for SV(C|O) and 28S

SEQ ID NO: 66083 - DNA, 120 bp, Homo sapiens; identical to SEQ ID NO: 50934
  misc_feature: 524 for SV(C|O) and 28S

SEQ ID NO: 66084 - DNA, 120 bp, Homo sapiens
  misc_feature: 524 for SV(C|O) and 28S
agggttccatgtgaacagcagttgaacatgggtcagtcggtcctgagagatgggcgagcgccgttccgaagggacgggcgatggcctccgttgccctcggccgatcgaaagggagtcggg

SEQ ID NO: 66085 - DNA, 120 bp, Homo sapiens
  misc_feature: 523 for SV(C|O) and 28S
gcgctgccgtatcgttccgcctgggcgggattctgacttagaggcgttcagtcataatcccacagatggtagcttcgccccattggctcctcagccaagcacatacaccaaatgtctgaa

SEQ ID NO: 66086 - DNA, 120 bp, Homo sapiens; identical to SEQ ID NO: 51064
  misc_feature: 523 for SV(C|O) and 28S

SEQ ID NO: 66087 - DNA, 120 bp, Homo sapiens
  misc_feature: 523 for SV(C|O) and 28S
tagtctggcacggtgaagagacatgagaggtgtagaataagtgggaggcccccggcgcccccccggtgtccccgcgaggggcccggggcggggtccgccggccctgcgggccgccggtga

SEQ ID NO: 66088 - DNA, 120 bp, Homo sapiens; identical to SEQ ID NO: 50976
  misc_feature: 523 for SV(C|O) and 28S

SEQ ID NO: 66089 - DNA, 120 bp, Homo sapiens; identical to SEQ ID NO: 50428
  misc_feature: 523 for SV(C|O) and 28S

SEQ ID NO: 66090 - DNA, 120 bp, Homo sapiens
  misc_feature: 523 for SV(C|O) and 28S
gggtgccgcgcgcgggtcggggggcggggcggactgtccccagtgcgccccgggcgggtcgcgccgtcgggcccgggggaggttctctcggggccacgcgcgcgtcccccgaagaggggg

SEQ ID NO: 66091 - DNA, 120 bp, Homo sapiens
  misc_feature: 523 for SV(C|O) and 28S
ctccacgggaggtttctgtcctccctgagctcgccttaggacacctgcgttaccgtttgacaggtgtaccgccccagtcaaactccccacctggcactgtccccggagcgggtcgcgccc

SEQ ID NO: 66092 - DNA, 120 bp, Homo sapiens
  misc_feature: 523 for SV(C|O) and 28S
ctaaggctaaataccggcacgagaccgatagtcaacaagtaccgtaagggaaagttgaaaagaactttgaagagagagttcaagagggcgtgaaaccgttaagaggtaaacgggtggggt

SEQ ID NO: 66093 - DNA, 120 bp, Homo sapiens; identical to SEQ ID NO: 49424
  misc_feature: 523 for SV(C|O) and 28S

SEQ ID NO: 66094 - DNA, 120 bp, Homo sapiens; identical to SEQ ID NO: 50600
  misc_feature: 523 for SV(C|O) and 28S

SEQ ID NO: 66095 - DNA, 120 bp, Homo sapiens; identical to SEQ ID NO: 50848
  misc_feature: 523 for SV(C|O) and 28S

SEQ ID NO: 66096 - DNA, 120 bp, Homo sapiens
  misc_feature: 522 for SV(C|O) and 28S
tgctccacgggaggtttctgtcctccctgagctcgccttaggacacctgcgttaccgtttgacaggtgtaccgccccagtcaaactccccacctggcactgtccccggagcgggtcgcgc

SEQ ID NO: 66097 - DNA, 120 bp, Homo sapiens; identical to SEQ ID NO: 49236
  misc_feature: 522 for SV(C|O) and 28S

SEQ ID NO: 66098 - DNA, 120 bp, Homo sapiens
  misc_feature: 522 for SV(C|O) and 28S
ggaaccagctactagatggttcgattagtctttcgcccctatacccaggtcggacgaccgatttgcacgtcaggaccgctacggacctccaccagagtttcctctggcttcgccctgccc

SEQ ID NO: 66099 - DNA, 120 bp, Homo sapiens; identical to SEQ ID NO: 50754
  misc_feature: 522 for SV(C|O) and 28S

SEQ ID NO: 66100 - DNA, 120 bp, Homo sapiens
  misc_feature: 522 for SV(C|O) and 28S
actctagtctggcacggtgaagagacatgagaggtgtagaataagtgggaggcccccggcgcccccccggtgtccccgcgaggggcccggggcggggtccgccggccctgcgggccgccg

SEQ ID NO: 66101 - DNA, 120 bp, Homo sapiens
  misc_feature: 521 for SV(C|O) and 28S
ttctcttttctttgtgaagggcagggcgccctggaatgggttcgccccgagagaggggcccgtgccttggaaagcgtcgcggttccggcggcgtccggtgagctctcgctggcccttgaa

SEQ ID NO: 66102 - DNA, 120 bp, Homo sapiens
  misc_feature: 521 for SV(C|O) and 28S
ttcacatggaacccttctccacttcggccttcaaagttctcgtttgaatatttgctactaccaccaagatctgcacctgcggcggctccacccgggcccgcgccctaggcttcaaggctc

SEQ ID NO: 66103 - DNA, 120 bp, Homo sapiens; identical to SEQ ID NO: 50691
  misc_feature: 521 for SV(C|O) and 28S

SEQ ID NO: 66104 - DNA, 120 bp, Homo sapiens
  misc_feature: 521 for SV(C|O) and 28S
gaaccagctactagatggttcgattagtctttcgcccctatacccaggtcggacgaccgatttgcacgtcaggaccgctacggacctccaccagagtttcctctggcttcgccctgccca

SEQ ID NO: 66105 - DNA, 120 bp, Homo sapiens
  misc_feature: 521 for SV(C|O) and 28S
gactctagtctggcacggtgaagagacatgagaggtgtagaataagtgggaggcccccggcgcccccccggtgtccccgcgaggggcccggggcggggtccgccggccctgcgggccgcc

SEQ ID NO: 66106 - DNA, 120 bp, Homo sapiens
  misc_feature: 521 for SV(C|O) and 28S
gctccacgggaggtttctgtcctccctgagctcgccttaggacacctgcgttaccgtttgacaggtgtaccgccccagtcaaactccccacctggcactgtccccggagcgggtcgcgcc

SEQ ID NO: 66107 - DNA, 120 bp, Homo sapiens
  misc_feature: 521 for SV(C|O) and 28S
ccgaagagggggacggcggagcgagcgcacggggtcggcggcgacgtcggctacccacccgacccgtcttgaaacacggaccaaggagtctaacacgtgcgcgagtcgggggctcgcacg

SEQ ID NO: 66108 - DNA, 120 bp, Homo sapiens; identical to SEQ ID NO: 50886
  misc_feature: 521 for SV(C|O) and 28S

SEQ ID NO: 66109 - DNA, 120 bp, Homo sapiens; identical to SEQ ID NO: 50099
  misc_feature: 521 for SV(C|O) and 28S

SEQ ID NO: 66110 - DNA, 120 bp, Homo sapiens
  misc_feature: 520 for SV(C|O) and 28S
tgaagagacatgagaggtgtagaataagtgggaggcccccggcgcccccccggtgtccccgcgaggggcccggggcggggtccgccggccctgcgggccgccggtgaaataccactactc

SEQ ID NO: 66111 - DNA, 120 bp, Homo sapiens
  misc_feature: 520 for SV(C|O) and 28S
tctagtctggcacggtgaagagacatgagaggtgtagaataagtgggaggcccccggcgcccccccggtgtccccgcgaggggcccggggcggggtccgccggccctgcgggccgccggt

SEQ ID NO: 66112 - DNA, 120 bp, Homo sapiens; identical to SEQ ID NO: 51175
  misc_feature: 520 for SV(C|O) and 28S

SEQ ID NO: 66113 - DNA, 120 bp, Homo sapiens; identical to SEQ ID NO: 50909
  misc_feature: 520 for SV(C|O) and 28S

SEQ ID NO: 66114 - DNA, 120 bp, Homo sapiens
  misc_feature: 520 for SV(C|O) and 28S
tacattgttccaacatgccagaggctgttcaccttggagacctgctgcggatatgggtacggcccggcgcgagatttacaccctctcccccggattttcaagggccagcgagagctcacc

SEQ ID NO: 66115 - DNA, 120 bp, Homo sapiens
  misc_feature: 520 for SV(C|O) and 28S
ctacattgttccaacatgccagaggctgttcaccttggagacctgctgcggatatgggtacggcccggcgcgagatttacaccctctcccccggattttcaagggccagcgagagctcac

SEQ ID NO: 66116 - DNA, 120 bp, Homo sapiens
  misc_feature: 520 for SV(C|O) and 28S
gtgaagagacatgagaggtgtagaataagtgggaggcccccggcgcccccccggtgtccccgcgaggggcccggggcggggtccgccggccctgcgggccgccggtgaaataccactact

SEQ ID NO: 66117 - DNA, 120 bp, Homo sapiens
  misc_feature: 520 for SV(C|O) and 28S
gggtcggcggcgacgtcggctacccacccgacccgtcttgaaacacggaccaaggagtctaacacgtgcgcgagtcgggggctcgcacgaaagccgccgtggcgcaatgaaggtgaaggc

SEQ ID NO: 66118 - DNA, 120 bp, Homo sapiens; identical to SEQ ID NO: 50393
  misc_feature: 520 for SV(C|O) and 28S

SEQ ID NO: 66119 - DNA, 120 bp, Homo sapiens; identical to SEQ ID NO: 49396
  misc_feature: 520 for SV(C|O) and 28S

SEQ ID NO: 66120 - DNA, 120 bp, Homo sapiens; identical to SEQ ID NO: 50124
  misc_feature: 519 for SV(C|O) and 28S

SEQ ID NO: 66121 - DNA, 120 bp, Homo sapiens
  misc_feature: 519 for SV(C|O) and 28S
ttcaagacgggtcgggtgggtagccgacgtcgccgccgaccccgtgcgctcgctccgccgtccccctcttcgggggacgcgcgcgtggccccgagagaacctcccccgggcccgacggcg

SEQ ID NO: 66122 - DNA, 120 bp, Homo sapiens; identical to SEQ ID NO: 50763
  misc_feature: 519 for SV(C|O) and 28S

SEQ ID NO: 66123 - DNA, 120 bp, Homo sapiens; identical to SEQ ID NO: 50041
  misc_feature: 519 for SV(C|O) and 28S

SEQ ID NO: 66124 - DNA, 120 bp, Homo sapiens
  misc_feature: 519 for SV(C|O) and 28S
tcaagacgggtcgggtgggtagccgacgtcgccgccgaccccgtgcgctcgctccgccgtccccctcttcgggggacgcgcgcgtggccccgagagaacctcccccgggcccgacggcgc

SEQ ID NO: 66125 - DNA, 120 bp, Homo sapiens; identical to SEQ ID NO: 50864
  misc_feature: 519 for SV(C|O) and 28S

SEQ ID NO: 66126 - DNA, 120 bp, Homo sapiens
  misc_feature: 519 for SV(C|O) and 28S
ggcggcgcctcgtccagccgcggcgcgcgcccagccccgcttcgcgccccagcccgaccgacccagcccttagagccaatccttatcccgaagttacggatccggcttgccgacttccct

SEQ ID NO: 66127 - DNA, 120 bp, Homo sapiens
  misc_feature: 519 for SV(C|O) and 28S
ccttctgctccacgggaggtttctgtcctccctgagctcgccttaggacacctgcgttaccgtttgacaggtgtaccgccccagtcaaactccccacctggcactgtccccggagcgggt

SEQ ID NO: 66128 - DNA, 120 bp, Homo sapiens; identical to SEQ ID NO: 50734
  misc_feature: 519 for SV(C|O) and 28S

SEQ ID NO: 66129 - DNA, 120 bp, Homo sapiens
  misc_feature: 518 for SV(C|O) and 28S
ggtaaacggcgggagtaactatgactctcttaaggtagccaaatgcctcgtcatctaattagtgacgcgcatgaatggatgaacgagattcccactgtccctacctactatccagcgaaa

SEQ ID NO: 66130 - DNA, 120 bp, Homo sapiens
  misc_feature: 518 for SV(C|O) and 28S
ccccgaagagggggacggcggagcgagcgcacggggtcggcggcgacgtcggctacccacccgacccgtcttgaaacacggaccaaggagtctaacacgtgcgcgagtcgggggctcgca

SEQ ID NO: 66131 - DNA, 120 bp, Homo sapiens; identical to SEQ ID NO: 51131
  misc_feature: 518 for SV(C|O) and 28S

SEQ ID NO: 66132 - DNA, 120 bp, Homo sapiens
  misc_feature: 518 for SV(C|O) and 28S
taaacggcgggagtaactatgactctcttaaggtagccaaatgcctcgtcatctaattagtgacgcgcatgaatggatgaacgagattcccactgtccctacctactatccagcgaaacc

SEQ ID NO: 66133 - DNA, 120 bp, Homo sapiens; identical to SEQ ID NO: 50622
  misc_feature: 518 for SV(C|O) and 28S

SEQ ID NO: 66134 - DNA, 120 bp, Homo sapiens
  misc_feature: 518 for SV(C|O) and 28S
ggaacccttctccacttcggccttcaaagttctcgtttgaatatttgctactaccaccaagatctgcacctgcggcggctccacccgggcccgcgccctaggcttcaaggctcaccgcag

SEQ ID NO: 66135 - DNA, 120 bp, Homo sapiens; identical to SEQ ID NO: 50107
  misc_feature: 518 for SV(C|O) and 28S

SEQ ID NO: 66136 - DNA, 120 bp, Homo sapiens; identical to SEQ ID NO: 49687
  misc_feature: 517 for SV(C|O) and 28S

SEQ ID NO: 66137 - DNA, 120 bp, Homo sapiens
  misc_feature: 517 for SV(C|O) and 28S
tctggcacggtgaagagacatgagaggtgtagaataagtgggaggcccccggcgcccccccggtgtccccgcgaggggcccggggcggggtccgccggccctgcgggccgccggtgaaat

SEQ ID NO: 66138 - DNA, 120 bp, Homo sapiens
  misc_feature: 517 for SV(C|O) and 28S
cgccaagcccgttcccttggctgtggtttcgctggatagtaggtagggacagtgggaatctcgttcatccattcatgcgcgtcactaattagatgacgaggcatttggctaccttaagag

SEQ ID NO: 66139 - DNA, 120 bp, Homo sapiens
  misc_feature: 517 for SV(C|O) and 28S
cgttcccttggctgtggtttcgctggatagtaggtagggacagtgggaatctcgttcatccattcatgcgcgtcactaattagatgacgaggcatttggctaccttaagagagtcatagt

SEQ ID NO: 66140 - DNA, 120 bp, Homo sapiens; identical to SEQ ID NO: 50801
  misc_feature: 517 for SV(C|O) and 28S

SEQ ID NO: 66141 - DNA, 120 bp, Homo sapiens
  misc_feature: 516 for SV(C|O) and 28S
gggagtaactatgactctcttaaggtagccaaatgcctcgtcatctaattagtgacgcgcatgaatggatgaacgagattcccactgtccctacctactatccagcgaaaccacagccaa

SEQ ID NO: 66142 - DNA, 120 bp, Homo sapiens; identical to SEQ ID NO: 50086
  misc_feature: 516 for SV(C|O) and 28S

SEQ ID NO: 66143 - DNA, 120 bp, Homo sapiens
  misc_feature: 516 for SV(C|O) and 28S
ccgccaagcccgttcccttggctgtggtttcgctggatagtaggtagggacagtgggaatctcgttcatccattcatgcgcgtcactaattagatgacgaggcatttggctaccttaaga

SEQ ID NO: 66144 - DNA, 120 bp, Homo sapiens; identical to SEQ ID NO: 50102
  misc_feature: 516 for SV(C|O) and 28S

SEQ ID NO: 66145 - DNA, 120 bp, Homo sapiens
  misc_feature: 516 for SV(C|O) and 28S
gtaaacggcgggagtaactatgactctcttaaggtagccaaatgcctcgtcatctaattagtgacgcgcatgaatggatgaacgagattcccactgtccctacctactatccagcgaaac

SEQ ID NO: 66146 - DNA, 120 bp, Homo sapiens
  misc_feature: 516 for SV(C|O) and 28S
cggcggcgcctcgtccagccgcggcgcgcgcccagccccgcttcgcgccccagcccgaccgacccagcccttagagccaatccttatcccgaagttacggatccggcttgccgacttccc

SEQ ID NO: 66147 - DNA, 120 bp, Homo sapiens
  misc_feature: 516 for SV(C|O) and 28S
ccgggcgtggggggggcggcggcgcctcgtccagccgcggcgcgcgcccagccccgcttcgcgccccagcccgaccgacccagcccttagagccaatccttatcccgaagttacggatcc

SEQ ID NO: 66148 - DNA, 120 bp, Homo sapiens; identical to SEQ ID NO: 50803
  misc_feature: 516 for SV(C|O) and 28S

SEQ ID NO: 66149 - DNA, 120 bp, Homo sapiens; identical to SEQ ID NO: 50473
  misc_feature: 516 for SV(C|O) and 28S

SEQ ID NO: 66150 - DNA, 120 bp, Homo sapiens; identical to SEQ ID NO: 50073
  misc_feature: 516 for SV(C|O) and 28S

SEQ ID NO: 66151 - DNA, 120 bp, Homo sapiens
  misc_feature: 515 for SV(C|O) and 28S
tccgccaagcccgttcccttggctgtggtttcgctggatagtaggtagggacagtgggaatctcgttcatccattcatgcgcgtcactaattagatgacgaggcatttggctaccttaag

SEQ ID NO: 66152 - DNA, 120 bp, Homo sapiens; identical to SEQ ID NO: 50451
  misc_feature: 515 for SV(C|O) and 28S

SEQ ID NO: 66153 - DNA, 120 bp, Homo sapiens
  misc_feature: 515 for SV(C|O) and 28S
gttctcttttctttgtgaagggcagggcgccctggaatgggttcgccccgagagaggggcccgtgccttggaaagcgtcgcggttccggcggcgtccggtgagctctcgctggcccttga

SEQ ID NO: 66154 - DNA, 120 bp, Homo sapiens
  misc_feature: 515 for SV(C|O) and 28S
gttcacatggaacccttctccacttcggccttcaaagttctcgtttgaatatttgctactaccaccaagatctgcacctgcggcggctccacccgggcccgcgccctaggcttcaaggct

SEQ ID NO: 66155 - DNA, 120 bp, Homo sapiens; identical to SEQ ID NO: 50624
  misc_feature: 515 for SV(C|O) and 28S

SEQ ID NO: 66156 - DNA, 120 bp, Homo sapiens; identical to SEQ ID NO: 50080
  misc_feature: 515 for SV(C|O) and 28S

SEQ ID NO: 66157 - DNA, 120 bp, Homo sapiens
  misc_feature: 515 for SV(C|O) and 28S
cccccgaagagggggacggcggagcgagcgcacggggtcggcggcgacgtcggctacccacccgacccgtcttgaaacacggaccaaggagtctaacacgtgcgcgagtcgggggctcgc

SEQ ID NO: 66158 - DNA, 120 bp, Homo sapiens; identical to SEQ ID NO: 50081
  misc_feature: 515 for SV(C|O) and 28S

SEQ ID NO: 66159 - DNA, 120 bp, Homo sapiens; identical to SEQ ID NO: 50334
  misc_feature: 515 for SV(C|O) and 28S

SEQ ID NO: 66160 - DNA, 120 bp, Homo sapiens
  misc_feature: 515 for SV(C|O) and 28S
cgcgcgcgtcccccgaagagggggacggcggagcgagcgcacggggtcggcggcgacgtcggctacccacccgacccgtcttgaaacacggaccaaggagtctaacacgtgcgcgagtcg

SEQ ID NO: 66161 - DNA, 120 bp, Homo sapiens
  misc_feature: 514 for SV(C|O) and 28S
agggcgccctggaatgggttcgccccgagagaggggcccgtgccttggaaagcgtcgcggttccggcggcgtccggtgagctctcgctggcccttgaaaatccgggggagagggtgtaaa

SEQ ID NO: 66162 - DNA, 120 bp, Homo sapiens
  misc_feature: 514 for SV(C|O) and 28S
ttctgctccacgggaggtttctgtcctccctgagctcgccttaggacacctgcgttaccgtttgacaggtgtaccgccccagtcaaactccccacctggcactgtccccggagcgggtcg

SEQ ID NO: 66163 - DNA, 120 bp, Homo sapiens
  misc_feature: 514 for SV(C|O) and 28S
gccaagcccgttcccttggctgtggtttcgctggatagtaggtagggacagtgggaatctcgttcatccattcatgcgcgtcactaattagatgacgaggcatttggctaccttaagaga

SEQ ID NO: 66164 - DNA, 120 bp, Homo sapiens; identical to SEQ ID NO: 50851
  misc_feature: 514 for SV(C|O) and 28S

SEQ ID NO: 66165 - DNA, 120 bp, Homo sapiens
  misc_feature: 514 for SV(C|O) and 28S
ggggggggcggcggcgcctcgtccagccgcggcgcgcgcccagccccgcttcgcgccccagcccgaccgacccagcccttagagccaatccttatcccgaagttacggatccggcttgcc

SEQ ID NO: 66166 - DNA, 120 bp, Homo sapiens; identical to SEQ ID NO: 50853
  misc_feature: 514 for SV(C|O) and 28S

SEQ ID NO: 66167 - DNA, 120 bp, Homo sapiens
  misc_feature: 514 for SV(C|O) and 28S
gaacccttctccacttcggccttcaaagttctcgtttgaatatttgctactaccaccaagatctgcacctgcggcggctccacccgggcccgcgccctaggcttcaaggctcaccgcagc

SEQ ID NO: 66168 - DNA, 120 bp, Homo sapiens; identical to SEQ ID NO: 51077
  misc_feature: 514 for SV(C|O) and 28S

SEQ ID NO: 66169 - DNA, 120 bp, Homo sapiens
  misc_feature: 513 for SV(C|O) and 28S
cagggcgccctggaatgggttcgccccgagagaggggcccgtgccttggaaagcgtcgcggttccggcggcgtccggtgagctctcgctggcccttgaaaatccgggggagagggtgtaa

SEQ ID NO: 66170 - DNA, 120 bp, Homo sapiens; identical to SEQ ID NO: 51083
  misc_feature: 513 for SV(C|O) and 28S

SEQ ID NO: 66171 - DNA, 120 bp, Homo sapiens
  misc_feature: 513 for SV(C|O) and 28S
ggcgggagtaactatgactctcttaaggtagccaaatgcctcgtcatctaattagtgacgcgcatgaatggatgaacgagattcccactgtccctacctactatccagcgaaaccacagc

SEQ ID NO: 66172 - DNA, 120 bp, Homo sapiens; identical to SEQ ID NO: 50472
  misc_feature: 513 for SV(C|O) and 28S

SEQ ID NO: 66173 - DNA, 120 bp, Homo sapiens; identical to SEQ ID NO: 50444
  misc_feature: 513 for SV(C|O) and 28S

SEQ ID NO: 66174 - DNA, 120 bp, Homo sapiens; identical to SEQ ID NO: 51211
  misc_feature: 512 for SV(C|O) and 28S

SEQ ID NO: 66175 - DNA, 120 bp, Homo sapiens
  misc_feature: 512 for SV(C|O) and 28S
cggcgcctcgtccagccgcggcgcgcgcccagccccgcttcgcgccccagcccgaccgacccagcccttagagccaatccttatcccgaagttacggatccggcttgccgacttccctta

SEQ ID NO: 66176 - DNA, 120 bp, Homo sapiens
  misc_feature: 512 for SV(C|O) and 28S
gggcgccctggaatgggttcgccccgagagaggggcccgtgccttggaaagcgtcgcggttccggcggcgtccggtgagctctcgctggcccttgaaaatccgggggagagggtgtaaat

SEQ ID NO: 66177 - DNA, 120 bp, Homo sapiens; identical to SEQ ID NO: 50525
  misc_feature: 512 for SV(C|O) and 28S

SEQ ID NO: 66178 - DNA, 120 bp, Homo sapiens
  misc_feature: 512 for SV(C|O) and 28S
gatgagcgtcggcatcgggcgccttaacccggcgttcggttcatcccgcagcgccagttctgcttaccaaaagtggcccactaggcactcgcattccacgcccggctccacgccagcgag

SEQ ID NO: 66179 - DNA, 120 bp, Homo sapiens
  misc_feature: 512 for SV(C|O) and 28S
gaagagacatgagaggtgtagaataagtgggaggcccccggcgcccccccggtgtccccgcgaggggcccggggcggggtccgccggccctgcgggccgccggtgaaataccactactct

SEQ ID NO: 66180 - DNA, 120 bp, Homo sapiens; identical to SEQ ID NO: 51034
  misc_feature: 512 for SV(C|O) and 28S

SEQ ID NO: 66181 - DNA, 120 bp, Homo sapiens; identical to SEQ ID NO: 50286
  misc_feature: 511 for SV(C|O) and 28S

SEQ ID NO: 66182 - DNA, 120 bp, Homo sapiens
  misc_feature: 511 for SV(C|O) and 28S
tgactctagtctggcacggtgaagagacatgagaggtgtagaataagtgggaggcccccggcgcccccccggtgtccccgcgaggggcccggggcggggtccgccggccctgcgggccgc

SEQ ID NO: 66183 - DNA, 120 bp, Homo sapiens
  misc_feature: 511 for SV(C|O) and 28S
aaccgaggctccgcggcgctgccgtatcgttccgcctgggcgggattctgacttagaggcgttcagtcataatcccacagatggtagcttcgccccattggctcctcagccaagcacata

SEQ ID NO: 66184 - DNA, 120 bp, Homo sapiens; identical to SEQ ID NO: 50795
  misc_feature: 511 for SV(C|O) and 28S

SEQ ID NO: 66185 - DNA, 120 bp, Homo sapiens; identical to SEQ ID NO: 49663
  misc_feature: 511 for SV(C|O) and 28S

SEQ ID NO: 66186 - DNA, 120 bp, Homo sapiens
  misc_feature: 511 for SV(C|O) and 28S
accgaggctccgcggcgctgccgtatcgttccgcctgggcgggattctgacttagaggcgttcagtcataatcccacagatggtagcttcgccccattggctcctcagccaagcacatac

SEQ ID NO: 66187 - DNA, 120 bp, Homo sapiens; identical to SEQ ID NO: 50694
  misc_feature: 511 for SV(C|O) and 28S

SEQ ID NO: 66188 - DNA, 120 bp, Homo sapiens
  misc_feature: 511 for SV(C|O) and 28S
gggcgtggggggggcggcggcgcctcgtccagccgcggcgcgcgcccagccccgcttcgcgccccagcccgaccgacccagcccttagagccaatccttatcccgaagttacggatccgg

SEQ ID NO: 66189 - DNA, 120 bp, Homo sapiens
  misc_feature: 511 for SV(C|O) and 28S
gcggcggcgcctcgtccagccgcggcgcgcgcccagccccgcttcgcgccccagcccgaccgacccagcccttagagccaatccttatcccgaagttacggatccggcttgccgacttcc

SEQ ID NO: 66190 - DNA, 120 bp, Homo sapiens; identical to SEQ ID NO: 50980
  misc_feature: 511 for SV(C|O) and 28S

SEQ ID NO: 66191 - DNA, 120 bp, Homo sapiens
  misc_feature: 510 for SV(C|O) and 28S
aaacggcgggagtaactatgactctcttaaggtagccaaatgcctcgtcatctaattagtgacgcgcatgaatggatgaacgagattcccactgtccctacctactatccagcgaaacca

SEQ ID NO: 66192 - DNA, 120 bp, Homo sapiens; identical to SEQ ID NO: 50789
  misc_feature: 510 for SV(C|O) and 28S

SEQ ID NO: 66193 - DNA, 120 bp, Homo sapiens; identical to SEQ ID NO: 50357
  misc_feature: 510 for SV(C|O) and 28S

SEQ ID NO: 66194 - DNA, 120 bp, Homo sapiens; identical to SEQ ID NO: 50544
  misc_feature: 510 for SV(C|O) and 28S

SEQ ID NO: 66195 - DNA, 120 bp, Homo sapiens
  misc_feature: 510 for SV(C|O) and 28S
aacggcgggagtaactatgactctcttaaggtagccaaatgcctcgtcatctaattagtgacgcgcatgaatggatgaacgagattcccactgtccctacctactatccagcgaaaccac

SEQ ID NO: 66196 - DNA, 120 bp, Homo sapiens
  misc_feature: 510 for SV(C|O) and 28S
ggcgtggggggggcggcggcgcctcgtccagccgcggcgcgcgcccagccccgcttcgcgccccagcccgaccgacccagcccttagagccaatccttatcccgaagttacggatccggc

SEQ ID NO: 66197 - DNA, 120 bp, Homo sapiens
  misc_feature: 510 for SV(C|O) and 28S
ggcgccctggaatgggttcgccccgagagaggggcccgtgccttggaaagcgtcgcggttccggcggcgtccggtgagctctcgctggcccttgaaaatccgggggagagggtgtaaatc

SEQ ID NO: 66198 - DNA, 120 bp, Homo sapiens; identical to SEQ ID NO: 51049
  misc_feature: 510 for SV(C|O) and 28S

SEQ ID NO: 66199 - DNA, 120 bp, Homo sapiens
  misc_feature: 510 for SV(C|O) and 28S
atgagcgtcggcatcgggcgccttaacccggcgttcggttcatcccgcagcgccagttctgcttaccaaaagtggcccactaggcactcgcattccacgcccggctccacgccagcgagc

SEQ ID NO: 66200 - DNA, 120 bp, Homo sapiens; identical to SEQ ID NO: 51128
  misc_feature: 510 for SV(C|O) and 28S

SEQ ID NO: 66201 - DNA, 120 bp, Homo sapiens
  misc_feature: 510 for SV(C|O) and 28S
caaccgaggctccgcggcgctgccgtatcgttccgcctgggcgggattctgacttagaggcgttcagtcataatcccacagatggtagcttcgccccattggctcctcagccaagcacat

SEQ ID NO: 66202 - DNA, 120 bp, Homo sapiens
  misc_feature: 509 for SV(C|O) and 28S
tggcacggtgaagagacatgagaggtgtagaataagtgggaggcccccggcgcccccccggtgtccccgcgaggggcccggggcggggtccgccggccctgcgggccgccggtgaaatac

SEQ ID NO: 66203 - DNA, 120 bp, Homo sapiens; identical to SEQ ID NO: 50816
  misc_feature: 509 for SV(C|O) and 28S

SEQ ID NO: 66204 - DNA, 120 bp, Homo sapiens
  misc_feature: 509 for SV(C|O) and 28S
tctgctccacgggaggtttctgtcctccctgagctcgccttaggacacctgcgttaccgtttgacaggtgtaccgccccagtcaaactccccacctggcactgtccccggagcgggtcgc

SEQ ID NO: 66205 - DNA, 120 bp, Homo sapiens; identical to SEQ ID NO: 49831
  misc_feature: 509 for SV(C|O) and 28S

SEQ ID NO: 66206 - DNA, 120 bp, Homo sapiens
  misc_feature: 509 for SV(C|O) and 28S
ggtgccgcgcgcgggtcggggggcggggcggactgtccccagtgcgccccgggcgggtcgcgccgtcgggcccgggggaggttctctcggggccacgcgcgcgtcccccgaagaggggga

SEQ ID NO: 66207 - DNA, 120 bp, Homo sapiens; identical to SEQ ID NO: 50818
  misc_feature: 509 for SV(C|O) and 28S

SEQ ID NO: 66208 - DNA, 120 bp, Homo sapiens
  misc_feature: 509 for SV(C|O) and 28S
gggttccatgtgaacagcagttgaacatgggtcagtcggtcctgagagatgggcgagcgccgttccgaagggacgggcgatggcctccgttgccctcggccgatcgaaagggagtcgggt

SEQ ID NO: 66209 - DNA, 120 bp, Homo sapiens
  misc_feature: 509 for SV(C|O) and 28S
gggaaccagctactagatggttcgattagtctttcgcccctatacccaggtcggacgaccgatttgcacgtcaggaccgctacggacctccaccagagtttcctctggcttcgccctgcc

SEQ ID NO: 66210 - DNA, 120 bp, Homo sapiens
  misc_feature: 509 for SV(C|O) and 28S
gcgcgcgtcccccgaagagggggacggcggagcgagcgcacggggtcggcggcgacgtcggctacccacccgacccgtcttgaaacacggaccaaggagtctaacacgtgcgcgagtcgg

SEQ ID NO: 66211 - DNA, 120 bp, Homo sapiens; identical to SEQ ID NO: 50994
  misc_feature: 509 for SV(C|O) and 28S

SEQ ID NO: 66212 - DNA, 120 bp, Homo sapiens
  misc_feature: 508 for SV(C|O) and 28S
ttttctggggtctgatgagcgtcggcatcgggcgccttaacccggcgttcggttcatcccgcagcgccagttctgcttaccaaaagtggcccactaggcactcgcattccacgcccggct

SEQ ID NO: 66213 - DNA, 120 bp, Homo sapiens
  misc_feature: 508 for SV(C|O) and 28S
gcacggtgaagagacatgagaggtgtagaataagtgggaggcccccggcgcccccccggtgtccccgcgaggggcccggggcggggtccgccggccctgcgggccgccggtgaaatacca

SEQ ID NO: 66214 - DNA, 120 bp, Homo sapiens
  misc_feature: 508 for SV(C|O) and 28S
tgatgagcgtcggcatcgggcgccttaacccggcgttcggttcatcccgcagcgccagttctgcttaccaaaagtggcccactaggcactcgcattccacgcccggctccacgccagcga

SEQ ID NO: 66215 - DNA, 120 bp, Homo sapiens; identical to SEQ ID NO: 50236
  misc_feature: 508 for SV(C|O) and 28S

SEQ ID NO: 66216 - DNA, 120 bp, Homo sapiens
  misc_feature: 508 for SV(C|O) and 28S
ggtgaagagacatgagaggtgtagaataagtgggaggcccccggcgcccccccggtgtccccgcgaggggcccggggcggggtccgccggccctgcgggccgccggtgaaataccactac

SEQ ID NO: 66217 - DNA, 120 bp, Homo sapiens; identical to SEQ ID NO: 49691
  misc_feature: 508 for SV(C|O) and 28S

SEQ ID NO: 66218 - DNA, 120 bp, Homo sapiens; identical to SEQ ID NO: 50747
  misc_feature: 508 for SV(C|O) and 28S

SEQ ID NO: 66219 - DNA, 120 bp, Homo sapiens
  misc_feature: 508 for SV(C|O) and 28S
ctgctccacgggaggtttctgtcctccctgagctcgccttaggacacctgcgttaccgtttgacaggtgtaccgccccagtcaaactccccacctggcactgtccccggagcgggtcgcg

SEQ ID NO: 66220 - DNA, 120 bp, Homo sapiens
  misc_feature: 508 for SV(C|O) and 28S
ccgttcccttggctgtggtttcgctggatagtaggtagggacagtgggaatctcgttcatccattcatgcgcgtcactaattagatgacgaggcatttggctaccttaagagagtcatag

SEQ ID NO: 66221 - DNA, 120 bp, Homo sapiens; identical to SEQ ID NO: 50502
  misc_feature: 508 for SV(C|O) and 28S

SEQ ID NO: 66222 - DNA, 120 bp, Homo sapiens
  misc_feature: 507 for SV(C|O) and 28S
tgttcacatggaacccttctccacttcggccttcaaagttctcgtttgaatatttgctactaccaccaagatctgcacctgcggcggctccacccgggcccgcgccctaggcttcaaggc

SEQ ID NO: 66223 - DNA, 120 bp, Homo sapiens
  misc_feature: 507 for SV(C|O) and 28S
cgggagtaactatgactctcttaaggtagccaaatgcctcgtcatctaattagtgacgcgcatgaatggatgaacgagattcccactgtccctacctactatccagcgaaaccacagcca

SEQ ID NO: 66224 - DNA, 120 bp, Homo sapiens; identical to SEQ ID NO: 51119
  misc_feature: 507 for SV(C|O) and 28S

SEQ ID NO: 66225 - DNA, 120 bp, Homo sapiens
  misc_feature: 507 for SV(C|O) and 28S
tccacgggaggtttctgtcctccctgagctcgccttaggacacctgcgttaccgtttgacaggtgtaccgccccagtcaaactccccacctggcactgtccccggagcgggtcgcgcccg

SEQ ID NO: 66226 - DNA, 120 bp, Homo sapiens
  misc_feature: 507 for SV(C|O) and 28S
gtgccgcgcgcgggtcggggggcggggcggactgtccccagtgcgccccgggcgggtcgcgccgtcgggcccgggggaggttctctcggggccacgcgcgcgtcccccgaagagggggac

SEQ ID NO: 66227 - DNA, 120 bp, Homo sapiens; identical to SEQ ID NO: 50457
  misc_feature: 507 for SV(C|O) and 28S

SEQ ID NO: 66228 - DNA, 120 bp, Homo sapiens
  misc_feature: 507 for SV(C|O) and 28S
gcggcgcctcgtccagccgcggcgcgcgcccagccccgcttcgcgccccagcccgaccgacccagcccttagagccaatccttatcccgaagttacggatccggcttgccgacttccctt

SEQ ID NO: 66229 - DNA, 120 bp, Homo sapiens
  misc_feature: 507 for SV(C|O) and 28S
cccgggcgtggggggggcggcggcgcctcgtccagccgcggcgcgcgcccagccccgcttcgcgccccagcccgaccgacccagcccttagagccaatccttatcccgaagttacggatc

SEQ ID NO: 66230 - DNA, 120 bp, Homo sapiens
  misc_feature: 507 for SV(C|O) and 28S
ccaagcccgttcccttggctgtggtttcgctggatagtaggtagggacagtgggaatctcgttcatccattcatgcgcgtcactaattagatgacgaggcatttggctaccttaagagag

SEQ ID NO: 66231 - DNA, 120 bp, Homo sapiens; identical to SEQ ID NO: 49712
  misc_feature: 506 for SV(C|O) and 28S

SEQ ID NO: 66232 - DNA, 120 bp, Homo sapiens; identical to SEQ ID NO: 50339
  misc_feature: 506 for SV(C|O) and 28S

SEQ ID NO: 66233 - DNA, 120 bp, Homo sapiens
  misc_feature: 506 for SV(C|O) and 28S
ctggcacggtgaagagacatgagaggtgtagaataagtgggaggcccccggcgcccccccggtgtccccgcgaggggcccggggcggggtccgccggccctgcgggccgccggtgaaata

SEQ ID NO: 66234 - DNA, 120 bp, Homo sapiens
  misc_feature: 506 for SV(C|O) and 28S
cccgttcccttggctgtggtttcgctggatagtaggtagggacagtgggaatctcgttcatccattcatgcgcgtcactaattagatgacgaggcatttggctaccttaagagagtcata

SEQ ID NO: 66235 - DNA, 120 bp, Homo sapiens
  misc_feature: 506 for SV(C|O) and 28S
ggggagacccccctcgcgggggattccccgcgggggtgggcgccgggaggggggagagcgcggcgacgggtctcgctccctcggccccgggattcggcgagtgctgctgccgggggggct

SEQ ID NO: 66236 - DNA, 120 bp, Homo sapiens; identical to SEQ ID NO: 50289
  misc_feature: 506 for SV(C|O) and 28S

SEQ ID NO: 66237 - DNA, 120 bp, Homo sapiens
  misc_feature: 506 for SV(C|O) and 28S
gcgccctggaatgggttcgccccgagagaggggcccgtgccttggaaagcgtcgcggttccggcggcgtccggtgagctctcgctggcccttgaaaatccgggggagagggtgtaaatct

SEQ ID NO: 66238 - DNA, 120 bp, Homo sapiens
  misc_feature: 506 for SV(C|O) and 28S
cttttctggggtctgatgagcgtcggcatcgggcgccttaacccggcgttcggttcatcccgcagcgccagttctgcttaccaaaagtggcccactaggcactcgcattccacgcccggc

SEQ ID NO: 66239 - DNA, 120 bp, Homo sapiens; identical to SEQ ID NO: 50644
  misc_feature: 506 for SV(C|O) and 28S

SEQ ID NO: 66240 - DNA, 120 bp, Homo sapiens
  misc_feature: 506 for SV(C|O) and 28S
cgcctcgtccagccgcggcgcgcgcccagccccgcttcgcgccccagcccgaccgacccagcccttagagccaatccttatcccgaagttacggatccggcttgccgacttcccttacct

SEQ ID NO: 66241 - DNA, 120 bp, Homo sapiens; identical to SEQ ID NO: 50447
  misc_feature: 506 for SV(C|O) and 28S

SEQ ID NO: 66242 - DNA, 120 bp, Homo sapiens
  misc_feature: 505 for SV(C|O) and 28S
gcctcgtccagccgcggcgcgcgcccagccccgcttcgcgccccagcccgaccgacccagcccttagagccaatccttatcccgaagttacggatccggcttgccgacttcccttaccta

SEQ ID NO: 66243 - DNA, 120 bp, Homo sapiens
  misc_feature: 505 for SV(C|O) and 28S
cctcgtccagccgcggcgcgcgcccagccccgcttcgcgccccagcccgaccgacccagcccttagagccaatccttatcccgaagttacggatccggcttgccgacttcccttacctac

SEQ ID NO: 66244 - DNA, 120 bp, Homo sapiens
  misc_feature: 505 for SV(C|O) and 28S
ggttccatgtgaacagcagttgaacatgggtcagtcggtcctgagagatgggcgagcgccgttccgaagggacgggcgatggcctccgttgccctcggccgatcgaaagggagtcgggtt

SEQ ID NO: 66245 - DNA, 120 bp, Homo sapiens
  misc_feature: 505 for SV(C|O) and 28S
ggcacggtgaagagacatgagaggtgtagaataagtgggaggcccccggcgcccccccggtgtccccgcgaggggcccggggcggggtccgccggccctgcgggccgccggtgaaatacc

SEQ ID NO: 66246 - DNA, 120 bp, Homo sapiens; identical to SEQ ID NO: 50985
  misc_feature: 505 for SV(C|O) and 28S

SEQ ID NO: 66247 - DNA, 120 bp, Homo sapiens; identical to SEQ ID NO: 49694
  misc_feature: 505 for SV(C|O) and 28S

SEQ ID NO: 66248 - DNA, 120 bp, Homo sapiens; identical to SEQ ID NO: 51125
  misc_feature: 505 for SV(C|O) and 28S

SEQ ID NO: 66249 - DNA, 120 bp, Homo sapiens
  misc_feature: 505 for SV(C|O) and 28S
aacccttctccacttcggccttcaaagttctcgtttgaatatttgctactaccaccaagatctgcacctgcggcggctccacccgggcccgcgccctaggcttcaaggctcaccgcagcg

SEQ ID NO: 66250 - DNA, 120 bp, Homo sapiens; identical to SEQ ID NO: 51060
  misc_feature: 505 for SV(C|O) and 28S

SEQ ID NO: 66251 - DNA, 120 bp, Homo sapiens; identical to SEQ ID NO: 50197
  misc_feature: 504 for SV(C|O) and 28S

SEQ ID NO: 66252 - DNA, 120 bp, Homo sapiens; identical to SEQ ID NO: 50494
  misc_feature: 504 for SV(C|O) and 28S

SEQ ID NO: 66253 - DNA, 120 bp, Homo sapiens
  misc_feature: 504 for SV(C|O) and 28S
tggggggggcggcggcgcctcgtccagccgcggcgcgcgcccagccccgcttcgcgccccagcccgaccgacccagcccttagagccaatccttatcccgaagttacggatccggcttgc

SEQ ID NO: 66254 - DNA, 120 bp, Homo sapiens
  misc_feature: 504 for SV(C|O) and 28S
tgagcgtcggcatcgggcgccttaacccggcgttcggttcatcccgcagcgccagttctgcttaccaaaagtggcccactaggcactcgcattccacgcccggctccacgccagcgagcc

SEQ ID NO: 66255 - DNA, 120 bp, Homo sapiens
  misc_feature: 504 for SV(C|O) and 28S
gtttctgtcctccctgagctcgccttaggacacctgcgttaccgtttgacaggtgtaccgccccagtcaaactccccacctggcactgtccccggagcgggtcgcgcccggccggcgcgc

SEQ ID NO: 66256 - DNA, 120 bp, Homo sapiens; identical to SEQ ID NO: 51226
  misc_feature: 504 for SV(C|O) and 28S

SEQ ID NO: 66257 - DNA, 120 bp, Homo sapiens
  misc_feature: 504 for SV(C|O) and 28S
ggcgcctcgtccagccgcggcgcgcgcccagccccgcttcgcgccccagcccgaccgacccagcccttagagccaatccttatcccgaagttacggatccggcttgccgacttcccttac

SEQ ID NO: 66258 - DNA, 120 bp, Homo sapiens
  misc_feature: 504 for SV(C|O) and 28S
gcgggagtaactatgactctcttaaggtagccaaatgcctcgtcatctaattagtgacgcgcatgaatggatgaacgagattcccactgtccctacctactatccagcgaaaccacagcc

SEQ ID NO: 66259 - DNA, 120 bp, Homo sapiens; identical to SEQ ID NO: 50737
  misc_feature: 504 for SV(C|O) and 28S

SEQ ID NO: 66260 - DNA, 120 bp, Homo sapiens
  misc_feature: 504 for SV(C|O) and 28S
cgggcgtggggggggcggcggcgcctcgtccagccgcggcgcgcgcccagccccgcttcgcgccccagcccgaccgacccagcccttagagccaatccttatcccgaagttacggatccg

SEQ ID NO: 66261 - DNA, 120 bp, Homo sapiens; identical to SEQ ID NO: 50005
  misc_feature: 504 for SV(C|O) and 28S

SEQ ID NO: 66262 - DNA, 120 bp, Homo sapiens; identical to SEQ ID NO: 50367
  misc_feature: 504 for SV(C|O) and 28S

SEQ ID NO: 66263 - DNA, 120 bp, Homo sapiens; identical to SEQ ID NO: 50670
  misc_feature: 503 for SV(C|O) and 28S

SEQ ID NO: 66264 - DNA, 120 bp, Homo sapiens
  misc_feature: 503 for SV(C|O) and 28S
ccaaccgaggctccgcggcgctgccgtatcgttccgcctgggcgggattctgacttagaggcgttcagtcataatcccacagatggtagcttcgccccattggctcctcagccaagcaca

SEQ ID NO: 66265 - DNA, 120 bp, Homo sapiens; identical to SEQ ID NO: 50188
  misc_feature: 503 for SV(C|O) and 28S

SEQ ID NO: 66266 - DNA, 120 bp, Homo sapiens
  misc_feature: 503 for SV(C|O) and 28S
tctgatgagcgtcggcatcgggcgccttaacccggcgttcggttcatcccgcagcgccagttctgcttaccaaaagtggcccactaggcactcgcattccacgcccggctccacgccagc

SEQ ID NO: 66267 - DNA, 120 bp, Homo sapiens; identical to SEQ ID NO: 50572
  misc_feature: 503 for SV(C|O) and 28S

SEQ ID NO: 66268 - DNA, 120 bp, Homo sapiens; identical to SEQ ID NO: 51413
  misc_feature: 503 for SV(C|O) and 28S

SEQ ID NO: 66269 - DNA, 120 bp, Homo sapiens; identical to SEQ ID NO: 50413
  misc_feature: 503 for SV(C|O) and 28S

SEQ ID NO: 66270 - DNA, 120 bp, Homo sapiens; identical to SEQ ID NO: 50072
  misc_feature: 503 for SV(C|O) and 28S

SEQ ID NO: 66271 - DNA, 120 bp, Homo sapiens
  misc_feature: 503 for SV(C|O) and 28S
aagcccgttcccttggctgtggtttcgctggatagtaggtagggacagtgggaatctcgttcatccattcatgcgcgtcactaattagatgacgaggcatttggctaccttaagagagtc

SEQ ID NO: 66272 - DNA, 120 bp, Homo sapiens
  misc_feature: 503 for SV(C|O) and 28S
cgtggggggggcggcggcgcctcgtccagccgcggcgcgcgcccagccccgcttcgcgccccagcccgaccgacccagcccttagagccaatccttatcccgaagttacggatccggctt

SEQ ID NO: 66273 - DNA, 120 bp, Homo sapiens; identical to SEQ ID NO: 51382
  misc_feature: 503 for SV(C|O) and 28S

SEQ ID NO: 66274 - DNA, 120 bp, Homo sapiens; identical to SEQ ID NO: 50485
  misc_feature: 503 for SV(C|O) and 28S

SEQ ID NO: 66275 - DNA, 120 bp, Homo sapiens
  misc_feature: 503 for SV(C|O) and 28S
agttctcttttctttgtgaagggcagggcgccctggaatgggttcgccccgagagaggggcccgtgccttggaaagcgtcgcggttccggcggcgtccggtgagctctcgctggcccttg

SEQ ID NO: 66276 - DNA, 120 bp, Homo sapiens
  misc_feature: 503 for SV(C|O) and 28S
caagcccgttcccttggctgtggtttcgctggatagtaggtagggacagtgggaatctcgttcatccattcatgcgcgtcactaattagatgacgaggcatttggctaccttaagagagt

SEQ ID NO: 66277 - DNA, 120 bp, Homo sapiens
  misc_feature: 503 for SV(C|O) and 28S
acggtgaagagacatgagaggtgtagaataagtgggaggcccccggcgcccccccggtgtccccgcgaggggcccggggcggggtccgccggccctgcgggccgccggtgaaataccact

SEQ ID NO: 66278 - DNA, 120 bp, Homo sapiens
  misc_feature: 502 for SV(C|O) and 28S
gcgccggggaggtggagcacgagcgcacgtgttaggacccgaaagatggtgaactatgcctgggcagggcgaagccagaggaaactctggtggaggtccgtagcggtcctgacgtgcaaa

SEQ ID NO: 66279 - DNA, 120 bp, Homo sapiens
  misc_feature: 502 for SV(C|O) and 28S
ggccaaccgaggctccgcggcgctgccgtatcgttccgcctgggcgggattctgacttagaggcgttcagtcataatcccacagatggtagcttcgccccattggctcctcagccaagca

SEQ ID NO: 66280 - DNA, 120 bp, Homo sapiens
  misc_feature: 502 for SV(C|O) and 28S
cggtgaagagacatgagaggtgtagaataagtgggaggcccccggcgcccccccggtgtccccgcgaggggcccggggcggggtccgccggccctgcgggccgccggtgaaataccacta

SEQ ID NO: 66281 - DNA, 120 bp, Homo sapiens
  misc_feature: 502 for SV(C|O) and 28S
ggtttctgtcctccctgagctcgccttaggacacctgcgttaccgtttgacaggtgtaccgccccagtcaaactccccacctggcactgtccccggagcgggtcgcgcccggccggcgcg

SEQ ID NO: 66282 - DNA, 120 bp, Homo sapiens; identical to SEQ ID NO: 51410
  misc_feature: 502 for SV(C|O) and 28S

SEQ ID NO: 66283 - DNA, 120 bp, Homo sapiens
  misc_feature: 502 for SV(C|O) and 28S
gagacatgagaggtgtagaataagtgggaggcccccggcgcccccccggtgtccccgcgaggggcccggggcggggtccgccggccctgcgggccgccggtgaaataccactactctgat

SEQ ID NO: 66284 - DNA, 120 bp, Homo sapiens
  misc_feature: 502 for SV(C|O) and 28S
cgcgcgtcccccgaagagggggacggcggagcgagcgcacggggtcggcggcgacgtcggctacccacccgacccgtcttgaaacacggaccaaggagtctaacacgtgcgcgagtcggg

SEQ ID NO: 66285 - DNA, 120 bp, Homo sapiens
  misc_feature: 502 for SV(C|O) and 28S
ccgcgggggagacccccctcgcgggggattccccgcgggggtgggcgccgggaggggggagagcgcggcgacgggtctcgctccctcggccccgggattcggcgagtgctgctgccgggg

SEQ ID NO: 66286 - DNA, 120 bp, Homo sapiens
  misc_feature: 502 for SV(C|O) and 28S
ccccgggcgtggggggggcggcggcgcctcgtccagccgcggcgcgcgcccagccccgcttcgcgccccagcccgaccgacccagcccttagagccaatccttatcccgaagttacggat

SEQ ID NO: 66287 - DNA, 120 bp, Homo sapiens
  misc_feature: 501 for SV(C|O) and 28S
tttctggggtctgatgagcgtcggcatcgggcgccttaacccggcgttcggttcatcccgcagcgccagttctgcttaccaaaagtggcccactaggcactcgcattccacgcccggctc

SEQ ID NO: 66288 - DNA, 120 bp, Homo sapiens; identical to SEQ ID NO: 50356
  misc_feature: 501 for SV(C|O) and 28S

SEQ ID NO: 66289 - DNA, 120 bp, Homo sapiens; identical to SEQ ID NO: 50297
  misc_feature: 501 for SV(C|O) and 28S

SEQ ID NO: 66290 - DNA, 120 bp, Homo sapiens; identical to SEQ ID NO: 50562
  misc_feature: 501 for SV(C|O) and 28S

SEQ ID NO: 66291 - DNA, 120 bp, Homo sapiens
  misc_feature: 501 for SV(C|O) and 28S
agagacatgagaggtgtagaataagtgggaggcccccggcgcccccccggtgtccccgcgaggggcccggggcggggtccgccggccctgcgggccgccggtgaaataccactactctga

SEQ ID NO: 66292 - DNA, 120 bp, Homo sapiens
  misc_feature: 501 for SV(C|O) and 28S
gccttaacccggcgttcggttcatcccgcagcgccagttctgcttaccaaaagtggcccactaggcactcgcattccacgcccggctccacgccagcgagccgggcttcttacccattta

SEQ ID NO: 66293 - DNA, 120 bp, Homo sapiens
  misc_feature: 501 for SV(C|O) and 28S
gcgcgtcccccgaagagggggacggcggagcgagcgcacggggtcggcggcgacgtcggctacccacccgacccgtcttgaaacacggaccaaggagtctaacacgtgcgcgagtcgggg

SEQ ID NO: 66294 - DNA, 120 bp, Homo sapiens; identical to SEQ ID NO: 50324
  misc_feature: 501 for SV(C|O) and 28S

SEQ ID NO: 66295 - DNA, 120 bp, Homo sapiens
  misc_feature: 501 for SV(C|O) and 28S
cggcgggagtaactatgactctcttaaggtagccaaatgcctcgtcatctaattagtgacgcgcatgaatggatgaacgagattcccactgtccctacctactatccagcgaaaccacag

SEQ ID NO: 66296 - DNA, 120 bp, Homo sapiens
  misc_feature: 501 for SV(C|O) and 28S
ctgatgagcgtcggcatcgggcgccttaacccggcgttcggttcatcccgcagcgccagttctgcttaccaaaagtggcccactaggcactcgcattccacgcccggctccacgccagcg

SEQ ID NO: 66297 - DNA, 120 bp, Homo sapiens
  misc_feature: 501 for SV(C|O) and 28S
cccgatgccgacgctcatcagaccccagaaaaggtgttggttgatatagacagcaggacggtggccatggaagtcggaatccgctaaggagtgtgtaacaactcacctgccgaatcaact

SEQ ID NO: 66298 - DNA, 120 bp, Homo sapiens
  misc_feature: 500 for SV(C|O) and 28S
ggtctgatgagcgtcggcatcgggcgccttaacccggcgttcggttcatcccgcagcgccagttctgcttaccaaaagtggcccactaggcactcgcattccacgcccggctccacgcca

SEQ ID NO: 66299 - DNA, 120 bp, Homo sapiens
  misc_feature: 500 for SV(C|O) and 28S
catcgggcgccttaacccggcgttcggttcatcccgcagcgccagttctgcttaccaaaagtggcccactaggcactcgcattccacgcccggctccacgccagcgagccgggcttctta

SEQ ID NO: 66300 - DNA, 120 bp, Homo sapiens
  misc_feature: 500 for SV(C|O) and 28S
gttccatgtgaacagcagttgaacatgggtcagtcggtcctgagagatgggcgagcgccgttccgaagggacgggcgatggcctccgttgccctcggccgatcgaaagggagtcgggttc

SEQ ID NO: 66301 - DNA, 120 bp, Homo sapiens
  misc_feature: 500 for SV(C|O) and 28S
cacggtgaagagacatgagaggtgtagaataagtgggaggcccccggcgcccccccggtgtccccgcgaggggcccggggcggggtccgccggccctgcgggccgccggtgaaataccac

SEQ ID NO: 66302 - DNA, 120 bp, Homo sapiens
  misc_feature: 500 for SV(C|O) and 28S
gtggggggggcggcggcgcctcgtccagccgcggcgcgcgcccagccccgcttcgcgccccagcccgaccgacccagcccttagagccaatccttatcccgaagttacggatccggcttg

SEQ ID NO: 66303 - DNA, 120 bp, Homo sapiens; identical to SEQ ID NO: 50884
  misc_feature: 500 for SV(C|O) and 28S

SEQ ID NO: 66304 - DNA, 120 bp, Homo sapiens
  misc_feature: 500 for SV(C|O) and 28S
ggcgggtcgcgccgtcgggcccgggggaggttctctcggggccacgcgcgcgtcccccgaagagggggacggcggagcgagcgcacggggtcggcggcgacgtcggctacccacccgacc

SEQ ID NO: 66305 - DNA, 120 bp, Homo sapiens
  misc_feature: 500 for SV(C|O) and 28S
ggtcggcggcgacgtcggctacccacccgacccgtcttgaaacacggaccaaggagtctaacacgtgcgcgagtcgggggctcgcacgaaagccgccgtggcgcaatgaaggtgaaggcc

SEQ ID NO: 66306 - DNA, 120 bp, Homo sapiens; identical to SEQ ID NO: 50203
  misc_feature: 500 for SV(C|O) and 28S

SEQ ID NO: 66307 - DNA, 120 bp, Homo sapiens
  misc_feature: 500 for SV(C|O) and 28S
cttgactctagtctggcacggtgaagagacatgagaggtgtagaataagtgggaggcccccggcgcccccccggtgtccccgcgaggggcccggggcggggtccgccggccctgcgggcc

SEQ ID NO: 66308 - DNA, 120 bp, Homo sapiens; identical to SEQ ID NO: 51315
  misc_feature: 500 for SV(C|O) and 28S

SEQ ID NO: 66309 - DNA, 120 bp, Homo sapiens
  misc_feature: 500 for SV(C|O) and 28S
ggagacccccctcgcgggggattccccgcgggggtgggcgccgggaggggggagagcgcggcgacgggtctcgctccctcggccccgggattcggcgagtgctgctgccgggggggctgt

SEQ ID NO: 66310 - DNA, 120 bp, Homo sapiens
  misc_feature: 500 for SV(C|O) and 28S
gagcttgactctagtctggcacggtgaagagacatgagaggtgtagaataagtgggaggcccccggcgcccccccggtgtccccgcgaggggcccggggcggggtccgccggccctgcgg

SEQ ID NO: 66311 - DNA, 120 bp, Homo sapiens
  misc_feature: 500 for SV(C|O) and 28S
ctgttcacatggaacccttctccacttcggccttcaaagttctcgtttgaatatttgctactaccaccaagatctgcacctgcggcggctccacccgggcccgcgccctaggcttcaagg

SEQ ID NO: 66312 - DNA, 120 bp, Homo sapiens
  misc_feature: 500 for SV(C|O) and 28S
ccttttctggggtctgatgagcgtcggcatcgggcgccttaacccggcgttcggttcatcccgcagcgccagttctgcttaccaaaagtggcccactaggcactcgcattccacgcccgg

SEQ ID NO: 66313 - DNA, 120 bp, Homo sapiens; identical to SEQ ID NO: 50672
  misc_feature: 499 for SV(C|O) and 28S

SEQ ID NO: 66314 - DNA, 120 bp, Homo sapiens; identical to SEQ ID NO: 51271
  misc_feature: 499 for SV(C|O) and 28S

SEQ ID NO: 66315 - DNA, 120 bp, Homo sapiens
  misc_feature: 499 for SV(C|O) and 28S
cagggccggcggaccccgccccgggcccctcgcggggacaccgggggggcgccgggggcctcccacttattctacacctctcatgtctcttcaccgtgccagactagagtcaagctcaac

SEQ ID NO: 66316 - DNA, 120 bp, Homo sapiens
  misc_feature: 499 for SV(C|O) and 28S
gccaaccgaggctccgcggcgctgccgtatcgttccgcctgggcgggattctgacttagaggcgttcagtcataatcccacagatggtagcttcgccccattggctcctcagccaagcac

SEQ ID NO: 66317 - DNA, 120 bp, Homo sapiens
  misc_feature: 499 for SV(C|O) and 28S
gtcggcggcgacgtcggctacccacccgacccgtcttgaaacacggaccaaggagtctaacacgtgcgcgagtcgggggctcgcacgaaagccgccgtggcgcaatgaaggtgaaggccg

SEQ ID NO: 66318 - DNA, 120 bp, Homo sapiens; identical to SEQ ID NO: 51438
  misc_feature: 499 for SV(C|O) and 28S

SEQ ID NO: 66319 - DNA, 120 bp, Homo sapiens
  misc_feature: 499 for SV(C|O) and 28S
ggggggtgccccgggcgtggggggggcggcggcgcctcgtccagccgcggcgcgcgcccagccccgcttcgcgccccagcccgaccgacccagcccttagagccaatccttatcccgaag

SEQ ID NO: 66320 - DNA, 120 bp, Homo sapiens; identical to SEQ ID NO: 51076
  misc_feature: 499 for SV(C|O) and 28S

SEQ ID NO: 66321 - DNA, 120 bp, Homo sapiens
  misc_feature: 499 for SV(C|O) and 28S
gggagacccccctcgcgggggattccccgcgggggtgggcgccgggaggggggagagcgcggcgacgggtctcgctccctcggccccgggattcggcgagtgctgctgccgggggggctg

SEQ ID NO: 66322 - DNA, 120 bp, Homo sapiens; identical to SEQ ID NO: 50492
  misc_feature: 499 for SV(C|O) and 28S

SEQ ID NO: 66323 - DNA, 120 bp, Homo sapiens
  misc_feature: 499 for SV(C|O) and 28S
gagcgtcggcatcgggcgccttaacccggcgttcggttcatcccgcagcgccagttctgcttaccaaaagtggcccactaggcactcgcattccacgcccggctccacgccagcgagccg

SEQ ID NO: 66324 - DNA, 120 bp, Homo sapiens; identical to SEQ ID NO: 50568
  misc_feature: 499 for SV(C|O) and 28S

SEQ ID NO: 66325 - DNA, 120 bp, Homo sapiens
  misc_feature: 499 for SV(C|O) and 28S
ccacgggaggtttctgtcctccctgagctcgccttaggacacctgcgttaccgtttgacaggtgtaccgccccagtcaaactccccacctggcactgtccccggagcgggtcgcgcccgg

SEQ ID NO: 66326 - DNA, 120 bp, Homo sapiens; identical to SEQ ID NO: 50699
  misc_feature: 499 for SV(C|O) and 28S

SEQ ID NO: 66327 - DNA, 120 bp, Homo sapiens
  misc_feature: 498 for SV(C|O) and 28S
cgcgccggggaggtggagcacgagcgcacgtgttaggacccgaaagatggtgaactatgcctgggcagggcgaagccagaggaaactctggtggaggtccgtagcggtcctgacgtgcaa

SEQ ID NO: 66328 - DNA, 120 bp, Homo sapiens
  misc_feature: 498 for SV(C|O) and 28S
ttctggggtctgatgagcgtcggcatcgggcgccttaacccggcgttcggttcatcccgcagcgccagttctgcttaccaaaagtggcccactaggcactcgcattccacgcccggctcc

SEQ ID NO: 66329 - DNA, 120 bp, Homo sapiens
  misc_feature: 498 for SV(C|O) and 28S
tgccgcgcgcgggtcggggggcggggcggactgtccccagtgcgccccgggcgggtcgcgccgtcgggcccgggggaggttctctcggggccacgcgcgcgtcccccgaagagggggacg

SEQ ID NO: 66330 - DNA, 120 bp, Homo sapiens
  misc_feature: 498 for SV(C|O) and 28S
ggggtctgatgagcgtcggcatcgggcgccttaacccggcgttcggttcatcccgcagcgccagttctgcttaccaaaagtggcccactaggcactcgcattccacgcccggctccacgc

SEQ ID NO: 66331 - DNA, 120 bp, Homo sapiens; identical to SEQ ID NO: 50361
  misc_feature: 498 for SV(C|O) and 28S

SEQ ID NO: 66332 - DNA, 120 bp, Homo sapiens; identical to SEQ ID NO: 50431
  misc_feature: 498 for SV(C|O) and 28S

SEQ ID NO: 66333 - DNA, 120 bp, Homo sapiens
  misc_feature: 498 for SV(C|O) and 28S
gcgtggggggggcggcggcgcctcgtccagccgcggcgcgcgcccagccccgcttcgcgccccagcccgaccgacccagcccttagagccaatccttatcccgaagttacggatccggct

SEQ ID NO: 66334 - DNA, 120 bp, Homo sapiens; identical to SEQ ID NO: 50246
  misc_feature: 498 for SV(C|O) and 28S

SEQ ID NO: 66335 - DNA, 120 bp, Homo sapiens
  misc_feature: 498 for SV(C|O) and 28S
cacgggaggtttctgtcctccctgagctcgccttaggacacctgcgttaccgtttgacaggtgtaccgccccagtcaaactccccacctggcactgtccccggagcgggtcgcgcccggc

SEQ ID NO: 66336 - DNA, 120 bp, Homo sapiens
  misc_feature: 498 for SV(C|O) and 28S
gcccgttcccttggctgtggtttcgctggatagtaggtagggacagtgggaatctcgttcatccattcatgcgcgtcactaattagatgacgaggcatttggctaccttaagagagtcat

SEQ ID NO: 66337 - DNA, 120 bp, Homo sapiens; identical to SEQ ID NO: 50628
  misc_feature: 498 for SV(C|O) and 28S

SEQ ID NO: 66338 - DNA, 120 bp, Homo sapiens
  misc_feature: 498 for SV(C|O) and 28S
cccctcgcgggggattccccgcgggggtgggcgccgggaggggggagagcgcggcgacgggtctcgctccctcggccccgggattcggcgagtgctgctgccgggggggctgtaacactc

SEQ ID NO: 66339 - DNA, 120 bp, Homo sapiens
  misc_feature: 498 for SV(C|O) and 28S
cgccctggaatgggttcgccccgagagaggggcccgtgccttggaaagcgtcgcggttccggcggcgtccggtgagctctcgctggcccttgaaaatccgggggagagggtgtaaatctc

SEQ ID NO: 66340 - DNA, 120 bp, Homo sapiens; identical to SEQ ID NO: 50614
  misc_feature: 498 for SV(C|O) and 28S

SEQ ID NO: 66341 - DNA, 120 bp, Homo sapiens
  misc_feature: 498 for SV(C|O) and 28S
cgcgggggagacccccctcgcgggggattccccgcgggggtgggcgccgggaggggggagagcgcggcgacgggtctcgctccctcggccccgggattcggcgagtgctgctgccggggg

SEQ ID NO: 66342 - DNA, 120 bp, Homo sapiens
  misc_feature: 498 for SV(C|O) and 28S
aagagacatgagaggtgtagaataagtgggaggcccccggcgcccccccggtgtccccgcgaggggcccggggcggggtccgccggccctgcgggccgccggtgaaataccactactctg

SEQ ID NO: 66343 - DNA, 120 bp, Homo sapiens
  misc_feature: 497 for SV(C|O) and 28S
ttgagcttgactctagtctggcacggtgaagagacatgagaggtgtagaataagtgggaggcccccggcgcccccccggtgtccccgcgaggggcccggggcggggtccgccggccctgc

SEQ ID NO: 66344 - DNA, 120 bp, Homo sapiens
  misc_feature: 497 for SV(C|O) and 28S
ttgactctagtctggcacggtgaagagacatgagaggtgtagaataagtgggaggcccccggcgcccccccggtgtccccgcgaggggcccggggcggggtccgccggccctgcgggccg

SEQ ID NO: 66345 - DNA, 120 bp, Homo sapiens
  misc_feature: 497 for SV(C|O) and 28S
agcccgttcccttggctgtggtttcgctggatagtaggtagggacagtgggaatctcgttcatccattcatgcgcgtcactaattagatgacgaggcatttggctaccttaagagagtca

SEQ ID NO: 66346 - DNA, 120 bp, Homo sapiens; identical to SEQ ID NO: 51407
  misc_feature: 497 for SV(C|O) and 28S

SEQ ID NO: 66347 - DNA, 120 bp, Homo sapiens
  misc_feature: 497 for SV(C|O) and 28S
tcccccgaagagggggacggcggagcgagcgcacggggtcggcggcgacgtcggctacccacccgacccgtcttgaaacacggaccaaggagtctaacacgtgcgcgagtcgggggctcg

SEQ ID NO: 66348 - DNA, 120 bp, Homo sapiens
  misc_feature: 497 for SV(C|O) and 28S
gtctgatgagcgtcggcatcgggcgccttaacccggcgttcggttcatcccgcagcgccagttctgcttaccaaaagtggcccactaggcactcgcattccacgcccggctccacgccag

SEQ ID NO: 66349 - DNA, 120 bp, Homo sapiens; identical to SEQ ID NO: 50280
  misc_feature: 497 for SV(C|O) and 28S

SEQ ID NO: 66350 - DNA, 120 bp, Homo sapiens
  misc_feature: 497 for SV(C|O) and 28S
gcgcctcgtccagccgcggcgcgcgcccagccccgcttcgcgccccagcccgaccgacccagcccttagagccaatccttatcccgaagttacggatccggcttgccgacttcccttacc

SEQ ID NO: 66351 - DNA, 120 bp, Homo sapiens
  misc_feature: 497 for SV(C|O) and 28S
ggggtgccccgggcgtggggggggcggcggcgcctcgtccagccgcggcgcgcgcccagccccgcttcgcgccccagcccgaccgacccagcccttagagccaatccttatcccgaagtt

SEQ ID NO: 66352 - DNA, 120 bp, Homo sapiens; identical to SEQ ID NO: 50471
  misc_feature: 497 for SV(C|O) and 28S

SEQ ID NO: 66353 - DNA, 120 bp, Homo sapiens
  misc_feature: 497 for SV(C|O) and 28S
gcgtcccccgaagagggggacggcggagcgagcgcacggggtcggcggcgacgtcggctacccacccgacccgtcttgaaacacggaccaaggagtctaacacgtgcgcgagtcgggggc

SEQ ID NO: 66354 - DNA, 120 bp, Homo sapiens
  misc_feature: 497 for SV(C|O) and 28S
agggaaccagctactagatggttcgattagtctttcgcccctatacccaggtcggacgaccgatttgcacgtcaggaccgctacggacctccaccagagtttcctctggcttcgccctgc

SEQ ID NO: 66355 - DNA, 120 bp, Homo sapiens; identical to SEQ ID NO: 51235
  misc_feature: 497 for SV(C|O) and 28S

SEQ ID NO: 66356 - DNA, 120 bp, Homo sapiens
  misc_feature: 496 for SV(C|O) and 28S
acggcgggagtaactatgactctcttaaggtagccaaatgcctcgtcatctaattagtgacgcgcatgaatggatgaacgagattcccactgtccctacctactatccagcgaaaccaca

SEQ ID NO: 66357 - DNA, 120 bp, Homo sapiens
  misc_feature: 496 for SV(C|O) and 28S
ctcgtccagccgcggcgcgcgcccagccccgcttcgcgccccagcccgaccgacccagcccttagagccaatccttatcccgaagttacggatccggcttgccgacttcccttacctaca

SEQ ID NO: 66358 - DNA, 120 bp, Homo sapiens; identical to SEQ ID NO: 50454
  misc_feature: 496 for SV(C|O) and 28S

SEQ ID NO: 66359 - DNA, 120 bp, Homo sapiens
  misc_feature: 496 for SV(C|O) and 28S
tactatccagcgaaaccacagccaagggaacgggcttggcggaatcagcggggaaagaagaccctgttgagcttgactctagtctggcacggtgaagagacatgagaggtgtagaataag

SEQ ID NO: 66360 - DNA, 120 bp, Homo sapiens
  misc_feature: 496 for SV(C|O) and 28S
atcgggcgccttaacccggcgttcggttcatcccgcagcgccagttctgcttaccaaaagtggcccactaggcactcgcattccacgcccggctccacgccagcgagccgggcttcttac

SEQ ID NO: 66361 - DNA, 120 bp, Homo sapiens
  misc_feature: 496 for SV(C|O) and 28S
gcgggtcgcgccgtcgggcccgggggaggttctctcggggccacgcgcgcgtcccccgaagagggggacggcggagcgagcgcacggggtcggcggcgacgtcggctacccacccgaccc

SEQ ID NO: 66362 - DNA, 120 bp, Homo sapiens
  misc_feature: 496 for SV(C|O) and 28S
cgggggagacccccctcgcgggggattccccgcgggggtgggcgccgggaggggggagagcgcggcgacgggtctcgctccctcggccccgggattcggcgagtgctgctgccggggggg

SEQ ID NO: 66363 - DNA, 120 bp, Homo sapiens; identical to SEQ ID NO: 50273
  misc_feature: 496 for SV(C|O) and 28S

SEQ ID NO: 66364 - DNA, 120 bp, Homo sapiens
  misc_feature: 495 for SV(C|O) and 28S
cttaacccggcgttcggttcatcccgcagcgccagttctgcttaccaaaagtggcccactaggcactcgcattccacgcccggctccacgccagcgagccgggcttcttacccatttaaa

SEQ ID NO: 66365 - DNA, 120 bp, Homo sapiens; identical to SEQ ID NO: 50260
  misc_feature: 495 for SV(C|O) and 28S

SEQ ID NO: 66366 - DNA, 120 bp, Homo sapiens
  misc_feature: 495 for SV(C|O) and 28S
tcggggatctgaacccgactccctttcgatcggccgagggcaacggaggccatcgcccgtcccttcggaacggcgctcgcccatctctcaggaccgactgacccatgttcaactgctgtt

SEQ ID NO: 66367 - DNA, 120 bp, Homo sapiens; identical to SEQ ID NO: 50437
  misc_feature: 495 for SV(C|O) and 28S

SEQ ID NO: 66368 - DNA, 120 bp, Homo sapiens
  misc_feature: 495 for SV(C|O) and 28S
tcgccctgcccaggcatagttcaccatctttcgggtcctaacacgtgcgctcgtgctccacctccccggcgcggcgggcgagacgggccggtggtgcgccctcggcggactggagaggcc

SEQ ID NO: 66369 - DNA, 120 bp, Homo sapiens; identical to SEQ ID NO: 51258
  misc_feature: 495 for SV(C|O) and 28S

SEQ ID NO: 66370 - DNA, 120 bp, Homo sapiens; identical to SEQ ID NO: 50662
  misc_feature: 495 for SV(C|O) and 28S

SEQ ID NO: 66371 - DNA, 120 bp, Homo sapiens
  misc_feature: 495 for SV(C|O) and 28S
gggcgggtcgcgccgtcgggcccgggggaggttctctcggggccacgcgcgcgtcccccgaagagggggacggcggagcgagcgcacggggtcggcggcgacgtcggctacccacccgac

SEQ ID NO: 66372 - DNA, 120 bp, Homo sapiens
  misc_feature: 495 for SV(C|O) and 28S
aggccaaccgaggctccgcggcgctgccgtatcgttccgcctgggcgggattctgacttagaggcgttcagtcataatcccacagatggtagcttcgccccattggctcctcagccaagc

SEQ ID NO: 66373 - DNA, 120 bp, Homo sapiens
  misc_feature: 495 for SV(C|O) and 28S
gcttgactctagtctggcacggtgaagagacatgagaggtgtagaataagtgggaggcccccggcgcccccccggtgtccccgcgaggggcccggggcggggtccgccggccctgcgggc

SEQ ID NO: 66374 - DNA, 120 bp, Homo sapiens
  misc_feature: 495 for SV(C|O) and 28S
gctgttcacatggaacccttctccacttcggccttcaaagttctcgtttgaatatttgctactaccaccaagatctgcacctgcggcggctccacccgggcccgcgccctaggcttcaag

SEQ ID NO: 66375 - DNA, 120 bp, Homo sapiens; identical to SEQ ID NO: 51569
  misc_feature: 495 for SV(C|O) and 28S

SEQ ID NO: 66376 - DNA, 120 bp, Homo sapiens; identical to SEQ ID NO: 51243
  misc_feature: 495 for SV(C|O) and 28S

SEQ ID NO: 66377 - DNA, 120 bp, Homo sapiens
  misc_feature: 495 for SV(C|O) and 28S
cgcgtcccccgaagagggggacggcggagcgagcgcacggggtcggcggcgacgtcggctacccacccgacccgtcttgaaacacggaccaaggagtctaacacgtgcgcgagtcggggg

SEQ ID NO: 66378 - DNA, 120 bp, Homo sapiens; identical to SEQ ID NO: 50006
  misc_feature: 495 for SV(C|O) and 28S

SEQ ID NO: 66379 - DNA, 120 bp, Homo sapiens
  misc_feature: 495 for SV(C|O) and 28S
ccgagtgttacagcccccccggcagcagcactcgccgaatcccggggccgagggagcgagacccgtcgccgcgctctcccccctcccggcgcccacccccgcggggaatcccccgcgagg

SEQ ID NO: 66380 - DNA, 120 bp, Homo sapiens
  misc_feature: 495 for SV(C|O) and 28S
cccgcgggggagacccccctcgcgggggattccccgcgggggtgggcgccgggaggggggagagcgcggcgacgggtctcgctccctcggccccgggattcggcgagtgctgctgccggg

SEQ ID NO: 66381 - DNA, 120 bp, Homo sapiens
  misc_feature: 495 for SV(C|O) and 28S
ccccctcgcgggggattccccgcgggggtgggcgccgggaggggggagagcgcggcgacgggtctcgctccctcggccccgggattcggcgagtgctgctgccgggggggctgtaacact

SEQ ID NO: 66382 - DNA, 120 bp, Homo sapiens
  misc_feature: 495 for SV(C|O) and 28S
attcggggatctgaacccgactccctttcgatcggccgagggcaacggaggccatcgcccgtcccttcggaacggcgctcgcccatctctcaggaccgactgacccatgttcaactgctg

SEQ ID NO: 66383 - DNA, 120 bp, Homo sapiens
  misc_feature: 495 for SV(C|O) and 28S
atgagaggtgtagaataagtgggaggcccccggcgcccccccggtgtccccgcgaggggcccggggcggggtccgccggccctgcgggccgccggtgaaataccactactctgatcgttt

SEQ ID NO: 66384 - DNA, 120 bp, Homo sapiens
  misc_feature: 494 for SV(C|O) and 28S
gcccgatgccgacgctcatcagaccccagaaaaggtgttggttgatatagacagcaggacggtggccatggaagtcggaatccgctaaggagtgtgtaacaactcacctgccgaatcaac

SEQ ID NO: 66385 - DNA, 120 bp, Homo sapiens
  misc_feature: 494 for SV(C|O) and 28S
ctggggtctgatgagcgtcggcatcgggcgccttaacccggcgttcggttcatcccgcagcgccagttctgcttaccaaaagtggcccactaggcactcgcattccacgcccggctccac

SEQ ID NO: 66386 - DNA, 120 bp, Homo sapiens; identical to SEQ ID NO: 51237
  misc_feature: 494 for SV(C|O) and 28S

SEQ ID NO: 66387 - DNA, 120 bp, Homo sapiens
  misc_feature: 494 for SV(C|O) and 28S
gggtctgatgagcgtcggcatcgggcgccttaacccggcgttcggttcatcccgcagcgccagttctgcttaccaaaagtggcccactaggcactcgcattccacgcccggctccacgcc

SEQ ID NO: 66388 - DNA, 120 bp, Homo sapiens
  misc_feature: 494 for SV(C|O) and 28S
gggggtgccccgggcgtggggggggcggcggcgcctcgtccagccgcggcgcgcgcccagccccgcttcgcgccccagcccgaccgacccagcccttagagccaatccttatcccgaagt

SEQ ID NO: 66389 - DNA, 120 bp, Homo sapiens
  misc_feature: 494 for SV(C|O) and 28S
gggggagacccccctcgcgggggattccccgcgggggtgggcgccgggaggggggagagcgcggcgacgggtctcgctccctcggccccgggattcggcgagtgctgctgccgggggggc

SEQ ID NO: 66390 - DNA, 120 bp, Homo sapiens
  misc_feature: 494 for SV(C|O) and 28S
gattggctctaagggctgggtcggtcgggctggggcgcgaagcggggctgggcgcgcgccgcggctggacgaggcgccgccgccccccccacgcccggggcacccccctcgcggccctcc

SEQ ID NO: 66391 - DNA, 120 bp, Homo sapiens; identical to SEQ ID NO: 51232
  misc_feature: 494 for SV(C|O) and 28S

SEQ ID NO: 66392 - DNA, 120 bp, Homo sapiens; identical to SEQ ID NO: 51329
  misc_feature: 494 for SV(C|O) and 28S

SEQ ID NO: 66393 - DNA, 120 bp, Homo sapiens; identical to SEQ ID NO: 50534
  misc_feature: 494 for SV(C|O) and 28S

SEQ ID NO: 66394 - DNA, 120 bp, Homo sapiens; identical to SEQ ID NO: 51043
  misc_feature: 494 for SV(C|O) and 28S

SEQ ID NO: 66395 - DNA, 120 bp, Homo sapiens
  misc_feature: 494 for SV(C|O) and 28S
ccctcgcgggggattccccgcgggggtgggcgccgggaggggggagagcgcggcgacgggtctcgctccctcggccccgggattcggcgagtgctgctgccgggggggctgtaacactcg

SEQ ID NO: 66396 - DNA, 120 bp, Homo sapiens; identical to SEQ ID NO: 50590
  misc_feature: 494 for SV(C|O) and 28S

SEQ ID NO: 66397 - DNA, 120 bp, Homo sapiens
  misc_feature: 494 for SV(C|O) and 28S
actatccagcgaaaccacagccaagggaacgggcttggcggaatcagcggggaaagaagaccctgttgagcttgactctagtctggcacggtgaagagacatgagaggtgtagaataagt

SEQ ID NO: 66398 - DNA, 120 bp, Homo sapiens
  misc_feature: 493 for SV(C|O) and 28S
tttctgtcctccctgagctcgccttaggacacctgcgttaccgtttgacaggtgtaccgccccagtcaaactccccacctggcactgtccccggagcgggtcgcgcccggccggcgcgcg

SEQ ID NO: 66399 - DNA, 120 bp, Homo sapiens
  misc_feature: 493 for SV(C|O) and 28S
ttccatgtgaacagcagttgaacatgggtcagtcggtcctgagagatgggcgagcgccgttccgaagggacgggcgatggcctccgttgccctcggccgatcgaaagggagtcgggttca

SEQ ID NO: 66400 - DNA, 120 bp, Homo sapiens
  misc_feature: 493 for SV(C|O) and 28S
ccttaacccggcgttcggttcatcccgcagcgccagttctgcttaccaaaagtggcccactaggcactcgcattccacgcccggctccacgccagcgagccgggcttcttacccatttaa

SEQ ID NO: 66401 - DNA, 120 bp, Homo sapiens
  misc_feature: 493 for SV(C|O) and 28S
tgagcttgactctagtctggcacggtgaagagacatgagaggtgtagaataagtgggaggcccccggcgcccccccggtgtccccgcgaggggcccggggcggggtccgccggccctgcg

SEQ ID NO: 66402 - DNA, 120 bp, Homo sapiens
  misc_feature: 493 for SV(C|O) and 28S
ccgatgccgacgctcatcagaccccagaaaaggtgttggttgatatagacagcaggacggtggccatggaagtcggaatccgctaaggagtgtgtaacaactcacctgccgaatcaacta

SEQ ID NO: 66403 - DNA, 120 bp, Homo sapiens; identical to SEQ ID NO: 50791
  misc_feature: 493 for SV(C|O) and 28S

SEQ ID NO: 66404 - DNA, 120 bp, Homo sapiens; identical to SEQ ID NO: 50172
  misc_feature: 493 for SV(C|O) and 28S

SEQ ID NO: 66405 - DNA, 120 bp, Homo sapiens
  misc_feature: 493 for SV(C|O) and 28S
gcgggggagacccccctcgcgggggattccccgcgggggtgggcgccgggaggggggagagcgcggcgacgggtctcgctccctcggccccgggattcggcgagtgctgctgccgggggg

SEQ ID NO: 66406 - DNA, 120 bp, Homo sapiens; identical to SEQ ID NO: 50626
  misc_feature: 493 for SV(C|O) and 28S

SEQ ID NO: 66407 - DNA, 120 bp, Homo sapiens; identical to SEQ ID NO: 51284
  misc_feature: 493 for SV(C|O) and 28S

SEQ ID NO: 66408 - DNA, 120 bp, Homo sapiens; identical to SEQ ID NO: 50049
  misc_feature: 493 for SV(C|O) and 28S

SEQ ID NO: 66409 - DNA, 120 bp, Homo sapiens
  misc_feature: 492 for SV(C|O) and 28S
agggccggcggaccccgccccgggcccctcgcggggacaccgggggggcgccgggggcctcccacttattctacacctctcatgtctcttcaccgtgccagactagagtcaagctcaaca

SEQ ID NO: 66410 - DNA, 120 bp, Homo sapiens
  misc_feature: 492 for SV(C|O) and 28S
tggggtctgatgagcgtcggcatcgggcgccttaacccggcgttcggttcatcccgcagcgccagttctgcttaccaaaagtggcccactaggcactcgcattccacgcccggctccacg

SEQ ID NO: 66411 - DNA, 120 bp, Homo sapiens
  misc_feature: 492 for SV(C|O) and 28S
ccgcgccggggaggtggagcacgagcgcacgtgttaggacccgaaagatggtgaactatgcctgggcagggcgaagccagaggaaactctggtggaggtccgtagcggtcctgacgtgca

SEQ ID NO: 66412 - DNA, 120 bp, Homo sapiens
  misc_feature: 492 for SV(C|O) and 28S
tgagggaaacttcggagggaaccagctactagatggttcgattagtctttcgcccctatacccaggtcggacgaccgatttgcacgtcaggaccgctacggacctccaccagagtttcct

SEQ ID NO: 66413 - DNA, 120 bp, Homo sapiens; identical to SEQ ID NO: 50647
  misc_feature: 492 for SV(C|O) and 28S

SEQ ID NO: 66414 - DNA, 120 bp, Homo sapiens
  misc_feature: 492 for SV(C|O) and 28S
gagacccccctcgcgggggattccccgcgggggtgggcgccgggaggggggagagcgcggcgacgggtctcgctccctcggccccgggattcggcgagtgctgctgccgggggggctgta

SEQ ID NO: 66415 - DNA, 120 bp, Homo sapiens
  misc_feature: 492 for SV(C|O) and 28S
cccccctcgcgggggattccccgcgggggtgggcgccgggaggggggagagcgcggcgacgggtctcgctccctcggccccgggattcggcgagtgctgctgccgggggggctgtaacac

SEQ ID NO: 66416 - DNA, 120 bp, Homo sapiens
  misc_feature: 492 for SV(C|O) and 28S
attggctctaagggctgggtcggtcgggctggggcgcgaagcggggctgggcgcgcgccgcggctggacgaggcgccgccgccccccccacgcccggggcacccccctcgcggccctccc

SEQ ID NO: 66417 - DNA, 120 bp, Homo sapiens
  misc_feature: 492 for SV(C|O) and 28S
ctgagggaaacttcggagggaaccagctactagatggttcgattagtctttcgcccctatacccaggtcggacgaccgatttgcacgtcaggaccgctacggacctccaccagagtttcc

SEQ ID NO: 66418 - DNA, 120 bp, Homo sapiens; identical to SEQ ID NO: 50112
  misc_feature: 492 for SV(C|O) and 28S

SEQ ID NO: 66419 - DNA, 120 bp, Homo sapiens
  misc_feature: 492 for SV(C|O) and 28S
gagttgttacacactccttagcggattccgacttccatggccaccgtcctgctgtctatatcaaccaacaccttttctggggtctgatgagcgtcggcatcgggcgccttaacccggcgt

SEQ ID NO: 66420 - DNA, 120 bp, Homo sapiens
  misc_feature: 492 for SV(C|O) and 28S
gacatgagaggtgtagaataagtgggaggcccccggcgcccccccggtgtccccgcgaggggcccggggcggggtccgccggccctgcgggccgccggtgaaataccactactctgatcg

SEQ ID NO: 66421 - DNA, 120 bp, Homo sapiens; identical to SEQ ID NO: 51424
  misc_feature: 492 for SV(C|O) and 28S

SEQ ID NO: 66422 - DNA, 120 bp, Homo sapiens
  misc_feature: 492 for SV(C|O) and 28S
cgccttaacccggcgttcggttcatcccgcagcgccagttctgcttaccaaaagtggcccactaggcactcgcattccacgcccggctccacgccagcgagccgggcttcttacccattt

SEQ ID NO: 66423 - DNA, 120 bp, Homo sapiens; identical to SEQ ID NO: 50257
  misc_feature: 492 for SV(C|O) and 28S

SEQ ID NO: 66424 - DNA, 120 bp, Homo sapiens; identical to SEQ ID NO: 51192
  misc_feature: 492 for SV(C|O) and 28S

SEQ ID NO: 66425 - DNA, 120 bp, Homo sapiens
  misc_feature: 491 for SV(C|O) and 28S
aggggggtgccccgggcgtggggggggcggcggcgcctcgtccagccgcggcgcgcgcccagccccgcttcgcgccccagcccgaccgacccagcccttagagccaatccttatcccgaa

SEQ ID NO: 66426 - DNA, 120 bp, Homo sapiens
  misc_feature: 491 for SV(C|O) and 28S
ttaacccggcgttcggttcatcccgcagcgccagttctgcttaccaaaagtggcccactaggcactcgcattccacgcccggctccacgccagcgagccgggcttcttacccatttaaag

SEQ ID NO: 66427 - DNA, 120 bp, Homo sapiens
  misc_feature: 491 for SV(C|O) and 28S
acccccctcgcgggggattccccgcgggggtgggcgccgggaggggggagagcgcggcgacgggtctcgctccctcggccccgggattcggcgagtgctgctgccgggggggctgtaaca

SEQ ID NO: 66428 - DNA, 120 bp, Homo sapiens
  misc_feature: 491 for SV(C|O) and 28S
gggcgccttaacccggcgttcggttcatcccgcagcgccagttctgcttaccaaaagtggcccactaggcactcgcattccacgcccggctccacgccagcgagccgggcttcttaccca

SEQ ID NO: 66429 - DNA, 120 bp, Homo sapiens
  misc_feature: 491 for SV(C|O) and 28S
ggcgccttaacccggcgttcggttcatcccgcagcgccagttctgcttaccaaaagtggcccactaggcactcgcattccacgcccggctccacgccagcgagccgggcttcttacccat

SEQ ID NO: 66430 - DNA, 120 bp, Homo sapiens
  misc_feature: 491 for SV(C|O) and 28S
ggagggaaccagctactagatggttcgattagtctttcgcccctatacccaggtcggacgaccgatttgcacgtcaggaccgctacggacctccaccagagtttcctctggcttcgccct

SEQ ID NO: 66431 - DNA, 120 bp, Homo sapiens
  misc_feature: 491 for SV(C|O) and 28S
gccgcgccggggaggtggagcacgagcgcacgtgttaggacccgaaagatggtgaactatgcctgggcagggcgaagccagaggaaactctggtggaggtccgtagcggtcctgacgtgc

SEQ ID NO: 66432 - DNA, 120 bp, Homo sapiens
  misc_feature: 491 for SV(C|O) and 28S
gagttctcttttctttgtgaagggcagggcgccctggaatgggttcgccccgagagaggggcccgtgccttggaaagcgtcgcggttccggcggcgtccggtgagctctcgctggccctt

SEQ ID NO: 66433 - DNA, 120 bp, Homo sapiens
  misc_feature: 491 for SV(C|O) and 28S
cgatgccgacgctcatcagaccccagaaaaggtgttggttgatatagacagcaggacggtggccatggaagtcggaatccgctaaggagtgtgtaacaactcacctgccgaatcaactag

SEQ ID NO: 66434 - DNA, 120 bp, Homo sapiens
  misc_feature: 491 for SV(C|O) and 28S
cctgcccaggcatagttcaccatctttcgggtcctaacacgtgcgctcgtgctccacctccccggcgcggcgggcgagacgggccggtggtgcgccctcggcggactggagaggcctcgg

SEQ ID NO: 66435 - DNA, 120 bp, Homo sapiens
  misc_feature: 490 for SV(C|O) and 28S
cctgagggaaacttcggagggaaccagctactagatggttcgattagtctttcgcccctatacccaggtcggacgaccgatttgcacgtcaggaccgctacggacctccaccagagtttc

SEQ ID NO: 66436 - DNA, 120 bp, Homo sapiens
  misc_feature: 490 for SV(C|O) and 28S
ccctgagctcgccttaggacacctgcgttaccgtttgacaggtgtaccgccccagtcaaactccccacctggcactgtccccggagcgggtcgcgcccggccggcgcgcggccgggcgct

SEQ ID NO: 66437 - DNA, 120 bp, Homo sapiens; identical to SEQ ID NO: 51241
  misc_feature: 489 for SV(C|O) and 28S

SEQ ID NO: 66438 - DNA, 120 bp, Homo sapiens; identical to SEQ ID NO: 51362
  misc_feature: 489 for SV(C|O) and 28S

SEQ ID NO: 66439 - DNA, 120 bp, Homo sapiens
  misc_feature: 489 for SV(C|O) and 28S
agacatgagaggtgtagaataagtgggaggcccccggcgcccccccggtgtccccgcgaggggcccggggcggggtccgccggccctgcgggccgccggtgaaataccactactctgatc

SEQ ID NO: 66440 - DNA, 120 bp, Homo sapiens
  misc_feature: 489 for SV(C|O) and 28S
cccgagtgttacagcccccccggcagcagcactcgccgaatcccggggccgagggagcgagacccgtcgccgcgctctcccccctcccggcgcccacccccgcggggaatcccccgcgag

SEQ ID NO: 66441 - DNA, 120 bp, Homo sapiens; identical to SEQ ID NO: 50920
  misc_feature: 489 for SV(C|O) and 28S

SEQ ID NO: 66442 - DNA, 120 bp, Homo sapiens; identical to SEQ ID NO: 50365
  misc_feature: 489 for SV(C|O) and 28S

SEQ ID NO: 66443 - DNA, 120 bp, Homo sapiens
  misc_feature: 488 for SV(C|O) and 28S
ttcggggatctgaacccgactccctttcgatcggccgagggcaacggaggccatcgcccgtcccttcggaacggcgctcgcccatctctcaggaccgactgacccatgttcaactgctgt

SEQ ID NO: 66444 - DNA, 120 bp, Homo sapiens
  misc_feature: 488 for SV(C|O) and 28S
tgttcaccttggagacctgctgcggatatgggtacggcccggcgcgagatttacaccctctcccccggattttcaagggccagcgagagctcaccggacgccgccggaaccgcgacgctt

SEQ ID NO: 66445 - DNA, 120 bp, Homo sapiens
  misc_feature: 488 for SV(C|O) and 28S
tgagaggtgtagaataagtgggaggcccccggcgcccccccggtgtccccgcgaggggcccggggcggggtccgccggccctgcgggccgccggtgaaataccactactctgatcgtttt

SEQ ID NO: 66446 - DNA, 120 bp, Homo sapiens
  misc_feature: 488 for SV(C|O) and 28S
tcggcggcgacgtcggctacccacccgacccgtcttgaaacacggaccaaggagtctaacacgtgcgcgagtcgggggctcgcacgaaagccgccgtggcgcaatgaaggtgaaggccgg

SEQ ID NO: 66447 - DNA, 120 bp, Homo sapiens
  misc_feature: 488 for SV(C|O) and 28S
tatccagcgaaaccacagccaagggaacgggcttggcggaatcagcggggaaagaagaccctgttgagcttgactctagtctggcacggtgaagagacatgagaggtgtagaataagtgg

SEQ ID NO: 66448 - DNA, 120 bp, Homo sapiens
  misc_feature: 488 for SV(C|O) and 28S
gttcaccttggagacctgctgcggatatgggtacggcccggcgcgagatttacaccctctcccccggattttcaagggccagcgagagctcaccggacgccgccggaaccgcgacgcttt

SEQ ID NO: 66449 - DNA, 120 bp, Homo sapiens
  misc_feature: 488 for SV(C|O) and 28S
gcgaggggggtgccccgggcgtggggggggcggcggcgcctcgtccagccgcggcgcgcgcccagccccgcttcgcgccccagcccgaccgacccagcccttagagccaatccttatccc

SEQ ID NO: 66450 - DNA, 120 bp, Homo sapiens
  misc_feature: 488 for SV(C|O) and 28S
ctgtcctccctgagctcgccttaggacacctgcgttaccgtttgacaggtgtaccgccccagtcaaactccccacctggcactgtccccggagcgggtcgcgcccggccggcgcgcggcc

SEQ ID NO: 66451 - DNA, 120 bp, Homo sapiens
  misc_feature: 488 for SV(C|O) and 28S
gccctggaatgggttcgccccgagagaggggcccgtgccttggaaagcgtcgcggttccggcggcgtccggtgagctctcgctggcccttgaaaatccgggggagagggtgtaaatctcg

SEQ ID NO: 66452 - DNA, 120 bp, Homo sapiens
  misc_feature: 488 for SV(C|O) and 28S
ccagcgaaaccacagccaagggaacgggcttggcggaatcagcggggaaagaagaccctgttgagcttgactctagtctggcacggtgaagagacatgagaggtgtagaataagtgggag

SEQ ID NO: 66453 - DNA, 120 bp, Homo sapiens; identical to SEQ ID NO: 50434
  misc_feature: 488 for SV(C|O) and 28S

SEQ ID NO: 66454 - DNA, 120 bp, Homo sapiens
  misc_feature: 488 for SV(C|O) and 28S
acatgagaggtgtagaataagtgggaggcccccggcgcccccccggtgtccccgcgaggggcccggggcggggtccgccggccctgcgggccgccggtgaaataccactactctgatcgt

SEQ ID NO: 66455 - DNA, 120 bp, Homo sapiens
  misc_feature: 487 for SV(C|O) and 28S
tgccccgggcgtggggggggcggcggcgcctcgtccagccgcggcgcgcgcccagccccgcttcgcgccccagcccgaccgacccagcccttagagccaatccttatcccgaagttacgg

SEQ ID NO: 66456 - DNA, 120 bp, Homo sapiens
  misc_feature: 487 for SV(C|O) and 28S
gaggggggtgccccgggcgtggggggggcggcggcgcctcgtccagccgcggcgcgcgcccagccccgcttcgcgccccagcccgaccgacccagcccttagagccaatccttatcccga

SEQ ID NO: 66457 - DNA, 120 bp, Homo sapiens
  misc_feature: 487 for SV(C|O) and 28S
gccccgggcgtggggggggcggcggcgcctcgtccagccgcggcgcgcgcccagccccgcttcgcgccccagcccgaccgacccagcccttagagccaatccttatcccgaagttacgga

SEQ ID NO: 66458 - DNA, 120 bp, Homo sapiens
  misc_feature: 487 for SV(C|O) and 28S
tccatgtgaacagcagttgaacatgggtcagtcggtcctgagagatgggcgagcgccgttccgaagggacgggcgatggcctccgttgccctcggccgatcgaaagggagtcgggttcag

SEQ ID NO: 66459 - DNA, 120 bp, Homo sapiens
  misc_feature: 487 for SV(C|O) and 28S
taacccggcgttcggttcatcccgcagcgccagttctgcttaccaaaagtggcccactaggcactcgcattccacgcccggctccacgccagcgagccgggcttcttacccatttaaagt

SEQ ID NO: 66460 - DNA, 120 bp, Homo sapiens
  misc_feature: 487 for SV(C|O) and 28S
gattcggggatctgaacccgactccctttcgatcggccgagggcaacggaggccatcgcccgtcccttcggaacggcgctcgcccatctctcaggaccgactgacccatgttcaactgct

SEQ ID NO: 66461 - DNA, 120 bp, Homo sapiens
  misc_feature: 487 for SV(C|O) and 28S
cttggagacctgctgcggatatgggtacggcccggcgcgagatttacaccctctcccccggattttcaagggccagcgagagctcaccggacgccgccggaaccgcgacgctttccaagg

SEQ ID NO: 66462 - DNA, 120 bp, Homo sapiens
  misc_feature: 487 for SV(C|O) and 28S
ctatccagcgaaaccacagccaagggaacgggcttggcggaatcagcggggaaagaagaccctgttgagcttgactctagtctggcacggtgaagagacatgagaggtgtagaataagtg

SEQ ID NO: 66463 - DNA, 120 bp, Homo sapiens
  misc_feature: 487 for SV(C|O) and 28S
agcttgactctagtctggcacggtgaagagacatgagaggtgtagaataagtgggaggcccccggcgcccccccggtgtccccgcgaggggcccggggcggggtccgccggccctgcggg

SEQ ID NO: 66464 - DNA, 120 bp, Homo sapiens
  misc_feature: 487 for SV(C|O) and 28S
catgagaggtgtagaataagtgggaggcccccggcgcccccccggtgtccccgcgaggggcccggggcggggtccgccggccctgcgggccgccggtgaaataccactactctgatcgtt

SEQ ID NO: 66465 - DNA, 120 bp, Homo sapiens
  misc_feature: 487 for SV(C|O) and 28S
agttgttacacactccttagcggattccgacttccatggccaccgtcctgctgtctatatcaaccaacaccttttctggggtctgatgagcgtcggcatcgggcgccttaacccggcgtt

SEQ ID NO: 66466 - DNA, 120 bp, Homo sapiens
  misc_feature: 486 for SV(C|O) and 28S
ttggagacctgctgcggatatgggtacggcccggcgcgagatttacaccctctcccccggattttcaagggccagcgagagctcaccggacgccgccggaaccgcgacgctttccaaggc

SEQ ID NO: 66467 - DNA, 120 bp, Homo sapiens
  misc_feature: 486 for SV(C|O) and 28S
gacccccctcgcgggggattccccgcgggggtgggcgccgggaggggggagagcgcggcgacgggtctcgctccctcggccccgggattcggcgagtgctgctgccgggggggctgtaac

SEQ ID NO: 66468 - DNA, 120 bp, Homo sapiens; identical to SEQ ID NO: 51017
  misc_feature: 486 for SV(C|O) and 28S

SEQ ID NO: 66469 - DNA, 120 bp, Homo sapiens
  misc_feature: 486 for SV(C|O) and 28S
gggatctgaacccgactccctttcgatcggccgagggcaacggaggccatcgcccgtcccttcggaacggcgctcgcccatctctcaggaccgactgacccatgttcaactgctgttcac

SEQ ID NO: 66470 - DNA, 120 bp, Homo sapiens; identical to SEQ ID NO: 51265
  misc_feature: 486 for SV(C|O) and 28S

SEQ ID NO: 66471 - DNA, 120 bp, Homo sapiens
  misc_feature: 486 for SV(C|O) and 28S
ggattggctctaagggctgggtcggtcgggctggggcgcgaagcggggctgggcgcgcgccgcggctggacgaggcgccgccgccccccccacgcccggggcacccccctcgcggccctc

SEQ ID NO: 66472 - DNA, 120 bp, Homo sapiens; identical to SEQ ID NO: 51221
  misc_feature: 486 for SV(C|O) and 28S

SEQ ID NO: 66473 - DNA, 120 bp, Homo sapiens
  misc_feature: 486 for SV(C|O) and 28S
gagggaaccagctactagatggttcgattagtctttcgcccctatacccaggtcggacgaccgatttgcacgtcaggaccgctacggacctccaccagagtttcctctggcttcgccctg

SEQ ID NO: 66474 - DNA, 120 bp, Homo sapiens
  misc_feature: 486 for SV(C|O) and 28S
ctgttcaccttggagacctgctgcggatatgggtacggcccggcgcgagatttacaccctctcccccggattttcaagggccagcgagagctcaccggacgccgccggaaccgcgacgct

SEQ ID NO: 66475 - DNA, 120 bp, Homo sapiens; identical to SEQ ID NO: 51626
  misc_feature: 486 for SV(C|O) and 28S

SEQ ID NO: 66476 - DNA, 120 bp, Homo sapiens
  misc_feature: 486 for SV(C|O) and 28S
cgccctgcccaggcatagttcaccatctttcgggtcctaacacgtgcgctcgtgctccacctccccggcgcggcgggcgagacgggccggtggtgcgccctcggcggactggagaggcct

SEQ ID NO: 66477 - DNA, 120 bp, Homo sapiens
  misc_feature: 486 for SV(C|O) and 28S
atccagcgaaaccacagccaagggaacgggcttggcggaatcagcggggaaagaagaccctgttgagcttgactctagtctggcacggtgaagagacatgagaggtgtagaataagtggg

SEQ ID NO: 66478 - DNA, 120 bp, Homo sapiens; identical to SEQ ID NO: 50462
  misc_feature: 486 for SV(C|O) and 28S

SEQ ID NO: 66479 - DNA, 120 bp, Homo sapiens
  misc_feature: 485 for SV(C|O) and 28S
agacccccctcgcgggggattccccgcgggggtgggcgccgggaggggggagagcgcggcgacgggtctcgctccctcggccccgggattcggcgagtgctgctgccgggggggctgtaa

SEQ ID NO: 66480 - DNA, 120 bp, Homo sapiens
  misc_feature: 485 for SV(C|O) and 28S
tctggggtctgatgagcgtcggcatcgggcgccttaacccggcgttcggttcatcccgcagcgccagttctgcttaccaaaagtggcccactaggcactcgcattccacgcccggctcca

SEQ ID NO: 66481 - DNA, 120 bp, Homo sapiens
  misc_feature: 485 for SV(C|O) and 28S
tggagacctgctgcggatatgggtacggcccggcgcgagatttacaccctctcccccggattttcaagggccagcgagagctcaccggacgccgccggaaccgcgacgctttccaaggca

SEQ ID NO: 66482 - DNA, 120 bp, Homo sapiens
  misc_feature: 485 for SV(C|O) and 28S
tgagttgttacacactccttagcggattccgacttccatggccaccgtcctgctgtctatatcaaccaacaccttttctggggtctgatgagcgtcggcatcgggcgccttaacccggcg

SEQ ID NO: 66483 - DNA, 120 bp, Homo sapiens
  misc_feature: 485 for SV(C|O) and 28S
tgagctcgccttaggacacctgcgttaccgtttgacaggtgtaccgccccagtcaaactccccacctggcactgtccccggagcgggtcgcgcccggccggcgcgcggccgggcgcttgg

SEQ ID NO: 66484 - DNA, 120 bp, Homo sapiens
  misc_feature: 485 for SV(C|O) and 28S
tcgtccagccgcggcgcgcgcccagccccgcttcgcgccccagcccgaccgacccagcccttagagccaatccttatcccgaagttacggatccggcttgccgacttcccttacctacat

SEQ ID NO: 66485 - DNA, 120 bp, Homo sapiens; identical to SEQ ID NO: 51299
  misc_feature: 485 for SV(C|O) and 28S

SEQ ID NO: 66486 - DNA, 120 bp, Homo sapiens
  misc_feature: 485 for SV(C|O) and 28S
aaggattggctctaagggctgggtcggtcgggctggggcgcgaagcggggctgggcgcgcgccgcggctggacgaggcgccgccgccccccccacgcccggggcacccccctcgcggccc

SEQ ID NO: 66487 - DNA, 120 bp, Homo sapiens
  misc_feature: 485 for SV(C|O) and 28S
ggcgacgtcggctacccacccgacccgtcttgaaacacggaccaaggagtctaacacgtgcgcgagtcgggggctcgcacgaaagccgccgtggcgcaatgaaggtgaaggccggcgcgc

SEQ ID NO: 66488 - DNA, 120 bp, Homo sapiens
  misc_feature: 485 for SV(C|O) and 28S
ggattcggggatctgaacccgactccctttcgatcggccgagggcaacggaggccatcgcccgtcccttcggaacggcgctcgcccatctctcaggaccgactgacccatgttcaactgc

SEQ ID NO: 66489 - DNA, 120 bp, Homo sapiens
  misc_feature: 485 for SV(C|O) and 28S
gccctgcccaggcatagttcaccatctttcgggtcctaacacgtgcgctcgtgctccacctccccggcgcggcgggcgagacgggccggtggtgcgccctcggcggactggagaggcctc

SEQ ID NO: 66490 - DNA, 120 bp, Homo sapiens
  misc_feature: 485 for SV(C|O) and 28S
ccttggagacctgctgcggatatgggtacggcccggcgcgagatttacaccctctcccccggattttcaagggccagcgagagctcaccggacgccgccggaaccgcgacgctttccaag

SEQ ID NO: 66491 - DNA, 120 bp, Homo sapiens
  misc_feature: 485 for SV(C|O) and 28S
ccccgcgggggagacccccctcgcgggggattccccgcgggggtgggcgccgggaggggggagagcgcggcgacgggtctcgctccctcggccccgggattcggcgagtgctgctgccgg

SEQ ID NO: 66492 - DNA, 120 bp, Homo sapiens; identical to SEQ ID NO: 51115
  misc_feature: 485 for SV(C|O) and 28S

SEQ ID NO: 66493 - DNA, 120 bp, Homo sapiens
  misc_feature: 484 for SV(C|O) and 28S
ttctgtcctccctgagctcgccttaggacacctgcgttaccgtttgacaggtgtaccgccccagtcaaactccccacctggcactgtccccggagcgggtcgcgcccggccggcgcgcgg

SEQ ID NO: 66494 - DNA, 120 bp, Homo sapiens; identical to SEQ ID NO: 50657
  misc_feature: 484 for SV(C|O) and 28S

SEQ ID NO: 66495 - DNA, 120 bp, Homo sapiens
  misc_feature: 484 for SV(C|O) and 28S
tccagcgaaaccacagccaagggaacgggcttggcggaatcagcggggaaagaagaccctgttgagcttgactctagtctggcacggtgaagagacatgagaggtgtagaataagtggga

SEQ ID NO: 66496 - DNA, 120 bp, Homo sapiens
  misc_feature: 484 for SV(C|O) and 28S
gggtgccccgggcgtggggggggcggcggcgcctcgtccagccgcggcgcgcgcccagccccgcttcgcgccccagcccgaccgacccagcccttagagccaatccttatcccgaagtta

SEQ ID NO: 66497 - DNA, 120 bp, Homo sapiens
  misc_feature: 484 for SV(C|O) and 28S
cgggcgccttaacccggcgttcggttcatcccgcagcgccagttctgcttaccaaaagtggcccactaggcactcgcattccacgcccggctccacgccagcgagccgggcttcttaccc

SEQ ID NO: 66498 - DNA, 120 bp, Homo sapiens
  misc_feature: 484 for SV(C|O) and 28S
ggctgttcaccttggagacctgctgcggatatgggtacggcccggcgcgagatttacaccctctcccccggattttcaagggccagcgagagctcaccggacgccgccggaaccgcgacg

SEQ ID NO: 66499 - DNA, 120 bp, Homo sapiens
  misc_feature: 484 for SV(C|O) and 28S
gcgccttaacccggcgttcggttcatcccgcagcgccagttctgcttaccaaaagtggcccactaggcactcgcattccacgcccggctccacgccagcgagccgggcttcttacccatt

SEQ ID NO: 66500 - DNA, 120 bp, Homo sapiens
  misc_feature: 484 for SV(C|O) and 28S
atgtgaacagcagttgaacatgggtcagtcggtcctgagagatgggcgagcgccgttccgaagggacgggcgatggcctccgttgccctcggccgatcgaaagggagtcgggttcagatc

SEQ ID NO: 66501 - DNA, 120 bp, Homo sapiens
  misc_feature: 484 for SV(C|O) and 28S
gacgtcggctacccacccgacccgtcttgaaacacggaccaaggagtctaacacgtgcgcgagtcgggggctcgcacgaaagccgccgtggcgcaatgaaggtgaaggccggcgcgctcg

SEQ ID NO: 66502 - DNA, 120 bp, Homo sapiens; identical to SEQ ID NO: 50221
  misc_feature: 484 for SV(C|O) and 28S

SEQ ID NO: 66503 - DNA, 120 bp, Homo sapiens
  misc_feature: 484 for SV(C|O) and 28S
cctgagctcgccttaggacacctgcgttaccgtttgacaggtgtaccgccccagtcaaactccccacctggcactgtccccggagcgggtcgcgcccggccggcgcgcggccgggcgctt

SEQ ID NO: 66504 - DNA, 120 bp, Homo sapiens
  misc_feature: 484 for SV(C|O) and 28S
catgtgaacagcagttgaacatgggtcagtcggtcctgagagatgggcgagcgccgttccgaagggacgggcgatggcctccgttgccctcggccgatcgaaagggagtcgggttcagat

SEQ ID NO: 66505 - DNA, 120 bp, Homo sapiens
  misc_feature: 483 for SV(C|O) and 28S
ccatgtgaacagcagttgaacatgggtcagtcggtcctgagagatgggcgagcgccgttccgaagggacgggcgatggcctccgttgccctcggccgatcgaaagggagtcgggttcaga

SEQ ID NO: 66506 - DNA, 120 bp, Homo sapiens; identical to SEQ ID NO: 51188
  misc_feature: 483 for SV(C|O) and 28S

SEQ ID NO: 66507 - DNA, 120 bp, Homo sapiens
  misc_feature: 483 for SV(C|O) and 28S
gcgtggaatgcgagtgcctagtgggccacttttggtaagcagaactggcgctgcgggatgaaccgaacgccgggttaaggcgcccgatgccgacgctcatcagaccccagaaaaggtgtt

SEQ ID NO: 66508 - DNA, 120 bp, Homo sapiens; identical to SEQ ID NO: 51590
  misc_feature: 483 for SV(C|O) and 28S

SEQ ID NO: 66509 - DNA, 120 bp, Homo sapiens
  misc_feature: 483 for SV(C|O) and 28S
gagctcgccttaggacacctgcgttaccgtttgacaggtgtaccgccccagtcaaactccccacctggcactgtccccggagcgggtcgcgcccggccggcgcgcggccgggcgcttggc

SEQ ID NO: 66510 - DNA, 120 bp, Homo sapiens
  misc_feature: 483 for SV(C|O) and 28S
gagggaaacttcggagggaaccagctactagatggttcgattagtctttcgcccctatacccaggtcggacgaccgatttgcacgtcaggaccgctacggacctccaccagagtttcctc

SEQ ID NO: 66511 - DNA, 120 bp, Homo sapiens
  misc_feature: 483 for SV(C|O) and 28S
gaggccaaccgaggctccgcggcgctgccgtatcgttccgcctgggcgggattctgacttagaggcgttcagtcataatcccacagatggtagcttcgccccattggctcctcagccaag

SEQ ID NO: 66512 - DNA, 120 bp, Homo sapiens
  misc_feature: 483 for SV(C|O) and 28S
cgaggggggtgccccgggcgtggggggggcggcggcgcctcgtccagccgcggcgcgcgcccagccccgcttcgcgccccagcccgaccgacccagcccttagagccaatccttatcccg

SEQ ID NO: 66513 - DNA, 120 bp, Homo sapiens
  misc_feature: 483 for SV(C|O) and 28S
ccagccccgcttcgcgccccagcccgaccgacccagcccttagagccaatccttatcccgaagttacggatccggcttgccgacttcccttacctacattgttccaacatgccagaggct

SEQ ID NO: 66514 - DNA, 120 bp, Homo sapiens; identical to SEQ ID NO: 51015
  misc_feature: 482 for SV(C|O) and 28S

SEQ ID NO: 66515 - DNA, 120 bp, Homo sapiens
  misc_feature: 482 for SV(C|O) and 28S
ggggatctgaacccgactccctttcgatcggccgagggcaacggaggccatcgcccgtcccttcggaacggcgctcgcccatctctcaggaccgactgacccatgttcaactgctgttca

SEQ ID NO: 66516 - DNA, 120 bp, Homo sapiens
  misc_feature: 482 for SV(C|O) and 28S
tcctgagggaaacttcggagggaaccagctactagatggttcgattagtctttcgcccctatacccaggtcggacgaccgatttgcacgtcaggaccgctacggacctccaccagagttt

SEQ ID NO: 66517 - DNA, 120 bp, Homo sapiens
  misc_feature: 482 for SV(C|O) and 28S
gtgagttgttacacactccttagcggattccgacttccatggccaccgtcctgctgtctatatcaaccaacaccttttctggggtctgatgagcgtcggcatcgggcgccttaacccggc

SEQ ID NO: 66518 - DNA, 120 bp, Homo sapiens
  misc_feature: 482 for SV(C|O) and 28S
ggcgtggaatgcgagtgcctagtgggccacttttggtaagcagaactggcgctgcgggatgaaccgaacgccgggttaaggcgcccgatgccgacgctcatcagaccccagaaaaggtgt

SEQ ID NO: 66519 - DNA, 120 bp, Homo sapiens
  misc_feature: 482 for SV(C|O) and 28S
gctgttcaccttggagacctgctgcggatatgggtacggcccggcgcgagatttacaccctctcccccggattttcaagggccagcgagagctcaccggacgccgccggaaccgcgacgc

SEQ ID NO: 66520 - DNA, 120 bp, Homo sapiens; identical to SEQ ID NO: 51158
  misc_feature: 482 for SV(C|O) and 28S

SEQ ID NO: 66521 - DNA, 120 bp, Homo sapiens; identical to SEQ ID NO: 51394
  misc_feature: 482 for SV(C|O) and 28S

SEQ ID NO: 66522 - DNA, 120 bp, Homo sapiens
  misc_feature: 482 for SV(C|O) and 28S
agagttctcttttctttgtgaagggcagggcgccctggaatgggttcgccccgagagaggggcccgtgccttggaaagcgtcgcggttccggcggcgtccggtgagctctcgctggccct

SEQ ID NO: 66523 - DNA, 120 bp, Homo sapiens; identical to SEQ ID NO: 50835
  misc_feature: 481 for SV(C|O) and 28S

SEQ ID NO: 66524 - DNA, 120 bp, Homo sapiens
  misc_feature: 481 for SV(C|O) and 28S
taacacgtgcgcgagtcgggggctcgcacgaaagccgccgtggcgcaatgaaggtgaaggccggcgcgctcgccggccgaggtgggatcccgaggcctctccagtccgccgagggcgcac

SEQ ID NO: 66525 - DNA, 120 bp, Homo sapiens; identical to SEQ ID NO: 51298
  misc_feature: 481 for SV(C|O) and 28S

SEQ ID NO: 66526 - DNA, 120 bp, Homo sapiens
  misc_feature: 481 for SV(C|O) and 28S
aacacgtgcgcgagtcgggggctcgcacgaaagccgccgtggcgcaatgaaggtgaaggccggcgcgctcgccggccgaggtgggatcccgaggcctctccagtccgccgagggcgcacc

SEQ ID NO: 66527 - DNA, 120 bp, Homo sapiens
  misc_feature: 481 for SV(C|O) and 28S
ccctggaatgggttcgccccgagagaggggcccgtgccttggaaagcgtcgcggttccggcggcgtccggtgagctctcgctggcccttgaaaatccgggggagagggtgtaaatctcgc

SEQ ID NO: 66528 - DNA, 120 bp, Homo sapiens
  misc_feature: 481 for SV(C|O) and 28S
gagaggtgtagaataagtgggaggcccccggcgcccccccggtgtccccgcgaggggcccggggcggggtccgccggccctgcgggccgccggtgaaataccactactctgatcgttttt

SEQ ID NO: 66529 - DNA, 120 bp, Homo sapiens
  misc_feature: 481 for SV(C|O) and 28S
ccctgcccaggcatagttcaccatctttcgggtcctaacacgtgcgctcgtgctccacctccccggcgcggcgggcgagacgggccggtggtgcgccctcggcggactggagaggcctcg

SEQ ID NO: 66530 - DNA, 120 bp, Homo sapiens
  misc_feature: 480 for SV(C|O) and 28S
ttcgccctgcccaggcatagttcaccatctttcgggtcctaacacgtgcgctcgtgctccacctccccggcgcggcgggcgagacgggccggtggtgcgccctcggcggactggagaggc

SEQ ID NO: 66531 - DNA, 120 bp, Homo sapiens
  misc_feature: 480 for SV(C|O) and 28S
ttcaccttggagacctgctgcggatatgggtacggcccggcgcgagatttacaccctctcccccggattttcaagggccagcgagagctcaccggacgccgccggaaccgcgacgctttc

SEQ ID NO: 66532 - DNA, 120 bp, Homo sapiens
  misc_feature: 480 for SV(C|O) and 28S
tgtgaacagcagttgaacatgggtcagtcggtcctgagagatgggcgagcgccgttccgaagggacgggcgatggcctccgttgccctcggccgatcgaaagggagtcgggttcagatcc

SEQ ID NO: 66533 - DNA, 120 bp, Homo sapiens; identical to SEQ ID NO: 50984
  misc_feature: 480 for SV(C|O) and 28S

SEQ ID NO: 66534 - DNA, 120 bp, Homo sapiens
  misc_feature: 480 for SV(C|O) and 28S
ggggagagttctcttttctttgtgaagggcagggcgccctggaatgggttcgccccgagagaggggcccgtgccttggaaagcgtcgcggttccggcggcgtccggtgagctctcgctgg

SEQ ID NO: 66535 - DNA, 120 bp, Homo sapiens; identical to SEQ ID NO: 51343
  misc_feature: 480 for SV(C|O) and 28S

SEQ ID NO: 66536 - DNA, 120 bp, Homo sapiens
  misc_feature: 480 for SV(C|O) and 28S
cggagggaaccagctactagatggttcgattagtctttcgcccctatacccaggtcggacgaccgatttgcacgtcaggaccgctacggacctccaccagagtttcctctggcttcgccc

SEQ ID NO: 66537 - DNA, 120 bp, Homo sapiens
  misc_feature: 480 for SV(C|O) and 28S
gggccggcggaccccgccccgggcccctcgcggggacaccgggggggcgccgggggcctcccacttattctacacctctcatgtctcttcaccgtgccagactagagtcaagctcaacag

SEQ ID NO: 66538 - DNA, 120 bp, Homo sapiens
  misc_feature: 480 for SV(C|O) and 28S
ggccggcggaccccgccccgggcccctcgcggggacaccgggggggcgccgggggcctcccacttattctacacctctcatgtctcttcaccgtgccagactagagtcaagctcaacagg

SEQ ID NO: 66539 - DNA, 120 bp, Homo sapiens
  misc_feature: 480 for SV(C|O) and 28S
cgcgaggggggtgccccgggcgtggggggggcggcggcgcctcgtccagccgcggcgcgcgcccagccccgcttcgcgccccagcccgaccgacccagcccttagagccaatccttatcc

SEQ ID NO: 66540 - DNA, 120 bp, Homo sapiens; identical to SEQ ID NO: 51180
  misc_feature: 480 for SV(C|O) and 28S

SEQ ID NO: 66541 - DNA, 120 bp, Homo sapiens
  misc_feature: 480 for SV(C|O) and 28S
gcgacgtcggctacccacccgacccgtcttgaaacacggaccaaggagtctaacacgtgcgcgagtcgggggctcgcacgaaagccgccgtggcgcaatgaaggtgaaggccggcgcgct

SEQ ID NO: 66542 - DNA, 120 bp, Homo sapiens
  misc_feature: 480 for SV(C|O) and 28S
ccccgcttcgcgccccagcccgaccgacccagcccttagagccaatccttatcccgaagttacggatccggcttgccgacttcccttacctacattgttccaacatgccagaggctgttc

SEQ ID NO: 66543 - DNA, 120 bp, Homo sapiens
  misc_feature: 480 for SV(C|O) and 28S
cggggatctgaacccgactccctttcgatcggccgagggcaacggaggccatcgcccgtcccttcggaacggcgctcgcccatctctcaggaccgactgacccatgttcaactgctgttc

SEQ ID NO: 66544 - DNA, 120 bp, Homo sapiens
  misc_feature: 480 for SV(C|O) and 28S
cttcgccctgcccaggcatagttcaccatctttcgggtcctaacacgtgcgctcgtgctccacctccccggcgcggcgggcgagacgggccggtggtgcgccctcggcggactggagagg

SEQ ID NO: 66545 - DNA, 120 bp, Homo sapiens
  misc_feature: 480 for SV(C|O) and 28S
cccccgcgggggagacccccctcgcgggggattccccgcgggggtgggcgccgggaggggggagagcgcggcgacgggtctcgctccctcggccccgggattcggcgagtgctgctgccg

SEQ ID NO: 66546 - DNA, 120 bp, Homo sapiens
  misc_feature: 480 for SV(C|O) and 28S
agccccgcttcgcgccccagcccgaccgacccagcccttagagccaatccttatcccgaagttacggatccggcttgccgacttcccttacctacattgttccaacatgccagaggctgt

SEQ ID NO: 66547 - DNA, 120 bp, Homo sapiens; identical to SEQ ID NO: 50328
  misc_feature: 479 for SV(C|O) and 28S

SEQ ID NO: 66548 - DNA, 120 bp, Homo sapiens
  misc_feature: 479 for SV(C|O) and 28S
ccccgagtgttacagcccccccggcagcagcactcgccgaatcccggggccgagggagcgagacccgtcgccgcgctctcccccctcccggcgcccacccccgcggggaatcccccgcga

SEQ ID NO: 66549 - DNA, 120 bp, Homo sapiens
  misc_feature: 479 for SV(C|O) and 28S
ggtgccccgggcgtggggggggcggcggcgcctcgtccagccgcggcgcgcgcccagccccgcttcgcgccccagcccgaccgacccagcccttagagccaatccttatcccgaagttac

SEQ ID NO: 66550 - DNA, 120 bp, Homo sapiens
  misc_feature: 479 for SV(C|O) and 28S
gccccgcttcgcgccccagcccgaccgacccagcccttagagccaatccttatcccgaagttacggatccggcttgccgacttcccttacctacattgttccaacatgccagaggctgtt

SEQ ID NO: 66551 - DNA, 120 bp, Homo sapiens
  misc_feature: 479 for SV(C|O) and 28S
agggaaacttcggagggaaccagctactagatggttcgattagtctttcgcccctatacccaggtcggacgaccgatttgcacgtcaggaccgctacggacctccaccagagtttcctct

SEQ ID NO: 66552 - DNA, 120 bp, Homo sapiens; identical to SEQ ID NO: 51457
  misc_feature: 478 for SV(C|O) and 28S

SEQ ID NO: 66553 - DNA, 120 bp, Homo sapiens; identical to SEQ ID NO: 50585
  misc_feature: 478 for SV(C|O) and 28S

SEQ ID NO: 66554 - DNA, 120 bp, Homo sapiens; identical to SEQ ID NO: 51224
  misc_feature: 478 for SV(C|O) and 28S

SEQ ID NO: 66555 - DNA, 120 bp, Homo sapiens
  misc_feature: 478 for SV(C|O) and 28S
tctgtcctccctgagctcgccttaggacacctgcgttaccgtttgacaggtgtaccgccccagtcaaactccccacctggcactgtccccggagcgggtcgcgcccggccggcgcgcggc

SEQ ID NO: 66556 - DNA, 120 bp, Homo sapiens
  misc_feature: 478 for SV(C|O) and 28S
caggtgagttgttacacactccttagcggattccgacttccatggccaccgtcctgctgtctatatcaaccaacaccttttctggggtctgatgagcgtcggcatcgggcgccttaaccc

SEQ ID NO: 66557 - DNA, 120 bp, Homo sapiens
  misc_feature: 478 for SV(C|O) and 28S
gccgcgaggggggtgccccgggcgtggggggggcggcggcgcctcgtccagccgcggcgcgcgcccagccccgcttcgcgccccagcccgaccgacccagcccttagagccaatccttat

SEQ ID NO: 66558 - DNA, 120 bp, Homo sapiens
  misc_feature: 478 for SV(C|O) and 28S
cgacgtcggctacccacccgacccgtcttgaaacacggaccaaggagtctaacacgtgcgcgagtcgggggctcgcacgaaagccgccgtggcgcaatgaaggtgaaggccggcgcgctc

SEQ ID NO: 66559 - DNA, 120 bp, Homo sapiens
  misc_feature: 478 for SV(C|O) and 28S
ctgagctcgccttaggacacctgcgttaccgtttgacaggtgtaccgccccagtcaaactccccacctggcactgtccccggagcgggtcgcgcccggccggcgcgcggccgggcgcttg

SEQ ID NO: 66560 - DNA, 120 bp, Homo sapiens
  misc_feature: 478 for SV(C|O) and 28S
cgtggaatgcgagtgcctagtgggccacttttggtaagcagaactggcgctgcgggatgaaccgaacgccgggttaaggcgcccgatgccgacgctcatcagaccccagaaaaggtgttg

SEQ ID NO: 66561 - DNA, 120 bp, Homo sapiens
  misc_feature: 478 for SV(C|O) and 28S
aggtgagttgttacacactccttagcggattccgacttccatggccaccgtcctgctgtctatatcaaccaacaccttttctggggtctgatgagcgtcggcatcgggcgccttaacccg

SEQ ID NO: 66562 - DNA, 120 bp, Homo sapiens
  misc_feature: 478 for SV(C|O) and 28S
aggattggctctaagggctgggtcggtcgggctggggcgcgaagcggggctgggcgcgcgccgcggctggacgaggcgccgccgccccccccacgcccggggcacccccctcgcggccct

SEQ ID NO: 66563 - DNA, 120 bp, Homo sapiens
  misc_feature: 478 for SV(C|O) and 28S
aacccggcgttcggttcatcccgcagcgccagttctgcttaccaaaagtggcccactaggcactcgcattccacgcccggctccacgccagcgagccgggcttcttacccatttaaagtt

SEQ ID NO: 66564 - DNA, 120 bp, Homo sapiens
  misc_feature: 477 for SV(C|O) and 28S
tgctgttcacatggaacccttctccacttcggccttcaaagttctcgtttgaatatttgctactaccaccaagatctgcacctgcggcggctccacccgggcccgcgccctaggcttcaa

SEQ ID NO: 66565 - DNA, 120 bp, Homo sapiens
  misc_feature: 477 for SV(C|O) and 28S
tggaatgcgagtgcctagtgggccacttttggtaagcagaactggcgctgcgggatgaaccgaacgccgggttaaggcgcccgatgccgacgctcatcagaccccagaaaaggtgttggt

SEQ ID NO: 66566 - DNA, 120 bp, Homo sapiens; identical to SEQ ID NO: 51120
  misc_feature: 477 for SV(C|O) and 28S

SEQ ID NO: 66567 - DNA, 120 bp, Homo sapiens
  misc_feature: 477 for SV(C|O) and 28S
tcaccttggagacctgctgcggatatgggtacggcccggcgcgagatttacaccctctcccccggattttcaagggccagcgagagctcaccggacgccgccggaaccgcgacgctttcc

SEQ ID NO: 66568 - DNA, 120 bp, Homo sapiens
  misc_feature: 477 for SV(C|O) and 28S
gtgccccgggcgtggggggggcggcggcgcctcgtccagccgcggcgcgcgcccagccccgcttcgcgccccagcccgaccgacccagcccttagagccaatccttatcccgaagttacg

SEQ ID NO: 66569 - DNA, 120 bp, Homo sapiens
  misc_feature: 477 for SV(C|O) and 28S
ccgcgaggggggtgccccgggcgtggggggggcggcggcgcctcgtccagccgcggcgcgcgcccagccccgcttcgcgccccagcccgaccgacccagcccttagagccaatccttatc

SEQ ID NO: 66570 - DNA, 120 bp, Homo sapiens
  misc_feature: 477 for SV(C|O) and 28S
cgccgcgccggggaggtggagcacgagcgcacgtgttaggacccgaaagatggtgaactatgcctgggcagggcgaagccagaggaaactctggtggaggtccgtagcggtcctgacgtg

SEQ ID NO: 66571 - DNA, 120 bp, Homo sapiens
  misc_feature: 476 for SV(C|O) and 28S
acacgtgcgcgagtcgggggctcgcacgaaagccgccgtggcgcaatgaaggtgaaggccggcgcgctcgccggccgaggtgggatcccgaggcctctccagtccgccgagggcgcacca

SEQ ID NO: 66572 - DNA, 120 bp, Homo sapiens
  misc_feature: 476 for SV(C|O) and 28S
caccttggagacctgctgcggatatgggtacggcccggcgcgagatttacaccctctcccccggattttcaagggccagcgagagctcaccggacgccgccggaaccgcgacgctttcca

SEQ ID NO: 66573 - DNA, 120 bp, Homo sapiens
  misc_feature: 476 for SV(C|O) and 28S
tcggagggaaccagctactagatggttcgattagtctttcgcccctatacccaggtcggacgaccgatttgcacgtcaggaccgctacggacctccaccagagtttcctctggcttcgcc

SEQ ID NO: 66574 - DNA, 120 bp, Homo sapiens
  misc_feature: 476 for SV(C|O) and 28S
gttgttacacactccttagcggattccgacttccatggccaccgtcctgctgtctatatcaaccaacaccttttctggggtctgatgagcgtcggcatcgggcgccttaacccggcgttc

SEQ ID NO: 66575 - DNA, 120 bp, Homo sapiens
  misc_feature: 476 for SV(C|O) and 28S
gcccgccgcgccggggaggtggagcacgagcgcacgtgttaggacccgaaagatggtgaactatgcctgggcagggcgaagccagaggaaactctggtggaggtccgtagcggtcctgac

SEQ ID NO: 66576 - DNA, 120 bp, Homo sapiens
  misc_feature: 476 for SV(C|O) and 28S
gccggcggaccccgccccgggcccctcgcggggacaccgggggggcgccgggggcctcccacttattctacacctctcatgtctcttcaccgtgccagactagagtcaagctcaacaggg

SEQ ID NO: 66577 - DNA, 120 bp, Homo sapiens; identical to SEQ ID NO: 51233
  misc_feature: 476 for SV(C|O) and 28S

SEQ ID NO: 66578 - DNA, 120 bp, Homo sapiens
  misc_feature: 476 for SV(C|O) and 28S
cagcgaaaccacagccaagggaacgggcttggcggaatcagcggggaaagaagaccctgttgagcttgactctagtctggcacggtgaagagacatgagaggtgtagaataagtgggagg

SEQ ID NO: 66579 - DNA, 120 bp, Homo sapiens
  misc_feature: 476 for SV(C|O) and 28S
agaggtgtagaataagtgggaggcccccggcgcccccccggtgtccccgcgaggggcccggggcggggtccgccggccctgcgggccgccggtgaaataccactactctgatcgtttttt

SEQ ID NO: 66580 - DNA, 120 bp, Homo sapiens
  misc_feature: 475 for SV(C|O) and 28S
ttggctgaggagccaatggggcgaagctaccatctgtgggattatgactgaacgcctctaagtcagaatcccgcccaggcggaacgatacggcagcgccgcggagcctcggttggcctcg

SEQ ID NO: 66581 - DNA, 120 bp, Homo sapiens; identical to SEQ ID NO: 51267
  misc_feature: 475 for SV(C|O) and 28S

SEQ ID NO: 66582 - DNA, 120 bp, Homo sapiens; identical to SEQ ID NO: 51463
  misc_feature: 475 for SV(C|O) and 28S

SEQ ID NO: 66583 - DNA, 120 bp, Homo sapiens
  misc_feature: 475 for SV(C|O) and 28S
tcgcccgccgcgccggggaggtggagcacgagcgcacgtgttaggacccgaaagatggtgaactatgcctgggcagggcgaagccagaggaaactctggtggaggtccgtagcggtcctg

SEQ ID NO: 66584 - DNA, 120 bp, Homo sapiens
  misc_feature: 475 for SV(C|O) and 28S
taaggattggctctaagggctgggtcggtcgggctggggcgcgaagcggggctgggcgcgcgccgcggctggacgaggcgccgccgccccccccacgcccggggcacccccctcgcggcc

SEQ ID NO: 66585 - DNA, 120 bp, Homo sapiens
  misc_feature: 475 for SV(C|O) and 28S
gtggaatgcgagtgcctagtgggccacttttggtaagcagaactggcgctgcgggatgaaccgaacgccgggttaaggcgcccgatgccgacgctcatcagaccccagaaaaggtgttgg

SEQ ID NO: 66586 - DNA, 120 bp, Homo sapiens
  misc_feature: 475 for SV(C|O) and 28S
ggcggcgacgtcggctacccacccgacccgtcttgaaacacggaccaaggagtctaacacgtgcgcgagtcgggggctcgcacgaaagccgccgtggcgcaatgaaggtgaaggccggcg

SEQ ID NO: 66587 - DNA, 120 bp, Homo sapiens
  misc_feature: 475 for SV(C|O) and 28S
ggagagttctcttttctttgtgaagggcagggcgccctggaatgggttcgccccgagagaggggcccgtgccttggaaagcgtcgcggttccggcggcgtccggtgagctctcgctggcc

SEQ ID NO: 66588 - DNA, 120 bp, Homo sapiens
  misc_feature: 475 for SV(C|O) and 28S
gcggcgacgtcggctacccacccgacccgtcttgaaacacggaccaaggagtctaacacgtgcgcgagtcgggggctcgcacgaaagccgccgtggcgcaatgaaggtgaaggccggcgc

SEQ ID NO: 66589 - DNA, 120 bp, Homo sapiens; identical to SEQ ID NO: 50322
  misc_feature: 475 for SV(C|O) and 28S

SEQ ID NO: 66590 - DNA, 120 bp, Homo sapiens
  misc_feature: 475 for SV(C|O) and 28S
cctggaatgggttcgccccgagagaggggcccgtgccttggaaagcgtcgcggttccggcggcgtccggtgagctctcgctggcccttgaaaatccgggggagagggtgtaaatctcgcg

SEQ ID NO: 66591 - DNA, 120 bp, Homo sapiens
  misc_feature: 475 for SV(C|O) and 28S
cagccccgcttcgcgccccagcccgaccgacccagcccttagagccaatccttatcccgaagttacggatccggcttgccgacttcccttacctacattgttccaacatgccagaggctg

SEQ ID NO: 66592 - DNA, 120 bp, Homo sapiens
  misc_feature: 474 for SV(C|O) and 28S
gtccagccgcggcgcgcgcccagccccgcttcgcgccccagcccgaccgacccagcccttagagccaatccttatcccgaagttacggatccggcttgccgacttcccttacctacattg

SEQ ID NO: 66593 - DNA, 120 bp, Homo sapiens
  misc_feature: 474 for SV(C|O) and 28S
gggagagttctcttttctttgtgaagggcagggcgccctggaatgggttcgccccgagagaggggcccgtgccttggaaagcgtcgcggttccggcggcgtccggtgagctctcgctggc

SEQ ID NO: 66594 - DNA, 120 bp, Homo sapiens
  misc_feature: 474 for SV(C|O) and 28S
ggcggaccccgccccgggcccctcgcggggacaccgggggggcgccgggggcctcccacttattctacacctctcatgtctcttcaccgtgccagactagagtcaagctcaacagggtct

SEQ ID NO: 66595 - DNA, 120 bp, Homo sapiens; identical to SEQ ID NO: 49203
  misc_feature: 474 for SV(C|O) and 28S

SEQ ID NO: 66596 - DNA, 120 bp, Homo sapiens
  misc_feature: 474 for SV(C|O) and 28S
cggcgacgtcggctacccacccgacccgtcttgaaacacggaccaaggagtctaacacgtgcgcgagtcgggggctcgcacgaaagccgccgtggcgcaatgaaggtgaaggccggcgcg

SEQ ID NO: 66597 - DNA, 120 bp, Homo sapiens
  misc_feature: 474 for SV(C|O) and 28S
agtcggaatccgctaaggagtgtgtaacaactcacctgccgaatcaactagccctgaaaatggatggcgctggagcgtcgggcccatacccggccgtcgccggcagtcgagagtggacgg

SEQ ID NO: 66598 - DNA, 120 bp, Homo sapiens; identical to SEQ ID NO: 51459
  misc_feature: 474 for SV(C|O) and 28S

SEQ ID NO: 66599 - DNA, 120 bp, Homo sapiens
  misc_feature: 473 for SV(C|O) and 28S
tttcagggctagttgattcggcaggtgagttgttacacactccttagcggattccgacttccatggccaccgtcctgctgtctatatcaaccaacaccttttctggggtctgatgagcgt

SEQ ID NO: 66600 - DNA, 120 bp, Homo sapiens; identical to SEQ ID NO: 51500
  misc_feature: 473 for SV(C|O) and 28S

SEQ ID NO: 66601 - DNA, 120 bp, Homo sapiens
  misc_feature: 473 for SV(C|O) and 28S
acgtcggctacccacccgacccgtcttgaaacacggaccaaggagtctaacacgtgcgcgagtcgggggctcgcacgaaagccgccgtggcgcaatgaaggtgaaggccggcgcgctcgc

SEQ ID NO: 66602 - DNA, 120 bp, Homo sapiens; identical to SEQ ID NO: 51100
  misc_feature: 473 for SV(C|O) and 28S

SEQ ID NO: 66603 - DNA, 120 bp, Homo sapiens
  misc_feature: 473 for SV(C|O) and 28S
gcccagccccgcttcgcgccccagcccgaccgacccagcccttagagccaatccttatcccgaagttacggatccggcttgccgacttcccttacctacattgttccaacatgccagagg

SEQ ID NO: 66604 - DNA, 120 bp, Homo sapiens
  misc_feature: 473 for SV(C|O) and 28S
gaaccgcgacgctttccaaggcacgggcccctctctcggggcgaacccattccagggcgccctgcccttcacaaagaaaagagaactctccccggggctcccgccggcttctccgggatc

SEQ ID NO: 66605 - DNA, 120 bp, Homo sapiens
  misc_feature: 473 for SV(C|O) and 28S
aggagtctaacacgtgcgcgagtcgggggctcgcacgaaagccgccgtggcgcaatgaaggtgaaggccggcgcgctcgccggccgaggtgggatcccgaggcctctccagtccgccgag

SEQ ID NO: 66606 - DNA, 120 bp, Homo sapiens
  misc_feature: 473 for SV(C|O) and 28S
cgtccagccgcggcgcgcgcccagccccgcttcgcgccccagcccgaccgacccagcccttagagccaatccttatcccgaagttacggatccggcttgccgacttcccttacctacatt

SEQ ID NO: 66607 - DNA, 120 bp, Homo sapiens
  misc_feature: 473 for SV(C|O) and 28S
cggggagagttctcttttctttgtgaagggcagggcgccctggaatgggttcgccccgagagaggggcccgtgccttggaaagcgtcgcggttccggcggcgtccggtgagctctcgctg

SEQ ID NO: 66608 - DNA, 120 bp, Homo sapiens
  misc_feature: 473 for SV(C|O) and 28S
ccgccgcgccggggaggtggagcacgagcgcacgtgttaggacccgaaagatggtgaactatgcctgggcagggcgaagccagaggaaactctggtggaggtccgtagcggtcctgacgt

SEQ ID NO: 66609 - DNA, 120 bp, Homo sapiens; identical to SEQ ID NO: 51264
  misc_feature: 473 for SV(C|O) and 28S

SEQ ID NO: 66610 - DNA, 120 bp, Homo sapiens
  misc_feature: 473 for SV(C|O) and 28S
acccggcgttcggttcatcccgcagcgccagttctgcttaccaaaagtggcccactaggcactcgcattccacgcccggctccacgccagcgagccgggcttcttacccatttaaagttt

SEQ ID NO: 66611 - DNA, 120 bp, Homo sapiens
  misc_feature: 472 for SV(C|O) and 28S
accttggagacctgctgcggatatgggtacggcccggcgcgagatttacaccctctcccccggattttcaagggccagcgagagctcaccggacgccgccggaaccgcgacgctttccaa

SEQ ID NO: 66612 - DNA, 120 bp, Homo sapiens
  misc_feature: 472 for SV(C|O) and 28S
tggcttcgccctgcccaggcatagttcaccatctttcgggtcctaacacgtgcgctcgtgctccacctccccggcgcggcgggcgagacgggccggtggtgcgccctcggcggactggag

SEQ ID NO: 66613 - DNA, 120 bp, Homo sapiens; identical to SEQ ID NO: 51063
  misc_feature: 472 for SV(C|O) and 28S

SEQ ID NO: 66614 - DNA, 120 bp, Homo sapiens
  misc_feature: 472 for SV(C|O) and 28S
tctaacacgtgcgcgagtcgggggctcgcacgaaagccgccgtggcgcaatgaaggtgaaggccggcgcgctcgccggccgaggtgggatcccgaggcctctccagtccgccgagggcgc

SEQ ID NO: 66615 - DNA, 120 bp, Homo sapiens
  misc_feature: 472 for SV(C|O) and 28S
gtcggaatccgctaaggagtgtgtaacaactcacctgccgaatcaactagccctgaaaatggatggcgctggagcgtcgggcccatacccggccgtcgccggcagtcgagagtggacggg

SEQ ID NO: 66616 - DNA, 120 bp, Homo sapiens
  misc_feature: 472 for SV(C|O) and 28S
cgtcggctacccacccgacccgtcttgaaacacggaccaaggagtctaacacgtgcgcgagtcgggggctcgcacgaaagccgccgtggcgcaatgaaggtgaaggccggcgcgctcgcc

SEQ ID NO: 66617 - DNA, 120 bp, Homo sapiens
  misc_feature: 472 for SV(C|O) and 28S
gaggtgtagaataagtgggaggcccccggcgcccccccggtgtccccgcgaggggcccggggcggggtccgccggccctgcgggccgccggtgaaataccactactctgatcgttttttc

SEQ ID NO: 66618 - DNA, 120 bp, Homo sapiens; identical to SEQ ID NO: 51476
  misc_feature: 472 for SV(C|O) and 28S

SEQ ID NO: 66619 - DNA, 120 bp, Homo sapiens
  misc_feature: 472 for SV(C|O) and 28S
atcctgagggaaacttcggagggaaccagctactagatggttcgattagtctttcgcccctatacccaggtcggacgaccgatttgcacgtcaggaccgctacggacctccaccagagtt

SEQ ID NO: 66620 - DNA, 120 bp, Homo sapiens; identical to SEQ ID NO: 51240
  misc_feature: 471 for SV(C|O) and 28S

SEQ ID NO: 66621 - DNA, 120 bp, Homo sapiens; identical to SEQ ID NO: 51318
  misc_feature: 471 for SV(C|O) and 28S

SEQ ID NO: 66622 - DNA, 120 bp, Homo sapiens
  misc_feature: 471 for SV(C|O) and 28S
cgggcgggtcgcgccgtcgggcccgggggaggttctctcggggccacgcgcgcgtcccccgaagagggggacggcggagcgagcgcacggggtcggcggcgacgtcggctacccacccga

SEQ ID NO: 66623 - DNA, 120 bp, Homo sapiens
  misc_feature: 471 for SV(C|O) and 28S
ggtgagttgttacacactccttagcggattccgacttccatggccaccgtcctgctgtctatatcaaccaacaccttttctggggtctgatgagcgtcggcatcgggcgccttaacccgg

SEQ ID NO: 66624 - DNA, 120 bp, Homo sapiens
  misc_feature: 471 for SV(C|O) and 28S
gggaaacttcggagggaaccagctactagatggttcgattagtctttcgcccctatacccaggtcggacgaccgatttgcacgtcaggaccgctacggacctccaccagagtttcctctg

SEQ ID NO: 66625 - DNA, 120 bp, Homo sapiens; identical to SEQ ID NO: 50165
  misc_feature: 471 for SV(C|O) and 28S

SEQ ID NO: 66626 - DNA, 120 bp, Homo sapiens; identical to SEQ ID NO: 51661
  misc_feature: 471 for SV(C|O) and 28S

SEQ ID NO: 66627 - DNA, 120 bp, Homo sapiens; identical to SEQ ID NO: 51433
  misc_feature: 471 for SV(C|O) and 28S

SEQ ID NO: 66628 - DNA, 120 bp, Homo sapiens
  misc_feature: 471 for SV(C|O) and 28S
aataagtgggaggcccccggcgcccccccggtgtccccgcgaggggcccggggcggggtccgccggccctgcgggccgccggtgaaataccactactctgatcgttttttcactgacccg

SEQ ID NO: 66629 - DNA, 120 bp, Homo sapiens
  misc_feature: 470 for SV(C|O) and 28S
ttggctctaagggctgggtcggtcgggctggggcgcgaagcggggctgggcgcgcgccgcggctggacgaggcgccgccgccccccccacgcccggggcacccccctcgcggccctcccc

SEQ ID NO: 66630 - DNA, 120 bp, Homo sapiens
  misc_feature: 470 for SV(C|O) and 28S
ccttaggacacctgcgttaccgtttgacaggtgtaccgccccagtcaaactccccacctggcactgtccccggagcgggtcgcgcccggccggcgcgcggccgggcgcttggcgccagaa

SEQ ID NO: 66631 - DNA, 120 bp, Homo sapiens; identical to SEQ ID NO: 51676
  misc_feature: 470 for SV(C|O) and 28S

SEQ ID NO: 66632 - DNA, 120 bp, Homo sapiens
  misc_feature: 470 for SV(C|O) and 28S
gtcggctacccacccgacccgtcttgaaacacggaccaaggagtctaacacgtgcgcgagtcgggggctcgcacgaaagccgccgtggcgcaatgaaggtgaaggccggcgcgctcgccg

SEQ ID NO: 66633 - DNA, 120 bp, Homo sapiens; identical to SEQ ID NO: 51207
  misc_feature: 470 for SV(C|O) and 28S

SEQ ID NO: 66634 - DNA, 120 bp, Homo sapiens
  misc_feature: 470 for SV(C|O) and 28S
gaagtcggaatccgctaaggagtgtgtaacaactcacctgccgaatcaactagccctgaaaatggatggcgctggagcgtcgggcccatacccggccgtcgccggcagtcgagagtggac

SEQ ID NO: 66635 - DNA, 120 bp, Homo sapiens
  misc_feature: 470 for SV(C|O) and 28S
gagagttctcttttctttgtgaagggcagggcgccctggaatgggttcgccccgagagaggggcccgtgccttggaaagcgtcgcggttccggcggcgtccggtgagctctcgctggccc

SEQ ID NO: 66636 - DNA, 120 bp, Homo sapiens
  misc_feature: 470 for SV(C|O) and 28S
ggaatgcgagtgcctagtgggccacttttggtaagcagaactggcgctgcgggatgaaccgaacgccgggttaaggcgcccgatgccgacgctcatcagaccccagaaaaggtgttggtt

SEQ ID NO: 66637 - DNA, 120 bp, Homo sapiens
  misc_feature: 470 for SV(C|O) and 28S
cggcggcgacgtcggctacccacccgacccgtcttgaaacacggaccaaggagtctaacacgtgcgcgagtcgggggctcgcacgaaagccgccgtggcgcaatgaaggtgaaggccggc

SEQ ID NO: 66638 - DNA, 120 bp, Homo sapiens; identical to SEQ ID NO: 50309
  misc_feature: 470 for SV(C|O) and 28S

SEQ ID NO: 66639 - DNA, 120 bp, Homo sapiens
  misc_feature: 470 for SV(C|O) and 28S
cggattcggggatctgaacccgactccctttcgatcggccgagggcaacggaggccatcgcccgtcccttcggaacggcgctcgcccatctctcaggaccgactgacccatgttcaactg

SEQ ID NO: 66640 - DNA, 120 bp, Homo sapiens
  misc_feature: 470 for SV(C|O) and 28S
agctcgccttaggacacctgcgttaccgtttgacaggtgtaccgccccagtcaaactccccacctggcactgtccccggagcgggtcgcgcccggccggcgcgcggccgggcgcttggcg

SEQ ID NO: 66641 - DNA, 120 bp, Homo sapiens
  misc_feature: 469 for SV(C|O) and 28S
ggcttcgccctgcccaggcatagttcaccatctttcgggtcctaacacgtgcgctcgtgctccacctccccggcgcggcgggcgagacgggccggtggtgcgccctcggcggactggaga

SEQ ID NO: 66642 - DNA, 120 bp, Homo sapiens
  misc_feature: 469 for SV(C|O) and 28S
ggagacctgctgcggatatgggtacggcccggcgcgagatttacaccctctcccccggattttcaagggccagcgagagctcaccggacgccgccggaaccgcgacgctttccaaggcac

SEQ ID NO: 66643 - DNA, 120 bp, Homo sapiens
  misc_feature: 469 for SV(C|O) and 28S
caatgaagcgcgggtaaacggcgggagtaactatgactctcttaaggtagccaaatgcctcgtcatctaattagtgacgcgcatgaatggatgaacgagattcccactgtccctacctac

SEQ ID NO: 66644 - DNA, 120 bp, Homo sapiens; identical to SEQ ID NO: 51667
  misc_feature: 469 for SV(C|O) and 28S

SEQ ID NO: 66645 - DNA, 120 bp, Homo sapiens; identical to SEQ ID NO: 51671
  misc_feature: 469 for SV(C|O) and 28S

SEQ ID NO: 66646 - DNA, 120 bp, Homo sapiens; identical to SEQ ID NO: 51066
  misc_feature: 469 for SV(C|O) and 28S

SEQ ID NO: 66647 - DNA, 120 bp, Homo sapiens
  misc_feature: 469 for SV(C|O) and 28S
cttaggacacctgcgttaccgtttgacaggtgtaccgccccagtcaaactccccacctggcactgtccccggagcgggtcgcgcccggccggcgcgcggccgggcgcttggcgccagaag

SEQ ID NO: 66648 - DNA, 120 bp, Homo sapiens
  misc_feature: 469 for SV(C|O) and 28S
aagtcggaatccgctaaggagtgtgtaacaactcacctgccgaatcaactagccctgaaaatggatggcgctggagcgtcgggcccatacccggccgtcgccggcagtcgagagtggacg

SEQ ID NO: 66649 - DNA, 120 bp, Homo sapiens
  misc_feature: 469 for SV(C|O) and 28S
ccagccgcggcgcgcgcccagccccgcttcgcgccccagcccgaccgacccagcccttagagccaatccttatcccgaagttacggatccggcttgccgacttcccttacctacattgtt

SEQ ID NO: 66650 - DNA, 120 bp, Homo sapiens
  misc_feature: 468 for SV(C|O) and 28S
tggctctaagggctgggtcggtcgggctggggcgcgaagcggggctgggcgcgcgccgcggctggacgaggcgccgccgccccccccacgcccggggcacccccctcgcggccctccccc

SEQ ID NO: 66651 - DNA, 120 bp, Homo sapiens
  misc_feature: 468 for SV(C|O) and 28S
ctgctgttcacatggaacccttctccacttcggccttcaaagttctcgtttgaatatttgctactaccaccaagatctgcacctgcggcggctccacccgggcccgcgccctaggcttca

SEQ ID NO: 66652 - DNA, 120 bp, Homo sapiens
  misc_feature: 468 for SV(C|O) and 28S
ctacccacccgacccgtcttgaaacacggaccaaggagtctaacacgtgcgcgagtcgggggctcgcacgaaagccgccgtggcgcaatgaaggtgaaggccggcgcgctcgccggccga

SEQ ID NO: 66653 - DNA, 120 bp, Homo sapiens
  misc_feature: 468 for SV(C|O) and 28S
tccagccgcggcgcgcgcccagccccgcttcgcgccccagcccgaccgacccagcccttagagccaatccttatcccgaagttacggatccggcttgccgacttcccttacctacattgt

SEQ ID NO: 66654 - DNA, 120 bp, Homo sapiens
  misc_feature: 468 for SV(C|O) and 28S
gcttcgccctgcccaggcatagttcaccatctttcgggtcctaacacgtgcgctcgtgctccacctccccggcgcggcgggcgagacgggccggtggtgcgccctcggcggactggagag

SEQ ID NO: 66655 - DNA, 120 bp, Homo sapiens
  misc_feature: 468 for SV(C|O) and 28S
cggaccaaggagtctaacacgtgcgcgagtcgggggctcgcacgaaagccgccgtggcgcaatgaaggtgaaggccggcgcgctcgccggccgaggtgggatcccgaggcctctccagtc

SEQ ID NO: 66656 - DNA, 120 bp, Homo sapiens
  misc_feature: 468 for SV(C|O) and 28S
acccacccgacccgtcttgaaacacggaccaaggagtctaacacgtgcgcgagtcgggggctcgcacgaaagccgccgtggcgcaatgaaggtgaaggccggcgcgctcgccggccgagg

SEQ ID NO: 66657 - DNA, 120 bp, Homo sapiens
  misc_feature: 467 for SV(C|O) and 28S
ctaacacgtgcgcgagtcgggggctcgcacgaaagccgccgtggcgcaatgaaggtgaaggccggcgcgctcgccggccgaggtgggatcccgaggcctctccagtccgccgagggcgca

SEQ ID NO: 66658 - DNA, 120 bp, Homo sapiens; identical to SEQ ID NO: 51313
  misc_feature: 467 for SV(C|O) and 28S

SEQ ID NO: 66659 - DNA, 120 bp, Homo sapiens
  misc_feature: 467 for SV(C|O) and 28S
cgcccgccgcgccggggaggtggagcacgagcgcacgtgttaggacccgaaagatggtgaactatgcctgggcagggcgaagccagaggaaactctggtggaggtccgtagcggtcctga

SEQ ID NO: 66660 - DNA, 120 bp, Homo sapiens
  misc_feature: 467 for SV(C|O) and 28S
taagtgggaggcccccggcgcccccccggtgtccccgcgaggggcccggggcggggtccgccggccctgcgggccgccggtgaaataccactactctgatcgttttttcactgacccggt

SEQ ID NO: 66661 - DNA, 120 bp, Homo sapiens
  misc_feature: 467 for SV(C|O) and 28S
gcccccgcgggggagacccccctcgcgggggattccccgcgggggtgggcgccgggaggggggagagcgcggcgacgggtctcgctccctcggccccgggattcggcgagtgctgctgcc

SEQ ID NO: 66662 - DNA, 120 bp, Homo sapiens
  misc_feature: 467 for SV(C|O) and 28S
ggagtctaacacgtgcgcgagtcgggggctcgcacgaaagccgccgtggcgcaatgaaggtgaaggccggcgcgctcgccggccgaggtgggatcccgaggcctctccagtccgccgagg

SEQ ID NO: 66663 - DNA, 120 bp, Homo sapiens; identical to SEQ ID NO: 51637
  misc_feature: 467 for SV(C|O) and 28S

SEQ ID NO: 66664 - DNA, 120 bp, Homo sapiens
  misc_feature: 467 for SV(C|O) and 28S
agtctaacacgtgcgcgagtcgggggctcgcacgaaagccgccgtggcgcaatgaaggtgaaggccggcgcgctcgccggccgaggtgggatcccgaggcctctccagtccgccgagggc

SEQ ID NO: 66665 - DNA, 120 bp, Homo sapiens
  misc_feature: 467 for SV(C|O) and 28S
gagtctaacacgtgcgcgagtcgggggctcgcacgaaagccgccgtggcgcaatgaaggtgaaggccggcgcgctcgccggccgaggtgggatcccgaggcctctccagtccgccgaggg

SEQ ID NO: 66666 - DNA, 120 bp, Homo sapiens
  misc_feature: 467 for SV(C|O) and 28S
cggcggaccccgccccgggcccctcgcggggacaccgggggggcgccgggggcctcccacttattctacacctctcatgtctcttcaccgtgccagactagagtcaagctcaacagggtc

SEQ ID NO: 66667 - DNA, 120 bp, Homo sapiens; identical to SEQ ID NO: 50346
  misc_feature: 467 for SV(C|O) and 28S

SEQ ID NO: 66668 - DNA, 120 bp, Homo sapiens
  misc_feature: 467 for SV(C|O) and 28S
cccgccgcgccggggaggtggagcacgagcgcacgtgttaggacccgaaagatggtgaactatgcctgggcagggcgaagccagaggaaactctggtggaggtccgtagcggtcctgacg

SEQ ID NO: 66669 - DNA, 120 bp, Homo sapiens; identical to SEQ ID NO: 51454
  misc_feature: 467 for SV(C|O) and 28S

SEQ ID NO: 66670 - DNA, 120 bp, Homo sapiens
  misc_feature: 466 for SV(C|O) and 28S
aggtgtagaataagtgggaggcccccggcgcccccccggtgtccccgcgaggggcccggggcggggtccgccggccctgcgggccgccggtgaaataccactactctgatcgttttttca

SEQ ID NO: 66671 - DNA, 120 bp, Homo sapiens
  misc_feature: 466 for SV(C|O) and 28S
aaggagtctaacacgtgcgcgagtcgggggctcgcacgaaagccgccgtggcgcaatgaaggtgaaggccggcgcgctcgccggccgaggtgggatcccgaggcctctccagtccgccga

SEQ ID NO: 66672 - DNA, 120 bp, Homo sapiens; identical to SEQ ID NO: 51227
  misc_feature: 466 for SV(C|O) and 28S

SEQ ID NO: 66673 - DNA, 120 bp, Homo sapiens; identical to SEQ ID NO: 50304
  misc_feature: 466 for SV(C|O) and 28S

SEQ ID NO: 66674 - DNA, 120 bp, Homo sapiens; identical to SEQ ID NO: 49576
  misc_feature: 466 for SV(C|O) and 28S

SEQ ID NO: 66675 - DNA, 120 bp, Homo sapiens
  misc_feature: 466 for SV(C|O) and 28S
cgcgacgctttccaaggcacgggcccctctctcggggcgaacccattccagggcgccctgcccttcacaaagaaaagagaactctccccggggctcccgccggcttctccgggatcggtc

SEQ ID NO: 66676 - DNA, 120 bp, Homo sapiens; identical to SEQ ID NO: 50757
  misc_feature: 466 for SV(C|O) and 28S

SEQ ID NO: 66677 - DNA, 120 bp, Homo sapiens
  misc_feature: 466 for SV(C|O) and 28S
acttcggagggaaccagctactagatggttcgattagtctttcgcccctatacccaggtcggacgaccgatttgcacgtcaggaccgctacggacctccaccagagtttcctctggcttc

SEQ ID NO: 66678 - DNA, 120 bp, Homo sapiens
  misc_feature: 466 for SV(C|O) and 28S
ccgggcgggtcgcgccgtcgggcccgggggaggttctctcggggccacgcgcgcgtcccccgaagagggggacggcggagcgagcgcacggggtcggcggcgacgtcggctacccacccg

SEQ ID NO: 66679 - DNA, 120 bp, Homo sapiens
  misc_feature: 465 for SV(C|O) and 28S
ttgttacacactccttagcggattccgacttccatggccaccgtcctgctgtctatatcaaccaacaccttttctggggtctgatgagcgtcggcatcgggcgccttaacccggcgttcg

SEQ ID NO: 66680 - DNA, 120 bp, Homo sapiens
  misc_feature: 465 for SV(C|O) and 28S
acacactccttagcggattccgacttccatggccaccgtcctgctgtctatatcaaccaacaccttttctggggtctgatgagcgtcggcatcgggcgccttaacccggcgttcggttca

SEQ ID NO: 66681 - DNA, 120 bp, Homo sapiens
  misc_feature: 465 for SV(C|O) and 28S
tcggaatccgctaaggagtgtgtaacaactcacctgccgaatcaactagccctgaaaatggatggcgctggagcgtcgggcccatacccggccgtcgccggcagtcgagagtggacggga

SEQ ID NO: 66682 - DNA, 120 bp, Homo sapiens
  misc_feature: 465 for SV(C|O) and 28S
ctggcttcgccctgcccaggcatagttcaccatctttcgggtcctaacacgtgcgctcgtgctccacctccccggcgcggcgggcgagacgggccggtggtgcgccctcggcggactgga

SEQ ID NO: 66683 - DNA, 120 bp, Homo sapiens
  misc_feature: 465 for SV(C|O) and 28S
tacccacccgacccgtcttgaaacacggaccaaggagtctaacacgtgcgcgagtcgggggctcgcacgaaagccgccgtggcgcaatgaaggtgaaggccggcgcgctcgccggccgag

SEQ ID NO: 66684 - DNA, 120 bp, Homo sapiens
  misc_feature: 465 for SV(C|O) and 28S
gtctaacacgtgcgcgagtcgggggctcgcacgaaagccgccgtggcgcaatgaaggtgaaggccggcgcgctcgccggccgaggtgggatcccgaggcctctccagtccgccgagggcg

SEQ ID NO: 66685 - DNA, 120 bp, Homo sapiens
  misc_feature: 465 for SV(C|O) and 28S
ctggaatgggttcgccccgagagaggggcccgtgccttggaaagcgtcgcggttccggcggcgtccggtgagctctcgctggcccttgaaaatccgggggagagggtgtaaatctcgcgc

SEQ ID NO: 66686 - DNA, 120 bp, Homo sapiens
  misc_feature: 465 for SV(C|O) and 28S
ctcgcccgccgcgccggggaggtggagcacgagcgcacgtgttaggacccgaaagatggtgaactatgcctgggcagggcgaagccagaggaaactctggtggaggtccgtagcggtcct

SEQ ID NO: 66687 - DNA, 120 bp, Homo sapiens
  misc_feature: 465 for SV(C|O) and 28S
ataagtgggaggcccccggcgcccccccggtgtccccgcgaggggcccggggcggggtccgccggccctgcgggccgccggtgaaataccactactctgatcgttttttcactgacccgg

SEQ ID NO: 66688 - DNA, 120 bp, Homo sapiens
  misc_feature: 465 for SV(C|O) and 28S
ccggggagagttctcttttctttgtgaagggcagggcgccctggaatgggttcgccccgagagaggggcccgtgccttggaaagcgtcgcggttccggcggcgtccggtgagctctcgct

SEQ ID NO: 66689 - DNA, 120 bp, Homo sapiens; identical to SEQ ID NO: 49343
  misc_feature: 464 for SV(C|O) and 28S

SEQ ID NO: 66690 - DNA, 120 bp, Homo sapiens; identical to SEQ ID NO: 51559
  misc_feature: 464 for SV(C|O) and 28S

SEQ ID NO: 66691 - DNA, 120 bp, Homo sapiens
  misc_feature: 464 for SV(C|O) and 28S
ttacacactccttagcggattccgacttccatggccaccgtcctgctgtctatatcaaccaacaccttttctggggtctgatgagcgtcggcatcgggcgccttaacccggcgttcggtt

SEQ ID NO: 66692 - DNA, 120 bp, Homo sapiens; identical to SEQ ID NO: 49480
  misc_feature: 464 for SV(C|O) and 28S

SEQ ID NO: 66693 - DNA, 120 bp, Homo sapiens
  misc_feature: 464 for SV(C|O) and 28S
gccttaggacacctgcgttaccgtttgacaggtgtaccgccccagtcaaactccccacctggcactgtccccggagcgggtcgcgcccggccggcgcgcggccgggcgcttggcgccaga

SEQ ID NO: 66694 - DNA, 120 bp, Homo sapiens; identical to SEQ ID NO: 49291
  misc_feature: 464 for SV(C|O) and 28S

SEQ ID NO: 66695 - DNA, 120 bp, Homo sapiens
  misc_feature: 464 for SV(C|O) and 28S
tacacactccttagcggattccgacttccatggccaccgtcctgctgtctatatcaaccaacaccttttctggggtctgatgagcgtcggcatcgggcgccttaacccggcgttcggttc

SEQ ID NO: 66696 - DNA, 120 bp, Homo sapiens
  misc_feature: 464 for SV(C|O) and 28S
gctcgccttaggacacctgcgttaccgtttgacaggtgtaccgccccagtcaaactccccacctggcactgtccccggagcgggtcgcgcccggccggcgcgcggccgggcgcttggcgc

SEQ ID NO: 66697 - DNA, 120 bp, Homo sapiens
  misc_feature: 464 for SV(C|O) and 28S
cccggggagagttctcttttctttgtgaagggcagggcgccctggaatgggttcgccccgagagaggggcccgtgccttggaaagcgtcgcggttccggcggcgtccggtgagctctcgc

SEQ ID NO: 66698 - DNA, 120 bp, Homo sapiens
  misc_feature: 464 for SV(C|O) and 28S
cggaatccgctaaggagtgtgtaacaactcacctgccgaatcaactagccctgaaaatggatggcgctggagcgtcgggcccatacccggccgtcgccggcagtcgagagtggacgggag

SEQ ID NO: 66699 - DNA, 120 bp, Homo sapiens
  misc_feature: 464 for SV(C|O) and 28S
aaccgcgacgctttccaaggcacgggcccctctctcggggcgaacccattccagggcgccctgcccttcacaaagaaaagagaactctccccggggctcccgccggcttctccgggatcg

SEQ ID NO: 66700 - DNA, 120 bp, Homo sapiens
  misc_feature: 463 for SV(C|O) and 28S
ttcggagggaaccagctactagatggttcgattagtctttcgcccctatacccaggtcggacgaccgatttgcacgtcaggaccgctacggacctccaccagagtttcctctggcttcgc

SEQ ID NO: 66701 - DNA, 120 bp, Homo sapiens
  misc_feature: 463 for SV(C|O) and 28S
tgttacacactccttagcggattccgacttccatggccaccgtcctgctgtctatatcaaccaacaccttttctggggtctgatgagcgtcggcatcgggcgccttaacccggcgttcgg

SEQ ID NO: 66702 - DNA, 120 bp, Homo sapiens
  misc_feature: 463 for SV(C|O) and 28S
acacggaccaaggagtctaacacgtgcgcgagtcgggggctcgcacgaaagccgccgtggcgcaatgaaggtgaaggccggcgcgctcgccggccgaggtgggatcccgaggcctctcca

SEQ ID NO: 66703 - DNA, 120 bp, Homo sapiens; identical to SEQ ID NO: 51595
  misc_feature: 463 for SV(C|O) and 28S

SEQ ID NO: 66704 - DNA, 120 bp, Homo sapiens; identical to SEQ ID NO: 51596
  misc_feature: 463 for SV(C|O) and 28S

SEQ ID NO: 66705 - DNA, 120 bp, Homo sapiens
  misc_feature: 463 for SV(C|O) and 28S
ctcgccttaggacacctgcgttaccgtttgacaggtgtaccgccccagtcaaactccccacctggcactgtccccggagcgggtcgcgcccggccggcgcgcggccgggcgcttggcgcc

SEQ ID NO: 66706 - DNA, 120 bp, Homo sapiens
  misc_feature: 463 for SV(C|O) and 28S
gcgcgggcccgggtggagccgccgcaggtgcagatcttggtggtagtagcaaatattcaaacgagaactttgaaggccgaagtggagaagggttccatgtgaacagcagttgaacatggg

SEQ ID NO: 66707 - DNA, 120 bp, Homo sapiens; identical to SEQ ID NO: 51451
  misc_feature: 463 for SV(C|O) and 28S

SEQ ID NO: 66708 - DNA, 120 bp, Homo sapiens
  misc_feature: 463 for SV(C|O) and 28S
cgcccagccccgcttcgcgccccagcccgaccgacccagcccttagagccaatccttatcccgaagttacggatccggcttgccgacttcccttacctacattgttccaacatgccagag

SEQ ID NO: 66709 - DNA, 120 bp, Homo sapiens
  misc_feature: 463 for SV(C|O) and 28S
cctccaccagagtttcctctggcttcgccctgcccaggcatagttcaccatctttcgggtcctaacacgtgcgctcgtgctccacctccccggcgcggcgggcgagacgggccggtggtg

SEQ ID NO: 66710 - DNA, 120 bp, Homo sapiens
  misc_feature: 463 for SV(C|O) and 28S
ccggcggaccccgccccgggcccctcgcggggacaccgggggggcgccgggggcctcccacttattctacacctctcatgtctcttcaccgtgccagactagagtcaagctcaacagggt

SEQ ID NO: 66711 - DNA, 120 bp, Homo sapiens
  misc_feature: 463 for SV(C|O) and 28S
cccacccgacccgtcttgaaacacggaccaaggagtctaacacgtgcgcgagtcgggggctcgcacgaaagccgccgtggcgcaatgaaggtgaaggccggcgcgctcgccggccgaggt

SEQ ID NO: 66712 - DNA, 120 bp, Homo sapiens; identical to SEQ ID NO: 49386
  misc_feature: 462 for SV(C|O) and 28S

SEQ ID NO: 66713 - DNA, 120 bp, Homo sapiens; identical to SEQ ID NO: 51640
  misc_feature: 462 for SV(C|O) and 28S

SEQ ID NO: 66714 - DNA, 120 bp, Homo sapiens; identical to SEQ ID NO: 50941
  misc_feature: 462 for SV(C|O) and 28S

SEQ ID NO: 66715 - DNA, 120 bp, Homo sapiens
  misc_feature: 462 for SV(C|O) and 28S
ccattttcagggctagttgattcggcaggtgagttgttacacactccttagcggattccgacttccatggccaccgtcctgctgtctatatcaaccaacaccttttctggggtctgatga

SEQ ID NO: 66716 - DNA, 120 bp, Homo sapiens; identical to SEQ ID NO: 50271
  misc_feature: 462 for SV(C|O) and 28S

SEQ ID NO: 66717 - DNA, 120 bp, Homo sapiens; identical to SEQ ID NO: 50917
  misc_feature: 462 for SV(C|O) and 28S

SEQ ID NO: 66718 - DNA, 120 bp, Homo sapiens
  misc_feature: 462 for SV(C|O) and 28S
ggctacccacccgacccgtcttgaaacacggaccaaggagtctaacacgtgcgcgagtcgggggctcgcacgaaagccgccgtggcgcaatgaaggtgaaggccggcgcgctcgccggcc

SEQ ID NO: 66719 - DNA, 120 bp, Homo sapiens; identical to SEQ ID NO: 51533
  misc_feature: 462 for SV(C|O) and 28S

SEQ ID NO: 66720 - DNA, 120 bp, Homo sapiens
  misc_feature: 462 for SV(C|O) and 28S
cgcccccgcgggggagacccccctcgcgggggattccccgcgggggtgggcgccgggaggggggagagcgcggcgacgggtctcgctccctcggccccgggattcggcgagtgctgctgc

SEQ ID NO: 66721 - DNA, 120 bp, Homo sapiens; identical to SEQ ID NO: 51651
  misc_feature: 462 for SV(C|O) and 28S

SEQ ID NO: 66722 - DNA, 120 bp, Homo sapiens
  misc_feature: 462 for SV(C|O) and 28S
cccggcgttcggttcatcccgcagcgccagttctgcttaccaaaagtggcccactaggcactcgcattccacgcccggctccacgccagcgagccgggcttcttacccatttaaagtttg

SEQ ID NO: 66723 - DNA, 120 bp, Homo sapiens
  misc_feature: 461 for SV(C|O) and 28S
ttttcagggctagttgattcggcaggtgagttgttacacactccttagcggattccgacttccatggccaccgtcctgctgtctatatcaaccaacaccttttctggggtctgatgagcg

SEQ ID NO: 66724 - DNA, 120 bp, Homo sapiens
  misc_feature: 461 for SV(C|O) and 28S
tggaagtcggaatccgctaaggagtgtgtaacaactcacctgccgaatcaactagccctgaaaatggatggcgctggagcgtcgggcccatacccggccgtcgccggcagtcgagagtgg

SEQ ID NO: 66725 - DNA, 120 bp, Homo sapiens
  misc_feature: 461 for SV(C|O) and 28S
tctcgcccgccgcgccggggaggtggagcacgagcgcacgtgttaggacccgaaagatggtgaactatgcctgggcagggcgaagccagaggaaactctggtggaggtccgtagcggtcc

SEQ ID NO: 66726 - DNA, 120 bp, Homo sapiens
  misc_feature: 461 for SV(C|O) and 28S
tcggctacccacccgacccgtcttgaaacacggaccaaggagtctaacacgtgcgcgagtcgggggctcgcacgaaagccgccgtggcgcaatgaaggtgaaggccggcgcgctcgccgg

SEQ ID NO: 66727 - DNA, 120 bp, Homo sapiens
  misc_feature: 461 for SV(C|O) and 28S
cccgggcgggtcgcgccgtcgggcccgggggaggttctctcggggccacgcgcgcgtcccccgaagagggggacggcggagcgagcgcacggggtcggcggcgacgtcggctacccaccc

SEQ ID NO: 66728 - DNA, 120 bp, Homo sapiens; identical to SEQ ID NO: 51527
  misc_feature: 461 for SV(C|O) and 28S

SEQ ID NO: 66729 - DNA, 120 bp, Homo sapiens
  misc_feature: 461 for SV(C|O) and 28S
ggaccaaggagtctaacacgtgcgcgagtcgggggctcgcacgaaagccgccgtggcgcaatgaaggtgaaggccggcgcgctcgccggccgaggtgggatcccgaggcctctccagtcc

SEQ ID NO: 66730 - DNA, 120 bp, Homo sapiens
  misc_feature: 461 for SV(C|O) and 28S
gcggaccccgccccgggcccctcgcggggacaccgggggggcgccgggggcctcccacttattctacacctctcatgtctcttcaccgtgccagactagagtcaagctcaacagggtctt

SEQ ID NO: 66731 - DNA, 120 bp, Homo sapiens
  misc_feature: 461 for SV(C|O) and 28S
gccgaatcccggggccgagggagcgagacccgtcgccgcgctctcccccctcccggcgcccacccccgcggggaatcccccgcgaggggggtctcccccgcgggggcgcgccggcgtctc

SEQ ID NO: 66732 - DNA, 120 bp, Homo sapiens
  misc_feature: 461 for SV(C|O) and 28S
caaggagtctaacacgtgcgcgagtcgggggctcgcacgaaagccgccgtggcgcaatgaaggtgaaggccggcgcgctcgccggccgaggtgggatcccgaggcctctccagtccgccg

SEQ ID NO: 66733 - DNA, 120 bp, Homo sapiens
  misc_feature: 461 for SV(C|O) and 28S
ccggattcggggatctgaacccgactccctttcgatcggccgagggcaacggaggccatcgcccgtcccttcggaacggcgctcgcccatctctcaggaccgactgacccatgttcaact

SEQ ID NO: 66734 - DNA, 120 bp, Homo sapiens
  misc_feature: 461 for SV(C|O) and 28S
atccattttcagggctagttgattcggcaggtgagttgttacacactccttagcggattccgacttccatggccaccgtcctgctgtctatatcaaccaacaccttttctggggtctgat

SEQ ID NO: 66735 - DNA, 120 bp, Homo sapiens
  misc_feature: 460 for SV(C|O) and 28S
gttacacactccttagcggattccgacttccatggccaccgtcctgctgtctatatcaaccaacaccttttctggggtctgatgagcgtcggcatcgggcgccttaacccggcgttcggt

SEQ ID NO: 66736 - DNA, 120 bp, Homo sapiens
  misc_feature: 460 for SV(C|O) and 28S
gtgggaggcccccggcgcccccccggtgtccccgcgaggggcccggggcggggtccgccggccctgcgggccgccggtgaaataccactactctgatcgttttttcactgacccggtgag

SEQ ID NO: 66737 - DNA, 120 bp, Homo sapiens; identical to SEQ ID NO: 51491
  misc_feature: 460 for SV(C|O) and 28S

SEQ ID NO: 66738 - DNA, 120 bp, Homo sapiens; identical to SEQ ID NO: 51616
  misc_feature: 460 for SV(C|O) and 28S

SEQ ID NO: 66739 - DNA, 120 bp, Homo sapiens; identical to SEQ ID NO: 50546
  misc_feature: 460 for SV(C|O) and 28S

SEQ ID NO: 66740 - DNA, 120 bp, Homo sapiens
  misc_feature: 460 for SV(C|O) and 28S
attttcagggctagttgattcggcaggtgagttgttacacactccttagcggattccgacttccatggccaccgtcctgctgtctatatcaaccaacaccttttctggggtctgatgagc

SEQ ID NO: 66741 - DNA, 120 bp, Homo sapiens
  misc_feature: 460 for SV(C|O) and 28S
acactccttagcggattccgacttccatggccaccgtcctgctgtctatatcaaccaacaccttttctggggtctgatgagcgtcggcatcgggcgccttaacccggcgttcggttcatc

SEQ ID NO: 66742 - DNA, 120 bp, Homo sapiens
  misc_feature: 460 for SV(C|O) and 28S
cacggaccaaggagtctaacacgtgcgcgagtcgggggctcgcacgaaagccgccgtggcgcaatgaaggtgaaggccggcgcgctcgccggccgaggtgggatcccgaggcctctccag

SEQ ID NO: 66743 - DNA, 120 bp, Homo sapiens
  misc_feature: 460 for SV(C|O) and 28S
cattttcagggctagttgattcggcaggtgagttgttacacactccttagcggattccgacttccatggccaccgtcctgctgtctatatcaaccaacaccttttctggggtctgatgag

SEQ ID NO: 66744 - DNA, 120 bp, Homo sapiens; identical to SEQ ID NO: 49859
  misc_feature: 460 for SV(C|O) and 28S

SEQ ID NO: 66745 - DNA, 120 bp, Homo sapiens; identical to SEQ ID NO: 50348
  misc_feature: 460 for SV(C|O) and 28S

SEQ ID NO: 66746 - DNA, 120 bp, Homo sapiens
  misc_feature: 460 for SV(C|O) and 28S
aagtgggaggcccccggcgcccccccggtgtccccgcgaggggcccggggcggggtccgccggccctgcgggccgccggtgaaataccactactctgatcgttttttcactgacccggtg

SEQ ID NO: 66747 - DNA, 120 bp, Homo sapiens
  misc_feature: 459 for SV(C|O) and 28S
tgtcctccctgagctcgccttaggacacctgcgttaccgtttgacaggtgtaccgccccagtcaaactccccacctggcactgtccccggagcgggtcgcgcccggccggcgcgcggccg

SEQ ID NO: 66748 - DNA, 120 bp, Homo sapiens
  misc_feature: 459 for SV(C|O) and 28S
tggaatgggttcgccccgagagaggggcccgtgccttggaaagcgtcgcggttccggcggcgtccggtgagctctcgctggcccttgaaaatccgggggagagggtgtaaatctcgcgcc

SEQ ID NO: 66749 - DNA, 120 bp, Homo sapiens; identical to SEQ ID NO: 51536
  misc_feature: 459 for SV(C|O) and 28S

SEQ ID NO: 66750 - DNA, 120 bp, Homo sapiens; identical to SEQ ID NO: 50077
  misc_feature: 459 for SV(C|O) and 28S

SEQ ID NO: 66751 - DNA, 120 bp, Homo sapiens
  misc_feature: 459 for SV(C|O) and 28S
agtgggaggcccccggcgcccccccggtgtccccgcgaggggcccggggcggggtccgccggccctgcgggccgccggtgaaataccactactctgatcgttttttcactgacccggtga

SEQ ID NO: 66752 - DNA, 120 bp, Homo sapiens
  misc_feature: 459 for SV(C|O) and 28S
tatcctgagggaaacttcggagggaaccagctactagatggttcgattagtctttcgcccctatacccaggtcggacgaccgatttgcacgtcaggaccgctacggacctccaccagagt

SEQ ID NO: 66753 - DNA, 120 bp, Homo sapiens
  misc_feature: 459 for SV(C|O) and 28S
gcgggtcggggggcggggcggactgtccccagtgcgccccgggcgggtcgcgccgtcgggcccgggggaggttctctcggggccacgcgcgcgtcccccgaagagggggacggcggagcg

SEQ ID NO: 66754 - DNA, 120 bp, Homo sapiens
  misc_feature: 459 for SV(C|O) and 28S
ctccaccagagtttcctctggcttcgccctgcccaggcatagttcaccatctttcgggtcctaacacgtgcgctcgtgctccacctccccggcgcggcgggcgagacgggccggtggtgc

SEQ ID NO: 66755 - DNA, 120 bp, Homo sapiens
  misc_feature: 459 for SV(C|O) and 28S
cgcgggcccgggtggagccgccgcaggtgcagatcttggtggtagtagcaaatattcaaacgagaactttgaaggccgaagtggagaagggttccatgtgaacagcagttgaacatgggt

SEQ ID NO: 66756 - DNA, 120 bp, Homo sapiens; identical to SEQ ID NO: 50212
  misc_feature: 459 for SV(C|O) and 28S

SEQ ID NO: 66757 - DNA, 120 bp, Homo sapiens
  misc_feature: 459 for SV(C|O) and 28S
ccagcgccatccattttcagggctagttgattcggcaggtgagttgttacacactccttagcggattccgacttccatggccaccgtcctgctgtctatatcaaccaacaccttttctgg

SEQ ID NO: 66758 - DNA, 120 bp, Homo sapiens
  misc_feature: 459 for SV(C|O) and 28S
cacactccttagcggattccgacttccatggccaccgtcctgctgtctatatcaaccaacaccttttctggggtctgatgagcgtcggcatcgggcgccttaacccggcgttcggttcat

SEQ ID NO: 66759 - DNA, 120 bp, Homo sapiens
  misc_feature: 458 for SV(C|O) and 28S
tcgccttaggacacctgcgttaccgtttgacaggtgtaccgccccagtcaaactccccacctggcactgtccccggagcgggtcgcgcccggccggcgcgcggccgggcgcttggcgcca

SEQ ID NO: 66760 - DNA, 120 bp, Homo sapiens
  misc_feature: 458 for SV(C|O) and 28S
gcgcccagccccgcttcgcgccccagcccgaccgacccagcccttagagccaatccttatcccgaagttacggatccggcttgccgacttcccttacctacattgttccaacatgccaga

SEQ ID NO: 66761 - DNA, 120 bp, Homo sapiens; identical to SEQ ID NO: 50631
  misc_feature: 458 for SV(C|O) and 28S

SEQ ID NO: 66762 - DNA, 120 bp, Homo sapiens
  misc_feature: 458 for SV(C|O) and 28S
ggaagtcggaatccgctaaggagtgtgtaacaactcacctgccgaatcaactagccctgaaaatggatggcgctggagcgtcgggcccatacccggccgtcgccggcagtcgagagtgga

SEQ ID NO: 66763 - DNA, 120 bp, Homo sapiens; identical to SEQ ID NO: 50912
  misc_feature: 458 for SV(C|O) and 28S

SEQ ID NO: 66764 - DNA, 120 bp, Homo sapiens
  misc_feature: 458 for SV(C|O) and 28S
ggaaacttcggagggaaccagctactagatggttcgattagtctttcgcccctatacccaggtcggacgaccgatttgcacgtcaggaccgctacggacctccaccagagtttcctctgg

SEQ ID NO: 66765 - DNA, 120 bp, Homo sapiens
  misc_feature: 458 for SV(C|O) and 28S
gcgacgctttccaaggcacgggcccctctctcggggcgaacccattccagggcgccctgcccttcacaaagaaaagagaactctccccggggctcccgccggcttctccgggatcggtcg

SEQ ID NO: 66766 - DNA, 120 bp, Homo sapiens
  misc_feature: 458 for SV(C|O) and 28S
cggctacccacccgacccgtcttgaaacacggaccaaggagtctaacacgtgcgcgagtcgggggctcgcacgaaagccgccgtggcgcaatgaaggtgaaggccggcgcgctcgccggc

SEQ ID NO: 66767 - DNA, 120 bp, Homo sapiens; identical to SEQ ID NO: 51022
  misc_feature: 458 for SV(C|O) and 28S

SEQ ID NO: 66768 - DNA, 120 bp, Homo sapiens
  misc_feature: 458 for SV(C|O) and 28S
gaccaaggagtctaacacgtgcgcgagtcgggggctcgcacgaaagccgccgtggcgcaatgaaggtgaaggccggcgcgctcgccggccgaggtgggatcccgaggcctctccagtccg

SEQ ID NO: 66769 - DNA, 120 bp, Homo sapiens
  misc_feature: 458 for SV(C|O) and 28S
cagccgcggcgcgcgcccagccccgcttcgcgccccagcccgaccgacccagcccttagagccaatccttatcccgaagttacggatccggcttgccgacttcccttacctacattgttc

SEQ ID NO: 66770 - DNA, 120 bp, Homo sapiens
  misc_feature: 458 for SV(C|O) and 28S
ctcgccgaatcccggggccgagggagcgagacccgtcgccgcgctctcccccctcccggcgcccacccccgcggggaatcccccgcgaggggggtctcccccgcgggggcgcgccggcgt

SEQ ID NO: 66771 - DNA, 120 bp, Homo sapiens
  misc_feature: 458 for SV(C|O) and 28S
aacttcggagggaaccagctactagatggttcgattagtctttcgcccctatacccaggtcggacgaccgatttgcacgtcaggaccgctacggacctccaccagagtttcctctggctt

SEQ ID NO: 66772 - DNA, 120 bp, Homo sapiens
  misc_feature: 457 for SV(C|O) and 28S
ttcaatgaagcgcgggtaaacggcgggagtaactatgactctcttaaggtagccaaatgcctcgtcatctaattagtgacgcgcatgaatggatgaacgagattcccactgtccctacct

SEQ ID NO: 66773 - DNA, 120 bp, Homo sapiens
  misc_feature: 457 for SV(C|O) and 28S
tctggcttcgccctgcccaggcatagttcaccatctttcgggtcctaacacgtgcgctcgtgctccacctccccggcgcggcgggcgagacgggccggtggtgcgccctcggcggactgg

SEQ ID NO: 66774 - DNA, 120 bp, Homo sapiens
  misc_feature: 457 for SV(C|O) and 28S
tccattttcagggctagttgattcggcaggtgagttgttacacactccttagcggattccgacttccatggccaccgtcctgctgtctatatcaaccaacaccttttctggggtctgatg

SEQ ID NO: 66775 - DNA, 120 bp, Homo sapiens
  misc_feature: 457 for SV(C|O) and 28S
tcaatgaagcgcgggtaaacggcgggagtaactatgactctcttaaggtagccaaatgcctcgtcatctaattagtgacgcgcatgaatggatgaacgagattcccactgtccctaccta

SEQ ID NO: 66776 - DNA, 120 bp, Homo sapiens; identical to SEQ ID NO: 49351
  misc_feature: 457 for SV(C|O) and 28S

SEQ ID NO: 66777 - DNA, 120 bp, Homo sapiens; identical to SEQ ID NO: 49410
  misc_feature: 457 for SV(C|O) and 28S

SEQ ID NO: 66778 - DNA, 120 bp, Homo sapiens
  misc_feature: 457 for SV(C|O) and 28S
ggcgcgggcccgggtggagccgccgcaggtgcagatcttggtggtagtagcaaatattcaaacgagaactttgaaggccgaagtggagaagggttccatgtgaacagcagttgaacatgg

SEQ ID NO: 66779 - DNA, 120 bp, Homo sapiens; identical to SEQ ID NO: 50556
  misc_feature: 457 for SV(C|O) and 28S

SEQ ID NO: 66780 - DNA, 120 bp, Homo sapiens; identical to SEQ ID NO: 51568
  misc_feature: 457 for SV(C|O) and 28S

SEQ ID NO: 66781 - DNA, 120 bp, Homo sapiens; identical to SEQ ID NO: 50944
  misc_feature: 457 for SV(C|O) and 28S

SEQ ID NO: 66782 - DNA, 120 bp, Homo sapiens
  misc_feature: 457 for SV(C|O) and 28S
gcgcccccgcgggggagacccccctcgcgggggattccccgcgggggtgggcgccgggaggggggagagcgcggcgacgggtctcgctccctcggccccgggattcggcgagtgctgctg

SEQ ID NO: 66783 - DNA, 120 bp, Homo sapiens; identical to SEQ ID NO: 50529
  misc_feature: 457 for SV(C|O) and 28S

SEQ ID NO: 66784 - DNA, 120 bp, Homo sapiens
  misc_feature: 457 for SV(C|O) and 28S
cttcggagggaaccagctactagatggttcgattagtctttcgcccctatacccaggtcggacgaccgatttgcacgtcaggaccgctacggacctccaccagagtttcctctggcttcg

SEQ ID NO: 66785 - DNA, 120 bp, Homo sapiens
  misc_feature: 457 for SV(C|O) and 28S
cgccttaggacacctgcgttaccgtttgacaggtgtaccgccccagtcaaactccccacctggcactgtccccggagcgggtcgcgcccggccggcgcgcggccgggcgcttggcgccag

SEQ ID NO: 66786 - DNA, 120 bp, Homo sapiens
  misc_feature: 457 for SV(C|O) and 28S
ccgcgacgctttccaaggcacgggcccctctctcggggcgaacccattccagggcgccctgcccttcacaaagaaaagagaactctccccggggctcccgccggcttctccgggatcggt

SEQ ID NO: 66787 - DNA, 120 bp, Homo sapiens; identical to SEQ ID NO: 49550
  misc_feature: 457 for SV(C|O) and 28S

SEQ ID NO: 66788 - DNA, 120 bp, Homo sapiens
  misc_feature: 457 for SV(C|O) and 28S
acggaccaaggagtctaacacgtgcgcgagtcgggggctcgcacgaaagccgccgtggcgcaatgaaggtgaaggccggcgcgctcgccggccgaggtgggatcccgaggcctctccagt

SEQ ID NO: 66789 - DNA, 120 bp, Homo sapiens
  misc_feature: 456 for SV(C|O) and 28S
ttcggttcatcccgcagcgccagttctgcttaccaaaagtggcccactaggcactcgcattccacgcccggctccacgccagcgagccgggcttcttacccatttaaagtttgagaatag

SEQ ID NO: 66790 - DNA, 120 bp, Homo sapiens
  misc_feature: 456 for SV(C|O) and 28S
ttaggacacctgcgttaccgtttgacaggtgtaccgccccagtcaaactccccacctggcactgtccccggagcgggtcgcgcccggccggcgcgcggccgggcgcttggcgccagaagc

SEQ ID NO: 66791 - DNA, 120 bp, Homo sapiens; identical to SEQ ID NO: 51521
  misc_feature: 456 for SV(C|O) and 28S

SEQ ID NO: 66792 - DNA, 120 bp, Homo sapiens
  misc_feature: 456 for SV(C|O) and 28S
tccaccagagtttcctctggcttcgccctgcccaggcatagttcaccatctttcgggtcctaacacgtgcgctcgtgctccacctccccggcgcggcgggcgagacgggccggtggtgcg

SEQ ID NO: 66793 - DNA, 120 bp, Homo sapiens; identical to SEQ ID NO: 51576
  misc_feature: 456 for SV(C|O) and 28S

SEQ ID NO: 66794 - DNA, 120 bp, Homo sapiens; identical to SEQ ID NO: 50663
  misc_feature: 456 for SV(C|O) and 28S

SEQ ID NO: 66795 - DNA, 120 bp, Homo sapiens
  misc_feature: 456 for SV(C|O) and 28S
agccgcggcgcgcgcccagccccgcttcgcgccccagcccgaccgacccagcccttagagccaatccttatcccgaagttacggatccggcttgccgacttcccttacctacattgttcc

SEQ ID NO: 66796 - DNA, 120 bp, Homo sapiens
  misc_feature: 456 for SV(C|O) and 28S
gctacccacccgacccgtcttgaaacacggaccaaggagtctaacacgtgcgcgagtcgggggctcgcacgaaagccgccgtggcgcaatgaaggtgaaggccggcgcgctcgccggccg

SEQ ID NO: 66797 - DNA, 120 bp, Homo sapiens
  misc_feature: 456 for SV(C|O) and 28S
gaaacttcggagggaaccagctactagatggttcgattagtctttcgcccctatacccaggtcggacgaccgatttgcacgtcaggaccgctacggacctccaccagagtttcctctggc

SEQ ID NO: 66798 - DNA, 120 bp, Homo sapiens
  misc_feature: 456 for SV(C|O) and 28S
gagacctgctgcggatatgggtacggcccggcgcgagatttacaccctctcccccggattttcaagggccagcgagagctcaccggacgccgccggaaccgcgacgctttccaaggcacg

SEQ ID NO: 66799 - DNA, 120 bp, Homo sapiens
  misc_feature: 456 for SV(C|O) and 28S
gaatgcgagtgcctagtgggccacttttggtaagcagaactggcgctgcgggatgaaccgaacgccgggttaaggcgcccgatgccgacgctcatcagaccccagaaaaggtgttggttg

SEQ ID NO: 66800 - DNA, 120 bp, Homo sapiens
  misc_feature: 456 for SV(C|O) and 28S
ctatcctgagggaaacttcggagggaaccagctactagatggttcgattagtctttcgcccctatacccaggtcggacgaccgatttgcacgtcaggaccgctacggacctccaccagag

SEQ ID NO: 66801 - DNA, 120 bp, Homo sapiens
  misc_feature: 456 for SV(C|O) and 28S
ctcgggatcccacctcggccggcgagcgcgccggccttcaccttcattgcgccacggcggctttcgtgcgagcccccgactcgcgcacgtgttagactccttggtccgtgtttcaagacg

SEQ ID NO: 66802 - DNA, 120 bp, Homo sapiens
  misc_feature: 456 for SV(C|O) and 28S
cgcgcccccgcgggggagacccccctcgcgggggattccccgcgggggtgggcgccgggaggggggagagcgcggcgacgggtctcgctccctcggccccgggattcggcgagtgctgct

SEQ ID NO: 66803 - DNA, 120 bp, Homo sapiens
  misc_feature: 456 for SV(C|O) and 28S
accgcgacgctttccaaggcacgggcccctctctcggggcgaacccattccagggcgccctgcccttcacaaagaaaagagaactctccccggggctcccgccggcttctccgggatcgg

SEQ ID NO: 66804 - DNA, 120 bp, Homo sapiens
  misc_feature: 456 for SV(C|O) and 28S
ccacccgacccgtcttgaaacacggaccaaggagtctaacacgtgcgcgagtcgggggctcgcacgaaagccgccgtggcgcaatgaaggtgaaggccggcgcgctcgccggccgaggtg

SEQ ID NO: 66805 - DNA, 120 bp, Homo sapiens
  misc_feature: 455 for SV(C|O) and 28S
gcgcgcccagccccgcttcgcgccccagcccgaccgacccagcccttagagccaatccttatcccgaagttacggatccggcttgccgacttcccttacctacattgttccaacatgcca

SEQ ID NO: 66806 - DNA, 120 bp, Homo sapiens; identical to SEQ ID NO: 51057
  misc_feature: 455 for SV(C|O) and 28S

SEQ ID NO: 66807 - DNA, 120 bp, Homo sapiens
  misc_feature: 455 for SV(C|O) and 28S
tcggttcatcccgcagcgccagttctgcttaccaaaagtggcccactaggcactcgcattccacgcccggctccacgccagcgagccgggcttcttacccatttaaagtttgagaatagg

SEQ ID NO: 66808 - DNA, 120 bp, Homo sapiens
  misc_feature: 455 for SV(C|O) and 28S
tcgccgaatcccggggccgagggagcgagacccgtcgccgcgctctcccccctcccggcgcccacccccgcggggaatcccccgcgaggggggtctcccccgcgggggcgcgccggcgtc

SEQ ID NO: 66809 - DNA, 120 bp, Homo sapiens; identical to SEQ ID NO: 49205
  misc_feature: 455 for SV(C|O) and 28S

SEQ ID NO: 66810 - DNA, 120 bp, Homo sapiens; identical to SEQ ID NO: 50587
  misc_feature: 455 for SV(C|O) and 28S

SEQ ID NO: 66811 - DNA, 120 bp, Homo sapiens
  misc_feature: 455 for SV(C|O) and 28S
aacacggaccaaggagtctaacacgtgcgcgagtcgggggctcgcacgaaagccgccgtggcgcaatgaaggtgaaggccggcgcgctcgccggccgaggtgggatcccgaggcctctcc

SEQ ID NO: 66812 - DNA, 120 bp, Homo sapiens
  misc_feature: 455 for SV(C|O) and 28S
cgacgctttccaaggcacgggcccctctctcggggcgaacccattccagggcgccctgcccttcacaaagaaaagagaactctccccggggctcccgccggcttctccgggatcggtcgc

SEQ ID NO: 66813 - DNA, 120 bp, Homo sapiens
  misc_feature: 455 for SV(C|O) and 28S
agcgaaaccacagccaagggaacgggcttggcggaatcagcggggaaagaagaccctgttgagcttgactctagtctggcacggtgaagagacatgagaggtgtagaataagtgggaggc

SEQ ID NO: 66814 - DNA, 120 bp, Homo sapiens
  misc_feature: 455 for SV(C|O) and 28S
ccccgagagaggggcccgtgccttggaaagcgtcgcggttccggcggcgtccggtgagctctcgctggcccttgaaaatccgggggagagggtgtaaatctcgcgccgggccgtacccat

SEQ ID NO: 66815 - DNA, 120 bp, Homo sapiens; identical to SEQ ID NO: 50539
  misc_feature: 455 for SV(C|O) and 28S

SEQ ID NO: 66816 - DNA, 120 bp, Homo sapiens; identical to SEQ ID NO: 49479
  misc_feature: 455 for SV(C|O) and 28S

SEQ ID NO: 66817 - DNA, 120 bp, Homo sapiens
  misc_feature: 455 for SV(C|O) and 28S
aaacttcggagggaaccagctactagatggttcgattagtctttcgcccctatacccaggtcggacgaccgatttgcacgtcaggaccgctacggacctccaccagagtttcctctggct

SEQ ID NO: 66818 - DNA, 120 bp, Homo sapiens; identical to SEQ ID NO: 50772
  misc_feature: 455 for SV(C|O) and 28S

SEQ ID NO: 66819 - DNA, 120 bp, Homo sapiens
  misc_feature: 454 for SV(C|O) and 28S
ccgcggcgcgcgcccagccccgcttcgcgccccagcccgaccgacccagcccttagagccaatccttatcccgaagttacggatccggcttgccgacttcccttacctacattgttccaa

SEQ ID NO: 66820 - DNA, 120 bp, Homo sapiens; identical to SEQ ID NO: 49300
  misc_feature: 454 for SV(C|O) and 28S

SEQ ID NO: 66821 - DNA, 120 bp, Homo sapiens; identical to SEQ ID NO: 51622
  misc_feature: 454 for SV(C|O) and 28S

SEQ ID NO: 66822 - DNA, 120 bp, Homo sapiens; identical to SEQ ID NO: 51087
  misc_feature: 454 for SV(C|O) and 28S

SEQ ID NO: 66823 - DNA, 120 bp, Homo sapiens
  misc_feature: 454 for SV(C|O) and 28S
cactaggcactcgcattccacgcccggctccacgccagcgagccgggcttcttacccatttaaagtttgagaataggttgagatcgtttcggccccaagacctctaatcattcgctttac

SEQ ID NO: 66824 - DNA, 120 bp, Homo sapiens
  misc_feature: 454 for SV(C|O) and 28S
gcgccatccattttcagggctagttgattcggcaggtgagttgttacacactccttagcggattccgacttccatggccaccgtcctgctgtctatatcaaccaacaccttttctggggt

SEQ ID NO: 66825 - DNA, 120 bp, Homo sapiens; identical to SEQ ID NO: 50363
  misc_feature: 454 for SV(C|O) and 28S

SEQ ID NO: 66826 - DNA, 120 bp, Homo sapiens
  misc_feature: 454 for SV(C|O) and 28S
ctctggcttcgccctgcccaggcatagttcaccatctttcgggtcctaacacgtgcgctcgtgctccacctccccggcgcggcgggcgagacgggccggtggtgcgccctcggcggactg

SEQ ID NO: 66827 - DNA, 120 bp, Homo sapiens; identical to SEQ ID NO: 51078
  misc_feature: 454 for SV(C|O) and 28S

SEQ ID NO: 66828 - DNA, 120 bp, Homo sapiens
  misc_feature: 453 for SV(C|O) and 28S
gccgcggcgcgcgcccagccccgcttcgcgccccagcccgaccgacccagcccttagagccaatccttatcccgaagttacggatccggcttgccgacttcccttacctacattgttcca

SEQ ID NO: 66829 - DNA, 120 bp, Homo sapiens
  misc_feature: 453 for SV(C|O) and 28S
ggtgtagaataagtgggaggcccccggcgcccccccggtgtccccgcgaggggcccggggcggggtccgccggccctgcgggccgccggtgaaataccactactctgatcgttttttcac

SEQ ID NO: 66830 - DNA, 120 bp, Homo sapiens; identical to SEQ ID NO: 49628
  misc_feature: 453 for SV(C|O) and 28S

SEQ ID NO: 66831 - DNA, 120 bp, Homo sapiens; identical to SEQ ID NO: 51059
  misc_feature: 453 for SV(C|O) and 28S

SEQ ID NO: 66832 - DNA, 120 bp, Homo sapiens
  misc_feature: 453 for SV(C|O) and 28S
agacctgctgcggatatgggtacggcccggcgcgagatttacaccctctcccccggattttcaagggccagcgagagctcaccggacgccgccggaaccgcgacgctttccaaggcacgg

SEQ ID NO: 66833 - DNA, 120 bp, Homo sapiens
  misc_feature: 453 for SV(C|O) and 28S
cccagtgctctgaatgtcaaagtgaagaaattcaatgaagcgcgggtaaacggcgggagtaactatgactctcttaaggtagccaaatgcctcgtcatctaattagtgacgcgcatgaat

SEQ ID NO: 66834 - DNA, 120 bp, Homo sapiens
  misc_feature: 453 for SV(C|O) and 28S
catggaagtcggaatccgctaaggagtgtgtaacaactcacctgccgaatcaactagccctgaaaatggatggcgctggagcgtcgggcccatacccggccgtcgccggcagtcgagagt

SEQ ID NO: 66835 - DNA, 120 bp, Homo sapiens; identical to SEQ ID NO: 49458
  misc_feature: 453 for SV(C|O) and 28S

SEQ ID NO: 66836 - DNA, 120 bp, Homo sapiens; identical to SEQ ID NO: 50477
  misc_feature: 453 for SV(C|O) and 28S

SEQ ID NO: 66837 - DNA, 120 bp, Homo sapiens; identical to SEQ ID NO: 51645
  misc_feature: 452 for SV(C|O) and 28S

SEQ ID NO: 66838 - DNA, 120 bp, Homo sapiens
  misc_feature: 452 for SV(C|O) and 28S
cgggtcggggggcggggcggactgtccccagtgcgccccgggcgggtcgcgccgtcgggcccgggggaggttctctcggggccacgcgcgcgtcccccgaagagggggacggcggagcga

SEQ ID NO: 66839 - DNA, 120 bp, Homo sapiens; identical to SEQ ID NO: 50519
  misc_feature: 452 for SV(C|O) and 28S

SEQ ID NO: 66840 - DNA, 120 bp, Homo sapiens
  misc_feature: 452 for SV(C|O) and 28S
ccggcgttcggttcatcccgcagcgccagttctgcttaccaaaagtggcccactaggcactcgcattccacgcccggctccacgccagcgagccgggcttcttacccatttaaagtttga

SEQ ID NO: 66841 - DNA, 120 bp, Homo sapiens; identical to SEQ ID NO: 49409
  misc_feature: 452 for SV(C|O) and 28S

SEQ ID NO: 66842 - DNA, 120 bp, Homo sapiens
  misc_feature: 452 for SV(C|O) and 28S
attcaatgaagcgcgggtaaacggcgggagtaactatgactctcttaaggtagccaaatgcctcgtcatctaattagtgacgcgcatgaatggatgaacgagattcccactgtccctacc

SEQ ID NO: 66843 - DNA, 120 bp, Homo sapiens
  misc_feature: 452 for SV(C|O) and 28S
ggggcggggcggactgtccccagtgcgccccgggcgggtcgcgccgtcgggcccgggggaggttctctcggggccacgcgcgcgtcccccgaagagggggacggcggagcgagcgcacgg

SEQ ID NO: 66844 - DNA, 120 bp, Homo sapiens
  misc_feature: 452 for SV(C|O) and 28S
ccaaggagtctaacacgtgcgcgagtcgggggctcgcacgaaagccgccgtggcgcaatgaaggtgaaggccggcgcgctcgccggccgaggtgggatcccgaggcctctccagtccgcc

SEQ ID NO: 66845 - DNA, 120 bp, Homo sapiens
  misc_feature: 452 for SV(C|O) and 28S
gcgggcccgggtggagccgccgcaggtgcagatcttggtggtagtagcaaatattcaaacgagaactttgaaggccgaagtggagaagggttccatgtgaacagcagttgaacatgggtc

SEQ ID NO: 66846 - DNA, 120 bp, Homo sapiens; identical to SEQ ID NO: 51458
  misc_feature: 452 for SV(C|O) and 28S

SEQ ID NO: 66847 - DNA, 120 bp, Homo sapiens
  misc_feature: 451 for SV(C|O) and 28S
gcccagtgctctgaatgtcaaagtgaagaaattcaatgaagcgcgggtaaacggcgggagtaactatgactctcttaaggtagccaaatgcctcgtcatctaattagtgacgcgcatgaa

SEQ ID NO: 66848 - DNA, 120 bp, Homo sapiens; identical to SEQ ID NO: 51035
  misc_feature: 451 for SV(C|O) and 28S

SEQ ID NO: 66849 - DNA, 120 bp, Homo sapiens; identical to SEQ ID NO: 50369
  misc_feature: 451 for SV(C|O) and 28S

SEQ ID NO: 66850 - DNA, 120 bp, Homo sapiens
  misc_feature: 451 for SV(C|O) and 28S
gttcggttcatcccgcagcgccagttctgcttaccaaaagtggcccactaggcactcgcattccacgcccggctccacgccagcgagccgggcttcttacccatttaaagtttgagaata

SEQ ID NO: 66851 - DNA, 120 bp, Homo sapiens; identical to SEQ ID NO: 51588
  misc_feature: 451 for SV(C|O) and 28S

SEQ ID NO: 66852 - DNA, 120 bp, Homo sapiens
  misc_feature: 451 for SV(C|O) and 28S
ccactaggcactcgcattccacgcccggctccacgccagcgagccgggcttcttacccatttaaagtttgagaataggttgagatcgtttcggccccaagacctctaatcattcgcttta

SEQ ID NO: 66853 - DNA, 120 bp, Homo sapiens
  misc_feature: 451 for SV(C|O) and 28S
gtgtagaataagtgggaggcccccggcgcccccccggtgtccccgcgaggggcccggggcggggtccgccggccctgcgggccgccggtgaaataccactactctgatcgttttttcact

SEQ ID NO: 66854 - DNA, 120 bp, Homo sapiens
  misc_feature: 451 for SV(C|O) and 28S
gggtcggggggcggggcggactgtccccagtgcgccccgggcgggtcgcgccgtcgggcccgggggaggttctctcggggccacgcgcgcgtcccccgaagagggggacggcggagcgag

SEQ ID NO: 66855 - DNA, 120 bp, Homo sapiens
  misc_feature: 451 for SV(C|O) and 28S
gaataagtgggaggcccccggcgcccccccggtgtccccgcgaggggcccggggcggggtccgccggccctgcgggccgccggtgaaataccactactctgatcgttttttcactgaccc

SEQ ID NO: 66856 - DNA, 120 bp, Homo sapiens; identical to SEQ ID NO: 49679
  misc_feature: 451 for SV(C|O) and 28S

SEQ ID NO: 66857 - DNA, 120 bp, Homo sapiens; identical to SEQ ID NO: 50978
  misc_feature: 451 for SV(C|O) and 28S

SEQ ID NO: 66858 - DNA, 120 bp, Homo sapiens; identical to SEQ ID NO: 50105
  misc_feature: 451 for SV(C|O) and 28S

SEQ ID NO: 66859 - DNA, 120 bp, Homo sapiens
  misc_feature: 451 for SV(C|O) and 28S
agcgccatccattttcagggctagttgattcggcaggtgagttgttacacactccttagcggattccgacttccatggccaccgtcctgctgtctatatcaaccaacaccttttctgggg

SEQ ID NO: 66860 - DNA, 120 bp, Homo sapiens; identical to SEQ ID NO: 51586
  misc_feature: 450 for SV(C|O) and 28S

SEQ ID NO: 66861 - DNA, 120 bp, Homo sapiens
  misc_feature: 450 for SV(C|O) and 28S
tgggaggcccccggcgcccccccggtgtccccgcgaggggcccggggcggggtccgccggccctgcgggccgccggtgaaataccactactctgatcgttttttcactgacccggtgagg

SEQ ID NO: 66862 - DNA, 120 bp, Homo sapiens; identical to SEQ ID NO: 50541
  misc_feature: 450 for SV(C|O) and 28S

SEQ ID NO: 66863 - DNA, 120 bp, Homo sapiens
  misc_feature: 450 for SV(C|O) and 28S
gggatcccacctcggccggcgagcgcgccggccttcaccttcattgcgccacggcggctttcgtgcgagcccccgactcgcgcacgtgttagactccttggtccgtgtttcaagacgggt

SEQ ID NO: 66864 - DNA, 120 bp, Homo sapiens; identical to SEQ ID NO: 50111
  misc_feature: 450 for SV(C|O) and 28S

SEQ ID NO: 66865 - DNA, 120 bp, Homo sapiens; identical to SEQ ID NO: 51610
  misc_feature: 450 for SV(C|O) and 28S

SEQ ID NO: 66866 - DNA, 120 bp, Homo sapiens
  misc_feature: 450 for SV(C|O) and 28S
agctatcctgagggaaacttcggagggaaccagctactagatggttcgattagtctttcgcccctatacccaggtcggacgaccgatttgcacgtcaggaccgctacggacctccaccag

SEQ ID NO: 66867 - DNA, 120 bp, Homo sapiens
  misc_feature: 450 for SV(C|O) and 28S
cgccgaatcccggggccgagggagcgagacccgtcgccgcgctctcccccctcccggcgcccacccccgcggggaatcccccgcgaggggggtctcccccgcgggggcgcgccggcgtct

SEQ ID NO: 66868 - DNA, 120 bp, Homo sapiens
  misc_feature: 450 for SV(C|O) and 28S
cctgctgtctatatcaaccaacaccttttctggggtctgatgagcgtcggcatcgggcgccttaacccggcgttcggttcatcccgcagcgccagttctgcttaccaaaagtggcccact

SEQ ID NO: 66869 - DNA, 120 bp, Homo sapiens
  misc_feature: 449 for SV(C|O) and 28S
tgtagaataagtgggaggcccccggcgcccccccggtgtccccgcgaggggcccggggcggggtccgccggccctgcgggccgccggtgaaataccactactctgatcgttttttcactg

SEQ ID NO: 66870 - DNA, 120 bp, Homo sapiens; identical to SEQ ID NO: 49807
  misc_feature: 449 for SV(C|O) and 28S

SEQ ID NO: 66871 - DNA, 120 bp, Homo sapiens
  misc_feature: 449 for SV(C|O) and 28S
tcgggatcccacctcggccggcgagcgcgccggccttcaccttcattgcgccacggcggctttcgtgcgagcccccgactcgcgcacgtgttagactccttggtccgtgtttcaagacgg

SEQ ID NO: 66872 - DNA, 120 bp, Homo sapiens
  misc_feature: 449 for SV(C|O) and 28S
taggcactcgcattccacgcccggctccacgccagcgagccgggcttcttacccatttaaagtttgagaataggttgagatcgtttcggccccaagacctctaatcattcgctttaccgg

SEQ ID NO: 66873 - DNA, 120 bp, Homo sapiens; identical to SEQ ID NO: 50272
  misc_feature: 449 for SV(C|O) and 28S

SEQ ID NO: 66874 - DNA, 120 bp, Homo sapiens
  misc_feature: 449 for SV(C|O) and 28S
cagcgccatccattttcagggctagttgattcggcaggtgagttgttacacactccttagcggattccgacttccatggccaccgtcctgctgtctatatcaaccaacaccttttctggg

SEQ ID NO: 66875 - DNA, 120 bp, Homo sapiens
  misc_feature: 449 for SV(C|O) and 28S
ccatccattttcagggctagttgattcggcaggtgagttgttacacactccttagcggattccgacttccatggccaccgtcctgctgtctatatcaaccaacaccttttctggggtctg

SEQ ID NO: 66876 - DNA, 120 bp, Homo sapiens
  misc_feature: 449 for SV(C|O) and 28S
atggaagtcggaatccgctaaggagtgtgtaacaactcacctgccgaatcaactagccctgaaaatggatggcgctggagcgtcgggcccatacccggccgtcgccggcagtcgagagtg

SEQ ID NO: 66877 - DNA, 120 bp, Homo sapiens
  misc_feature: 448 for SV(C|O) and 28S
ctccggattcggggatctgaacccgactccctttcgatcggccgagggcaacggaggccatcgcccgtcccttcggaacggcgctcgcccatctctcaggaccgactgacccatgttcaa

SEQ ID NO: 66878 - DNA, 120 bp, Homo sapiens; identical to SEQ ID NO: 50616
  misc_feature: 448 for SV(C|O) and 28S

SEQ ID NO: 66879 - DNA, 120 bp, Homo sapiens
  misc_feature: 448 for SV(C|O) and 28S
tccggattcggggatctgaacccgactccctttcgatcggccgagggcaacggaggccatcgcccgtcccttcggaacggcgctcgcccatctctcaggaccgactgacccatgttcaac

SEQ ID NO: 66880 - DNA, 120 bp, Homo sapiens
  misc_feature: 448 for SV(C|O) and 28S
aattcaatgaagcgcgggtaaacggcgggagtaactatgactctcttaaggtagccaaatgcctcgtcatctaattagtgacgcgcatgaatggatgaacgagattcccactgtccctac

SEQ ID NO: 66881 - DNA, 120 bp, Homo sapiens
  misc_feature: 448 for SV(C|O) and 28S
ccccgggcgggtcgcgccgtcgggcccgggggaggttctctcggggccacgcgcgcgtcccccgaagagggggacggcggagcgagcgcacggggtcggcggcgacgtcggctacccacc

SEQ ID NO: 66882 - DNA, 120 bp, Homo sapiens; identical to SEQ ID NO: 49554
  misc_feature: 448 for SV(C|O) and 28S

SEQ ID NO: 66883 - DNA, 120 bp, Homo sapiens; identical to SEQ ID NO: 49720
  misc_feature: 448 for SV(C|O) and 28S

SEQ ID NO: 66884 - DNA, 120 bp, Homo sapiens
  misc_feature: 448 for SV(C|O) and 28S
ggaatgggttcgccccgagagaggggcccgtgccttggaaagcgtcgcggttccggcggcgtccggtgagctctcgctggcccttgaaaatccgggggagagggtgtaaatctcgcgccg

SEQ ID NO: 66885 - DNA, 120 bp, Homo sapiens
  misc_feature: 448 for SV(C|O) and 28S
ccacctcggccggcgagcgcgccggccttcaccttcattgcgccacggcggctttcgtgcgagcccccgactcgcgcacgtgttagactccttggtccgtgtttcaagacgggtcgggtg

SEQ ID NO: 66886 - DNA, 120 bp, Homo sapiens; identical to SEQ ID NO: 50780
  misc_feature: 448 for SV(C|O) and 28S

SEQ ID NO: 66887 - DNA, 120 bp, Homo sapiens; identical to SEQ ID NO: 51593
  misc_feature: 448 for SV(C|O) and 28S

SEQ ID NO: 66888 - DNA, 120 bp, Homo sapiens; identical to SEQ ID NO: 49616
  misc_feature: 447 for SV(C|O) and 28S

SEQ ID NO: 66889 - DNA, 120 bp, Homo sapiens
  misc_feature: 447 for SV(C|O) and 28S
catccattttcagggctagttgattcggcaggtgagttgttacacactccttagcggattccgacttccatggccaccgtcctgctgtctatatcaaccaacaccttttctggggtctga

SEQ ID NO: 66890 - DNA, 120 bp, Homo sapiens; identical to SEQ ID NO: 50749
  misc_feature: 447 for SV(C|O) and 28S

SEQ ID NO: 66891 - DNA, 120 bp, Homo sapiens; identical to SEQ ID NO: 50782
  misc_feature: 447 for SV(C|O) and 28S

SEQ ID NO: 66892 - DNA, 120 bp, Homo sapiens
  misc_feature: 447 for SV(C|O) and 28S
gggaggcccccggcgcccccccggtgtccccgcgaggggcccggggcggggtccgccggccctgcgggccgccggtgaaataccactactctgatcgttttttcactgacccggtgaggc

SEQ ID NO: 66893 - DNA, 120 bp, Homo sapiens
  misc_feature: 447 for SV(C|O) and 28S
ggatcccacctcggccggcgagcgcgccggccttcaccttcattgcgccacggcggctttcgtgcgagcccccgactcgcgcacgtgttagactccttggtccgtgtttcaagacgggtc

SEQ ID NO: 66894 - DNA, 120 bp, Homo sapiens
  misc_feature: 447 for SV(C|O) and 28S
accaaggagtctaacacgtgcgcgagtcgggggctcgcacgaaagccgccgtggcgcaatgaaggtgaaggccggcgcgctcgccggccgaggtgggatcccgaggcctctccagtccgc

SEQ ID NO: 66895 - DNA, 120 bp, Homo sapiens; identical to SEQ ID NO: 51617
  misc_feature: 447 for SV(C|O) and 28S

SEQ ID NO: 66896 - DNA, 120 bp, Homo sapiens
  misc_feature: 447 for SV(C|O) and 28S
cgcgcccagccccgcttcgcgccccagcccgaccgacccagcccttagagccaatccttatcccgaagttacggatccggcttgccgacttcccttacctacattgttccaacatgccag

SEQ ID NO: 66897 - DNA, 120 bp, Homo sapiens
  misc_feature: 447 for SV(C|O) and 28S
cgggatcccacctcggccggcgagcgcgccggccttcaccttcattgcgccacggcggctttcgtgcgagcccccgactcgcgcacgtgttagactccttggtccgtgtttcaagacggg

SEQ ID NO: 66898 - DNA, 120 bp, Homo sapiens
  misc_feature: 446 for SV(C|O) and 28S
gctatcctgagggaaacttcggagggaaccagctactagatggttcgattagtctttcgcccctatacccaggtcggacgaccgatttgcacgtcaggaccgctacggacctccaccaga

SEQ ID NO: 66899 - DNA, 120 bp, Homo sapiens
  misc_feature: 446 for SV(C|O) and 28S
tcctgctgtctatatcaaccaacaccttttctggggtctgatgagcgtcggcatcgggcgccttaacccggcgttcggttcatcccgcagcgccagttctgcttaccaaaagtggcccac

SEQ ID NO: 66900 - DNA, 120 bp, Homo sapiens
  misc_feature: 446 for SV(C|O) and 28S
taggacacctgcgttaccgtttgacaggtgtaccgccccagtcaaactccccacctggcactgtccccggagcgggtcgcgcccggccggcgcgcggccgggcgcttggcgccagaagcg

SEQ ID NO: 66901 - DNA, 120 bp, Homo sapiens
  misc_feature: 446 for SV(C|O) and 28S
agaataagtgggaggcccccggcgcccccccggtgtccccgcgaggggcccggggcggggtccgccggccctgcgggccgccggtgaaataccactactctgatcgttttttcactgacc

SEQ ID NO: 66902 - DNA, 120 bp, Homo sapiens
  misc_feature: 446 for SV(C|O) and 28S
actaggcactcgcattccacgcccggctccacgccagcgagccgggcttcttacccatttaaagtttgagaataggttgagatcgtttcggccccaagacctctaatcattcgctttacc

SEQ ID NO: 66903 - DNA, 120 bp, Homo sapiens
  misc_feature: 446 for SV(C|O) and 28S
gaaaccacagccaagggaacgggcttggcggaatcagcggggaaagaagaccctgttgagcttgactctagtctggcacggtgaagagacatgagaggtgtagaataagtgggaggcccc

SEQ ID NO: 66904 - DNA, 120 bp, Homo sapiens; identical to SEQ ID NO: 51655
  misc_feature: 446 for SV(C|O) and 28S

SEQ ID NO: 66905 - DNA, 120 bp, Homo sapiens; identical to SEQ ID NO: 51089
  misc_feature: 446 for SV(C|O) and 28S

SEQ ID NO: 66906 - DNA, 120 bp, Homo sapiens; identical to SEQ ID NO: 50919
  misc_feature: 446 for SV(C|O) and 28S

SEQ ID NO: 66907 - DNA, 120 bp, Homo sapiens; identical to SEQ ID NO: 50708
  misc_feature: 446 for SV(C|O) and 28S

SEQ ID NO: 66908 - DNA, 120 bp, Homo sapiens; identical to SEQ ID NO: 49279
  misc_feature: 446 for SV(C|O) and 28S

SEQ ID NO: 66909 - DNA, 120 bp, Homo sapiens; identical to SEQ ID NO: 51068
  misc_feature: 445 for SV(C|O) and 28S

SEQ ID NO: 66910 - DNA, 120 bp, Homo sapiens; identical to SEQ ID NO: 51603
  misc_feature: 445 for SV(C|O) and 28S

SEQ ID NO: 66911 - DNA, 120 bp, Homo sapiens
  misc_feature: 445 for SV(C|O) and 28S
aatgtcaaagtgaagaaattcaatgaagcgcgggtaaacggcgggagtaactatgactctcttaaggtagccaaatgcctcgtcatctaattagtgacgcgcatgaatggatgaacgaga

SEQ ID NO: 66912 - DNA, 120 bp, Homo sapiens; identical to SEQ ID NO: 51109
  misc_feature: 445 for SV(C|O) and 28S

SEQ ID NO: 66913 - DNA, 120 bp, Homo sapiens
  misc_feature: 445 for SV(C|O) and 28S
cgcggcgcgcgcccagccccgcttcgcgccccagcccgaccgacccagcccttagagccaatccttatcccgaagttacggatccggcttgccgacttcccttacctacattgttccaac

SEQ ID NO: 66914 - DNA, 120 bp, Homo sapiens; identical to SEQ ID NO: 50609
  misc_feature: 445 for SV(C|O) and 28S

SEQ ID NO: 66915 - DNA, 120 bp, Homo sapiens
  misc_feature: 445 for SV(C|O) and 28S
gggcggggcggactgtccccagtgcgccccgggcgggtcgcgccgtcgggcccgggggaggttctctcggggccacgcgcgcgtcccccgaagagggggacggcggagcgagcgcacggg

SEQ ID NO: 66916 - DNA, 120 bp, Homo sapiens
  misc_feature: 445 for SV(C|O) and 28S
ggccatggaagtcggaatccgctaaggagtgtgtaacaactcacctgccgaatcaactagccctgaaaatggatggcgctggagcgtcgggcccatacccggccgtcgccggcagtcgag

SEQ ID NO: 66917 - DNA, 120 bp, Homo sapiens
  misc_feature: 445 for SV(C|O) and 28S
ggaggcccccggcgcccccccggtgtccccgcgaggggcccggggcggggtccgccggccctgcgggccgccggtgaaataccactactctgatcgttttttcactgacccggtgaggcg

SEQ ID NO: 66918 - DNA, 120 bp, Homo sapiens; identical to SEQ ID NO: 51033
  misc_feature: 445 for SV(C|O) and 28S

SEQ ID NO: 66919 - DNA, 120 bp, Homo sapiens
  misc_feature: 445 for SV(C|O) and 28S
gaatgggttcgccccgagagaggggcccgtgccttggaaagcgtcgcggttccggcggcgtccggtgagctctcgctggcccttgaaaatccgggggagagggtgtaaatctcgcgccgg

SEQ ID NO: 66920 - DNA, 120 bp, Homo sapiens
  misc_feature: 445 for SV(C|O) and 28S
ctaggcactcgcattccacgcccggctccacgccagcgagccgggcttcttacccatttaaagtttgagaataggttgagatcgtttcggccccaagacctctaatcattcgctttaccg

SEQ ID NO: 66921 - DNA, 120 bp, Homo sapiens
  misc_feature: 445 for SV(C|O) and 28S
atcccacctcggccggcgagcgcgccggccttcaccttcattgcgccacggcggctttcgtgcgagcccccgactcgcgcacgtgttagactccttggtccgtgtttcaagacgggtcgg

SEQ ID NO: 66922 - DNA, 120 bp, Homo sapiens
  misc_feature: 445 for SV(C|O) and 28S
aatgggttcgccccgagagaggggcccgtgccttggaaagcgtcgcggttccggcggcgtccggtgagctctcgctggcccttgaaaatccgggggagagggtgtaaatctcgcgccggg

SEQ ID NO: 66923 - DNA, 120 bp, Homo sapiens
  misc_feature: 444 for SV(C|O) and 28S
gccccgagagaggggcccgtgccttggaaagcgtcgcggttccggcggcgtccggtgagctctcgctggcccttgaaaatccgggggagagggtgtaaatctcgcgccgggccgtaccca

SEQ ID NO: 66924 - DNA, 120 bp, Homo sapiens; identical to SEQ ID NO: 51646
  misc_feature: 444 for SV(C|O) and 28S

SEQ ID NO: 66925 - DNA, 120 bp, Homo sapiens; identical to SEQ ID NO: 51615
  misc_feature: 444 for SV(C|O) and 28S

SEQ ID NO: 66926 - DNA, 120 bp, Homo sapiens
  misc_feature: 444 for SV(C|O) and 28S
actccggattcggggatctgaacccgactccctttcgatcggccgagggcaacggaggccatcgcccgtcccttcggaacggcgctcgcccatctctcaggaccgactgacccatgttca

SEQ ID NO: 66927 - DNA, 120 bp, Homo sapiens
  misc_feature: 444 for SV(C|O) and 28S
gcgaaaccacagccaagggaacgggcttggcggaatcagcggggaaagaagaccctgttgagcttgactctagtctggcacggtgaagagacatgagaggtgtagaataagtgggaggcc

SEQ ID NO: 66928 - DNA, 120 bp, Homo sapiens
  misc_feature: 444 for SV(C|O) and 28S
cactccttagcggattccgacttccatggccaccgtcctgctgtctatatcaaccaacaccttttctggggtctgatgagcgtcggcatcgggcgccttaacccggcgttcggttcatcc

SEQ ID NO: 66929 - DNA, 120 bp, Homo sapiens
  misc_feature: 444 for SV(C|O) and 28S
gcgcgcccccgcgggggagacccccctcgcgggggattccccgcgggggtgggcgccgggaggggggagagcgcggcgacgggtctcgctccctcggccccgggattcggcgagtgctgc

SEQ ID NO: 66930 - DNA, 120 bp, Homo sapiens
  misc_feature: 444 for SV(C|O) and 28S
gaggcccccggcgcccccccggtgtccccgcgaggggcccggggcggggtccgccggccctgcgggccgccggtgaaataccactactctgatcgttttttcactgacccggtgaggcgg

SEQ ID NO: 66931 - DNA, 120 bp, Homo sapiens
  misc_feature: 444 for SV(C|O) and 28S
ccatggaagtcggaatccgctaaggagtgtgtaacaactcacctgccgaatcaactagccctgaaaatggatggcgctggagcgtcgggcccatacccggccgtcgccggcagtcgagag

SEQ ID NO: 66932 - DNA, 120 bp, Homo sapiens; identical to SEQ ID NO: 49192
  misc_feature: 444 for SV(C|O) and 28S

SEQ ID NO: 66933 - DNA, 120 bp, Homo sapiens
  misc_feature: 443 for SV(C|O) and 28S
cagctatcctgagggaaacttcggagggaaccagctactagatggttcgattagtctttcgcccctatacccaggtcggacgaccgatttgcacgtcaggaccgctacggacctccacca

SEQ ID NO: 66934 - DNA, 120 bp, Homo sapiens; identical to SEQ ID NO: 49436
  misc_feature: 443 for SV(C|O) and 28S

SEQ ID NO: 66935 - DNA, 120 bp, Homo sapiens
  misc_feature: 443 for SV(C|O) and 28S
tcccacctcggccggcgagcgcgccggccttcaccttcattgcgccacggcggctttcgtgcgagcccccgactcgcgcacgtgttagactccttggtccgtgtttcaagacgggtcggg

SEQ ID NO: 66936 - DNA, 120 bp, Homo sapiens; identical to SEQ ID NO: 49662
  misc_feature: 443 for SV(C|O) and 28S

SEQ ID NO: 66937 - DNA, 120 bp, Homo sapiens
  misc_feature: 443 for SV(C|O) and 28S
tagaataagtgggaggcccccggcgcccccccggtgtccccgcgaggggcccggggcggggtccgccggccctgcgggccgccggtgaaataccactactctgatcgttttttcactgac

SEQ ID NO: 66938 - DNA, 120 bp, Homo sapiens
  misc_feature: 443 for SV(C|O) and 28S
aaaccacagccaagggaacgggcttggcggaatcagcggggaaagaagaccctgttgagcttgactctagtctggcacggtgaagagacatgagaggtgtagaataagtgggaggccccc

SEQ ID NO: 66939 - DNA, 120 bp, Homo sapiens; identical to SEQ ID NO: 51339
  misc_feature: 443 for SV(C|O) and 28S

SEQ ID NO: 66940 - DNA, 120 bp, Homo sapiens
  misc_feature: 443 for SV(C|O) and 28S
ggctctaagggctgggtcggtcgggctggggcgcgaagcggggctgggcgcgcgccgcggctggacgaggcgccgccgccccccccacgcccggggcacccccctcgcggccctcccccg

SEQ ID NO: 66941 - DNA, 120 bp, Homo sapiens; identical to SEQ ID NO: 50526
  misc_feature: 443 for SV(C|O) and 28S

SEQ ID NO: 66942 - DNA, 120 bp, Homo sapiens
  misc_feature: 443 for SV(C|O) and 28S
gacctgctgcggatatgggtacggcccggcgcgagatttacaccctctcccccggattttcaagggccagcgagagctcaccggacgccgccggaaccgcgacgctttccaaggcacggg

SEQ ID NO: 66943 - DNA, 120 bp, Homo sapiens; identical to SEQ ID NO: 49996
  misc_feature: 443 for SV(C|O) and 28S

SEQ ID NO: 66944 - DNA, 120 bp, Homo sapiens
  misc_feature: 443 for SV(C|O) and 28S
actcgccgaatcccggggccgagggagcgagacccgtcgccgcgctctcccccctcccggcgcccacccccgcggggaatcccccgcgaggggggtctcccccgcgggggcgcgccggcg

SEQ ID NO: 66945 - DNA, 120 bp, Homo sapiens
  misc_feature: 443 for SV(C|O) and 28S
ccagtgctctgaatgtcaaagtgaagaaattcaatgaagcgcgggtaaacggcgggagtaactatgactctcttaaggtagccaaatgcctcgtcatctaattagtgacgcgcatgaatg

SEQ ID NO: 66946 - DNA, 120 bp, Homo sapiens
  misc_feature: 443 for SV(C|O) and 28S
acgctttccaaggcacgggcccctctctcggggcgaacccattccagggcgccctgcccttcacaaagaaaagagaactctccccggggctcccgccggcttctccgggatcggtcgcgt

SEQ ID NO: 66947 - DNA, 120 bp, Homo sapiens
  misc_feature: 442 for SV(C|O) and 28S
ggcgttcggttcatcccgcagcgccagttctgcttaccaaaagtggcccactaggcactcgcattccacgcccggctccacgccagcgagccgggcttcttacccatttaaagtttgaga

SEQ ID NO: 66948 - DNA, 120 bp, Homo sapiens
  misc_feature: 442 for SV(C|O) and 28S
gccccgggcgggtcgcgccgtcgggcccgggggaggttctctcggggccacgcgcgcgtcccccgaagagggggacggcggagcgagcgcacggggtcggcggcgacgtcggctacccac

SEQ ID NO: 66949 - DNA, 120 bp, Homo sapiens; identical to SEQ ID NO: 51623
  misc_feature: 442 for SV(C|O) and 28S

SEQ ID NO: 66950 - DNA, 120 bp, Homo sapiens; identical to SEQ ID NO: 49553
  misc_feature: 442 for SV(C|O) and 28S

SEQ ID NO: 66951 - DNA, 120 bp, Homo sapiens
  misc_feature: 442 for SV(C|O) and 28S
gccatccattttcagggctagttgattcggcaggtgagttgttacacactccttagcggattccgacttccatggccaccgtcctgctgtctatatcaaccaacaccttttctggggtct

SEQ ID NO: 66952 - DNA, 120 bp, Homo sapiens
  misc_feature: 442 for SV(C|O) and 28S
cggcgcgcgcccagccccgcttcgcgccccagcccgaccgacccagcccttagagccaatccttatcccgaagttacggatccggcttgccgacttcccttacctacattgttccaacat

SEQ ID NO: 66953 - DNA, 120 bp, Homo sapiens; identical to SEQ ID NO: 49499
  misc_feature: 442 for SV(C|O) and 28S

SEQ ID NO: 66954 - DNA, 120 bp, Homo sapiens
  misc_feature: 441 for SV(C|O) and 28S
gcggcgcgcgcccagccccgcttcgcgccccagcccgaccgacccagcccttagagccaatccttatcccgaagttacggatccggcttgccgacttcccttacctacattgttccaaca

SEQ ID NO: 66955 - DNA, 120 bp, Homo sapiens
  misc_feature: 441 for SV(C|O) and 28S
tgtcaaagtgaagaaattcaatgaagcgcgggtaaacggcgggagtaactatgactctcttaaggtagccaaatgcctcgtcatctaattagtgacgcgcatgaatggatgaacgagatt

SEQ ID NO: 66956 - DNA, 120 bp, Homo sapiens
  misc_feature: 441 for SV(C|O) and 28S
cgggcccgggtggagccgccgcaggtgcagatcttggtggtagtagcaaatattcaaacgagaactttgaaggccgaagtggagaagggttccatgtgaacagcagttgaacatgggtca

SEQ ID NO: 66957 - DNA, 120 bp, Homo sapiens
  misc_feature: 441 for SV(C|O) and 28S
gccatggaagtcggaatccgctaaggagtgtgtaacaactcacctgccgaatcaactagccctgaaaatggatggcgctggagcgtcgggcccatacccggccgtcgccggcagtcgaga

SEQ ID NO: 66958 - DNA, 120 bp, Homo sapiens
  misc_feature: 441 for SV(C|O) and 28S
aggcactcgcattccacgcccggctccacgccagcgagccgggcttcttacccatttaaagtttgagaataggttgagatcgtttcggccccaagacctctaatcattcgctttaccgga

SEQ ID NO: 66959 - DNA, 120 bp, Homo sapiens
  misc_feature: 441 for SV(C|O) and 28S
gtagaataagtgggaggcccccggcgcccccccggtgtccccgcgaggggcccggggcggggtccgccggccctgcgggccgccggtgaaataccactactctgatcgttttttcactga

SEQ ID NO: 66960 - DNA, 120 bp, Homo sapiens; identical to SEQ ID NO: 51627
  misc_feature: 441 for SV(C|O) and 28S

SEQ ID NO: 66961 - DNA, 120 bp, Homo sapiens
  misc_feature: 441 for SV(C|O) and 28S
gctctaagggctgggtcggtcgggctggggcgcgaagcggggctgggcgcgcgccgcggctggacgaggcgccgccgccccccccacgcccggggcacccccctcgcggccctcccccgc

SEQ ID NO: 66962 - DNA, 120 bp, Homo sapiens; identical to SEQ ID NO: 49620
  misc_feature: 441 for SV(C|O) and 28S

SEQ ID NO: 66963 - DNA, 120 bp, Homo sapiens
  misc_feature: 441 for SV(C|O) and 28S
cagcgccagttctgcttaccaaaagtggcccactaggcactcgcattccacgcccggctccacgccagcgagccgggcttcttacccatttaaagtttgagaataggttgagatcgtttc

SEQ ID NO: 66964 - DNA, 120 bp, Homo sapiens; identical to SEQ ID NO: 49708
  misc_feature: 441 for SV(C|O) and 28S

SEQ ID NO: 66965 - DNA, 120 bp, Homo sapiens; identical to SEQ ID NO: 51150
  misc_feature: 441 for SV(C|O) and 28S

SEQ ID NO: 66966 - DNA, 120 bp, Homo sapiens; identical to SEQ ID NO: 50788
  misc_feature: 440 for SV(C|O) and 28S

SEQ ID NO: 66967 - DNA, 120 bp, Homo sapiens
  misc_feature: 440 for SV(C|O) and 28S
tggttgatatagacagcaggacggtggccatggaagtcggaatccgctaaggagtgtgtaacaactcacctgccgaatcaactagccctgaaaatggatggcgctggagcgtcgggccca

SEQ ID NO: 66968 - DNA, 120 bp, Homo sapiens
  misc_feature: 440 for SV(C|O) and 28S
gttcgccccgagagaggggcccgtgccttggaaagcgtcgcggttccggcggcgtccggtgagctctcgctggcccttgaaaatccgggggagagggtgtaaatctcgcgccgggccgta

SEQ ID NO: 66969 - DNA, 120 bp, Homo sapiens
  misc_feature: 440 for SV(C|O) and 28S
gttcatcccgcagcgccagttctgcttaccaaaagtggcccactaggcactcgcattccacgcccggctccacgccagcgagccgggcttcttacccatttaaagtttgagaataggttg

SEQ ID NO: 66970 - DNA, 120 bp, Homo sapiens
  misc_feature: 440 for SV(C|O) and 28S
gtcaaagtgaagaaattcaatgaagcgcgggtaaacggcgggagtaactatgactctcttaaggtagccaaatgcctcgtcatctaattagtgacgcgcatgaatggatgaacgagattc

SEQ ID NO: 66971 - DNA, 120 bp, Homo sapiens
  misc_feature: 440 for SV(C|O) and 28S
gggggcggggcggactgtccccagtgcgccccgggcgggtcgcgccgtcgggcccgggggaggttctctcggggccacgcgcgcgtcccccgaagagggggacggcggagcgagcgcacg

SEQ ID NO: 66972 - DNA, 120 bp, Homo sapiens
  misc_feature: 440 for SV(C|O) and 28S
ggcgcgcccccgcgggggagacccccctcgcgggggattccccgcgggggtgggcgccgggaggggggagagcgcggcgacgggtctcgctccctcggccccgggattcggcgagtgctg

SEQ ID NO: 66973 - DNA, 120 bp, Homo sapiens
  misc_feature: 440 for SV(C|O) and 28S
ggcccgggtggagccgccgcaggtgcagatcttggtggtagtagcaaatattcaaacgagaactttgaaggccgaagtggagaagggttccatgtgaacagcagttgaacatgggtcagt

SEQ ID NO: 66974 - DNA, 120 bp, Homo sapiens
  misc_feature: 440 for SV(C|O) and 28S
cgcgcgcccagccccgcttcgcgccccagcccgaccgacccagcccttagagccaatccttatcccgaagttacggatccggcttgccgacttcccttacctacattgttccaacatgcc

SEQ ID NO: 66975 - DNA, 120 bp, Homo sapiens; identical to SEQ ID NO: 51544
  misc_feature: 440 for SV(C|O) and 28S

SEQ ID NO: 66976 - DNA, 120 bp, Homo sapiens
  misc_feature: 440 for SV(C|O) and 28S
gccggcgcgcccccgcgggggagacccccctcgcgggggattccccgcgggggtgggcgccgggaggggggagagcgcggcgacgggtctcgctccctcggccccgggattcggcgagtg

SEQ ID NO: 66977 - DNA, 120 bp, Homo sapiens; identical to SEQ ID NO: 51094
  misc_feature: 440 for SV(C|O) and 28S

SEQ ID NO: 66978 - DNA, 120 bp, Homo sapiens
  misc_feature: 440 for SV(C|O) and 28S
cggcgttcggttcatcccgcagcgccagttctgcttaccaaaagtggcccactaggcactcgcattccacgcccggctccacgccagcgagccgggcttcttacccatttaaagtttgag

SEQ ID NO: 66979 - DNA, 120 bp, Homo sapiens
  misc_feature: 440 for SV(C|O) and 28S
cgttcggttcatcccgcagcgccagttctgcttaccaaaagtggcccactaggcactcgcattccacgcccggctccacgccagcgagccgggcttcttacccatttaaagtttgagaat

SEQ ID NO: 66980 - DNA, 120 bp, Homo sapiens; identical to SEQ ID NO: 50097
  misc_feature: 440 for SV(C|O) and 28S

SEQ ID NO: 66981 - DNA, 120 bp, Homo sapiens
  misc_feature: 439 for SV(C|O) and 28S
gcgttcggttcatcccgcagcgccagttctgcttaccaaaagtggcccactaggcactcgcattccacgcccggctccacgccagcgagccgggcttcttacccatttaaagtttgagaa

SEQ ID NO: 66982 - DNA, 120 bp, Homo sapiens; identical to SEQ ID NO: 51249
  misc_feature: 439 for SV(C|O) and 28S

SEQ ID NO: 66983 - DNA, 120 bp, Homo sapiens
  misc_feature: 439 for SV(C|O) and 28S
gacggtggccatggaagtcggaatccgctaaggagtgtgtaacaactcacctgccgaatcaactagccctgaaaatggatggcgctggagcgtcgggcccatacccggccgtcgccggca

SEQ ID NO: 66984 - DNA, 120 bp, Homo sapiens; identical to SEQ ID NO: 49633
  misc_feature: 439 for SV(C|O) and 28S

SEQ ID NO: 66985 - DNA, 120 bp, Homo sapiens
  misc_feature: 439 for SV(C|O) and 28S
ggggggcggggcggactgtccccagtgcgccccgggcgggtcgcgccgtcgggcccgggggaggttctctcggggccacgcgcgcgtcccccgaagagggggacggcggagcgagcgcac

SEQ ID NO: 66986 - DNA, 120 bp, Homo sapiens; identical to SEQ ID NO: 49755
  misc_feature: 439 for SV(C|O) and 28S

SEQ ID NO: 66987 - DNA, 120 bp, Homo sapiens; identical to SEQ ID NO: 49797
  misc_feature: 439 for SV(C|O) and 28S

SEQ ID NO: 66988 - DNA, 120 bp, Homo sapiens
  misc_feature: 439 for SV(C|O) and 28S
cctctggcttcgccctgcccaggcatagttcaccatctttcgggtcctaacacgtgcgctcgtgctccacctccccggcgcggcgggcgagacgggccggtggtgcgccctcggcggact

SEQ ID NO: 66989 - DNA, 120 bp, Homo sapiens
  misc_feature: 439 for SV(C|O) and 28S
cccacctcggccggcgagcgcgccggccttcaccttcattgcgccacggcggctttcgtgcgagcccccgactcgcgcacgtgttagactccttggtccgtgtttcaagacgggtcgggt

SEQ ID NO: 66990 - DNA, 120 bp, Homo sapiens; identical to SEQ ID NO: 50065
  misc_feature: 439 for SV(C|O) and 28S

SEQ ID NO: 66991 - DNA, 120 bp, Homo sapiens
  misc_feature: 438 for SV(C|O) and 28S
tggccatggaagtcggaatccgctaaggagtgtgtaacaactcacctgccgaatcaactagccctgaaaatggatggcgctggagcgtcgggcccatacccggccgtcgccggcagtcga

SEQ ID NO: 66992 - DNA, 120 bp, Homo sapiens
  misc_feature: 438 for SV(C|O) and 28S
aggacacctgcgttaccgtttgacaggtgtaccgccccagtcaaactccccacctggcactgtccccggagcgggtcgcgcccggccggcgcgcggccgggcgcttggcgccagaagcga

SEQ ID NO: 66993 - DNA, 120 bp, Homo sapiens
  misc_feature: 438 for SV(C|O) and 28S
ctctaagggctgggtcggtcgggctggggcgcgaagcggggctgggcgcgcgccgcggctggacgaggcgccgccgccccccccacgcccggggcacccccctcgcggccctcccccgcc

SEQ ID NO: 66994 - DNA, 120 bp, Homo sapiens
  misc_feature: 438 for SV(C|O) and 28S
atgggttcgccccgagagaggggcccgtgccttggaaagcgtcgcggttccggcggcgtccggtgagctctcgctggcccttgaaaatccgggggagagggtgtaaatctcgcgccgggc

SEQ ID NO: 66995 - DNA, 120 bp, Homo sapiens
  misc_feature: 438 for SV(C|O) and 28S
gccccgggcccctcgcggggacaccgggggggcgccgggggcctcccacttattctacacctctcatgtctcttcaccgtgccagactagagtcaagctcaacagggtcttctttccccg

SEQ ID NO: 66996 - DNA, 120 bp, Homo sapiens
  misc_feature: 438 for SV(C|O) and 28S
gcagcgccagttctgcttaccaaaagtggcccactaggcactcgcattccacgcccggctccacgccagcgagccgggcttcttacccatttaaagtttgagaataggttgagatcgttt

SEQ ID NO: 66997 - DNA, 120 bp, Homo sapiens
  misc_feature: 438 for SV(C|O) and 28S
gaatgtcaaagtgaagaaattcaatgaagcgcgggtaaacggcgggagtaactatgactctcttaaggtagccaaatgcctcgtcatctaattagtgacgcgcatgaatggatgaacgag

SEQ ID NO: 66998 - DNA, 120 bp, Homo sapiens
  misc_feature: 438 for SV(C|O) and 28S
cactccggattcggggatctgaacccgactccctttcgatcggccgagggcaacggaggccatcgcccgtcccttcggaacggcgctcgcccatctctcaggaccgactgacccatgttc

SEQ ID NO: 66999 - DNA, 120 bp, Homo sapiens
  misc_feature: 438 for SV(C|O) and 28S
cccgcagcgccagttctgcttaccaaaagtggcccactaggcactcgcattccacgcccggctccacgccagcgagccgggcttcttacccatttaaagtttgagaataggttgagatcg

SEQ ID NO: 67000 - DNA, 120 bp, Homo sapiens
  misc_feature: 438 for SV(C|O) and 28S
atgtcaaagtgaagaaattcaatgaagcgcgggtaaacggcgggagtaactatgactctcttaaggtagccaaatgcctcgtcatctaattagtgacgcgcatgaatggatgaacgagat

SEQ ID NO: 67001 - DNA, 120 bp, Homo sapiens
  misc_feature: 437 for SV(C|O) and 28S
actcgcattccacgcccggctccacgccagcgagccgggcttcttacccatttaaagtttgagaataggttgagatcgtttcggccccaagacctctaatcattcgctttaccggataaa

SEQ ID NO: 67002 - DNA, 120 bp, Homo sapiens
  misc_feature: 437 for SV(C|O) and 28S
tgggttcgccccgagagaggggcccgtgccttggaaagcgtcgcggttccggcggcgtccggtgagctctcgctggcccttgaaaatccgggggagagggtgtaaatctcgcgccgggcc

SEQ ID NO: 67003 - DNA, 120 bp, Homo sapiens
  misc_feature: 437 for SV(C|O) and 28S
gtcctgctgtctatatcaaccaacaccttttctggggtctgatgagcgtcggcatcgggcgccttaacccggcgttcggttcatcccgcagcgccagttctgcttaccaaaagtggccca

SEQ ID NO: 67004 - DNA, 120 bp, Homo sapiens
  misc_feature: 437 for SV(C|O) and 28S
tcatcccgcagcgccagttctgcttaccaaaagtggcccactaggcactcgcattccacgcccggctccacgccagcgagccgggcttcttacccatttaaagtttgagaataggttgag

SEQ ID NO: 67005 - DNA, 120 bp, Homo sapiens
  misc_feature: 437 for SV(C|O) and 28S
gttggttgatatagacagcaggacggtggccatggaagtcggaatccgctaaggagtgtgtaacaactcacctgccgaatcaactagccctgaaaatggatggcgctggagcgtcgggcc

SEQ ID NO: 67006 - DNA, 120 bp, Homo sapiens
  misc_feature: 437 for SV(C|O) and 28S
ggtcggggggcggggcggactgtccccagtgcgccccgggcgggtcgcgccgtcgggcccgggggaggttctctcggggccacgcgcgcgtcccccgaagagggggacggcggagcgagc

SEQ ID NO: 67007 - DNA, 120 bp, Homo sapiens
  misc_feature: 437 for SV(C|O) and 28S
ggcggggcggactgtccccagtgcgccccgggcgggtcgcgccgtcgggcccgggggaggttctctcggggccacgcgcgcgtcccccgaagagggggacggcggagcgagcgcacgggg

SEQ ID NO: 67008 - DNA, 120 bp, Homo sapiens; identical to SEQ ID NO: 49502
  misc_feature: 437 for SV(C|O) and 28S

SEQ ID NO: 67009 - DNA, 120 bp, Homo sapiens
  misc_feature: 437 for SV(C|O) and 28S
aagaaattcaatgaagcgcgggtaaacggcgggagtaactatgactctcttaaggtagccaaatgcctcgtcatctaattagtgacgcgcatgaatggatgaacgagattcccactgtcc

SEQ ID NO: 67010 - DNA, 120 bp, Homo sapiens; identical to SEQ ID NO: 49317
  misc_feature: 437 for SV(C|O) and 28S

SEQ ID NO: 67011 - DNA, 120 bp, Homo sapiens
  misc_feature: 437 for SV(C|O) and 28S
cgccatccattttcagggctagttgattcggcaggtgagttgttacacactccttagcggattccgacttccatggccaccgtcctgctgtctatatcaaccaacaccttttctggggtc

SEQ ID NO: 67012 - DNA, 120 bp, Homo sapiens; identical to SEQ ID NO: 50580
  misc_feature: 437 for SV(C|O) and 28S

SEQ ID NO: 67013 - DNA, 120 bp, Homo sapiens; identical to SEQ ID NO: 50514
  misc_feature: 437 for SV(C|O) and 28S

SEQ ID NO: 67014 - DNA, 120 bp, Homo sapiens
  misc_feature: 437 for SV(C|O) and 28S
cccagtgcgccccgggcgggtcgcgccgtcgggcccgggggaggttctctcggggccacgcgcgcgtcccccgaagagggggacggcggagcgagcgcacggggtcggcggcgacgtcgg

SEQ ID NO: 67015 - DNA, 120 bp, Homo sapiens
  misc_feature: 436 for SV(C|O) and 28S
aaagtgaagaaattcaatgaagcgcgggtaaacggcgggagtaactatgactctcttaaggtagccaaatgcctcgtcatctaattagtgacgcgcatgaatggatgaacgagattccca

SEQ ID NO: 67016 - DNA, 120 bp, Homo sapiens
  misc_feature: 436 for SV(C|O) and 28S
tgaatgtcaaagtgaagaaattcaatgaagcgcgggtaaacggcgggagtaactatgactctcttaaggtagccaaatgcctcgtcatctaattagtgacgcgcatgaatggatgaacga

SEQ ID NO: 67017 - DNA, 120 bp, Homo sapiens
  misc_feature: 436 for SV(C|O) and 28S
agtgctctgaatgtcaaagtgaagaaattcaatgaagcgcgggtaaacggcgggagtaactatgactctcttaaggtagccaaatgcctcgtcatctaattagtgacgcgcatgaatgga

SEQ ID NO: 67018 - DNA, 120 bp, Homo sapiens
  misc_feature: 436 for SV(C|O) and 28S
aaattcaatgaagcgcgggtaaacggcgggagtaactatgactctcttaaggtagccaaatgcctcgtcatctaattagtgacgcgcatgaatggatgaacgagattcccactgtcccta

SEQ ID NO: 67019 - DNA, 120 bp, Homo sapiens
  misc_feature: 436 for SV(C|O) and 28S
ggttcgccccgagagaggggcccgtgccttggaaagcgtcgcggttccggcggcgtccggtgagctctcgctggcccttgaaaatccgggggagagggtgtaaatctcgcgccgggccgt

SEQ ID NO: 67020 - DNA, 120 bp, Homo sapiens
  misc_feature: 436 for SV(C|O) and 28S
gggttcgccccgagagaggggcccgtgccttggaaagcgtcgcggttccggcggcgtccggtgagctctcgctggcccttgaaaatccgggggagagggtgtaaatctcgcgccgggccg

SEQ ID NO: 67021 - DNA, 120 bp, Homo sapiens
  misc_feature: 436 for SV(C|O) and 28S
cgccccgagagaggggcccgtgccttggaaagcgtcgcggttccggcggcgtccggtgagctctcgctggcccttgaaaatccgggggagagggtgtaaatctcgcgccgggccgtaccc

SEQ ID NO: 67022 - DNA, 120 bp, Homo sapiens
  misc_feature: 436 for SV(C|O) and 28S
gggcccgggtggagccgccgcaggtgcagatcttggtggtagtagcaaatattcaaacgagaactttgaaggccgaagtggagaagggttccatgtgaacagcagttgaacatgggtcag

SEQ ID NO: 67023 - DNA, 120 bp, Homo sapiens; identical to SEQ ID NO: 51281
  misc_feature: 436 for SV(C|O) and 28S

SEQ ID NO: 67024 - DNA, 120 bp, Homo sapiens
  misc_feature: 436 for SV(C|O) and 28S
ccggcgcgcccccgcgggggagacccccctcgcgggggattccccgcgggggtgggcgccgggaggggggagagcgcggcgacgggtctcgctccctcggccccgggattcggcgagtgc

SEQ ID NO: 67025 - DNA, 120 bp, Homo sapiens
  misc_feature: 436 for SV(C|O) and 28S
gacgctttccaaggcacgggcccctctctcggggcgaacccattccagggcgccctgcccttcacaaagaaaagagaactctccccggggctcccgccggcttctccgggatcggtcgcg

SEQ ID NO: 67026 - DNA, 120 bp, Homo sapiens; identical to SEQ ID NO: 51259
  misc_feature: 436 for SV(C|O) and 28S

SEQ ID NO: 67027 - DNA, 120 bp, Homo sapiens
  misc_feature: 436 for SV(C|O) and 28S
ccgccactccggattcggggatctgaacccgactccctttcgatcggccgagggcaacggaggccatcgcccgtcccttcggaacggcgctcgcccatctctcaggaccgactgacccat

SEQ ID NO: 67028 - DNA, 120 bp, Homo sapiens
  misc_feature: 436 for SV(C|O) and 28S
cagtgctctgaatgtcaaagtgaagaaattcaatgaagcgcgggtaaacggcgggagtaactatgactctcttaaggtagccaaatgcctcgtcatctaattagtgacgcgcatgaatgg

SEQ ID NO: 67029 - DNA, 120 bp, Homo sapiens
  misc_feature: 435 for SV(C|O) and 28S
ctcgcattccacgcccggctccacgccagcgagccgggcttcttacccatttaaagtttgagaataggttgagatcgtttcggccccaagacctctaatcattcgctttaccggataaaa

SEQ ID NO: 67030 - DNA, 120 bp, Homo sapiens
  misc_feature: 435 for SV(C|O) and 28S
ccagctatcctgagggaaacttcggagggaaccagctactagatggttcgattagtctttcgcccctatacccaggtcggacgaccgatttgcacgtcaggaccgctacggacctccacc

SEQ ID NO: 67031 - DNA, 120 bp, Homo sapiens
  misc_feature: 435 for SV(C|O) and 28S
cgaaaccacagccaagggaacgggcttggcggaatcagcggggaaagaagaccctgttgagcttgactctagtctggcacggtgaagagacatgagaggtgtagaataagtgggaggccc

SEQ ID NO: 67032 - DNA, 120 bp, Homo sapiens; identical to SEQ ID NO: 51636
  misc_feature: 435 for SV(C|O) and 28S

SEQ ID NO: 67033 - DNA, 120 bp, Homo sapiens
  misc_feature: 435 for SV(C|O) and 28S
gaaattcaatgaagcgcgggtaaacggcgggagtaactatgactctcttaaggtagccaaatgcctcgtcatctaattagtgacgcgcatgaatggatgaacgagattcccactgtccct

SEQ ID NO: 67034 - DNA, 120 bp, Homo sapiens; identical to SEQ ID NO: 49722
  misc_feature: 435 for SV(C|O) and 28S

SEQ ID NO: 67035 - DNA, 120 bp, Homo sapiens; identical to SEQ ID NO: 49515
  misc_feature: 435 for SV(C|O) and 28S

SEQ ID NO: 67036 - DNA, 120 bp, Homo sapiens; identical to SEQ ID NO: 50106
  misc_feature: 435 for SV(C|O) and 28S

SEQ ID NO: 67037 - DNA, 120 bp, Homo sapiens
  misc_feature: 434 for SV(C|O) and 28S
ttcgccccgagagaggggcccgtgccttggaaagcgtcgcggttccggcggcgtccggtgagctctcgctggcccttgaaaatccgggggagagggtgtaaatctcgcgccgggccgtac

SEQ ID NO: 67038 - DNA, 120 bp, Homo sapiens
  misc_feature: 434 for SV(C|O) and 28S
tcccgcagcgccagttctgcttaccaaaagtggcccactaggcactcgcattccacgcccggctccacgccagcgagccgggcttcttacccatttaaagtttgagaataggttgagatc

SEQ ID NO: 67039 - DNA, 120 bp, Homo sapiens
  misc_feature: 434 for SV(C|O) and 28S
ctgtccccagtgcgccccgggcgggtcgcgccgtcgggcccgggggaggttctctcggggccacgcgcgcgtcccccgaagagggggacggcggagcgagcgcacggggtcggcggcgac

SEQ ID NO: 67040 - DNA, 120 bp, Homo sapiens
  misc_feature: 434 for SV(C|O) and 28S
ggactgtccccagtgcgccccgggcgggtcgcgccgtcgggcccgggggaggttctctcggggccacgcgcgcgtcccccgaagagggggacggcggagcgagcgcacggggtcggcggc

SEQ ID NO: 67041 - DNA, 120 bp, Homo sapiens; identical to SEQ ID NO: 51266
  misc_feature: 434 for SV(C|O) and 28S

SEQ ID NO: 67042 - DNA, 120 bp, Homo sapiens
  misc_feature: 434 for SV(C|O) and 28S
gatcccacctcggccggcgagcgcgccggccttcaccttcattgcgccacggcggctttcgtgcgagcccccgactcgcgcacgtgttagactccttggtccgtgtttcaagacgggtcg

SEQ ID NO: 67043 - DNA, 120 bp, Homo sapiens
  misc_feature: 434 for SV(C|O) and 28S
aaccacagccaagggaacgggcttggcggaatcagcggggaaagaagaccctgttgagcttgactctagtctggcacggtgaagagacatgagaggtgtagaataagtgggaggcccccg

SEQ ID NO: 67044 - DNA, 120 bp, Homo sapiens; identical to SEQ ID NO: 49212
  misc_feature: 434 for SV(C|O) and 28S

SEQ ID NO: 67045 - DNA, 120 bp, Homo sapiens
  misc_feature: 434 for SV(C|O) and 28S
cgccactccggattcggggatctgaacccgactccctttcgatcggccgagggcaacggaggccatcgcccgtcccttcggaacggcgctcgcccatctctcaggaccgactgacccatg

SEQ ID NO: 67046 - DNA, 120 bp, Homo sapiens; identical to SEQ ID NO: 50682
  misc_feature: 434 for SV(C|O) and 28S

SEQ ID NO: 67047 - DNA, 120 bp, Homo sapiens
  misc_feature: 434 for SV(C|O) and 28S
ccagagtttcctctggcttcgccctgcccaggcatagttcaccatctttcgggtcctaacacgtgcgctcgtgctccacctccccggcgcggcgggcgagacgggccggtggtgcgccct

SEQ ID NO: 67048 - DNA, 120 bp, Homo sapiens; identical to SEQ ID NO: 51294
  misc_feature: 434 for SV(C|O) and 28S

SEQ ID NO: 67049 - DNA, 120 bp, Homo sapiens; identical to SEQ ID NO: 51291
  misc_feature: 433 for SV(C|O) and 28S

SEQ ID NO: 67050 - DNA, 120 bp, Homo sapiens
  misc_feature: 433 for SV(C|O) and 28S
tcgcattccacgcccggctccacgccagcgagccgggcttcttacccatttaaagtttgagaataggttgagatcgtttcggccccaagacctctaatcattcgctttaccggataaaac

SEQ ID NO: 67051 - DNA, 120 bp, Homo sapiens
  misc_feature: 433 for SV(C|O) and 28S
tccccagtgcgccccgggcgggtcgcgccgtcgggcccgggggaggttctctcggggccacgcgcgcgtcccccgaagagggggacggcggagcgagcgcacggggtcggcggcgacgtc

SEQ ID NO: 67052 - DNA, 120 bp, Homo sapiens
  misc_feature: 433 for SV(C|O) and 28S
gccagctatcctgagggaaacttcggagggaaccagctactagatggttcgattagtctttcgcccctatacccaggtcggacgaccgatttgcacgtcaggaccgctacggacctccac

SEQ ID NO: 67053 - DNA, 120 bp, Homo sapiens
  misc_feature: 433 for SV(C|O) and 28S
gtcggggggcggggcggactgtccccagtgcgccccgggcgggtcgcgccgtcgggcccgggggaggttctctcggggccacgcgcgcgtcccccgaagagggggacggcggagcgagcg

SEQ ID NO: 67054 - DNA, 120 bp, Homo sapiens
  misc_feature: 433 for SV(C|O) and 28S
ggctgggtcggtcgggctggggcgcgaagcggggctgggcgcgcgccgcggctggacgaggcgccgccgccccccccacgcccggggcacccccctcgcggccctcccccgccccacccc

SEQ ID NO: 67055 - DNA, 120 bp, Homo sapiens
  misc_feature: 433 for SV(C|O) and 28S
gctgaggagccaatggggcgaagctaccatctgtgggattatgactgaacgcctctaagtcagaatcccgcccaggcggaacgatacggcagcgccgcggagcctcggttggcctcggat

SEQ ID NO: 67056 - DNA, 120 bp, Homo sapiens; identical to SEQ ID NO: 49966
  misc_feature: 433 for SV(C|O) and 28S

SEQ ID NO: 67057 - DNA, 120 bp, Homo sapiens
  misc_feature: 433 for SV(C|O) and 28S
cgcagcgccagttctgcttaccaaaagtggcccactaggcactcgcattccacgcccggctccacgccagcgagccgggcttcttacccatttaaagtttgagaataggttgagatcgtt

SEQ ID NO: 67058 - DNA, 120 bp, Homo sapiens
  misc_feature: 433 for SV(C|O) and 28S
ccccagtgcgccccgggcgggtcgcgccgtcgggcccgggggaggttctctcggggccacgcgcgcgtcccccgaagagggggacggcggagcgagcgcacggggtcggcggcgacgtcg

SEQ ID NO: 67059 - DNA, 120 bp, Homo sapiens
  misc_feature: 432 for SV(C|O) and 28S
ttggttgatatagacagcaggacggtggccatggaagtcggaatccgctaaggagtgtgtaacaactcacctgccgaatcaactagccctgaaaatggatggcgctggagcgtcgggccc

SEQ ID NO: 67060 - DNA, 120 bp, Homo sapiens
  misc_feature: 432 for SV(C|O) and 28S
tctgaatgtcaaagtgaagaaattcaatgaagcgcgggtaaacggcgggagtaactatgactctcttaaggtagccaaatgcctcgtcatctaattagtgacgcgcatgaatggatgaac

SEQ ID NO: 67061 - DNA, 120 bp, Homo sapiens
  misc_feature: 432 for SV(C|O) and 28S
catcccgcagcgccagttctgcttaccaaaagtggcccactaggcactcgcattccacgcccggctccacgccagcgagccgggcttcttacccatttaaagtttgagaataggttgaga

SEQ ID NO: 67062 - DNA, 120 bp, Homo sapiens
  misc_feature: 432 for SV(C|O) and 28S
aagtgaagaaattcaatgaagcgcgggtaaacggcgggagtaactatgactctcttaaggtagccaaatgcctcgtcatctaattagtgacgcgcatgaatggatgaacgagattcccac

SEQ ID NO: 67063 - DNA, 120 bp, Homo sapiens
  misc_feature: 432 for SV(C|O) and 28S
ggttcatcccgcagcgccagttctgcttaccaaaagtggcccactaggcactcgcattccacgcccggctccacgccagcgagccgggcttcttacccatttaaagtttgagaataggtt

SEQ ID NO: 67064 - DNA, 120 bp, Homo sapiens
  misc_feature: 432 for SV(C|O) and 28S
ccccgggcccctcgcggggacaccgggggggcgccgggggcctcccacttattctacacctctcatgtctcttcaccgtgccagactagagtcaagctcaacagggtcttctttccccgc

SEQ ID NO: 67065 - DNA, 120 bp, Homo sapiens; identical to SEQ ID NO: 49179
  misc_feature: 432 for SV(C|O) and 28S

SEQ ID NO: 67066 - DNA, 120 bp, Homo sapiens; identical to SEQ ID NO: 50047
  misc_feature: 432 for SV(C|O) and 28S

SEQ ID NO: 67067 - DNA, 120 bp, Homo sapiens
  misc_feature: 432 for SV(C|O) and 28S
cggcgcgcccccgcgggggagacccccctcgcgggggattccccgcgggggtgggcgccgggaggggggagagcgcggcgacgggtctcgctccctcggccccgggattcggcgagtgct

SEQ ID NO: 67068 - DNA, 120 bp, Homo sapiens
  misc_feature: 432 for SV(C|O) and 28S
cccgcctcaccgggtcagtgaaaaaacgatcagagtagtggtatttcaccggcggcccgcagggccggcggaccccgccccgggcccctcgcggggacaccgggggggcgccgggggcct

SEQ ID NO: 67069 - DNA, 120 bp, Homo sapiens
  misc_feature: 432 for SV(C|O) and 28S
ccactccggattcggggatctgaacccgactccctttcgatcggccgagggcaacggaggccatcgcccgtcccttcggaacggcgctcgcccatctctcaggaccgactgacccatgtt

SEQ ID NO: 67070 - DNA, 120 bp, Homo sapiens
  misc_feature: 432 for SV(C|O) and 28S
agtgaagaaattcaatgaagcgcgggtaaacggcgggagtaactatgactctcttaaggtagccaaatgcctcgtcatctaattagtgacgcgcatgaatggatgaacgagattcccact

SEQ ID NO: 67071 - DNA, 120 bp, Homo sapiens; identical to SEQ ID NO: 51273
  misc_feature: 431 for SV(C|O) and 28S

SEQ ID NO: 67072 - DNA, 120 bp, Homo sapiens
  misc_feature: 431 for SV(C|O) and 28S
gttgatatagacagcaggacggtggccatggaagtcggaatccgctaaggagtgtgtaacaactcacctgccgaatcaactagccctgaaaatggatggcgctggagcgtcgggcccata

SEQ ID NO: 67073 - DNA, 120 bp, Homo sapiens
  misc_feature: 431 for SV(C|O) and 28S
accagagtttcctctggcttcgccctgcccaggcatagttcaccatctttcgggtcctaacacgtgcgctcgtgctccacctccccggcgcggcgggcgagacgggccggtggtgcgccc

SEQ ID NO: 67074 - DNA, 120 bp, Homo sapiens
  misc_feature: 431 for SV(C|O) and 28S
agaaattcaatgaagcgcgggtaaacggcgggagtaactatgactctcttaaggtagccaaatgcctcgtcatctaattagtgacgcgcatgaatggatgaacgagattcccactgtccc

SEQ ID NO: 67075 - DNA, 120 bp, Homo sapiens
  misc_feature: 431 for SV(C|O) and 28S
ggacggtggccatggaagtcggaatccgctaaggagtgtgtaacaactcacctgccgaatcaactagccctgaaaatggatggcgctggagcgtcgggcccatacccggccgtcgccggc

SEQ ID NO: 67076 - DNA, 120 bp, Homo sapiens
  misc_feature: 431 for SV(C|O) and 28S
ccgaaacgatctcaacctattctcaaactttaaatgggtaagaagcccggctcgctggcgtggagccgggcgtggaatgcgagtgcctagtgggccacttttggtaagcagaactggcgc

SEQ ID NO: 67077 - DNA, 120 bp, Homo sapiens
  misc_feature: 431 for SV(C|O) and 28S
ccagtgcgccccgggcgggtcgcgccgtcgggcccgggggaggttctctcggggccacgcgcgcgtcccccgaagagggggacggcggagcgagcgcacggggtcggcggcgacgtcggc

SEQ ID NO: 67078 - DNA, 120 bp, Homo sapiens
  misc_feature: 431 for SV(C|O) and 28S
acagcaggacggtggccatggaagtcggaatccgctaaggagtgtgtaacaactcacctgccgaatcaactagccctgaaaatggatggcgctggagcgtcgggcccatacccggccgtc

SEQ ID NO: 67079 - DNA, 120 bp, Homo sapiens
  misc_feature: 431 for SV(C|O) and 28S
aggacggtggccatggaagtcggaatccgctaaggagtgtgtaacaactcacctgccgaatcaactagccctgaaaatggatggcgctggagcgtcgggcccatacccggccgtcgccgg

SEQ ID NO: 67080 - DNA, 120 bp, Homo sapiens; identical to SEQ ID NO: 51261
  misc_feature: 430 for SV(C|O) and 28S

SEQ ID NO: 67081 - DNA, 120 bp, Homo sapiens
  misc_feature: 430 for SV(C|O) and 28S
tcgccccgagagaggggcccgtgccttggaaagcgtcgcggttccggcggcgtccggtgagctctcgctggcccttgaaaatccgggggagagggtgtaaatctcgcgccgggccgtacc

SEQ ID NO: 67082 - DNA, 120 bp, Homo sapiens
  misc_feature: 430 for SV(C|O) and 28S
gtgaagaaattcaatgaagcgcgggtaaacggcgggagtaactatgactctcttaaggtagccaaatgcctcgtcatctaattagtgacgcgcatgaatggatgaacgagattcccactg

SEQ ID NO: 67083 - DNA, 120 bp, Homo sapiens
  misc_feature: 430 for SV(C|O) and 28S
ggttgatatagacagcaggacggtggccatggaagtcggaatccgctaaggagtgtgtaacaactcacctgccgaatcaactagccctgaaaatggatggcgctggagcgtcgggcccat

SEQ ID NO: 67084 - DNA, 120 bp, Homo sapiens; identical to SEQ ID NO: 50510
  misc_feature: 430 for SV(C|O) and 28S

SEQ ID NO: 67085 - DNA, 120 bp, Homo sapiens; identical to SEQ ID NO: 51292
  misc_feature: 430 for SV(C|O) and 28S

SEQ ID NO: 67086 - DNA, 120 bp, Homo sapiens
  misc_feature: 430 for SV(C|O) and 28S
ggcgcgcgcccagccccgcttcgcgccccagcccgaccgacccagcccttagagccaatccttatcccgaagttacggatccggcttgccgacttcccttacctacattgttccaacatg

SEQ ID NO: 67087 - DNA, 120 bp, Homo sapiens; identical to SEQ ID NO: 49216
  misc_feature: 430 for SV(C|O) and 28S

SEQ ID NO: 67088 - DNA, 120 bp, Homo sapiens
  misc_feature: 430 for SV(C|O) and 28S
ccaccagagtttcctctggcttcgccctgcccaggcatagttcaccatctttcgggtcctaacacgtgcgctcgtgctccacctccccggcgcggcgggcgagacgggccggtggtgcgc

SEQ ID NO: 67089 - DNA, 120 bp, Homo sapiens; identical to SEQ ID NO: 50432
  misc_feature: 430 for SV(C|O) and 28S

SEQ ID NO: 67090 - DNA, 120 bp, Homo sapiens
  misc_feature: 430 for SV(C|O) and 28S
cagagtttcctctggcttcgccctgcccaggcatagttcaccatctttcgggtcctaacacgtgcgctcgtgctccacctccccggcgcggcgggcgagacgggccggtggtgcgccctc

SEQ ID NO: 67091 - DNA, 120 bp, Homo sapiens; identical to SEQ ID NO: 51334
  misc_feature: 430 for SV(C|O) and 28S

SEQ ID NO: 67092 - DNA, 120 bp, Homo sapiens
  misc_feature: 430 for SV(C|O) and 28S
attccacgcccggctccacgccagcgagccgggcttcttacccatttaaagtttgagaataggttgagatcgtttcggccccaagacctctaatcattcgctttaccggataaaactgcg

SEQ ID NO: 67093 - DNA, 120 bp, Homo sapiens
  misc_feature: 430 for SV(C|O) and 28S
ccgcagcgccagttctgcttaccaaaagtggcccactaggcactcgcattccacgcccggctccacgccagcgagccgggcttcttacccatttaaagtttgagaataggttgagatcgt

SEQ ID NO: 67094 - DNA, 120 bp, Homo sapiens
  misc_feature: 429 for SV(C|O) and 28S
ttcatcccgcagcgccagttctgcttaccaaaagtggcccactaggcactcgcattccacgcccggctccacgccagcgagccgggcttcttacccatttaaagtttgagaataggttga

SEQ ID NO: 67095 - DNA, 120 bp, Homo sapiens
  misc_feature: 429 for SV(C|O) and 28S
cggggggcggggcggactgtccccagtgcgccccgggcgggtcgcgccgtcgggcccgggggaggttctctcggggccacgcgcgcgtcccccgaagagggggacggcggagcgagcgca

SEQ ID NO: 67096 - DNA, 120 bp, Homo sapiens
  misc_feature: 429 for SV(C|O) and 28S
tctaagggctgggtcggtcgggctggggcgcgaagcggggctgggcgcgcgccgcggctggacgaggcgccgccgccccccccacgcccggggcacccccctcgcggccctcccccgccc

SEQ ID NO: 67097 - DNA, 120 bp, Homo sapiens
  misc_feature: 429 for SV(C|O) and 28S
gcactcgcattccacgcccggctccacgccagcgagccgggcttcttacccatttaaagtttgagaataggttgagatcgtttcggccccaagacctctaatcattcgctttaccggata

SEQ ID NO: 67098 - DNA, 120 bp, Homo sapiens
  misc_feature: 429 for SV(C|O) and 28S
gtggccatggaagtcggaatccgctaaggagtgtgtaacaactcacctgccgaatcaactagccctgaaaatggatggcgctggagcgtcgggcccatacccggccgtcgccggcagtcg

SEQ ID NO: 67099 - DNA, 120 bp, Homo sapiens
  misc_feature: 429 for SV(C|O) and 28S
gcgcgcgcccagccccgcttcgcgccccagcccgaccgacccagcccttagagccaatccttatcccgaagttacggatccggcttgccgacttcccttacctacattgttccaacatgc

SEQ ID NO: 67100 - DNA, 120 bp, Homo sapiens; identical to SEQ ID NO: 49526
  misc_feature: 429 for SV(C|O) and 28S

SEQ ID NO: 67101 - DNA, 120 bp, Homo sapiens
  misc_feature: 429 for SV(C|O) and 28S
cagtgcgccccgggcgggtcgcgccgtcgggcccgggggaggttctctcggggccacgcgcgcgtcccccgaagagggggacggcggagcgagcgcacggggtcggcggcgacgtcggct

SEQ ID NO: 67102 - DNA, 120 bp, Homo sapiens
  misc_feature: 428 for SV(C|O) and 28S
ttgatatagacagcaggacggtggccatggaagtcggaatccgctaaggagtgtgtaacaactcacctgccgaatcaactagccctgaaaatggatggcgctggagcgtcgggcccatac

SEQ ID NO: 67103 - DNA, 120 bp, Homo sapiens
  misc_feature: 428 for SV(C|O) and 28S
ttccacgcccggctccacgccagcgagccgggcttcttacccatttaaagtttgagaataggttgagatcgtttcggccccaagacctctaatcattcgctttaccggataaaactgcgt

SEQ ID NO: 67104 - DNA, 120 bp, Homo sapiens
  misc_feature: 428 for SV(C|O) and 28S
tcaaagtgaagaaattcaatgaagcgcgggtaaacggcgggagtaactatgactctcttaaggtagccaaatgcctcgtcatctaattagtgacgcgcatgaatggatgaacgagattcc

SEQ ID NO: 67105 - DNA, 120 bp, Homo sapiens
  misc_feature: 428 for SV(C|O) and 28S
agtgcgccccgggcgggtcgcgccgtcgggcccgggggaggttctctcggggccacgcgcgcgtcccccgaagagggggacggcggagcgagcgcacggggtcggcggcgacgtcggcta

SEQ ID NO: 67106 - DNA, 120 bp, Homo sapiens
  misc_feature: 428 for SV(C|O) and 28S
ctaagggctgggtcggtcgggctggggcgcgaagcggggctgggcgcgcgccgcggctggacgaggcgccgccgccccccccacgcccggggcacccccctcgcggccctcccccgcccc

SEQ ID NO: 67107 - DNA, 120 bp, Homo sapiens
  misc_feature: 428 for SV(C|O) and 28S
ggggcggactgtccccagtgcgccccgggcgggtcgcgccgtcgggcccgggggaggttctctcggggccacgcgcgcgtcccccgaagagggggacggcggagcgagcgcacggggtcg

SEQ ID NO: 67108 - DNA, 120 bp, Homo sapiens
  misc_feature: 428 for SV(C|O) and 28S
agcaggacggtggccatggaagtcggaatccgctaaggagtgtgtaacaactcacctgccgaatcaactagccctgaaaatggatggcgctggagcgtcgggcccatacccggccgtcgc

SEQ ID NO: 67109 - DNA, 120 bp, Homo sapiens
  misc_feature: 428 for SV(C|O) and 28S
gaagaaattcaatgaagcgcgggtaaacggcgggagtaactatgactctcttaaggtagccaaatgcctcgtcatctaattagtgacgcgcatgaatggatgaacgagattcccactgtc

SEQ ID NO: 67110 - DNA, 120 bp, Homo sapiens
  misc_feature: 428 for SV(C|O) and 28S
cggttcatcccgcagcgccagttctgcttaccaaaagtggcccactaggcactcgcattccacgcccggctccacgccagcgagccgggcttcttacccatttaaagtttgagaataggt

SEQ ID NO: 67111 - DNA, 120 bp, Homo sapiens
  misc_feature: 428 for SV(C|O) and 28S
cccgggcccctcgcggggacaccgggggggcgccgggggcctcccacttattctacacctctcatgtctcttcaccgtgccagactagagtcaagctcaacagggtcttctttccccgct

SEQ ID NO: 67112 - DNA, 120 bp, Homo sapiens
  misc_feature: 427 for SV(C|O) and 28S
ctctgaatgtcaaagtgaagaaattcaatgaagcgcgggtaaacggcgggagtaactatgactctcttaaggtagccaaatgcctcgtcatctaattagtgacgcgcatgaatggatgaa

SEQ ID NO: 67113 - DNA, 120 bp, Homo sapiens
  misc_feature: 427 for SV(C|O) and 28S
tgttggttgatatagacagcaggacggtggccatggaagtcggaatccgctaaggagtgtgtaacaactcacctgccgaatcaactagccctgaaaatggatggcgctggagcgtcgggc

SEQ ID NO: 67114 - DNA, 120 bp, Homo sapiens
  misc_feature: 427 for SV(C|O) and 28S
tcggggggcggggcggactgtccccagtgcgccccgggcgggtcgcgccgtcgggcccgggggaggttctctcggggccacgcgcgcgtcccccgaagagggggacggcggagcgagcgc

SEQ ID NO: 67115 - DNA, 120 bp, Homo sapiens
  misc_feature: 427 for SV(C|O) and 28S
gtgctctgaatgtcaaagtgaagaaattcaatgaagcgcgggtaaacggcgggagtaactatgactctcttaaggtagccaaatgcctcgtcatctaattagtgacgcgcatgaatggat

SEQ ID NO: 67116 - DNA, 120 bp, Homo sapiens
  misc_feature: 427 for SV(C|O) and 28S
ctccgccactccggattcggggatctgaacccgactccctttcgatcggccgagggcaacggaggccatcgcccgtcccttcggaacggcgctcgcccatctctcaggaccgactgaccc

SEQ ID NO: 67117 - DNA, 120 bp, Homo sapiens
  misc_feature: 427 for SV(C|O) and 28S
caccagagtttcctctggcttcgccctgcccaggcatagttcaccatctttcgggtcctaacacgtgcgctcgtgctccacctccccggcgcggcgggcgagacgggccggtggtgcgcc

SEQ ID NO: 67118 - DNA, 120 bp, Homo sapiens
  misc_feature: 427 for SV(C|O) and 28S
ggacacctgcgttaccgtttgacaggtgtaccgccccagtcaaactccccacctggcactgtccccggagcgggtcgcgcccggccggcgcgcggccgggcgcttggcgccagaagcgag

SEQ ID NO: 67119 - DNA, 120 bp, Homo sapiens
  misc_feature: 427 for SV(C|O) and 28S
gactgtccccagtgcgccccgggcgggtcgcgccgtcgggcccgggggaggttctctcggggccacgcgcgcgtcccccgaagagggggacggcggagcgagcgcacggggtcggcggcg

SEQ ID NO: 67120 - DNA, 120 bp, Homo sapiens; identical to SEQ ID NO: 51653
  misc_feature: 427 for SV(C|O) and 28S

SEQ ID NO: 67121 - DNA, 120 bp, Homo sapiens; identical to SEQ ID NO: 49656
  misc_feature: 426 for SV(C|O) and 28S

SEQ ID NO: 67122 - DNA, 120 bp, Homo sapiens
  misc_feature: 426 for SV(C|O) and 28S
ctgaggagccaatggggcgaagctaccatctgtgggattatgactgaacgcctctaagtcagaatcccgcccaggcggaacgatacggcagcgccgcggagcctcggttggcctcggata

SEQ ID NO: 67123 - DNA, 120 bp, Homo sapiens
  misc_feature: 426 for SV(C|O) and 28S
aagggctgggtcggtcgggctggggcgcgaagcggggctgggcgcgcgccgcggctggacgaggcgccgccgccccccccacgcccggggcacccccctcgcggccctcccccgccccac

SEQ ID NO: 67124 - DNA, 120 bp, Homo sapiens
  misc_feature: 426 for SV(C|O) and 28S
gtccccagtgcgccccgggcgggtcgcgccgtcgggcccgggggaggttctctcggggccacgcgcgcgtcccccgaagagggggacggcggagcgagcgcacggggtcggcggcgacgt

SEQ ID NO: 67125 - DNA, 120 bp, Homo sapiens
  misc_feature: 426 for SV(C|O) and 28S
ggtgttggttgatatagacagcaggacggtggccatggaagtcggaatccgctaaggagtgtgtaacaactcacctgccgaatcaactagccctgaaaatggatggcgctggagcgtcgg

SEQ ID NO: 67126 - DNA, 120 bp, Homo sapiens
  misc_feature: 426 for SV(C|O) and 28S
gggcccctcgcggggacaccgggggggcgccgggggcctcccacttattctacacctctcatgtctcttcaccgtgccagactagagtcaagctcaacagggtcttctttccccgctgat

SEQ ID NO: 67127 - DNA, 120 bp, Homo sapiens
  misc_feature: 426 for SV(C|O) and 28S
ggcactcgcattccacgcccggctccacgccagcgagccgggcttcttacccatttaaagtttgagaataggttgagatcgtttcggccccaagacctctaatcattcgctttaccggat

SEQ ID NO: 67128 - DNA, 120 bp, Homo sapiens
  misc_feature: 426 for SV(C|O) and 28S
gccactccggattcggggatctgaacccgactccctttcgatcggccgagggcaacggaggccatcgcccgtcccttcggaacggcgctcgcccatctctcaggaccgactgacccatgt

SEQ ID NO: 67129 - DNA, 120 bp, Homo sapiens
  misc_feature: 426 for SV(C|O) and 28S
acacctgcgttaccgtttgacaggtgtaccgccccagtcaaactccccacctggcactgtccccggagcgggtcgcgcccggccggcgcgcggccgggcgcttggcgccagaagcgagag

SEQ ID NO: 67130 - DNA, 120 bp, Homo sapiens; identical to SEQ ID NO: 50601
  misc_feature: 426 for SV(C|O) and 28S

SEQ ID NO: 67131 - DNA, 120 bp, Homo sapiens
  misc_feature: 426 for SV(C|O) and 28S
accacagccaagggaacgggcttggcggaatcagcggggaaagaagaccctgttgagcttgactctagtctggcacggtgaagagacatgagaggtgtagaataagtgggaggcccccgg

SEQ ID NO: 67132 - DNA, 120 bp, Homo sapiens
  misc_feature: 426 for SV(C|O) and 28S
atcccgcagcgccagttctgcttaccaaaagtggcccactaggcactcgcattccacgcccggctccacgccagcgagccgggcttcttacccatttaaagtttgagaataggttgagat

SEQ ID NO: 67133 - DNA, 120 bp, Homo sapiens
  misc_feature: 425 for SV(C|O) and 28S
ttcctctggcttcgccctgcccaggcatagttcaccatctttcgggtcctaacacgtgcgctcgtgctccacctccccggcgcggcgggcgagacgggccggtggtgcgccctcggcgga

SEQ ID NO: 67134 - DNA, 120 bp, Homo sapiens
  misc_feature: 425 for SV(C|O) and 28S
tgatatagacagcaggacggtggccatggaagtcggaatccgctaaggagtgtgtaacaactcacctgccgaatcaactagccctgaaaatggatggcgctggagcgtcgggcccatacc

SEQ ID NO: 67135 - DNA, 120 bp, Homo sapiens
  misc_feature: 425 for SV(C|O) and 28S
actgtccccagtgcgccccgggcgggtcgcgccgtcgggcccgggggaggttctctcggggccacgcgcgcgtcccccgaagagggggacggcggagcgagcgcacggggtcggcggcga

SEQ ID NO: 67136 - DNA, 120 bp, Homo sapiens; identical to SEQ ID NO: 51327
  misc_feature: 425 for SV(C|O) and 28S

SEQ ID NO: 67137 - DNA, 120 bp, Homo sapiens
  misc_feature: 425 for SV(C|O) and 28S
tagacagcaggacggtggccatggaagtcggaatccgctaaggagtgtgtaacaactcacctgccgaatcaactagccctgaaaatggatggcgctggagcgtcgggcccatacccggcc

SEQ ID NO: 67138 - DNA, 120 bp, Homo sapiens
  misc_feature: 425 for SV(C|O) and 28S
gtgttggttgatatagacagcaggacggtggccatggaagtcggaatccgctaaggagtgtgtaacaactcacctgccgaatcaactagccctgaaaatggatggcgctggagcgtcggg

SEQ ID NO: 67139 - DNA, 120 bp, Homo sapiens
  misc_feature: 425 for SV(C|O) and 28S
cgtcctgctgtctatatcaaccaacaccttttctggggtctgatgagcgtcggcatcgggcgccttaacccggcgttcggttcatcccgcagcgccagttctgcttaccaaaagtggccc

SEQ ID NO: 67140 - DNA, 120 bp, Homo sapiens
  misc_feature: 425 for SV(C|O) and 28S
caaagtgaagaaattcaatgaagcgcgggtaaacggcgggagtaactatgactctcttaaggtagccaaatgcctcgtcatctaattagtgacgcgcatgaatggatgaacgagattccc

SEQ ID NO: 67141 - DNA, 120 bp, Homo sapiens
  misc_feature: 425 for SV(C|O) and 28S
gcaggacggtggccatggaagtcggaatccgctaaggagtgtgtaacaactcacctgccgaatcaactagccctgaaaatggatggcgctggagcgtcgggcccatacccggccgtcgcc

SEQ ID NO: 67142 - DNA, 120 bp, Homo sapiens
  misc_feature: 425 for SV(C|O) and 28S
cacagccaagggaacgggcttggcggaatcagcggggaaagaagaccctgttgagcttgactctagtctggcacggtgaagagacatgagaggtgtagaataagtgggaggcccccggcg

SEQ ID NO: 67143 - DNA, 120 bp, Homo sapiens
  misc_feature: 425 for SV(C|O) and 28S
cgcattccacgcccggctccacgccagcgagccgggcttcttacccatttaaagtttgagaataggttgagatcgtttcggccccaagacctctaatcattcgctttaccggataaaact

SEQ ID NO: 67144 - DNA, 120 bp, Homo sapiens
  misc_feature: 424 for SV(C|O) and 28S
cgccccgggcgggtcgcgccgtcgggcccgggggaggttctctcggggccacgcgcgcgtcccccgaagagggggacggcggagcgagcgcacggggtcggcggcgacgtcggctaccca

SEQ ID NO: 67145 - DNA, 120 bp, Homo sapiens
  misc_feature: 424 for SV(C|O) and 28S
tgctctgaatgtcaaagtgaagaaattcaatgaagcgcgggtaaacggcgggagtaactatgactctcttaaggtagccaaatgcctcgtcatctaattagtgacgcgcatgaatggatg

SEQ ID NO: 67146 - DNA, 120 bp, Homo sapiens
  misc_feature: 424 for SV(C|O) and 28S
tctccgccactccggattcggggatctgaacccgactccctttcgatcggccgagggcaacggaggccatcgcccgtcccttcggaacggcgctcgcccatctctcaggaccgactgacc

SEQ ID NO: 67147 - DNA, 120 bp, Homo sapiens
  misc_feature: 424 for SV(C|O) and 28S
tccacgcccggctccacgccagcgagccgggcttcttacccatttaaagtttgagaataggttgagatcgtttcggccccaagacctctaatcattcgctttaccggataaaactgcgtg

SEQ ID NO: 67148 - DNA, 120 bp, Homo sapiens
  misc_feature: 424 for SV(C|O) and 28S
gctctgaatgtcaaagtgaagaaattcaatgaagcgcgggtaaacggcgggagtaactatgactctcttaaggtagccaaatgcctcgtcatctaattagtgacgcgcatgaatggatga

SEQ ID NO: 67149 - DNA, 120 bp, Homo sapiens
  misc_feature: 424 for SV(C|O) and 28S
gggcggactgtccccagtgcgccccgggcgggtcgcgccgtcgggcccgggggaggttctctcggggccacgcgcgcgtcccccgaagagggggacggcggagcgagcgcacggggtcgg

SEQ ID NO: 67150 - DNA, 120 bp, Homo sapiens
  misc_feature: 424 for SV(C|O) and 28S
ccacagccaagggaacgggcttggcggaatcagcggggaaagaagaccctgttgagcttgactctagtctggcacggtgaagagacatgagaggtgtagaataagtgggaggcccccggc

SEQ ID NO: 67151 - DNA, 120 bp, Homo sapiens; identical to SEQ ID NO: 51665
  misc_feature: 424 for SV(C|O) and 28S

SEQ ID NO: 67152 - DNA, 120 bp, Homo sapiens
  misc_feature: 424 for SV(C|O) and 28S
ctgaatgtcaaagtgaagaaattcaatgaagcgcgggtaaacggcgggagtaactatgactctcttaaggtagccaaatgcctcgtcatctaattagtgacgcgcatgaatggatgaacg

SEQ ID NO: 67153 - DNA, 120 bp, Homo sapiens
  misc_feature: 424 for SV(C|O) and 28S
caccgtcctgctgtctatatcaaccaacaccttttctggggtctgatgagcgtcggcatcgggcgccttaacccggcgttcggttcatcccgcagcgccagttctgcttaccaaaagtgg

SEQ ID NO: 67154 - DNA, 120 bp, Homo sapiens; identical to SEQ ID NO: 49640
  misc_feature: 423 for SV(C|O) and 28S

SEQ ID NO: 67155 - DNA, 120 bp, Homo sapiens; identical to SEQ ID NO: 51372
  misc_feature: 423 for SV(C|O) and 28S

SEQ ID NO: 67156 - DNA, 120 bp, Homo sapiens
  misc_feature: 423 for SV(C|O) and 28S
cactcgcattccacgcccggctccacgccagcgagccgggcttcttacccatttaaagtttgagaataggttgagatcgtttcggccccaagacctctaatcattcgctttaccggataa

SEQ ID NO: 67157 - DNA, 120 bp, Homo sapiens
  misc_feature: 423 for SV(C|O) and 28S
gacacctgcgttaccgtttgacaggtgtaccgccccagtcaaactccccacctggcactgtccccggagcgggtcgcgcccggccggcgcgcggccgggcgcttggcgccagaagcgaga

SEQ ID NO: 67158 - DNA, 120 bp, Homo sapiens
  misc_feature: 423 for SV(C|O) and 28S
agggctgggtcggtcgggctggggcgcgaagcggggctgggcgcgcgccgcggctggacgaggcgccgccgccccccccacgcccggggcacccccctcgcggccctcccccgccccacc

SEQ ID NO: 67159 - DNA, 120 bp, Homo sapiens
  misc_feature: 423 for SV(C|O) and 28S
gggctgggtcggtcgggctggggcgcgaagcggggctgggcgcgcgccgcggctggacgaggcgccgccgccccccccacgcccggggcacccccctcgcggccctcccccgccccaccc

SEQ ID NO: 67160 - DNA, 120 bp, Homo sapiens
  misc_feature: 423 for SV(C|O) and 28S
gcgccccgggcgggtcgcgccgtcgggcccgggggaggttctctcggggccacgcgcgcgtcccccgaagagggggacggcggagcgagcgcacggggtcggcggcgacgtcggctaccc

SEQ ID NO: 67161 - DNA, 120 bp, Homo sapiens; identical to SEQ ID NO: 51337
  misc_feature: 423 for SV(C|O) and 28S

SEQ ID NO: 67162 - DNA, 120 bp, Homo sapiens
  misc_feature: 423 for SV(C|O) and 28S
gcattccacgcccggctccacgccagcgagccgggcttcttacccatttaaagtttgagaataggttgagatcgtttcggccccaagacctctaatcattcgctttaccggataaaactg

SEQ ID NO: 67163 - DNA, 120 bp, Homo sapiens
  misc_feature: 423 for SV(C|O) and 28S
gacagcaggacggtggccatggaagtcggaatccgctaaggagtgtgtaacaactcacctgccgaatcaactagccctgaaaatggatggcgctggagcgtcgggcccatacccggccgt

SEQ ID NO: 67164 - DNA, 120 bp, Homo sapiens
  misc_feature: 423 for SV(C|O) and 28S
agagtttcctctggcttcgccctgcccaggcatagttcaccatctttcgggtcctaacacgtgcgctcgtgctccacctccccggcgcggcgggcgagacgggccggtggtgcgccctcg

SEQ ID NO: 67165 - DNA, 120 bp, Homo sapiens; identical to SEQ ID NO: 51321
  misc_feature: 422 for SV(C|O) and 28S

SEQ ID NO: 67166 - DNA, 120 bp, Homo sapiens
  misc_feature: 422 for SV(C|O) and 28S
tgcgccccgggcgggtcgcgccgtcgggcccgggggaggttctctcggggccacgcgcgcgtcccccgaagagggggacggcggagcgagcgcacggggtcggcggcgacgtcggctacc

SEQ ID NO: 67167 - DNA, 120 bp, Homo sapiens
  misc_feature: 422 for SV(C|O) and 28S
cgggcccctcgcggggacaccgggggggcgccgggggcctcccacttattctacacctctcatgtctcttcaccgtgccagactagagtcaagctcaacagggtcttctttccccgctga

SEQ ID NO: 67168 - DNA, 120 bp, Homo sapiens
  misc_feature: 422 for SV(C|O) and 28S
gcggactgtccccagtgcgccccgggcgggtcgcgccgtcgggcccgggggaggttctctcggggccacgcgcgcgtcccccgaagagggggacggcggagcgagcgcacggggtcggcg

SEQ ID NO: 67169 - DNA, 120 bp, Homo sapiens; identical to SEQ ID NO: 49758
  misc_feature: 422 for SV(C|O) and 28S

SEQ ID NO: 67170 - DNA, 120 bp, Homo sapiens
  misc_feature: 422 for SV(C|O) and 28S
ccacgcccggctccacgccagcgagccgggcttcttacccatttaaagtttgagaataggttgagatcgtttcggccccaagacctctaatcattcgctttaccggataaaactgcgtgg

SEQ ID NO: 67171 - DNA, 120 bp, Homo sapiens
  misc_feature: 421 for SV(C|O) and 28S
ggcggactgtccccagtgcgccccgggcgggtcgcgccgtcgggcccgggggaggttctctcggggccacgcgcgcgtcccccgaagagggggacggcggagcgagcgcacggggtcggc

SEQ ID NO: 67172 - DNA, 120 bp, Homo sapiens
  misc_feature: 421 for SV(C|O) and 28S
cacgcccggctccacgccagcgagccgggcttcttacccatttaaagtttgagaataggttgagatcgtttcggccccaagacctctaatcattcgctttaccggataaaactgcgtggc

SEQ ID NO: 67173 - DNA, 120 bp, Homo sapiens; identical to SEQ ID NO: 50493
  misc_feature: 421 for SV(C|O) and 28S

SEQ ID NO: 67174 - DNA, 120 bp, Homo sapiens
  misc_feature: 421 for SV(C|O) and 28S
agacagcaggacggtggccatggaagtcggaatccgctaaggagtgtgtaacaactcacctgccgaatcaactagccctgaaaatggatggcgctggagcgtcgggcccatacccggccg

SEQ ID NO: 67175 - DNA, 120 bp, Homo sapiens; identical to SEQ ID NO: 51373
  misc_feature: 420 for SV(C|O) and 28S

SEQ ID NO: 67176 - DNA, 120 bp, Homo sapiens
  misc_feature: 420 for SV(C|O) and 28S
tccgccactccggattcggggatctgaacccgactccctttcgatcggccgagggcaacggaggccatcgcccgtcccttcggaacggcgctcgcccatctctcaggaccgactgaccca

SEQ ID NO: 67177 - DNA, 120 bp, Homo sapiens
  misc_feature: 420 for SV(C|O) and 28S
taagggctgggtcggtcgggctggggcgcgaagcggggctgggcgcgcgccgcggctggacgaggcgccgccgccccccccacgcccggggcacccccctcgcggccctcccccgcccca

SEQ ID NO: 67178 - DNA, 120 bp, Homo sapiens
  misc_feature: 420 for SV(C|O) and 28S
tgaggagccaatggggcgaagctaccatctgtgggattatgactgaacgcctctaagtcagaatcccgcccaggcggaacgatacggcagcgccgcggagcctcggttggcctcggatag

SEQ ID NO: 67179 - DNA, 120 bp, Homo sapiens
  misc_feature: 420 for SV(C|O) and 28S
tgaagaaattcaatgaagcgcgggtaaacggcgggagtaactatgactctcttaaggtagccaaatgcctcgtcatctaattagtgacgcgcatgaatggatgaacgagattcccactgt

SEQ ID NO: 67180 - DNA, 120 bp, Homo sapiens; identical to SEQ ID NO: 49702
  misc_feature: 420 for SV(C|O) and 28S

SEQ ID NO: 67181 - DNA, 120 bp, Homo sapiens
  misc_feature: 420 for SV(C|O) and 28S
cattccacgcccggctccacgccagcgagccgggcttcttacccatttaaagtttgagaataggttgagatcgtttcggccccaagacctctaatcattcgctttaccggataaaactgc

SEQ ID NO: 67182 - DNA, 120 bp, Homo sapiens
  misc_feature: 420 for SV(C|O) and 28S
atatagacagcaggacggtggccatggaagtcggaatccgctaaggagtgtgtaacaactcacctgccgaatcaactagccctgaaaatggatggcgctggagcgtcgggcccatacccg

SEQ ID NO: 67183 - DNA, 120 bp, Homo sapiens; identical to SEQ ID NO: 49328
  misc_feature: 420 for SV(C|O) and 28S

SEQ ID NO: 67184 - DNA, 120 bp, Homo sapiens; identical to SEQ ID NO: 51304
  misc_feature: 419 for SV(C|O) and 28S

SEQ ID NO: 67185 - DNA, 120 bp, Homo sapiens
  misc_feature: 419 for SV(C|O) and 28S
accgtcctgctgtctatatcaaccaacaccttttctggggtctgatgagcgtcggcatcgggcgccttaacccggcgttcggttcatcccgcagcgccagttctgcttaccaaaagtggc

SEQ ID NO: 67186 - DNA, 120 bp, Homo sapiens
  misc_feature: 418 for SV(C|O) and 28S
tttcctctggcttcgccctgcccaggcatagttcaccatctttcgggtcctaacacgtgcgctcgtgctccacctccccggcgcggcgggcgagacgggccggtggtgcgccctcggcgg

SEQ ID NO: 67187 - DNA, 120 bp, Homo sapiens
  misc_feature: 418 for SV(C|O) and 28S
tatagacagcaggacggtggccatggaagtcggaatccgctaaggagtgtgtaacaactcacctgccgaatcaactagccctgaaaatggatggcgctggagcgtcgggcccatacccgg

SEQ ID NO: 67188 - DNA, 120 bp, Homo sapiens
  misc_feature: 418 for SV(C|O) and 28S
gtttcctctggcttcgccctgcccaggcatagttcaccatctttcgggtcctaacacgtgcgctcgtgctccacctccccggcgcggcgggcgagacgggccggtggtgcgccctcggcg

SEQ ID NO: 67189 - DNA, 120 bp, Homo sapiens
  misc_feature: 418 for SV(C|O) and 28S
gatatagacagcaggacggtggccatggaagtcggaatccgctaaggagtgtgtaacaactcacctgccgaatcaactagccctgaaaatggatggcgctggagcgtcgggcccataccc

SEQ ID NO: 67190 - DNA, 120 bp, Homo sapiens; identical to SEQ ID NO: 51419
  misc_feature: 418 for SV(C|O) and 28S

SEQ ID NO: 67191 - DNA, 120 bp, Homo sapiens
  misc_feature: 418 for SV(C|O) and 28S
cacctgcgttaccgtttgacaggtgtaccgccccagtcaaactccccacctggcactgtccccggagcgggtcgcgcccggccggcgcgcggccgggcgcttggcgccagaagcgagagc

SEQ ID NO: 67192 - DNA, 120 bp, Homo sapiens
  misc_feature: 418 for SV(C|O) and 28S
cggggcggactgtccccagtgcgccccgggcgggtcgcgccgtcgggcccgggggaggttctctcggggccacgcgcgcgtcccccgaagagggggacggcggagcgagcgcacggggtc

SEQ ID NO: 67193 - DNA, 120 bp, Homo sapiens; identical to SEQ ID NO: 49361
  misc_feature: 418 for SV(C|O) and 28S

SEQ ID NO: 67194 - DNA, 120 bp, Homo sapiens
  misc_feature: 417 for SV(C|O) and 28S
acagccaagggaacgggcttggcggaatcagcggggaaagaagaccctgttgagcttgactctagtctggcacggtgaagagacatgagaggtgtagaataagtgggaggcccccggcgc

SEQ ID NO: 67195 - DNA, 120 bp, Homo sapiens; identical to SEQ ID NO: 51428
  misc_feature: 417 for SV(C|O) and 28S

SEQ ID NO: 67196 - DNA, 120 bp, Homo sapiens
  misc_feature: 416 for SV(C|O) and 28S
tgtccccagtgcgccccgggcgggtcgcgccgtcgggcccgggggaggttctctcggggccacgcgcgcgtcccccgaagagggggacggcggagcgagcgcacggggtcggcggcgacg

SEQ ID NO: 67197 - DNA, 120 bp, Homo sapiens
  misc_feature: 416 for SV(C|O) and 28S
tcctctggcttcgccctgcccaggcatagttcaccatctttcgggtcctaacacgtgcgctcgtgctccacctccccggcgcggcgggcgagacgggccggtggtgcgccctcggcggac

SEQ ID NO: 67198 - DNA, 120 bp, Homo sapiens; identical to SEQ ID NO: 51380
  misc_feature: 416 for SV(C|O) and 28S

SEQ ID NO: 67199 - DNA, 120 bp, Homo sapiens
  misc_feature: 416 for SV(C|O) and 28S
gtgcgccccgggcgggtcgcgccgtcgggcccgggggaggttctctcggggccacgcgcgcgtcccccgaagagggggacggcggagcgagcgcacggggtcggcggcgacgtcggctac

SEQ ID NO: 67200 - DNA, 120 bp, Homo sapiens
  misc_feature: 416 for SV(C|O) and 28S
ccgggcccctcgcggggacaccgggggggcgccgggggcctcccacttattctacacctctcatgtctcttcaccgtgccagactagagtcaagctcaacagggtcttctttccccgctg

SEQ ID NO: 67201 - DNA, 120 bp, Homo sapiens; identical to SEQ ID NO: 51445
  misc_feature: 416 for SV(C|O) and 28S

SEQ ID NO: 67202 - DNA, 120 bp, Homo sapiens; identical to SEQ ID NO: 51430
  misc_feature: 415 for SV(C|O) and 28S

SEQ ID NO: 67203 - DNA, 120 bp, Homo sapiens; identical to SEQ ID NO: 51450
  misc_feature: 415 for SV(C|O) and 28S

SEQ ID NO: 67204 - DNA, 120 bp, Homo sapiens
  misc_feature: 415 for SV(C|O) and 28S
cagccaagggaacgggcttggcggaatcagcggggaaagaagaccctgttgagcttgactctagtctggcacggtgaagagacatgagaggtgtagaataagtgggaggcccccggcgcc

SEQ ID NO: 67205 - DNA, 120 bp, Homo sapiens
  misc_feature: 415 for SV(C|O) and 28S
ccgtcctgctgtctatatcaaccaacaccttttctggggtctgatgagcgtcggcatcgggcgccttaacccggcgttcggttcatcccgcagcgccagttctgcttaccaaaagtggcc

SEQ ID NO: 67206 - DNA, 120 bp, Homo sapiens
  misc_feature: 415 for SV(C|O) and 28S
atagacagcaggacggtggccatggaagtcggaatccgctaaggagtgtgtaacaactcacctgccgaatcaactagccctgaaaatggatggcgctggagcgtcgggcccatacccggc

SEQ ID NO: 67207 - DNA, 120 bp, Homo sapiens; identical to SEQ ID NO: 49487
  misc_feature: 415 for SV(C|O) and 28S

SEQ ID NO: 67208 - DNA, 120 bp, Homo sapiens
  misc_feature: 415 for SV(C|O) and 28S
cggactgtccccagtgcgccccgggcgggtcgcgccgtcgggcccgggggaggttctctcggggccacgcgcgcgtcccccgaagagggggacggcggagcgagcgcacggggtcggcgg

SEQ ID NO: 67209 - DNA, 120 bp, Homo sapiens; identical to SEQ ID NO: 49571
  misc_feature: 414 for SV(C|O) and 28S

SEQ ID NO: 67210 - DNA, 120 bp, Homo sapiens
  misc_feature: 414 for SV(C|O) and 28S
cagcaggacggtggccatggaagtcggaatccgctaaggagtgtgtaacaactcacctgccgaatcaactagccctgaaaatggatggcgctggagcgtcgggcccatacccggccgtcg

SEQ ID NO: 67211 - DNA, 120 bp, Homo sapiens; identical to SEQ ID NO: 51415
  misc_feature: 413 for SV(C|O) and 28S

SEQ ID NO: 67212 - DNA, 120 bp, Homo sapiens
  misc_feature: 413 for SV(C|O) and 28S
cctgcgttaccgtttgacaggtgtaccgccccagtcaaactccccacctggcactgtccccggagcgggtcgcgcccggccggcgcgcggccgggcgcttggcgccagaagcgagagccc

SEQ ID NO: 67213 - DNA, 120 bp, Homo sapiens
  misc_feature: 413 for SV(C|O) and 28S
acctgcgttaccgtttgacaggtgtaccgccccagtcaaactccccacctggcactgtccccggagcgggtcgcgcccggccggcgcgcggccgggcgcttggcgccagaagcgagagcc

SEQ ID NO: 67214 - DNA, 120 bp, Homo sapiens
  misc_feature: 413 for SV(C|O) and 28S
gcggggcggactgtccccagtgcgccccgggcgggtcgcgccgtcgggcccgggggaggttctctcggggccacgcgcgcgtcccccgaagagggggacggcggagcgagcgcacggggt

SEQ ID NO: 67215 - DNA, 120 bp, Homo sapiens
  misc_feature: 413 for SV(C|O) and 28S
gagtttcctctggcttcgccctgcccaggcatagttcaccatctttcgggtcctaacacgtgcgctcgtgctccacctccccggcgcggcgggcgagacgggccggtggtgcgccctcgg

SEQ ID NO: 67216 - DNA, 120 bp, Homo sapiens; identical to SEQ ID NO: 51371
  misc_feature: 413 for SV(C|O) and 28S

SEQ ID NO: 67217 - DNA, 120 bp, Homo sapiens
  misc_feature: 413 for SV(C|O) and 28S
caggacggtggccatggaagtcggaatccgctaaggagtgtgtaacaactcacctgccgaatcaactagccctgaaaatggatggcgctggagcgtcgggcccatacccggccgtcgccg

SEQ ID NO: 67218 - DNA, 120 bp, Homo sapiens
  misc_feature: 412 for SV(C|O) and 28S
cgccagctatcctgagggaaacttcggagggaaccagctactagatggttcgattagtctttcgcccctatacccaggtcggacgaccgatttgcacgtcaggaccgctacggacctcca

SEQ ID NO: 67219 - DNA, 120 bp, Homo sapiens
  misc_feature: 412 for SV(C|O) and 28S
ccaagggaacgggcttggcggaatcagcggggaaagaagaccctgttgagcttgactctagtctggcacggtgaagagacatgagaggtgtagaataagtgggaggcccccggcgccccc

SEQ ID NO: 67220 - DNA, 120 bp, Homo sapiens
  misc_feature: 412 for SV(C|O) and 28S
gcgccagctatcctgagggaaacttcggagggaaccagctactagatggttcgattagtctttcgcccctatacccaggtcggacgaccgatttgcacgtcaggaccgctacggacctcc

SEQ ID NO: 67221 - DNA, 120 bp, Homo sapiens
  misc_feature: 412 for SV(C|O) and 28S
agtttcctctggcttcgccctgcccaggcatagttcaccatctttcgggtcctaacacgtgcgctcgtgctccacctccccggcgcggcgggcgagacgggccggtggtgcgccctcggc

SEQ ID NO: 67222 - DNA, 120 bp, Homo sapiens
  misc_feature: 412 for SV(C|O) and 28S
acaccgggggggcgccgggggcctcccacttattctacacctctcatgtctcttcaccgtgccagactagagtcaagctcaacagggtcttctttccccgctgattccgccaagcccgtt

SEQ ID NO: 67223 - DNA, 120 bp, Homo sapiens; identical to SEQ ID NO: 51379
  misc_feature: 411 for SV(C|O) and 28S

SEQ ID NO: 67224 - DNA, 120 bp, Homo sapiens
  misc_feature: 411 for SV(C|O) and 28S
gccaagggaacgggcttggcggaatcagcggggaaagaagaccctgttgagcttgactctagtctggcacggtgaagagacatgagaggtgtagaataagtgggaggcccccggcgcccc

SEQ ID NO: 67225 - DNA, 120 bp, Homo sapiens
  misc_feature: 411 for SV(C|O) and 28S
agccaagggaacgggcttggcggaatcagcggggaaagaagaccctgttgagcttgactctagtctggcacggtgaagagacatgagaggtgtagaataagtgggaggcccccggcgccc

SEQ ID NO: 67226 - DNA, 120 bp, Homo sapiens
  misc_feature: 411 for SV(C|O) and 28S
ggcccctcgcggggacaccgggggggcgccgggggcctcccacttattctacacctctcatgtctcttcaccgtgccagactagagtcaagctcaacagggtcttctttccccgctgatt

SEQ ID NO: 67227 - DNA, 120 bp, Homo sapiens
  misc_feature: 410 for SV(C|O) and 28S
caagggaacgggcttggcggaatcagcggggaaagaagaccctgttgagcttgactctagtctggcacggtgaagagacatgagaggtgtagaataagtgggaggcccccggcgcccccc

SEQ ID NO: 67228 - DNA, 120 bp, Homo sapiens
  misc_feature: 410 for SV(C|O) and 28S
agcgccagctatcctgagggaaacttcggagggaaccagctactagatggttcgattagtctttcgcccctatacccaggtcggacgaccgatttgcacgtcaggaccgctacggacctc

SEQ ID NO: 67229 - DNA, 120 bp, Homo sapiens; identical to SEQ ID NO: 51351
  misc_feature: 410 for SV(C|O) and 28S

SEQ ID NO: 67230 - DNA, 120 bp, Homo sapiens
  misc_feature: 409 for SV(C|O) and 28S
ctgcgttaccgtttgacaggtgtaccgccccagtcaaactccccacctggcactgtccccggagcgggtcgcgcccggccggcgcgcggccgggcgcttggcgccagaagcgagagcccc

SEQ ID NO: 67231 - DNA, 120 bp, Homo sapiens
  misc_feature: 409 for SV(C|O) and 28S
gcccctcgcggggacaccgggggggcgccgggggcctcccacttattctacacctctcatgtctcttcaccgtgccagactagagtcaagctcaacagggtcttctttccccgctgattc

SEQ ID NO: 67232 - DNA, 120 bp, Homo sapiens
  misc_feature: 409 for SV(C|O) and 28S
ccctcgcggggacaccgggggggcgccgggggcctcccacttattctacacctctcatgtctcttcaccgtgccagactagagtcaagctcaacagggtcttctttccccgctgattccg

SEQ ID NO: 67233 - DNA, 120 bp, Homo sapiens; identical to SEQ ID NO: 51325
  misc_feature: 409 for SV(C|O) and 28S

SEQ ID NO: 67234 - DNA, 120 bp, Homo sapiens
  misc_feature: 408 for SV(C|O) and 28S
cccctcgcggggacaccgggggggcgccgggggcctcccacttattctacacctctcatgtctcttcaccgtgccagactagagtcaagctcaacagggtcttctttccccgctgattcc

SEQ ID NO: 67235 - DNA, 120 bp, Homo sapiens
  misc_feature: 408 for SV(C|O) and 28S
gagcgccagctatcctgagggaaacttcggagggaaccagctactagatggttcgattagtctttcgcccctatacccaggtcggacgaccgatttgcacgtcaggaccgctacggacct

SEQ ID NO: 67236 - DNA, 120 bp, Homo sapiens
  misc_feature: 407 for SV(C|O) and 28S
aagggaacgggcttggcggaatcagcggggaaagaagaccctgttgagcttgactctagtctggcacggtgaagagacatgagaggtgtagaataagtgggaggcccccggcgccccccc

SEQ ID NO: 67237 - DNA, 120 bp, Homo sapiens
  misc_feature: 407 for SV(C|O) and 28S
ggcccctctctcggggcgaacccattccagggcgccctgcccttcacaaagaaaagagaactctccccggggctcccgccggcttctccgggatcggtcgcgttaccgcactggacgcct

SEQ ID NO: 67238 - DNA, 120 bp, Homo sapiens; identical to SEQ ID NO: 51385
  misc_feature: 407 for SV(C|O) and 28S

SEQ ID NO: 67239 - DNA, 120 bp, Homo sapiens
  misc_feature: 407 for SV(C|O) and 28S
acgcccggctccacgccagcgagccgggcttcttacccatttaaagtttgagaataggttgagatcgtttcggccccaagacctctaatcattcgctttaccggataaaactgcgtggcg

SEQ ID NO: 67240 - DNA, 120 bp, Homo sapiens
  misc_feature: 406 for SV(C|O) and 28S
gaggagccaatggggcgaagctaccatctgtgggattatgactgaacgcctctaagtcagaatcccgcccaggcggaacgatacggcagcgccgcggagcctcggttggcctcggatagc

SEQ ID NO: 67241 - DNA, 120 bp, Homo sapiens
  misc_feature: 405 for SV(C|O) and 28S
gggacaccgggggggcgccgggggcctcccacttattctacacctctcatgtctcttcaccgtgccagactagagtcaagctcaacagggtcttctttccccgctgattccgccaagccc

SEQ ID NO: 67242 - DNA, 120 bp, Homo sapiens
  misc_feature: 405 for SV(C|O) and 28S
gaacgggcttggcggaatcagcggggaaagaagaccctgttgagcttgactctagtctggcacggtgaagagacatgagaggtgtagaataagtgggaggcccccggcgcccccccggtg

SEQ ID NO: 67243 - DNA, 120 bp, Homo sapiens
  misc_feature: 404 for SV(C|O) and 28S
gctgggtcggtcgggctggggcgcgaagcggggctgggcgcgcgccgcggctggacgaggcgccgccgccccccccacgcccggggcacccccctcgcggccctcccccgccccaccccg

SEQ ID NO: 67244 - DNA, 120 bp, Homo sapiens
  misc_feature: 404 for SV(C|O) and 28S
cctcgcggggacaccgggggggcgccgggggcctcccacttattctacacctctcatgtctcttcaccgtgccagactagagtcaagctcaacagggtcttctttccccgctgattccgc

SEQ ID NO: 67245 - DNA, 120 bp, Homo sapiens
  misc_feature: 403 for SV(C|O) and 28S
gggagctgctctgctacgtacgaaaccccgacccagaagcaggtcgtctacgaatggtttagcgccaggttccccacgaacgtgcggtgcgtgacgggcgagggggcggccgcctttccg

SEQ ID NO: 67246 - DNA, 120 bp, Homo sapiens
  misc_feature: 402 for SV(C|O) and 28S
ctgggtcggtcgggctggggcgcgaagcggggctgggcgcgcgccgcggctggacgaggcgccgccgccccccccacgcccggggcacccccctcgcggccctcccccgccccaccccgc

SEQ ID NO: 67247 - DNA, 120 bp, Homo sapiens
  misc_feature: 401 for SV(C|O) and 28S
gcgtcactaattagatgacgaggcatttggctaccttaagagagtcatagttactcccgccgtttacccgcgcttcattgaatttcttcactttgacattcagagcactgggcagaaatc

SEQ ID NO: 67248 - DNA, 120 bp, Homo sapiens
  misc_feature: 400 for SV(C|O) and 28S
cgcggggtggggcgggggagggccgcgaggggggtgccccgggcgtggggggggcggcggcgcctcgtccagccgcggcgcgcgcccagccccgcttcgcgccccagcccgaccgaccca

SEQ ID NO: 67249 - DNA, 120 bp, Homo sapiens
  misc_feature: 400 for SV(C|O) and 28S
ggggacaccgggggggcgccgggggcctcccacttattctacacctctcatgtctcttcaccgtgccagactagagtcaagctcaacagggtcttctttccccgctgattccgccaagcc

SEQ ID NO: 67250 - DNA, 120 bp, Homo sapiens
  misc_feature: 399 for SV(C|O) and 28S
tgggaaacggggcgcggccggaaaggcggccgccccctcgcccgtcacgcaccgcacgttcgtggggaacctggcgctaaaccattcgtagacgacctgcttctgggtcggggtttcgta

SEQ ID NO: 67251 - DNA, 120 bp, Homo sapiens
  misc_feature: 399 for SV(C|O) and 28S
agagcgccagctatcctgagggaaacttcggagggaaccagctactagatggttcgattagtctttcgcccctatacccaggtcggacgaccgatttgcacgtcaggaccgctacggacc

SEQ ID NO: 67252 - DNA, 120 bp, Homo sapiens
  misc_feature: 398 for SV(C|O) and 28S
gcgcggggtggggcgggggagggccgcgaggggggtgccccgggcgtggggggggcggcggcgcctcgtccagccgcggcgcgcgcccagccccgcttcgcgccccagcccgaccgaccc

SEQ ID NO: 67253 - DNA, 120 bp, Homo sapiens
  misc_feature: 397 for SV(C|O) and 28S
aggagccaatggggcgaagctaccatctgtgggattatgactgaacgcctctaagtcagaatcccgcccaggcggaacgatacggcagcgccgcggagcctcggttggcctcggatagcc

SEQ ID NO: 67254 - DNA, 120 bp, Homo sapiens
  misc_feature: 396 for SV(C|O) and 28S
ggacaccgggggggcgccgggggcctcccacttattctacacctctcatgtctcttcaccgtgccagactagagtcaagctcaacagggtcttctttccccgctgattccgccaagcccg

SEQ ID NO: 67255 - DNA, 120 bp, Homo sapiens
  misc_feature: 395 for SV(C|O) and 28S
cgtcactaattagatgacgaggcatttggctaccttaagagagtcatagttactcccgccgtttacccgcgcttcattgaatttcttcactttgacattcagagcactgggcagaaatca

SEQ ID NO: 67256 - DNA, 120 bp, Homo sapiens
  misc_feature: 395 for SV(C|O) and 28S
cggggacaccgggggggcgccgggggcctcccacttattctacacctctcatgtctcttcaccgtgccagactagagtcaagctcaacagggtcttctttccccgctgattccgccaagc

SEQ ID NO: 67257 - DNA, 120 bp, Homo sapiens; identical to SEQ ID NO: 51464
  misc_feature: 394 for SV(C|O) and 28S

SEQ ID NO: 67258 - DNA, 120 bp, Homo sapiens
  misc_feature: 394 for SV(C|O) and 28S
gggaacgggcttggcggaatcagcggggaaagaagaccctgttgagcttgactctagtctggcacggtgaagagacatgagaggtgtagaataagtgggaggcccccggcgcccccccgg

SEQ ID NO: 67259 - DNA, 120 bp, Homo sapiens
  misc_feature: 394 for SV(C|O) and 28S
ctcgcggggacaccgggggggcgccgggggcctcccacttattctacacctctcatgtctcttcaccgtgccagactagagtcaagctcaacagggtcttctttccccgctgattccgcc

SEQ ID NO: 67260 - DNA, 120 bp, Homo sapiens
  misc_feature: 394 for SV(C|O) and 28S
gcggggacaccgggggggcgccgggggcctcccacttattctacacctctcatgtctcttcaccgtgccagactagagtcaagctcaacagggtcttctttccccgctgattccgccaag

SEQ ID NO: 67261 - DNA, 120 bp, Homo sapiens
  misc_feature: 393 for SV(C|O) and 28S
ggaacgggcttggcggaatcagcggggaaagaagaccctgttgagcttgactctagtctggcacggtgaagagacatgagaggtgtagaataagtgggaggcccccggcgcccccccggt

SEQ ID NO: 67262 - DNA, 120 bp, Homo sapiens
  misc_feature: 393 for SV(C|O) and 28S
ggaaacggggcgcggccggaaaggcggccgccccctcgcccgtcacgcaccgcacgttcgtggggaacctggcgctaaaccattcgtagacgacctgcttctgggtcggggtttcgtacg

SEQ ID NO: 67263 - DNA, 120 bp, Homo sapiens
  misc_feature: 393 for SV(C|O) and 28S
gacaccgggggggcgccgggggcctcccacttattctacacctctcatgtctcttcaccgtgccagactagagtcaagctcaacagggtcttctttccccgctgattccgccaagcccgt

SEQ ID NO: 67264 - DNA, 120 bp, Homo sapiens
  misc_feature: 393 for SV(C|O) and 28S
ctgggaaacggggcgcggccggaaaggcggccgccccctcgcccgtcacgcaccgcacgttcgtggggaacctggcgctaaaccattcgtagacgacctgcttctgggtcggggtttcgt

SEQ ID NO: 67265 - DNA, 120 bp, Homo sapiens
  misc_feature: 392 for SV(C|O) and 28S
tgcgttaccgtttgacaggtgtaccgccccagtcaaactccccacctggcactgtccccggagcgggtcgcgcccggccggcgcgcggccgggcgcttggcgccagaagcgagagcccct

SEQ ID NO: 67266 - DNA, 120 bp, Homo sapiens
  misc_feature: 392 for SV(C|O) and 28S
gagagcgccagctatcctgagggaaacttcggagggaaccagctactagatggttcgattagtctttcgcccctatacccaggtcggacgaccgatttgcacgtcaggaccgctacggac

SEQ ID NO: 67267 - DNA, 120 bp, Homo sapiens
  misc_feature: 392 for SV(C|O) and 28S
gggaaacggggcgcggccggaaaggcggccgccccctcgcccgtcacgcaccgcacgttcgtggggaacctggcgctaaaccattcgtagacgacctgcttctgggtcggggtttcgtac

SEQ ID NO: 67268 - DNA, 120 bp, Homo sapiens
  misc_feature: 392 for SV(C|O) and 28S
gcgagagcgccagctatcctgagggaaacttcggagggaaccagctactagatggttcgattagtctttcgcccctatacccaggtcggacgaccgatttgcacgtcaggaccgctacgg

SEQ ID NO: 67269 - DNA, 120 bp, Homo sapiens
  misc_feature: 392 for SV(C|O) and 28S
cctgggaaacggggcgcggccggaaaggcggccgccccctcgcccgtcacgcaccgcacgttcgtggggaacctggcgctaaaccattcgtagacgacctgcttctgggtcggggtttcg

SEQ ID NO: 67270 - DNA, 120 bp, Homo sapiens
  misc_feature: 390 for SV(C|O) and 28S
tcgcggggacaccgggggggcgccgggggcctcccacttattctacacctctcatgtctcttcaccgtgccagactagagtcaagctcaacagggtcttctttccccgctgattccgcca

SEQ ID NO: 67271 - DNA, 120 bp, Homo sapiens; identical to SEQ ID NO: 51505
  misc_feature: 390 for SV(C|O) and 28S

SEQ ID NO: 67272 - DNA, 120 bp, Homo sapiens
  misc_feature: 390 for SV(C|O) and 28S
agggaacgggcttggcggaatcagcggggaaagaagaccctgttgagcttgactctagtctggcacggtgaagagacatgagaggtgtagaataagtgggaggcccccggcgcccccccg

SEQ ID NO: 67273 - DNA, 120 bp, Homo sapiens
  misc_feature: 388 for SV(C|O) and 28S
cgagagcgccagctatcctgagggaaacttcggagggaaccagctactagatggttcgattagtctttcgcccctatacccaggtcggacgaccgatttgcacgtcaggaccgctacgga

SEQ ID NO: 67274 - DNA, 120 bp, Homo sapiens
  misc_feature: 388 for SV(C|O) and 28S
ggagctgctctgctacgtacgaaaccccgacccagaagcaggtcgtctacgaatggtttagcgccaggttccccacgaacgtgcggtgcgtgacgggcgagggggcggccgcctttccgg

SEQ ID NO: 67275 - DNA, 120 bp, Homo sapiens
  misc_feature: 388 for SV(C|O) and 28S
ggagccaatggggcgaagctaccatctgtgggattatgactgaacgcctctaagtcagaatcccgcccaggcggaacgatacggcagcgccgcggagcctcggttggcctcggatagccg

SEQ ID NO: 67276 - DNA, 120 bp, Homo sapiens
  misc_feature: 387 for SV(C|O) and 28S
gcccctctctcggggcgaacccattccagggcgccctgcccttcacaaagaaaagagaactctccccggggctcccgccggcttctccgggatcggtcgcgttaccgcactggacgcctc

SEQ ID NO: 67277 - DNA, 120 bp, Homo sapiens
  misc_feature: 386 for SV(C|O) and 28S
tctgcgagagcgccagctatcctgagggaaacttcggagggaaccagctactagatggttcgattagtctttcgcccctatacccaggtcggacgaccgatttgcacgtcaggaccgcta

SEQ ID NO: 67278 - DNA, 120 bp, Homo sapiens
  misc_feature: 386 for SV(C|O) and 28S
cgcgcggggtggggcgggggagggccgcgaggggggtgccccgggcgtggggggggcggcggcgcctcgtccagccgcggcgcgcgcccagccccgcttcgcgccccagcccgaccgacc

SEQ ID NO: 67279 - DNA, 120 bp, Homo sapiens
  misc_feature: 385 for SV(C|O) and 28S
gtcactaattagatgacgaggcatttggctaccttaagagagtcatagttactcccgccgtttacccgcgcttcattgaatttcttcactttgacattcagagcactgggcagaaatcac

SEQ ID NO: 67280 - DNA, 120 bp, Homo sapiens; identical to SEQ ID NO: 51023
  misc_feature: 385 for SV(C|O) and 28S

SEQ ID NO: 67281 - DNA, 120 bp, Homo sapiens; identical to SEQ ID NO: 50937
  misc_feature: 384 for SV(C|O) and 28S

SEQ ID NO: 67282 - DNA, 120 bp, Homo sapiens
  misc_feature: 383 for SV(C|O) and 28S
cgcggggacaccgggggggcgccgggggcctcccacttattctacacctctcatgtctcttcaccgtgccagactagagtcaagctcaacagggtcttctttccccgctgattccgccaa

SEQ ID NO: 67283 - DNA, 120 bp, Homo sapiens
  misc_feature: 383 for SV(C|O) and 28S
gcgcgcggggtggggcgggggagggccgcgaggggggtgccccgggcgtggggggggcggcggcgcctcgtccagccgcggcgcgcgcccagccccgcttcgcgccccagcccgaccgac

SEQ ID NO: 67284 - DNA, 120 bp, Homo sapiens
  misc_feature: 383 for SV(C|O) and 28S
gcgttaccgtttgacaggtgtaccgccccagtcaaactccccacctggcactgtccccggagcgggtcgcgcccggccggcgcgcggccgggcgcttggcgccagaagcgagagcccctc

SEQ ID NO: 67285 - DNA, 120 bp, Homo sapiens; identical to SEQ ID NO: 49987
  misc_feature: 383 for SV(C|O) and 28S

SEQ ID NO: 67286 - DNA, 120 bp, Homo sapiens; identical to SEQ ID NO: 49991
  misc_feature: 382 for SV(C|O) and 28S

SEQ ID NO: 67287 - DNA, 120 bp, Homo sapiens
  misc_feature: 382 for SV(C|O) and 28S
ggcgcgcgcggggtggggcgggggagggccgcgaggggggtgccccgggcgtggggggggcggcggcgcctcgtccagccgcggcgcgcgcccagccccgcttcgcgccccagcccgacc

SEQ ID NO: 67288 - DNA, 120 bp, Homo sapiens
  misc_feature: 381 for SV(C|O) and 28S
gtctgcgagagcgccagctatcctgagggaaacttcggagggaaccagctactagatggttcgattagtctttcgcccctatacccaggtcggacgaccgatttgcacgtcaggaccgct

SEQ ID NO: 67289 - DNA, 120 bp, Homo sapiens
  misc_feature: 381 for SV(C|O) and 28S
gcctcacaccgtccacgggctgggcctcgatcagaaggacttgggccccccacgagcggcgccggggagcgggtcttccgtacgccacatgtcccgcgccccgccgcggggcggggattc

SEQ ID NO: 67290 - DNA, 120 bp, Homo sapiens
  misc_feature: 377 for SV(C|O) and 28S
gggccccggcggcgggggcacggtcccccgcgaggggggcccgggcacccggggggccggcggcggcggcgactctggacgcgagccgggcccttcccgtggatcgccccagctgcggcg

SEQ ID NO: 67291 - DNA, 120 bp, Homo sapiens
  misc_feature: 376 for SV(C|O) and 28S
tcactaattagatgacgaggcatttggctaccttaagagagtcatagttactcccgccgtttacccgcgcttcattgaatttcttcactttgacattcagagcactgggcagaaatcaca

SEQ ID NO: 67292 - DNA, 120 bp, Homo sapiens
  misc_feature: 376 for SV(C|O) and 28S
ggggcggcgggggaagggagggcgggtggaggggtcgggaggaacggggggcgggaaagatccgccgggccgccgacacggccggacccgccgccgggttgaatcctccgggcggactgc

SEQ ID NO: 67293 - DNA, 120 bp, Homo sapiens
  misc_feature: 376 for SV(C|O) and 28S
cccacgagcggcgccggggagcgggtcttccgtacgccacatgtcccgcgccccgccgcggggcggggattcggcgctgggctcttccctgttcactcgccgttactgagggaatcctgg

SEQ ID NO: 67294 - DNA, 120 bp, Homo sapiens
  misc_feature: 375 for SV(C|O) and 28S
cggcgcgcgcggggtggggcgggggagggccgcgaggggggtgccccgggcgtggggggggcggcggcgcctcgtccagccgcggcgcgcgcccagccccgcttcgcgccccagcccgac

SEQ ID NO: 67295 - DNA, 120 bp, Homo sapiens; identical to SEQ ID NO: 50389
  misc_feature: 375 for SV(C|O) and 28S

SEQ ID NO: 67296 - DNA, 120 bp, Homo sapiens
  misc_feature: 375 for SV(C|O) and 28S
gcgcgcgcggggtggggcgggggagggccgcgaggggggtgccccgggcgtggggggggcggcggcgcctcgtccagccgcggcgcgcgcccagccccgcttcgcgccccagcccgaccg

SEQ ID NO: 67297 - DNA, 120 bp, Homo sapiens; identical to SEQ ID NO: 50098
  misc_feature: 375 for SV(C|O) and 28S

SEQ ID NO: 67298 - DNA, 120 bp, Homo sapiens
  misc_feature: 374 for SV(C|O) and 28S
cgccgggtccgcccccggggccgcggttccgcgcggcgcctcgcctcggccggcgcctagcagccgacttagaactggtgcggaccaggggaatccgactgtttaattaaaacaaagcat

SEQ ID NO: 67299 - DNA, 120 bp, Homo sapiens
  misc_feature: 374 for SV(C|O) and 28S
cgagtgaacagggaagagcccagcgccgaatccccgccccgcggcggggcgcgggacatgtggcgtacggaagacccgctccccggcgccgctcgtggggggcccaagtccttctgatcg

SEQ ID NO: 67300 - DNA, 120 bp, Homo sapiens; identical to SEQ ID NO: 50064
  misc_feature: 374 for SV(C|O) and 28S

SEQ ID NO: 67301 - DNA, 120 bp, Homo sapiens
  misc_feature: 373 for SV(C|O) and 28S
cgcgcgcggggtggggcgggggagggccgcgaggggggtgccccgggcgtggggggggcggcggcgcctcgtccagccgcggcgcgcgcccagccccgcttcgcgccccagcccgaccga

SEQ ID NO: 67302 - DNA, 120 bp, Homo sapiens
  misc_feature: 373 for SV(C|O) and 28S
gtgaacagggaagagcccagcgccgaatccccgccccgcggcggggcgcgggacatgtggcgtacggaagacccgctccccggcgccgctcgtggggggcccaagtccttctgatcgagg

SEQ ID NO: 67303 - DNA, 120 bp, Homo sapiens
  misc_feature: 373 for SV(C|O) and 28S
ggtctgcgagagcgccagctatcctgagggaaacttcggagggaaccagctactagatggttcgattagtctttcgcccctatacccaggtcggacgaccgatttgcacgtcaggaccgc

SEQ ID NO: 67304 - DNA, 120 bp, Homo sapiens; identical to SEQ ID NO: 50001
  misc_feature: 373 for SV(C|O) and 28S

SEQ ID NO: 67305 - DNA, 120 bp, Homo sapiens
  misc_feature: 373 for SV(C|O) and 28S
gcgagtgaacagggaagagcccagcgccgaatccccgccccgcggcggggcgcgggacatgtggcgtacggaagacccgctccccggcgccgctcgtggggggcccaagtccttctgatc

SEQ ID NO: 67306 - DNA, 120 bp, Homo sapiens
  misc_feature: 373 for SV(C|O) and 28S
gagccaatggggcgaagctaccatctgtgggattatgactgaacgcctctaagtcagaatcccgcccaggcggaacgatacggcagcgccgcggagcctcggttggcctcggatagccgg

SEQ ID NO: 67307 - DNA, 120 bp, Homo sapiens
  misc_feature: 371 for SV(C|O) and 28S
gagtgaacagggaagagcccagcgccgaatccccgccccgcggcggggcgcgggacatgtggcgtacggaagacccgctccccggcgccgctcgtggggggcccaagtccttctgatcga

SEQ ID NO: 67308 - DNA, 120 bp, Homo sapiens; identical to SEQ ID NO: 49911
  misc_feature: 371 for SV(C|O) and 28S

SEQ ID NO: 67309 - DNA, 120 bp, Homo sapiens; identical to SEQ ID NO: 50303
  misc_feature: 371 for SV(C|O) and 28S

SEQ ID NO: 67310 - DNA, 120 bp, Homo sapiens; identical to SEQ ID NO: 49993
  misc_feature: 371 for SV(C|O) and 28S

SEQ ID NO: 67311 - DNA, 120 bp, Homo sapiens; identical to SEQ ID NO: 49971
  misc_feature: 371 for SV(C|O) and 28S

SEQ ID NO: 67312 - DNA, 120 bp, Homo sapiens; identical to SEQ ID NO: 49956
  misc_feature: 370 for SV(C|O) and 28S

SEQ ID NO: 67313 - DNA, 120 bp, Homo sapiens; identical to SEQ ID NO: 50478
  misc_feature: 370 for SV(C|O) and 28S

SEQ ID NO: 67314 - DNA, 120 bp, Homo sapiens
  misc_feature: 370 for SV(C|O) and 28S
ccgccgggtccgcccccggggccgcggttccgcgcggcgcctcgcctcggccggcgcctagcagccgacttagaactggtgcggaccaggggaatccgactgtttaattaaaacaaagca

SEQ ID NO: 67315 - DNA, 120 bp, Homo sapiens; identical to SEQ ID NO: 49856
  misc_feature: 370 for SV(C|O) and 28S

SEQ ID NO: 67316 - DNA, 120 bp, Homo sapiens; identical to SEQ ID NO: 49753
  misc_feature: 370 for SV(C|O) and 28S

SEQ ID NO: 67317 - DNA, 120 bp, Homo sapiens; identical to SEQ ID NO: 49697
  misc_feature: 370 for SV(C|O) and 28S

SEQ ID NO: 67318 - DNA, 120 bp, Homo sapiens; identical to SEQ ID NO: 50185
  misc_feature: 370 for SV(C|O) and 28S

SEQ ID NO: 67319 - DNA, 120 bp, Homo sapiens
  misc_feature: 369 for SV(C|O) and 28S
gccgggtccgcccccggggccgcggttccgcgcggcgcctcgcctcggccggcgcctagcagccgacttagaactggtgcggaccaggggaatccgactgtttaattaaaacaaagcatc

SEQ ID NO: 67320 - DNA, 120 bp, Homo sapiens; identical to SEQ ID NO: 49963
  misc_feature: 369 for SV(C|O) and 28S

SEQ ID NO: 67321 - DNA, 120 bp, Homo sapiens
  misc_feature: 369 for SV(C|O) and 28S
cgttaccgtttgacaggtgtaccgccccagtcaaactccccacctggcactgtccccggagcgggtcgcgcccggccggcgcgcggccgggcgcttggcgccagaagcgagagcccctcg

SEQ ID NO: 67322 - DNA, 120 bp, Homo sapiens
  misc_feature: 369 for SV(C|O) and 28S
cctcacaccgtccacgggctgggcctcgatcagaaggacttgggccccccacgagcggcgccggggagcgggtcttccgtacgccacatgtcccgcgccccgccgcggggcggggattcg

SEQ ID NO: 67323 - DNA, 120 bp, Homo sapiens
  misc_feature: 368 for SV(C|O) and 28S
tgaacagggaagagcccagcgccgaatccccgccccgcggcggggcgcgggacatgtggcgtacggaagacccgctccccggcgccgctcgtggggggcccaagtccttctgatcgaggc

SEQ ID NO: 67324 - DNA, 120 bp, Homo sapiens; identical to SEQ ID NO: 49895
  misc_feature: 368 for SV(C|O) and 28S

SEQ ID NO: 67325 - DNA, 120 bp, Homo sapiens; identical to SEQ ID NO: 50533
  misc_feature: 368 for SV(C|O) and 28S

SEQ ID NO: 67326 - DNA, 120 bp, Homo sapiens; identical to SEQ ID NO: 50024
  misc_feature: 367 for SV(C|O) and 28S

SEQ ID NO: 67327 - DNA, 120 bp, Homo sapiens
  misc_feature: 367 for SV(C|O) and 28S
cacgagcggcgccggggagcgggtcttccgtacgccacatgtcccgcgccccgccgcggggcggggattcggcgctgggctcttccctgttcactcgccgttactgagggaatcctggtt

SEQ ID NO: 67328 - DNA, 120 bp, Homo sapiens
  misc_feature: 366 for SV(C|O) and 28S
cccgccgggtccgcccccggggccgcggttccgcgcggcgcctcgcctcggccggcgcctagcagccgacttagaactggtgcggaccaggggaatccgactgtttaattaaaacaaagc

SEQ ID NO: 67329 - DNA, 120 bp, Homo sapiens
  misc_feature: 366 for SV(C|O) and 28S
agtgaacagggaagagcccagcgccgaatccccgccccgcggcggggcgcgggacatgtggcgtacggaagacccgctccccggcgccgctcgtggggggcccaagtccttctgatcgag

SEQ ID NO: 67330 - DNA, 120 bp, Homo sapiens
  misc_feature: 366 for SV(C|O) and 28S
ccgggtccgcccccggggccgcggttccgcgcggcgcctcgcctcggccggcgcctagcagccgacttagaactggtgcggaccaggggaatccgactgtttaattaaaacaaagcatcg

SEQ ID NO: 67331 - DNA, 120 bp, Homo sapiens; identical to SEQ ID NO: 50214
  misc_feature: 365 for SV(C|O) and 28S

SEQ ID NO: 67332 - DNA, 120 bp, Homo sapiens
  misc_feature: 365 for SV(C|O) and 28S
ggggccccggcggcgggggcacggtcccccgcgaggggggcccgggcacccggggggccggcggcggcggcgactctggacgcgagccgggcccttcccgtggatcgccccagctgcggc

SEQ ID NO: 67333 - DNA, 120 bp, Homo sapiens; identical to SEQ ID NO: 50666
  misc_feature: 365 for SV(C|O) and 28S

SEQ ID NO: 67334 - DNA, 120 bp, Homo sapiens; identical to SEQ ID NO: 49149
  misc_feature: 365 for SV(C|O) and 28S

SEQ ID NO: 67335 - DNA, 120 bp, Homo sapiens
  misc_feature: 365 for SV(C|O) and 28S
agccaatggggcgaagctaccatctgtgggattatgactgaacgcctctaagtcagaatcccgcccaggcggaacgatacggcagcgccgcggagcctcggttggcctcggatagccggt

SEQ ID NO: 67336 - DNA, 120 bp, Homo sapiens; identical to SEQ ID NO: 50897
  misc_feature: 365 for SV(C|O) and 28S

SEQ ID NO: 67337 - DNA, 120 bp, Homo sapiens
  misc_feature: 364 for SV(C|O) and 28S
gggtctgcgagagcgccagctatcctgagggaaacttcggagggaaccagctactagatggttcgattagtctttcgcccctatacccaggtcggacgaccgatttgcacgtcaggaccg

SEQ ID NO: 67338 - DNA, 120 bp, Homo sapiens; identical to SEQ ID NO: 50783
  misc_feature: 364 for SV(C|O) and 28S

SEQ ID NO: 67339 - DNA, 120 bp, Homo sapiens
  misc_feature: 363 for SV(C|O) and 28S
cccctctctcggggcgaacccattccagggcgccctgcccttcacaaagaaaagagaactctccccggggctcccgccggcttctccgggatcggtcgcgttaccgcactggacgcctcg

SEQ ID NO: 67340 - DNA, 120 bp, Homo sapiens; identical to SEQ ID NO: 49673
  misc_feature: 362 for SV(C|O) and 28S

SEQ ID NO: 67341 - DNA, 120 bp, Homo sapiens
  misc_feature: 362 for SV(C|O) and 28S
gcggcgcgcgcggggtggggcgggggagggccgcgaggggggtgccccgggcgtggggggggcggcggcgcctcgtccagccgcggcgcgcgcccagccccgcttcgcgccccagcccga

SEQ ID NO: 67342 - DNA, 120 bp, Homo sapiens
  misc_feature: 362 for SV(C|O) and 28S
gaacagggaagagcccagcgccgaatccccgccccgcggcggggcgcgggacatgtggcgtacggaagacccgctccccggcgccgctcgtggggggcccaagtccttctgatcgaggcc

SEQ ID NO: 67343 - DNA, 120 bp, Homo sapiens
  misc_feature: 362 for SV(C|O) and 28S
cgcagctggggcgatccacgggaagggcccggctcgcgtccagagtcgccgccgccgccggccccccgggtgcccgggcccccctcgcgggggaccgtgcccccgccgccggggccccgc

SEQ ID NO: 67344 - DNA, 120 bp, Homo sapiens
  misc_feature: 362 for SV(C|O) and 28S
ccgcagctggggcgatccacgggaagggcccggctcgcgtccagagtcgccgccgccgccggccccccgggtgcccgggcccccctcgcgggggaccgtgcccccgccgccggggccccg

SEQ ID NO: 67345 - DNA, 120 bp, Homo sapiens
  misc_feature: 361 for SV(C|O) and 28S
ggaggggcggcgggggaagggagggcgggtggaggggtcgggaggaacggggggcgggaaagatccgccgggccgccgacacggccggacccgccgccgggttgaatcctccgggcggac

SEQ ID NO: 67346 - DNA, 120 bp, Homo sapiens
  misc_feature: 361 for SV(C|O) and 28S
gcagctggggcgatccacgggaagggcccggctcgcgtccagagtcgccgccgccgccggccccccgggtgcccgggcccccctcgcgggggaccgtgcccccgccgccggggccccgcg

SEQ ID NO: 67347 - DNA, 120 bp, Homo sapiens
  misc_feature: 361 for SV(C|O) and 28S
gaggggcggcgggggaagggagggcgggtggaggggtcgggaggaacggggggcgggaaagatccgccgggccgccgacacggccggacccgccgccgggttgaatcctccgggcggact

SEQ ID NO: 67348 - DNA, 120 bp, Homo sapiens
  misc_feature: 361 for SV(C|O) and 28S
gaccgaaaccccccccgagtgttacagcccccccggcagcagcactcgccgaatcccggggccgagggagcgagacccgtcgccgcgctctcccccctcccggcgcccacccccgcgggg

SEQ ID NO: 67349 - DNA, 120 bp, Homo sapiens; identical to SEQ ID NO: 50829
  misc_feature: 361 for SV(C|O) and 28S

SEQ ID NO: 67350 - DNA, 120 bp, Homo sapiens; identical to SEQ ID NO: 49696
  misc_feature: 361 for SV(C|O) and 28S

SEQ ID NO: 67351 - DNA, 120 bp, Homo sapiens
  misc_feature: 361 for SV(C|O) and 28S
ctcacaccgtccacgggctgggcctcgatcagaaggacttgggccccccacgagcggcgccggggagcgggtcttccgtacgccacatgtcccgcgccccgccgcggggcggggattcgg

SEQ ID NO: 67352 - DNA, 120 bp, Homo sapiens
  misc_feature: 361 for SV(C|O) and 28S
ccacgagcggcgccggggagcgggtcttccgtacgccacatgtcccgcgccccgccgcggggcggggattcggcgctgggctcttccctgttcactcgccgttactgagggaatcctggt

SEQ ID NO: 67353 - DNA, 120 bp, Homo sapiens
  misc_feature: 360 for SV(C|O) and 28S
gttaccgtttgacaggtgtaccgccccagtcaaactccccacctggcactgtccccggagcgggtcgcgcccggccggcgcgcggccgggcgcttggcgccagaagcgagagcccctcgg

SEQ ID NO: 67354 - DNA, 120 bp, Homo sapiens
  misc_feature: 360 for SV(C|O) and 28S
ggaccgaaaccccccccgagtgttacagcccccccggcagcagcactcgccgaatcccggggccgagggagcgagacccgtcgccgcgctctcccccctcccggcgcccacccccgcggg

SEQ ID NO: 67355 - DNA, 120 bp, Homo sapiens; identical to SEQ ID NO: 49899
  misc_feature: 360 for SV(C|O) and 28S

SEQ ID NO: 67356 - DNA, 120 bp, Homo sapiens
  misc_feature: 359 for SV(C|O) and 28S
tcacaccgtccacgggctgggcctcgatcagaaggacttgggccccccacgagcggcgccggggagcgggtcttccgtacgccacatgtcccgcgccccgccgcggggcggggattcggc

SEQ ID NO: 67357 - DNA, 120 bp, Homo sapiens; identical to SEQ ID NO: 49818
  misc_feature: 358 for SV(C|O) and 28S

SEQ ID NO: 67358 - DNA, 120 bp, Homo sapiens; identical to SEQ ID NO: 50650
  misc_feature: 358 for SV(C|O) and 28S

SEQ ID NO: 67359 - DNA, 120 bp, Homo sapiens; identical to SEQ ID NO: 49137
  misc_feature: 355 for SV(C|O) and 28S

SEQ ID NO: 67360 - DNA, 120 bp, Homo sapiens
  misc_feature: 354 for SV(C|O) and 28S
ttaccgtttgacaggtgtaccgccccagtcaaactccccacctggcactgtccccggagcgggtcgcgcccggccggcgcgcggccgggcgcttggcgccagaagcgagagcccctcggg

SEQ ID NO: 67361 - DNA, 120 bp, Homo sapiens
  misc_feature: 354 for SV(C|O) and 28S
aggggcggcgggggaagggagggcgggtggaggggtcgggaggaacggggggcgggaaagatccgccgggccgccgacacggccggacccgccgccgggttgaatcctccgggcggactg

SEQ ID NO: 67362 - DNA, 120 bp, Homo sapiens
  misc_feature: 352 for SV(C|O) and 28S
gccaatggggcgaagctaccatctgtgggattatgactgaacgcctctaagtcagaatcccgcccaggcggaacgatacggcagcgccgcggagcctcggttggcctcggatagccggtc

SEQ ID NO: 67363 - DNA, 120 bp, Homo sapiens
  misc_feature: 351 for SV(C|O) and 28S
taccgtttgacaggtgtaccgccccagtcaaactccccacctggcactgtccccggagcgggtcgcgcccggccggcgcgcggccgggcgcttggcgccagaagcgagagcccctcgggg

SEQ ID NO: 67364 - DNA, 120 bp, Homo sapiens
  misc_feature: 350 for SV(C|O) and 28S
gagcggcgcgcgcggggtggggcgggggagggccgcgaggggggtgccccgggcgtggggggggcggcggcgcctcgtccagccgcggcgcgcgcccagccccgcttcgcgccccagccc

SEQ ID NO: 67365 - DNA, 120 bp, Homo sapiens
  misc_feature: 350 for SV(C|O) and 28S
accgtttgacaggtgtaccgccccagtcaaactccccacctggcactgtccccggagcgggtcgcgcccggccggcgcgcggccgggcgcttggcgccagaagcgagagcccctcggggc

SEQ ID NO: 67366 - DNA, 120 bp, Homo sapiens; identical to SEQ ID NO: 49146
  misc_feature: 349 for SV(C|O) and 28S

SEQ ID NO: 67367 - DNA, 120 bp, Homo sapiens
  misc_feature: 348 for SV(C|O) and 28S
cgagcggcgcgcgcggggtggggcgggggagggccgcgaggggggtgccccgggcgtggggggggcggcggcgcctcgtccagccgcggcgcgcgcccagccccgcttcgcgccccagcc

SEQ ID NO: 67368 - DNA, 120 bp, Homo sapiens
  misc_feature: 347 for SV(C|O) and 28S
cgggtctgcgagagcgccagctatcctgagggaaacttcggagggaaccagctactagatggttcgattagtctttcgcccctatacccaggtcggacgaccgatttgcacgtcaggacc

SEQ ID NO: 67369 - DNA, 120 bp, Homo sapiens
  misc_feature: 347 for SV(C|O) and 28S
ccaatggggcgaagctaccatctgtgggattatgactgaacgcctctaagtcagaatcccgcccaggcggaacgatacggcagcgccgcggagcctcggttggcctcggatagccggtcc

SEQ ID NO: 67370 - DNA, 120 bp, Homo sapiens
  misc_feature: 347 for SV(C|O) and 28S
ccctctctcggggcgaacccattccagggcgccctgcccttcacaaagaaaagagaactctccccggggctcccgccggcttctccgggatcggtcgcgttaccgcactggacgcctcgc

SEQ ID NO: 67371 - DNA, 120 bp, Homo sapiens; identical to SEQ ID NO: 50376
  misc_feature: 346 for SV(C|O) and 28S

SEQ ID NO: 67372 - DNA, 120 bp, Homo sapiens; identical to SEQ ID NO: 49135
  misc_feature: 344 for SV(C|O) and 28S

SEQ ID NO: 67373 - DNA, 120 bp, Homo sapiens
  misc_feature: 344 for SV(C|O) and 28S
caatggggcgaagctaccatctgtgggattatgactgaacgcctctaagtcagaatcccgcccaggcggaacgatacggcagcgccgcggagcctcggttggcctcggatagccggtccc

SEQ ID NO: 67374 - DNA, 120 bp, Homo sapiens
  misc_feature: 343 for SV(C|O) and 28S
aggaggggcggcgggggaagggagggcgggtggaggggtcgggaggaacggggggcgggaaagatccgccgggccgccgacacggccggacccgccgccgggttgaatcctccgggcgga

SEQ ID NO: 67375 - DNA, 120 bp, Homo sapiens
  misc_feature: 341 for SV(C|O) and 28S
gggaccgaaaccccccccgagtgttacagcccccccggcagcagcactcgccgaatcccggggccgagggagcgagacccgtcgccgcgctctcccccctcccggcgcccacccccgcgg

SEQ ID NO: 67376 - DNA, 120 bp, Homo sapiens
  misc_feature: 341 for SV(C|O) and 28S
gcgagcggcgcgcgcggggtggggcgggggagggccgcgaggggggtgccccgggcgtggggggggcggcggcgcctcgtccagccgcggcgcgcgcccagccccgcttcgcgccccagc

SEQ ID NO: 67377 - DNA, 120 bp, Homo sapiens
  misc_feature: 341 for SV(C|O) and 28S
cgtttgacaggtgtaccgccccagtcaaactccccacctggcactgtccccggagcgggtcgcgcccggccggcgcgcggccgggcgcttggcgccagaagcgagagcccctcggggctc

SEQ ID NO: 67378 - DNA, 120 bp, Homo sapiens
  misc_feature: 341 for SV(C|O) and 28S
agcggcgcgcgcggggtggggcgggggagggccgcgaggggggtgccccgggcgtggggggggcggcggcgcctcgtccagccgcggcgcgcgcccagccccgcttcgcgccccagcccg

SEQ ID NO: 67379 - DNA, 120 bp, Homo sapiens; identical to SEQ ID NO: 49976
  misc_feature: 340 for SV(C|O) and 28S

SEQ ID NO: 67380 - DNA, 120 bp, Homo sapiens; identical to SEQ ID NO: 49141
  misc_feature: 340 for SV(C|O) and 28S

SEQ ID NO: 67381 - DNA, 120 bp, Homo sapiens
  misc_feature: 339 for SV(C|O) and 28S
tcgggtctgcgagagcgccagctatcctgagggaaacttcggagggaaccagctactagatggttcgattagtctttcgcccctatacccaggtcggacgaccgatttgcacgtcaggac

SEQ ID NO: 67382 - DNA, 120 bp, Homo sapiens
  misc_feature: 339 for SV(C|O) and 28S
ggagcgagcggcgcgcgcggggtggggcgggggagggccgcgaggggggtgccccgggcgtggggggggcggcggcgcctcgtccagccgcggcgcgcgcccagccccgcttcgcgcccc

SEQ ID NO: 67383 - DNA, 120 bp, Homo sapiens
  misc_feature: 339 for SV(C|O) and 28S
aatggggcgaagctaccatctgtgggattatgactgaacgcctctaagtcagaatcccgcccaggcggaacgatacggcagcgccgcggagcctcggttggcctcggatagccggtcccc

SEQ ID NO: 67384 - DNA, 120 bp, Homo sapiens
  misc_feature: 339 for SV(C|O) and 28S
gaggaggggcggcgggggaagggagggcgggtggaggggtcgggaggaacggggggcgggaaagatccgccgggccgccgacacggccggacccgccgccgggttgaatcctccgggcgg

SEQ ID NO: 67385 - DNA, 120 bp, Homo sapiens
  misc_feature: 339 for SV(C|O) and 28S
ccgtttgacaggtgtaccgccccagtcaaactccccacctggcactgtccccggagcgggtcgcgcccggccggcgcgcggccgggcgcttggcgccagaagcgagagcccctcggggct

SEQ ID NO: 67386 - DNA, 120 bp, Homo sapiens
  misc_feature: 338 for SV(C|O) and 28S
cggtgtccccgcgaggggcccggggcggggtccgccggccctgcgggccgccggtgaaataccactactctgatcgttttttcactgacccggtgaggcgggggggcgagccccgagggg

SEQ ID NO: 67387 - DNA, 120 bp, Homo sapiens
  misc_feature: 336 for SV(C|O) and 28S
ggcggcgggtccggccgtgtcggcggcccggcggatctttcccgccccccgttcctcccgacccctccacccgccctcccttcccccgccgcccctcctcctcctccccggagggggcgg

SEQ ID NO: 67388 - DNA, 120 bp, Homo sapiens; identical to SEQ ID NO: 49465
  misc_feature: 335 for SV(C|O) and 28S

SEQ ID NO: 67389 - DNA, 120 bp, Homo sapiens
  misc_feature: 335 for SV(C|O) and 28S
cggcggcgggtccggccgtgtcggcggcccggcggatctttcccgccccccgttcctcccgacccctccacccgccctcccttcccccgccgcccctcctcctcctccccggagggggcg

SEQ ID NO: 67390 - DNA, 120 bp, Homo sapiens
  misc_feature: 335 for SV(C|O) and 28S
aggggcccggggcggggtccgccggccctgcgggccgccggtgaaataccactactctgatcgttttttcactgacccggtgaggcgggggggcgagccccgaggggctctcgcttctgg

SEQ ID NO: 67391 - DNA, 120 bp, Homo sapiens
  misc_feature: 334 for SV(C|O) and 28S
gagcgagcggcgcgcgcggggtggggcgggggagggccgcgaggggggtgccccgggcgtggggggggcggcggcgcctcgtccagccgcggcgcgcgcccagccccgcttcgcgcccca

SEQ ID NO: 67392 - DNA, 120 bp, Homo sapiens
  misc_feature: 332 for SV(C|O) and 28S
ccggcggcgggtccggccgtgtcggcggcccggcggatctttcccgccccccgttcctcccgacccctccacccgccctcccttcccccgccgcccctcctcctcctccccggagggggc

SEQ ID NO: 67393 - DNA, 120 bp, Homo sapiens
  misc_feature: 332 for SV(C|O) and 28S
gaggggcccggggcggggtccgccggccctgcgggccgccggtgaaataccactactctgatcgttttttcactgacccggtgaggcgggggggcgagccccgaggggctctcgcttctg

SEQ ID NO: 67394 - DNA, 120 bp, Homo sapiens
  misc_feature: 331 for SV(C|O) and 28S
gtcgggtctgcgagagcgccagctatcctgagggaaacttcggagggaaccagctactagatggttcgattagtctttcgcccctatacccaggtcggacgaccgatttgcacgtcagga

SEQ ID NO: 67395 - DNA, 120 bp, Homo sapiens; identical to SEQ ID NO: 50665
  misc_feature: 331 for SV(C|O) and 28S

SEQ ID NO: 67396 - DNA, 120 bp, Homo sapiens
  misc_feature: 331 for SV(C|O) and 28S
gggagcgagcggcgcgcgcggggtggggcgggggagggccgcgaggggggtgccccgggcgtggggggggcggcggcgcctcgtccagccgcggcgcgcgcccagccccgcttcgcgccc

SEQ ID NO: 67397 - DNA, 120 bp, Homo sapiens
  misc_feature: 331 for SV(C|O) and 28S
ggaggaggggcggcgggggaagggagggcgggtggaggggtcgggaggaacggggggcgggaaagatccgccgggccgccgacacggccggacccgccgccgggttgaatcctccgggcg

SEQ ID NO: 67398 - DNA, 120 bp, Homo sapiens
  misc_feature: 330 for SV(C|O) and 28S
atggggcgaagctaccatctgtgggattatgactgaacgcctctaagtcagaatcccgcccaggcggaacgatacggcagcgccgcggagcctcggttggcctcggatagccggtccccc

SEQ ID NO: 67399 - DNA, 120 bp, Homo sapiens
  misc_feature: 330 for SV(C|O) and 28S
ggaggaggaggggcggcgggggaagggagggcgggtggaggggtcgggaggaacggggggcgggaaagatccgccgggccgccgacacggccggacccgccgccgggttgaatcctccgg

SEQ ID NO: 67400 - DNA, 120 bp, Homo sapiens
  misc_feature: 330 for SV(C|O) and 28S
agcgagcggcgcgcgcggggtggggcgggggagggccgcgaggggggtgccccgggcgtggggggggcggcggcgcctcgtccagccgcggcgcgcgcccagccccgcttcgcgccccag

SEQ ID NO: 67401 - DNA, 120 bp, Homo sapiens
  misc_feature: 330 for SV(C|O) and 28S
cctctctcggggcgaacccattccagggcgccctgcccttcacaaagaaaagagaactctccccggggctcccgccggcttctccgggatcggtcgcgttaccgcactggacgcctcgcg

SEQ ID NO: 67402 - DNA, 120 bp, Homo sapiens; identical to SEQ ID NO: 50712
  misc_feature: 329 for SV(C|O) and 28S

SEQ ID NO: 67403 - DNA, 120 bp, Homo sapiens
  misc_feature: 329 for SV(C|O) and 28S
ggtgtccccgcgaggggcccggggcggggtccgccggccctgcgggccgccggtgaaataccactactctgatcgttttttcactgacccggtgaggcgggggggcgagccccgaggggc

SEQ ID NO: 67404 - DNA, 120 bp, Homo sapiens
  misc_feature: 329 for SV(C|O) and 28S
cgggaccgaaaccccccccgagtgttacagcccccccggcagcagcactcgccgaatcccggggccgagggagcgagacccgtcgccgcgctctcccccctcccggcgcccacccccgcg

SEQ ID NO: 67405 - DNA, 120 bp, Homo sapiens
  misc_feature: 328 for SV(C|O) and 28S
gtttgacaggtgtaccgccccagtcaaactccccacctggcactgtccccggagcgggtcgcgcccggccggcgcgcggccgggcgcttggcgccagaagcgagagcccctcggggctcg

SEQ ID NO: 67406 - DNA, 120 bp, Homo sapiens
  misc_feature: 328 for SV(C|O) and 28S
gggtccggccgtgtcggcggcccggcggatctttcccgccccccgttcctcccgacccctccacccgccctcccttcccccgccgcccctcctcctcctccccggagggggcgggctccg

SEQ ID NO: 67407 - DNA, 120 bp, Homo sapiens; identical to SEQ ID NO: 49454
  misc_feature: 328 for SV(C|O) and 28S

SEQ ID NO: 67408 - DNA, 120 bp, Homo sapiens
  misc_feature: 328 for SV(C|O) and 28S
gaggaggaggggcggcgggggaagggagggcgggtggaggggtcgggaggaacggggggcgggaaagatccgccgggccgccgacacggccggacccgccgccgggttgaatcctccggg

SEQ ID NO: 67409 - DNA, 120 bp, Homo sapiens
  misc_feature: 328 for SV(C|O) and 28S
acccggcggcgggtccggccgtgtcggcggcccggcggatctttcccgccccccgttcctcccgacccctccacccgccctcccttcccccgccgcccctcctcctcctccccggagggg

SEQ ID NO: 67410 - DNA, 120 bp, Homo sapiens
  misc_feature: 327 for SV(C|O) and 28S
ggtccggccgtgtcggcggcccggcggatctttcccgccccccgttcctcccgacccctccacccgccctcccttcccccgccgcccctcctcctcctccccggagggggcgggctccgg

SEQ ID NO: 67411 - DNA, 120 bp, Homo sapiens
  misc_feature: 327 for SV(C|O) and 28S
gaggaggaggaggggcggcgggggaagggagggcgggtggaggggtcgggaggaacggggggcgggaaagatccgccgggccgccgacacggccggacccgccgccgggttgaatcctcc

SEQ ID NO: 67412 - DNA, 120 bp, Homo sapiens
  misc_feature: 327 for SV(C|O) and 28S
aggaggaggggcggcgggggaagggagggcgggtggaggggtcgggaggaacggggggcgggaaagatccgccgggccgccgacacggccggacccgccgccgggttgaatcctccgggc

SEQ ID NO: 67413 - DNA, 120 bp, Homo sapiens
  misc_feature: 327 for SV(C|O) and 28S
cccggcggcgggtccggccgtgtcggcggcccggcggatctttcccgccccccgttcctcccgacccctccacccgccctcccttcccccgccgcccctcctcctcctccccggaggggg

SEQ ID NO: 67414 - DNA, 120 bp, Homo sapiens; identical to SEQ ID NO: 50723
  misc_feature: 326 for SV(C|O) and 28S

SEQ ID NO: 67415 - DNA, 120 bp, Homo sapiens
  misc_feature: 325 for SV(C|O) and 28S
tttgacaggtgtaccgccccagtcaaactccccacctggcactgtccccggagcgggtcgcgcccggccggcgcgcggccgggcgcttggcgccagaagcgagagcccctcggggctcgc

SEQ ID NO: 67416 - DNA, 120 bp, Homo sapiens; identical to SEQ ID NO: 50715
  misc_feature: 325 for SV(C|O) and 28S

SEQ ID NO: 67417 - DNA, 120 bp, Homo sapiens
  misc_feature: 325 for SV(C|O) and 28S
gcggcgggtccggccgtgtcggcggcccggcggatctttcccgccccccgttcctcccgacccctccacccgccctcccttcccccgccgcccctcctcctcctccccggagggggcggg

SEQ ID NO: 67418 - DNA, 120 bp, Homo sapiens
  misc_feature: 324 for SV(C|O) and 28S
cgggtccggccgtgtcggcggcccggcggatctttcccgccccccgttcctcccgacccctccacccgccctcccttcccccgccgcccctcctcctcctccccggagggggcgggctcc

SEQ ID NO: 67419 - DNA, 120 bp, Homo sapiens; identical to SEQ ID NO: 49145
  misc_feature: 324 for SV(C|O) and 28S

SEQ ID NO: 67420 - DNA, 120 bp, Homo sapiens
  misc_feature: 323 for SV(C|O) and 28S
tgacaggtgtaccgccccagtcaaactccccacctggcactgtccccggagcgggtcgcgcccggccggcgcgcggccgggcgcttggcgccagaagcgagagcccctcggggctcgccc

SEQ ID NO: 67421 - DNA, 120 bp, Homo sapiens; identical to SEQ ID NO: 49511
  misc_feature: 323 for SV(C|O) and 28S

SEQ ID NO: 67422 - DNA, 120 bp, Homo sapiens; identical to SEQ ID NO: 49650
  misc_feature: 323 for SV(C|O) and 28S

SEQ ID NO: 67423 - DNA, 120 bp, Homo sapiens
  misc_feature: 323 for SV(C|O) and 28S
cgggccttcgcgatgctttgttttaattaaacagtcggattcccctggtccgcaccagttctaagtcggctgctaggcgccggccgaggcgaggcgccgcgcggaaccgcggccccgggg

SEQ ID NO: 67424 - DNA, 120 bp, Homo sapiens
  misc_feature: 322 for SV(C|O) and 28S
ttgacaggtgtaccgccccagtcaaactccccacctggcactgtccccggagcgggtcgcgcccggccggcgcgcggccgggcgcttggcgccagaagcgagagcccctcggggctcgcc

SEQ ID NO: 67425 - DNA, 120 bp, Homo sapiens; identical to SEQ ID NO: 49446
  misc_feature: 322 for SV(C|O) and 28S

SEQ ID NO: 67426 - DNA, 120 bp, Homo sapiens; identical to SEQ ID NO: 50678
  misc_feature: 322 for SV(C|O) and 28S

SEQ ID NO: 67427 - DNA, 120 bp, Homo sapiens
  misc_feature: 322 for SV(C|O) and 28S
ggaggaggaggaggggcggcgggggaagggagggcgggtggaggggtcgggaggaacggggggcgggaaagatccgccgggccgccgacacggccggacccgccgccgggttgaatcctc

SEQ ID NO: 67428 - DNA, 120 bp, Homo sapiens
  misc_feature: 322 for SV(C|O) and 28S
gcgggccttcgcgatgctttgttttaattaaacagtcggattcccctggtccgcaccagttctaagtcggctgctaggcgccggccgaggcgaggcgccgcgcggaaccgcggccccggg

SEQ ID NO: 67429 - DNA, 120 bp, Homo sapiens
  misc_feature: 322 for SV(C|O) and 28S
cgcgggccttcgcgatgctttgttttaattaaacagtcggattcccctggtccgcaccagttctaagtcggctgctaggcgccggccgaggcgaggcgccgcgcggaaccgcggccccgg

SEQ ID NO: 67430 - DNA, 120 bp, Homo sapiens; identical to SEQ ID NO: 49379
  misc_feature: 321 for SV(C|O) and 28S

SEQ ID NO: 67431 - DNA, 120 bp, Homo sapiens
  misc_feature: 321 for SV(C|O) and 28S
tgtccccgcgaggggcccggggcggggtccgccggccctgcgggccgccggtgaaataccactactctgatcgttttttcactgacccggtgaggcgggggggcgagccccgaggggctc

SEQ ID NO: 67432 - DNA, 120 bp, Homo sapiens
  misc_feature: 321 for SV(C|O) and 28S
gtccccgcgaggggcccggggcggggtccgccggccctgcgggccgccggtgaaataccactactctgatcgttttttcactgacccggtgaggcgggggggcgagccccgaggggctct

SEQ ID NO: 67433 - DNA, 120 bp, Homo sapiens
  misc_feature: 321 for SV(C|O) and 28S
acaggtgtaccgccccagtcaaactccccacctggcactgtccccggagcgggtcgcgcccggccggcgcgcggccgggcgcttggcgccagaagcgagagcccctcggggctcgccccc

SEQ ID NO: 67434 - DNA, 120 bp, Homo sapiens
  misc_feature: 321 for SV(C|O) and 28S
gggccttcgcgatgctttgttttaattaaacagtcggattcccctggtccgcaccagttctaagtcggctgctaggcgccggccgaggcgaggcgccgcgcggaaccgcggccccggggg

SEQ ID NO: 67435 - DNA, 120 bp, Homo sapiens
  misc_feature: 321 for SV(C|O) and 28S
gcgggaccgaaaccccccccgagtgttacagcccccccggcagcagcactcgccgaatcccggggccgagggagcgagacccgtcgccgcgctctcccccctcccggcgcccacccccgc

SEQ ID NO: 67436 - DNA, 120 bp, Homo sapiens
  misc_feature: 321 for SV(C|O) and 28S
ctctctcggggcgaacccattccagggcgccctgcccttcacaaagaaaagagaactctccccggggctcccgccggcttctccgggatcggtcgcgttaccgcactggacgcctcgcgg

SEQ ID NO: 67437 - DNA, 120 bp, Homo sapiens; identical to SEQ ID NO: 49682
  misc_feature: 321 for SV(C|O) and 28S

SEQ ID NO: 67438 - DNA, 120 bp, Homo sapiens
  misc_feature: 321 for SV(C|O) and 28S
cgaggggcccggggcggggtccgccggccctgcgggccgccggtgaaataccactactctgatcgttttttcactgacccggtgaggcgggggggcgagccccgaggggctctcgcttct

SEQ ID NO: 67439 - DNA, 120 bp, Homo sapiens
  misc_feature: 320 for SV(C|O) and 28S
tccccgcgaggggcccggggcggggtccgccggccctgcgggccgccggtgaaataccactactctgatcgttttttcactgacccggtgaggcgggggggcgagccccgaggggctctc

SEQ ID NO: 67440 - DNA, 120 bp, Homo sapiens
  misc_feature: 320 for SV(C|O) and 28S
gacaggtgtaccgccccagtcaaactccccacctggcactgtccccggagcgggtcgcgcccggccggcgcgcggccgggcgcttggcgccagaagcgagagcccctcggggctcgcccc

SEQ ID NO: 67441 - DNA, 120 bp, Homo sapiens
  misc_feature: 320 for SV(C|O) and 28S
gggaggaggaggaggggcggcgggggaagggagggcgggtggaggggtcgggaggaacggggggcgggaaagatccgccgggccgccgacacggccggacccgccgccgggttgaatcct

SEQ ID NO: 67442 - DNA, 120 bp, Homo sapiens
  misc_feature: 319 for SV(C|O) and 28S
agggagcgagcggcgcgcgcggggtggggcgggggagggccgcgaggggggtgccccgggcgtggggggggcggcggcgcctcgtccagccgcggcgcgcgcccagccccgcttcgcgcc

SEQ ID NO: 67443 - DNA, 120 bp, Homo sapiens
  misc_feature: 319 for SV(C|O) and 28S
gcgggtccggccgtgtcggcggcccggcggatctttcccgccccccgttcctcccgacccctccacccgccctcccttcccccgccgcccctcctcctcctccccggagggggcgggctc

SEQ ID NO: 67444 - DNA, 120 bp, Homo sapiens; identical to SEQ ID NO: 49705
  misc_feature: 319 for SV(C|O) and 28S

SEQ ID NO: 67445 - DNA, 120 bp, Homo sapiens
  misc_feature: 319 for SV(C|O) and 28S
aggaggaggaggggcggcgggggaagggagggcgggtggaggggtcgggaggaacggggggcgggaaagatccgccgggccgccgacacggccggacccgccgccgggttgaatcctccg

SEQ ID NO: 67446 - DNA, 120 bp, Homo sapiens
  misc_feature: 319 for SV(C|O) and 28S
aacccggcggcgggtccggccgtgtcggcggcccggcggatctttcccgccccccgttcctcccgacccctccacccgccctcccttcccccgccgcccctcctcctcctccccggaggg

SEQ ID NO: 67447 - DNA, 120 bp, Homo sapiens
  misc_feature: 318 for SV(C|O) and 28S
tctctcggggcgaacccattccagggcgccctgcccttcacaaagaaaagagaactctccccggggctcccgccggcttctccgggatcggtcgcgttaccgcactggacgcctcgcggc

SEQ ID NO: 67448 - DNA, 120 bp, Homo sapiens
  misc_feature: 318 for SV(C|O) and 28S
cggcgggtccggccgtgtcggcggcccggcggatctttcccgccccccgttcctcccgacccctccacccgccctcccttcccccgccgcccctcctcctcctccccggagggggcgggc

SEQ ID NO: 67449 - DNA, 120 bp, Homo sapiens
  misc_feature: 318 for SV(C|O) and 28S
cgcgaggggcccggggcggggtccgccggccctgcgggccgccggtgaaataccactactctgatcgttttttcactgacccggtgaggcgggggggcgagccccgaggggctctcgctt

SEQ ID NO: 67450 - DNA, 120 bp, Homo sapiens
  misc_feature: 318 for SV(C|O) and 28S
ccgcgaggggcccggggcggggtccgccggccctgcgggccgccggtgaaataccactactctgatcgttttttcactgacccggtgaggcgggggggcgagccccgaggggctctcgct

SEQ ID NO: 67451 - DNA, 120 bp, Homo sapiens; identical to SEQ ID NO: 49726
  misc_feature: 317 for SV(C|O) and 28S

SEQ ID NO: 67452 - DNA, 120 bp, Homo sapiens
  misc_feature: 317 for SV(C|O) and 28S
gtgtccccgcgaggggcccggggcggggtccgccggccctgcgggccgccggtgaaataccactactctgatcgttttttcactgacccggtgaggcgggggggcgagccccgaggggct

SEQ ID NO: 67453 - DNA, 120 bp, Homo sapiens
  misc_feature: 317 for SV(C|O) and 28S
gcgaggggcccggggcggggtccgccggccctgcgggccgccggtgaaataccactactctgatcgttttttcactgacccggtgaggcgggggggcgagccccgaggggctctcgcttc

SEQ ID NO: 67454 - DNA, 120 bp, Homo sapiens
  misc_feature: 317 for SV(C|O) and 28S
ccccgcgaggggcccggggcggggtccgccggccctgcgggccgccggtgaaataccactactctgatcgttttttcactgacccggtgaggcgggggggcgagccccgaggggctctcg

SEQ ID NO: 67455 - DNA, 120 bp, Homo sapiens; identical to SEQ ID NO: 50721
  misc_feature: 317 for SV(C|O) and 28S

SEQ ID NO: 67456 - DNA, 120 bp, Homo sapiens
  misc_feature: 317 for SV(C|O) and 28S
caacccggcggcgggtccggccgtgtcggcggcccggcggatctttcccgccccccgttcctcccgacccctccacccgccctcccttcccccgccgcccctcctcctcctccccggagg

SEQ ID NO: 67457 - DNA, 120 bp, Homo sapiens
  misc_feature: 316 for SV(C|O) and 28S
tggggcgaagctaccatctgtgggattatgactgaacgcctctaagtcagaatcccgcccaggcggaacgatacggcagcgccgcggagcctcggttggcctcggatagccggtcccccg

SEQ ID NO: 67458 - DNA, 120 bp, Homo sapiens; identical to SEQ ID NO: 49138
  misc_feature: 315 for SV(C|O) and 28S

SEQ ID NO: 67459 - DNA, 120 bp, Homo sapiens
  misc_feature: 315 for SV(C|O) and 28S
caggtgtaccgccccagtcaaactccccacctggcactgtccccggagcgggtcgcgcccggccggcgcgcggccgggcgcttggcgccagaagcgagagcccctcggggctcgcccccc

SEQ ID NO: 67460 - DNA, 120 bp, Homo sapiens
  misc_feature: 315 for SV(C|O) and 28S
cccgcgaggggcccggggcggggtccgccggccctgcgggccgccggtgaaataccactactctgatcgttttttcactgacccggtgaggcgggggggcgagccccgaggggctctcgc

SEQ ID NO: 67461 - DNA, 120 bp, Homo sapiens
  misc_feature: 314 for SV(C|O) and 28S
ggggaggaggaggaggggcggcgggggaagggagggcgggtggaggggtcgggaggaacggggggcgggaaagatccgccgggccgccgacacggccggacccgccgccgggttgaatcc

SEQ ID NO: 67462 - DNA, 120 bp, Homo sapiens; identical to SEQ ID NO: 50706
  misc_feature: 314 for SV(C|O) and 28S

SEQ ID NO: 67463 - DNA, 120 bp, Homo sapiens; identical to SEQ ID NO: 51600
  misc_feature: 313 for SV(C|O) and 28S

SEQ ID NO: 67464 - DNA, 120 bp, Homo sapiens; identical to SEQ ID NO: 51674
  misc_feature: 313 for SV(C|O) and 28S

SEQ ID NO: 67465 - DNA, 120 bp, Homo sapiens; identical to SEQ ID NO: 49577
  misc_feature: 312 for SV(C|O) and 28S

SEQ ID NO: 67466 - DNA, 120 bp, Homo sapiens
  misc_feature: 311 for SV(C|O) and 28S
tccccggggctcccgccggcttctccgggatcggtcgcgttaccgcactggacgcctcgcggcgcccatctccgccactccggattcggggatctgaacccgactccctttcgatcggcc

SEQ ID NO: 67467 - DNA, 120 bp, Homo sapiens
  misc_feature: 311 for SV(C|O) and 28S
ggcgggtccggccgtgtcggcggcccggcggatctttcccgccccccgttcctcccgacccctccacccgccctcccttcccccgccgcccctcctcctcctccccggagggggcgggct

SEQ ID NO: 67468 - DNA, 120 bp, Homo sapiens
  misc_feature: 311 for SV(C|O) and 28S
gattcaacccggcggcgggtccggccgtgtcggcggcccggcggatctttcccgccccccgttcctcccgacccctccacccgccctcccttcccccgccgcccctcctcctcctccccg

SEQ ID NO: 67469 - DNA, 120 bp, Homo sapiens
  misc_feature: 311 for SV(C|O) and 28S
ctctcggggcgaacccattccagggcgccctgcccttcacaaagaaaagagaactctccccggggctcccgccggcttctccgggatcggtcgcgttaccgcactggacgcctcgcggcg

SEQ ID NO: 67470 - DNA, 120 bp, Homo sapiens
  misc_feature: 311 for SV(C|O) and 28S
ccgcgggccttcgcgatgctttgttttaattaaacagtcggattcccctggtccgcaccagttctaagtcggctgctaggcgccggccgaggcgaggcgccgcgcggaaccgcggccccg

SEQ ID NO: 67471 - DNA, 120 bp, Homo sapiens
  misc_feature: 310 for SV(C|O) and 28S
tctccccggggctcccgccggcttctccgggatcggtcgcgttaccgcactggacgcctcgcggcgcccatctccgccactccggattcggggatctgaacccgactccctttcgatcgg

SEQ ID NO: 67472 - DNA, 120 bp, Homo sapiens
  misc_feature: 310 for SV(C|O) and 28S
tcaacccggcggcgggtccggccgtgtcggcggcccggcggatctttcccgccccccgttcctcccgacccctccacccgccctcccttcccccgccgcccctcctcctcctccccggag

SEQ ID NO: 67473 - DNA, 120 bp, Homo sapiens; identical to SEQ ID NO: 51630
  misc_feature: 310 for SV(C|O) and 28S

SEQ ID NO: 67474 - DNA, 120 bp, Homo sapiens; identical to SEQ ID NO: 51582
  misc_feature: 310 for SV(C|O) and 28S

SEQ ID NO: 67475 - DNA, 120 bp, Homo sapiens
  misc_feature: 310 for SV(C|O) and 28S
ctccccggggctcccgccggcttctccgggatcggtcgcgttaccgcactggacgcctcgcggcgcccatctccgccactccggattcggggatctgaacccgactccctttcgatcggc

SEQ ID NO: 67476 - DNA, 120 bp, Homo sapiens
  misc_feature: 310 for SV(C|O) and 28S
attcaacccggcggcgggtccggccgtgtcggcggcccggcggatctttcccgccccccgttcctcccgacccctccacccgccctcccttcccccgccgcccctcctcctcctccccgg

SEQ ID NO: 67477 - DNA, 120 bp, Homo sapiens; identical to SEQ ID NO: 51562
  misc_feature: 308 for SV(C|O) and 28S

SEQ ID NO: 67478 - DNA, 120 bp, Homo sapiens; identical to SEQ ID NO: 51632
  misc_feature: 307 for SV(C|O) and 28S

SEQ ID NO: 67479 - DNA, 120 bp, Homo sapiens; identical to SEQ ID NO: 49128
  misc_feature: 307 for SV(C|O) and 28S

SEQ ID NO: 67480 - DNA, 120 bp, Homo sapiens
  misc_feature: 306 for SV(C|O) and 28S
atctgtgggattatgactgaacgcctctaagtcagaatcccgcccaggcggaacgatacggcagcgccgcggagcctcggttggcctcggatagccggtcccccgcctgtccccgccggc

SEQ ID NO: 67481 - DNA, 120 bp, Homo sapiens
  misc_feature: 306 for SV(C|O) and 28S
ctctccccggggctcccgccggcttctccgggatcggtcgcgttaccgcactggacgcctcgcggcgcccatctccgccactccggattcggggatctgaacccgactccctttcgatcg

SEQ ID NO: 67482 - DNA, 120 bp, Homo sapiens
  misc_feature: 305 for SV(C|O) and 28S
ggggcgaagctaccatctgtgggattatgactgaacgcctctaagtcagaatcccgcccaggcggaacgatacggcagcgccgcggagcctcggttggcctcggatagccggtcccccgc

SEQ ID NO: 67483 - DNA, 120 bp, Homo sapiens
  misc_feature: 304 for SV(C|O) and 28S
ttcaacccggcggcgggtccggccgtgtcggcggcccggcggatctttcccgccccccgttcctcccgacccctccacccgccctcccttcccccgccgcccctcctcctcctccccgga

SEQ ID NO: 67484 - DNA, 120 bp, Homo sapiens
  misc_feature: 304 for SV(C|O) and 28S
gcgtcgggtctgcgagagcgccagctatcctgagggaaacttcggagggaaccagctactagatggttcgattagtctttcgcccctatacccaggtcggacgaccgatttgcacgtcag

SEQ ID NO: 67485 - DNA, 120 bp, Homo sapiens; identical to SEQ ID NO: 51514
  misc_feature: 303 for SV(C|O) and 28S

SEQ ID NO: 67486 - DNA, 120 bp, Homo sapiens
  misc_feature: 303 for SV(C|O) and 28S
tctgtgggattatgactgaacgcctctaagtcagaatcccgcccaggcggaacgatacggcagcgccgcggagcctcggttggcctcggatagccggtcccccgcctgtccccgccggcg

SEQ ID NO: 67487 - DNA, 120 bp, Homo sapiens; identical to SEQ ID NO: 51539
  misc_feature: 303 for SV(C|O) and 28S

SEQ ID NO: 67488 - DNA, 120 bp, Homo sapiens
  misc_feature: 302 for SV(C|O) and 28S
aggtgtaccgccccagtcaaactccccacctggcactgtccccggagcgggtcgcgcccggccggcgcgcggccgggcgcttggcgccagaagcgagagcccctcggggctcgccccccc

SEQ ID NO: 67489 - DNA, 120 bp, Homo sapiens
  misc_feature: 302 for SV(C|O) and 28S
ccggcggcggccggtcgccggtcgggggacggtcccccgccgaccccacccccggccccgcccgcccacccccgcacccgccggagcccgccccctccggggaggaggaggaggggcggc

SEQ ID NO: 67490 - DNA, 120 bp, Homo sapiens
  misc_feature: 302 for SV(C|O) and 28S
actctccccggggctcccgccggcttctccgggatcggtcgcgttaccgcactggacgcctcgcggcgcccatctccgccactccggattcggggatctgaacccgactccctttcgatc

SEQ ID NO: 67491 - DNA, 120 bp, Homo sapiens
  misc_feature: 302 for SV(C|O) and 28S
cgtcgggtctgcgagagcgccagctatcctgagggaaacttcggagggaaccagctactagatggttcgattagtctttcgcccctatacccaggtcggacgaccgatttgcacgtcagg

SEQ ID NO: 67492 - DNA, 120 bp, Homo sapiens
  misc_feature: 302 for SV(C|O) and 28S
cggcggcggccggtcgccggtcgggggacggtcccccgccgaccccacccccggccccgcccgcccacccccgcacccgccggagcccgccccctccggggaggaggaggaggggcggcg

SEQ ID NO: 67493 - DNA, 120 bp, Homo sapiens; identical to SEQ ID NO: 49117
  misc_feature: 301 for SV(C|O) and 28S

SEQ ID NO: 67494 - DNA, 120 bp, Homo sapiens
  misc_feature: 301 for SV(C|O) and 28S
gcctcctcccctcctcccgcccacgccccgctccccgcccccggagccccgcggacgctacgccgcgacgagtaggagggccgctgcggtgagccttgaagcctagggcgcgggcccggg

SEQ ID NO: 67495 - DNA, 120 bp, Homo sapiens
  misc_feature: 299 for SV(C|O) and 28S
cgcctcctcccctcctcccgcccacgccccgctccccgcccccggagccccgcggacgctacgccgcgacgagtaggagggccgctgcggtgagccttgaagcctagggcgcgggcccgg

SEQ ID NO: 67496 - DNA, 120 bp, Homo sapiens
  misc_feature: 297 for SV(C|O) and 28S
tctcggggcgaacccattccagggcgccctgcccttcacaaagaaaagagaactctccccggggctcccgccggcttctccgggatcggtcgcgttaccgcactggacgcctcgcggcgc

SEQ ID NO: 67497 - DNA, 120 bp, Homo sapiens
  misc_feature: 297 for SV(C|O) and 28S
gggcgaagctaccatctgtgggattatgactgaacgcctctaagtcagaatcccgcccaggcggaacgatacggcagcgccgcggagcctcggttggcctcggatagccggtcccccgcc

SEQ ID NO: 67498 - DNA, 120 bp, Homo sapiens
  misc_feature: 297 for SV(C|O) and 28S
aagagaactctccccggggctcccgccggcttctccgggatcggtcgcgttaccgcactggacgcctcgcggcgcccatctccgccactccggattcggggatctgaacccgactccctt

SEQ ID NO: 67499 - DNA, 120 bp, Homo sapiens
  misc_feature: 296 for SV(C|O) and 28S
ctgtgggattatgactgaacgcctctaagtcagaatcccgcccaggcggaacgatacggcagcgccgcggagcctcggttggcctcggatagccggtcccccgcctgtccccgccggcgg

SEQ ID NO: 67500 - DNA, 120 bp, Homo sapiens
  misc_feature: 296 for SV(C|O) and 28S
agagaactctccccggggctcccgccggcttctccgggatcggtcgcgttaccgcactggacgcctcgcggcgcccatctccgccactccggattcggggatctgaacccgactcccttt

SEQ ID NO: 67501 - DNA, 120 bp, Homo sapiens
  misc_feature: 294 for SV(C|O) and 28S
aaagagaactctccccggggctcccgccggcttctccgggatcggtcgcgttaccgcactggacgcctcgcggcgcccatctccgccactccggattcggggatctgaacccgactccct

SEQ ID NO: 67502 - DNA, 120 bp, Homo sapiens
  misc_feature: 293 for SV(C|O) and 28S
catctgtgggattatgactgaacgcctctaagtcagaatcccgcccaggcggaacgatacggcagcgccgcggagcctcggttggcctcggatagccggtcccccgcctgtccccgccgg

SEQ ID NO: 67503 - DNA, 120 bp, Homo sapiens
  misc_feature: 292 for SV(C|O) and 28S
ggcgaagctaccatctgtgggattatgactgaacgcctctaagtcagaatcccgcccaggcggaacgatacggcagcgccgcggagcctcggttggcctcggatagccggtcccccgcct

SEQ ID NO: 67504 - DNA, 120 bp, Homo sapiens
  misc_feature: 292 for SV(C|O) and 28S
agaactctccccggggctcccgccggcttctccgggatcggtcgcgttaccgcactggacgcctcgcggcgcccatctccgccactccggattcggggatctgaacccgactccctttcg

SEQ ID NO: 67505 - DNA, 120 bp, Homo sapiens
  misc_feature: 292 for SV(C|O) and 28S
caccacacgcgcgcgcgcgcgcgccgcccccgccgctcccgtccactctcgactgccggcgacggccgggtatgggcccgacgctccagcgccatccattttcagggctagttgattcgg

SEQ ID NO: 67506 - DNA, 120 bp, Homo sapiens
  misc_feature: 292 for SV(C|O) and 28S
aactctccccggggctcccgccggcttctccgggatcggtcgcgttaccgcactggacgcctcgcggcgcccatctccgccactccggattcggggatctgaacccgactccctttcgat

SEQ ID NO: 67507 - DNA, 120 bp, Homo sapiens; identical to SEQ ID NO: 51515
  misc_feature: 291 for SV(C|O) and 28S

SEQ ID NO: 67508 - DNA, 120 bp, Homo sapiens
  misc_feature: 291 for SV(C|O) and 28S
aaaagagaactctccccggggctcccgccggcttctccgggatcggtcgcgttaccgcactggacgcctcgcggcgcccatctccgccactccggattcggggatctgaacccgactccc

SEQ ID NO: 67509 - DNA, 120 bp, Homo sapiens
  misc_feature: 291 for SV(C|O) and 28S
ctcggggcgaacccattccagggcgccctgcccttcacaaagaaaagagaactctccccggggctcccgccggcttctccgggatcggtcgcgttaccgcactggacgcctcgcggcgcc

SEQ ID NO: 67510 - DNA, 120 bp, Homo sapiens
  misc_feature: 291 for SV(C|O) and 28S
gagaactctccccggggctcccgccggcttctccgggatcggtcgcgttaccgcactggacgcctcgcggcgcccatctccgccactccggattcggggatctgaacccgactccctttc

SEQ ID NO: 67511 - DNA, 120 bp, Homo sapiens
  misc_feature: 291 for SV(C|O) and 28S
cacaccacacgcgcgcgcgcgcgcgccgcccccgccgctcccgtccactctcgactgccggcgacggccgggtatgggcccgacgctccagcgccatccattttcagggctagttgattc

SEQ ID NO: 67512 - DNA, 120 bp, Homo sapiens
  misc_feature: 290 for SV(C|O) and 28S
tgtgggattatgactgaacgcctctaagtcagaatcccgcccaggcggaacgatacggcagcgccgcggagcctcggttggcctcggatagccggtcccccgcctgtccccgccggcggg

SEQ ID NO: 67513 - DNA, 120 bp, Homo sapiens
  misc_feature: 290 for SV(C|O) and 28S
ccacacgcgcgcgcgcgcgcgccgcccccgccgctcccgtccactctcgactgccggcgacggccgggtatgggcccgacgctccagcgccatccattttcagggctagttgattcggca

SEQ ID NO: 67514 - DNA, 120 bp, Homo sapiens; identical to SEQ ID NO: 51462
  misc_feature: 290 for SV(C|O) and 28S

SEQ ID NO: 67515 - DNA, 120 bp, Homo sapiens
  misc_feature: 290 for SV(C|O) and 28S
cgcacaccacacgcgcgcgcgcgcgcgccgcccccgccgctcccgtccactctcgactgccggcgacggccgggtatgggcccgacgctccagcgccatccattttcagggctagttgat

SEQ ID NO: 67516 - DNA, 120 bp, Homo sapiens
  misc_feature: 290 for SV(C|O) and 28S
acaccacacgcgcgcgcgcgcgcgccgcccccgccgctcccgtccactctcgactgccggcgacggccgggtatgggcccgacgctccagcgccatccattttcagggctagttgattcg

SEQ ID NO: 67517 - DNA, 120 bp, Homo sapiens
  misc_feature: 289 for SV(C|O) and 28S
tgggattatgactgaacgcctctaagtcagaatcccgcccaggcggaacgatacggcagcgccgcggagcctcggttggcctcggatagccggtcccccgcctgtccccgccggcgggcc

SEQ ID NO: 67518 - DNA, 120 bp, Homo sapiens
  misc_feature: 289 for SV(C|O) and 28S
gcacaccacacgcgcgcgcgcgcgcgccgcccccgccgctcccgtccactctcgactgccggcgacggccgggtatgggcccgacgctccagcgccatccattttcagggctagttgatt

SEQ ID NO: 67519 - DNA, 120 bp, Homo sapiens; identical to SEQ ID NO: 49120
  misc_feature: 288 for SV(C|O) and 28S

SEQ ID NO: 67520 - DNA, 120 bp, Homo sapiens
  misc_feature: 288 for SV(C|O) and 28S
agaaaagagaactctccccggggctcccgccggcttctccgggatcggtcgcgttaccgcactggacgcctcgcggcgcccatctccgccactccggattcggggatctgaacccgactc

SEQ ID NO: 67521 - DNA, 120 bp, Homo sapiens
  misc_feature: 287 for SV(C|O) and 28S
gaaaagagaactctccccggggctcccgccggcttctccgggatcggtcgcgttaccgcactggacgcctcgcggcgcccatctccgccactccggattcggggatctgaacccgactcc

SEQ ID NO: 67522 - DNA, 120 bp, Homo sapiens
  misc_feature: 287 for SV(C|O) and 28S
accacacgcgcgcgcgcgcgcgccgcccccgccgctcccgtccactctcgactgccggcgacggccgggtatgggcccgacgctccagcgccatccattttcagggctagttgattcggc

SEQ ID NO: 67523 - DNA, 120 bp, Homo sapiens; identical to SEQ ID NO: 50156
  misc_feature: 286 for SV(C|O) and 28S

SEQ ID NO: 67524 - DNA, 120 bp, Homo sapiens
  misc_feature: 285 for SV(C|O) and 28S
gaactctccccggggctcccgccggcttctccgggatcggtcgcgttaccgcactggacgcctcgcggcgcccatctccgccactccggattcggggatctgaacccgactccctttcga

SEQ ID NO: 67525 - DNA, 120 bp, Homo sapiens
  misc_feature: 285 for SV(C|O) and 28S
gtgggattatgactgaacgcctctaagtcagaatcccgcccaggcggaacgatacggcagcgccgcggagcctcggttggcctcggatagccggtcccccgcctgtccccgccggcgggc

SEQ ID NO: 67526 - DNA, 120 bp, Homo sapiens; identical to SEQ ID NO: 51324
  misc_feature: 285 for SV(C|O) and 28S

SEQ ID NO: 67527 - DNA, 120 bp, Homo sapiens
  misc_feature: 285 for SV(C|O) and 28S
gggattatgactgaacgcctctaagtcagaatcccgcccaggcggaacgatacggcagcgccgcggagcctcggttggcctcggatagccggtcccccgcctgtccccgccggcgggccg

SEQ ID NO: 67528 - DNA, 120 bp, Homo sapiens
  misc_feature: 285 for SV(C|O) and 28S
ccatctgtgggattatgactgaacgcctctaagtcagaatcccgcccaggcggaacgatacggcagcgccgcggagcctcggttggcctcggatagccggtcccccgcctgtccccgccg

SEQ ID NO: 67529 - DNA, 120 bp, Homo sapiens
  misc_feature: 284 for SV(C|O) and 28S
acgcacaccacacgcgcgcgcgcgcgcgccgcccccgccgctcccgtccactctcgactgccggcgacggccgggtatgggcccgacgctccagcgccatccattttcagggctagttga

SEQ ID NO: 67530 - DNA, 120 bp, Homo sapiens
  misc_feature: 284 for SV(C|O) and 28S
gggattcggcgctgggctcttccctgttcactcgccgttactgagggaatcctggttagtttcttttcctccgctgactaatatgcttaaattcagcgggtcgccacgtctgatctgagg

SEQ ID NO: 67531 - DNA, 120 bp, Homo sapiens
  misc_feature: 284 for SV(C|O) and 28S
accatctgtgggattatgactgaacgcctctaagtcagaatcccgcccaggcggaacgatacggcagcgccgcggagcctcggttggcctcggatagccggtcccccgcctgtccccgcc

SEQ ID NO: 67532 - DNA, 120 bp, Homo sapiens
  misc_feature: 1108 for SV(C|O) and mtDNA
tcctccgcataagcctgcgtcagattaaaacactgaactgacaattaacagcccaatatctacaatcaaccaacaagtcattattaccctcactgtcaacccaacacaggcatgctcata

SEQ ID NO: 67533 - DNA, 120 bp, Homo sapiens
  misc_feature: 1108 for SV(C|O) and mtDNA
ctcctccgcataagcctgcgtcagattaaaacactgaactgacaattaacagcccaatatctacaatcaaccaacaagtcattattaccctcactgtcaacccaacacaggcatgctcat

SEQ ID NO: 67534 - DNA, 120 bp, Homo sapiens
  misc_feature: 1107 for SV(C|O) and mtDNA
acatgaaaacattctcctccgcataagcctgcgtcagattaaaacactgaactgacaattaacagcccaatatctacaatcaaccaacaagtcattattaccctcactgtcaacccaaca

SEQ ID NO: 67535 - DNA, 120 bp, Homo sapiens
  misc_feature: 1103 for SV(C|O) and mtDNA
ccgcataagcctgcgtcagattaaaacactgaactgacaattaacagcccaatatctacaatcaaccaacaagtcattattaccctcactgtcaacccaacacaggcatgctcataagga

SEQ ID NO: 67536 - DNA, 120 bp, Homo sapiens
  misc_feature: 1102 for SV(C|O) and mtDNA
gaatattgtacggtaccataaatacttgaccacctgtagtacataaaaacccaatccacatcaaaaccccctccccatgcttacaagcaagtacagcaatcaaccctcaactatcacaca

SEQ ID NO: 67537 - DNA, 120 bp, Homo sapiens
  misc_feature: 1100 for SV(C|O) and mtDNA
ctccgcataagcctgcgtcagattaaaacactgaactgacaattaacagcccaatatctacaatcaaccaacaagtcattattaccctcactgtcaacccaacacaggcatgctcataag

SEQ ID NO: 67538 - DNA, 120 bp, Homo sapiens
  misc_feature: 1099 for SV(C|O) and mtDNA
cctccgcataagcctgcgtcagattaaaacactgaactgacaattaacagcccaatatctacaatcaaccaacaagtcattattaccctcactgtcaacccaacacaggcatgctcataa

SEQ ID NO: 67539 - DNA, 120 bp, Homo sapiens; identical to SEQ ID NO: 51918
  misc_feature: 1099 for SV(C|O) and mtDNA

SEQ ID NO: 67540 - DNA, 120 bp, Homo sapiens
  misc_feature: 1098 for SV(C|O) and mtDNA
tgaatattgtacggtaccataaatacttgaccacctgtagtacataaaaacccaatccacatcaaaaccccctccccatgcttacaagcaagtacagcaatcaaccctcaactatcacac

SEQ ID NO: 67541 - DNA, 120 bp, Homo sapiens
  misc_feature: 1098 for SV(C|O) and mtDNA
tccgcataagcctgcgtcagattaaaacactgaactgacaattaacagcccaatatctacaatcaaccaacaagtcattattaccctcactgtcaacccaacacaggcatgctcataagg

SEQ ID NO: 67542 - DNA, 120 bp, Homo sapiens
  misc_feature: 1096 for SV(C|O) and mtDNA
tctcctccgcataagcctgcgtcagattaaaacactgaactgacaattaacagcccaatatctacaatcaaccaacaagtcattattaccctcactgtcaacccaacacaggcatgctca

SEQ ID NO: 67543 - DNA, 120 bp, Homo sapiens
  misc_feature: 1095 for SV(C|O) and mtDNA
catgaaaacattctcctccgcataagcctgcgtcagattaaaacactgaactgacaattaacagcccaatatctacaatcaaccaacaagtcattattaccctcactgtcaacccaacac

SEQ ID NO: 67544 - DNA, 120 bp, Homo sapiens
  misc_feature: 1093 for SV(C|O) and mtDNA
atgaaaacattctcctccgcataagcctgcgtcagattaaaacactgaactgacaattaacagcccaatatctacaatcaaccaacaagtcattattaccctcactgtcaacccaacaca

SEQ ID NO: 67545 - DNA, 120 bp, Homo sapiens
  misc_feature: 1093 for SV(C|O) and mtDNA
aatattgtacggtaccataaatacttgaccacctgtagtacataaaaacccaatccacatcaaaaccccctccccatgcttacaagcaagtacagcaatcaaccctcaactatcacacat

SEQ ID NO: 67546 - DNA, 120 bp, Homo sapiens
  misc_feature: 1092 for SV(C|O) and mtDNA
gcataagcctgcgtcagattaaaacactgaactgacaattaacagcccaatatctacaatcaaccaacaagtcattattaccctcactgtcaacccaacacaggcatgctcataaggaaa

SEQ ID NO: 67547 - DNA, 120 bp, Homo sapiens
  misc_feature: 1092 for SV(C|O) and mtDNA
cgcataagcctgcgtcagattaaaacactgaactgacaattaacagcccaatatctacaatcaaccaacaagtcattattaccctcactgtcaacccaacacaggcatgctcataaggaa

SEQ ID NO: 67548 - DNA, 120 bp, Homo sapiens
  misc_feature: 1090 for SV(C|O) and mtDNA
ttctcctccgcataagcctgcgtcagattaaaacactgaactgacaattaacagcccaatatctacaatcaaccaacaagtcattattaccctcactgtcaacccaacacaggcatgctc

SEQ ID NO: 67549 - DNA, 120 bp, Homo sapiens
  misc_feature: 1088 for SV(C|O) and mtDNA
tattgtacggtaccataaatacttgaccacctgtagtacataaaaacccaatccacatcaaaaccccctccccatgcttacaagcaagtacagcaatcaaccctcaactatcacacatca

SEQ ID NO: 67550 - DNA, 120 bp, Homo sapiens
  misc_feature: 1087 for SV(C|O) and mtDNA
ttgtacggtaccataaatacttgaccacctgtagtacataaaaacccaatccacatcaaaaccccctccccatgcttacaagcaagtacagcaatcaaccctcaactatcacacatcaac

SEQ ID NO: 67551 - DNA, 120 bp, Homo sapiens
  misc_feature: 1086 for SV(C|O) and mtDNA
atgaatattgtacggtaccataaatacttgaccacctgtagtacataaaaacccaatccacatcaaaaccccctccccatgcttacaagcaagtacagcaatcaaccctcaactatcaca

SEQ ID NO: 67552 - DNA, 120 bp, Homo sapiens
  misc_feature: 1083 for SV(C|O) and mtDNA
attctcctccgcataagcctgcgtcagattaaaacactgaactgacaattaacagcccaatatctacaatcaaccaacaagtcattattaccctcactgtcaacccaacacaggcatgct

SEQ ID NO: 67553 - DNA, 120 bp, Homo sapiens
  misc_feature: 1080 for SV(C|O) and mtDNA
catgaatattgtacggtaccataaatacttgaccacctgtagtacataaaaacccaatccacatcaaaaccccctccccatgcttacaagcaagtacagcaatcaaccctcaactatcac

SEQ ID NO: 67554 - DNA, 120 bp, Homo sapiens
  misc_feature: 1080 for SV(C|O) and mtDNA
atattgtacggtaccataaatacttgaccacctgtagtacataaaaacccaatccacatcaaaaccccctccccatgcttacaagcaagtacagcaatcaaccctcaactatcacacatc

SEQ ID NO: 67555 - DNA, 120 bp, Homo sapiens
  misc_feature: 1080 for SV(C|O) and mtDNA
acattctcctccgcataagcctgcgtcagattaaaacactgaactgacaattaacagcccaatatctacaatcaaccaacaagtcattattaccctcactgtcaacccaacacaggcatg

SEQ ID NO: 67556 - DNA, 120 bp, Homo sapiens; identical to SEQ ID NO: 51895
  misc_feature: 1078 for SV(C|O) and mtDNA

SEQ ID NO: 67557 - DNA, 120 bp, Homo sapiens
  misc_feature: 1078 for SV(C|O) and mtDNA
attgtacggtaccataaatacttgaccacctgtagtacataaaaacccaatccacatcaaaaccccctccccatgcttacaagcaagtacagcaatcaaccctcaactatcacacatcaa

SEQ ID NO: 67558 - DNA, 120 bp, Homo sapiens
  misc_feature: 1076 for SV(C|O) and mtDNA
tgaaaacattctcctccgcataagcctgcgtcagattaaaacactgaactgacaattaacagcccaatatctacaatcaaccaacaagtcattattaccctcactgtcaacccaacacag

SEQ ID NO: 67559 - DNA, 120 bp, Homo sapiens
  misc_feature: 1074 for SV(C|O) and mtDNA
cattctcctccgcataagcctgcgtcagattaaaacactgaactgacaattaacagcccaatatctacaatcaaccaacaagtcattattaccctcactgtcaacccaacacaggcatgc

SEQ ID NO: 67560 - DNA, 120 bp, Homo sapiens
  misc_feature: 1072 for SV(C|O) and mtDNA
cataagcctgcgtcagattaaaacactgaactgacaattaacagcccaatatctacaatcaaccaacaagtcattattaccctcactgtcaacccaacacaggcatgctcataaggaaag

SEQ ID NO: 67561 - DNA, 120 bp, Homo sapiens
  misc_feature: 1071 for SV(C|O) and mtDNA
tgtacggtaccataaatacttgaccacctgtagtacataaaaacccaatccacatcaaaaccccctccccatgcttacaagcaagtacagcaatcaaccctcaactatcacacatcaact

SEQ ID NO: 67562 - DNA, 120 bp, Homo sapiens
  misc_feature: 1067 for SV(C|O) and mtDNA
accatgaatattgtacggtaccataaatacttgaccacctgtagtacataaaaacccaatccacatcaaaaccccctccccatgcttacaagcaagtacagcaatcaaccctcaactatc

SEQ ID NO: 67563 - DNA, 120 bp, Homo sapiens
  misc_feature: 1066 for SV(C|O) and mtDNA
ccatgaatattgtacggtaccataaatacttgaccacctgtagtacataaaaacccaatccacatcaaaaccccctccccatgcttacaagcaagtacagcaatcaaccctcaactatca

SEQ ID NO: 67564 - DNA, 120 bp, Homo sapiens
  misc_feature: 1064 for SV(C|O) and mtDNA
aacattctcctccgcataagcctgcgtcagattaaaacactgaactgacaattaacagcccaatatctacaatcaaccaacaagtcattattaccctcactgtcaacccaacacaggcat

SEQ ID NO: 67565 - DNA, 120 bp, Homo sapiens; identical to SEQ ID NO: 52020
  misc_feature: 1063 for SV(C|O) and mtDNA

SEQ ID NO: 67566 - DNA, 120 bp, Homo sapiens
  misc_feature: 1063 for SV(C|O) and mtDNA
aaacattctcctccgcataagcctgcgtcagattaaaacactgaactgacaattaacagcccaatatctacaatcaaccaacaagtcattattaccctcactgtcaacccaacacaggca

SEQ ID NO: 67567 - DNA, 120 bp, Homo sapiens
  misc_feature: 1063 for SV(C|O) and mtDNA
aaaacattctcctccgcataagcctgcgtcagattaaaacactgaactgacaattaacagcccaatatctacaatcaaccaacaagtcattattaccctcactgtcaacccaacacaggc

SEQ ID NO: 67568 - DNA, 120 bp, Homo sapiens
  misc_feature: 1063 for SV(C|O) and mtDNA
gaaaacattctcctccgcataagcctgcgtcagattaaaacactgaactgacaattaacagcccaatatctacaatcaaccaacaagtcattattaccctcactgtcaacccaacacagg

SEQ ID NO: 67569 - DNA, 120 bp, Homo sapiens
  misc_feature: 1060 for SV(C|O) and mtDNA
caccatgaatattgtacggtaccataaatacttgaccacctgtagtacataaaaacccaatccacatcaaaaccccctccccatgcttacaagcaagtacagcaatcaaccctcaactat

SEQ ID NO: 67570 - DNA, 120 bp, Homo sapiens
  misc_feature: 1059 for SV(C|O) and mtDNA
gtacggtaccataaatacttgaccacctgtagtacataaaaacccaatccacatcaaaaccccctccccatgcttacaagcaagtacagcaatcaaccctcaactatcacacatcaactg

SEQ ID NO: 67571 - DNA, 120 bp, Homo sapiens; identical to SEQ ID NO: 52160
  misc_feature: 1045 for SV(C|O) and mtDNA

SEQ ID NO: 67572 - DNA, 120 bp, Homo sapiens
  misc_feature: 1045 for SV(C|O) and mtDNA
ataagcctgcgtcagattaaaacactgaactgacaattaacagcccaatatctacaatcaaccaacaagtcattattaccctcactgtcaacccaacacaggcatgctcataaggaaagg

SEQ ID NO: 67573 - DNA, 120 bp, Homo sapiens
  misc_feature: 1042 for SV(C|O) and mtDNA
tacggtaccataaatacttgaccacctgtagtacataaaaacccaatccacatcaaaaccccctccccatgcttacaagcaagtacagcaatcaaccctcaactatcacacatcaactgc

SEQ ID NO: 67574 - DNA, 120 bp, Homo sapiens
  misc_feature: 1040 for SV(C|O) and mtDNA
acggtaccataaatacttgaccacctgtagtacataaaaacccaatccacatcaaaaccccctccccatgcttacaagcaagtacagcaatcaaccctcaactatcacacatcaactgca

SEQ ID NO: 67575 - DNA, 120 bp, Homo sapiens
  misc_feature: 1037 for SV(C|O) and mtDNA
taagcctgcgtcagattaaaacactgaactgacaattaacagcccaatatctacaatcaaccaacaagtcattattaccctcactgtcaacccaacacaggcatgctcataaggaaaggt

SEQ ID NO: 67576 - DNA, 120 bp, Homo sapiens; identical to SEQ ID NO: 52122
  misc_feature: 1037 for SV(C|O) and mtDNA

SEQ ID NO: 67577 - DNA, 120 bp, Homo sapiens
  misc_feature: 1033 for SV(C|O) and mtDNA
ccaccatgaatattgtacggtaccataaatacttgaccacctgtagtacataaaaacccaatccacatcaaaaccccctccccatgcttacaagcaagtacagcaatcaaccctcaacta

SEQ ID NO: 67578 - DNA, 120 bp, Homo sapiens
  misc_feature: 1033 for SV(C|O) and mtDNA
gccaccatgaatattgtacggtaccataaatacttgaccacctgtagtacataaaaacccaatccacatcaaaaccccctccccatgcttacaagcaagtacagcaatcaaccctcaact

SEQ ID NO: 67579 - DNA, 120 bp, Homo sapiens
  misc_feature: 1032 for SV(C|O) and mtDNA
aagcctgcgtcagattaaaacactgaactgacaattaacagcccaatatctacaatcaaccaacaagtcattattaccctcactgtcaacccaacacaggcatgctcataaggaaaggtt

SEQ ID NO: 67580 - DNA, 120 bp, Homo sapiens
  misc_feature: 1029 for SV(C|O) and mtDNA
agcctgcgtcagattaaaacactgaactgacaattaacagcccaatatctacaatcaaccaacaagtcattattaccctcactgtcaacccaacacaggcatgctcataaggaaaggtta

SEQ ID NO: 67581 - DNA, 120 bp, Homo sapiens
  misc_feature: 1022 for SV(C|O) and mtDNA
cggtaccataaatacttgaccacctgtagtacataaaaacccaatccacatcaaaaccccctccccatgcttacaagcaagtacagcaatcaaccctcaactatcacacatcaactgcaa

SEQ ID NO: 67582 - DNA, 120 bp, Homo sapiens
  misc_feature: 1017 for SV(C|O) and mtDNA
gcctgcgtcagattaaaacactgaactgacaattaacagcccaatatctacaatcaaccaacaagtcattattaccctcactgtcaacccaacacaggcatgctcataaggaaaggttaa

SEQ ID NO: 67583 - DNA, 120 bp, Homo sapiens; identical to SEQ ID NO: 52058
  misc_feature: 1006 for SV(C|O) and mtDNA

SEQ ID NO: 67584 - DNA, 120 bp, Homo sapiens
  misc_feature: 1006 for SV(C|O) and mtDNA
agccaccatgaatattgtacggtaccataaatacttgaccacctgtagtacataaaaacccaatccacatcaaaaccccctccccatgcttacaagcaagtacagcaatcaaccctcaac

SEQ ID NO: 67585 - DNA, 120 bp, Homo sapiens; identical to SEQ ID NO: 55708
  misc_feature: 1005 for SV(C|O) and mtDNA

SEQ ID NO: 67586 - DNA, 120 bp, Homo sapiens
  misc_feature: 1000 for SV(C|O) and mtDNA
cctgcgtcagattaaaacactgaactgacaattaacagcccaatatctacaatcaaccaacaagtcattattaccctcactgtcaacccaacacaggcatgctcataaggaaaggttaaa

SEQ ID NO: 67587 - DNA, 120 bp, Homo sapiens; identical to SEQ ID NO: 55545
  misc_feature: 994 for SV(C|O) and mtDNA

SEQ ID NO: 67588 - DNA, 120 bp, Homo sapiens
  misc_feature: 993 for SV(C|O) and mtDNA
tagggggttaattttgcgtattggggtcattggtgttcttgtagttgaaatacaacgatggtttttcatatcattggtcgtggttgtagtccgtgcgagaataatgatgtatgctttgtt

SEQ ID NO: 67589 - DNA, 120 bp, Homo sapiens
  misc_feature: 992 for SV(C|O) and mtDNA
cagccaccatgaatattgtacggtaccataaatacttgaccacctgtagtacataaaaacccaatccacatcaaaaccccctccccatgcttacaagcaagtacagcaatcaaccctcaa

SEQ ID NO: 67590 - DNA, 120 bp, Homo sapiens
  misc_feature: 990 for SV(C|O) and mtDNA
attagggggttaattttgcgtattggggtcattggtgttcttgtagttgaaatacaacgatggtttttcatatcattggtcgtggttgtagtccgtgcgagaataatgatgtatgctttg

SEQ ID NO: 67591 - DNA, 120 bp, Homo sapiens; identical to SEQ ID NO: 52136
  misc_feature: 989 for SV(C|O) and mtDNA

SEQ ID NO: 67592 - DNA, 120 bp, Homo sapiens
  misc_feature: 988 for SV(C|O) and mtDNA
agggggttaattttgcgtattggggtcattggtgttcttgtagttgaaatacaacgatggtttttcatatcattggtcgtggttgtagtccgtgcgagaataatgatgtatgctttgttt

SEQ ID NO: 67593 - DNA, 120 bp, Homo sapiens
  misc_feature: 987 for SV(C|O) and mtDNA
ttagggggttaattttgcgtattggggtcattggtgttcttgtagttgaaatacaacgatggtttttcatatcattggtcgtggttgtagtccgtgcgagaataatgatgtatgctttgt

SEQ ID NO: 67594 - DNA, 120 bp, Homo sapiens; identical to SEQ ID NO: 55807
  misc_feature: 984 for SV(C|O) and mtDNA

SEQ ID NO: 67595 - DNA, 120 bp, Homo sapiens
  misc_feature: 984 for SV(C|O) and mtDNA
ggggttaattttgcgtattggggtcattggtgttcttgtagttgaaatacaacgatggtttttcatatcattggtcgtggttgtagtccgtgcgagaataatgatgtatgctttgtttct

SEQ ID NO: 67596 - DNA, 120 bp, Homo sapiens
  misc_feature: 983 for SV(C|O) and mtDNA
tattagggggttaattttgcgtattggggtcattggtgttcttgtagttgaaatacaacgatggtttttcatatcattggtcgtggttgtagtccgtgcgagaataatgatgtatgcttt

SEQ ID NO: 67597 - DNA, 120 bp, Homo sapiens
  misc_feature: 982 for SV(C|O) and mtDNA
tccagcgtctcgcaatgctatcgcgtgcacaccccccagacgaaaataccaaatgcatggagagctcccgtgagtggttaatagggtgatagacctgtgatccatcgtgatgtcttattt

SEQ ID NO: 67598 - DNA, 120 bp, Homo sapiens; identical to SEQ ID NO: 52173
  misc_feature: 982 for SV(C|O) and mtDNA

SEQ ID NO: 67599 - DNA, 120 bp, Homo sapiens; identical to SEQ ID NO: 55838
  misc_feature: 980 for SV(C|O) and mtDNA

SEQ ID NO: 67600 - DNA, 120 bp, Homo sapiens
  misc_feature: 978 for SV(C|O) and mtDNA
gggggttaattttgcgtattggggtcattggtgttcttgtagttgaaatacaacgatggtttttcatatcattggtcgtggttgtagtccgtgcgagaataatgatgtatgctttgtttc

SEQ ID NO: 67601 - DNA, 120 bp, Homo sapiens
  misc_feature: 978 for SV(C|O) and mtDNA
agcgtctcgcaatgctatcgcgtgcacaccccccagacgaaaataccaaatgcatggagagctcccgtgagtggttaatagggtgatagacctgtgatccatcgtgatgtcttatttaag

SEQ ID NO: 67602 - DNA, 120 bp, Homo sapiens
  misc_feature: 976 for SV(C|O) and mtDNA
ctgcgtcagattaaaacactgaactgacaattaacagcccaatatctacaatcaaccaacaagtcattattaccctcactgtcaacccaacacaggcatgctcataaggaaaggttaaaa

SEQ ID NO: 67603 - DNA, 120 bp, Homo sapiens
  misc_feature: 976 for SV(C|O) and mtDNA
gcgtctcgcaatgctatcgcgtgcacaccccccagacgaaaataccaaatgcatggagagctcccgtgagtggttaatagggtgatagacctgtgatccatcgtgatgtcttatttaagg

SEQ ID NO: 67604 - DNA, 120 bp, Homo sapiens
  misc_feature: 975 for SV(C|O) and mtDNA
ccagcgtctcgcaatgctatcgcgtgcacaccccccagacgaaaataccaaatgcatggagagctcccgtgagtggttaatagggtgatagacctgtgatccatcgtgatgtcttattta

SEQ ID NO: 67605 - DNA, 120 bp, Homo sapiens
  misc_feature: 974 for SV(C|O) and mtDNA
ccagccaccatgaatattgtacggtaccataaatacttgaccacctgtagtacataaaaacccaatccacatcaaaaccccctccccatgcttacaagcaagtacagcaatcaaccctca

SEQ ID NO: 67606 - DNA, 120 bp, Homo sapiens; identical to SEQ ID NO: 51916
  misc_feature: 973 for SV(C|O) and mtDNA

SEQ ID NO: 67607 - DNA, 120 bp, Homo sapiens; identical to SEQ ID NO: 52011
  misc_feature: 972 for SV(C|O) and mtDNA

SEQ ID NO: 67608 - DNA, 120 bp, Homo sapiens; identical to SEQ ID NO: 52048
  misc_feature: 972 for SV(C|O) and mtDNA

SEQ ID NO: 67609 - DNA, 120 bp, Homo sapiens; identical to SEQ ID NO: 52293
  misc_feature: 970 for SV(C|O) and mtDNA

SEQ ID NO: 67610 - DNA, 120 bp, Homo sapiens; identical to SEQ ID NO: 51933
  misc_feature: 969 for SV(C|O) and mtDNA

SEQ ID NO: 67611 - DNA, 120 bp, Homo sapiens; identical to SEQ ID NO: 51952
  misc_feature: 969 for SV(C|O) and mtDNA

SEQ ID NO: 67612 - DNA, 120 bp, Homo sapiens
  misc_feature: 969 for SV(C|O) and mtDNA
aaatctaactttcttcccacaacactttctcggcctatccggaatgccccgacgttactcggactaccccgatgcatacaccacatgaaacatcctatcatctgtaggctcattcatttc

SEQ ID NO: 67613 - DNA, 120 bp, Homo sapiens
  misc_feature: 968 for SV(C|O) and mtDNA
ttattagggggttaattttgcgtattggggtcattggtgttcttgtagttgaaatacaacgatggtttttcatatcattggtcgtggttgtagtccgtgcgagaataatgatgtatgctt

SEQ ID NO: 67614 - DNA, 120 bp, Homo sapiens; identical to SEQ ID NO: 52060
  misc_feature: 967 for SV(C|O) and mtDNA

SEQ ID NO: 67615 - DNA, 120 bp, Homo sapiens
  misc_feature: 966 for SV(C|O) and mtDNA
ctccagcgtctcgcaatgctatcgcgtgcacaccccccagacgaaaataccaaatgcatggagagctcccgtgagtggttaatagggtgatagacctgtgatccatcgtgatgtcttatt

SEQ ID NO: 67616 - DNA, 120 bp, Homo sapiens; identical to SEQ ID NO: 51934
  misc_feature: 965 for SV(C|O) and mtDNA

SEQ ID NO: 67617 - DNA, 120 bp, Homo sapiens; identical to SEQ ID NO: 52076
  misc_feature: 965 for SV(C|O) and mtDNA

SEQ ID NO: 67618 - DNA, 120 bp, Homo sapiens
  misc_feature: 965 for SV(C|O) and mtDNA
gggttaattttgcgtattggggtcattggtgttcttgtagttgaaatacaacgatggtttttcatatcattggtcgtggttgtagtccgtgcgagaataatgatgtatgctttgtttctg

SEQ ID NO: 67619 - DNA, 120 bp, Homo sapiens
  misc_feature: 965 for SV(C|O) and mtDNA
aatctaactttcttcccacaacactttctcggcctatccggaatgccccgacgttactcggactaccccgatgcatacaccacatgaaacatcctatcatctgtaggctcattcatttct

SEQ ID NO: 67620 - DNA, 120 bp, Homo sapiens
  misc_feature: 964 for SV(C|O) and mtDNA
cagcgtctcgcaatgctatcgcgtgcacaccccccagacgaaaataccaaatgcatggagagctcccgtgagtggttaatagggtgatagacctgtgatccatcgtgatgtcttatttaa

SEQ ID NO: 67621 - DNA, 120 bp, Homo sapiens; identical to SEQ ID NO: 51878
  misc_feature: 964 for SV(C|O) and mtDNA

SEQ ID NO: 67622 - DNA, 120 bp, Homo sapiens; identical to SEQ ID NO: 51866
  misc_feature: 964 for SV(C|O) and mtDNA

SEQ ID NO: 67623 - DNA, 120 bp, Homo sapiens
  misc_feature: 964 for SV(C|O) and mtDNA
gtctcgcaatgctatcgcgtgcacaccccccagacgaaaataccaaatgcatggagagctcccgtgagtggttaatagggtgatagacctgtgatccatcgtgatgtcttatttaagggg

SEQ ID NO: 67624 - DNA, 120 bp, Homo sapiens
  misc_feature: 964 for SV(C|O) and mtDNA
cgtctcgcaatgctatcgcgtgcacaccccccagacgaaaataccaaatgcatggagagctcccgtgagtggttaatagggtgatagacctgtgatccatcgtgatgtcttatttaaggg

SEQ ID NO: 67625 - DNA, 120 bp, Homo sapiens
  misc_feature: 962 for SV(C|O) and mtDNA
tcatgaaaggtgataagctcttctatgataggggaagtagcgtcttgtagacctacttgcgctgcatgtgccattaagatatataggatttagcctataatttaactttgacaaagttat

SEQ ID NO: 67626 - DNA, 120 bp, Homo sapiens; identical to SEQ ID NO: 52159
  misc_feature: 962 for SV(C|O) and mtDNA

SEQ ID NO: 67627 - DNA, 120 bp, Homo sapiens
  misc_feature: 962 for SV(C|O) and mtDNA
gctccagcgtctcgcaatgctatcgcgtgcacaccccccagacgaaaataccaaatgcatggagagctcccgtgagtggttaatagggtgatagacctgtgatccatcgtgatgtcttat

SEQ ID NO: 67628 - DNA, 120 bp, Homo sapiens
  misc_feature: 962 for SV(C|O) and mtDNA
atctaactttcttcccacaacactttctcggcctatccggaatgccccgacgttactcggactaccccgatgcatacaccacatgaaacatcctatcatctgtaggctcattcatttctc

SEQ ID NO: 67629 - DNA, 120 bp, Homo sapiens
  misc_feature: 961 for SV(C|O) and mtDNA
tttattagggggttaattttgcgtattggggtcattggtgttcttgtagttgaaatacaacgatggtttttcatatcattggtcgtggttgtagtccgtgcgagaataatgatgtatgct

SEQ ID NO: 67630 - DNA, 120 bp, Homo sapiens; identical to SEQ ID NO: 51981
  misc_feature: 960 for SV(C|O) and mtDNA

SEQ ID NO: 67631 - DNA, 120 bp, Homo sapiens; identical to SEQ ID NO: 52041
  misc_feature: 959 for SV(C|O) and mtDNA

SEQ ID NO: 67632 - DNA, 120 bp, Homo sapiens; identical to SEQ ID NO: 52258
  misc_feature: 959 for SV(C|O) and mtDNA

SEQ ID NO: 67633 - DNA, 120 bp, Homo sapiens
  misc_feature: 958 for SV(C|O) and mtDNA
aaaggtgataagctcttctatgataggggaagtagcgtcttgtagacctacttgcgctgcatgtgccattaagatatataggatttagcctataatttaactttgacaaagttatgaaat

SEQ ID NO: 67634 - DNA, 120 bp, Homo sapiens
  misc_feature: 957 for SV(C|O) and mtDNA
tgaaaggtgataagctcttctatgataggggaagtagcgtcttgtagacctacttgcgctgcatgtgccattaagatatataggatttagcctataatttaactttgacaaagttatgaa

SEQ ID NO: 67635 - DNA, 120 bp, Homo sapiens; identical to SEQ ID NO: 51845
  misc_feature: 956 for SV(C|O) and mtDNA

SEQ ID NO: 67636 - DNA, 120 bp, Homo sapiens; identical to SEQ ID NO: 52215
  misc_feature: 955 for SV(C|O) and mtDNA

SEQ ID NO: 67637 - DNA, 120 bp, Homo sapiens
  misc_feature: 955 for SV(C|O) and mtDNA
caaagttaaattataggctaaatcctatatatcttaatggcacatgcagcgcaagtaggtctacaagacgctacttcccctatcatagaagagcttatcacctttcatgatcacgccctc

SEQ ID NO: 67638 - DNA, 120 bp, Homo sapiens
  misc_feature: 952 for SV(C|O) and mtDNA
ggctccagcgtctcgcaatgctatcgcgtgcacaccccccagacgaaaataccaaatgcatggagagctcccgtgagtggttaatagggtgatagacctgtgatccatcgtgatgtctta

SEQ ID NO: 67639 - DNA, 120 bp, Homo sapiens
  misc_feature: 951 for SV(C|O) and mtDNA
ggttaattttgcgtattggggtcattggtgttcttgtagttgaaatacaacgatggtttttcatatcattggtcgtggttgtagtccgtgcgagaataatgatgtatgctttgtttctgt

SEQ ID NO: 67640 - DNA, 120 bp, Homo sapiens
  misc_feature: 951 for SV(C|O) and mtDNA
gccagccaccatgaatattgtacggtaccataaatacttgaccacctgtagtacataaaaacccaatccacatcaaaaccccctccccatgcttacaagcaagtacagcaatcaaccctc

SEQ ID NO: 67641 - DNA, 120 bp, Homo sapiens; identical to SEQ ID NO: 52248
  misc_feature: 950 for SV(C|O) and mtDNA

SEQ ID NO: 67642 - DNA, 120 bp, Homo sapiens
  misc_feature: 950 for SV(C|O) and mtDNA
ttgtcaaagttaaattataggctaaatcctatatatcttaatggcacatgcagcgcaagtaggtctacaagacgctacttcccctatcatagaagagcttatcacctttcatgatcacgc

SEQ ID NO: 67643 - DNA, 120 bp, Homo sapiens
  misc_feature: 950 for SV(C|O) and mtDNA
atgaaaggtgataagctcttctatgataggggaagtagcgtcttgtagacctacttgcgctgcatgtgccattaagatatataggatttagcctataatttaactttgacaaagttatga

SEQ ID NO: 67644 - DNA, 120 bp, Homo sapiens; identical to SEQ ID NO: 52088
  misc_feature: 950 for SV(C|O) and mtDNA

SEQ ID NO: 67645 - DNA, 120 bp, Homo sapiens
  misc_feature: 949 for SV(C|O) and mtDNA
aatgaatgagcctacagatgataggatgtttcatgtggtgtatgcatcggggtagtccgagtaacgtcggggcattccggataggccgagaaagtgttgtgggaagaaagttagatttac

SEQ ID NO: 67646 - DNA, 120 bp, Homo sapiens
  misc_feature: 949 for SV(C|O) and mtDNA
catgaaaggtgataagctcttctatgataggggaagtagcgtcttgtagacctacttgcgctgcatgtgccattaagatatataggatttagcctataatttaactttgacaaagttatg

SEQ ID NO: 67647 - DNA, 120 bp, Homo sapiens; identical to SEQ ID NO: 52084
  misc_feature: 947 for SV(C|O) and mtDNA

SEQ ID NO: 67648 - DNA, 120 bp, Homo sapiens; identical to SEQ ID NO: 52073
  misc_feature: 947 for SV(C|O) and mtDNA

SEQ ID NO: 67649 - DNA, 120 bp, Homo sapiens; identical to SEQ ID NO: 52115
  misc_feature: 946 for SV(C|O) and mtDNA

SEQ ID NO: 67650 - DNA, 120 bp, Homo sapiens; identical to SEQ ID NO: 51768
  misc_feature: 946 for SV(C|O) and mtDNA

SEQ ID NO: 67651 - DNA, 120 bp, Homo sapiens; identical to SEQ ID NO: 52339
  misc_feature: 946 for SV(C|O) and mtDNA

SEQ ID NO: 67652 - DNA, 120 bp, Homo sapiens; identical to SEQ ID NO: 55531
  misc_feature: 946 for SV(C|O) and mtDNA

SEQ ID NO: 67653 - DNA, 120 bp, Homo sapiens
  misc_feature: 946 for SV(C|O) and mtDNA
tctcgcaatgctatcgcgtgcacaccccccagacgaaaataccaaatgcatggagagctcccgtgagtggttaatagggtgatagacctgtgatccatcgtgatgtcttatttaagggga

SEQ ID NO: 67654 - DNA, 120 bp, Homo sapiens
  misc_feature: 946 for SV(C|O) and mtDNA
tcaaagttaaattataggctaaatcctatatatcttaatggcacatgcagcgcaagtaggtctacaagacgctacttcccctatcatagaagagcttatcacctttcatgatcacgccct

SEQ ID NO: 67655 - DNA, 120 bp, Homo sapiens; identical to SEQ ID NO: 52032
  misc_feature: 946 for SV(C|O) and mtDNA

SEQ ID NO: 67656 - DNA, 120 bp, Homo sapiens
  misc_feature: 945 for SV(C|O) and mtDNA
gaaaggtgataagctcttctatgataggggaagtagcgtcttgtagacctacttgcgctgcatgtgccattaagatatataggatttagcctataatttaactttgacaaagttatgaaa

SEQ ID NO: 67657 - DNA, 120 bp, Homo sapiens
  misc_feature: 945 for SV(C|O) and mtDNA
aaggtgataagctcttctatgataggggaagtagcgtcttgtagacctacttgcgctgcatgtgccattaagatatataggatttagcctataatttaactttgacaaagttatgaaatg

SEQ ID NO: 67658 - DNA, 120 bp, Homo sapiens; identical to SEQ ID NO: 56334
  misc_feature: 944 for SV(C|O) and mtDNA

SEQ ID NO: 67659 - DNA, 120 bp, Homo sapiens
  misc_feature: 943 for SV(C|O) and mtDNA
ggcaggaatcaaagacagatactgcgacatagggtgctccggctccagcgtctcgcaatgctatcgcgtgcacaccccccagacgaaaataccaaatgcatggagagctcccgtgagtgg

SEQ ID NO: 67660 - DNA, 120 bp, Homo sapiens
  misc_feature: 943 for SV(C|O) and mtDNA
aggtgataagctcttctatgataggggaagtagcgtcttgtagacctacttgcgctgcatgtgccattaagatatataggatttagcctataatttaactttgacaaagttatgaaatgg

SEQ ID NO: 67661 - DNA, 120 bp, Homo sapiens
  misc_feature: 941 for SV(C|O) and mtDNA
tgtcaaagttaaattataggctaaatcctatatatcttaatggcacatgcagcgcaagtaggtctacaagacgctacttcccctatcatagaagagcttatcacctttcatgatcacgcc

SEQ ID NO: 67662 - DNA, 120 bp, Homo sapiens
  misc_feature: 941 for SV(C|O) and mtDNA
gtgtgggtttagtaatggggtttgtggggttttcttctaagccttctcctatttatgggggtttagtattgattgttagcggtgtggtcgggtgtgttattattctgaattttgggggag

SEQ ID NO: 67663 - DNA, 120 bp, Homo sapiens
  misc_feature: 941 for SV(C|O) and mtDNA
aggcaggaatcaaagacagatactgcgacatagggtgctccggctccagcgtctcgcaatgctatcgcgtgcacaccccccagacgaaaataccaaatgcatggagagctcccgtgagtg

SEQ ID NO: 67664 - DNA, 120 bp, Homo sapiens
  misc_feature: 940 for SV(C|O) and mtDNA
ttttattagggggttaattttgcgtattggggtcattggtgttcttgtagttgaaatacaacgatggtttttcatatcattggtcgtggttgtagtccgtgcgagaataatgatgtatgc

SEQ ID NO: 67665 - DNA, 120 bp, Homo sapiens
  misc_feature: 940 for SV(C|O) and mtDNA
tcgcaatgctatcgcgtgcacaccccccagacgaaaataccaaatgcatggagagctcccgtgagtggttaatagggtgatagacctgtgatccatcgtgatgtcttatttaaggggaac

SEQ ID NO: 67666 - DNA, 120 bp, Homo sapiens
  misc_feature: 940 for SV(C|O) and mtDNA
gcaggaatcaaagacagatactgcgacatagggtgctccggctccagcgtctcgcaatgctatcgcgtgcacaccccccagacgaaaataccaaatgcatggagagctcccgtgagtggt

SEQ ID NO: 67667 - DNA, 120 bp, Homo sapiens; identical to SEQ ID NO: 56094
  misc_feature: 939 for SV(C|O) and mtDNA

SEQ ID NO: 67668 - DNA, 120 bp, Homo sapiens
  misc_feature: 939 for SV(C|O) and mtDNA
ctcgcaatgctatcgcgtgcacaccccccagacgaaaataccaaatgcatggagagctcccgtgagtggttaatagggtgatagacctgtgatccatcgtgatgtcttatttaaggggaa

SEQ ID NO: 67669 - DNA, 120 bp, Homo sapiens; identical to SEQ ID NO: 52613
  misc_feature: 939 for SV(C|O) and mtDNA

SEQ ID NO: 67670 - DNA, 120 bp, Homo sapiens
  misc_feature: 937 for SV(C|O) and mtDNA
atgaatgagcctacagatgataggatgtttcatgtggtgtatgcatcggggtagtccgagtaacgtcggggcattccggataggccgagaaagtgttgtgggaagaaagttagatttacg

SEQ ID NO: 67671 - DNA, 120 bp, Homo sapiens
  misc_feature: 936 for SV(C|O) and mtDNA
aaagttaaattataggctaaatcctatatatcttaatggcacatgcagcgcaagtaggtctacaagacgctacttcccctatcatagaagagcttatcacctttcatgatcacgccctca

SEQ ID NO: 67672 - DNA, 120 bp, Homo sapiens
  misc_feature: 936 for SV(C|O) and mtDNA
agtgtgggtttagtaatggggtttgtggggttttcttctaagccttctcctatttatgggggtttagtattgattgttagcggtgtggtcgggtgtgttattattctgaattttggggga

SEQ ID NO: 67673 - DNA, 120 bp, Homo sapiens; identical to SEQ ID NO: 52471
  misc_feature: 935 for SV(C|O) and mtDNA

SEQ ID NO: 67674 - DNA, 120 bp, Homo sapiens
  misc_feature: 935 for SV(C|O) and mtDNA
tcagaataataacacacccgaccacaccgctaacaatcaatactaaacccccataaataggagaaggcttagaagaaaaccccacaaaccccattactaaacccacactcaacagaaaca

SEQ ID NO: 67675 - DNA, 120 bp, Homo sapiens; identical to SEQ ID NO: 51804
  misc_feature: 935 for SV(C|O) and mtDNA

SEQ ID NO: 67676 - DNA, 120 bp, Homo sapiens
  misc_feature: 935 for SV(C|O) and mtDNA
cgcaatgctatcgcgtgcacaccccccagacgaaaataccaaatgcatggagagctcccgtgagtggttaatagggtgatagacctgtgatccatcgtgatgtcttatttaaggggaacg

SEQ ID NO: 67677 - DNA, 120 bp, Homo sapiens; identical to SEQ ID NO: 52117
  misc_feature: 934 for SV(C|O) and mtDNA

SEQ ID NO: 67678 - DNA, 120 bp, Homo sapiens
  misc_feature: 934 for SV(C|O) and mtDNA
gcaatgctatcgcgtgcacaccccccagacgaaaataccaaatgcatggagagctcccgtgagtggttaatagggtgatagacctgtgatccatcgtgatgtcttatttaaggggaacgt

SEQ ID NO: 67679 - DNA, 120 bp, Homo sapiens
  misc_feature: 933 for SV(C|O) and mtDNA
agaataataacacacccgaccacaccgctaacaatcaatactaaacccccataaataggagaaggcttagaagaaaaccccacaaaccccattactaaacccacactcaacagaaacaaa

SEQ ID NO: 67680 - DNA, 120 bp, Homo sapiens
  misc_feature: 933 for SV(C|O) and mtDNA
gagtgtgggtttagtaatggggtttgtggggttttcttctaagccttctcctatttatgggggtttagtattgattgttagcggtgtggtcgggtgtgttattattctgaattttggggg

SEQ ID NO: 67681 - DNA, 120 bp, Homo sapiens
  misc_feature: 933 for SV(C|O) and mtDNA
agttaattggaagttaacggtactatttatactaaaagagtaagaccctcatcaatagatggagacatacagaaatagtcaaaccacgtctacaaaatgccagtatcaggcggcggcttc

SEQ ID NO: 67682 - DNA, 120 bp, Homo sapiens
  misc_feature: 933 for SV(C|O) and mtDNA
aagttaaattataggctaaatcctatatatcttaatggcacatgcagcgcaagtaggtctacaagacgctacttcccctatcatagaagagcttatcacctttcatgatcacgccctcat

SEQ ID NO: 67683 - DNA, 120 bp, Homo sapiens; identical to SEQ ID NO: 52250
  misc_feature: 932 for SV(C|O) and mtDNA

SEQ ID NO: 67684 - DNA, 120 bp, Homo sapiens
  misc_feature: 932 for SV(C|O) and mtDNA
tgccagccaccatgaatattgtacggtaccataaatacttgaccacctgtagtacataaaaacccaatccacatcaaaaccccctccccatgcttacaagcaagtacagcaatcaaccct

SEQ ID NO: 67685 - DNA, 120 bp, Homo sapiens
  misc_feature: 932 for SV(C|O) and mtDNA
gtcaaagttaaattataggctaaatcctatatatcttaatggcacatgcagcgcaagtaggtctacaagacgctacttcccctatcatagaagagcttatcacctttcatgatcacgccc

SEQ ID NO: 67686 - DNA, 120 bp, Homo sapiens
  misc_feature: 932 for SV(C|O) and mtDNA
attttattagggggttaattttgcgtattggggtcattggtgttcttgtagttgaaatacaacgatggtttttcatatcattggtcgtggttgtagtccgtgcgagaataatgatgtatg

SEQ ID NO: 67687 - DNA, 120 bp, Homo sapiens
  misc_feature: 932 for SV(C|O) and mtDNA
atactggcattttgtagacgtggtttgactatttctgtatgtctccatctattgatgagggtcttactcttttagtataaatagtaccgttaacttccaattaactagttttgacaacat

SEQ ID NO: 67688 - DNA, 120 bp, Homo sapiens; identical to SEQ ID NO: 52597
  misc_feature: 931 for SV(C|O) and mtDNA

SEQ ID NO: 67689 - DNA, 120 bp, Homo sapiens; identical to SEQ ID NO: 56679
  misc_feature: 931 for SV(C|O) and mtDNA

SEQ ID NO: 67690 - DNA, 120 bp, Homo sapiens
  misc_feature: 931 for SV(C|O) and mtDNA
caatgctatcgcgtgcacaccccccagacgaaaataccaaatgcatggagagctcccgtgagtggttaatagggtgatagacctgtgatccatcgtgatgtcttatttaaggggaacgtg

SEQ ID NO: 67691 - DNA, 120 bp, Homo sapiens; identical to SEQ ID NO: 55479
  misc_feature: 930 for SV(C|O) and mtDNA

SEQ ID NO: 67692 - DNA, 120 bp, Homo sapiens
  misc_feature: 930 for SV(C|O) and mtDNA
gatactggcattttgtagacgtggtttgactatttctgtatgtctccatctattgatgagggtcttactcttttagtataaatagtaccgttaacttccaattaactagttttgacaaca

SEQ ID NO: 67693 - DNA, 120 bp, Homo sapiens
  misc_feature: 930 for SV(C|O) and mtDNA
gttaattttgcgtattggggtcattggtgttcttgtagttgaaatacaacgatggtttttcatatcattggtcgtggttgtagtccgtgcgagaataatgatgtatgctttgtttctgtt

SEQ ID NO: 67694 - DNA, 120 bp, Homo sapiens
  misc_feature: 929 for SV(C|O) and mtDNA
tgtgggtttagtaatggggtttgtggggttttcttctaagccttctcctatttatgggggtttagtattgattgttagcggtgtggtcgggtgtgttattattctgaattttgggggagg

SEQ ID NO: 67695 - DNA, 120 bp, Homo sapiens; identical to SEQ ID NO: 56364
  misc_feature: 928 for SV(C|O) and mtDNA

SEQ ID NO: 67696 - DNA, 120 bp, Homo sapiens; identical to SEQ ID NO: 51985
  misc_feature: 928 for SV(C|O) and mtDNA

SEQ ID NO: 67697 - DNA, 120 bp, Homo sapiens; identical to SEQ ID NO: 52788
  misc_feature: 928 for SV(C|O) and mtDNA

SEQ ID NO: 67698 - DNA, 120 bp, Homo sapiens; identical to SEQ ID NO: 52865
  misc_feature: 928 for SV(C|O) and mtDNA

SEQ ID NO: 67699 - DNA, 120 bp, Homo sapiens
  misc_feature: 927 for SV(C|O) and mtDNA
cagaataataacacacccgaccacaccgctaacaatcaatactaaacccccataaataggagaaggcttagaagaaaaccccacaaaccccattactaaacccacactcaacagaaacaa

SEQ ID NO: 67700 - DNA, 120 bp, Homo sapiens
  misc_feature: 927 for SV(C|O) and mtDNA
agttaaattataggctaaatcctatatatcttaatggcacatgcagcgcaagtaggtctacaagacgctacttcccctatcatagaagagcttatcacctttcatgatcacgccctcata

SEQ ID NO: 67701 - DNA, 120 bp, Homo sapiens; identical to SEQ ID NO: 52078
  misc_feature: 927 for SV(C|O) and mtDNA

SEQ ID NO: 67702 - DNA, 120 bp, Homo sapiens
  misc_feature: 927 for SV(C|O) and mtDNA
aataataacacacccgaccacaccgctaacaatcaatactaaacccccataaataggagaaggcttagaagaaaaccccacaaaccccattactaaacccacactcaacagaaacaaagc

SEQ ID NO: 67703 - DNA, 120 bp, Homo sapiens
  misc_feature: 927 for SV(C|O) and mtDNA
aatgctatcgcgtgcacaccccccagacgaaaataccaaatgcatggagagctcccgtgagtggttaatagggtgatagacctgtgatccatcgtgatgtcttatttaaggggaacgtgt

SEQ ID NO: 67704 - DNA, 120 bp, Homo sapiens; identical to SEQ ID NO: 56530
  misc_feature: 926 for SV(C|O) and mtDNA

SEQ ID NO: 67705 - DNA, 120 bp, Homo sapiens
  misc_feature: 926 for SV(C|O) and mtDNA
tagttaattggaagttaacggtactatttatactaaaagagtaagaccctcatcaatagatggagacatacagaaatagtcaaaccacgtctacaaaatgccagtatcaggcggcggctt

SEQ ID NO: 67706 - DNA, 120 bp, Homo sapiens
  misc_feature: 925 for SV(C|O) and mtDNA
cctgatactggcattttgtagacgtggtttgactatttctgtatgtctccatctattgatgagggtcttactcttttagtataaatagtaccgttaacttccaattaactagttttgaca

SEQ ID NO: 67707 - DNA, 120 bp, Homo sapiens; identical to SEQ ID NO: 56536
  misc_feature: 925 for SV(C|O) and mtDNA

SEQ ID NO: 67708 - DNA, 120 bp, Homo sapiens
  misc_feature: 925 for SV(C|O) and mtDNA
aggaatcaaagacagatactgcgacatagggtgctccggctccagcgtctcgcaatgctatcgcgtgcacaccccccagacgaaaataccaaatgcatggagagctcccgtgagtggtta

SEQ ID NO: 67709 - DNA, 120 bp, Homo sapiens
  misc_feature: 925 for SV(C|O) and mtDNA
caggaatcaaagacagatactgcgacatagggtgctccggctccagcgtctcgcaatgctatcgcgtgcacaccccccagacgaaaataccaaatgcatggagagctcccgtgagtggtt

SEQ ID NO: 67710 - DNA, 120 bp, Homo sapiens
  misc_feature: 924 for SV(C|O) and mtDNA
ccaaaattcagaataataacacacccgaccacaccgctaacaatcaatactaaacccccataaataggagaaggcttagaagaaaaccccacaaaccccattactaaacccacactcaac

SEQ ID NO: 67711 - DNA, 120 bp, Homo sapiens
  misc_feature: 924 for SV(C|O) and mtDNA
gtgataagctcttctatgataggggaagtagcgtcttgtagacctacttgcgctgcatgtgccattaagatatataggatttagcctataatttaactttgacaaagttatgaaatggtt

SEQ ID NO: 67712 - DNA, 120 bp, Homo sapiens
  misc_feature: 924 for SV(C|O) and mtDNA
gaataataacacacccgaccacaccgctaacaatcaatactaaacccccataaataggagaaggcttagaagaaaaccccacaaaccccattactaaacccacactcaacagaaacaaag

SEQ ID NO: 67713 - DNA, 120 bp, Homo sapiens
  misc_feature: 924 for SV(C|O) and mtDNA
cggctccagcgtctcgcaatgctatcgcgtgcacaccccccagacgaaaataccaaatgcatggagagctcccgtgagtggttaatagggtgatagacctgtgatccatcgtgatgtctt

SEQ ID NO: 67714 - DNA, 120 bp, Homo sapiens
  misc_feature: 924 for SV(C|O) and mtDNA
ataagctcttctatgataggggaagtagcgtcttgtagacctacttgcgctgcatgtgccattaagatatataggatttagcctataatttaactttgacaaagttatgaaatggttttt

SEQ ID NO: 67715 - DNA, 120 bp, Homo sapiens
  misc_feature: 923 for SV(C|O) and mtDNA
ctgatactggcattttgtagacgtggtttgactatttctgtatgtctccatctattgatgagggtcttactcttttagtataaatagtaccgttaacttccaattaactagttttgacaa

SEQ ID NO: 67716 - DNA, 120 bp, Homo sapiens; identical to SEQ ID NO: 52002
  misc_feature: 923 for SV(C|O) and mtDNA

SEQ ID NO: 67717 - DNA, 120 bp, Homo sapiens
  misc_feature: 923 for SV(C|O) and mtDNA
tgatactggcattttgtagacgtggtttgactatttctgtatgtctccatctattgatgagggtcttactcttttagtataaatagtaccgttaacttccaattaactagttttgacaac

SEQ ID NO: 67718 - DNA, 120 bp, Homo sapiens
  misc_feature: 923 for SV(C|O) and mtDNA
tgaatgagcctacagatgataggatgtttcatgtggtgtatgcatcggggtagtccgagtaacgtcggggcattccggataggccgagaaagtgttgtgggaagaaagttagatttacgc

SEQ ID NO: 67719 - DNA, 120 bp, Homo sapiens; identical to SEQ ID NO: 51898
  misc_feature: 923 for SV(C|O) and mtDNA

SEQ ID NO: 67720 - DNA, 120 bp, Homo sapiens
  misc_feature: 923 for SV(C|O) and mtDNA
ggtgataagctcttctatgataggggaagtagcgtcttgtagacctacttgcgctgcatgtgccattaagatatataggatttagcctataatttaactttgacaaagttatgaaatggt

SEQ ID NO: 67721 - DNA, 120 bp, Homo sapiens; identical to SEQ ID NO: 52346
  misc_feature: 923 for SV(C|O) and mtDNA

SEQ ID NO: 67722 - DNA, 120 bp, Homo sapiens
  misc_feature: 922 for SV(C|O) and mtDNA
tggcattttgtagacgtggtttgactatttctgtatgtctccatctattgatgagggtcttactcttttagtataaatagtaccgttaacttccaattaactagttttgacaacattcaa

SEQ ID NO: 67723 - DNA, 120 bp, Homo sapiens
  misc_feature: 922 for SV(C|O) and mtDNA
gttaaattataggctaaatcctatatatcttaatggcacatgcagcgcaagtaggtctacaagacgctacttcccctatcatagaagagcttatcacctttcatgatcacgccctcataa

SEQ ID NO: 67724 - DNA, 120 bp, Homo sapiens
  misc_feature: 922 for SV(C|O) and mtDNA
ataataacacacccgaccacaccgctaacaatcaatactaaacccccataaataggagaaggcttagaagaaaaccccacaaaccccattactaaacccacactcaacagaaacaaagca

SEQ ID NO: 67725 - DNA, 120 bp, Homo sapiens
  misc_feature: 922 for SV(C|O) and mtDNA
gataagctcttctatgataggggaagtagcgtcttgtagacctacttgcgctgcatgtgccattaagatatataggatttagcctataatttaactttgacaaagttatgaaatggtttt

SEQ ID NO: 67726 - DNA, 120 bp, Homo sapiens
  misc_feature: 922 for SV(C|O) and mtDNA
ctagttaattggaagttaacggtactatttatactaaaagagtaagaccctcatcaatagatggagacatacagaaatagtcaaaccacgtctacaaaatgccagtatcaggcggcggct

SEQ ID NO: 67727 - DNA, 120 bp, Homo sapiens; identical to SEQ ID NO: 51843
  misc_feature: 921 for SV(C|O) and mtDNA

SEQ ID NO: 67728 - DNA, 120 bp, Homo sapiens; identical to SEQ ID NO: 52015
  misc_feature: 921 for SV(C|O) and mtDNA

SEQ ID NO: 67729 - DNA, 120 bp, Homo sapiens
  misc_feature: 920 for SV(C|O) and mtDNA
cccaaaattcagaataataacacacccgaccacaccgctaacaatcaatactaaacccccataaataggagaaggcttagaagaaaaccccacaaaccccattactaaacccacactcaa

SEQ ID NO: 67730 - DNA, 120 bp, Homo sapiens
  misc_feature: 920 for SV(C|O) and mtDNA
tgataagctcttctatgataggggaagtagcgtcttgtagacctacttgcgctgcatgtgccattaagatatataggatttagcctataatttaactttgacaaagttatgaaatggttt

SEQ ID NO: 67731 - DNA, 120 bp, Homo sapiens; identical to SEQ ID NO: 51982
  misc_feature: 920 for SV(C|O) and mtDNA

SEQ ID NO: 67732 - DNA, 120 bp, Homo sapiens
  misc_feature: 920 for SV(C|O) and mtDNA
gcctgatactggcattttgtagacgtggtttgactatttctgtatgtctccatctattgatgagggtcttactcttttagtataaatagtaccgttaacttccaattaactagttttgac

SEQ ID NO: 67733 - DNA, 120 bp, Homo sapiens
  misc_feature: 919 for SV(C|O) and mtDNA
tgagtgtgggtttagtaatggggtttgtggggttttcttctaagccttctcctatttatgggggtttagtattgattgttagcggtgtggtcgggtgtgttattattctgaattttgggg

SEQ ID NO: 67734 - DNA, 120 bp, Homo sapiens
  misc_feature: 919 for SV(C|O) and mtDNA
tactggcattttgtagacgtggtttgactatttctgtatgtctccatctattgatgagggtcttactcttttagtataaatagtaccgttaacttccaattaactagttttgacaacatt

SEQ ID NO: 67735 - DNA, 120 bp, Homo sapiens; identical to SEQ ID NO: 54990
  misc_feature: 918 for SV(C|O) and mtDNA

SEQ ID NO: 67736 - DNA, 120 bp, Homo sapiens
  misc_feature: 918 for SV(C|O) and mtDNA
tgctatcgcgtgcacaccccccagacgaaaataccaaatgcatggagagctcccgtgagtggttaatagggtgatagacctgtgatccatcgtgatgtcttatttaaggggaacgtgtgg

SEQ ID NO: 67737 - DNA, 120 bp, Homo sapiens
  misc_feature: 918 for SV(C|O) and mtDNA
atgctatcgcgtgcacaccccccagacgaaaataccaaatgcatggagagctcccgtgagtggttaatagggtgatagacctgtgatccatcgtgatgtcttatttaaggggaacgtgtg

SEQ ID NO: 67738 - DNA, 120 bp, Homo sapiens; identical to SEQ ID NO: 53048
  misc_feature: 917 for SV(C|O) and mtDNA

SEQ ID NO: 67739 - DNA, 120 bp, Homo sapiens; identical to SEQ ID NO: 52128
  misc_feature: 917 for SV(C|O) and mtDNA

SEQ ID NO: 67740 - DNA, 120 bp, Homo sapiens
  misc_feature: 917 for SV(C|O) and mtDNA
actggcattttgtagacgtggtttgactatttctgtatgtctccatctattgatgagggtcttactcttttagtataaatagtaccgttaacttccaattaactagttttgacaacattc

SEQ ID NO: 67741 - DNA, 120 bp, Homo sapiens
  misc_feature: 916 for SV(C|O) and mtDNA
tgggtttagtaatggggtttgtggggttttcttctaagccttctcctatttatgggggtttagtattgattgttagcggtgtggtcgggtgtgttattattctgaattttgggggaggtt

SEQ ID NO: 67742 - DNA, 120 bp, Homo sapiens; identical to SEQ ID NO: 52921
  misc_feature: 916 for SV(C|O) and mtDNA

SEQ ID NO: 67743 - DNA, 120 bp, Homo sapiens
  misc_feature: 916 for SV(C|O) and mtDNA
gtgggtttagtaatggggtttgtggggttttcttctaagccttctcctatttatgggggtttagtattgattgttagcggtgtggtcgggtgtgttattattctgaattttgggggaggt

SEQ ID NO: 67744 - DNA, 120 bp, Homo sapiens
  misc_feature: 916 for SV(C|O) and mtDNA
actagttaattggaagttaacggtactatttatactaaaagagtaagaccctcatcaatagatggagacatacagaaatagtcaaaccacgtctacaaaatgccagtatcaggcggcggc

SEQ ID NO: 67745 - DNA, 120 bp, Homo sapiens
  misc_feature: 915 for SV(C|O) and mtDNA
ggcattttgtagacgtggtttgactatttctgtatgtctccatctattgatgagggtcttactcttttagtataaatagtaccgttaacttccaattaactagttttgacaacattcaaa

SEQ ID NO: 67746 - DNA, 120 bp, Homo sapiens
  misc_feature: 915 for SV(C|O) and mtDNA
ggaatcaaagacagatactgcgacatagggtgctccggctccagcgtctcgcaatgctatcgcgtgcacaccccccagacgaaaataccaaatgcatggagagctcccgtgagtggttaa

SEQ ID NO: 67747 - DNA, 120 bp, Homo sapiens
  misc_feature: 915 for SV(C|O) and mtDNA
gaatgagcctacagatgataggatgtttcatgtggtgtatgcatcggggtagtccgagtaacgtcggggcattccggataggccgagaaagtgttgtgggaagaaagttagatttacgcc

SEQ ID NO: 67748 - DNA, 120 bp, Homo sapiens
  misc_feature: 915 for SV(C|O) and mtDNA
aattttattagggggttaattttgcgtattggggtcattggtgttcttgtagttgaaatacaacgatggtttttcatatcattggtcgtggttgtagtccgtgcgagaataatgatgtat

SEQ ID NO: 67749 - DNA, 120 bp, Homo sapiens
  misc_feature: 914 for SV(C|O) and mtDNA
ttaattttgcgtattggggtcattggtgttcttgtagttgaaatacaacgatggtttttcatatcattggtcgtggttgtagtccgtgcgagaataatgatgtatgctttgtttctgttg

SEQ ID NO: 67750 - DNA, 120 bp, Homo sapiens
  misc_feature: 914 for SV(C|O) and mtDNA
tctaggcatagtagggaggatatgaggtgtgagcggtatactagtattcctagaagtgagatggtaaatgctagtataatatttatgtaaatgaggggcatttggtaaatatgattatca

SEQ ID NO: 67751 - DNA, 120 bp, Homo sapiens
  misc_feature: 914 for SV(C|O) and mtDNA
ctggcattttgtagacgtggtttgactatttctgtatgtctccatctattgatgagggtcttactcttttagtataaatagtaccgttaacttccaattaactagttttgacaacattca

SEQ ID NO: 67752 - DNA, 120 bp, Homo sapiens
  misc_feature: 914 for SV(C|O) and mtDNA
attggaagttaacggtactatttatactaaaagagtaagaccctcatcaatagatggagacatacagaaatagtcaaaccacgtctacaaaatgccagtatcaggcggcggcttcgaagc

SEQ ID NO: 67753 - DNA, 120 bp, Homo sapiens
  misc_feature: 914 for SV(C|O) and mtDNA
aatgagcctacagatgataggatgtttcatgtggtgtatgcatcggggtagtccgagtaacgtcggggcattccggataggccgagaaagtgttgtgggaagaaagttagatttacgccg

SEQ ID NO: 67754 - DNA, 120 bp, Homo sapiens
  misc_feature: 913 for SV(C|O) and mtDNA
taattggaagttaacggtactatttatactaaaagagtaagaccctcatcaatagatggagacatacagaaatagtcaaaccacgtctacaaaatgccagtatcaggcggcggcttcgaa

SEQ ID NO: 67755 - DNA, 120 bp, Homo sapiens; identical to SEQ ID NO: 52134
  misc_feature: 913 for SV(C|O) and mtDNA

SEQ ID NO: 67756 - DNA, 120 bp, Homo sapiens
  misc_feature: 913 for SV(C|O) and mtDNA
aattggaagttaacggtactatttatactaaaagagtaagaccctcatcaatagatggagacatacagaaatagtcaaaccacgtctacaaaatgccagtatcaggcggcggcttcgaag

SEQ ID NO: 67757 - DNA, 120 bp, Homo sapiens
  misc_feature: 912 for SV(C|O) and mtDNA
ttggaagttaacggtactatttatactaaaagagtaagaccctcatcaatagatggagacatacagaaatagtcaaaccacgtctacaaaatgccagtatcaggcggcggcttcgaagcc

SEQ ID NO: 67758 - DNA, 120 bp, Homo sapiens
  misc_feature: 912 for SV(C|O) and mtDNA
gtgaagtcttagcatgtactgctcggaggttgggttctgctccgaggtcgccccaaccgaaatttttaatgcaggtttggtagtttaggacctgtgggtttgttaggtactgtttgcatt

SEQ ID NO: 67759 - DNA, 120 bp, Homo sapiens
  misc_feature: 912 for SV(C|O) and mtDNA
aaactagttaattggaagttaacggtactatttatactaaaagagtaagaccctcatcaatagatggagacatacagaaatagtcaaaccacgtctacaaaatgccagtatcaggcggcg

SEQ ID NO: 67760 - DNA, 120 bp, Homo sapiens; identical to SEQ ID NO: 51936
  misc_feature: 911 for SV(C|O) and mtDNA

SEQ ID NO: 67761 - DNA, 120 bp, Homo sapiens
  misc_feature: 911 for SV(C|O) and mtDNA
attttgcgtattggggtcattggtgttcttgtagttgaaatacaacgatggtttttcatatcattggtcgtggttgtagtccgtgcgagaataatgatgtatgctttgtttctgttgagt

SEQ ID NO: 67762 - DNA, 120 bp, Homo sapiens
  misc_feature: 910 for SV(C|O) and mtDNA
ttaattggaagttaacggtactatttatactaaaagagtaagaccctcatcaatagatggagacatacagaaatagtcaaaccacgtctacaaaatgccagtatcaggcggcggcttcga

SEQ ID NO: 67763 - DNA, 120 bp, Homo sapiens
  misc_feature: 910 for SV(C|O) and mtDNA
aacactttctcggcctatccggaatgccccgacgttactcggactaccccgatgcatacaccacatgaaacatcctatcatctgtaggctcattcatttctctaacagcagtaatattaa

SEQ ID NO: 67764 - DNA, 120 bp, Homo sapiens
  misc_feature: 910 for SV(C|O) and mtDNA
tgactggtgaagtcttagcatgtactgctcggaggttgggttctgctccgaggtcgccccaaccgaaatttttaatgcaggtttggtagtttaggacctgtgggtttgttaggtactgtt

SEQ ID NO: 67765 - DNA, 120 bp, Homo sapiens
  misc_feature: 910 for SV(C|O) and mtDNA
ctaggcatagtagggaggatatgaggtgtgagcggtatactagtattcctagaagtgagatggtaaatgctagtataatatttatgtaaatgaggggcatttggtaaatatgattatcat

SEQ ID NO: 67766 - DNA, 120 bp, Homo sapiens; identical to SEQ ID NO: 52882
  misc_feature: 909 for SV(C|O) and mtDNA

SEQ ID NO: 67767 - DNA, 120 bp, Homo sapiens
  misc_feature: 909 for SV(C|O) and mtDNA
taattttgcgtattggggtcattggtgttcttgtagttgaaatacaacgatggtttttcatatcattggtcgtggttgtagtccgtgcgagaataatgatgtatgctttgtttctgttga

SEQ ID NO: 67768 - DNA, 120 bp, Homo sapiens
  misc_feature: 909 for SV(C|O) and mtDNA
cgcctgatactggcattttgtagacgtggtttgactatttctgtatgtctccatctattgatgagggtcttactcttttagtataaatagtaccgttaacttccaattaactagttttga

SEQ ID NO: 67769 - DNA, 120 bp, Homo sapiens
  misc_feature: 909 for SV(C|O) and mtDNA
caacactttctcggcctatccggaatgccccgacgttactcggactaccccgatgcatacaccacatgaaacatcctatcatctgtaggctcattcatttctctaacagcagtaatatta

SEQ ID NO: 67770 - DNA, 120 bp, Homo sapiens
  misc_feature: 909 for SV(C|O) and mtDNA
atatttcactttacatccaaacatcactttggcttcgaagccgccgcctgatactggcattttgtagacgtggtttgactatttctgtatgtctccatctattgatgagggtcttactct

SEQ ID NO: 67771 - DNA, 120 bp, Homo sapiens
  misc_feature: 908 for SV(C|O) and mtDNA
tattactgctgttagagaaatgaatgagcctacagatgataggatgtttcatgtggtgtatgcatcggggtagtccgagtaacgtcggggcattccggataggccgagaaagtgttgtgg

SEQ ID NO: 67772 - DNA, 120 bp, Homo sapiens
  misc_feature: 908 for SV(C|O) and mtDNA
gttaattggaagttaacggtactatttatactaaaagagtaagaccctcatcaatagatggagacatacagaaatagtcaaaccacgtctacaaaatgccagtatcaggcggcggcttcg

SEQ ID NO: 67773 - DNA, 120 bp, Homo sapiens
  misc_feature: 908 for SV(C|O) and mtDNA
aattttgcgtattggggtcattggtgttcttgtagttgaaatacaacgatggtttttcatatcattggtcgtggttgtagtccgtgcgagaataatgatgtatgctttgtttctgttgag

SEQ ID NO: 67774 - DNA, 120 bp, Homo sapiens
  misc_feature: 908 for SV(C|O) and mtDNA
ccggctccagcgtctcgcaatgctatcgcgtgcacaccccccagacgaaaataccaaatgcatggagagctcccgtgagtggttaatagggtgatagacctgtgatccatcgtgatgtct

SEQ ID NO: 67775 - DNA, 120 bp, Homo sapiens; identical to SEQ ID NO: 52438
  misc_feature: 907 for SV(C|O) and mtDNA

SEQ ID NO: 67776 - DNA, 120 bp, Homo sapiens
  misc_feature: 907 for SV(C|O) and mtDNA
atgagcctacagatgataggatgtttcatgtggtgtatgcatcggggtagtccgagtaacgtcggggcattccggataggccgagaaagtgttgtgggaagaaagttagatttacgccga

SEQ ID NO: 67777 - DNA, 120 bp, Homo sapiens
  misc_feature: 907 for SV(C|O) and mtDNA
taaattataggctaaatcctatatatcttaatggcacatgcagcgcaagtaggtctacaagacgctacttcccctatcatagaagagcttatcacctttcatgatcacgccctcataatc

SEQ ID NO: 67778 - DNA, 120 bp, Homo sapiens
  misc_feature: 907 for SV(C|O) and mtDNA
ctttgactggtgaagtcttagcatgtactgctcggaggttgggttctgctccgaggtcgccccaaccgaaatttttaatgcaggtttggtagtttaggacctgtgggtttgttaggtact

SEQ ID NO: 67779 - DNA, 120 bp, Homo sapiens
  misc_feature: 907 for SV(C|O) and mtDNA
aagctcttctatgataggggaagtagcgtcttgtagacctacttgcgctgcatgtgccattaagatatataggatttagcctataatttaactttgacaaagttatgaaatggtttttct

SEQ ID NO: 67780 - DNA, 120 bp, Homo sapiens
  misc_feature: 906 for SV(C|O) and mtDNA
tgaagtcttagcatgtactgctcggaggttgggttctgctccgaggtcgccccaaccgaaatttttaatgcaggtttggtagtttaggacctgtgggtttgttaggtactgtttgcatta

SEQ ID NO: 67781 - DNA, 120 bp, Homo sapiens
  misc_feature: 906 for SV(C|O) and mtDNA
tatttcactttacatccaaacatcactttggcttcgaagccgccgcctgatactggcattttgtagacgtggtttgactatttctgtatgtctccatctattgatgagggtcttactctt

SEQ ID NO: 67782 - DNA, 120 bp, Homo sapiens
  misc_feature: 906 for SV(C|O) and mtDNA
taagctcttctatgataggggaagtagcgtcttgtagacctacttgcgctgcatgtgccattaagatatataggatttagcctataatttaactttgacaaagttatgaaatggtttttc

SEQ ID NO: 67783 - DNA, 120 bp, Homo sapiens
  misc_feature: 906 for SV(C|O) and mtDNA
gctttgactggtgaagtcttagcatgtactgctcggaggttgggttctgctccgaggtcgccccaaccgaaatttttaatgcaggtttggtagtttaggacctgtgggtttgttaggtac

SEQ ID NO: 67784 - DNA, 120 bp, Homo sapiens
  misc_feature: 906 for SV(C|O) and mtDNA
ctggtgaagtcttagcatgtactgctcggaggttgggttctgctccgaggtcgccccaaccgaaatttttaatgcaggtttggtagtttaggacctgtgggtttgttaggtactgtttgc

SEQ ID NO: 67785 - DNA, 120 bp, Homo sapiens; identical to SEQ ID NO: 52440
  misc_feature: 905 for SV(C|O) and mtDNA

SEQ ID NO: 67786 - DNA, 120 bp, Homo sapiens
  misc_feature: 905 for SV(C|O) and mtDNA
tgagcctacagatgataggatgtttcatgtggtgtatgcatcggggtagtccgagtaacgtcggggcattccggataggccgagaaagtgttgtgggaagaaagttagatttacgccgat

SEQ ID NO: 67787 - DNA, 120 bp, Homo sapiens
  misc_feature: 905 for SV(C|O) and mtDNA
atccaaacatcactttggcttcgaagccgccgcctgatactggcattttgtagacgtggtttgactatttctgtatgtctccatctattgatgagggtcttactcttttagtataaatag

SEQ ID NO: 67788 - DNA, 120 bp, Homo sapiens
  misc_feature: 905 for SV(C|O) and mtDNA
aatattactgctgttagagaaatgaatgagcctacagatgataggatgtttcatgtggtgtatgcatcggggtagtccgagtaacgtcggggcattccggataggccgagaaagtgttgt

SEQ ID NO: 67789 - DNA, 120 bp, Homo sapiens
  misc_feature: 904 for SV(C|O) and mtDNA
cgctttgactggtgaagtcttagcatgtactgctcggaggttgggttctgctccgaggtcgccccaaccgaaatttttaatgcaggtttggtagtttaggacctgtgggtttgttaggta

SEQ ID NO: 67790 - DNA, 120 bp, Homo sapiens
  misc_feature: 904 for SV(C|O) and mtDNA
taataacacacccgaccacaccgctaacaatcaatactaaacccccataaataggagaaggcttagaagaaaaccccacaaaccccattactaaacccacactcaacagaaacaaagcat

SEQ ID NO: 67791 - DNA, 120 bp, Homo sapiens
  misc_feature: 904 for SV(C|O) and mtDNA
gggtttagtaatggggtttgtggggttttcttctaagccttctcctatttatgggggtttagtattgattgttagcggtgtggtcgggtgtgttattattctgaattttgggggaggtta

SEQ ID NO: 67792 - DNA, 120 bp, Homo sapiens
  misc_feature: 904 for SV(C|O) and mtDNA
ctgccagccaccatgaatattgtacggtaccataaatacttgaccacctgtagtacataaaaacccaatccacatcaaaaccccctccccatgcttacaagcaagtacagcaatcaaccc

SEQ ID NO: 67793 - DNA, 120 bp, Homo sapiens
  misc_feature: 904 for SV(C|O) and mtDNA
aactagttaattggaagttaacggtactatttatactaaaagagtaagaccctcatcaatagatggagacatacagaaatagtcaaaccacgtctacaaaatgccagtatcaggcggcgg

SEQ ID NO: 67794 - DNA, 120 bp, Homo sapiens
  misc_feature: 903 for SV(C|O) and mtDNA
gaagttaacggtactatttatactaaaagagtaagaccctcatcaatagatggagacatacagaaatagtcaaaccacgtctacaaaatgccagtatcaggcggcggcttcgaagccaaa

SEQ ID NO: 67795 - DNA, 120 bp, Homo sapiens
  misc_feature: 903 for SV(C|O) and mtDNA
ttaaattataggctaaatcctatatatcttaatggcacatgcagcgcaagtaggtctacaagacgctacttcccctatcatagaagagcttatcacctttcatgatcacgccctcataat

SEQ ID NO: 67796 - DNA, 120 bp, Homo sapiens
  misc_feature: 903 for SV(C|O) and mtDNA
tccaaacatcactttggcttcgaagccgccgcctgatactggcattttgtagacgtggtttgactatttctgtatgtctccatctattgatgagggtcttactcttttagtataaatagt

SEQ ID NO: 67797 - DNA, 120 bp, Homo sapiens
  misc_feature: 903 for SV(C|O) and mtDNA
ggtttagtaatggggtttgtggggttttcttctaagccttctcctatttatgggggtttagtattgattgttagcggtgtggtcgggtgtgttattattctgaattttgggggaggttat

SEQ ID NO: 67798 - DNA, 120 bp, Homo sapiens
  misc_feature: 903 for SV(C|O) and mtDNA
ggtgaagtcttagcatgtactgctcggaggttgggttctgctccgaggtcgccccaaccgaaatttttaatgcaggtttggtagtttaggacctgtgggtttgttaggtactgtttgcat

SEQ ID NO: 67799 - DNA, 120 bp, Homo sapiens
  misc_feature: 903 for SV(C|O) and mtDNA
gctatcgcgtgcacaccccccagacgaaaataccaaatgcatggagagctcccgtgagtggttaatagggtgatagacctgtgatccatcgtgatgtcttatttaaggggaacgtgtggg

SEQ ID NO: 67800 - DNA, 120 bp, Homo sapiens; identical to SEQ ID NO: 51960
  misc_feature: 903 for SV(C|O) and mtDNA

SEQ ID NO: 67801 - DNA, 120 bp, Homo sapiens
  misc_feature: 902 for SV(C|O) and mtDNA
gcattttgtagacgtggtttgactatttctgtatgtctccatctattgatgagggtcttactcttttagtataaatagtaccgttaacttccaattaactagttttgacaacattcaaaa

SEQ ID NO: 67802 - DNA, 120 bp, Homo sapiens
  misc_feature: 902 for SV(C|O) and mtDNA
ttgactggtgaagtcttagcatgtactgctcggaggttgggttctgctccgaggtcgccccaaccgaaatttttaatgcaggtttggtagtttaggacctgtgggtttgttaggtactgt

SEQ ID NO: 67803 - DNA, 120 bp, Homo sapiens
  misc_feature: 902 for SV(C|O) and mtDNA
tcgctttgactggtgaagtcttagcatgtactgctcggaggttgggttctgctccgaggtcgccccaaccgaaatttttaatgcaggtttggtagtttaggacctgtgggtttgttaggt

SEQ ID NO: 67804 - DNA, 120 bp, Homo sapiens
  misc_feature: 902 for SV(C|O) and mtDNA
aatatttcactttacatccaaacatcactttggcttcgaagccgccgcctgatactggcattttgtagacgtggtttgactatttctgtatgtctccatctattgatgagggtcttactc

SEQ ID NO: 67805 - DNA, 120 bp, Homo sapiens
  misc_feature: 902 for SV(C|O) and mtDNA
atattactgctgttagagaaatgaatgagcctacagatgataggatgtttcatgtggtgtatgcatcggggtagtccgagtaacgtcggggcattccggataggccgagaaagtgttgtg

SEQ ID NO: 67806 - DNA, 120 bp, Homo sapiens
  misc_feature: 901 for SV(C|O) and mtDNA
tggaagttaacggtactatttatactaaaagagtaagaccctcatcaatagatggagacatacagaaatagtcaaaccacgtctacaaaatgccagtatcaggcggcggcttcgaagcca

SEQ ID NO: 67807 - DNA, 120 bp, Homo sapiens
  misc_feature: 901 for SV(C|O) and mtDNA
tccggctccagcgtctcgcaatgctatcgcgtgcacaccccccagacgaaaataccaaatgcatggagagctcccgtgagtggttaatagggtgatagacctgtgatccatcgtgatgtc

SEQ ID NO: 67808 - DNA, 120 bp, Homo sapiens
  misc_feature: 901 for SV(C|O) and mtDNA
tataggctaaatcctatatatcttaatggcacatgcagcgcaagtaggtctacaagacgctacttcccctatcatagaagagcttatcacctttcatgatcacgccctcataatcatttt

SEQ ID NO: 67809 - DNA, 120 bp, Homo sapiens
  misc_feature: 901 for SV(C|O) and mtDNA
taattttattagggggttaattttgcgtattggggtcattggtgttcttgtagttgaaatacaacgatggtttttcatatcattggtcgtggttgtagtccgtgcgagaataatgatgta

SEQ ID NO: 67810 - DNA, 120 bp, Homo sapiens
  misc_feature: 901 for SV(C|O) and mtDNA
aaaactagttaattggaagttaacggtactatttatactaaaagagtaagaccctcatcaatagatggagacatacagaaatagtcaaaccacgtctacaaaatgccagtatcaggcggc

SEQ ID NO: 67811 - DNA, 120 bp, Homo sapiens
  misc_feature: 900 for SV(C|O) and mtDNA
ttcactttacatccaaacatcactttggcttcgaagccgccgcctgatactggcattttgtagacgtggtttgactatttctgtatgtctccatctattgatgagggtcttactctttta

SEQ ID NO: 67812 - DNA, 120 bp, Homo sapiens
  misc_feature: 899 for SV(C|O) and mtDNA
tttcactttacatccaaacatcactttggcttcgaagccgccgcctgatactggcattttgtagacgtggtttgactatttctgtatgtctccatctattgatgagggtcttactctttt

SEQ ID NO: 67813 - DNA, 120 bp, Homo sapiens
  misc_feature: 899 for SV(C|O) and mtDNA
aggcatagtagggaggatatgaggtgtgagcggtatactagtattcctagaagtgagatggtaaatgctagtataatatttatgtaaatgaggggcatttggtaaatatgattatcataa

SEQ ID NO: 67814 - DNA, 120 bp, Homo sapiens
  misc_feature: 899 for SV(C|O) and mtDNA
tggtgaagtcttagcatgtactgctcggaggttgggttctgctccgaggtcgccccaaccgaaatttttaatgcaggtttggtagtttaggacctgtgggtttgttaggtactgtttgca

SEQ ID NO: 67815 - DNA, 120 bp, Homo sapiens
  misc_feature: 899 for SV(C|O) and mtDNA
catccaaacatcactttggcttcgaagccgccgcctgatactggcattttgtagacgtggtttgactatttctgtatgtctccatctattgatgagggtcttactcttttagtataaata

SEQ ID NO: 67816 - DNA, 120 bp, Homo sapiens
  misc_feature: 899 for SV(C|O) and mtDNA
taggcatagtagggaggatatgaggtgtgagcggtatactagtattcctagaagtgagatggtaaatgctagtataatatttatgtaaatgaggggcatttggtaaatatgattatcata

SEQ ID NO: 67817 - DNA, 120 bp, Homo sapiens
  misc_feature: 899 for SV(C|O) and mtDNA
ccaaacatcactttggcttcgaagccgccgcctgatactggcattttgtagacgtggtttgactatttctgtatgtctccatctattgatgagggtcttactcttttagtataaatagta

SEQ ID NO: 67818 - DNA, 120 bp, Homo sapiens; identical to SEQ ID NO: 53089
  misc_feature: 899 for SV(C|O) and mtDNA

SEQ ID NO: 67819 - DNA, 120 bp, Homo sapiens
  misc_feature: 899 for SV(C|O) and mtDNA
ggcatagtagggaggatatgaggtgtgagcggtatactagtattcctagaagtgagatggtaaatgctagtataatatttatgtaaatgaggggcatttggtaaatatgattatcataat

SEQ ID NO: 67820 - DNA, 120 bp, Homo sapiens
  misc_feature: 899 for SV(C|O) and mtDNA
atttcactttacatccaaacatcactttggcttcgaagccgccgcctgatactggcattttgtagacgtggtttgactatttctgtatgtctccatctattgatgagggtcttactcttt

SEQ ID NO: 67821 - DNA, 120 bp, Homo sapiens
  misc_feature: 898 for SV(C|O) and mtDNA
ggaaggaatcgaaccccccaaagctggtttcaagccaaccccatggcctccatgactttttcaaaaaggtattagaaaaaccatttcataactttgtcaaagttaaattataggctaaat

SEQ ID NO: 67822 - DNA, 120 bp, Homo sapiens
  misc_feature: 898 for SV(C|O) and mtDNA
ctttctcggcctatccggaatgccccgacgttactcggactaccccgatgcatacaccacatgaaacatcctatcatctgtaggctcattcatttctctaacagcagtaatattaataat

SEQ ID NO: 67823 - DNA, 120 bp, Homo sapiens
  misc_feature: 898 for SV(C|O) and mtDNA
acactttctcggcctatccggaatgccccgacgttactcggactaccccgatgcatacaccacatgaaacatcctatcatctgtaggctcattcatttctctaacagcagtaatattaat

SEQ ID NO: 67824 - DNA, 120 bp, Homo sapiens; identical to SEQ ID NO: 52063
  misc_feature: 898 for SV(C|O) and mtDNA

SEQ ID NO: 67825 - DNA, 120 bp, Homo sapiens
  misc_feature: 897 for SV(C|O) and mtDNA
cattttgtagacgtggtttgactatttctgtatgtctccatctattgatgagggtcttactcttttagtataaatagtaccgttaacttccaattaactagttttgacaacattcaaaaa

SEQ ID NO: 67826 - DNA, 120 bp, Homo sapiens
  misc_feature: 897 for SV(C|O) and mtDNA
tatgcagaaggtataggggttagtccttgctgtattatgcttggttataatttttcatctttcccttgcggtactatatctattgcgccaggtttcaatttctatcgcctatactttatt

SEQ ID NO: 67827 - DNA, 120 bp, Homo sapiens
  misc_feature: 897 for SV(C|O) and mtDNA
attatgcagaaggtataggggttagtccttgctgtattatgcttggttataatttttcatctttcccttgcggtactatatctattgcgccaggtttcaatttctatcgcctatacttta

SEQ ID NO: 67828 - DNA, 120 bp, Homo sapiens
  misc_feature: 897 for SV(C|O) and mtDNA
cctataatttaactttgacaaagttatgaaatggtttttctaatacctttttgaaaaagtcatggaggccatggggttggcttgaaaccagctttggggggttcgattccttcctttttt

SEQ ID NO: 67829 - DNA, 120 bp, Homo sapiens
  misc_feature: 896 for SV(C|O) and mtDNA
aggaaggaatcgaaccccccaaagctggtttcaagccaaccccatggcctccatgactttttcaaaaaggtattagaaaaaccatttcataactttgtcaaagttaaattataggctaaa

SEQ ID NO: 67830 - DNA, 120 bp, Homo sapiens
  misc_feature: 896 for SV(C|O) and mtDNA
ttctaggcatagtagggaggatatgaggtgtgagcggtatactagtattcctagaagtgagatggtaaatgctagtataatatttatgtaaatgaggggcatttggtaaatatgattatc

SEQ ID NO: 67831 - DNA, 120 bp, Homo sapiens
  misc_feature: 896 for SV(C|O) and mtDNA
actttctcggcctatccggaatgccccgacgttactcggactaccccgatgcatacaccacatgaaacatcctatcatctgtaggctcattcatttctctaacagcagtaatattaataa

SEQ ID NO: 67832 - DNA, 120 bp, Homo sapiens; identical to SEQ ID NO: 52607
  misc_feature: 896 for SV(C|O) and mtDNA

SEQ ID NO: 67833 - DNA, 120 bp, Homo sapiens; identical to SEQ ID NO: 52566
  misc_feature: 895 for SV(C|O) and mtDNA

SEQ ID NO: 67834 - DNA, 120 bp, Homo sapiens
  misc_feature: 895 for SV(C|O) and mtDNA
cactttctcggcctatccggaatgccccgacgttactcggactaccccgatgcatacaccacatgaaacatcctatcatctgtaggctcattcatttctctaacagcagtaatattaata

SEQ ID NO: 67835 - DNA, 120 bp, Homo sapiens
  misc_feature: 895 for SV(C|O) and mtDNA
aaaagcagccaccaattaagaaagcgttcaagctcaacacccactacctaaaaaatcccaaacatataactgaactcctcacacccaattggaccaatctatcaccctatagaagaacta

SEQ ID NO: 67836 - DNA, 120 bp, Homo sapiens
  misc_feature: 895 for SV(C|O) and mtDNA
agctcttctatgataggggaagtagcgtcttgtagacctacttgcgctgcatgtgccattaagatatataggatttagcctataatttaactttgacaaagttatgaaatggtttttcta

SEQ ID NO: 67837 - DNA, 120 bp, Homo sapiens
  misc_feature: 895 for SV(C|O) and mtDNA
gaaggaatcgaaccccccaaagctggtttcaagccaaccccatggcctccatgactttttcaaaaaggtattagaaaaaccatttcataactttgtcaaagttaaattataggctaaatc

SEQ ID NO: 67838 - DNA, 120 bp, Homo sapiens
  misc_feature: 895 for SV(C|O) and mtDNA
gactggtgaagtcttagcatgtactgctcggaggttgggttctgctccgaggtcgccccaaccgaaatttttaatgcaggtttggtagtttaggacctgtgggtttgttaggtactgttt

SEQ ID NO: 67839 - DNA, 120 bp, Homo sapiens
  misc_feature: 895 for SV(C|O) and mtDNA
aagttaacggtactatttatactaaaagagtaagaccctcatcaatagatggagacatacagaaatagtcaaaccacgtctacaaaatgccagtatcaggcggcggcttcgaagccaaag

SEQ ID NO: 67840 - DNA, 120 bp, Homo sapiens
  misc_feature: 895 for SV(C|O) and mtDNA
cattatgcagaaggtataggggttagtccttgctgtattatgcttggttataatttttcatctttcccttgcggtactatatctattgcgccaggtttcaatttctatcgcctatacttt

SEQ ID NO: 67841 - DNA, 120 bp, Homo sapiens
  misc_feature: 894 for SV(C|O) and mtDNA
tttgcgtattggggtcattggtgttcttgtagttgaaatacaacgatggtttttcatatcattggtcgtggttgtagtccgtgcgagaataatgatgtatgctttgtttctgttgagtgt

SEQ ID NO: 67842 - DNA, 120 bp, Homo sapiens
  misc_feature: 894 for SV(C|O) and mtDNA
ttataggctaaatcctatatatcttaatggcacatgcagcgcaagtaggtctacaagacgctacttcccctatcatagaagagcttatcacctttcatgatcacgccctcataatcattt

SEQ ID NO: 67843 - DNA, 120 bp, Homo sapiens
  misc_feature: 894 for SV(C|O) and mtDNA
aaggaaggaatcgaaccccccaaagctggtttcaagccaaccccatggcctccatgactttttcaaaaaggtattagaaaaaccatttcataactttgtcaaagttaaattataggctaa

SEQ ID NO: 67844 - DNA, 120 bp, Homo sapiens
  misc_feature: 894 for SV(C|O) and mtDNA
tatcgcgtgcacaccccccagacgaaaataccaaatgcatggagagctcccgtgagtggttaatagggtgatagacctgtgatccatcgtgatgtcttatttaaggggaacgtgtgggct

SEQ ID NO: 67845 - DNA, 120 bp, Homo sapiens; identical to SEQ ID NO: 54448
  misc_feature: 894 for SV(C|O) and mtDNA

SEQ ID NO: 67846 - DNA, 120 bp, Homo sapiens
  misc_feature: 894 for SV(C|O) and mtDNA
taaaagcagccaccaattaagaaagcgttcaagctcaacacccactacctaaaaaatcccaaacatataactgaactcctcacacccaattggaccaatctatcaccctatagaagaact

SEQ ID NO: 67847 - DNA, 120 bp, Homo sapiens
  misc_feature: 894 for SV(C|O) and mtDNA
ctatcgcgtgcacaccccccagacgaaaataccaaatgcatggagagctcccgtgagtggttaatagggtgatagacctgtgatccatcgtgatgtcttatttaaggggaacgtgtgggc

SEQ ID NO: 67848 - DNA, 120 bp, Homo sapiens
  misc_feature: 893 for SV(C|O) and mtDNA
tacatccaaacatcactttggcttcgaagccgccgcctgatactggcattttgtagacgtggtttgactatttctgtatgtctccatctattgatgagggtcttactcttttagtataaa

SEQ ID NO: 67849 - DNA, 120 bp, Homo sapiens
  misc_feature: 893 for SV(C|O) and mtDNA
ggaagttaacggtactatttatactaaaagagtaagaccctcatcaatagatggagacatacagaaatagtcaaaccacgtctacaaaatgccagtatcaggcggcggcttcgaagccaa

SEQ ID NO: 67850 - DNA, 120 bp, Homo sapiens
  misc_feature: 893 for SV(C|O) and mtDNA
aaattataggctaaatcctatatatcttaatggcacatgcagcgcaagtaggtctacaagacgctacttcccctatcatagaagagcttatcacctttcatgatcacgccctcataatca

SEQ ID NO: 67851 - DNA, 120 bp, Homo sapiens
  misc_feature: 893 for SV(C|O) and mtDNA
atcgcgtgcacaccccccagacgaaaataccaaatgcatggagagctcccgtgagtggttaatagggtgatagacctgtgatccatcgtgatgtcttatttaaggggaacgtgtgggcta

SEQ ID NO: 67852 - DNA, 120 bp, Homo sapiens
  misc_feature: 893 for SV(C|O) and mtDNA
taattcattatgcagaaggtataggggttagtccttgctgtattatgcttggttataatttttcatctttcccttgcggtactatatctattgcgccaggtttcaatttctatcgcctat

SEQ ID NO: 67853 - DNA, 120 bp, Homo sapiens
  misc_feature: 893 for SV(C|O) and mtDNA
gttaattcattatgcagaaggtataggggttagtccttgctgtattatgcttggttataatttttcatctttcccttgcggtactatatctattgcgccaggtttcaatttctatcgcct

SEQ ID NO: 67854 - DNA, 120 bp, Homo sapiens
  misc_feature: 893 for SV(C|O) and mtDNA
atttaactttgacaaagttatgaaatggtttttctaatacctttttgaaaaagtcatggaggccatggggttggcttgaaaccagctttggggggttcgattccttccttttttgtctag

SEQ ID NO: 67855 - DNA, 120 bp, Homo sapiens
  misc_feature: 893 for SV(C|O) and mtDNA
attataggctaaatcctatatatcttaatggcacatgcagcgcaagtaggtctacaagacgctacttcccctatcatagaagagcttatcacctttcatgatcacgccctcataatcatt

SEQ ID NO: 67856 - DNA, 120 bp, Homo sapiens
  misc_feature: 892 for SV(C|O) and mtDNA
ttaattttattagggggttaattttgcgtattggggtcattggtgttcttgtagttgaaatacaacgatggtttttcatatcattggtcgtggttgtagtccgtgcgagaataatgatgt

SEQ ID NO: 67857 - DNA, 120 bp, Homo sapiens
  misc_feature: 892 for SV(C|O) and mtDNA
tcattatgcagaaggtataggggttagtccttgctgtattatgcttggttataatttttcatctttcccttgcggtactatatctattgcgccaggtttcaatttctatcgcctatactt

SEQ ID NO: 67858 - DNA, 120 bp, Homo sapiens; identical to SEQ ID NO: 55488
  misc_feature: 892 for SV(C|O) and mtDNA

SEQ ID NO: 67859 - DNA, 120 bp, Homo sapiens; identical to SEQ ID NO: 53398
  misc_feature: 892 for SV(C|O) and mtDNA

SEQ ID NO: 67860 - DNA, 120 bp, Homo sapiens
  misc_feature: 892 for SV(C|O) and mtDNA
gagaagccttcgcttcgaagcgaaaagtcctaatagtagaagaaccctccataaacctggagtgactatatggatgccccccaccctaccacacattcgaagaacccgtatacataaaat

SEQ ID NO: 67861 - DNA, 120 bp, Homo sapiens
  misc_feature: 892 for SV(C|O) and mtDNA
gaatcaaagacagatactgcgacatagggtgctccggctccagcgtctcgcaatgctatcgcgtgcacaccccccagacgaaaataccaaatgcatggagagctcccgtgagtggttaat

SEQ ID NO: 67862 - DNA, 120 bp, Homo sapiens
  misc_feature: 892 for SV(C|O) and mtDNA
ataggctaaatcctatatatcttaatggcacatgcagcgcaagtaggtctacaagacgctacttcccctatcatagaagagcttatcacctttcatgatcacgccctcataatcattttc

SEQ ID NO: 67863 - DNA, 120 bp, Homo sapiens
  misc_feature: 892 for SV(C|O) and mtDNA
aattataggctaaatcctatatatcttaatggcacatgcagcgcaagtaggtctacaagacgctacttcccctatcatagaagagcttatcacctttcatgatcacgccctcataatcat

SEQ ID NO: 67864 - DNA, 120 bp, Homo sapiens
  misc_feature: 891 for SV(C|O) and mtDNA
attttgtagacgtggtttgactatttctgtatgtctccatctattgatgagggtcttactcttttagtataaatagtaccgttaacttccaattaactagttttgacaacattcaaaaaa

SEQ ID NO: 67865 - DNA, 120 bp, Homo sapiens
  misc_feature: 891 for SV(C|O) and mtDNA
gaagtcttagcatgtactgctcggaggttgggttctgctccgaggtcgccccaaccgaaatttttaatgcaggtttggtagtttaggacctgtgggtttgttaggtactgtttgcattaa

SEQ ID NO: 67866 - DNA, 120 bp, Homo sapiens
  misc_feature: 891 for SV(C|O) and mtDNA
taacggtactatttatactaaaagagtaagaccctcatcaatagatggagacatacagaaatagtcaaaccacgtctacaaaatgccagtatcaggcggcggcttcgaagccaaagtgat

SEQ ID NO: 67867 - DNA, 120 bp, Homo sapiens
  misc_feature: 891 for SV(C|O) and mtDNA
gttaacggtactatttatactaaaagagtaagaccctcatcaatagatggagacatacagaaatagtcaaaccacgtctacaaaatgccagtatcaggcggcggcttcgaagccaaagtg

SEQ ID NO: 67868 - DNA, 120 bp, Homo sapiens
  misc_feature: 891 for SV(C|O) and mtDNA
ccgcctgatactggcattttgtagacgtggtttgactatttctgtatgtctccatctattgatgagggtcttactcttttagtataaatagtaccgttaacttccaattaactagttttg

SEQ ID NO: 67869 - DNA, 120 bp, Homo sapiens
  misc_feature: 891 for SV(C|O) and mtDNA
cactttacatccaaacatcactttggcttcgaagccgccgcctgatactggcattttgtagacgtggtttgactatttctgtatgtctccatctattgatgagggtcttactcttttagt

SEQ ID NO: 67870 - DNA, 120 bp, Homo sapiens
  misc_feature: 890 for SV(C|O) and mtDNA
tttctcggcctatccggaatgccccgacgttactcggactaccccgatgcatacaccacatgaaacatcctatcatctgtaggctcattcatttctctaacagcagtaatattaataatt

SEQ ID NO: 67871 - DNA, 120 bp, Homo sapiens
  misc_feature: 890 for SV(C|O) and mtDNA
tttaactttgacaaagttatgaaatggtttttctaatacctttttgaaaaagtcatggaggccatggggttggcttgaaaccagctttggggggttcgattccttccttttttgtctaga

SEQ ID NO: 67872 - DNA, 120 bp, Homo sapiens
  misc_feature: 890 for SV(C|O) and mtDNA
atagtaggcctaaaagcagccaccaattaagaaagcgttcaagctcaacacccactacctaaaaaatcccaaacatataactgaactcctcacacccaattggaccaatctatcacccta

SEQ ID NO: 67873 - DNA, 120 bp, Homo sapiens
  misc_feature: 890 for SV(C|O) and mtDNA
aaaggaaggaatcgaaccccccaaagctggtttcaagccaaccccatggcctccatgactttttcaaaaaggtattagaaaaaccatttcataactttgtcaaagttaaattataggcta

SEQ ID NO: 67874 - DNA, 120 bp, Homo sapiens
  misc_feature: 890 for SV(C|O) and mtDNA
taatatttcactttacatccaaacatcactttggcttcgaagccgccgcctgatactggcattttgtagacgtggtttgactatttctgtatgtctccatctattgatgagggtcttact

SEQ ID NO: 67875 - DNA, 120 bp, Homo sapiens; identical to SEQ ID NO: 52062
  misc_feature: 890 for SV(C|O) and mtDNA

SEQ ID NO: 67876 - DNA, 120 bp, Homo sapiens
  misc_feature: 890 for SV(C|O) and mtDNA
actggtgaagtcttagcatgtactgctcggaggttgggttctgctccgaggtcgccccaaccgaaatttttaatgcaggtttggtagtttaggacctgtgggtttgttaggtactgtttg

SEQ ID NO: 67877 - DNA, 120 bp, Homo sapiens
  misc_feature: 890 for SV(C|O) and mtDNA
agttaacggtactatttatactaaaagagtaagaccctcatcaatagatggagacatacagaaatagtcaaaccacgtctacaaaatgccagtatcaggcggcggcttcgaagccaaagt

SEQ ID NO: 67878 - DNA, 120 bp, Homo sapiens
  misc_feature: 889 for SV(C|O) and mtDNA
tttgacaaagttatgaaatggtttttctaatacctttttgaaaaagtcatggaggccatggggttggcttgaaaccagctttggggggttcgattccttccttttttgtctagattttat

SEQ ID NO: 67879 - DNA, 120 bp, Homo sapiens
  misc_feature: 889 for SV(C|O) and mtDNA
ttaattcattatgcagaaggtataggggttagtccttgctgtattatgcttggttataatttttcatctttcccttgcggtactatatctattgcgccaggtttcaatttctatcgccta

SEQ ID NO: 67880 - DNA, 120 bp, Homo sapiens
  misc_feature: 889 for SV(C|O) and mtDNA
tgtagtcactcataggccagacttagggctaggatgatgattaataagagggatgacataactattagtggtaggttagttgtttgtagggctcatggtaggggtaaaaggagggcaatt

SEQ ID NO: 67881 - DNA, 120 bp, Homo sapiens
  misc_feature: 889 for SV(C|O) and mtDNA
aattcattatgcagaaggtataggggttagtccttgctgtattatgcttggttataatttttcatctttcccttgcggtactatatctattgcgccaggtttcaatttctatcgcctata

SEQ ID NO: 67882 - DNA, 120 bp, Homo sapiens
  misc_feature: 889 for SV(C|O) and mtDNA
gcctataatttaactttgacaaagttatgaaatggtttttctaatacctttttgaaaaagtcatggaggccatggggttggcttgaaaccagctttggggggttcgattccttccttttt

SEQ ID NO: 67883 - DNA, 120 bp, Homo sapiens
  misc_feature: 889 for SV(C|O) and mtDNA
gagcctacagatgataggatgtttcatgtggtgtatgcatcggggtagtccgagtaacgtcggggcattccggataggccgagaaagtgttgtgggaagaaagttagatttacgccgatg

SEQ ID NO: 67884 - DNA, 120 bp, Homo sapiens
  misc_feature: 889 for SV(C|O) and mtDNA
aagtcttagcatgtactgctcggaggttgggttctgctccgaggtcgccccaaccgaaatttttaatgcaggtttggtagtttaggacctgtgggtttgttaggtactgtttgcattaat

SEQ ID NO: 67885 - DNA, 120 bp, Homo sapiens
  misc_feature: 888 for SV(C|O) and mtDNA
tttgactggtgaagtcttagcatgtactgctcggaggttgggttctgctccgaggtcgccccaaccgaaatttttaatgcaggtttggtagtttaggacctgtgggtttgttaggtactg

SEQ ID NO: 67886 - DNA, 120 bp, Homo sapiens
  misc_feature: 888 for SV(C|O) and mtDNA
ttgcgtattggggtcattggtgttcttgtagttgaaatacaacgatggtttttcatatcattggtcgtggttgtagtccgtgcgagaataatgatgtatgctttgtttctgttgagtgtg

SEQ ID NO: 67887 - DNA, 120 bp, Homo sapiens
  misc_feature: 888 for SV(C|O) and mtDNA
ttcattatgcagaaggtataggggttagtccttgctgtattatgcttggttataatttttcatctttcccttgcggtactatatctattgcgccaggtttcaatttctatcgcctatact

SEQ ID NO: 67888 - DNA, 120 bp, Homo sapiens
  misc_feature: 888 for SV(C|O) and mtDNA
ttagttcttctatagggtgatagattggtccaattgggtgtgaggagttcagttatatgtttgggattttttaggtagtgggtgttgagcttgaacgctttcttaattggtggctgcttt

SEQ ID NO: 67889 - DNA, 120 bp, Homo sapiens
  misc_feature: 888 for SV(C|O) and mtDNA
aatttaactttgacaaagttatgaaatggtttttctaatacctttttgaaaaagtcatggaggccatggggttggcttgaaaccagctttggggggttcgattccttccttttttgtcta

SEQ ID NO: 67890 - DNA, 120 bp, Homo sapiens
  misc_feature: 888 for SV(C|O) and mtDNA
taacattagttcttctatagggtgatagattggtccaattgggtgtgaggagttcagttatatgtttgggattttttaggtagtgggtgttgagcttgaacgctttcttaattggtggct

SEQ ID NO: 67891 - DNA, 120 bp, Homo sapiens
  misc_feature: 888 for SV(C|O) and mtDNA
cttctaggcatagtagggaggatatgaggtgtgagcggtatactagtattcctagaagtgagatggtaaatgctagtataatatttatgtaaatgaggggcatttggtaaatatgattat

SEQ ID NO: 67892 - DNA, 120 bp, Homo sapiens
  misc_feature: 888 for SV(C|O) and mtDNA
cattagttcttctatagggtgatagattggtccaattgggtgtgaggagttcagttatatgtttgggattttttaggtagtgggtgttgagcttgaacgctttcttaattggtggctgct

SEQ ID NO: 67893 - DNA, 120 bp, Homo sapiens
  misc_feature: 888 for SV(C|O) and mtDNA
attaattttattagggggttaattttgcgtattggggtcattggtgttcttgtagttgaaatacaacgatggtttttcatatcattggtcgtggttgtagtccgtgcgagaataatgatg

SEQ ID NO: 67894 - DNA, 120 bp, Homo sapiens
  misc_feature: 887 for SV(C|O) and mtDNA
tgagaagccttcgcttcgaagcgaaaagtcctaatagtagaagaaccctccataaacctggagtgactatatggatgccccccaccctaccacacattcgaagaacccgtatacataaaa

SEQ ID NO: 67895 - DNA, 120 bp, Homo sapiens
  misc_feature: 887 for SV(C|O) and mtDNA
aataacacacccgaccacaccgctaacaatcaatactaaacccccataaataggagaaggcttagaagaaaaccccacaaaccccattactaaacccacactcaacagaaacaaagcata

SEQ ID NO: 67896 - DNA, 120 bp, Homo sapiens
  misc_feature: 887 for SV(C|O) and mtDNA
ctaacattagttcttctatagggtgatagattggtccaattgggtgtgaggagttcagttatatgtttgggattttttaggtagtgggtgttgagcttgaacgctttcttaattggtggc

SEQ ID NO: 67897 - DNA, 120 bp, Homo sapiens
  misc_feature: 887 for SV(C|O) and mtDNA
ctataatttaactttgacaaagttatgaaatggtttttctaatacctttttgaaaaagtcatggaggccatggggttggcttgaaaccagctttggggggttcgattccttccttttttg

SEQ ID NO: 67898 - DNA, 120 bp, Homo sapiens
  misc_feature: 887 for SV(C|O) and mtDNA
catcactttggcttcgaagccgccgcctgatactggcattttgtagacgtggtttgactatttctgtatgtctccatctattgatgagggtcttactcttttagtataaatagtaccgtt

SEQ ID NO: 67899 - DNA, 120 bp, Homo sapiens
  misc_feature: 887 for SV(C|O) and mtDNA
aacattagttcttctatagggtgatagattggtccaattgggtgtgaggagttcagttatatgtttgggattttttaggtagtgggtgttgagcttgaacgctttcttaattggtggctg

SEQ ID NO: 67900 - DNA, 120 bp, Homo sapiens
  misc_feature: 887 for SV(C|O) and mtDNA
atgcagaaggtataggggttagtccttgctgtattatgcttggttataatttttcatctttcccttgcggtactatatctattgcgccaggtttcaatttctatcgcctatactttattt

SEQ ID NO: 67901 - DNA, 120 bp, Homo sapiens
  misc_feature: 886 for SV(C|O) and mtDNA
ttaacggtactatttatactaaaagagtaagaccctcatcaatagatggagacatacagaaatagtcaaaccacgtctacaaaatgccagtatcaggcggcggcttcgaagccaaagtga

SEQ ID NO: 67902 - DNA, 120 bp, Homo sapiens; identical to SEQ ID NO: 52852
  misc_feature: 886 for SV(C|O) and mtDNA

SEQ ID NO: 67903 - DNA, 120 bp, Homo sapiens
  misc_feature: 886 for SV(C|O) and mtDNA
tcactttacatccaaacatcactttggcttcgaagccgccgcctgatactggcattttgtagacgtggtttgactatttctgtatgtctccatctattgatgagggtcttactcttttag

SEQ ID NO: 67904 - DNA, 120 bp, Homo sapiens
  misc_feature: 886 for SV(C|O) and mtDNA
ctaatatttcactttacatccaaacatcactttggcttcgaagccgccgcctgatactggcattttgtagacgtggtttgactatttctgtatgtctccatctattgatgagggtcttac

SEQ ID NO: 67905 - DNA, 120 bp, Homo sapiens
  misc_feature: 886 for SV(C|O) and mtDNA
gcatagtagggaggatatgaggtgtgagcggtatactagtattcctagaagtgagatggtaaatgctagtataatatttatgtaaatgaggggcatttggtaaatatgattatcataatt

SEQ ID NO: 67906 - DNA, 120 bp, Homo sapiens
  misc_feature: 886 for SV(C|O) and mtDNA
attagttcttctatagggtgatagattggtccaattgggtgtgaggagttcagttatatgtttgggattttttaggtagtgggtgttgagcttgaacgctttcttaattggtggctgctt

SEQ ID NO: 67907 - DNA, 120 bp, Homo sapiens
  misc_feature: 886 for SV(C|O) and mtDNA
agcctataatttaactttgacaaagttatgaaatggtttttctaatacctttttgaaaaagtcatggaggccatggggttggcttgaaaccagctttggggggttcgattccttcctttt

SEQ ID NO: 67908 - DNA, 120 bp, Homo sapiens
  misc_feature: 885 for SV(C|O) and mtDNA
tgcagaaggtataggggttagtccttgctgtattatgcttggttataatttttcatctttcccttgcggtactatatctattgcgccaggtttcaatttctatcgcctatactttatttg

SEQ ID NO: 67909 - DNA, 120 bp, Homo sapiens
  misc_feature: 885 for SV(C|O) and mtDNA
tcctttttgtagtcactcataggccagacttagggctaggatgatgattaataagagggatgacataactattagtggtaggttagttgtttgtagggctcatggtaggggtaaaaggag

SEQ ID NO: 67910 - DNA, 120 bp, Homo sapiens
  misc_feature: 885 for SV(C|O) and mtDNA
tagtaggcctaaaagcagccaccaattaagaaagcgttcaagctcaacacccactacctaaaaaatcccaaacatataactgaactcctcacacccaattggaccaatctatcaccctat

SEQ ID NO: 67911 - DNA, 120 bp, Homo sapiens
  misc_feature: 885 for SV(C|O) and mtDNA
aaacatcactttggcttcgaagccgccgcctgatactggcattttgtagacgtggtttgactatttctgtatgtctccatctattgatgagggtcttactcttttagtataaatagtacc

SEQ ID NO: 67912 - DNA, 120 bp, Homo sapiens
  misc_feature: 885 for SV(C|O) and mtDNA
agttaattcattatgcagaaggtataggggttagtccttgctgtattatgcttggttataatttttcatctttcccttgcggtactatatctattgcgccaggtttcaatttctatcgcc

SEQ ID NO: 67913 - DNA, 120 bp, Homo sapiens
  misc_feature: 885 for SV(C|O) and mtDNA
caactaatatttcactttacatccaaacatcactttggcttcgaagccgccgcctgatactggcattttgtagacgtggtttgactatttctgtatgtctccatctattgatgagggtct

SEQ ID NO: 67914 - DNA, 120 bp, Homo sapiens
  misc_feature: 884 for SV(C|O) and mtDNA
gcctacagatgataggatgtttcatgtggtgtatgcatcggggtagtccgagtaacgtcggggcattccggataggccgagaaagtgttgtgggaagaaagttagatttacgccgatgaa

SEQ ID NO: 67915 - DNA, 120 bp, Homo sapiens
  misc_feature: 884 for SV(C|O) and mtDNA
agtaggcctaaaagcagccaccaattaagaaagcgttcaagctcaacacccactacctaaaaaatcccaaacatataactgaactcctcacacccaattggaccaatctatcaccctata

SEQ ID NO: 67916 - DNA, 120 bp, Homo sapiens; identical to SEQ ID NO: 51980
  misc_feature: 884 for SV(C|O) and mtDNA

SEQ ID NO: 67917 - DNA, 120 bp, Homo sapiens
  misc_feature: 884 for SV(C|O) and mtDNA
tacaggactaggaagcagataaggaaaatgattatgagggcgtgatcatgaaaggtgataagctcttctatgataggggaagtagcgtcttgtagacctacttgcgctgcatgtgccatt

SEQ ID NO: 67918 - DNA, 120 bp, Homo sapiens
  misc_feature: 884 for SV(C|O) and mtDNA
gtagtcactcataggccagacttagggctaggatgatgattaataagagggatgacataactattagtggtaggttagttgtttgtagggctcatggtaggggtaaaaggagggcaattt

SEQ ID NO: 67919 - DNA, 120 bp, Homo sapiens
  misc_feature: 884 for SV(C|O) and mtDNA
acattagttcttctatagggtgatagattggtccaattgggtgtgaggagttcagttatatgtttgggattttttaggtagtgggtgttgagcttgaacgctttcttaattggtggctgc

SEQ ID NO: 67920 - DNA, 120 bp, Homo sapiens
  misc_feature: 884 for SV(C|O) and mtDNA
gatttgagaagccttcgcttcgaagcgaaaagtcctaatagtagaagaaccctccataaacctggagtgactatatggatgccccccaccctaccacacattcgaagaacccgtatacat

SEQ ID NO: 67921 - DNA, 120 bp, Homo sapiens
  misc_feature: 884 for SV(C|O) and mtDNA
acatccaaacatcactttggcttcgaagccgccgcctgatactggcattttgtagacgtggtttgactatttctgtatgtctccatctattgatgagggtcttactcttttagtataaat

SEQ ID NO: 67922 - DNA, 120 bp, Homo sapiens
  misc_feature: 884 for SV(C|O) and mtDNA
aactaatatttcactttacatccaaacatcactttggcttcgaagccgccgcctgatactggcattttgtagacgtggtttgactatttctgtatgtctccatctattgatgagggtctt

SEQ ID NO: 67923 - DNA, 120 bp, Homo sapiens
  misc_feature: 883 for SV(C|O) and mtDNA
ttacatccaaacatcactttggcttcgaagccgccgcctgatactggcattttgtagacgtggtttgactatttctgtatgtctccatctattgatgagggtcttactcttttagtataa

SEQ ID NO: 67924 - DNA, 120 bp, Homo sapiens
  misc_feature: 883 for SV(C|O) and mtDNA
ccttctaggcatagtagggaggatatgaggtgtgagcggtatactagtattcctagaagtgagatggtaaatgctagtataatatttatgtaaatgaggggcatttggtaaatatgatta

SEQ ID NO: 67925 - DNA, 120 bp, Homo sapiens; identical to SEQ ID NO: 53880
  misc_feature: 883 for SV(C|O) and mtDNA

SEQ ID NO: 67926 - DNA, 120 bp, Homo sapiens
  misc_feature: 883 for SV(C|O) and mtDNA
cctttttgtagtcactcataggccagacttagggctaggatgatgattaataagagggatgacataactattagtggtaggttagttgtttgtagggctcatggtaggggtaaaaggagg

SEQ ID NO: 67927 - DNA, 120 bp, Homo sapiens
  misc_feature: 883 for SV(C|O) and mtDNA
cctacagatgataggatgtttcatgtggtgtatgcatcggggtagtccgagtaacgtcggggcattccggataggccgagaaagtgttgtgggaagaaagttagatttacgccgatgaat

SEQ ID NO: 67928 - DNA, 120 bp, Homo sapiens
  misc_feature: 883 for SV(C|O) and mtDNA
catagtagggaggatatgaggtgtgagcggtatactagtattcctagaagtgagatggtaaatgctagtataatatttatgtaaatgaggggcatttggtaaatatgattatcataattt

SEQ ID NO: 67929 - DNA, 120 bp, Homo sapiens
  misc_feature: 883 for SV(C|O) and mtDNA
catagtaggcctaaaagcagccaccaattaagaaagcgttcaagctcaacacccactacctaaaaaatcccaaacatataactgaactcctcacacccaattggaccaatctatcaccct

SEQ ID NO: 67930 - DNA, 120 bp, Homo sapiens
  misc_feature: 882 for SV(C|O) and mtDNA
gtagacgtggtttgactatttctgtatgtctccatctattgatgagggtcttactcttttagtataaatagtaccgttaacttccaattaactagttttgacaacattcaaaaaagagta

SEQ ID NO: 67931 - DNA, 120 bp, Homo sapiens
  misc_feature: 882 for SV(C|O) and mtDNA
atagtagggaggatatgaggtgtgagcggtatactagtattcctagaagtgagatggtaaatgctagtataatatttatgtaaatgaggggcatttggtaaatatgattatcataattta

SEQ ID NO: 67932 - DNA, 120 bp, Homo sapiens
  misc_feature: 882 for SV(C|O) and mtDNA
caaacatcactttggcttcgaagccgccgcctgatactggcattttgtagacgtggtttgactatttctgtatgtctccatctattgatgagggtcttactcttttagtataaatagtac

SEQ ID NO: 67933 - DNA, 120 bp, Homo sapiens
  misc_feature: 882 for SV(C|O) and mtDNA
aaggaatcgaaccccccaaagctggtttcaagccaaccccatggcctccatgactttttcaaaaaggtattagaaaaaccatttcataactttgtcaaagttaaattataggctaaatcc

SEQ ID NO: 67934 - DNA, 120 bp, Homo sapiens; identical to SEQ ID NO: 52930
  misc_feature: 882 for SV(C|O) and mtDNA

SEQ ID NO: 67935 - DNA, 120 bp, Homo sapiens
  misc_feature: 882 for SV(C|O) and mtDNA
aggaatcgaaccccccaaagctggtttcaagccaaccccatggcctccatgactttttcaaaaaggtattagaaaaaccatttcataactttgtcaaagttaaattataggctaaatcct

SEQ ID NO: 67936 - DNA, 120 bp, Homo sapiens; identical to SEQ ID NO: 52317
  misc_feature: 881 for SV(C|O) and mtDNA

SEQ ID NO: 67937 - DNA, 120 bp, Homo sapiens
  misc_feature: 881 for SV(C|O) and mtDNA
tgcgtattggggtcattggtgttcttgtagttgaaatacaacgatggtttttcatatcattggtcgtggttgtagtccgtgcgagaataatgatgtatgctttgtttctgttgagtgtgg

SEQ ID NO: 67938 - DNA, 120 bp, Homo sapiens
  misc_feature: 881 for SV(C|O) and mtDNA
tactaacattagttcttctatagggtgatagattggtccaattgggtgtgaggagttcagttatatgtttgggattttttaggtagtgggtgttgagcttgaacgctttcttaattggtg

SEQ ID NO: 67939 - DNA, 120 bp, Homo sapiens
  misc_feature: 881 for SV(C|O) and mtDNA
attcattatgcagaaggtataggggttagtccttgctgtattatgcttggttataatttttcatctttcccttgcggtactatatctattgcgccaggtttcaatttctatcgcctatac

SEQ ID NO: 67940 - DNA, 120 bp, Homo sapiens
  misc_feature: 881 for SV(C|O) and mtDNA
ctccggctccagcgtctcgcaatgctatcgcgtgcacaccccccagacgaaaataccaaatgcatggagagctcccgtgagtggttaatagggtgatagacctgtgatccatcgtgatgt

SEQ ID NO: 67941 - DNA, 120 bp, Homo sapiens
  misc_feature: 881 for SV(C|O) and mtDNA
aatgcatgggctgtgacgataacgttgtagatgtggtcgttacctagaaggttgcctggctggcccagctcggctcgaataaggaggcttagagctgtgcctaggactccagctcatgcg

SEQ ID NO: 67942 - DNA, 120 bp, Homo sapiens
  misc_feature: 881 for SV(C|O) and mtDNA
actaacattagttcttctatagggtgatagattggtccaattgggtgtgaggagttcagttatatgtttgggattttttaggtagtgggtgttgagcttgaacgctttcttaattggtgg

SEQ ID NO: 67943 - DNA, 120 bp, Homo sapiens
  misc_feature: 881 for SV(C|O) and mtDNA
atacaggactaggaagcagataaggaaaatgattatgagggcgtgatcatgaaaggtgataagctcttctatgataggggaagtagcgtcttgtagacctacttgcgctgcatgtgccat

SEQ ID NO: 67944 - DNA, 120 bp, Homo sapiens; identical to SEQ ID NO: 53388
  misc_feature: 881 for SV(C|O) and mtDNA

SEQ ID NO: 67945 - DNA, 120 bp, Homo sapiens
  misc_feature: 880 for SV(C|O) and mtDNA
tttacatccaaacatcactttggcttcgaagccgccgcctgatactggcattttgtagacgtggtttgactatttctgtatgtctccatctattgatgagggtcttactcttttagtata

SEQ ID NO: 67946 - DNA, 120 bp, Homo sapiens
  misc_feature: 880 for SV(C|O) and mtDNA
tttaactccaccattagcacccaaagctaagattctaatttaaactattctctgttctttcatggggaagcagatttgggtgccacccaagtattgactcacccatcaacaaccgctatg

SEQ ID NO: 67947 - DNA, 120 bp, Homo sapiens
  misc_feature: 880 for SV(C|O) and mtDNA
atttgagaagccttcgcttcgaagcgaaaagtcctaatagtagaagaaccctccataaacctggagtgactatatggatgccccccaccctaccacacattcgaagaacccgtatacata

SEQ ID NO: 67948 - DNA, 120 bp, Homo sapiens
  misc_feature: 880 for SV(C|O) and mtDNA
tataatttaactttgacaaagttatgaaatggtttttctaatacctttttgaaaaagtcatggaggccatggggttggcttgaaaccagctttggggggttcgattccttccttttttgt

SEQ ID NO: 67949 - DNA, 120 bp, Homo sapiens
  misc_feature: 880 for SV(C|O) and mtDNA
gtttagtaatggggtttgtggggttttcttctaagccttctcctatttatgggggtttagtattgattgttagcggtgtggtcgggtgtgttattattctgaattttgggggaggttata

SEQ ID NO: 67950 - DNA, 120 bp, Homo sapiens
  misc_feature: 880 for SV(C|O) and mtDNA
taatcctttttgtagtcactcataggccagacttagggctaggatgatgattaataagagggatgacataactattagtggtaggttagttgtttgtagggctcatggtaggggtaaaag

SEQ ID NO: 67951 - DNA, 120 bp, Homo sapiens
  misc_feature: 880 for SV(C|O) and mtDNA
taactttgacaaagttatgaaatggtttttctaatacctttttgaaaaagtcatggaggccatggggttggcttgaaaccagctttggggggttcgattccttccttttttgtctagatt

SEQ ID NO: 67952 - DNA, 120 bp, Homo sapiens
  misc_feature: 880 for SV(C|O) and mtDNA
aacatcactttggcttcgaagccgccgcctgatactggcattttgtagacgtggtttgactatttctgtatgtctccatctattgatgagggtcttactcttttagtataaatagtaccg

SEQ ID NO: 67953 - DNA, 120 bp, Homo sapiens; identical to SEQ ID NO: 52540
  misc_feature: 880 for SV(C|O) and mtDNA

SEQ ID NO: 67954 - DNA, 120 bp, Homo sapiens
  misc_feature: 879 for SV(C|O) and mtDNA
tttttgtagtcactcataggccagacttagggctaggatgatgattaataagagggatgacataactattagtggtaggttagttgtttgtagggctcatggtaggggtaaaaggagggc

SEQ ID NO: 67955 - DNA, 120 bp, Homo sapiens
  misc_feature: 879 for SV(C|O) and mtDNA
agcctacagatgataggatgtttcatgtggtgtatgcatcggggtagtccgagtaacgtcggggcattccggataggccgagaaagtgttgtgggaagaaagttagatttacgccgatga

SEQ ID NO: 67956 - DNA, 120 bp, Homo sapiens
  misc_feature: 879 for SV(C|O) and mtDNA
ctacagatgataggatgtttcatgtggtgtatgcatcggggtagtccgagtaacgtcggggcattccggataggccgagaaagtgttgtgggaagaaagttagatttacgccgatgaata

SEQ ID NO: 67957 - DNA, 120 bp, Homo sapiens
  misc_feature: 879 for SV(C|O) and mtDNA
taatttaactttgacaaagttatgaaatggtttttctaatacctttttgaaaaagtcatggaggccatggggttggcttgaaaccagctttggggggttcgattccttccttttttgtct

SEQ ID NO: 67958 - DNA, 120 bp, Homo sapiens
  misc_feature: 879 for SV(C|O) and mtDNA
ctttgacaaagttatgaaatggtttttctaatacctttttgaaaaagtcatggaggccatggggttggcttgaaaccagctttggggggttcgattccttccttttttgtctagatttta

SEQ ID NO: 67959 - DNA, 120 bp, Homo sapiens; identical to SEQ ID NO: 52410
  misc_feature: 879 for SV(C|O) and mtDNA

SEQ ID NO: 67960 - DNA, 120 bp, Homo sapiens
  misc_feature: 879 for SV(C|O) and mtDNA
aaggaaaatgattatgagggcgtgatcatgaaaggtgataagctcttctatgataggggaagtagcgtcttgtagacctacttgcgctgcatgtgccattaagatatataggatttagcc

SEQ ID NO: 67961 - DNA, 120 bp, Homo sapiens; identical to SEQ ID NO: 53771
  misc_feature: 879 for SV(C|O) and mtDNA

SEQ ID NO: 67962 - DNA, 120 bp, Homo sapiens
  misc_feature: 878 for SV(C|O) and mtDNA
ttgagaagccttcgcttcgaagcgaaaagtcctaatagtagaagaaccctccataaacctggagtgactatatggatgccccccaccctaccacacattcgaagaacccgtatacataaa

SEQ ID NO: 67963 - DNA, 120 bp, Homo sapiens
  misc_feature: 878 for SV(C|O) and mtDNA
gctcttctatgataggggaagtagcgtcttgtagacctacttgcgctgcatgtgccattaagatatataggatttagcctataatttaactttgacaaagttatgaaatggtttttctaa

SEQ ID NO: 67964 - DNA, 120 bp, Homo sapiens
  misc_feature: 878 for SV(C|O) and mtDNA
tagacgtggtttgactatttctgtatgtctccatctattgatgagggtcttactcttttagtataaatagtaccgttaacttccaattaactagttttgacaacattcaaaaaagagtaa

SEQ ID NO: 67965 - DNA, 120 bp, Homo sapiens
  misc_feature: 878 for SV(C|O) and mtDNA
tagtagggaggatatgaggtgtgagcggtatactagtattcctagaagtgagatggtaaatgctagtataatatttatgtaaatgaggggcatttggtaaatatgattatcataatttaa

SEQ ID NO: 67966 - DNA, 120 bp, Homo sapiens
  misc_feature: 878 for SV(C|O) and mtDNA
atcctttttgtagtcactcataggccagacttagggctaggatgatgattaataagagggatgacataactattagtggtaggttagttgtttgtagggctcatggtaggggtaaaagga

SEQ ID NO: 67967 - DNA, 120 bp, Homo sapiens
  misc_feature: 878 for SV(C|O) and mtDNA
actttacatccaaacatcactttggcttcgaagccgccgcctgatactggcattttgtagacgtggtttgactatttctgtatgtctccatctattgatgagggtcttactcttttagta

SEQ ID NO: 67968 - DNA, 120 bp, Homo sapiens; identical to SEQ ID NO: 53545
  misc_feature: 878 for SV(C|O) and mtDNA

SEQ ID NO: 67969 - DNA, 120 bp, Homo sapiens
  misc_feature: 878 for SV(C|O) and mtDNA
actaatatttcactttacatccaaacatcactttggcttcgaagccgccgcctgatactggcattttgtagacgtggtttgactatttctgtatgtctccatctattgatgagggtctta

SEQ ID NO: 67970 - DNA, 120 bp, Homo sapiens; identical to SEQ ID NO: 54350
  misc_feature: 878 for SV(C|O) and mtDNA

SEQ ID NO: 67971 - DNA, 120 bp, Homo sapiens
  misc_feature: 878 for SV(C|O) and mtDNA
agaagccttcgcttcgaagcgaaaagtcctaatagtagaagaaccctccataaacctggagtgactatatggatgccccccaccctaccacacattcgaagaacccgtatacataaaatc

SEQ ID NO: 67972 - DNA, 120 bp, Homo sapiens
  misc_feature: 878 for SV(C|O) and mtDNA
aattaagaaagcgttcaagctcaacacccactacctaaaaaatcccaaacatataactgaactcctcacacccaattggaccaatctatcaccctatagaagaactaatgttagtataag

SEQ ID NO: 67973 - DNA, 120 bp, Homo sapiens; identical to SEQ ID NO: 54489
  misc_feature: 878 for SV(C|O) and mtDNA

SEQ ID NO: 67974 - DNA, 120 bp, Homo sapiens
  misc_feature: 878 for SV(C|O) and mtDNA
acatcactttggcttcgaagccgccgcctgatactggcattttgtagacgtggtttgactatttctgtatgtctccatctattgatgagggtcttactcttttagtataaatagtaccgt

SEQ ID NO: 67975 - DNA, 120 bp, Homo sapiens
  misc_feature: 877 for SV(C|O) and mtDNA
ttttgtagacgtggtttgactatttctgtatgtctccatctattgatgagggtcttactcttttagtataaatagtaccgttaacttccaattaactagttttgacaacattcaaaaaag

SEQ ID NO: 67976 - DNA, 120 bp, Homo sapiens
  misc_feature: 877 for SV(C|O) and mtDNA
tttgtagacgtggtttgactatttctgtatgtctccatctattgatgagggtcttactcttttagtataaatagtaccgttaacttccaattaactagttttgacaacattcaaaaaaga

SEQ ID NO: 67977 - DNA, 120 bp, Homo sapiens
  misc_feature: 877 for SV(C|O) and mtDNA
ttaactttgacaaagttatgaaatggtttttctaatacctttttgaaaaagtcatggaggccatggggttggcttgaaaccagctttggggggttcgattccttccttttttgtctagat

SEQ ID NO: 67978 - DNA, 120 bp, Homo sapiens; identical to SEQ ID NO: 53804
  misc_feature: 877 for SV(C|O) and mtDNA

SEQ ID NO: 67979 - DNA, 120 bp, Homo sapiens; identical to SEQ ID NO: 52022
  misc_feature: 877 for SV(C|O) and mtDNA

SEQ ID NO: 67980 - DNA, 120 bp, Homo sapiens; identical to SEQ ID NO: 53745
  misc_feature: 877 for SV(C|O) and mtDNA

SEQ ID NO: 67981 - DNA, 120 bp, Homo sapiens
  misc_feature: 877 for SV(C|O) and mtDNA
ggaatcgaaccccccaaagctggtttcaagccaaccccatggcctccatgactttttcaaaaaggtattagaaaaaccatttcataactttgtcaaagttaaattataggctaaatccta

SEQ ID NO: 67982 - DNA, 120 bp, Homo sapiens
  misc_feature: 877 for SV(C|O) and mtDNA
ctaaaagcagccaccaattaagaaagcgttcaagctcaacacccactacctaaaaaatcccaaacatataactgaactcctcacacccaattggaccaatctatcaccctatagaagaac

SEQ ID NO: 67983 - DNA, 120 bp, Homo sapiens
  misc_feature: 877 for SV(C|O) and mtDNA
aactttgacaaagttatgaaatggtttttctaatacctttttgaaaaagtcatggaggccatggggttggcttgaaaccagctttggggggttcgattccttccttttttgtctagattt

SEQ ID NO: 67984 - DNA, 120 bp, Homo sapiens
  misc_feature: 876 for SV(C|O) and mtDNA
tttgagaagccttcgcttcgaagcgaaaagtcctaatagtagaagaaccctccataaacctggagtgactatatggatgccccccaccctaccacacattcgaagaacccgtatacataa

SEQ ID NO: 67985 - DNA, 120 bp, Homo sapiens
  misc_feature: 876 for SV(C|O) and mtDNA
tttagtaatggggtttgtggggttttcttctaagccttctcctatttatgggggtttagtattgattgttagcggtgtggtcgggtgtgttattattctgaattttgggggaggttatat

SEQ ID NO: 67986 - DNA, 120 bp, Homo sapiens
  misc_feature: 876 for SV(C|O) and mtDNA
ttgacaaagttatgaaatggtttttctaatacctttttgaaaaagtcatggaggccatggggttggcttgaaaccagctttggggggttcgattccttccttttttgtctagattttatg

SEQ ID NO: 67987 - DNA, 120 bp, Homo sapiens
  misc_feature: 876 for SV(C|O) and mtDNA
ttatgcagaaggtataggggttagtccttgctgtattatgcttggttataatttttcatctttcccttgcggtactatatctattgcgccaggtttcaatttctatcgcctatactttat

SEQ ID NO: 67988 - DNA, 120 bp, Homo sapiens
  misc_feature: 876 for SV(C|O) and mtDNA
caattaagaaagcgttcaagctcaacacccactacctaaaaaatcccaaacatataactgaactcctcacacccaattggaccaatctatcaccctatagaagaactaatgttagtataa

SEQ ID NO: 67989 - DNA, 120 bp, Homo sapiens
  misc_feature: 876 for SV(C|O) and mtDNA
ttaactccaccattagcacccaaagctaagattctaatttaaactattctctgttctttcatggggaagcagatttgggtgccacccaagtattgactcacccatcaacaaccgctatgt

SEQ ID NO: 67990 - DNA, 120 bp, Homo sapiens
  misc_feature: 876 for SV(C|O) and mtDNA
aagtctttaactccaccattagcacccaaagctaagattctaatttaaactattctctgttctttcatggggaagcagatttgggtgccacccaagtattgactcacccatcaacaaccg

SEQ ID NO: 67991 - DNA, 120 bp, Homo sapiens
  misc_feature: 876 for SV(C|O) and mtDNA
aatcctttttgtagtcactcataggccagacttagggctaggatgatgattaataagagggatgacataactattagtggtaggttagttgtttgtagggctcatggtaggggtaaaagg

SEQ ID NO: 67992 - DNA, 120 bp, Homo sapiens
  misc_feature: 876 for SV(C|O) and mtDNA
agatgataggatgtttcatgtggtgtatgcatcggggtagtccgagtaacgtcggggcattccggataggccgagaaagtgttgtgggaagaaagttagatttacgccgatgaatatgat

SEQ ID NO: 67993 - DNA, 120 bp, Homo sapiens
  misc_feature: 875 for SV(C|O) and mtDNA
aaagtctttaactccaccattagcacccaaagctaagattctaatttaaactattctctgttctttcatggggaagcagatttgggtgccacccaagtattgactcacccatcaacaacc

SEQ ID NO: 67994 - DNA, 120 bp, Homo sapiens
  misc_feature: 875 for SV(C|O) and mtDNA
ctttttgtagtcactcataggccagacttagggctaggatgatgattaataagagggatgacataactattagtggtaggttagttgtttgtagggctcatggtaggggtaaaaggaggg

SEQ ID NO: 67995 - DNA, 120 bp, Homo sapiens
  misc_feature: 875 for SV(C|O) and mtDNA
ctttacatccaaacatcactttggcttcgaagccgccgcctgatactggcattttgtagacgtggtttgactatttctgtatgtctccatctattgatgagggtcttactcttttagtat

SEQ ID NO: 67996 - DNA, 120 bp, Homo sapiens; identical to SEQ ID NO: 56816
  misc_feature: 875 for SV(C|O) and mtDNA

SEQ ID NO: 67997 - DNA, 120 bp, Homo sapiens
  misc_feature: 875 for SV(C|O) and mtDNA
cagaaggtataggggttagtccttgctgtattatgcttggttataatttttcatctttcccttgcggtactatatctattgcgccaggtttcaatttctatcgcctatactttatttggg

SEQ ID NO: 67998 - DNA, 120 bp, Homo sapiens; identical to SEQ ID NO: 52539
  misc_feature: 875 for SV(C|O) and mtDNA

SEQ ID NO: 67999 - DNA, 120 bp, Homo sapiens
  misc_feature: 875 for SV(C|O) and mtDNA
acccaaataaagtataggcgatagaaattgaaacctggcgcaatagatatagtaccgcaagggaaagatgaaaaattataaccaagcataatacagcaaggactaacccctataccttct

SEQ ID NO: 68000 - DNA, 120 bp, Homo sapiens
  misc_feature: 874 for SV(C|O) and mtDNA
taattaattttattagggggttaattttgcgtattggggtcattggtgttcttgtagttgaaatacaacgatggtttttcatatcattggtcgtggttgtagtccgtgcgagaataatga

SEQ ID NO: 68001 - DNA, 120 bp, Homo sapiens
  misc_feature: 874 for SV(C|O) and mtDNA
tagttaattcattatgcagaaggtataggggttagtccttgctgtattatgcttggttataatttttcatctttcccttgcggtactatatctattgcgccaggtttcaatttctatcgc

SEQ ID NO: 68002 - DNA, 120 bp, Homo sapiens
  misc_feature: 874 for SV(C|O) and mtDNA
tacagatgataggatgtttcatgtggtgtatgcatcggggtagtccgagtaacgtcggggcattccggataggccgagaaagtgttgtgggaagaaagttagatttacgccgatgaatat

SEQ ID NO: 68003 - DNA, 120 bp, Homo sapiens
  misc_feature: 874 for SV(C|O) and mtDNA
taatcactgcgcccgctcataaggggatggccatggctaggtttatagatagttgggtggttggtgtaaatgagtgaggcaggagtccgaggaggttagttgtggcaataaaaatgatta

SEQ ID NO: 68004 - DNA, 120 bp, Homo sapiens; identical to SEQ ID NO: 51821
  misc_feature: 874 for SV(C|O) and mtDNA

SEQ ID NO: 68005 - DNA, 120 bp, Homo sapiens; identical to SEQ ID NO: 52689
  misc_feature: 874 for SV(C|O) and mtDNA

SEQ ID NO: 68006 - DNA, 120 bp, Homo sapiens
  misc_feature: 874 for SV(C|O) and mtDNA
ataatttaactttgacaaagttatgaaatggtttttctaatacctttttgaaaaagtcatggaggccatggggttggcttgaaaccagctttggggggttcgattccttccttttttgtc

SEQ ID NO: 68007 - DNA, 120 bp, Homo sapiens
  misc_feature: 873 for SV(C|O) and mtDNA
ttgtagacgtggtttgactatttctgtatgtctccatctattgatgagggtcttactcttttagtataaatagtaccgttaacttccaattaactagttttgacaacattcaaaaaagag

SEQ ID NO: 68008 - DNA, 120 bp, Homo sapiens
  misc_feature: 873 for SV(C|O) and mtDNA
tgtagacgtggtttgactatttctgtatgtctccatctattgatgagggtcttactcttttagtataaatagtaccgttaacttccaattaactagttttgacaacattcaaaaaagagt

SEQ ID NO: 68009 - DNA, 120 bp, Homo sapiens; identical to SEQ ID NO: 53298
  misc_feature: 873 for SV(C|O) and mtDNA

SEQ ID NO: 68010 - DNA, 120 bp, Homo sapiens; identical to SEQ ID NO: 52407
  misc_feature: 873 for SV(C|O) and mtDNA

SEQ ID NO: 68011 - DNA, 120 bp, Homo sapiens
  misc_feature: 873 for SV(C|O) and mtDNA
tatactaacattagttcttctatagggtgatagattggtccaattgggtgtgaggagttcagttatatgtttgggattttttaggtagtgggtgttgagcttgaacgctttcttaattgg

SEQ ID NO: 68012 - DNA, 120 bp, Homo sapiens
  misc_feature: 873 for SV(C|O) and mtDNA
taactccaccattagcacccaaagctaagattctaatttaaactattctctgttctttcatggggaagcagatttgggtgccacccaagtattgactcacccatcaacaaccgctatgta

SEQ ID NO: 68013 - DNA, 120 bp, Homo sapiens; identical to SEQ ID NO: 52983
  misc_feature: 873 for SV(C|O) and mtDNA

SEQ ID NO: 68014 - DNA, 120 bp, Homo sapiens
  misc_feature: 873 for SV(C|O) and mtDNA
aattaattttattagggggttaattttgcgtattggggtcattggtgttcttgtagttgaaatacaacgatggtttttcatatcattggtcgtggttgtagtccgtgcgagaataatgat

SEQ ID NO: 68015 - DNA, 120 bp, Homo sapiens
  misc_feature: 873 for SV(C|O) and mtDNA
atactaacattagttcttctatagggtgatagattggtccaattgggtgtgaggagttcagttatatgtttgggattttttaggtagtgggtgttgagcttgaacgctttcttaattggt

SEQ ID NO: 68016 - DNA, 120 bp, Homo sapiens
  misc_feature: 873 for SV(C|O) and mtDNA
agtcactcataggccagacttagggctaggatgatgattaataagagggatgacataactattagtggtaggttagttgtttgtagggctcatggtaggggtaaaaggagggcaatttct

SEQ ID NO: 68017 - DNA, 120 bp, Homo sapiens; identical to SEQ ID NO: 53719
  misc_feature: 873 for SV(C|O) and mtDNA

SEQ ID NO: 68018 - DNA, 120 bp, Homo sapiens; identical to SEQ ID NO: 53274
  misc_feature: 872 for SV(C|O) and mtDNA

SEQ ID NO: 68019 - DNA, 120 bp, Homo sapiens
  misc_feature: 872 for SV(C|O) and mtDNA
ttcagtctaatcctttttgtagtcactcataggccagacttagggctaggatgatgattaataagagggatgacataactattagtggtaggttagttgtttgtagggctcatggtaggg

SEQ ID NO: 68020 - DNA, 120 bp, Homo sapiens
  misc_feature: 872 for SV(C|O) and mtDNA
tgatttgagaagccttcgcttcgaagcgaaaagtcctaatagtagaagaaccctccataaacctggagtgactatatggatgccccccaccctaccacacattcgaagaacccgtataca

SEQ ID NO: 68021 - DNA, 120 bp, Homo sapiens
  misc_feature: 872 for SV(C|O) and mtDNA
cagatgataggatgtttcatgtggtgtatgcatcggggtagtccgagtaacgtcggggcattccggataggccgagaaagtgttgtgggaagaaagttagatttacgccgatgaatatga

SEQ ID NO: 68022 - DNA, 120 bp, Homo sapiens; identical to SEQ ID NO: 51899
  misc_feature: 872 for SV(C|O) and mtDNA

SEQ ID NO: 68023 - DNA, 120 bp, Homo sapiens; identical to SEQ ID NO: 51790
  misc_feature: 872 for SV(C|O) and mtDNA

SEQ ID NO: 68024 - DNA, 120 bp, Homo sapiens; identical to SEQ ID NO: 55679
  misc_feature: 872 for SV(C|O) and mtDNA

SEQ ID NO: 68025 - DNA, 120 bp, Homo sapiens; identical to SEQ ID NO: 53794
  misc_feature: 872 for SV(C|O) and mtDNA

SEQ ID NO: 68026 - DNA, 120 bp, Homo sapiens
  misc_feature: 871 for SV(C|O) and mtDNA
ctaatcctttttgtagtcactcataggccagacttagggctaggatgatgattaataagagggatgacataactattagtggtaggttagttgtttgtagggctcatggtaggggtaaaa

SEQ ID NO: 68027 - DNA, 120 bp, Homo sapiens
  misc_feature: 871 for SV(C|O) and mtDNA
tttattactcttttttgaatgttgtcaaaactagttaattggaagttaacggtactatttatactaaaagagtaagaccctcatcaatagatggagacatacagaaatagtcaaaccacg

SEQ ID NO: 68028 - DNA, 120 bp, Homo sapiens
  misc_feature: 871 for SV(C|O) and mtDNA
ttgtagtcactcataggccagacttagggctaggatgatgattaataagagggatgacataactattagtggtaggttagttgtttgtagggctcatggtaggggtaaaaggagggcaat

SEQ ID NO: 68029 - DNA, 120 bp, Homo sapiens
  misc_feature: 871 for SV(C|O) and mtDNA
ttctcggcctatccggaatgccccgacgttactcggactaccccgatgcatacaccacatgaaacatcctatcatctgtaggctcattcatttctctaacagcagtaatattaataattt

SEQ ID NO: 68030 - DNA, 120 bp, Homo sapiens
  misc_feature: 871 for SV(C|O) and mtDNA
aatcactgcgcccgctcataaggggatggccatggctaggtttatagatagttgggtggttggtgtaaatgagtgaggcaggagtccgaggaggttagttgtggcaataaaaatgattaa

SEQ ID NO: 68031 - DNA, 120 bp, Homo sapiens
  misc_feature: 871 for SV(C|O) and mtDNA
catacaggactaggaagcagataaggaaaatgattatgagggcgtgatcatgaaaggtgataagctcttctatgataggggaagtagcgtcttgtagacctacttgcgctgcatgtgcca

SEQ ID NO: 68032 - DNA, 120 bp, Homo sapiens
  misc_feature: 871 for SV(C|O) and mtDNA
gttcagtctaatcctttttgtagtcactcataggccagacttagggctaggatgatgattaataagagggatgacataactattagtggtaggttagttgtttgtagggctcatggtagg

SEQ ID NO: 68033 - DNA, 120 bp, Homo sapiens
  misc_feature: 871 for SV(C|O) and mtDNA
ggttcagtctaatcctttttgtagtcactcataggccagacttagggctaggatgatgattaataagagggatgacataactattagtggtaggttagttgtttgtagggctcatggtag

SEQ ID NO: 68034 - DNA, 120 bp, Homo sapiens
  misc_feature: 871 for SV(C|O) and mtDNA
ctcttctatgataggggaagtagcgtcttgtagacctacttgcgctgcatgtgccattaagatatataggatttagcctataatttaactttgacaaagttatgaaatggtttttctaat

SEQ ID NO: 68035 - DNA, 120 bp, Homo sapiens
  misc_feature: 871 for SV(C|O) and mtDNA
ctccaccattagcacccaaagctaagattctaatttaaactattctctgttctttcatggggaagcagatttgggtgccacccaagtattgactcacccatcaacaaccgctatgtaatt

SEQ ID NO: 68036 - DNA, 120 bp, Homo sapiens
  misc_feature: 870 for SV(C|O) and mtDNA
agtattattccttctaggcatagtagggaggatatgaggtgtgagcggtatactagtattcctagaagtgagatggtaaatgctagtataatatttatgtaaatgaggggcatttggtaa

SEQ ID NO: 68037 - DNA, 120 bp, Homo sapiens; identical to SEQ ID NO: 51857
  misc_feature: 870 for SV(C|O) and mtDNA

SEQ ID NO: 68038 - DNA, 120 bp, Homo sapiens
  misc_feature: 870 for SV(C|O) and mtDNA
tagtcactcataggccagacttagggctaggatgatgattaataagagggatgacataactattagtggtaggttagttgtttgtagggctcatggtaggggtaaaaggagggcaatttc

SEQ ID NO: 68039 - DNA, 120 bp, Homo sapiens; identical to SEQ ID NO: 54393
  misc_feature: 870 for SV(C|O) and mtDNA

SEQ ID NO: 68040 - DNA, 120 bp, Homo sapiens
  misc_feature: 870 for SV(C|O) and mtDNA
actgccagccaccatgaatattgtacggtaccataaatacttgaccacctgtagtacataaaaacccaatccacatcaaaaccccctccccatgcttacaagcaagtacagcaatcaacc

SEQ ID NO: 68041 - DNA, 120 bp, Homo sapiens
  misc_feature: 870 for SV(C|O) and mtDNA
gcagaaggtataggggttagtccttgctgtattatgcttggttataatttttcatctttcccttgcggtactatatctattgcgccaggtttcaatttctatcgcctatactttatttgg

SEQ ID NO: 68042 - DNA, 120 bp, Homo sapiens
  misc_feature: 870 for SV(C|O) and mtDNA
gaagccttcgcttcgaagcgaaaagtcctaatagtagaagaaccctccataaacctggagtgactatatggatgccccccaccctaccacacattcgaagaacccgtatacataaaatct

SEQ ID NO: 68043 - DNA, 120 bp, Homo sapiens
  misc_feature: 870 for SV(C|O) and mtDNA
ccctcatcaatagatggagacatacagaaatagtcaaaccacgtctacaaaatgccagtatcaggcggcggcttcgaagccaaagtgatgtttggatgtaaagtgaaatattagttggcg

SEQ ID NO: 68044 - DNA, 120 bp, Homo sapiens; identical to SEQ ID NO: 53655
  misc_feature: 870 for SV(C|O) and mtDNA

SEQ ID NO: 68045 - DNA, 120 bp, Homo sapiens; identical to SEQ ID NO: 52562
  misc_feature: 870 for SV(C|O) and mtDNA

SEQ ID NO: 68046 - DNA, 120 bp, Homo sapiens
  misc_feature: 869 for SV(C|O) and mtDNA
acaggactaggaagcagataaggaaaatgattatgagggcgtgatcatgaaaggtgataagctcttctatgataggggaagtagcgtcttgtagacctacttgcgctgcatgtgccatta

SEQ ID NO: 68047 - DNA, 120 bp, Homo sapiens
  misc_feature: 869 for SV(C|O) and mtDNA
gtaggcctaaaagcagccaccaattaagaaagcgttcaagctcaacacccactacctaaaaaatcccaaacatataactgaactcctcacacccaattggaccaatctatcaccctatag

SEQ ID NO: 68048 - DNA, 120 bp, Homo sapiens; identical to SEQ ID NO: 56949
  misc_feature: 869 for SV(C|O) and mtDNA

SEQ ID NO: 68049 - DNA, 120 bp, Homo sapiens
  misc_feature: 869 for SV(C|O) and mtDNA
ctagttttaagagtactgcggcaagtactattgacccagcgatgggggcttcgacatgggctttagggagtcataagtggagtccgtaaagaggtatctttactataaaagctattgtgt

SEQ ID NO: 68050 - DNA, 120 bp, Homo sapiens
  misc_feature: 869 for SV(C|O) and mtDNA
atggagaaagggacgcgggcgggggatatagggtcgaagccgcactcgtaaggggtggatttttctatgtagccgttgagttgtggtagtcaaaatgtaataattattagtagtaaggct

SEQ ID NO: 68051 - DNA, 120 bp, Homo sapiens
  misc_feature: 868 for SV(C|O) and mtDNA
ttccaatgtctttgtggtttgtagagaatagtcaacggtcggcgaacatcagtgggggtgaggtaaaatggctgagtgaagcattggactgtaaatctaaagacaggggttaggcctctt

SEQ ID NO: 68052 - DNA, 120 bp, Homo sapiens; identical to SEQ ID NO: 53368
  misc_feature: 868 for SV(C|O) and mtDNA

SEQ ID NO: 68053 - DNA, 120 bp, Homo sapiens
  misc_feature: 868 for SV(C|O) and mtDNA
tccttctaggcatagtagggaggatatgaggtgtgagcggtatactagtattcctagaagtgagatggtaaatgctagtataatatttatgtaaatgaggggcatttggtaaatatgatt

SEQ ID NO: 68054 - DNA, 120 bp, Homo sapiens; identical to SEQ ID NO: 53762
  misc_feature: 868 for SV(C|O) and mtDNA

SEQ ID NO: 68055 - DNA, 120 bp, Homo sapiens
  misc_feature: 868 for SV(C|O) and mtDNA
gttccaatgtctttgtggtttgtagagaatagtcaacggtcggcgaacatcagtgggggtgaggtaaaatggctgagtgaagcattggactgtaaatctaaagacaggggttaggcctct

SEQ ID NO: 68056 - DNA, 120 bp, Homo sapiens
  misc_feature: 868 for SV(C|O) and mtDNA
aaatgcatgggctgtgacgataacgttgtagatgtggtcgttacctagaaggttgcctggctggcccagctcggctcgaataaggaggcttagagctgtgcctaggactccagctcatgc

SEQ ID NO: 68057 - DNA, 120 bp, Homo sapiens
  misc_feature: 868 for SV(C|O) and mtDNA
ccaactaatatttcactttacatccaaacatcactttggcttcgaagccgccgcctgatactggcattttgtagacgtggtttgactatttctgtatgtctccatctattgatgagggtc

SEQ ID NO: 68058 - DNA, 120 bp, Homo sapiens
  misc_feature: 868 for SV(C|O) and mtDNA
atcactgcgcccgctcataaggggatggccatggctaggtttatagatagttgggtggttggtgtaaatgagtgaggcaggagtccgaggaggttagttgtggcaataaaaatgattaag

SEQ ID NO: 68059 - DNA, 120 bp, Homo sapiens; identical to SEQ ID NO: 52891
  misc_feature: 868 for SV(C|O) and mtDNA

SEQ ID NO: 68060 - DNA, 120 bp, Homo sapiens; identical to SEQ ID NO: 54212
  misc_feature: 868 for SV(C|O) and mtDNA

SEQ ID NO: 68061 - DNA, 120 bp, Homo sapiens
  misc_feature: 867 for SV(C|O) and mtDNA
tgtgtaagctagtcatattaagttgttggctcaggagtttgatagttcttgggcagtgagagtgagtagtagaatgtttagtgagcctagggtgttgtgagtgtaaattagtgcgatgag

SEQ ID NO: 68062 - DNA, 120 bp, Homo sapiens; identical to SEQ ID NO: 53822
  misc_feature: 867 for SV(C|O) and mtDNA

SEQ ID NO: 68063 - DNA, 120 bp, Homo sapiens
  misc_feature: 867 for SV(C|O) and mtDNA
tcttctatgataggggaagtagcgtcttgtagacctacttgcgctgcatgtgccattaagatatataggatttagcctataatttaactttgacaaagttatgaaatggtttttctaata

SEQ ID NO: 68064 - DNA, 120 bp, Homo sapiens
  misc_feature: 867 for SV(C|O) and mtDNA
actccaccattagcacccaaagctaagattctaatttaaactattctctgttctttcatggggaagcagatttgggtgccacccaagtattgactcacccatcaacaaccgctatgtaat

SEQ ID NO: 68065 - DNA, 120 bp, Homo sapiens
  misc_feature: 866 for SV(C|O) and mtDNA
aggcctaaaagcagccaccaattaagaaagcgttcaagctcaacacccactacctaaaaaatcccaaacatataactgaactcctcacacccaattggaccaatctatcaccctatagaa

SEQ ID NO: 68066 - DNA, 120 bp, Homo sapiens; identical to SEQ ID NO: 53925
  misc_feature: 866 for SV(C|O) and mtDNA

SEQ ID NO: 68067 - DNA, 120 bp, Homo sapiens
  misc_feature: 866 for SV(C|O) and mtDNA
ccaaaacatcagattgtgaatctgacaacagaggcttacgaccccttatttaccgagaaagctcacaagaactgctaactcatgcccccatgtctaacaacatggctttctcaactttta

SEQ ID NO: 68068 - DNA, 120 bp, Homo sapiens
  misc_feature: 866 for SV(C|O) and mtDNA
gtattggggtcattggtgttcttgtagttgaaatacaacgatggtttttcatatcattggtcgtggttgtagtccgtgcgagaataatgatgtatgctttgtttctgttgagtgtgggtt

SEQ ID NO: 68069 - DNA, 120 bp, Homo sapiens; identical to SEQ ID NO: 53190
  misc_feature: 866 for SV(C|O) and mtDNA

SEQ ID NO: 68070 - DNA, 120 bp, Homo sapiens
  misc_feature: 866 for SV(C|O) and mtDNA
cagtctaatcctttttgtagtcactcataggccagacttagggctaggatgatgattaataagagggatgacataactattagtggtaggttagttgtttgtagggctcatggtaggggt

SEQ ID NO: 68071 - DNA, 120 bp, Homo sapiens; identical to SEQ ID NO: 52363
  misc_feature: 865 for SV(C|O) and mtDNA

SEQ ID NO: 68072 - DNA, 120 bp, Homo sapiens
  misc_feature: 865 for SV(C|O) and mtDNA
ttcggttcagtctaatcctttttgtagtcactcataggccagacttagggctaggatgatgattaataagagggatgacataactattagtggtaggttagttgtttgtagggctcatgg

SEQ ID NO: 68073 - DNA, 120 bp, Homo sapiens; identical to SEQ ID NO: 53295
  misc_feature: 865 for SV(C|O) and mtDNA

SEQ ID NO: 68074 - DNA, 120 bp, Homo sapiens
  misc_feature: 865 for SV(C|O) and mtDNA
tccaccattagcacccaaagctaagattctaatttaaactattctctgttctttcatggggaagcagatttgggtgccacccaagtattgactcacccatcaacaaccgctatgtaattc

SEQ ID NO: 68075 - DNA, 120 bp, Homo sapiens
  misc_feature: 865 for SV(C|O) and mtDNA
tagttttaagagtactgcggcaagtactattgacccagcgatgggggcttcgacatgggctttagggagtcataagtggagtccgtaaagaggtatctttactataaaagctattgtgta

SEQ ID NO: 68076 - DNA, 120 bp, Homo sapiens
  misc_feature: 865 for SV(C|O) and mtDNA
tagtgttccaatgtctttgtggtttgtagagaatagtcaacggtcggcgaacatcagtgggggtgaggtaaaatggctgagtgaagcattggactgtaaatctaaagacaggggttaggc

SEQ ID NO: 68077 - DNA, 120 bp, Homo sapiens
  misc_feature: 865 for SV(C|O) and mtDNA
tagtattattccttctaggcatagtagggaggatatgaggtgtgagcggtatactagtattcctagaagtgagatggtaaatgctagtataatatttatgtaaatgaggggcatttggta

SEQ ID NO: 68078 - DNA, 120 bp, Homo sapiens
  misc_feature: 865 for SV(C|O) and mtDNA
aagccttcgcttcgaagcgaaaagtcctaatagtagaagaaccctccataaacctggagtgactatatggatgccccccaccctaccacacattcgaagaacccgtatacataaaatcta

SEQ ID NO: 68079 - DNA, 120 bp, Homo sapiens
  misc_feature: 865 for SV(C|O) and mtDNA
aacctattccaactgttcatcggctgagagggcgtaggaattatatccttcttgctcatcagttgatgatacgcccgagcagatgccaacacagcagccattcaagcaatcctatacaac

SEQ ID NO: 68080 - DNA, 120 bp, Homo sapiens
  misc_feature: 865 for SV(C|O) and mtDNA
ataacacacccgaccacaccgctaacaatcaatactaaacccccataaataggagaaggcttagaagaaaaccccacaaaccccattactaaacccacactcaacagaaacaaagcatac

SEQ ID NO: 68081 - DNA, 120 bp, Homo sapiens
  misc_feature: 865 for SV(C|O) and mtDNA
ccatagtaggcctaaaagcagccaccaattaagaaagcgttcaagctcaacacccactacctaaaaaatcccaaacatataactgaactcctcacacccaattggaccaatctatcaccc

SEQ ID NO: 68082 - DNA, 120 bp, Homo sapiens; identical to SEQ ID NO: 55391
  misc_feature: 865 for SV(C|O) and mtDNA

SEQ ID NO: 68083 - DNA, 120 bp, Homo sapiens
  misc_feature: 865 for SV(C|O) and mtDNA
cctcatcaatagatggagacatacagaaatagtcaaaccacgtctacaaaatgccagtatcaggcggcggcttcgaagccaaagtgatgtttggatgtaaagtgaaatattagttggcgg

SEQ ID NO: 68084 - DNA, 120 bp, Homo sapiens
  misc_feature: 865 for SV(C|O) and mtDNA
acagatgataggatgtttcatgtggtgtatgcatcggggtagtccgagtaacgtcggggcattccggataggccgagaaagtgttgtgggaagaaagttagatttacgccgatgaatatg

SEQ ID NO: 68085 - DNA, 120 bp, Homo sapiens
  misc_feature: 865 for SV(C|O) and mtDNA
aatttacactcacaacaccctaggctcactaaacattctactactcactctcactgcccaagaactatcaaactcctgagccaacaacttaatatgactagcttacacaatagcttttat

SEQ ID NO: 68086 - DNA, 120 bp, Homo sapiens
  misc_feature: 864 for SV(C|O) and mtDNA
tttgtagtcactcataggccagacttagggctaggatgatgattaataagagggatgacataactattagtggtaggttagttgtttgtagggctcatggtaggggtaaaaggagggcaa

SEQ ID NO: 68087 - DNA, 120 bp, Homo sapiens
  misc_feature: 864 for SV(C|O) and mtDNA
tggagaaagggacgcgggcgggggatatagggtcgaagccgcactcgtaaggggtggatttttctatgtagccgttgagttgtggtagtcaaaatgtaataattattagtagtaaggcta

SEQ ID NO: 68088 - DNA, 120 bp, Homo sapiens
  misc_feature: 864 for SV(C|O) and mtDNA
tcagtctaatcctttttgtagtcactcataggccagacttagggctaggatgatgattaataagagggatgacataactattagtggtaggttagttgtttgtagggctcatggtagggg

SEQ ID NO: 68089 - DNA, 120 bp, Homo sapiens
  misc_feature: 864 for SV(C|O) and mtDNA
tattactcttttttgaatgttgtcaaaactagttaattggaagttaacggtactatttatactaaaagagtaagaccctcatcaatagatggagacatacagaaatagtcaaaccacgtc

SEQ ID NO: 68090 - DNA, 120 bp, Homo sapiens; identical to SEQ ID NO: 53855
  misc_feature: 864 for SV(C|O) and mtDNA

SEQ ID NO: 68091 - DNA, 120 bp, Homo sapiens
  misc_feature: 864 for SV(C|O) and mtDNA
taatttacactcacaacaccctaggctcactaaacattctactactcactctcactgcccaagaactatcaaactcctgagccaacaacttaatatgactagcttacacaatagctttta

SEQ ID NO: 68092 - DNA, 120 bp, Homo sapiens
  misc_feature: 864 for SV(C|O) and mtDNA
aaaagtctttaactccaccattagcacccaaagctaagattctaatttaaactattctctgttctttcatggggaagcagatttgggtgccacccaagtattgactcacccatcaacaac

SEQ ID NO: 68093 - DNA, 120 bp, Homo sapiens
  misc_feature: 864 for SV(C|O) and mtDNA
attcggttcagtctaatcctttttgtagtcactcataggccagacttagggctaggatgatgattaataagagggatgacataactattagtggtaggttagttgtttgtagggctcatg

SEQ ID NO: 68094 - DNA, 120 bp, Homo sapiens
  misc_feature: 864 for SV(C|O) and mtDNA
agacgtggtttgactatttctgtatgtctccatctattgatgagggtcttactcttttagtataaatagtaccgttaacttccaattaactagttttgacaacattcaaaaaagagtaat

SEQ ID NO: 68095 - DNA, 120 bp, Homo sapiens; identical to SEQ ID NO: 53177
  misc_feature: 863 for SV(C|O) and mtDNA

SEQ ID NO: 68096 - DNA, 120 bp, Homo sapiens
  misc_feature: 863 for SV(C|O) and mtDNA
tgaggcaggaatcaaagacagatactgcgacatagggtgctccggctccagcgtctcgcaatgctatcgcgtgcacaccccccagacgaaaataccaaatgcatggagagctcccgtgag

SEQ ID NO: 68097 - DNA, 120 bp, Homo sapiens
  misc_feature: 863 for SV(C|O) and mtDNA
tactgccagccaccatgaatattgtacggtaccataaatacttgaccacctgtagtacataaaaacccaatccacatcaaaaccccctccccatgcttacaagcaagtacagcaatcaac

SEQ ID NO: 68098 - DNA, 120 bp, Homo sapiens; identical to SEQ ID NO: 54260
  misc_feature: 863 for SV(C|O) and mtDNA

SEQ ID NO: 68099 - DNA, 120 bp, Homo sapiens; identical to SEQ ID NO: 52870
  misc_feature: 863 for SV(C|O) and mtDNA

SEQ ID NO: 68100 - DNA, 120 bp, Homo sapiens
  misc_feature: 863 for SV(C|O) and mtDNA
ctaatttacactcacaacaccctaggctcactaaacattctactactcactctcactgcccaagaactatcaaactcctgagccaacaacttaatatgactagcttacacaatagctttt

SEQ ID NO: 68101 - DNA, 120 bp, Homo sapiens
  misc_feature: 863 for SV(C|O) and mtDNA
ccaatgtctttgtggtttgtagagaatagtcaacggtcggcgaacatcagtgggggtgaggtaaaatggctgagtgaagcattggactgtaaatctaaagacaggggttaggcctctttt

SEQ ID NO: 68102 - DNA, 120 bp, Homo sapiens
  misc_feature: 862 for SV(C|O) and mtDNA
ttgtgtaagctagtcatattaagttgttggctcaggagtttgatagttcttgggcagtgagagtgagtagtagaatgtttagtgagcctagggtgttgtgagtgtaaattagtgcgatga

SEQ ID NO: 68103 - DNA, 120 bp, Homo sapiens
  misc_feature: 862 for SV(C|O) and mtDNA
aactccaccattagcacccaaagctaagattctaatttaaactattctctgttctttcatggggaagcagatttgggtgccacccaagtattgactcacccatcaacaaccgctatgtaa

SEQ ID NO: 68104 - DNA, 120 bp, Homo sapiens
  misc_feature: 862 for SV(C|O) and mtDNA
taggcctaaaagcagccaccaattaagaaagcgttcaagctcaacacccactacctaaaaaatcccaaacatataactgaactcctcacacccaattggaccaatctatcaccctataga

SEQ ID NO: 68105 - DNA, 120 bp, Homo sapiens
  misc_feature: 862 for SV(C|O) and mtDNA
taaggaaaatgattatgagggcgtgatcatgaaaggtgataagctcttctatgataggggaagtagcgtcttgtagacctacttgcgctgcatgtgccattaagatatataggatttagc

SEQ ID NO: 68106 - DNA, 120 bp, Homo sapiens
  misc_feature: 862 for SV(C|O) and mtDNA
gaatcgaaccccccaaagctggtttcaagccaaccccatggcctccatgactttttcaaaaaggtattagaaaaaccatttcataactttgtcaaagttaaattataggctaaatcctat

SEQ ID NO: 68107 - DNA, 120 bp, Homo sapiens
  misc_feature: 862 for SV(C|O) and mtDNA
ctttaactccaccattagcacccaaagctaagattctaatttaaactattctctgttctttcatggggaagcagatttgggtgccacccaagtattgactcacccatcaacaaccgctat

SEQ ID NO: 68108 - DNA, 120 bp, Homo sapiens
  misc_feature: 862 for SV(C|O) and mtDNA
atagtgttccaatgtctttgtggtttgtagagaatagtcaacggtcggcgaacatcagtgggggtgaggtaaaatggctgagtgaagcattggactgtaaatctaaagacaggggttagg

SEQ ID NO: 68109 - DNA, 120 bp, Homo sapiens
  misc_feature: 861 for SV(C|O) and mtDNA
ttttgtagtcactcataggccagacttagggctaggatgatgattaataagagggatgacataactattagtggtaggttagttgtttgtagggctcatggtaggggtaaaaggagggca

SEQ ID NO: 68110 - DNA, 120 bp, Homo sapiens
  misc_feature: 861 for SV(C|O) and mtDNA
tttacccctaccatgagccctacaaacaactaacctaccactaatagttatgtcatccctcttattaatcatcatcctagccctaagtctggcctatgagtgactacaaaaaggattaga

SEQ ID NO: 68111 - DNA, 120 bp, Homo sapiens
  misc_feature: 861 for SV(C|O) and mtDNA
tcggttcagtctaatcctttttgtagtcactcataggccagacttagggctaggatgatgattaataagagggatgacataactattagtggtaggttagttgtttgtagggctcatggt

SEQ ID NO: 68112 - DNA, 120 bp, Homo sapiens
  misc_feature: 861 for SV(C|O) and mtDNA
gtgagggaggtaggtggtagtttgtgtttaatatttttagttgggtgatgaggaatagtgtaaggagtatgggggtaattatggtgggccatacggtagtatttagttggggcatttcac

SEQ ID NO: 68113 - DNA, 120 bp, Homo sapiens; identical to SEQ ID NO: 55517
  misc_feature: 861 for SV(C|O) and mtDNA

SEQ ID NO: 68114 - DNA, 120 bp, Homo sapiens
  misc_feature: 861 for SV(C|O) and mtDNA
agtgttccaatgtctttgtggtttgtagagaatagtcaacggtcggcgaacatcagtgggggtgaggtaaaatggctgagtgaagcattggactgtaaatctaaagacaggggttaggcc

SEQ ID NO: 68115 - DNA, 120 bp, Homo sapiens
  misc_feature: 861 for SV(C|O) and mtDNA
ggagaaagggacgcgggcgggggatatagggtcgaagccgcactcgtaaggggtggatttttctatgtagccgttgagttgtggtagtcaaaatgtaataattattagtagtaaggctag

SEQ ID NO: 68116 - DNA, 120 bp, Homo sapiens
  misc_feature: 861 for SV(C|O) and mtDNA
accctcatcaatagatggagacatacagaaatagtcaaaccacgtctacaaaatgccagtatcaggcggcggcttcgaagccaaagtgatgtttggatgtaaagtgaaatattagttggc

SEQ ID NO: 68117 - DNA, 120 bp, Homo sapiens
  misc_feature: 861 for SV(C|O) and mtDNA
ctagttaattcattatgcagaaggtataggggttagtccttgctgtattatgcttggttataatttttcatctttcccttgcggtactatatctattgcgccaggtttcaatttctatcg

SEQ ID NO: 68118 - DNA, 120 bp, Homo sapiens
  misc_feature: 861 for SV(C|O) and mtDNA
ataaggaaaatgattatgagggcgtgatcatgaaaggtgataagctcttctatgataggggaagtagcgtcttgtagacctacttgcgctgcatgtgccattaagatatataggatttag

SEQ ID NO: 68119 - DNA, 120 bp, Homo sapiens
  misc_feature: 861 for SV(C|O) and mtDNA
agtagggaggatatgaggtgtgagcggtatactagtattcctagaagtgagatggtaaatgctagtataatatttatgtaaatgaggggcatttggtaaatatgattatcataatttaat

SEQ ID NO: 68120 - DNA, 120 bp, Homo sapiens
  misc_feature: 861 for SV(C|O) and mtDNA
atagtattattccttctaggcatagtagggaggatatgaggtgtgagcggtatactagtattcctagaagtgagatggtaaatgctagtataatatttatgtaaatgaggggcatttggt

SEQ ID NO: 68121 - DNA, 120 bp, Homo sapiens
  misc_feature: 861 for SV(C|O) and mtDNA
actttgacaaagttatgaaatggtttttctaatacctttttgaaaaagtcatggaggccatggggttggcttgaaaccagctttggggggttcgattccttccttttttgtctagatttt

SEQ ID NO: 68122 - DNA, 120 bp, Homo sapiens
  misc_feature: 861 for SV(C|O) and mtDNA
aattcaatatgaaaatcacctcggagctggtaaaaagaggcctaacccctgtctttagatttacagtccaatgcttcactcagccattttacctcacccccactgatgttcgccgaccgt

SEQ ID NO: 68123 - DNA, 120 bp, Homo sapiens
  misc_feature: 860 for SV(C|O) and mtDNA
gtattattccttctaggcatagtagggaggatatgaggtgtgagcggtatactagtattcctagaagtgagatggtaaatgctagtataatatttatgtaaatgaggggcatttggtaaa

SEQ ID NO: 68124 - DNA, 120 bp, Homo sapiens; identical to SEQ ID NO: 52692
  misc_feature: 860 for SV(C|O) and mtDNA

SEQ ID NO: 68125 - DNA, 120 bp, Homo sapiens
  misc_feature: 860 for SV(C|O) and mtDNA
cattagcacccaaagctaagattctaatttaaactattctctgttctttcatggggaagcagatttgggtgccacccaagtattgactcacccatcaacaaccgctatgtaattcgtaca

SEQ ID NO: 68126 - DNA, 120 bp, Homo sapiens; identical to SEQ ID NO: 54438
  misc_feature: 860 for SV(C|O) and mtDNA

SEQ ID NO: 68127 - DNA, 120 bp, Homo sapiens
  misc_feature: 860 for SV(C|O) and mtDNA
tgcaattcaatatgaaaatcacctcggagctggtaaaaagaggcctaacccctgtctttagatttacagtccaatgcttcactcagccattttacctcacccccactgatgttcgccgac

SEQ ID NO: 68128 - DNA, 120 bp, Homo sapiens; identical to SEQ ID NO: 52442
  misc_feature: 860 for SV(C|O) and mtDNA

SEQ ID NO: 68129 - DNA, 120 bp, Homo sapiens
  misc_feature: 860 for SV(C|O) and mtDNA
tgagggaggtaggtggtagtttgtgtttaatatttttagttgggtgatgaggaatagtgtaaggagtatgggggtaattatggtgggccatacggtagtatttagttggggcatttcact

SEQ ID NO: 68130 - DNA, 120 bp, Homo sapiens
  misc_feature: 860 for SV(C|O) and mtDNA
tgacaaagttatgaaatggtttttctaatacctttttgaaaaagtcatggaggccatggggttggcttgaaaccagctttggggggttcgattccttccttttttgtctagattttatgt

SEQ ID NO: 68131 - DNA, 120 bp, Homo sapiens
  misc_feature: 860 for SV(C|O) and mtDNA
agaaagggacgcgggcgggggatatagggtcgaagccgcactcgtaaggggtggatttttctatgtagccgttgagttgtggtagtcaaaatgtaataattattagtagtaaggctagga

SEQ ID NO: 68132 - DNA, 120 bp, Homo sapiens; identical to SEQ ID NO: 53354
  misc_feature: 860 for SV(C|O) and mtDNA

SEQ ID NO: 68133 - DNA, 120 bp, Homo sapiens
  misc_feature: 860 for SV(C|O) and mtDNA
ggaggatatgaggtgtgagcggtatactagtattcctagaagtgagatggtaaatgctagtataatatttatgtaaatgaggggcatttggtaaatatgattatcataatttaatgagtc

SEQ ID NO: 68134 - DNA, 120 bp, Homo sapiens
  misc_feature: 859 for SV(C|O) and mtDNA
caacctattccaactgttcatcggctgagagggcgtaggaattatatccttcttgctcatcagttgatgatacgcccgagcagatgccaacacagcagccattcaagcaatcctatacaa

SEQ ID NO: 68135 - DNA, 120 bp, Homo sapiens
  misc_feature: 859 for SV(C|O) and mtDNA
cctaaaagcagccaccaattaagaaagcgttcaagctcaacacccactacctaaaaaatcccaaacatataactgaactcctcacacccaattggaccaatctatcaccctatagaagaa

SEQ ID NO: 68136 - DNA, 120 bp, Homo sapiens
  misc_feature: 859 for SV(C|O) and mtDNA
ttacccctaccatgagccctacaaacaactaacctaccactaatagttatgtcatccctcttattaatcatcatcctagccctaagtctggcctatgagtgactacaaaaaggattagac

SEQ ID NO: 68137 - DNA, 120 bp, Homo sapiens
  misc_feature: 859 for SV(C|O) and mtDNA
caggactaggaagcagataaggaaaatgattatgagggcgtgatcatgaaaggtgataagctcttctatgataggggaagtagcgtcttgtagacctacttgcgctgcatgtgccattaa

SEQ ID NO: 68138 - DNA, 120 bp, Homo sapiens
  misc_feature: 859 for SV(C|O) and mtDNA
taacacacccgaccacaccgctaacaatcaatactaaacccccataaataggagaaggcttagaagaaaaccccacaaaccccattactaaacccacactcaacagaaacaaagcataca

SEQ ID NO: 68139 - DNA, 120 bp, Homo sapiens
  misc_feature: 859 for SV(C|O) and mtDNA
tcggagctggtaaaaagaggcctaacccctgtctttagatttacagtccaatgcttcactcagccattttacctcacccccactgatgttcgccgaccgttgactattctctacaaacca

SEQ ID NO: 68140 - DNA, 120 bp, Homo sapiens
  misc_feature: 859 for SV(C|O) and mtDNA
aaacccacactcaacagaaacaaagcatacatcattattctcgcacggactacaaccacgaccaatgatatgaaaaaccatcgttgtatttcaactacaagaacaccaatgaccccaata

SEQ ID NO: 68141 - DNA, 120 bp, Homo sapiens; identical to SEQ ID NO: 54447
  misc_feature: 859 for SV(C|O) and mtDNA

SEQ ID NO: 68142 - DNA, 120 bp, Homo sapiens
  misc_feature: 859 for SV(C|O) and mtDNA
atttacactcacaacaccctaggctcactaaacattctactactcactctcactgcccaagaactatcaaactcctgagccaacaacttaatatgactagcttacacaatagcttttata

SEQ ID NO: 68143 - DNA, 120 bp, Homo sapiens
  misc_feature: 859 for SV(C|O) and mtDNA
agtctaatcctttttgtagtcactcataggccagacttagggctaggatgatgattaataagagggatgacataactattagtggtaggttagttgtttgtagggctcatggtaggggta

SEQ ID NO: 68144 - DNA, 120 bp, Homo sapiens
  misc_feature: 859 for SV(C|O) and mtDNA
ataagaaggtaatagctactaagaagaattttatggagaaagggacgcgggcgggggatatagggtcgaagccgcactcgtaaggggtggatttttctatgtagccgttgagttgtggta

SEQ ID NO: 68145 - DNA, 120 bp, Homo sapiens; identical to SEQ ID NO: 53162
  misc_feature: 859 for SV(C|O) and mtDNA

SEQ ID NO: 68146 - DNA, 120 bp, Homo sapiens; identical to SEQ ID NO: 52667
  misc_feature: 859 for SV(C|O) and mtDNA

SEQ ID NO: 68147 - DNA, 120 bp, Homo sapiens
  misc_feature: 859 for SV(C|O) and mtDNA
agggaggatatgaggtgtgagcggtatactagtattcctagaagtgagatggtaaatgctagtataatatttatgtaaatgaggggcatttggtaaatatgattatcataatttaatgag

SEQ ID NO: 68148 - DNA, 120 bp, Homo sapiens
  misc_feature: 859 for SV(C|O) and mtDNA
agccttcgcttcgaagcgaaaagtcctaatagtagaagaaccctccataaacctggagtgactatatggatgccccccaccctaccacacattcgaagaacccgtatacataaaatctag

SEQ ID NO: 68149 - DNA, 120 bp, Homo sapiens; identical to SEQ ID NO: 52875
  misc_feature: 859 for SV(C|O) and mtDNA

SEQ ID NO: 68150 - DNA, 120 bp, Homo sapiens; identical to SEQ ID NO: 53408
  misc_feature: 859 for SV(C|O) and mtDNA

SEQ ID NO: 68151 - DNA, 120 bp, Homo sapiens; identical to SEQ ID NO: 54828
  misc_feature: 859 for SV(C|O) and mtDNA

SEQ ID NO: 68152 - DNA, 120 bp, Homo sapiens; identical to SEQ ID NO: 53656
  misc_feature: 858 for SV(C|O) and mtDNA

SEQ ID NO: 68153 - DNA, 120 bp, Homo sapiens
  misc_feature: 858 for SV(C|O) and mtDNA
ttattactcttttttgaatgttgtcaaaactagttaattggaagttaacggtactatttatactaaaagagtaagaccctcatcaatagatggagacatacagaaatagtcaaaccacgt

SEQ ID NO: 68154 - DNA, 120 bp, Homo sapiens
  misc_feature: 858 for SV(C|O) and mtDNA
agttttaagagtactgcggcaagtactattgacccagcgatgggggcttcgacatgggctttagggagtcataagtggagtccgtaaagaggtatctttactataaaagctattgtgtaa

SEQ ID NO: 68155 - DNA, 120 bp, Homo sapiens
  misc_feature: 858 for SV(C|O) and mtDNA
ttaattaattttattagggggttaattttgcgtattggggtcattggtgttcttgtagttgaaatacaacgatggtttttcatatcattggtcgtggttgtagtccgtgcgagaataatg

SEQ ID NO: 68156 - DNA, 120 bp, Homo sapiens
  misc_feature: 858 for SV(C|O) and mtDNA
ttaaccaaaacatcagattgtgaatctgacaacagaggcttacgaccccttatttaccgagaaagctcacaagaactgctaactcatgcccccatgtctaacaacatggctttctcaact

SEQ ID NO: 68157 - DNA, 120 bp, Homo sapiens
  misc_feature: 858 for SV(C|O) and mtDNA
tgttccaatgtctttgtggtttgtagagaatagtcaacggtcggcgaacatcagtgggggtgaggtaaaatggctgagtgaagcattggactgtaaatctaaagacaggggttaggcctc

SEQ ID NO: 68158 - DNA, 120 bp, Homo sapiens
  misc_feature: 858 for SV(C|O) and mtDNA
aataattttcatgatttgagaagccttcgcttcgaagcgaaaagtcctaatagtagaagaaccctccataaacctggagtgactatatggatgccccccaccctaccacacattcgaaga

SEQ ID NO: 68159 - DNA, 120 bp, Homo sapiens; identical to SEQ ID NO: 54948
  misc_feature: 858 for SV(C|O) and mtDNA

SEQ ID NO: 68160 - DNA, 120 bp, Homo sapiens
  misc_feature: 858 for SV(C|O) and mtDNA
taaccaaaacatcagattgtgaatctgacaacagaggcttacgaccccttatttaccgagaaagctcacaagaactgctaactcatgcccccatgtctaacaacatggctttctcaactt

SEQ ID NO: 68161 - DNA, 120 bp, Homo sapiens
  misc_feature: 858 for SV(C|O) and mtDNA
ctcggagctggtaaaaagaggcctaacccctgtctttagatttacagtccaatgcttcactcagccattttacctcacccccactgatgttcgccgaccgttgactattctctacaaacc

SEQ ID NO: 68162 - DNA, 120 bp, Homo sapiens; identical to SEQ ID NO: 56953
  misc_feature: 858 for SV(C|O) and mtDNA

SEQ ID NO: 68163 - DNA, 120 bp, Homo sapiens
  misc_feature: 858 for SV(C|O) and mtDNA
attaagaaagcgttcaagctcaacacccactacctaaaaaatcccaaacatataactgaactcctcacacccaattggaccaatctatcaccctatagaagaactaatgttagtataagt

SEQ ID NO: 68164 - DNA, 120 bp, Homo sapiens
  misc_feature: 858 for SV(C|O) and mtDNA
ataatcactgcgcccgctcataaggggatggccatggctaggtttatagatagttgggtggttggtgtaaatgagtgaggcaggagtccgaggaggttagttgtggcaataaaaatgatt

SEQ ID NO: 68165 - DNA, 120 bp, Homo sapiens; identical to SEQ ID NO: 52634
  misc_feature: 857 for SV(C|O) and mtDNA

SEQ ID NO: 68166 - DNA, 120 bp, Homo sapiens
  misc_feature: 857 for SV(C|O) and mtDNA
ttagtaatggggtttgtggggttttcttctaagccttctcctatttatgggggtttagtattgattgttagcggtgtggtcgggtgtgttattattctgaattttgggggaggttatatg

SEQ ID NO: 68167 - DNA, 120 bp, Homo sapiens
  misc_feature: 857 for SV(C|O) and mtDNA
caaaacatcagattgtgaatctgacaacagaggcttacgaccccttatttaccgagaaagctcacaagaactgctaactcatgcccccatgtctaacaacatggctttctcaacttttaa

SEQ ID NO: 68168 - DNA, 120 bp, Homo sapiens
  misc_feature: 857 for SV(C|O) and mtDNA
tctcggcctatccggaatgccccgacgttactcggactaccccgatgcatacaccacatgaaacatcctatcatctgtaggctcattcatttctctaacagcagtaatattaataatttt

SEQ ID NO: 68169 - DNA, 120 bp, Homo sapiens
  misc_feature: 857 for SV(C|O) and mtDNA
gatgataggatgtttcatgtggtgtatgcatcggggtagtccgagtaacgtcggggcattccggataggccgagaaagtgttgtgggaagaaagttagatttacgccgatgaatatgata

SEQ ID NO: 68170 - DNA, 120 bp, Homo sapiens
  misc_feature: 857 for SV(C|O) and mtDNA
attttcatgatttgagaagccttcgcttcgaagcgaaaagtcctaatagtagaagaaccctccataaacctggagtgactatatggatgccccccaccctaccacacattcgaagaaccc

SEQ ID NO: 68171 - DNA, 120 bp, Homo sapiens
  misc_feature: 857 for SV(C|O) and mtDNA
ggcctaaaagcagccaccaattaagaaagcgttcaagctcaacacccactacctaaaaaatcccaaacatataactgaactcctcacacccaattggaccaatctatcaccctatagaag

SEQ ID NO: 68172 - DNA, 120 bp, Homo sapiens
  misc_feature: 857 for SV(C|O) and mtDNA
gcctataatcactgcgcccgctcataaggggatggccatggctaggtttatagatagttgggtggttggtgtaaatgagtgaggcaggagtccgaggaggttagttgtggcaataaaaat

SEQ ID NO: 68173 - DNA, 120 bp, Homo sapiens
  misc_feature: 857 for SV(C|O) and mtDNA
gagggaggtaggtggtagtttgtgtttaatatttttagttgggtgatgaggaatagtgtaaggagtatgggggtaattatggtgggccatacggtagtatttagttggggcatttcactg

SEQ ID NO: 68174 - DNA, 120 bp, Homo sapiens; identical to SEQ ID NO: 56956
  misc_feature: 857 for SV(C|O) and mtDNA

SEQ ID NO: 68175 - DNA, 120 bp, Homo sapiens; identical to SEQ ID NO: 51831
  misc_feature: 857 for SV(C|O) and mtDNA

SEQ ID NO: 68176 - DNA, 120 bp, Homo sapiens; identical to SEQ ID NO: 51818
  misc_feature: 857 for SV(C|O) and mtDNA

SEQ ID NO: 68177 - DNA, 120 bp, Homo sapiens
  misc_feature: 857 for SV(C|O) and mtDNA
accaaaacatcagattgtgaatctgacaacagaggcttacgaccccttatttaccgagaaagctcacaagaactgctaactcatgcccccatgtctaacaacatggctttctcaactttt

SEQ ID NO: 68178 - DNA, 120 bp, Homo sapiens
  misc_feature: 856 for SV(C|O) and mtDNA
tttaaccaaaacatcagattgtgaatctgacaacagaggcttacgaccccttatttaccgagaaagctcacaagaactgctaactcatgcccccatgtctaacaacatggctttctcaac

SEQ ID NO: 68179 - DNA, 120 bp, Homo sapiens
  misc_feature: 856 for SV(C|O) and mtDNA
ttattccttctaggcatagtagggaggatatgaggtgtgagcggtatactagtattcctagaagtgagatggtaaatgctagtataatatttatgtaaatgaggggcatttggtaaatat

SEQ ID NO: 68180 - DNA, 120 bp, Homo sapiens; identical to SEQ ID NO: 51825
  misc_feature: 856 for SV(C|O) and mtDNA

SEQ ID NO: 68181 - DNA, 120 bp, Homo sapiens
  misc_feature: 856 for SV(C|O) and mtDNA
tggtgagggaggtaggtggtagtttgtgtttaatatttttagttgggtgatgaggaatagtgtaaggagtatgggggtaattatggtgggccatacggtagtatttagttggggcatttc

SEQ ID NO: 68182 - DNA, 120 bp, Homo sapiens
  misc_feature: 856 for SV(C|O) and mtDNA
aatcgaaccccccaaagctggtttcaagccaaccccatggcctccatgactttttcaaaaaggtattagaaaaaccatttcataactttgtcaaagttaaattataggctaaatcctata

SEQ ID NO: 68183 - DNA, 120 bp, Homo sapiens
  misc_feature: 856 for SV(C|O) and mtDNA
acctattccaactgttcatcggctgagagggcgtaggaattatatccttcttgctcatcagttgatgatacgcccgagcagatgccaacacagcagccattcaagcaatcctatacaacc

SEQ ID NO: 68184 - DNA, 120 bp, Homo sapiens; identical to SEQ ID NO: 54532
  misc_feature: 856 for SV(C|O) and mtDNA

SEQ ID NO: 68185 - DNA, 120 bp, Homo sapiens
  misc_feature: 856 for SV(C|O) and mtDNA
agtctttaactccaccattagcacccaaagctaagattctaatttaaactattctctgttctttcatggggaagcagatttgggtgccacccaagtattgactcacccatcaacaaccgc

SEQ ID NO: 68186 - DNA, 120 bp, Homo sapiens
  misc_feature: 856 for SV(C|O) and mtDNA
caattcaatatgaaaatcacctcggagctggtaaaaagaggcctaacccctgtctttagatttacagtccaatgcttcactcagccattttacctcacccccactgatgttcgccgaccg

SEQ ID NO: 68187 - DNA, 120 bp, Homo sapiens
  misc_feature: 856 for SV(C|O) and mtDNA
aattcggttcagtctaatcctttttgtagtcactcataggccagacttagggctaggatgatgattaataagagggatgacataactattagtggtaggttagttgtttgtagggctcat

SEQ ID NO: 68188 - DNA, 120 bp, Homo sapiens
  misc_feature: 855 for SV(C|O) and mtDNA
aaaacatcagattgtgaatctgacaacagaggcttacgaccccttatttaccgagaaagctcacaagaactgctaactcatgcccccatgtctaacaacatggctttctcaacttttaaa

SEQ ID NO: 68189 - DNA, 120 bp, Homo sapiens; identical to SEQ ID NO: 52752
  misc_feature: 855 for SV(C|O) and mtDNA

SEQ ID NO: 68190 - DNA, 120 bp, Homo sapiens
  misc_feature: 855 for SV(C|O) and mtDNA
ctcatcaatagatggagacatacagaaatagtcaaaccacgtctacaaaatgccagtatcaggcggcggcttcgaagccaaagtgatgtttggatgtaaagtgaaatattagttggcgga

SEQ ID NO: 68191 - DNA, 120 bp, Homo sapiens; identical to SEQ ID NO: 51753
  misc_feature: 855 for SV(C|O) and mtDNA

SEQ ID NO: 68192 - DNA, 120 bp, Homo sapiens
  misc_feature: 855 for SV(C|O) and mtDNA
taattttcatgatttgagaagccttcgcttcgaagcgaaaagtcctaatagtagaagaaccctccataaacctggagtgactatatggatgccccccaccctaccacacattcgaagaac

SEQ ID NO: 68193 - DNA, 120 bp, Homo sapiens
  misc_feature: 855 for SV(C|O) and mtDNA
taataattttcatgatttgagaagccttcgcttcgaagcgaaaagtcctaatagtagaagaaccctccataaacctggagtgactatatggatgccccccaccctaccacacattcgaag

SEQ ID NO: 68194 - DNA, 120 bp, Homo sapiens
  misc_feature: 855 for SV(C|O) and mtDNA
taaacccacactcaacagaaacaaagcatacatcattattctcgcacggactacaaccacgaccaatgatatgaaaaaccatcgttgtatttcaactacaagaacaccaatgaccccaat

SEQ ID NO: 68195 - DNA, 120 bp, Homo sapiens
  misc_feature: 855 for SV(C|O) and mtDNA
aattttcatgatttgagaagccttcgcttcgaagcgaaaagtcctaatagtagaagaaccctccataaacctggagtgactatatggatgccccccaccctaccacacattcgaagaacc

SEQ ID NO: 68196 - DNA, 120 bp, Homo sapiens
  misc_feature: 855 for SV(C|O) and mtDNA
atttgcaattcaatatgaaaatcacctcggagctggtaaaaagaggcctaacccctgtctttagatttacagtccaatgcttcactcagccattttacctcacccccactgatgttcgcc

SEQ ID NO: 68197 - DNA, 120 bp, Homo sapiens
  misc_feature: 855 for SV(C|O) and mtDNA
gcgtattggggtcattggtgttcttgtagttgaaatacaacgatggtttttcatatcattggtcgtggttgtagtccgtgcgagaataatgatgtatgctttgtttctgttgagtgtggg

SEQ ID NO: 68198 - DNA, 120 bp, Homo sapiens
  misc_feature: 855 for SV(C|O) and mtDNA
cctataatcactgcgcccgctcataaggggatggccatggctaggtttatagatagttgggtggttggtgtaaatgagtgaggcaggagtccgaggaggttagttgtggcaataaaaatg

SEQ ID NO: 68199 - DNA, 120 bp, Homo sapiens; identical to SEQ ID NO: 54876
  misc_feature: 854 for SV(C|O) and mtDNA

SEQ ID NO: 68200 - DNA, 120 bp, Homo sapiens; identical to SEQ ID NO: 52439
  misc_feature: 854 for SV(C|O) and mtDNA

SEQ ID NO: 68201 - DNA, 120 bp, Homo sapiens
  misc_feature: 854 for SV(C|O) and mtDNA
cactcacaacaccctaggctcactaaacattctactactcactctcactgcccaagaactatcaaactcctgagccaacaacttaatatgactagcttacacaatagcttttatagtaaa

SEQ ID NO: 68202 - DNA, 120 bp, Homo sapiens
  misc_feature: 854 for SV(C|O) and mtDNA
aatgtacgaattacatagcggttgttgatgggtgagtcaatacttgggtggcacccaaatctgcttccccatgaaagaacagagaatagtttaaattagaatcttagctttgggtgctaa

SEQ ID NO: 68203 - DNA, 120 bp, Homo sapiens; identical to SEQ ID NO: 54283
  misc_feature: 854 for SV(C|O) and mtDNA

SEQ ID NO: 68204 - DNA, 120 bp, Homo sapiens
  misc_feature: 854 for SV(C|O) and mtDNA
tctagttaattcattatgcagaaggtataggggttagtccttgctgtattatgcttggttataatttttcatctttcccttgcggtactatatctattgcgccaggtttcaatttctatc

SEQ ID NO: 68205 - DNA, 120 bp, Homo sapiens
  misc_feature: 854 for SV(C|O) and mtDNA
atgaggcaggaatcaaagacagatactgcgacatagggtgctccggctccagcgtctcgcaatgctatcgcgtgcacaccccccagacgaaaataccaaatgcatggagagctcccgtga

SEQ ID NO: 68206 - DNA, 120 bp, Homo sapiens
  misc_feature: 854 for SV(C|O) and mtDNA
tattattccttctaggcatagtagggaggatatgaggtgtgagcggtatactagtattcctagaagtgagatggtaaatgctagtataatatttatgtaaatgaggggcatttggtaaat

SEQ ID NO: 68207 - DNA, 120 bp, Homo sapiens
  misc_feature: 854 for SV(C|O) and mtDNA
catgatttgagaagccttcgcttcgaagcgaaaagtcctaatagtagaagaaccctccataaacctggagtgactatatggatgccccccaccctaccacacattcgaagaacccgtata

SEQ ID NO: 68208 - DNA, 120 bp, Homo sapiens
  misc_feature: 854 for SV(C|O) and mtDNA
taatgtacgaattacatagcggttgttgatgggtgagtcaatacttgggtggcacccaaatctgcttccccatgaaagaacagagaatagtttaaattagaatcttagctttgggtgcta

SEQ ID NO: 68209 - DNA, 120 bp, Homo sapiens
  misc_feature: 854 for SV(C|O) and mtDNA
cggttcagtctaatcctttttgtagtcactcataggccagacttagggctaggatgatgattaataagagggatgacataactattagtggtaggttagttgtttgtagggctcatggta

SEQ ID NO: 68210 - DNA, 120 bp, Homo sapiens
  misc_feature: 854 for SV(C|O) and mtDNA
aatgtctttgtggtttgtagagaatagtcaacggtcggcgaacatcagtgggggtgaggtaaaatggctgagtgaagcattggactgtaaatctaaagacaggggttaggcctcttttta

SEQ ID NO: 68211 - DNA, 120 bp, Homo sapiens; identical to SEQ ID NO: 51812
  misc_feature: 854 for SV(C|O) and mtDNA

SEQ ID NO: 68212 - DNA, 120 bp, Homo sapiens
  misc_feature: 854 for SV(C|O) and mtDNA
ccattagcacccaaagctaagattctaatttaaactattctctgttctttcatggggaagcagatttgggtgccacccaagtattgactcacccatcaacaaccgctatgtaattcgtac

SEQ ID NO: 68213 - DNA, 120 bp, Homo sapiens
  misc_feature: 854 for SV(C|O) and mtDNA
gaaagggacgcgggcgggggatatagggtcgaagccgcactcgtaaggggtggatttttctatgtagccgttgagttgtggtagtcaaaatgtaataattattagtagtaaggctaggag

SEQ ID NO: 68214 - DNA, 120 bp, Homo sapiens
  misc_feature: 854 for SV(C|O) and mtDNA
ctcggcctatccggaatgccccgacgttactcggactaccccgatgcatacaccacatgaaacatcctatcatctgtaggctcattcatttctctaacagcagtaatattaataattttc

SEQ ID NO: 68215 - DNA, 120 bp, Homo sapiens; identical to SEQ ID NO: 53492
  misc_feature: 854 for SV(C|O) and mtDNA

SEQ ID NO: 68216 - DNA, 120 bp, Homo sapiens
  misc_feature: 854 for SV(C|O) and mtDNA
ccaccattagcacccaaagctaagattctaatttaaactattctctgttctttcatggggaagcagatttgggtgccacccaagtattgactcacccatcaacaaccgctatgtaattcg

SEQ ID NO: 68217 - DNA, 120 bp, Homo sapiens
  misc_feature: 854 for SV(C|O) and mtDNA
caatgtctttgtggtttgtagagaatagtcaacggtcggcgaacatcagtgggggtgaggtaaaatggctgagtgaagcattggactgtaaatctaaagacaggggttaggcctcttttt

SEQ ID NO: 68218 - DNA, 120 bp, Homo sapiens; identical to SEQ ID NO: 56359
  misc_feature: 854 for SV(C|O) and mtDNA

SEQ ID NO: 68219 - DNA, 120 bp, Homo sapiens; identical to SEQ ID NO: 53676
  misc_feature: 854 for SV(C|O) and mtDNA

SEQ ID NO: 68220 - DNA, 120 bp, Homo sapiens
  misc_feature: 853 for SV(C|O) and mtDNA
tttacactcacaacaccctaggctcactaaacattctactactcactctcactgcccaagaactatcaaactcctgagccaacaacttaatatgactagcttacacaatagcttttatag

SEQ ID NO: 68221 - DNA, 120 bp, Homo sapiens; identical to SEQ ID NO: 53103
  misc_feature: 853 for SV(C|O) and mtDNA

SEQ ID NO: 68222 - DNA, 120 bp, Homo sapiens
  misc_feature: 853 for SV(C|O) and mtDNA
ttccttctaggcatagtagggaggatatgaggtgtgagcggtatactagtattcctagaagtgagatggtaaatgctagtataatatttatgtaaatgaggggcatttggtaaatatgat

SEQ ID NO: 68223 - DNA, 120 bp, Homo sapiens; identical to SEQ ID NO: 53211
  misc_feature: 853 for SV(C|O) and mtDNA

SEQ ID NO: 68224 - DNA, 120 bp, Homo sapiens; identical to SEQ ID NO: 53561
  misc_feature: 853 for SV(C|O) and mtDNA

SEQ ID NO: 68225 - DNA, 120 bp, Homo sapiens; identical to SEQ ID NO: 51897
  misc_feature: 853 for SV(C|O) and mtDNA

SEQ ID NO: 68226 - DNA, 120 bp, Homo sapiens
  misc_feature: 853 for SV(C|O) and mtDNA
tccaatgtctttgtggtttgtagagaatagtcaacggtcggcgaacatcagtgggggtgaggtaaaatggctgagtgaagcattggactgtaaatctaaagacaggggttaggcctcttt

SEQ ID NO: 68227 - DNA, 120 bp, Homo sapiens; identical to SEQ ID NO: 53125
  misc_feature: 853 for SV(C|O) and mtDNA

SEQ ID NO: 68228 - DNA, 120 bp, Homo sapiens
  misc_feature: 853 for SV(C|O) and mtDNA
gtcactcataggccagacttagggctaggatgatgattaataagagggatgacataactattagtggtaggttagttgtttgtagggctcatggtaggggtaaaaggagggcaatttcta

SEQ ID NO: 68229 - DNA, 120 bp, Homo sapiens; identical to SEQ ID NO: 53487
  misc_feature: 853 for SV(C|O) and mtDNA

SEQ ID NO: 68230 - DNA, 120 bp, Homo sapiens
  misc_feature: 853 for SV(C|O) and mtDNA
atgatttgagaagccttcgcttcgaagcgaaaagtcctaatagtagaagaaccctccataaacctggagtgactatatggatgccccccaccctaccacacattcgaagaacccgtatac

SEQ ID NO: 68231 - DNA, 120 bp, Homo sapiens; identical to SEQ ID NO: 57517
  misc_feature: 853 for SV(C|O) and mtDNA

SEQ ID NO: 68232 - DNA, 120 bp, Homo sapiens
  misc_feature: 853 for SV(C|O) and mtDNA
gagaaagggacgcgggcgggggatatagggtcgaagccgcactcgtaaggggtggatttttctatgtagccgttgagttgtggtagtcaaaatgtaataattattagtagtaaggctagg

SEQ ID NO: 68233 - DNA, 120 bp, Homo sapiens; identical to SEQ ID NO: 56477
  misc_feature: 853 for SV(C|O) and mtDNA

SEQ ID NO: 68234 - DNA, 120 bp, Homo sapiens
  misc_feature: 853 for SV(C|O) and mtDNA
aatatgaaaatcacctcggagctggtaaaaagaggcctaacccctgtctttagatttacagtccaatgcttcactcagccattttacctcacccccactgatgttcgccgaccgttgact

SEQ ID NO: 68235 - DNA, 120 bp, Homo sapiens; identical to SEQ ID NO: 51755
  misc_feature: 852 for SV(C|O) and mtDNA

SEQ ID NO: 68236 - DNA, 120 bp, Homo sapiens
  misc_feature: 852 for SV(C|O) and mtDNA
gatatgaggtgtgagcggtatactagtattcctagaagtgagatggtaaatgctagtataatatttatgtaaatgaggggcatttggtaaatatgattatcataatttaatgagtcgaaa

SEQ ID NO: 68237 - DNA, 120 bp, Homo sapiens
  misc_feature: 852 for SV(C|O) and mtDNA
ctaaacccacactcaacagaaacaaagcatacatcattattctcgcacggactacaaccacgaccaatgatatgaaaaaccatcgttgtatttcaactacaagaacaccaatgaccccaa

SEQ ID NO: 68238 - DNA, 120 bp, Homo sapiens
  misc_feature: 852 for SV(C|O) and mtDNA
ataattttcatgatttgagaagccttcgcttcgaagcgaaaagtcctaatagtagaagaaccctccataaacctggagtgactatatggatgccccccaccctaccacacattcgaagaa

SEQ ID NO: 68239 - DNA, 120 bp, Homo sapiens
  misc_feature: 852 for SV(C|O) and mtDNA
cccctcacaatcatggcaagccaacgccacttatccagtgaaccactatcacgaaaaaaactctacctctctatactaatctccctacaaatctccttaattataacattcacagccaca

SEQ ID NO: 68240 - DNA, 120 bp, Homo sapiens
  misc_feature: 852 for SV(C|O) and mtDNA
ggtgagggaggtaggtggtagtttgtgtttaatatttttagttgggtgatgaggaatagtgtaaggagtatgggggtaattatggtgggccatacggtagtatttagttggggcatttca

SEQ ID NO: 68241 - DNA, 120 bp, Homo sapiens
  misc_feature: 852 for SV(C|O) and mtDNA
tctttaactccaccattagcacccaaagctaagattctaatttaaactattctctgttctttcatggggaagcagatttgggtgccacccaagtattgactcacccatcaacaaccgcta

SEQ ID NO: 68242 - DNA, 120 bp, Homo sapiens
  misc_feature: 852 for SV(C|O) and mtDNA
tcatgatttgagaagccttcgcttcgaagcgaaaagtcctaatagtagaagaaccctccataaacctggagtgactatatggatgccccccaccctaccacacattcgaagaacccgtat

SEQ ID NO: 68243 - DNA, 120 bp, Homo sapiens; identical to SEQ ID NO: 53282
  misc_feature: 852 for SV(C|O) and mtDNA

SEQ ID NO: 68244 - DNA, 120 bp, Homo sapiens
  misc_feature: 852 for SV(C|O) and mtDNA
tatagtgttccaatgtctttgtggtttgtagagaatagtcaacggtcggcgaacatcagtgggggtgaggtaaaatggctgagtgaagcattggactgtaaatctaaagacaggggttag

SEQ ID NO: 68245 - DNA, 120 bp, Homo sapiens
  misc_feature: 852 for SV(C|O) and mtDNA
taacaacctattccaactgttcatcggctgagagggcgtaggaattatatccttcttgctcatcagttgatgatacgcccgagcagatgccaacacagcagccattcaagcaatcctata

SEQ ID NO: 68246 - DNA, 120 bp, Homo sapiens; identical to SEQ ID NO: 54952
  misc_feature: 852 for SV(C|O) and mtDNA

SEQ ID NO: 68247 - DNA, 120 bp, Homo sapiens
  misc_feature: 852 for SV(C|O) and mtDNA
gtgttccaatgtctttgtggtttgtagagaatagtcaacggtcggcgaacatcagtgggggtgaggtaaaatggctgagtgaagcattggactgtaaatctaaagacaggggttaggcct

SEQ ID NO: 68248 - DNA, 120 bp, Homo sapiens
  misc_feature: 852 for SV(C|O) and mtDNA
gtagggaggatatgaggtgtgagcggtatactagtattcctagaagtgagatggtaaatgctagtataatatttatgtaaatgaggggcatttggtaaatatgattatcataatttaatg

SEQ ID NO: 68249 - DNA, 120 bp, Homo sapiens
  misc_feature: 852 for SV(C|O) and mtDNA
atgtctttgtggtttgtagagaatagtcaacggtcggcgaacatcagtgggggtgaggtaaaatggctgagtgaagcattggactgtaaatctaaagacaggggttaggcctctttttac

SEQ ID NO: 68250 - DNA, 120 bp, Homo sapiens
  misc_feature: 852 for SV(C|O) and mtDNA
ggtatagtgttccaatgtctttgtggtttgtagagaatagtcaacggtcggcgaacatcagtgggggtgaggtaaaatggctgagtgaagcattggactgtaaatctaaagacaggggtt

SEQ ID NO: 68251 - DNA, 120 bp, Homo sapiens; identical to SEQ ID NO: 51854
  misc_feature: 852 for SV(C|O) and mtDNA

SEQ ID NO: 68252 - DNA, 120 bp, Homo sapiens
  misc_feature: 852 for SV(C|O) and mtDNA
actcacaacaccctaggctcactaaacattctactactcactctcactgcccaagaactatcaaactcctgagccaacaacttaatatgactagcttacacaatagcttttatagtaaag

SEQ ID NO: 68253 - DNA, 120 bp, Homo sapiens
  misc_feature: 852 for SV(C|O) and mtDNA
atatgaggtgtgagcggtatactagtattcctagaagtgagatggtaaatgctagtataatatttatgtaaatgaggggcatttggtaaatatgattatcataatttaatgagtcgaaat

SEQ ID NO: 68254 - DNA, 120 bp, Homo sapiens
  misc_feature: 852 for SV(C|O) and mtDNA
attagcacccaaagctaagattctaatttaaactattctctgttctttcatggggaagcagatttgggtgccacccaagtattgactcacccatcaacaaccgctatgtaattcgtacat

SEQ ID NO: 68255 - DNA, 120 bp, Homo sapiens; identical to SEQ ID NO: 57286
  misc_feature: 852 for SV(C|O) and mtDNA

SEQ ID NO: 68256 - DNA, 120 bp, Homo sapiens
  misc_feature: 852 for SV(C|O) and mtDNA
aataagaaggtaatagctactaagaagaattttatggagaaagggacgcgggcgggggatatagggtcgaagccgcactcgtaaggggtggatttttctatgtagccgttgagttgtggt

SEQ ID NO: 68257 - DNA, 120 bp, Homo sapiens
  misc_feature: 851 for SV(C|O) and mtDNA
agcctataatcactgcgcccgctcataaggggatggccatggctaggtttatagatagttgggtggttggtgtaaatgagtgaggcaggagtccgaggaggttagttgtggcaataaaaa

SEQ ID NO: 68258 - DNA, 120 bp, Homo sapiens; identical to SEQ ID NO: 51838
  misc_feature: 851 for SV(C|O) and mtDNA

SEQ ID NO: 68259 - DNA, 120 bp, Homo sapiens
  misc_feature: 851 for SV(C|O) and mtDNA
acactcacaacaccctaggctcactaaacattctactactcactctcactgcccaagaactatcaaactcctgagccaacaacttaatatgactagcttacacaatagcttttatagtaa

SEQ ID NO: 68260 - DNA, 120 bp, Homo sapiens
  misc_feature: 851 for SV(C|O) and mtDNA
actaaacccacactcaacagaaacaaagcatacatcattattctcgcacggactacaaccacgaccaatgatatgaaaaaccatcgttgtatttcaactacaagaacaccaatgacccca

SEQ ID NO: 68261 - DNA, 120 bp, Homo sapiens; identical to SEQ ID NO: 55312
  misc_feature: 851 for SV(C|O) and mtDNA

SEQ ID NO: 68262 - DNA, 120 bp, Homo sapiens
  misc_feature: 851 for SV(C|O) and mtDNA
tagggaggatatgaggtgtgagcggtatactagtattcctagaagtgagatggtaaatgctagtataatatttatgtaaatgaggggcatttggtaaatatgattatcataatttaatga

SEQ ID NO: 68263 - DNA, 120 bp, Homo sapiens
  misc_feature: 851 for SV(C|O) and mtDNA
tcatcaatagatggagacatacagaaatagtcaaaccacgtctacaaaatgccagtatcaggcggcggcttcgaagccaaagtgatgtttggatgtaaagtgaaatattagttggcggat

SEQ ID NO: 68264 - DNA, 120 bp, Homo sapiens
  misc_feature: 851 for SV(C|O) and mtDNA
ctgcgcccgctcataaggggatggccatggctaggtttatagatagttgggtggttggtgtaaatgagtgaggcaggagtccgaggaggttagttgtggcaataaaaatgattaaggata

SEQ ID NO: 68265 - DNA, 120 bp, Homo sapiens
  misc_feature: 851 for SV(C|O) and mtDNA
tagtaatggggtttgtggggttttcttctaagccttctcctatttatgggggtttagtattgattgttagcggtgtggtcgggtgtgttattattctgaattttgggggaggttatatgg

SEQ ID NO: 68266 - DNA, 120 bp, Homo sapiens
  misc_feature: 851 for SV(C|O) and mtDNA
tacccaaataaagtataggcgatagaaattgaaacctggcgcaatagatatagtaccgcaagggaaagatgaaaaattataaccaagcataatacagcaaggactaacccctataccttc

SEQ ID NO: 68267 - DNA, 120 bp, Homo sapiens
  misc_feature: 851 for SV(C|O) and mtDNA
gacaaagttatgaaatggtttttctaatacctttttgaaaaagtcatggaggccatggggttggcttgaaaccagctttggggggttcgattccttccttttttgtctagattttatgta

SEQ ID NO: 68268 - DNA, 120 bp, Homo sapiens; identical to SEQ ID NO: 53926
  misc_feature: 851 for SV(C|O) and mtDNA

SEQ ID NO: 68269 - DNA, 120 bp, Homo sapiens
  misc_feature: 851 for SV(C|O) and mtDNA
gtatagtgttccaatgtctttgtggtttgtagagaatagtcaacggtcggcgaacatcagtgggggtgaggtaaaatggctgagtgaagcattggactgtaaatctaaagacaggggtta

SEQ ID NO: 68270 - DNA, 120 bp, Homo sapiens; identical to SEQ ID NO: 55156
  misc_feature: 851 for SV(C|O) and mtDNA

SEQ ID NO: 68271 - DNA, 120 bp, Homo sapiens
  misc_feature: 851 for SV(C|O) and mtDNA
gtgtaagctagtcatattaagttgttggctcaggagtttgatagttcttgggcagtgagagtgagtagtagaatgtttagtgagcctagggtgttgtgagtgtaaattagtgcgatgagt

SEQ ID NO: 68272 - DNA, 120 bp, Homo sapiens
  misc_feature: 851 for SV(C|O) and mtDNA
gggaggatatgaggtgtgagcggtatactagtattcctagaagtgagatggtaaatgctagtataatatttatgtaaatgaggggcatttggtaaatatgattatcataatttaatgagt

SEQ ID NO: 68273 - DNA, 120 bp, Homo sapiens; identical to SEQ ID NO: 55107
  misc_feature: 851 for SV(C|O) and mtDNA

SEQ ID NO: 68274 - DNA, 120 bp, Homo sapiens; identical to SEQ ID NO: 53866
  misc_feature: 851 for SV(C|O) and mtDNA

SEQ ID NO: 68275 - DNA, 120 bp, Homo sapiens
  misc_feature: 850 for SV(C|O) and mtDNA
gaaagcctataatcactgcgcccgctcataaggggatggccatggctaggtttatagatagttgggtggttggtgtaaatgagtgaggcaggagtccgaggaggttagttgtggcaataa

SEQ ID NO: 68276 - DNA, 120 bp, Homo sapiens; identical to SEQ ID NO: 51783
  misc_feature: 850 for SV(C|O) and mtDNA

SEQ ID NO: 68277 - DNA, 120 bp, Homo sapiens
  misc_feature: 850 for SV(C|O) and mtDNA
gcctaaaagcagccaccaattaagaaagcgttcaagctcaacacccactacctaaaaaatcccaaacatataactgaactcctcacacccaattggaccaatctatcaccctatagaaga

SEQ ID NO: 68278 - DNA, 120 bp, Homo sapiens; identical to SEQ ID NO: 53154
  misc_feature: 850 for SV(C|O) and mtDNA

SEQ ID NO: 68279 - DNA, 120 bp, Homo sapiens
  misc_feature: 850 for SV(C|O) and mtDNA
tcactgcgcccgctcataaggggatggccatggctaggtttatagatagttgggtggttggtgtaaatgagtgaggcaggagtccgaggaggttagttgtggcaataaaaatgattaagg

SEQ ID NO: 68280 - DNA, 120 bp, Homo sapiens
  misc_feature: 850 for SV(C|O) and mtDNA
gctaacaacctattccaactgttcatcggctgagagggcgtaggaattatatccttcttgctcatcagttgatgatacgcccgagcagatgccaacacagcagccattcaagcaatccta

SEQ ID NO: 68281 - DNA, 120 bp, Homo sapiens; identical to SEQ ID NO: 51847
  misc_feature: 850 for SV(C|O) and mtDNA

SEQ ID NO: 68282 - DNA, 120 bp, Homo sapiens
  misc_feature: 850 for SV(C|O) and mtDNA
taagaaggtaatagctactaagaagaattttatggagaaagggacgcgggcgggggatatagggtcgaagccgcactcgtaaggggtggatttttctatgtagccgttgagttgtggtag

SEQ ID NO: 68283 - DNA, 120 bp, Homo sapiens
  misc_feature: 850 for SV(C|O) and mtDNA
cggagctggtaaaaagaggcctaacccctgtctttagatttacagtccaatgcttcactcagccattttacctcacccccactgatgttcgccgaccgttgactattctctacaaaccac

SEQ ID NO: 68284 - DNA, 120 bp, Homo sapiens
  misc_feature: 850 for SV(C|O) and mtDNA
gtaatgtacgaattacatagcggttgttgatgggtgagtcaatacttgggtggcacccaaatctgcttccccatgaaagaacagagaatagtttaaattagaatcttagctttgggtgct

SEQ ID NO: 68285 - DNA, 120 bp, Homo sapiens; identical to SEQ ID NO: 54175
  misc_feature: 850 for SV(C|O) and mtDNA

SEQ ID NO: 68286 - DNA, 120 bp, Homo sapiens
  misc_feature: 850 for SV(C|O) and mtDNA
ggtgcgataaataataggatgaggcaggaatcaaagacagatactgcgacatagggtgctccggctccagcgtctcgcaatgctatcgcgtgcacaccccccagacgaaaataccaaatg

SEQ ID NO: 68287 - DNA, 120 bp, Homo sapiens
  misc_feature: 850 for SV(C|O) and mtDNA
gcatacaggactaggaagcagataaggaaaatgattatgagggcgtgatcatgaaaggtgataagctcttctatgataggggaagtagcgtcttgtagacctacttgcgctgcatgtgcc

SEQ ID NO: 68288 - DNA, 120 bp, Homo sapiens
  misc_feature: 850 for SV(C|O) and mtDNA
aggactaggaagcagataaggaaaatgattatgagggcgtgatcatgaaaggtgataagctcttctatgataggggaagtagcgtcttgtagacctacttgcgctgcatgtgccattaag

SEQ ID NO: 68289 - DNA, 120 bp, Homo sapiens
  misc_feature: 850 for SV(C|O) and mtDNA
caaatgcatgggctgtgacgataacgttgtagatgtggtcgttacctagaaggttgcctggctggcccagctcggctcgaataaggaggcttagagctgtgcctaggactccagctcatg

SEQ ID NO: 68290 - DNA, 120 bp, Homo sapiens
  misc_feature: 850 for SV(C|O) and mtDNA
aaccaaaacatcagattgtgaatctgacaacagaggcttacgaccccttatttaccgagaaagctcacaagaactgctaactcatgcccccatgtctaacaacatggctttctcaacttt

SEQ ID NO: 68291 - DNA, 120 bp, Homo sapiens
  misc_feature: 849 for SV(C|O) and mtDNA
ttttaagagtactgcggcaagtactattgacccagcgatgggggcttcgacatgggctttagggagtcataagtggagtccgtaaagaggtatctttactataaaagctattgtgtaagc

SEQ ID NO: 68292 - DNA, 120 bp, Homo sapiens
  misc_feature: 849 for SV(C|O) and mtDNA
aaaaagtctttaactccaccattagcacccaaagctaagattctaatttaaactattctctgttctttcatggggaagcagatttgggtgccacccaagtattgactcacccatcaacaa

SEQ ID NO: 68293 - DNA, 120 bp, Homo sapiens
  misc_feature: 849 for SV(C|O) and mtDNA
ttggtgagggaggtaggtggtagtttgtgtttaatatttttagttgggtgatgaggaatagtgtaaggagtatgggggtaattatggtgggccatacggtagtatttagttggggcattt

SEQ ID NO: 68294 - DNA, 120 bp, Homo sapiens; identical to SEQ ID NO: 54806
  misc_feature: 849 for SV(C|O) and mtDNA

SEQ ID NO: 68295 - DNA, 120 bp, Homo sapiens
  misc_feature: 849 for SV(C|O) and mtDNA
ttctagttaattcattatgcagaaggtataggggttagtccttgctgtattatgcttggttataatttttcatctttcccttgcggtactatatctattgcgccaggtttcaatttctat

SEQ ID NO: 68296 - DNA, 120 bp, Homo sapiens; identical to SEQ ID NO: 53565
  misc_feature: 849 for SV(C|O) and mtDNA

SEQ ID NO: 68297 - DNA, 120 bp, Homo sapiens
  misc_feature: 849 for SV(C|O) and mtDNA
tacactcacaacaccctaggctcactaaacattctactactcactctcactgcccaagaactatcaaactcctgagccaacaacttaatatgactagcttacacaatagcttttatagta

SEQ ID NO: 68298 - DNA, 120 bp, Homo sapiens
  misc_feature: 849 for SV(C|O) and mtDNA
accattagcacccaaagctaagattctaatttaaactattctctgttctttcatggggaagcagatttgggtgccacccaagtattgactcacccatcaacaaccgctatgtaattcgta

SEQ ID NO: 68299 - DNA, 120 bp, Homo sapiens
  misc_feature: 849 for SV(C|O) and mtDNA
gtctttaactccaccattagcacccaaagctaagattctaatttaaactattctctgttctttcatggggaagcagatttgggtgccacccaagtattgactcacccatcaacaaccgct

SEQ ID NO: 68300 - DNA, 120 bp, Homo sapiens
  misc_feature: 849 for SV(C|O) and mtDNA
gcaattcaatatgaaaatcacctcggagctggtaaaaagaggcctaacccctgtctttagatttacagtccaatgcttcactcagccattttacctcacccccactgatgttcgccgacc

SEQ ID NO: 68301 - DNA, 120 bp, Homo sapiens; identical to SEQ ID NO: 56768
  misc_feature: 849 for SV(C|O) and mtDNA

SEQ ID NO: 68302 - DNA, 120 bp, Homo sapiens
  misc_feature: 849 for SV(C|O) and mtDNA
accgctaacaacctattccaactgttcatcggctgagagggcgtaggaattatatccttcttgctcatcagttgatgatacgcccgagcagatgccaacacagcagccattcaagcaatc

SEQ ID NO: 68303 - DNA, 120 bp, Homo sapiens
  misc_feature: 849 for SV(C|O) and mtDNA
ctaacaacctattccaactgttcatcggctgagagggcgtaggaattatatccttcttgctcatcagttgatgatacgcccgagcagatgccaacacagcagccattcaagcaatcctat

SEQ ID NO: 68304 - DNA, 120 bp, Homo sapiens
  misc_feature: 849 for SV(C|O) and mtDNA
cgtattggggtcattggtgttcttgtagttgaaatacaacgatggtttttcatatcattggtcgtggttgtagtccgtgcgagaataatgatgtatgctttgtttctgttgagtgtgggt

SEQ ID NO: 68305 - DNA, 120 bp, Homo sapiens
  misc_feature: 849 for SV(C|O) and mtDNA
aggtgcgataaataataggatgaggcaggaatcaaagacagatactgcgacatagggtgctccggctccagcgtctcgcaatgctatcgcgtgcacaccccccagacgaaaataccaaat

SEQ ID NO: 68306 - DNA, 120 bp, Homo sapiens; identical to SEQ ID NO: 52968
  misc_feature: 849 for SV(C|O) and mtDNA

SEQ ID NO: 68307 - DNA, 120 bp, Homo sapiens; identical to SEQ ID NO: 54704
  misc_feature: 848 for SV(C|O) and mtDNA

SEQ ID NO: 68308 - DNA, 120 bp, Homo sapiens; identical to SEQ ID NO: 54833
  misc_feature: 848 for SV(C|O) and mtDNA

SEQ ID NO: 68309 - DNA, 120 bp, Homo sapiens
  misc_feature: 848 for SV(C|O) and mtDNA
ttaagaaagcgttcaagctcaacacccactacctaaaaaatcccaaacatataactgaactcctcacacccaattggaccaatctatcaccctatagaagaactaatgttagtataagta

SEQ ID NO: 68310 - DNA, 120 bp, Homo sapiens; identical to SEQ ID NO: 52656
  misc_feature: 848 for SV(C|O) and mtDNA

SEQ ID NO: 68311 - DNA, 120 bp, Homo sapiens
  misc_feature: 848 for SV(C|O) and mtDNA
tgtaagctagtcatattaagttgttggctcaggagtttgatagttcttgggcagtgagagtgagtagtagaatgtttagtgagcctagggtgttgtgagtgtaaattagtgcgatgagta

SEQ ID NO: 68312 - DNA, 120 bp, Homo sapiens; identical to SEQ ID NO: 51747
  misc_feature: 848 for SV(C|O) and mtDNA

SEQ ID NO: 68313 - DNA, 120 bp, Homo sapiens
  misc_feature: 848 for SV(C|O) and mtDNA
attccttctaggcatagtagggaggatatgaggtgtgagcggtatactagtattcctagaagtgagatggtaaatgctagtataatatttatgtaaatgaggggcatttggtaaatatga

SEQ ID NO: 68314 - DNA, 120 bp, Homo sapiens
  misc_feature: 848 for SV(C|O) and mtDNA
taccgctaacaacctattccaactgttcatcggctgagagggcgtaggaattatatccttcttgctcatcagttgatgatacgcccgagcagatgccaacacagcagccattcaagcaat

SEQ ID NO: 68315 - DNA, 120 bp, Homo sapiens; identical to SEQ ID NO: 54126
  misc_feature: 848 for SV(C|O) and mtDNA

SEQ ID NO: 68316 - DNA, 120 bp, Homo sapiens; identical to SEQ ID NO: 55127
  misc_feature: 848 for SV(C|O) and mtDNA

SEQ ID NO: 68317 - DNA, 120 bp, Homo sapiens; identical to SEQ ID NO: 53357
  misc_feature: 848 for SV(C|O) and mtDNA

SEQ ID NO: 68318 - DNA, 120 bp, Homo sapiens
  misc_feature: 848 for SV(C|O) and mtDNA
ccctcacaatcatggcaagccaacgccacttatccagtgaaccactatcacgaaaaaaactctacctctctatactaatctccctacaaatctccttaattataacattcacagccacag

SEQ ID NO: 68319 - DNA, 120 bp, Homo sapiens
  misc_feature: 848 for SV(C|O) and mtDNA
aaagggacgcgggcgggggatatagggtcgaagccgcactcgtaaggggtggatttttctatgtagccgttgagttgtggtagtcaaaatgtaataattattagtagtaaggctaggagg

SEQ ID NO: 68320 - DNA, 120 bp, Homo sapiens
  misc_feature: 848 for SV(C|O) and mtDNA
aggtatagtgttccaatgtctttgtggtttgtagagaatagtcaacggtcggcgaacatcagtgggggtgaggtaaaatggctgagtgaagcattggactgtaaatctaaagacaggggt

SEQ ID NO: 68321 - DNA, 120 bp, Homo sapiens; identical to SEQ ID NO: 52984
  misc_feature: 847 for SV(C|O) and mtDNA

SEQ ID NO: 68322 - DNA, 120 bp, Homo sapiens; identical to SEQ ID NO: 51782
  misc_feature: 847 for SV(C|O) and mtDNA

SEQ ID NO: 68323 - DNA, 120 bp, Homo sapiens
  misc_feature: 847 for SV(C|O) and mtDNA
ttacccaaataaagtataggcgatagaaattgaaacctggcgcaatagatatagtaccgcaagggaaagatgaaaaattataaccaagcataatacagcaaggactaacccctatacctt

SEQ ID NO: 68324 - DNA, 120 bp, Homo sapiens; identical to SEQ ID NO: 52306
  misc_feature: 847 for SV(C|O) and mtDNA

SEQ ID NO: 68325 - DNA, 120 bp, Homo sapiens
  misc_feature: 847 for SV(C|O) and mtDNA
attattccttctaggcatagtagggaggatatgaggtgtgagcggtatactagtattcctagaagtgagatggtaaatgctagtataatatttatgtaaatgaggggcatttggtaaata

SEQ ID NO: 68326 - DNA, 120 bp, Homo sapiens
  misc_feature: 847 for SV(C|O) and mtDNA
tattccttctaggcatagtagggaggatatgaggtgtgagcggtatactagtattcctagaagtgagatggtaaatgctagtataatatttatgtaaatgaggggcatttggtaaatatg

SEQ ID NO: 68327 - DNA, 120 bp, Homo sapiens
  misc_feature: 847 for SV(C|O) and mtDNA
tataatcactgcgcccgctcataaggggatggccatggctaggtttatagatagttgggtggttggtgtaaatgagtgaggcaggagtccgaggaggttagttgtggcaataaaaatgat

SEQ ID NO: 68328 - DNA, 120 bp, Homo sapiens
  misc_feature: 847 for SV(C|O) and mtDNA
ggtcctaaactaccaaacctgcattaaaaatttcggttggggcgacctcggagcagaacccaacctccgagcagtacatgctaagacttcaccagtcaaagcgaactactatactcaatt

SEQ ID NO: 68329 - DNA, 120 bp, Homo sapiens; identical to SEQ ID NO: 55363
  misc_feature: 847 for SV(C|O) and mtDNA

SEQ ID NO: 68330 - DNA, 120 bp, Homo sapiens
  misc_feature: 847 for SV(C|O) and mtDNA
ggcatacaggactaggaagcagataaggaaaatgattatgagggcgtgatcatgaaaggtgataagctcttctatgataggggaagtagcgtcttgtagacctacttgcgctgcatgtgc

SEQ ID NO: 68331 - DNA, 120 bp, Homo sapiens; identical to SEQ ID NO: 55249
  misc_feature: 847 for SV(C|O) and mtDNA

SEQ ID NO: 68332 - DNA, 120 bp, Homo sapiens
  misc_feature: 846 for SV(C|O) and mtDNA
gtgggacttctaggggatttagcggggtgatgcctgttgggggccagtgccctcctaattggggggtaggggctaggctggagtggtaaaaggctcagaaaaatcctgcgaagaaaaaaa

SEQ ID NO: 68333 - DNA, 120 bp, Homo sapiens; identical to SEQ ID NO: 54631
  misc_feature: 846 for SV(C|O) and mtDNA

SEQ ID NO: 68334 - DNA, 120 bp, Homo sapiens
  misc_feature: 846 for SV(C|O) and mtDNA
ttgcaattcaatatgaaaatcacctcggagctggtaaaaagaggcctaacccctgtctttagatttacagtccaatgcttcactcagccattttacctcacccccactgatgttcgccga

SEQ ID NO: 68335 - DNA, 120 bp, Homo sapiens
  misc_feature: 846 for SV(C|O) and mtDNA
ttactgccagccaccatgaatattgtacggtaccataaatacttgaccacctgtagtacataaaaacccaatccacatcaaaaccccctccccatgcttacaagcaagtacagcaatcaa

SEQ ID NO: 68336 - DNA, 120 bp, Homo sapiens
  misc_feature: 846 for SV(C|O) and mtDNA
ctcacaatcatggcaagccaacgccacttatccagtgaaccactatcacgaaaaaaactctacctctctatactaatctccctacaaatctccttaattataacattcacagccacagaa

SEQ ID NO: 68337 - DNA, 120 bp, Homo sapiens
  misc_feature: 846 for SV(C|O) and mtDNA
ggatatgaggtgtgagcggtatactagtattcctagaagtgagatggtaaatgctagtataatatttatgtaaatgaggggcatttggtaaatatgattatcataatttaatgagtcgaa

SEQ ID NO: 68338 - DNA, 120 bp, Homo sapiens; identical to SEQ ID NO: 53442
  misc_feature: 846 for SV(C|O) and mtDNA

SEQ ID NO: 68339 - DNA, 120 bp, Homo sapiens; identical to SEQ ID NO: 51803
  misc_feature: 846 for SV(C|O) and mtDNA

SEQ ID NO: 68340 - DNA, 120 bp, Homo sapiens; identical to SEQ ID NO: 52711
  misc_feature: 846 for SV(C|O) and mtDNA

SEQ ID NO: 68341 - DNA, 120 bp, Homo sapiens; identical to SEQ ID NO: 52712
  misc_feature: 846 for SV(C|O) and mtDNA

SEQ ID NO: 68342 - DNA, 120 bp, Homo sapiens; identical to SEQ ID NO: 54446
  misc_feature: 846 for SV(C|O) and mtDNA

SEQ ID NO: 68343 - DNA, 120 bp, Homo sapiens
  misc_feature: 846 for SV(C|O) and mtDNA
tatgaaaatcacctcggagctggtaaaaagaggcctaacccctgtctttagatttacagtccaatgcttcactcagccattttacctcacccccactgatgttcgccgaccgttgactat

SEQ ID NO: 68344 - DNA, 120 bp, Homo sapiens; identical to SEQ ID NO: 56836
  misc_feature: 846 for SV(C|O) and mtDNA

SEQ ID NO: 68345 - DNA, 120 bp, Homo sapiens
  misc_feature: 846 for SV(C|O) and mtDNA
gataaggaaaatgattatgagggcgtgatcatgaaaggtgataagctcttctatgataggggaagtagcgtcttgtagacctacttgcgctgcatgtgccattaagatatataggattta

SEQ ID NO: 68346 - DNA, 120 bp, Homo sapiens
  misc_feature: 846 for SV(C|O) and mtDNA
gttttaagagtactgcggcaagtactattgacccagcgatgggggcttcgacatgggctttagggagtcataagtggagtccgtaaagaggtatctttactataaaagctattgtgtaag

SEQ ID NO: 68347 - DNA, 120 bp, Homo sapiens; identical to SEQ ID NO: 51836
  misc_feature: 846 for SV(C|O) and mtDNA

SEQ ID NO: 68348 - DNA, 120 bp, Homo sapiens
  misc_feature: 846 for SV(C|O) and mtDNA
aacaacctattccaactgttcatcggctgagagggcgtaggaattatatccttcttgctcatcagttgatgatacgcccgagcagatgccaacacagcagccattcaagcaatcctatac

SEQ ID NO: 68349 - DNA, 120 bp, Homo sapiens
  misc_feature: 846 for SV(C|O) and mtDNA
ccgctaacaacctattccaactgttcatcggctgagagggcgtaggaattatatccttcttgctcatcagttgatgatacgcccgagcagatgccaacacagcagccattcaagcaatcc

SEQ ID NO: 68350 - DNA, 120 bp, Homo sapiens; identical to SEQ ID NO: 53961
  misc_feature: 846 for SV(C|O) and mtDNA

SEQ ID NO: 68351 - DNA, 120 bp, Homo sapiens
  misc_feature: 846 for SV(C|O) and mtDNA
aacacacccgaccacaccgctaacaatcaatactaaacccccataaataggagaaggcttagaagaaaaccccacaaaccccattactaaacccacactcaacagaaacaaagcatacat

SEQ ID NO: 68352 - DNA, 120 bp, Homo sapiens
  misc_feature: 846 for SV(C|O) and mtDNA
actgcgcccgctcataaggggatggccatggctaggtttatagatagttgggtggttggtgtaaatgagtgaggcaggagtccgaggaggttagttgtggcaataaaaatgattaaggat

SEQ ID NO: 68353 - DNA, 120 bp, Homo sapiens; identical to SEQ ID NO: 53474
  misc_feature: 845 for SV(C|O) and mtDNA

SEQ ID NO: 68354 - DNA, 120 bp, Homo sapiens; identical to SEQ ID NO: 51945
  misc_feature: 845 for SV(C|O) and mtDNA

SEQ ID NO: 68355 - DNA, 120 bp, Homo sapiens
  misc_feature: 845 for SV(C|O) and mtDNA
ttaataattttcatgatttgagaagccttcgcttcgaagcgaaaagtcctaatagtagaagaaccctccataaacctggagtgactatatggatgccccccaccctaccacacattcgaa

SEQ ID NO: 68356 - DNA, 120 bp, Homo sapiens
  misc_feature: 845 for SV(C|O) and mtDNA
ttacactcacaacaccctaggctcactaaacattctactactcactctcactgcccaagaactatcaaactcctgagccaacaacttaatatgactagcttacacaatagcttttatagt

SEQ ID NO: 68357 - DNA, 120 bp, Homo sapiens
  misc_feature: 845 for SV(C|O) and mtDNA
tgcgcccgctcataaggggatggccatggctaggtttatagatagttgggtggttggtgtaaatgagtgaggcaggagtccgaggaggttagttgtggcaataaaaatgattaaggatac

SEQ ID NO: 68358 - DNA, 120 bp, Homo sapiens
  misc_feature: 845 for SV(C|O) and mtDNA
agatactgcgacatagggtgctccggctccagcgtctcgcaatgctatcgcgtgcacaccccccagacgaaaataccaaatgcatggagagctcccgtgagtggttaatagggtgataga

SEQ ID NO: 68359 - DNA, 120 bp, Homo sapiens; identical to SEQ ID NO: 53743
  misc_feature: 845 for SV(C|O) and mtDNA

SEQ ID NO: 68360 - DNA, 120 bp, Homo sapiens; identical to SEQ ID NO: 56604
  misc_feature: 845 for SV(C|O) and mtDNA

SEQ ID NO: 68361 - DNA, 120 bp, Homo sapiens
  misc_feature: 845 for SV(C|O) and mtDNA
gatttcgactcattaaattatgataatcatatttaccaaatgcccctcatttacataaatattatactagcatttaccatctcacttctaggaatactagtataccgctcacacctcata

SEQ ID NO: 68362 - DNA, 120 bp, Homo sapiens; identical to SEQ ID NO: 53231
  misc_feature: 845 for SV(C|O) and mtDNA

SEQ ID NO: 68363 - DNA, 120 bp, Homo sapiens; identical to SEQ ID NO: 51807
  misc_feature: 845 for SV(C|O) and mtDNA

SEQ ID NO: 68364 - DNA, 120 bp, Homo sapiens
  misc_feature: 845 for SV(C|O) and mtDNA
cttctatgataggggaagtagcgtcttgtagacctacttgcgctgcatgtgccattaagatatataggatttagcctataatttaactttgacaaagttatgaaatggtttttctaatac

SEQ ID NO: 68365 - DNA, 120 bp, Homo sapiens; identical to SEQ ID NO: 53875
  misc_feature: 845 for SV(C|O) and mtDNA

SEQ ID NO: 68366 - DNA, 120 bp, Homo sapiens; identical to SEQ ID NO: 53204
  misc_feature: 845 for SV(C|O) and mtDNA

SEQ ID NO: 68367 - DNA, 120 bp, Homo sapiens
  misc_feature: 845 for SV(C|O) and mtDNA
agtaatgtacgaattacatagcggttgttgatgggtgagtcaatacttgggtggcacccaaatctgcttccccatgaaagaacagagaatagtttaaattagaatcttagctttgggtgc

SEQ ID NO: 68368 - DNA, 120 bp, Homo sapiens
  misc_feature: 845 for SV(C|O) and mtDNA
gaggcaggaatcaaagacagatactgcgacatagggtgctccggctccagcgtctcgcaatgctatcgcgtgcacaccccccagacgaaaataccaaatgcatggagagctcccgtgagt

SEQ ID NO: 68369 - DNA, 120 bp, Homo sapiens
  misc_feature: 845 for SV(C|O) and mtDNA
caaagacagatactgcgacatagggtgctccggctccagcgtctcgcaatgctatcgcgtgcacaccccccagacgaaaataccaaatgcatggagagctcccgtgagtggttaataggg

SEQ ID NO: 68370 - DNA, 120 bp, Homo sapiens; identical to SEQ ID NO: 54511
  misc_feature: 845 for SV(C|O) and mtDNA

SEQ ID NO: 68371 - DNA, 120 bp, Homo sapiens
  misc_feature: 844 for SV(C|O) and mtDNA
aaagcctataatcactgcgcccgctcataaggggatggccatggctaggtttatagatagttgggtggttggtgtaaatgagtgaggcaggagtccgaggaggttagttgtggcaataaa

SEQ ID NO: 68372 - DNA, 120 bp, Homo sapiens
  misc_feature: 844 for SV(C|O) and mtDNA
ttaccgctaacaacctattccaactgttcatcggctgagagggcgtaggaattatatccttcttgctcatcagttgatgatacgcccgagcagatgccaacacagcagccattcaagcaa

SEQ ID NO: 68373 - DNA, 120 bp, Homo sapiens
  misc_feature: 844 for SV(C|O) and mtDNA
ttccaactgttcatcggctgagagggcgtaggaattatatccttcttgctcatcagttgatgatacgcccgagcagatgccaacacagcagccattcaagcaatcctatacaaccgtatc

SEQ ID NO: 68374 - DNA, 120 bp, Homo sapiens
  misc_feature: 844 for SV(C|O) and mtDNA
acaacctattccaactgttcatcggctgagagggcgtaggaattatatccttcttgctcatcagttgatgatacgcccgagcagatgccaacacagcagccattcaagcaatcctataca

SEQ ID NO: 68375 - DNA, 120 bp, Homo sapiens
  misc_feature: 844 for SV(C|O) and mtDNA
tactaaacccacactcaacagaaacaaagcatacatcattattctcgcacggactacaaccacgaccaatgatatgaaaaaccatcgttgtatttcaactacaagaacaccaatgacccc

SEQ ID NO: 68376 - DNA, 120 bp, Homo sapiens
  misc_feature: 844 for SV(C|O) and mtDNA
taataagaaggtaatagctactaagaagaattttatggagaaagggacgcgggcgggggatatagggtcgaagccgcactcgtaaggggtggatttttctatgtagccgttgagttgtgg

SEQ ID NO: 68377 - DNA, 120 bp, Homo sapiens
  misc_feature: 844 for SV(C|O) and mtDNA
cccatagtaggcctaaaagcagccaccaattaagaaagcgttcaagctcaacacccactacctaaaaaatcccaaacatataactgaactcctcacacccaattggaccaatctatcacc

SEQ ID NO: 68378 - DNA, 120 bp, Homo sapiens
  misc_feature: 844 for SV(C|O) and mtDNA
gcgcccgctcataaggggatggccatggctaggtttatagatagttgggtggttggtgtaaatgagtgaggcaggagtccgaggaggttagttgtggcaataaaaatgattaaggatact

SEQ ID NO: 68379 - DNA, 120 bp, Homo sapiens
  misc_feature: 844 for SV(C|O) and mtDNA
aaacatcagattgtgaatctgacaacagaggcttacgaccccttatttaccgagaaagctcacaagaactgctaactcatgcccccatgtctaacaacatggctttctcaacttttaaag

SEQ ID NO: 68380 - DNA, 120 bp, Homo sapiens
  misc_feature: 844 for SV(C|O) and mtDNA
ccctcctagccttactactaataattattacattttgactaccacaactcaacggctacatagaaaaatccaccccttacgagtgcggcttcgaccctatatcccccgcccgcgtccctt

SEQ ID NO: 68381 - DNA, 120 bp, Homo sapiens; identical to SEQ ID NO: 62595
  misc_feature: 843 for SV(C|O) and mtDNA

SEQ ID NO: 68382 - DNA, 120 bp, Homo sapiens; identical to SEQ ID NO: 52403
  misc_feature: 843 for SV(C|O) and mtDNA

SEQ ID NO: 68383 - DNA, 120 bp, Homo sapiens
  misc_feature: 843 for SV(C|O) and mtDNA
ttcaatatgaaaatcacctcggagctggtaaaaagaggcctaacccctgtctttagatttacagtccaatgcttcactcagccattttacctcacccccactgatgttcgccgaccgttg

SEQ ID NO: 68384 - DNA, 120 bp, Homo sapiens
  misc_feature: 843 for SV(C|O) and mtDNA
tgcgacatagggtgctccggctccagcgtctcgcaatgctatcgcgtgcacaccccccagacgaaaataccaaatgcatggagagctcccgtgagtggttaatagggtgatagacctgtg

SEQ ID NO: 68385 - DNA, 120 bp, Homo sapiens
  misc_feature: 843 for SV(C|O) and mtDNA
ctcacaacaccctaggctcactaaacattctactactcactctcactgcccaagaactatcaaactcctgagccaacaacttaatatgactagcttacacaatagcttttatagtaaaga

SEQ ID NO: 68386 - DNA, 120 bp, Homo sapiens
  misc_feature: 843 for SV(C|O) and mtDNA
cactgcgcccgctcataaggggatggccatggctaggtttatagatagttgggtggttggtgtaaatgagtgaggcaggagtccgaggaggttagttgtggcaataaaaatgattaagga

SEQ ID NO: 68387 - DNA, 120 bp, Homo sapiens
  misc_feature: 843 for SV(C|O) and mtDNA
ctataatcactgcgcccgctcataaggggatggccatggctaggtttatagatagttgggtggttggtgtaaatgagtgaggcaggagtccgaggaggttagttgtggcaataaaaatga

SEQ ID NO: 68388 - DNA, 120 bp, Homo sapiens
  misc_feature: 843 for SV(C|O) and mtDNA
cctcggagctggtaaaaagaggcctaacccctgtctttagatttacagtccaatgcttcactcagccattttacctcacccccactgatgttcgccgaccgttgactattctctacaaac

SEQ ID NO: 68389 - DNA, 120 bp, Homo sapiens; identical to SEQ ID NO: 53209
  misc_feature: 843 for SV(C|O) and mtDNA

SEQ ID NO: 68390 - DNA, 120 bp, Homo sapiens
  misc_feature: 842 for SV(C|O) and mtDNA
ttttcatgatttgagaagccttcgcttcgaagcgaaaagtcctaatagtagaagaaccctccataaacctggagtgactatatggatgccccccaccctaccacacattcgaagaacccg

SEQ ID NO: 68391 - DNA, 120 bp, Homo sapiens
  misc_feature: 842 for SV(C|O) and mtDNA
tcagattgtgaatctgacaacagaggcttacgaccccttatttaccgagaaagctcacaagaactgctaactcatgcccccatgtctaacaacatggctttctcaacttttaaaggataa

SEQ ID NO: 68392 - DNA, 120 bp, Homo sapiens
  misc_feature: 842 for SV(C|O) and mtDNA
tgggacttctaggggatttagcggggtgatgcctgttgggggccagtgccctcctaattggggggtaggggctaggctggagtggtaaaaggctcagaaaaatcctgcgaagaaaaaaac

SEQ ID NO: 68393 - DNA, 120 bp, Homo sapiens
  misc_feature: 842 for SV(C|O) and mtDNA
tgcgataaataataggatgaggcaggaatcaaagacagatactgcgacatagggtgctccggctccagcgtctcgcaatgctatcgcgtgcacaccccccagacgaaaataccaaatgca

SEQ ID NO: 68394 - DNA, 120 bp, Homo sapiens
  misc_feature: 842 for SV(C|O) and mtDNA
tcactcataggccagacttagggctaggatgatgattaataagagggatgacataactattagtggtaggttagttgtttgtagggctcatggtaggggtaaaaggagggcaatttctag

SEQ ID NO: 68395 - DNA, 120 bp, Homo sapiens; identical to SEQ ID NO: 54256
  misc_feature: 842 for SV(C|O) and mtDNA

SEQ ID NO: 68396 - DNA, 120 bp, Homo sapiens
  misc_feature: 842 for SV(C|O) and mtDNA
gcgataaataataggatgaggcaggaatcaaagacagatactgcgacatagggtgctccggctccagcgtctcgcaatgctatcgcgtgcacaccccccagacgaaaataccaaatgcat

SEQ ID NO: 68397 - DNA, 120 bp, Homo sapiens
  misc_feature: 842 for SV(C|O) and mtDNA
gattgtgaatctgacaacagaggcttacgaccccttatttaccgagaaagctcacaagaactgctaactcatgcccccatgtctaacaacatggctttctcaacttttaaaggataacag

SEQ ID NO: 68398 - DNA, 120 bp, Homo sapiens
  misc_feature: 842 for SV(C|O) and mtDNA
cgctaacaacctattccaactgttcatcggctgagagggcgtaggaattatatccttcttgctcatcagttgatgatacgcccgagcagatgccaacacagcagccattcaagcaatcct

SEQ ID NO: 68399 - DNA, 120 bp, Homo sapiens
  misc_feature: 842 for SV(C|O) and mtDNA
attagtgcgatgagtaggggaagggagcctactagggtgtagaataggaagtatgtgcctgcgttcaggcgttctggctggttgcctcatcgggtgatgatagccaaggtggggataagt

SEQ ID NO: 68400 - DNA, 120 bp, Homo sapiens
  misc_feature: 842 for SV(C|O) and mtDNA
agggaggtaggtggtagtttgtgtttaatatttttagttgggtgatgaggaatagtgtaaggagtatgggggtaattatggtgggccatacggtagtatttagttggggcatttcactgt

SEQ ID NO: 68401 - DNA, 120 bp, Homo sapiens
  misc_feature: 841 for SV(C|O) and mtDNA
tttgcaattcaatatgaaaatcacctcggagctggtaaaaagaggcctaacccctgtctttagatttacagtccaatgcttcactcagccattttacctcacccccactgatgttcgccg

SEQ ID NO: 68402 - DNA, 120 bp, Homo sapiens
  misc_feature: 841 for SV(C|O) and mtDNA
ttcatgatttgagaagccttcgcttcgaagcgaaaagtcctaatagtagaagaaccctccataaacctggagtgactatatggatgccccccaccctaccacacattcgaagaacccgta

SEQ ID NO: 68403 - DNA, 120 bp, Homo sapiens; identical to SEQ ID NO: 56338
  misc_feature: 841 for SV(C|O) and mtDNA

SEQ ID NO: 68404 - DNA, 120 bp, Homo sapiens
  misc_feature: 841 for SV(C|O) and mtDNA
tgatagtattattccttctaggcatagtagggaggatatgaggtgtgagcggtatactagtattcctagaagtgagatggtaaatgctagtataatatttatgtaaatgaggggcatttg

SEQ ID NO: 68405 - DNA, 120 bp, Homo sapiens
  misc_feature: 841 for SV(C|O) and mtDNA
ggactaggaagcagataaggaaaatgattatgagggcgtgatcatgaaaggtgataagctcttctatgataggggaagtagcgtcttgtagacctacttgcgctgcatgtgccattaaga

SEQ ID NO: 68406 - DNA, 120 bp, Homo sapiens
  misc_feature: 841 for SV(C|O) and mtDNA
atcagattgtgaatctgacaacagaggcttacgaccccttatttaccgagaaagctcacaagaactgctaactcatgcccccatgtctaacaacatggctttctcaacttttaaaggata

SEQ ID NO: 68407 - DNA, 120 bp, Homo sapiens
  misc_feature: 841 for SV(C|O) and mtDNA
atatgaaaatcacctcggagctggtaaaaagaggcctaacccctgtctttagatttacagtccaatgcttcactcagccattttacctcacccccactgatgttcgccgaccgttgacta

SEQ ID NO: 68408 - DNA, 120 bp, Homo sapiens
  misc_feature: 841 for SV(C|O) and mtDNA
taggtatagtgttccaatgtctttgtggtttgtagagaatagtcaacggtcggcgaacatcagtgggggtgaggtaaaatggctgagtgaagcattggactgtaaatctaaagacagggg

SEQ ID NO: 68409 - DNA, 120 bp, Homo sapiens
  misc_feature: 841 for SV(C|O) and mtDNA
gatagtattattccttctaggcatagtagggaggatatgaggtgtgagcggtatactagtattcctagaagtgagatggtaaatgctagtataatatttatgtaaatgaggggcatttgg

SEQ ID NO: 68410 - DNA, 120 bp, Homo sapiens; identical to SEQ ID NO: 52860
  misc_feature: 841 for SV(C|O) and mtDNA

SEQ ID NO: 68411 - DNA, 120 bp, Homo sapiens
  misc_feature: 841 for SV(C|O) and mtDNA
acaaagttatgaaatggtttttctaatacctttttgaaaaagtcatggaggccatggggttggcttgaaaccagctttggggggttcgattccttccttttttgtctagattttatgtat

SEQ ID NO: 68412 - DNA, 120 bp, Homo sapiens
  misc_feature: 841 for SV(C|O) and mtDNA
aaatggctttatgtactatgtgctgttaagggtgagtaggtttgttggtatcctagtgggtgaggggtggctttggagttgcagttgatgtgtgatagttgagggttgattgctgtactt

SEQ ID NO: 68413 - DNA, 120 bp, Homo sapiens
  misc_feature: 840 for SV(C|O) and mtDNA
aagcctataatcactgcgcccgctcataaggggatggccatggctaggtttatagatagttgggtggttggtgtaaatgagtgaggcaggagtccgaggaggttagttgtggcaataaaa

SEQ ID NO: 68414 - DNA, 120 bp, Homo sapiens; identical to SEQ ID NO: 51786
  misc_feature: 840 for SV(C|O) and mtDNA

SEQ ID NO: 68415 - DNA, 120 bp, Homo sapiens
  misc_feature: 840 for SV(C|O) and mtDNA
gtttaaccaaaacatcagattgtgaatctgacaacagaggcttacgaccccttatttaccgagaaagctcacaagaactgctaactcatgcccccatgtctaacaacatggctttctcaa

SEQ ID NO: 68416 - DNA, 120 bp, Homo sapiens
  misc_feature: 840 for SV(C|O) and mtDNA
ttctatgataggggaagtagcgtcttgtagacctacttgcgctgcatgtgccattaagatatataggatttagcctataatttaactttgacaaagttatgaaatggtttttctaatacc

SEQ ID NO: 68417 - DNA, 120 bp, Homo sapiens
  misc_feature: 840 for SV(C|O) and mtDNA
tgtgaatctgacaacagaggcttacgaccccttatttaccgagaaagctcacaagaactgctaactcatgcccccatgtctaacaacatggctttctcaacttttaaaggataacagcta

SEQ ID NO: 68418 - DNA, 120 bp, Homo sapiens; identical to SEQ ID NO: 51877
  misc_feature: 840 for SV(C|O) and mtDNA

SEQ ID NO: 68419 - DNA, 120 bp, Homo sapiens
  misc_feature: 840 for SV(C|O) and mtDNA
cctcacaatcatggcaagccaacgccacttatccagtgaaccactatcacgaaaaaaactctacctctctatactaatctccctacaaatctccttaattataacattcacagccacaga

SEQ ID NO: 68420 - DNA, 120 bp, Homo sapiens
  misc_feature: 840 for SV(C|O) and mtDNA
aggatatgaggtgtgagcggtatactagtattcctagaagtgagatggtaaatgctagtataatatttatgtaaatgaggggcatttggtaaatatgattatcataatttaatgagtcga

SEQ ID NO: 68421 - DNA, 120 bp, Homo sapiens
  misc_feature: 840 for SV(C|O) and mtDNA
tccatctattgatgagggtcttactcttttagtataaatagtaccgttaacttccaattaactagttttgacaacattcaaaaaagagtaataaacttcgccttaattttaataatcaac

SEQ ID NO: 68422 - DNA, 120 bp, Homo sapiens
  misc_feature: 840 for SV(C|O) and mtDNA
tattgatgagggtcttactcttttagtataaatagtaccgttaacttccaattaactagttttgacaacattcaaaaaagagtaataaacttcgccttaattttaataatcaacaccctc

SEQ ID NO: 68423 - DNA, 120 bp, Homo sapiens
  misc_feature: 840 for SV(C|O) and mtDNA
gttaattaattttattagggggttaattttgcgtattggggtcattggtgttcttgtagttgaaatacaacgatggtttttcatatcattggtcgtggttgtagtccgtgcgagaataat

SEQ ID NO: 68424 - DNA, 120 bp, Homo sapiens; identical to SEQ ID NO: 55100
  misc_feature: 840 for SV(C|O) and mtDNA

SEQ ID NO: 68425 - DNA, 120 bp, Homo sapiens
  misc_feature: 840 for SV(C|O) and mtDNA
cgataaataataggatgaggcaggaatcaaagacagatactgcgacatagggtgctccggctccagcgtctcgcaatgctatcgcgtgcacaccccccagacgaaaataccaaatgcatg

SEQ ID NO: 68426 - DNA, 120 bp, Homo sapiens
  misc_feature: 840 for SV(C|O) and mtDNA
caccattagcacccaaagctaagattctaatttaaactattctctgttctttcatggggaagcagatttgggtgccacccaagtattgactcacccatcaacaaccgctatgtaattcgt

SEQ ID NO: 68427 - DNA, 120 bp, Homo sapiens
  misc_feature: 839 for SV(C|O) and mtDNA
tttggtgagggaggtaggtggtagtttgtgtttaatatttttagttgggtgatgaggaatagtgtaaggagtatgggggtaattatggtgggccatacggtagtatttagttggggcatt

SEQ ID NO: 68428 - DNA, 120 bp, Homo sapiens; identical to SEQ ID NO: 55212
  misc_feature: 839 for SV(C|O) and mtDNA

SEQ ID NO: 68429 - DNA, 120 bp, Homo sapiens
  misc_feature: 839 for SV(C|O) and mtDNA
tcaatatgaaaatcacctcggagctggtaaaaagaggcctaacccctgtctttagatttacagtccaatgcttcactcagccattttacctcacccccactgatgttcgccgaccgttga

SEQ ID NO: 68430 - DNA, 120 bp, Homo sapiens
  misc_feature: 839 for SV(C|O) and mtDNA
cgaaagcctataatcactgcgcccgctcataaggggatggccatggctaggtttatagatagttgggtggttggtgtaaatgagtgaggcaggagtccgaggaggttagttgtggcaata

SEQ ID NO: 68431 - DNA, 120 bp, Homo sapiens
  misc_feature: 839 for SV(C|O) and mtDNA
gtgcgataaataataggatgaggcaggaatcaaagacagatactgcgacatagggtgctccggctccagcgtctcgcaatgctatcgcgtgcacaccccccagacgaaaataccaaatgc

SEQ ID NO: 68432 - DNA, 120 bp, Homo sapiens; identical to SEQ ID NO: 53136
  misc_feature: 839 for SV(C|O) and mtDNA

SEQ ID NO: 68433 - DNA, 120 bp, Homo sapiens
  misc_feature: 839 for SV(C|O) and mtDNA
attgatgagggtcttactcttttagtataaatagtaccgttaacttccaattaactagttttgacaacattcaaaaaagagtaataaacttcgccttaattttaataatcaacaccctcc

SEQ ID NO: 68434 - DNA, 120 bp, Homo sapiens; identical to SEQ ID NO: 53422
  misc_feature: 839 for SV(C|O) and mtDNA

SEQ ID NO: 68435 - DNA, 120 bp, Homo sapiens
  misc_feature: 839 for SV(C|O) and mtDNA
agtaatggggtttgtggggttttcttctaagccttctcctatttatgggggtttagtattgattgttagcggtgtggtcgggtgtgttattattctgaattttgggggaggttatatggg

SEQ ID NO: 68436 - DNA, 120 bp, Homo sapiens; identical to SEQ ID NO: 56555
  misc_feature: 839 for SV(C|O) and mtDNA

SEQ ID NO: 68437 - DNA, 120 bp, Homo sapiens
  misc_feature: 839 for SV(C|O) and mtDNA
aataataagaaggtaatagctactaagaagaattttatggagaaagggacgcgggcgggggatatagggtcgaagccgcactcgtaaggggtggatttttctatgtagccgttgagttgt

SEQ ID NO: 68438 - DNA, 120 bp, Homo sapiens; identical to SEQ ID NO: 53658
  misc_feature: 838 for SV(C|O) and mtDNA

SEQ ID NO: 68439 - DNA, 120 bp, Homo sapiens
  misc_feature: 838 for SV(C|O) and mtDNA
tctatgataggggaagtagcgtcttgtagacctacttgcgctgcatgtgccattaagatatataggatttagcctataatttaactttgacaaagttatgaaatggtttttctaatacct

SEQ ID NO: 68440 - DNA, 120 bp, Homo sapiens
  misc_feature: 838 for SV(C|O) and mtDNA
tcaaagacagatactgcgacatagggtgctccggctccagcgtctcgcaatgctatcgcgtgcacaccccccagacgaaaataccaaatgcatggagagctcccgtgagtggttaatagg

SEQ ID NO: 68441 - DNA, 120 bp, Homo sapiens
  misc_feature: 838 for SV(C|O) and mtDNA
aatcaaagacagatactgcgacatagggtgctccggctccagcgtctcgcaatgctatcgcgtgcacaccccccagacgaaaataccaaatgcatggagagctcccgtgagtggttaata

SEQ ID NO: 68442 - DNA, 120 bp, Homo sapiens
  misc_feature: 838 for SV(C|O) and mtDNA
ggggttttagttaaatgtcctttgaagtatacttgaggagggtgacgggcggtgtgtacgcgcttcagggccctgttcaactaagcactctactctcagtttactgctaaatccaccttc

SEQ ID NO: 68443 - DNA, 120 bp, Homo sapiens
  misc_feature: 838 for SV(C|O) and mtDNA
ggacttctaggggatttagcggggtgatgcctgttgggggccagtgccctcctaattggggggtaggggctaggctggagtggtaaaaggctcagaaaaatcctgcgaagaaaaaaactt

SEQ ID NO: 68444 - DNA, 120 bp, Homo sapiens
  misc_feature: 838 for SV(C|O) and mtDNA
attgtgaatctgacaacagaggcttacgaccccttatttaccgagaaagctcacaagaactgctaactcatgcccccatgtctaacaacatggctttctcaacttttaaaggataacagc

SEQ ID NO: 68445 - DNA, 120 bp, Homo sapiens
  misc_feature: 838 for SV(C|O) and mtDNA
gcgaaagcctataatcactgcgcccgctcataaggggatggccatggctaggtttatagatagttgggtggttggtgtaaatgagtgaggcaggagtccgaggaggttagttgtggcaat

SEQ ID NO: 68446 - DNA, 120 bp, Homo sapiens
  misc_feature: 838 for SV(C|O) and mtDNA
gagtgtaaattagtgcgatgagtaggggaagggagcctactagggtgtagaataggaagtatgtgcctgcgttcaggcgttctggctggttgcctcatcgggtgatgatagccaaggtgg

SEQ ID NO: 68447 - DNA, 120 bp, Homo sapiens
  misc_feature: 838 for SV(C|O) and mtDNA
gaggatatgaggtgtgagcggtatactagtattcctagaagtgagatggtaaatgctagtataatatttatgtaaatgaggggcatttggtaaatatgattatcataatttaatgagtcg

SEQ ID NO: 68448 - DNA, 120 bp, Homo sapiens
  misc_feature: 838 for SV(C|O) and mtDNA
ctgcgacatagggtgctccggctccagcgtctcgcaatgctatcgcgtgcacaccccccagacgaaaataccaaatgcatggagagctcccgtgagtggttaatagggtgatagacctgt

SEQ ID NO: 68449 - DNA, 120 bp, Homo sapiens
  misc_feature: 838 for SV(C|O) and mtDNA
atttctagttaattcattatgcagaaggtataggggttagtccttgctgtattatgcttggttataatttttcatctttcccttgcggtactatatctattgcgccaggtttcaatttct

SEQ ID NO: 68450 - DNA, 120 bp, Homo sapiens
  misc_feature: 838 for SV(C|O) and mtDNA
aaccccccaaagctggtttcaagccaaccccatggcctccatgactttttcaaaaaggtattagaaaaaccatttcataactttgtcaaagttaaattataggctaaatcctatatatct

SEQ ID NO: 68451 - DNA, 120 bp, Homo sapiens
  misc_feature: 838 for SV(C|O) and mtDNA
acttctaggggatttagcggggtgatgcctgttgggggccagtgccctcctaattggggggtaggggctaggctggagtggtaaaaggctcagaaaaatcctgcgaagaaaaaaacttct

SEQ ID NO: 68452 - DNA, 120 bp, Homo sapiens
  misc_feature: 837 for SV(C|O) and mtDNA
ttgtgaatctgacaacagaggcttacgaccccttatttaccgagaaagctcacaagaactgctaactcatgcccccatgtctaacaacatggctttctcaacttttaaaggataacagct

SEQ ID NO: 68453 - DNA, 120 bp, Homo sapiens
  misc_feature: 837 for SV(C|O) and mtDNA
tgagtgtaaattagtgcgatgagtaggggaagggagcctactagggtgtagaataggaagtatgtgcctgcgttcaggcgttctggctggttgcctcatcgggtgatgatagccaaggtg

SEQ ID NO: 68454 - DNA, 120 bp, Homo sapiens
  misc_feature: 837 for SV(C|O) and mtDNA
tccaactgttcatcggctgagagggcgtaggaattatatccttcttgctcatcagttgatgatacgcccgagcagatgccaacacagcagccattcaagcaatcctatacaaccgtatcg

SEQ ID NO: 68455 - DNA, 120 bp, Homo sapiens
  misc_feature: 837 for SV(C|O) and mtDNA
agaaaaagtctttaactccaccattagcacccaaagctaagattctaatttaaactattctctgttctttcatggggaagcagatttgggtgccacccaagtattgactcacccatcaac

SEQ ID NO: 68456 - DNA, 120 bp, Homo sapiens
  misc_feature: 837 for SV(C|O) and mtDNA
atctattgatgagggtcttactcttttagtataaatagtaccgttaacttccaattaactagttttgacaacattcaaaaaagagtaataaacttcgccttaattttaataatcaacacc

SEQ ID NO: 68457 - DNA, 120 bp, Homo sapiens
  misc_feature: 837 for SV(C|O) and mtDNA
caccctcctagccttactactaataattattacattttgactaccacaactcaacggctacatagaaaaatccaccccttacgagtgcggcttcgaccctatatcccccgcccgcgtccc

SEQ ID NO: 68458 - DNA, 120 bp, Homo sapiens; identical to SEQ ID NO: 56988
  misc_feature: 837 for SV(C|O) and mtDNA

SEQ ID NO: 68459 - DNA, 120 bp, Homo sapiens; identical to SEQ ID NO: 56950
  misc_feature: 837 for SV(C|O) and mtDNA

SEQ ID NO: 68460 - DNA, 120 bp, Homo sapiens
  misc_feature: 837 for SV(C|O) and mtDNA
aattagtgcgatgagtaggggaagggagcctactagggtgtagaataggaagtatgtgcctgcgttcaggcgttctggctggttgcctcatcgggtgatgatagccaaggtggggataag

SEQ ID NO: 68461 - DNA, 120 bp, Homo sapiens
  misc_feature: 837 for SV(C|O) and mtDNA
aacatcagattgtgaatctgacaacagaggcttacgaccccttatttaccgagaaagctcacaagaactgctaactcatgcccccatgtctaacaacatggctttctcaacttttaaagg

SEQ ID NO: 68462 - DNA, 120 bp, Homo sapiens
  misc_feature: 837 for SV(C|O) and mtDNA
attcaatatgaaaatcacctcggagctggtaaaaagaggcctaacccctgtctttagatttacagtccaatgcttcactcagccattttacctcacccccactgatgttcgccgaccgtt

SEQ ID NO: 68463 - DNA, 120 bp, Homo sapiens
  misc_feature: 837 for SV(C|O) and mtDNA
atcgaaccccccaaagctggtttcaagccaaccccatggcctccatgactttttcaaaaaggtattagaaaaaccatttcataactttgtcaaagttaaattataggctaaatcctatat

SEQ ID NO: 68464 - DNA, 120 bp, Homo sapiens; identical to SEQ ID NO: 54052
  misc_feature: 836 for SV(C|O) and mtDNA

SEQ ID NO: 68465 - DNA, 120 bp, Homo sapiens
  misc_feature: 836 for SV(C|O) and mtDNA
aaattagtgcgatgagtaggggaagggagcctactagggtgtagaataggaagtatgtgcctgcgttcaggcgttctggctggttgcctcatcgggtgatgatagccaaggtggggataa

SEQ ID NO: 68466 - DNA, 120 bp, Homo sapiens
  misc_feature: 836 for SV(C|O) and mtDNA
gttaccgctaacaacctattccaactgttcatcggctgagagggcgtaggaattatatccttcttgctcatcagttgatgatacgcccgagcagatgccaacacagcagccattcaagca

SEQ ID NO: 68467 - DNA, 120 bp, Homo sapiens; identical to SEQ ID NO: 51788
  misc_feature: 836 for SV(C|O) and mtDNA

SEQ ID NO: 68468 - DNA, 120 bp, Homo sapiens; identical to SEQ ID NO: 53566
  misc_feature: 836 for SV(C|O) and mtDNA

SEQ ID NO: 68469 - DNA, 120 bp, Homo sapiens
  misc_feature: 836 for SV(C|O) and mtDNA
caatatgaaaatcacctcggagctggtaaaaagaggcctaacccctgtctttagatttacagtccaatgcttcactcagccattttacctcacccccactgatgttcgccgaccgttgac

SEQ ID NO: 68470 - DNA, 120 bp, Homo sapiens
  misc_feature: 836 for SV(C|O) and mtDNA
ctacaagcctcagagtacttcgagtctcccttcaccatttccgacggcatctacggctcaacattttttgtagccacaggcttccacggacttcacgtcattattggctcaactttcctc

SEQ ID NO: 68471 - DNA, 120 bp, Homo sapiens; identical to SEQ ID NO: 54823
  misc_feature: 836 for SV(C|O) and mtDNA

SEQ ID NO: 68472 - DNA, 120 bp, Homo sapiens
  misc_feature: 836 for SV(C|O) and mtDNA
atgataggatgtttcatgtggtgtatgcatcggggtagtccgagtaacgtcggggcattccggataggccgagaaagtgttgtgggaagaaagttagatttacgccgatgaatatgatag

SEQ ID NO: 68473 - DNA, 120 bp, Homo sapiens
  misc_feature: 835 for SV(C|O) and mtDNA
tttaggagtgggacttctaggggatttagcggggtgatgcctgttgggggccagtgccctcctaattggggggtaggggctaggctggagtggtaaaaggctcagaaaaatcctgcgaag

SEQ ID NO: 68474 - DNA, 120 bp, Homo sapiens
  misc_feature: 835 for SV(C|O) and mtDNA
tttacccaaataaagtataggcgatagaaattgaaacctggcgcaatagatatagtaccgcaagggaaagatgaaaaattataaccaagcataatacagcaaggactaacccctatacct

SEQ ID NO: 68475 - DNA, 120 bp, Homo sapiens
  misc_feature: 835 for SV(C|O) and mtDNA
tttaagagtactgcggcaagtactattgacccagcgatgggggcttcgacatgggctttagggagtcataagtggagtccgtaaagaggtatctttactataaaagctattgtgtaagct

SEQ ID NO: 68476 - DNA, 120 bp, Homo sapiens
  misc_feature: 835 for SV(C|O) and mtDNA
ccatctattgatgagggtcttactcttttagtataaatagtaccgttaacttccaattaactagttttgacaacattcaaaaaagagtaataaacttcgccttaattttaataatcaaca

SEQ ID NO: 68477 - DNA, 120 bp, Homo sapiens
  misc_feature: 835 for SV(C|O) and mtDNA
agattgtgaatctgacaacagaggcttacgaccccttatttaccgagaaagctcacaagaactgctaactcatgcccccatgtctaacaacatggctttctcaacttttaaaggataaca

SEQ ID NO: 68478 - DNA, 120 bp, Homo sapiens
  misc_feature: 835 for SV(C|O) and mtDNA
tgatttcgactcattaaattatgataatcatatttaccaaatgcccctcatttacataaatattatactagcatttaccatctcacttctaggaatactagtataccgctcacacctcat

SEQ ID NO: 68479 - DNA, 120 bp, Homo sapiens
  misc_feature: 835 for SV(C|O) and mtDNA
agtttaaccaaaacatcagattgtgaatctgacaacagaggcttacgaccccttatttaccgagaaagctcacaagaactgctaactcatgcccccatgtctaacaacatggctttctca

SEQ ID NO: 68480 - DNA, 120 bp, Homo sapiens
  misc_feature: 835 for SV(C|O) and mtDNA
gccttcgcttcgaagcgaaaagtcctaatagtagaagaaccctccataaacctggagtgactatatggatgccccccaccctaccacacattcgaagaacccgtatacataaaatctaga

SEQ ID NO: 68481 - DNA, 120 bp, Homo sapiens
  misc_feature: 835 for SV(C|O) and mtDNA
acatcagattgtgaatctgacaacagaggcttacgaccccttatttaccgagaaagctcacaagaactgctaactcatgcccccatgtctaacaacatggctttctcaacttttaaagga

SEQ ID NO: 68482 - DNA, 120 bp, Homo sapiens
  misc_feature: 835 for SV(C|O) and mtDNA
agacagatactgcgacatagggtgctccggctccagcgtctcgcaatgctatcgcgtgcacaccccccagacgaaaataccaaatgcatggagagctcccgtgagtggttaatagggtga

SEQ ID NO: 68483 - DNA, 120 bp, Homo sapiens
  misc_feature: 835 for SV(C|O) and mtDNA
aggccagacttagggctaggatgatgattaataagagggatgacataactattagtggtaggttagttgtttgtagggctcatggtaggggtaaaaggagggcaatttctagatcaaata

SEQ ID NO: 68484 - DNA, 120 bp, Homo sapiens
  misc_feature: 835 for SV(C|O) and mtDNA
catctattgatgagggtcttactcttttagtataaatagtaccgttaacttccaattaactagttttgacaacattcaaaaaagagtaataaacttcgccttaattttaataatcaacac

SEQ ID NO: 68485 - DNA, 120 bp, Homo sapiens
  misc_feature: 835 for SV(C|O) and mtDNA
acccctcacaatcatggcaagccaacgccacttatccagtgaaccactatcacgaaaaaaactctacctctctatactaatctccctacaaatctccttaattataacattcacagccac

SEQ ID NO: 68486 - DNA, 120 bp, Homo sapiens
  misc_feature: 835 for SV(C|O) and mtDNA
acccatagtaggcctaaaagcagccaccaattaagaaagcgttcaagctcaacacccactacctaaaaaatcccaaacatataactgaactcctcacacccaattggaccaatctatcac

SEQ ID NO: 68487 - DNA, 120 bp, Homo sapiens
  misc_feature: 835 for SV(C|O) and mtDNA
atttacccaaataaagtataggcgatagaaattgaaacctggcgcaatagatatagtaccgcaagggaaagatgaaaaattataaccaagcataatacagcaaggactaacccctatacc

SEQ ID NO: 68488 - DNA, 120 bp, Homo sapiens
  misc_feature: 835 for SV(C|O) and mtDNA
ggctttatgtactatgtgctgttaagggtgagtaggtttgttggtatcctagtgggtgaggggtggctttggagttgcagttgatgtgtgatagttgagggttgattgctgtacttgctt

SEQ ID NO: 68489 - DNA, 120 bp, Homo sapiens; identical to SEQ ID NO: 53112
  misc_feature: 835 for SV(C|O) and mtDNA

SEQ ID NO: 68490 - DNA, 120 bp, Homo sapiens
  misc_feature: 835 for SV(C|O) and mtDNA
gacttctaggggatttagcggggtgatgcctgttgggggccagtgccctcctaattggggggtaggggctaggctggagtggtaaaaggctcagaaaaatcctgcgaagaaaaaaacttc

SEQ ID NO: 68491 - DNA, 120 bp, Homo sapiens; identical to SEQ ID NO: 53385
  misc_feature: 835 for SV(C|O) and mtDNA

SEQ ID NO: 68492 - DNA, 120 bp, Homo sapiens
  misc_feature: 835 for SV(C|O) and mtDNA
cctacaagcctcagagtacttcgagtctcccttcaccatttccgacggcatctacggctcaacattttttgtagccacaggcttccacggacttcacgtcattattggctcaactttcct

SEQ ID NO: 68493 - DNA, 120 bp, Homo sapiens
  misc_feature: 835 for SV(C|O) and mtDNA
acaaatgcatgggctgtgacgataacgttgtagatgtggtcgttacctagaaggttgcctggctggcccagctcggctcgaataaggaggcttagagctgtgcctaggactccagctcat

SEQ ID NO: 68494 - DNA, 120 bp, Homo sapiens
  misc_feature: 834 for SV(C|O) and mtDNA
tttctagttaattcattatgcagaaggtataggggttagtccttgctgtattatgcttggttataatttttcatctttcccttgcggtactatatctattgcgccaggtttcaatttcta

SEQ ID NO: 68495 - DNA, 120 bp, Homo sapiens
  misc_feature: 834 for SV(C|O) and mtDNA
tttcatgatttgagaagccttcgcttcgaagcgaaaagtcctaatagtagaagaaccctccataaacctggagtgactatatggatgccccccaccctaccacacattcgaagaacccgt

SEQ ID NO: 68496 - DNA, 120 bp, Homo sapiens
  misc_feature: 834 for SV(C|O) and mtDNA
taggagtgggacttctaggggatttagcggggtgatgcctgttgggggccagtgccctcctaattggggggtaggggctaggctggagtggtaaaaggctcagaaaaatcctgcgaagaa

SEQ ID NO: 68497 - DNA, 120 bp, Homo sapiens
  misc_feature: 834 for SV(C|O) and mtDNA
tgctgtgttggcatctgctcgggcgtatcatcaactgatgagcaagaaggatataattcctacgccctctcagccgatgaacagttggaataggttgttagcggtaactaagattagtat

SEQ ID NO: 68498 - DNA, 120 bp, Homo sapiens
  misc_feature: 834 for SV(C|O) and mtDNA
caaagttatgaaatggtttttctaatacctttttgaaaaagtcatggaggccatggggttggcttgaaaccagctttggggggttcgattccttccttttttgtctagattttatgtata

SEQ ID NO: 68499 - DNA, 120 bp, Homo sapiens
  misc_feature: 834 for SV(C|O) and mtDNA
tagagcgaaagcctataatcactgcgcccgctcataaggggatggccatggctaggtttatagatagttgggtggttggtgtaaatgagtgaggcaggagtccgaggaggttagttgtgg

SEQ ID NO: 68500 - DNA, 120 bp, Homo sapiens
  misc_feature: 834 for SV(C|O) and mtDNA
cagattgtgaatctgacaacagaggcttacgaccccttatttaccgagaaagctcacaagaactgctaactcatgcccccatgtctaacaacatggctttctcaacttttaaaggataac

SEQ ID NO: 68501 - DNA, 120 bp, Homo sapiens
  misc_feature: 834 for SV(C|O) and mtDNA
gtgatagtattattccttctaggcatagtagggaggatatgaggtgtgagcggtatactagtattcctagaagtgagatggtaaatgctagtataatatttatgtaaatgaggggcattt

SEQ ID NO: 68502 - DNA, 120 bp, Homo sapiens
  misc_feature: 834 for SV(C|O) and mtDNA
gatactgcgacatagggtgctccggctccagcgtctcgcaatgctatcgcgtgcacaccccccagacgaaaataccaaatgcatggagagctcccgtgagtggttaatagggtgatagac

SEQ ID NO: 68503 - DNA, 120 bp, Homo sapiens
  misc_feature: 834 for SV(C|O) and mtDNA
gtaagctagtcatattaagttgttggctcaggagtttgatagttcttgggcagtgagagtgagtagtagaatgtttagtgagcctagggtgttgtgagtgtaaattagtgcgatgagtag

SEQ ID NO: 68504 - DNA, 120 bp, Homo sapiens
  misc_feature: 834 for SV(C|O) and mtDNA
gcccgctcataaggggatggccatggctaggtttatagatagttgggtggttggtgtaaatgagtgaggcaggagtccgaggaggttagttgtggcaataaaaatgattaaggatactag

SEQ ID NO: 68505 - DNA, 120 bp, Homo sapiens; identical to SEQ ID NO: 57500
  misc_feature: 834 for SV(C|O) and mtDNA

SEQ ID NO: 68506 - DNA, 120 bp, Homo sapiens
  misc_feature: 834 for SV(C|O) and mtDNA
acacacccgaccacaccgctaacaatcaatactaaacccccataaataggagaaggcttagaagaaaaccccacaaaccccattactaaacccacactcaacagaaacaaagcatacatc

SEQ ID NO: 68507 - DNA, 120 bp, Homo sapiens
  misc_feature: 834 for SV(C|O) and mtDNA
aatgatttcgactcattaaattatgataatcatatttaccaaatgcccctcatttacataaatattatactagcatttaccatctcacttctaggaatactagtataccgctcacacctc

SEQ ID NO: 68508 - DNA, 120 bp, Homo sapiens
  misc_feature: 834 for SV(C|O) and mtDNA
atcaaagacagatactgcgacatagggtgctccggctccagcgtctcgcaatgctatcgcgtgcacaccccccagacgaaaataccaaatgcatggagagctcccgtgagtggttaatag

SEQ ID NO: 68509 - DNA, 120 bp, Homo sapiens
  misc_feature: 834 for SV(C|O) and mtDNA
cctaaactaccaaacctgcattaaaaatttcggttggggcgacctcggagcagaacccaacctccgagcagtacatgctaagacttcaccagtcaaagcgaactactatactcaattgat

SEQ ID NO: 68510 - DNA, 120 bp, Homo sapiens
  misc_feature: 834 for SV(C|O) and mtDNA
ataataagaaggtaatagctactaagaagaattttatggagaaagggacgcgggcgggggatatagggtcgaagccgcactcgtaaggggtggatttttctatgtagccgttgagttgtg

SEQ ID NO: 68511 - DNA, 120 bp, Homo sapiens
  misc_feature: 834 for SV(C|O) and mtDNA
aatggctttatgtactatgtgctgttaagggtgagtaggtttgttggtatcctagtgggtgaggggtggctttggagttgcagttgatgtgtgatagttgagggttgattgctgtacttg

SEQ ID NO: 68512 - DNA, 120 bp, Homo sapiens
  misc_feature: 834 for SV(C|O) and mtDNA
attccaactgttcatcggctgagagggcgtaggaattatatccttcttgctcatcagttgatgatacgcccgagcagatgccaacacagcagccattcaagcaatcctatacaaccgtat

SEQ ID NO: 68513 - DNA, 120 bp, Homo sapiens
  misc_feature: 834 for SV(C|O) and mtDNA
atggtggctggcagtaatgtacgaattacatagcggttgttgatgggtgagtcaatacttgggtggcacccaaatctgcttccccatgaaagaacagagaatagtttaaattagaatctt

SEQ ID NO: 68514 - DNA, 120 bp, Homo sapiens
  misc_feature: 834 for SV(C|O) and mtDNA
accccccaaagctggtttcaagccaaccccatggcctccatgactttttcaaaaaggtattagaaaaaccatttcataactttgtcaaagttaaattataggctaaatcctatatatctt

SEQ ID NO: 68515 - DNA, 120 bp, Homo sapiens
  misc_feature: 833 for SV(C|O) and mtDNA
ttgtgagtgtaaattagtgcgatgagtaggggaagggagcctactagggtgtagaataggaagtatgtgcctgcgttcaggcgttctggctggttgcctcatcgggtgatgatagccaag

SEQ ID NO: 68516 - DNA, 120 bp, Homo sapiens
  misc_feature: 833 for SV(C|O) and mtDNA
agcgaaagcctataatcactgcgcccgctcataaggggatggccatggctaggtttatagatagttgggtggttggtgtaaatgagtgaggcaggagtccgaggaggttagttgtggcaa

SEQ ID NO: 68517 - DNA, 120 bp, Homo sapiens
  misc_feature: 833 for SV(C|O) and mtDNA
ttagtgcgatgagtaggggaagggagcctactagggtgtagaataggaagtatgtgcctgcgttcaggcgttctggctggttgcctcatcgggtgatgatagccaaggtggggataagtg

SEQ ID NO: 68518 - DNA, 120 bp, Homo sapiens
  misc_feature: 833 for SV(C|O) and mtDNA
ttacttatactaacattagttcttctatagggtgatagattggtccaattgggtgtgaggagttcagttatatgtttgggattttttaggtagtgggtgttgagcttgaacgctttctta

SEQ ID NO: 68519 - DNA, 120 bp, Homo sapiens; identical to SEQ ID NO: 55257
  misc_feature: 833 for SV(C|O) and mtDNA

SEQ ID NO: 68520 - DNA, 120 bp, Homo sapiens
  misc_feature: 833 for SV(C|O) and mtDNA
gaaaaagtctttaactccaccattagcacccaaagctaagattctaatttaaactattctctgttctttcatggggaagcagatttgggtgccacccaagtattgactcacccatcaaca

SEQ ID NO: 68521 - DNA, 120 bp, Homo sapiens; identical to SEQ ID NO: 53709
  misc_feature: 833 for SV(C|O) and mtDNA

SEQ ID NO: 68522 - DNA, 120 bp, Homo sapiens
  misc_feature: 833 for SV(C|O) and mtDNA
tactgcgacatagggtgctccggctccagcgtctcgcaatgctatcgcgtgcacaccccccagacgaaaataccaaatgcatggagagctcccgtgagtggttaatagggtgatagacct

SEQ ID NO: 68523 - DNA, 120 bp, Homo sapiens
  misc_feature: 833 for SV(C|O) and mtDNA
gggttttagttaaatgtcctttgaagtatacttgaggagggtgacgggcggtgtgtacgcgcttcagggccctgttcaactaagcactctactctcagtttactgctaaatccaccttcg

SEQ ID NO: 68524 - DNA, 120 bp, Homo sapiens
  misc_feature: 833 for SV(C|O) and mtDNA
ctcataggccagacttagggctaggatgatgattaataagagggatgacataactattagtggtaggttagttgtttgtagggctcatggtaggggtaaaaggagggcaatttctagatc

SEQ ID NO: 68525 - DNA, 120 bp, Homo sapiens
  misc_feature: 833 for SV(C|O) and mtDNA
gactaggaagcagataaggaaaatgattatgagggcgtgatcatgaaaggtgataagctcttctatgataggggaagtagcgtcttgtagacctacttgcgctgcatgtgccattaagat

SEQ ID NO: 68526 - DNA, 120 bp, Homo sapiens; identical to SEQ ID NO: 53143
  misc_feature: 833 for SV(C|O) and mtDNA

SEQ ID NO: 68527 - DNA, 120 bp, Homo sapiens
  misc_feature: 833 for SV(C|O) and mtDNA
cctattccaactgttcatcggctgagagggcgtaggaattatatccttcttgctcatcagttgatgatacgcccgagcagatgccaacacagcagccattcaagcaatcctatacaaccg

SEQ ID NO: 68528 - DNA, 120 bp, Homo sapiens; identical to SEQ ID NO: 52528
  misc_feature: 833 for SV(C|O) and mtDNA

SEQ ID NO: 68529 - DNA, 120 bp, Homo sapiens
  misc_feature: 833 for SV(C|O) and mtDNA
aagacagatactgcgacatagggtgctccggctccagcgtctcgcaatgctatcgcgtgcacaccccccagacgaaaataccaaatgcatggagagctcccgtgagtggttaatagggtg

SEQ ID NO: 68530 - DNA, 120 bp, Homo sapiens
  misc_feature: 832 for SV(C|O) and mtDNA
gagtgggacttctaggggatttagcggggtgatgcctgttgggggccagtgccctcctaattggggggtaggggctaggctggagtggtaaaaggctcagaaaaatcctgcgaagaaaaa

SEQ ID NO: 68531 - DNA, 120 bp, Homo sapiens
  misc_feature: 832 for SV(C|O) and mtDNA
aggagtgggacttctaggggatttagcggggtgatgcctgttgggggccagtgccctcctaattggggggtaggggctaggctggagtggtaaaaggctcagaaaaatcctgcgaagaaa

SEQ ID NO: 68532 - DNA, 120 bp, Homo sapiens; identical to SEQ ID NO: 53350
  misc_feature: 832 for SV(C|O) and mtDNA

SEQ ID NO: 68533 - DNA, 120 bp, Homo sapiens
  misc_feature: 832 for SV(C|O) and mtDNA
tgatgagggtcttactcttttagtataaatagtaccgttaacttccaattaactagttttgacaacattcaaaaaagagtaataaacttcgccttaattttaataatcaacaccctccta

SEQ ID NO: 68534 - DNA, 120 bp, Homo sapiens
  misc_feature: 832 for SV(C|O) and mtDNA
atgatttcgactcattaaattatgataatcatatttaccaaatgcccctcatttacataaatattatactagcatttaccatctcacttctaggaatactagtataccgctcacacctca

SEQ ID NO: 68535 - DNA, 120 bp, Homo sapiens
  misc_feature: 832 for SV(C|O) and mtDNA
tacaaatgcatgggctgtgacgataacgttgtagatgtggtcgttacctagaaggttgcctggctggcccagctcggctcgaataaggaggcttagagctgtgcctaggactccagctca

SEQ ID NO: 68536 - DNA, 120 bp, Homo sapiens
  misc_feature: 832 for SV(C|O) and mtDNA
caattcggttcagtctaatcctttttgtagtcactcataggccagacttagggctaggatgatgattaataagagggatgacataactattagtggtaggttagttgtttgtagggctca

SEQ ID NO: 68537 - DNA, 120 bp, Homo sapiens; identical to SEQ ID NO: 55718
  misc_feature: 832 for SV(C|O) and mtDNA

SEQ ID NO: 68538 - DNA, 120 bp, Homo sapiens
  misc_feature: 832 for SV(C|O) and mtDNA
gggaggtaggtggtagtttgtgtttaatatttttagttgggtgatgaggaatagtgtaaggagtatgggggtaattatggtgggccatacggtagtatttagttggggcatttcactgta

SEQ ID NO: 68539 - DNA, 120 bp, Homo sapiens
  misc_feature: 832 for SV(C|O) and mtDNA
aaagttatgaaatggtttttctaatacctttttgaaaaagtcatggaggccatggggttggcttgaaaccagctttggggggttcgattccttccttttttgtctagattttatgtatac

SEQ ID NO: 68540 - DNA, 120 bp, Homo sapiens
  misc_feature: 832 for SV(C|O) and mtDNA
agttaccgctaacaacctattccaactgttcatcggctgagagggcgtaggaattatatccttcttgctcatcagttgatgatacgcccgagcagatgccaacacagcagccattcaagc

SEQ ID NO: 68541 - DNA, 120 bp, Homo sapiens
  misc_feature: 832 for SV(C|O) and mtDNA
gacagatactgcgacatagggtgctccggctccagcgtctcgcaatgctatcgcgtgcacaccccccagacgaaaataccaaatgcatggagagctcccgtgagtggttaatagggtgat

SEQ ID NO: 68542 - DNA, 120 bp, Homo sapiens
  misc_feature: 832 for SV(C|O) and mtDNA
gaatgatttcgactcattaaattatgataatcatatttaccaaatgcccctcatttacataaatattatactagcatttaccatctcacttctaggaatactagtataccgctcacacct

SEQ ID NO: 68543 - DNA, 120 bp, Homo sapiens; identical to SEQ ID NO: 55276
  misc_feature: 832 for SV(C|O) and mtDNA

SEQ ID NO: 68544 - DNA, 120 bp, Homo sapiens
  misc_feature: 832 for SV(C|O) and mtDNA
catcagattgtgaatctgacaacagaggcttacgaccccttatttaccgagaaagctcacaagaactgctaactcatgcccccatgtctaacaacatggctttctcaacttttaaaggat

SEQ ID NO: 68545 - DNA, 120 bp, Homo sapiens
  misc_feature: 832 for SV(C|O) and mtDNA
actgcgacatagggtgctccggctccagcgtctcgcaatgctatcgcgtgcacaccccccagacgaaaataccaaatgcatggagagctcccgtgagtggttaatagggtgatagacctg

SEQ ID NO: 68546 - DNA, 120 bp, Homo sapiens; identical to SEQ ID NO: 54103
  misc_feature: 832 for SV(C|O) and mtDNA

SEQ ID NO: 68547 - DNA, 120 bp, Homo sapiens
  misc_feature: 832 for SV(C|O) and mtDNA
aaagacagatactgcgacatagggtgctccggctccagcgtctcgcaatgctatcgcgtgcacaccccccagacgaaaataccaaatgcatggagagctcccgtgagtggttaatagggt

SEQ ID NO: 68548 - DNA, 120 bp, Homo sapiens
  misc_feature: 831 for SV(C|O) and mtDNA
ttaagagtactgcggcaagtactattgacccagcgatgggggcttcgacatgggctttagggagtcataagtggagtccgtaaagaggtatctttactataaaagctattgtgtaagcta

SEQ ID NO: 68549 - DNA, 120 bp, Homo sapiens
  misc_feature: 831 for SV(C|O) and mtDNA
tgtgagtgtaaattagtgcgatgagtaggggaagggagcctactagggtgtagaataggaagtatgtgcctgcgttcaggcgttctggctggttgcctcatcgggtgatgatagccaagg

SEQ ID NO: 68550 - DNA, 120 bp, Homo sapiens
  misc_feature: 831 for SV(C|O) and mtDNA
tggctgtgaatgttataattaaggagatttgtagggagattagtatagagaggtagagtttttttcgtgatagtggttcactggataagtggcgttggcttgccatgattgtgaggggta

SEQ ID NO: 68551 - DNA, 120 bp, Homo sapiens
  misc_feature: 831 for SV(C|O) and mtDNA
acagatactgcgacatagggtgctccggctccagcgtctcgcaatgctatcgcgtgcacaccccccagacgaaaataccaaatgcatggagagctcccgtgagtggttaatagggtgata

SEQ ID NO: 68552 - DNA, 120 bp, Homo sapiens
  misc_feature: 831 for SV(C|O) and mtDNA
cgcccgctcataaggggatggccatggctaggtttatagatagttgggtggttggtgtaaatgagtgaggcaggagtccgaggaggttagttgtggcaataaaaatgattaaggatacta

SEQ ID NO: 68553 - DNA, 120 bp, Homo sapiens
  misc_feature: 831 for SV(C|O) and mtDNA
taaactaccaaacctgcattaaaaatttcggttggggcgacctcggagcagaacccaacctccgagcagtacatgctaagacttcaccagtcaaagcgaactactatactcaattgatcc

SEQ ID NO: 68554 - DNA, 120 bp, Homo sapiens
  misc_feature: 831 for SV(C|O) and mtDNA
agagcgaaagcctataatcactgcgcccgctcataaggggatggccatggctaggtttatagatagttgggtggttggtgtaaatgagtgaggcaggagtccgaggaggttagttgtggc

SEQ ID NO: 68555 - DNA, 120 bp, Homo sapiens
  misc_feature: 831 for SV(C|O) and mtDNA
ccaactgttcatcggctgagagggcgtaggaattatatccttcttgctcatcagttgatgatacgcccgagcagatgccaacacagcagccattcaagcaatcctatacaaccgtatcgg

SEQ ID NO: 68556 - DNA, 120 bp, Homo sapiens
  misc_feature: 831 for SV(C|O) and mtDNA
aagctagtcatattaagttgttggctcaggagtttgatagttcttgggcagtgagagtgagtagtagaatgtttagtgagcctagggtgttgtgagtgtaaattagtgcgatgagtaggg

SEQ ID NO: 68557 - DNA, 120 bp, Homo sapiens
  misc_feature: 831 for SV(C|O) and mtDNA
accaattcggttcagtctaatcctttttgtagtcactcataggccagacttagggctaggatgatgattaataagagggatgacataactattagtggtaggttagttgtttgtagggct

SEQ ID NO: 68558 - DNA, 120 bp, Homo sapiens
  misc_feature: 830 for SV(C|O) and mtDNA
agtgggacttctaggggatttagcggggtgatgcctgttgggggccagtgccctcctaattggggggtaggggctaggctggagtggtaaaaggctcagaaaaatcctgcgaagaaaaaa

SEQ ID NO: 68559 - DNA, 120 bp, Homo sapiens
  misc_feature: 830 for SV(C|O) and mtDNA
acctcggagctggtaaaaagaggcctaacccctgtctttagatttacagtccaatgcttcactcagccattttacctcacccccactgatgttcgccgaccgttgactattctctacaaa

SEQ ID NO: 68560 - DNA, 120 bp, Homo sapiens
  misc_feature: 830 for SV(C|O) and mtDNA
ttagtagtagttactggttgaacattgtttgttggtgtatatattgtaattgagattgctcgggggaataggttatgtgattaggagtagggttaggatgagtgggaagaagaaagagag

SEQ ID NO: 68561 - DNA, 120 bp, Homo sapiens
  misc_feature: 830 for SV(C|O) and mtDNA
gagcgaaagcctataatcactgcgcccgctcataaggggatggccatggctaggtttatagatagttgggtggttggtgtaaatgagtgaggcaggagtccgaggaggttagttgtggca

SEQ ID NO: 68562 - DNA, 120 bp, Homo sapiens
  misc_feature: 830 for SV(C|O) and mtDNA
tcataggccagacttagggctaggatgatgattaataagagggatgacataactattagtggtaggttagttgtttgtagggctcatggtaggggtaaaaggagggcaatttctagatca

SEQ ID NO: 68563 - DNA, 120 bp, Homo sapiens
  misc_feature: 830 for SV(C|O) and mtDNA
cactcataggccagacttagggctaggatgatgattaataagagggatgacataactattagtggtaggttagttgtttgtagggctcatggtaggggtaaaaggagggcaatttctaga

SEQ ID NO: 68564 - DNA, 120 bp, Homo sapiens; identical to SEQ ID NO: 54201
  misc_feature: 830 for SV(C|O) and mtDNA

SEQ ID NO: 68565 - DNA, 120 bp, Homo sapiens; identical to SEQ ID NO: 56837
  misc_feature: 830 for SV(C|O) and mtDNA

SEQ ID NO: 68566 - DNA, 120 bp, Homo sapiens; identical to SEQ ID NO: 55387
  misc_feature: 830 for SV(C|O) and mtDNA

SEQ ID NO: 68567 - DNA, 120 bp, Homo sapiens
  misc_feature: 830 for SV(C|O) and mtDNA
gtaatggggtttgtggggttttcttctaagccttctcctatttatgggggtttagtattgattgttagcggtgtggtcgggtgtgttattattctgaattttgggggaggttatatgggt

SEQ ID NO: 68568 - DNA, 120 bp, Homo sapiens
  misc_feature: 830 for SV(C|O) and mtDNA
gggacttctaggggatttagcggggtgatgcctgttgggggccagtgccctcctaattggggggtaggggctaggctggagtggtaaaaggctcagaaaaatcctgcgaagaaaaaaact

SEQ ID NO: 68569 - DNA, 120 bp, Homo sapiens; identical to SEQ ID NO: 54425
  misc_feature: 830 for SV(C|O) and mtDNA

SEQ ID NO: 68570 - DNA, 120 bp, Homo sapiens; identical to SEQ ID NO: 53491
  misc_feature: 830 for SV(C|O) and mtDNA

SEQ ID NO: 68571 - DNA, 120 bp, Homo sapiens; identical to SEQ ID NO: 53534
  misc_feature: 830 for SV(C|O) and mtDNA

SEQ ID NO: 68572 - DNA, 120 bp, Homo sapiens
  misc_feature: 830 for SV(C|O) and mtDNA
accctcctagccttactactaataattattacattttgactaccacaactcaacggctacatagaaaaatccaccccttacgagtgcggcttcgaccctatatcccccgcccgcgtccct

SEQ ID NO: 68573 - DNA, 120 bp, Homo sapiens; identical to SEQ ID NO: 54110
  misc_feature: 829 for SV(C|O) and mtDNA

SEQ ID NO: 68574 - DNA, 120 bp, Homo sapiens
  misc_feature: 829 for SV(C|O) and mtDNA
tgttcatcggctgagagggcgtaggaattatatccttcttgctcatcagttgatgatacgcccgagcagatgccaacacagcagccattcaagcaatcctatacaaccgtatcggcgata

SEQ ID NO: 68575 - DNA, 120 bp, Homo sapiens; identical to SEQ ID NO: 54707
  misc_feature: 829 for SV(C|O) and mtDNA

SEQ ID NO: 68576 - DNA, 120 bp, Homo sapiens
  misc_feature: 829 for SV(C|O) and mtDNA
tgggtctctattttaccctcctacaagcctcagagtacttcgagtctcccttcaccatttccgacggcatctacggctcaacattttttgtagccacaggcttccacggacttcacgtca

SEQ ID NO: 68577 - DNA, 120 bp, Homo sapiens
  misc_feature: 829 for SV(C|O) and mtDNA
taaattagtgcgatgagtaggggaagggagcctactagggtgtagaataggaagtatgtgcctgcgttcaggcgttctggctggttgcctcatcgggtgatgatagccaaggtggggata

SEQ ID NO: 68578 - DNA, 120 bp, Homo sapiens; identical to SEQ ID NO: 53159
  misc_feature: 829 for SV(C|O) and mtDNA

SEQ ID NO: 68579 - DNA, 120 bp, Homo sapiens; identical to SEQ ID NO: 55464
  misc_feature: 829 for SV(C|O) and mtDNA

SEQ ID NO: 68580 - DNA, 120 bp, Homo sapiens
  misc_feature: 829 for SV(C|O) and mtDNA
tagagggaaggttaatggttgatattgctagggtggcgcttccaattaggtgcatgagtaggtggcctgcagtaatgttagcggttaggcgtacggccagggctattggttgaatgagta

SEQ ID NO: 68581 - DNA, 120 bp, Homo sapiens; identical to SEQ ID NO: 54477
  misc_feature: 829 for SV(C|O) and mtDNA

SEQ ID NO: 68582 - DNA, 120 bp, Homo sapiens
  misc_feature: 829 for SV(C|O) and mtDNA
gttaatggttgatattgctagggtggcgcttccaattaggtgcatgagtaggtggcctgcagtaatgttagcggttaggcgtacggccagggctattggttgaatgagtaggctgatggt

SEQ ID NO: 68583 - DNA, 120 bp, Homo sapiens
  misc_feature: 829 for SV(C|O) and mtDNA
gtgagtgtaaattagtgcgatgagtaggggaagggagcctactagggtgtagaataggaagtatgtgcctgcgttcaggcgttctggctggttgcctcatcgggtgatgatagccaaggt

SEQ ID NO: 68584 - DNA, 120 bp, Homo sapiens; identical to SEQ ID NO: 54367
  misc_feature: 829 for SV(C|O) and mtDNA

SEQ ID NO: 68585 - DNA, 120 bp, Homo sapiens; identical to SEQ ID NO: 53343
  misc_feature: 829 for SV(C|O) and mtDNA

SEQ ID NO: 68586 - DNA, 120 bp, Homo sapiens
  misc_feature: 829 for SV(C|O) and mtDNA
agtctggcctatgagtgactacaaaaaggattagactgaaccgaattggtatatagtttaaacaaaacgaatgatttcgactcattaaattatgataatcatatttaccaaatgcccctc

SEQ ID NO: 68587 - DNA, 120 bp, Homo sapiens
  misc_feature: 829 for SV(C|O) and mtDNA
aacaccctcctagccttactactaataattattacattttgactaccacaactcaacggctacatagaaaaatccaccccttacgagtgcggcttcgaccctatatcccccgcccgcgtc

SEQ ID NO: 68588 - DNA, 120 bp, Homo sapiens
  misc_feature: 829 for SV(C|O) and mtDNA
agttatgaaatggtttttctaatacctttttgaaaaagtcatggaggccatggggttggcttgaaaccagctttggggggttcgattccttccttttttgtctagattttatgtatacgg

SEQ ID NO: 68589 - DNA, 120 bp, Homo sapiens
  misc_feature: 829 for SV(C|O) and mtDNA
agtgtaaattagtgcgatgagtaggggaagggagcctactagggtgtagaataggaagtatgtgcctgcgttcaggcgttctggctggttgcctcatcgggtgatgatagccaaggtggg

SEQ ID NO: 68590 - DNA, 120 bp, Homo sapiens; identical to SEQ ID NO: 53406
  misc_feature: 829 for SV(C|O) and mtDNA

SEQ ID NO: 68591 - DNA, 120 bp, Homo sapiens
  misc_feature: 829 for SV(C|O) and mtDNA
aagtctggcctatgagtgactacaaaaaggattagactgaaccgaattggtatatagtttaaacaaaacgaatgatttcgactcattaaattatgataatcatatttaccaaatgcccct

SEQ ID NO: 68592 - DNA, 120 bp, Homo sapiens
  misc_feature: 829 for SV(C|O) and mtDNA
agataaggaaaatgattatgagggcgtgatcatgaaaggtgataagctcttctatgataggggaagtagcgtcttgtagacctacttgcgctgcatgtgccattaagatatataggattt

SEQ ID NO: 68593 - DNA, 120 bp, Homo sapiens
  misc_feature: 828 for SV(C|O) and mtDNA
ataggccagacttagggctaggatgatgattaataagagggatgacataactattagtggtaggttagttgtttgtagggctcatggtaggggtaaaaggagggcaatttctagatcaaa

SEQ ID NO: 68594 - DNA, 120 bp, Homo sapiens
  misc_feature: 828 for SV(C|O) and mtDNA
gaggtaggtggtagtttgtgtttaatatttttagttgggtgatgaggaatagtgtaaggagtatgggggtaattatggtgggccatacggtagtatttagttggggcatttcactgtaaa

SEQ ID NO: 68595 - DNA, 120 bp, Homo sapiens
  misc_feature: 828 for SV(C|O) and mtDNA
gagaaaaagtctttaactccaccattagcacccaaagctaagattctaatttaaactattctctgttctttcatggggaagcagatttgggtgccacccaagtattgactcacccatcaa

SEQ ID NO: 68596 - DNA, 120 bp, Homo sapiens
  misc_feature: 828 for SV(C|O) and mtDNA
ttaggagtgggacttctaggggatttagcggggtgatgcctgttgggggccagtgccctcctaattggggggtaggggctaggctggagtggtaaaaggctcagaaaaatcctgcgaaga

SEQ ID NO: 68597 - DNA, 120 bp, Homo sapiens
  misc_feature: 828 for SV(C|O) and mtDNA
tcggcctatccggaatgccccgacgttactcggactaccccgatgcatacaccacatgaaacatcctatcatctgtaggctcattcatttctctaacagcagtaatattaataattttca

SEQ ID NO: 68598 - DNA, 120 bp, Homo sapiens
  misc_feature: 828 for SV(C|O) and mtDNA
tagtgcgatgagtaggggaagggagcctactagggtgtagaataggaagtatgtgcctgcgttcaggcgttctggctggttgcctcatcgggtgatgatagccaaggtggggataagtgt

SEQ ID NO: 68599 - DNA, 120 bp, Homo sapiens
  misc_feature: 828 for SV(C|O) and mtDNA
ggtaaatggctttatgtactatgtgctgttaagggtgagtaggtttgttggtatcctagtgggtgaggggtggctttggagttgcagttgatgtgtgatagttgagggttgattgctgta

SEQ ID NO: 68600 - DNA, 120 bp, Homo sapiens
  misc_feature: 828 for SV(C|O) and mtDNA
agttaaatgtcctttgaagtatacttgaggagggtgacgggcggtgtgtacgcgcttcagggccctgttcaactaagcactctactctcagtttactgctaaatccaccttcgaccctta

SEQ ID NO: 68601 - DNA, 120 bp, Homo sapiens; identical to SEQ ID NO: 55325
  misc_feature: 828 for SV(C|O) and mtDNA

SEQ ID NO: 68602 - DNA, 120 bp, Homo sapiens
  misc_feature: 828 for SV(C|O) and mtDNA
taaatggctttatgtactatgtgctgttaagggtgagtaggtttgttggtatcctagtgggtgaggggtggctttggagttgcagttgatgtgtgatagttgagggttgattgctgtact

SEQ ID NO: 68603 - DNA, 120 bp, Homo sapiens
  misc_feature: 828 for SV(C|O) and mtDNA
gtgtaaattagtgcgatgagtaggggaagggagcctactagggtgtagaataggaagtatgtgcctgcgttcaggcgttctggctggttgcctcatcgggtgatgatagccaaggtgggg

SEQ ID NO: 68604 - DNA, 120 bp, Homo sapiens
  misc_feature: 828 for SV(C|O) and mtDNA
gtaaattagtgcgatgagtaggggaagggagcctactagggtgtagaataggaagtatgtgcctgcgttcaggcgttctggctggttgcctcatcgggtgatgatagccaaggtggggat

SEQ ID NO: 68605 - DNA, 120 bp, Homo sapiens
  misc_feature: 828 for SV(C|O) and mtDNA
atactgcgacatagggtgctccggctccagcgtctcgcaatgctatcgcgtgcacaccccccagacgaaaataccaaatgcatggagagctcccgtgagtggttaatagggtgatagacc

SEQ ID NO: 68606 - DNA, 120 bp, Homo sapiens
  misc_feature: 828 for SV(C|O) and mtDNA
aatttgcaattcaatatgaaaatcacctcggagctggtaaaaagaggcctaacccctgtctttagatttacagtccaatgcttcactcagccattttacctcacccccactgatgttcgc

SEQ ID NO: 68607 - DNA, 120 bp, Homo sapiens; identical to SEQ ID NO: 55652
  misc_feature: 828 for SV(C|O) and mtDNA

SEQ ID NO: 68608 - DNA, 120 bp, Homo sapiens
  misc_feature: 828 for SV(C|O) and mtDNA
atgataggggaagtagcgtcttgtagacctacttgcgctgcatgtgccattaagatatataggatttagcctataatttaactttgacaaagttatgaaatggtttttctaatacctttt

SEQ ID NO: 68609 - DNA, 120 bp, Homo sapiens
  misc_feature: 828 for SV(C|O) and mtDNA
agtgatagtattattccttctaggcatagtagggaggatatgaggtgtgagcggtatactagtattcctagaagtgagatggtaaatgctagtataatatttatgtaaatgaggggcatt

SEQ ID NO: 68610 - DNA, 120 bp, Homo sapiens
  misc_feature: 827 for SV(C|O) and mtDNA
ttgatgagggtcttactcttttagtataaatagtaccgttaacttccaattaactagttttgacaacattcaaaaaagagtaataaacttcgccttaattttaataatcaacaccctcct

SEQ ID NO: 68611 - DNA, 120 bp, Homo sapiens
  misc_feature: 827 for SV(C|O) and mtDNA
ttcatggtggctggcagtaatgtacgaattacatagcggttgttgatgggtgagtcaatacttgggtggcacccaaatctgcttccccatgaaagaacagagaatagtttaaattagaat

SEQ ID NO: 68612 - DNA, 120 bp, Homo sapiens
  misc_feature: 827 for SV(C|O) and mtDNA
ggttaattaattttattagggggttaattttgcgtattggggtcattggtgttcttgtagttgaaatacaacgatggtttttcatatcattggtcgtggttgtagtccgtgcgagaataa

SEQ ID NO: 68613 - DNA, 120 bp, Homo sapiens
  misc_feature: 827 for SV(C|O) and mtDNA
ttacaaatgcatgggctgtgacgataacgttgtagatgtggtcgttacctagaaggttgcctggctggcccagctcggctcgaataaggaggcttagagctgtgcctaggactccagctc

SEQ ID NO: 68614 - DNA, 120 bp, Homo sapiens
  misc_feature: 827 for SV(C|O) and mtDNA
tgtaaattagtgcgatgagtaggggaagggagcctactagggtgtagaataggaagtatgtgcctgcgttcaggcgttctggctggttgcctcatcgggtgatgatagccaaggtgggga

SEQ ID NO: 68615 - DNA, 120 bp, Homo sapiens
  misc_feature: 827 for SV(C|O) and mtDNA
tggctttatgtactatgtgctgttaagggtgagtaggtttgttggtatcctagtgggtgaggggtggctttggagttgcagttgatgtgtgatagttgagggttgattgctgtacttgct

SEQ ID NO: 68616 - DNA, 120 bp, Homo sapiens
  misc_feature: 827 for SV(C|O) and mtDNA
tatttctagttaattcattatgcagaaggtataggggttagtccttgctgtattatgcttggttataatttttcatctttcccttgcggtactatatctattgcgccaggtttcaatttc

SEQ ID NO: 68617 - DNA, 120 bp, Homo sapiens
  misc_feature: 827 for SV(C|O) and mtDNA
tatgataggggaagtagcgtcttgtagacctacttgcgctgcatgtgccattaagatatataggatttagcctataatttaactttgacaaagttatgaaatggtttttctaataccttt

SEQ ID NO: 68618 - DNA, 120 bp, Homo sapiens
  misc_feature: 827 for SV(C|O) and mtDNA
taggaagcagataaggaaaatgattatgagggcgtgatcatgaaaggtgataagctcttctatgataggggaagtagcgtcttgtagacctacttgcgctgcatgtgccattaagatata

SEQ ID NO: 68619 - DNA, 120 bp, Homo sapiens
  misc_feature: 827 for SV(C|O) and mtDNA
tagtttaaccaaaacatcagattgtgaatctgacaacagaggcttacgaccccttatttaccgagaaagctcacaagaactgctaactcatgcccccatgtctaacaacatggctttctc

SEQ ID NO: 68620 - DNA, 120 bp, Homo sapiens
  misc_feature: 827 for SV(C|O) and mtDNA
taagctagtcatattaagttgttggctcaggagtttgatagttcttgggcagtgagagtgagtagtagaatgtttagtgagcctagggtgttgtgagtgtaaattagtgcgatgagtagg

SEQ ID NO: 68621 - DNA, 120 bp, Homo sapiens
  misc_feature: 827 for SV(C|O) and mtDNA
taagagtactgcggcaagtactattgacccagcgatgggggcttcgacatgggctttagggagtcataagtggagtccgtaaagaggtatctttactataaaagctattgtgtaagctag

SEQ ID NO: 68622 - DNA, 120 bp, Homo sapiens
  misc_feature: 827 for SV(C|O) and mtDNA
catttacccaaataaagtataggcgatagaaattgaaacctggcgcaatagatatagtaccgcaagggaaagatgaaaaattataaccaagcataatacagcaaggactaacccctatac

SEQ ID NO: 68623 - DNA, 120 bp, Homo sapiens; identical to SEQ ID NO: 53673
  misc_feature: 827 for SV(C|O) and mtDNA

SEQ ID NO: 68624 - DNA, 120 bp, Homo sapiens
  misc_feature: 827 for SV(C|O) and mtDNA
cttctaggggatttagcggggtgatgcctgttgggggccagtgccctcctaattggggggtaggggctaggctggagtggtaaaaggctcagaaaaatcctgcgaagaaaaaaacttctg

SEQ ID NO: 68625 - DNA, 120 bp, Homo sapiens; identical to SEQ ID NO: 53862
  misc_feature: 827 for SV(C|O) and mtDNA

SEQ ID NO: 68626 - DNA, 120 bp, Homo sapiens
  misc_feature: 827 for SV(C|O) and mtDNA
cagatactgcgacatagggtgctccggctccagcgtctcgcaatgctatcgcgtgcacaccccccagacgaaaataccaaatgcatggagagctcccgtgagtggttaatagggtgatag

SEQ ID NO: 68627 - DNA, 120 bp, Homo sapiens
  misc_feature: 827 for SV(C|O) and mtDNA
cagtgatagtattattccttctaggcatagtagggaggatatgaggtgtgagcggtatactagtattcctagaagtgagatggtaaatgctagtataatatttatgtaaatgaggggcat

SEQ ID NO: 68628 - DNA, 120 bp, Homo sapiens
  misc_feature: 827 for SV(C|O) and mtDNA
agtgcgatgagtaggggaagggagcctactagggtgtagaataggaagtatgtgcctgcgttcaggcgttctggctggttgcctcatcgggtgatgatagccaaggtggggataagtgtg

SEQ ID NO: 68629 - DNA, 120 bp, Homo sapiens
  misc_feature: 827 for SV(C|O) and mtDNA
aaataataagaaggtaatagctactaagaagaattttatggagaaagggacgcgggcgggggatatagggtcgaagccgcactcgtaaggggtggatttttctatgtagccgttgagttg

SEQ ID NO: 68630 - DNA, 120 bp, Homo sapiens; identical to SEQ ID NO: 54651
  misc_feature: 827 for SV(C|O) and mtDNA

SEQ ID NO: 68631 - DNA, 120 bp, Homo sapiens
  misc_feature: 827 for SV(C|O) and mtDNA
aggggttttagttaaatgtcctttgaagtatacttgaggagggtgacgggcggtgtgtacgcgcttcagggccctgttcaactaagcactctactctcagtttactgctaaatccacctt

SEQ ID NO: 68632 - DNA, 120 bp, Homo sapiens; identical to SEQ ID NO: 55500
  misc_feature: 827 for SV(C|O) and mtDNA

SEQ ID NO: 68633 - DNA, 120 bp, Homo sapiens; identical to SEQ ID NO: 55399
  misc_feature: 827 for SV(C|O) and mtDNA

SEQ ID NO: 68634 - DNA, 120 bp, Homo sapiens
  misc_feature: 826 for SV(C|O) and mtDNA
ttactaaacccacactcaacagaaacaaagcatacatcattattctcgcacggactacaaccacgaccaatgatatgaaaaaccatcgttgtatttcaactacaagaacaccaatgaccc

SEQ ID NO: 68635 - DNA, 120 bp, Homo sapiens
  misc_feature: 826 for SV(C|O) and mtDNA
ttaatggttgatattgctagggtggcgcttccaattaggtgcatgagtaggtggcctgcagtaatgttagcggttaggcgtacggccagggctattggttgaatgagtaggctgatggtt

SEQ ID NO: 68636 - DNA, 120 bp, Homo sapiens
  misc_feature: 826 for SV(C|O) and mtDNA
tggctttggagttgcagttgatgtgtgatagttgagggttgattgctgtacttgcttgtaagcatggggagggggttttgatgtggattgggtttttatgtactacaggtggtcaagtat

SEQ ID NO: 68637 - DNA, 120 bp, Homo sapiens
  misc_feature: 826 for SV(C|O) and mtDNA
aaactaccaaacctgcattaaaaatttcggttggggcgacctcggagcagaacccaacctccgagcagtacatgctaagacttcaccagtcaaagcgaactactatactcaattgatcca

SEQ ID NO: 68638 - DNA, 120 bp, Homo sapiens
  misc_feature: 826 for SV(C|O) and mtDNA
attactgccagccaccatgaatattgtacggtaccataaatacttgaccacctgtagtacataaaaacccaatccacatcaaaaccccctccccatgcttacaagcaagtacagcaatca

SEQ ID NO: 68639 - DNA, 120 bp, Homo sapiens
  misc_feature: 826 for SV(C|O) and mtDNA
attagtagtagttactggttgaacattgtttgttggtgtatatattgtaattgagattgctcgggggaataggttatgtgattaggagtagggttaggatgagtgggaagaagaaagaga

SEQ ID NO: 68640 - DNA, 120 bp, Homo sapiens
  misc_feature: 826 for SV(C|O) and mtDNA
tctattgatgagggtcttactcttttagtataaatagtaccgttaacttccaattaactagttttgacaacattcaaaaaagagtaataaacttcgccttaattttaataatcaacaccc

SEQ ID NO: 68641 - DNA, 120 bp, Homo sapiens
  misc_feature: 826 for SV(C|O) and mtDNA
tcctacaagcctcagagtacttcgagtctcccttcaccatttccgacggcatctacggctcaacattttttgtagccacaggcttccacggacttcacgtcattattggctcaactttcc

SEQ ID NO: 68642 - DNA, 120 bp, Homo sapiens
  misc_feature: 826 for SV(C|O) and mtDNA
tcctaaactaccaaacctgcattaaaaatttcggttggggcgacctcggagcagaacccaacctccgagcagtacatgctaagacttcaccagtcaaagcgaactactatactcaattga

SEQ ID NO: 68643 - DNA, 120 bp, Homo sapiens
  misc_feature: 826 for SV(C|O) and mtDNA
taggccagacttagggctaggatgatgattaataagagggatgacataactattagtggtaggttagttgtttgtagggctcatggtaggggtaaaaggagggcaatttctagatcaaat

SEQ ID NO: 68644 - DNA, 120 bp, Homo sapiens
  misc_feature: 826 for SV(C|O) and mtDNA
ccccccaaagctggtttcaagccaaccccatggcctccatgactttttcaaaaaggtattagaaaaaccatttcataactttgtcaaagttaaattataggctaaatcctatatatctta

SEQ ID NO: 68645 - DNA, 120 bp, Homo sapiens
  misc_feature: 826 for SV(C|O) and mtDNA
gaaccccccaaagctggtttcaagccaaccccatggcctccatgactttttcaaaaaggtattagaaaaaccatttcataactttgtcaaagttaaattataggctaaatcctatatatc

SEQ ID NO: 68646 - DNA, 120 bp, Homo sapiens
  misc_feature: 826 for SV(C|O) and mtDNA
aggtaggtggtagtttgtgtttaatatttttagttgggtgatgaggaatagtgtaaggagtatgggggtaattatggtgggccatacggtagtatttagttggggcatttcactgtaaag

SEQ ID NO: 68647 - DNA, 120 bp, Homo sapiens
  misc_feature: 826 for SV(C|O) and mtDNA
aatgttataattaaggagatttgtagggagattagtatagagaggtagagtttttttcgtgatagtggttcactggataagtggcgttggcttgccatgattgtgaggggtaggagtcag

SEQ ID NO: 68648 - DNA, 120 bp, Homo sapiens
  misc_feature: 826 for SV(C|O) and mtDNA
catcaatagatggagacatacagaaatagtcaaaccacgtctacaaaatgccagtatcaggcggcggcttcgaagccaaagtgatgtttggatgtaaagtgaaatattagttggcggatg

SEQ ID NO: 68649 - DNA, 120 bp, Homo sapiens
  misc_feature: 825 for SV(C|O) and mtDNA
ccatagccgcctagttttaagagtactgcggcaagtactattgacccagcgatgggggcttcgacatgggctttagggagtcataagtggagtccgtaaagaggtatctttactataaaa

SEQ ID NO: 68650 - DNA, 120 bp, Homo sapiens
  misc_feature: 825 for SV(C|O) and mtDNA
tcacaacaccctaggctcactaaacattctactactcactctcactgcccaagaactatcaaactcctgagccaacaacttaatatgactagcttacacaatagcttttatagtaaagat

SEQ ID NO: 68651 - DNA, 120 bp, Homo sapiens
  misc_feature: 825 for SV(C|O) and mtDNA
gttacttatactaacattagttcttctatagggtgatagattggtccaattgggtgtgaggagttcagttatatgtttgggattttttaggtagtgggtgttgagcttgaacgctttctt

SEQ ID NO: 68652 - DNA, 120 bp, Homo sapiens
  misc_feature: 825 for SV(C|O) and mtDNA
gtagagggaaggttaatggttgatattgctagggtggcgcttccaattaggtgcatgagtaggtggcctgcagtaatgttagcggttaggcgtacggccagggctattggttgaatgagt

SEQ ID NO: 68653 - DNA, 120 bp, Homo sapiens; identical to SEQ ID NO: 53714
  misc_feature: 825 for SV(C|O) and mtDNA

SEQ ID NO: 68654 - DNA, 120 bp, Homo sapiens
  misc_feature: 825 for SV(C|O) and mtDNA
ggcctatccggaatgccccgacgttactcggactaccccgatgcatacaccacatgaaacatcctatcatctgtaggctcattcatttctctaacagcagtaatattaataattttcatg

SEQ ID NO: 68655 - DNA, 120 bp, Homo sapiens; identical to SEQ ID NO: 53113
  misc_feature: 825 for SV(C|O) and mtDNA

SEQ ID NO: 68656 - DNA, 120 bp, Homo sapiens
  misc_feature: 825 for SV(C|O) and mtDNA
ccaattcggttcagtctaatcctttttgtagtcactcataggccagacttagggctaggatgatgattaataagagggatgacataactattagtggtaggttagttgtttgtagggctc

SEQ ID NO: 68657 - DNA, 120 bp, Homo sapiens
  misc_feature: 825 for SV(C|O) and mtDNA
atattaataattttcatgatttgagaagccttcgcttcgaagcgaaaagtcctaatagtagaagaaccctccataaacctggagtgactatatggatgccccccaccctaccacacattc

SEQ ID NO: 68658 - DNA, 120 bp, Homo sapiens; identical to SEQ ID NO: 52772
  misc_feature: 825 for SV(C|O) and mtDNA

SEQ ID NO: 68659 - DNA, 120 bp, Homo sapiens
  misc_feature: 825 for SV(C|O) and mtDNA
ctatgataggggaagtagcgtcttgtagacctacttgcgctgcatgtgccattaagatatataggatttagcctataatttaactttgacaaagttatgaaatggtttttctaatacctt

SEQ ID NO: 68660 - DNA, 120 bp, Homo sapiens
  misc_feature: 825 for SV(C|O) and mtDNA
aagttatgaaatggtttttctaatacctttttgaaaaagtcatggaggccatggggttggcttgaaaccagctttggggggttcgattccttccttttttgtctagattttatgtatacg

SEQ ID NO: 68661 - DNA, 120 bp, Homo sapiens
  misc_feature: 825 for SV(C|O) and mtDNA
aactgttcatcggctgagagggcgtaggaattatatccttcttgctcatcagttgatgatacgcccgagcagatgccaacacagcagccattcaagcaatcctatacaaccgtatcggcg

SEQ ID NO: 68662 - DNA, 120 bp, Homo sapiens; identical to SEQ ID NO: 52774
  misc_feature: 825 for SV(C|O) and mtDNA

SEQ ID NO: 68663 - DNA, 120 bp, Homo sapiens
  misc_feature: 824 for SV(C|O) and mtDNA
gttgtgagtgtaaattagtgcgatgagtaggggaagggagcctactagggtgtagaataggaagtatgtgcctgcgttcaggcgttctggctggttgcctcatcgggtgatgatagccaa

SEQ ID NO: 68664 - DNA, 120 bp, Homo sapiens
  misc_feature: 824 for SV(C|O) and mtDNA
attcatggtggctggcagtaatgtacgaattacatagcggttgttgatgggtgagtcaatacttgggtggcacccaaatctgcttccccatgaaagaacagagaatagtttaaattagaa

SEQ ID NO: 68665 - DNA, 120 bp, Homo sapiens
  misc_feature: 824 for SV(C|O) and mtDNA
ttagttaaatgtcctttgaagtatacttgaggagggtgacgggcggtgtgtacgcgcttcagggccctgttcaactaagcactctactctcagtttactgctaaatccaccttcgaccct

SEQ ID NO: 68666 - DNA, 120 bp, Homo sapiens
  misc_feature: 824 for SV(C|O) and mtDNA
tacaagcctcagagtacttcgagtctcccttcaccatttccgacggcatctacggctcaacattttttgtagccacaggcttccacggacttcacgtcattattggctcaactttcctca

SEQ ID NO: 68667 - DNA, 120 bp, Homo sapiens; identical to SEQ ID NO: 54057
  misc_feature: 824 for SV(C|O) and mtDNA

SEQ ID NO: 68668 - DNA, 120 bp, Homo sapiens
  misc_feature: 824 for SV(C|O) and mtDNA
attaataattttcatgatttgagaagccttcgcttcgaagcgaaaagtcctaatagtagaagaaccctccataaacctggagtgactatatggatgccccccaccctaccacacattcga

SEQ ID NO: 68669 - DNA, 120 bp, Homo sapiens
  misc_feature: 824 for SV(C|O) and mtDNA
tcatggtggctggcagtaatgtacgaattacatagcggttgttgatgggtgagtcaatacttgggtggcacccaaatctgcttccccatgaaagaacagagaatagtttaaattagaatc

SEQ ID NO: 68670 - DNA, 120 bp, Homo sapiens
  misc_feature: 824 for SV(C|O) and mtDNA
tagttaaatgtcctttgaagtatacttgaggagggtgacgggcggtgtgtacgcgcttcagggccctgttcaactaagcactctactctcagtttactgctaaatccaccttcgaccctt

SEQ ID NO: 68671 - DNA, 120 bp, Homo sapiens
  misc_feature: 824 for SV(C|O) and mtDNA
gttcatcggctgagagggcgtaggaattatatccttcttgctcatcagttgatgatacgcccgagcagatgccaacacagcagccattcaagcaatcctatacaaccgtatcggcgatat

SEQ ID NO: 68672 - DNA, 120 bp, Homo sapiens
  misc_feature: 824 for SV(C|O) and mtDNA
ctaaactaccaaacctgcattaaaaatttcggttggggcgacctcggagcagaacccaacctccgagcagtacatgctaagacttcaccagtcaaagcgaactactatactcaattgatc

SEQ ID NO: 68673 - DNA, 120 bp, Homo sapiens
  misc_feature: 824 for SV(C|O) and mtDNA
ctgttcatcggctgagagggcgtaggaattatatccttcttgctcatcagttgatgatacgcccgagcagatgccaacacagcagccattcaagcaatcctatacaaccgtatcggcgat

SEQ ID NO: 68674 - DNA, 120 bp, Homo sapiens
  misc_feature: 824 for SV(C|O) and mtDNA
ctattccaactgttcatcggctgagagggcgtaggaattatatccttcttgctcatcagttgatgatacgcccgagcagatgccaacacagcagccattcaagcaatcctatacaaccgt

SEQ ID NO: 68675 - DNA, 120 bp, Homo sapiens
  misc_feature: 824 for SV(C|O) and mtDNA
actcataggccagacttagggctaggatgatgattaataagagggatgacataactattagtggtaggttagttgtttgtagggctcatggtaggggtaaaaggagggcaatttctagat

SEQ ID NO: 68676 - DNA, 120 bp, Homo sapiens; identical to SEQ ID NO: 53102
  misc_feature: 823 for SV(C|O) and mtDNA

SEQ ID NO: 68677 - DNA, 120 bp, Homo sapiens; identical to SEQ ID NO: 56213
  misc_feature: 823 for SV(C|O) and mtDNA

SEQ ID NO: 68678 - DNA, 120 bp, Homo sapiens; identical to SEQ ID NO: 56042
  misc_feature: 823 for SV(C|O) and mtDNA

SEQ ID NO: 68679 - DNA, 120 bp, Homo sapiens
  misc_feature: 823 for SV(C|O) and mtDNA
tcgaaccccccaaagctggtttcaagccaaccccatggcctccatgactttttcaaaaaggtattagaaaaaccatttcataactttgtcaaagttaaattataggctaaatcctatata

SEQ ID NO: 68680 - DNA, 120 bp, Homo sapiens
  misc_feature: 823 for SV(C|O) and mtDNA
ccttcgcttcgaagcgaaaagtcctaatagtagaagaaccctccataaacctggagtgactatatggatgccccccaccctaccacacattcgaagaacccgtatacataaaatctagac

SEQ ID NO: 68681 - DNA, 120 bp, Homo sapiens
  misc_feature: 823 for SV(C|O) and mtDNA
caactgttcatcggctgagagggcgtaggaattatatccttcttgctcatcagttgatgatacgcccgagcagatgccaacacagcagccattcaagcaatcctatacaaccgtatcggc

SEQ ID NO: 68682 - DNA, 120 bp, Homo sapiens
  misc_feature: 823 for SV(C|O) and mtDNA
atggctttatgtactatgtgctgttaagggtgagtaggtttgttggtatcctagtgggtgaggggtggctttggagttgcagttgatgtgtgatagttgagggttgattgctgtacttgc

SEQ ID NO: 68683 - DNA, 120 bp, Homo sapiens
  misc_feature: 823 for SV(C|O) and mtDNA
ctgggtctctattttaccctcctacaagcctcagagtacttcgagtctcccttcaccatttccgacggcatctacggctcaacattttttgtagccacaggcttccacggacttcacgtc

SEQ ID NO: 68684 - DNA, 120 bp, Homo sapiens; identical to SEQ ID NO: 54021
  misc_feature: 823 for SV(C|O) and mtDNA

SEQ ID NO: 68685 - DNA, 120 bp, Homo sapiens
  misc_feature: 823 for SV(C|O) and mtDNA
caacaccctcctagccttactactaataattattacattttgactaccacaactcaacggctacatagaaaaatccaccccttacgagtgcggcttcgaccctatatcccccgcccgcgt

SEQ ID NO: 68686 - DNA, 120 bp, Homo sapiens; identical to SEQ ID NO: 54334
  misc_feature: 823 for SV(C|O) and mtDNA

SEQ ID NO: 68687 - DNA, 120 bp, Homo sapiens
  misc_feature: 823 for SV(C|O) and mtDNA
aatattaataattttcatgatttgagaagccttcgcttcgaagcgaaaagtcctaatagtagaagaaccctccataaacctggagtgactatatggatgccccccaccctaccacacatt

SEQ ID NO: 68688 - DNA, 120 bp, Homo sapiens; identical to SEQ ID NO: 56888
  misc_feature: 822 for SV(C|O) and mtDNA

SEQ ID NO: 68689 - DNA, 120 bp, Homo sapiens
  misc_feature: 822 for SV(C|O) and mtDNA
ttatgtactatgtgctgttaagggtgagtaggtttgttggtatcctagtgggtgaggggtggctttggagttgcagttgatgtgtgatagttgagggttgattgctgtacttgcttgtaa

SEQ ID NO: 68690 - DNA, 120 bp, Homo sapiens
  misc_feature: 822 for SV(C|O) and mtDNA
ggaggtaggtggtagtttgtgtttaatatttttagttgggtgatgaggaatagtgtaaggagtatgggggtaattatggtgggccatacggtagtatttagttggggcatttcactgtaa

SEQ ID NO: 68691 - DNA, 120 bp, Homo sapiens; identical to SEQ ID NO: 55695
  misc_feature: 822 for SV(C|O) and mtDNA

SEQ ID NO: 68692 - DNA, 120 bp, Homo sapiens; identical to SEQ ID NO: 54115
  misc_feature: 822 for SV(C|O) and mtDNA

SEQ ID NO: 68693 - DNA, 120 bp, Homo sapiens
  misc_feature: 822 for SV(C|O) and mtDNA
attattacaaatgcatgggctgtgacgataacgttgtagatgtggtcgttacctagaaggttgcctggctggcccagctcggctcgaataaggaggcttagagctgtgcctaggactcca

SEQ ID NO: 68694 - DNA, 120 bp, Homo sapiens
  misc_feature: 822 for SV(C|O) and mtDNA
tagtcatattaagttgttggctcaggagtttgatagttcttgggcagtgagagtgagtagtagaatgtttagtgagcctagggtgttgtgagtgtaaattagtgcgatgagtaggggaag

SEQ ID NO: 68695 - DNA, 120 bp, Homo sapiens; identical to SEQ ID NO: 53417
  misc_feature: 822 for SV(C|O) and mtDNA

SEQ ID NO: 68696 - DNA, 120 bp, Homo sapiens
  misc_feature: 822 for SV(C|O) and mtDNA
gatgagggtcttactcttttagtataaatagtaccgttaacttccaattaactagttttgacaacattcaaaaaagagtaataaacttcgccttaattttaataatcaacaccctcctag

SEQ ID NO: 68697 - DNA, 120 bp, Homo sapiens
  misc_feature: 822 for SV(C|O) and mtDNA
ctattgatgagggtcttactcttttagtataaatagtaccgttaacttccaattaactagttttgacaacattcaaaaaagagtaataaacttcgccttaattttaataatcaacaccct

SEQ ID NO: 68698 - DNA, 120 bp, Homo sapiens
  misc_feature: 822 for SV(C|O) and mtDNA
cgaaccccccaaagctggtttcaagccaaccccatggcctccatgactttttcaaaaaggtattagaaaaaccatttcataactttgtcaaagttaaattataggctaaatcctatatat

SEQ ID NO: 68699 - DNA, 120 bp, Homo sapiens
  misc_feature: 822 for SV(C|O) and mtDNA
agctagtcatattaagttgttggctcaggagtttgatagttcttgggcagtgagagtgagtagtagaatgtttagtgagcctagggtgttgtgagtgtaaattagtgcgatgagtagggg

SEQ ID NO: 68700 - DNA, 120 bp, Homo sapiens
  misc_feature: 821 for SV(C|O) and mtDNA
accatagccgcctagttttaagagtactgcggcaagtactattgacccagcgatgggggcttcgacatgggctttagggagtcataagtggagtccgtaaagaggtatctttactataaa

SEQ ID NO: 68701 - DNA, 120 bp, Homo sapiens
  misc_feature: 821 for SV(C|O) and mtDNA
cctttgaagtatacttgaggagggtgacgggcggtgtgtacgcgcttcagggccctgttcaactaagcactctactctcagtttactgctaaatccaccttcgacccttaagtttcataa

SEQ ID NO: 68702 - DNA, 120 bp, Homo sapiens
  misc_feature: 821 for SV(C|O) and mtDNA
taccatagccgcctagttttaagagtactgcggcaagtactattgacccagcgatgggggcttcgacatgggctttagggagtcataagtggagtccgtaaagaggtatctttactataa

SEQ ID NO: 68703 - DNA, 120 bp, Homo sapiens
  misc_feature: 821 for SV(C|O) and mtDNA
tgttataattaaggagatttgtagggagattagtatagagaggtagagtttttttcgtgatagtggttcactggataagtggcgttggcttgccatgattgtgaggggtaggagtcaggt

SEQ ID NO: 68704 - DNA, 120 bp, Homo sapiens
  misc_feature: 821 for SV(C|O) and mtDNA
tgtgaatgttataattaaggagatttgtagggagattagtatagagaggtagagtttttttcgtgatagtggttcactggataagtggcgttggcttgccatgattgtgaggggtaggag

SEQ ID NO: 68705 - DNA, 120 bp, Homo sapiens
  misc_feature: 821 for SV(C|O) and mtDNA
cttcgcttcgaagcgaaaagtcctaatagtagaagaaccctccataaacctggagtgactatatggatgccccccaccctaccacacattcgaagaacccgtatacataaaatctagaca

SEQ ID NO: 68706 - DNA, 120 bp, Homo sapiens; identical to SEQ ID NO: 56015
  misc_feature: 821 for SV(C|O) and mtDNA

SEQ ID NO: 68707 - DNA, 120 bp, Homo sapiens
  misc_feature: 821 for SV(C|O) and mtDNA
ccatttacccaaataaagtataggcgatagaaattgaaacctggcgcaatagatatagtaccgcaagggaaagatgaaaaattataaccaagcataatacagcaaggactaacccctata

SEQ ID NO: 68708 - DNA, 120 bp, Homo sapiens
  misc_feature: 821 for SV(C|O) and mtDNA
aagcctcagagtacttcgagtctcccttcaccatttccgacggcatctacggctcaacattttttgtagccacaggcttccacggacttcacgtcattattggctcaactttcctcacta

SEQ ID NO: 68709 - DNA, 120 bp, Homo sapiens
  misc_feature: 821 for SV(C|O) and mtDNA
aaccatttacccaaataaagtataggcgatagaaattgaaacctggcgcaatagatatagtaccgcaagggaaagatgaaaaattataaccaagcataatacagcaaggactaaccccta

SEQ ID NO: 68710 - DNA, 120 bp, Homo sapiens
  misc_feature: 821 for SV(C|O) and mtDNA
gtaggtggtagtttgtgtttaatatttttagttgggtgatgaggaatagtgtaaggagtatgggggtaattatggtgggccatacggtagtatttagttggggcatttcactgtaaagag

SEQ ID NO: 68711 - DNA, 120 bp, Homo sapiens
  misc_feature: 821 for SV(C|O) and mtDNA
gctttatgtactatgtgctgttaagggtgagtaggtttgttggtatcctagtgggtgaggggtggctttggagttgcagttgatgtgtgatagttgagggttgattgctgtacttgcttg

SEQ ID NO: 68712 - DNA, 120 bp, Homo sapiens
  misc_feature: 821 for SV(C|O) and mtDNA
atagtttaaccaaaacatcagattgtgaatctgacaacagaggcttacgaccccttatttaccgagaaagctcacaagaactgctaactcatgcccccatgtctaacaacatggctttct

SEQ ID NO: 68713 - DNA, 120 bp, Homo sapiens; identical to SEQ ID NO: 54160
  misc_feature: 821 for SV(C|O) and mtDNA

SEQ ID NO: 68714 - DNA, 120 bp, Homo sapiens
  misc_feature: 820 for SV(C|O) and mtDNA
ttatttctagttaattcattatgcagaaggtataggggttagtccttgctgtattatgcttggttataatttttcatctttcccttgcggtactatatctattgcgccaggtttcaattt

SEQ ID NO: 68715 - DNA, 120 bp, Homo sapiens
  misc_feature: 820 for SV(C|O) and mtDNA
ttataattaaggagatttgtagggagattagtatagagaggtagagtttttttcgtgatagtggttcactggataagtggcgttggcttgccatgattgtgaggggtaggagtcaggtag

SEQ ID NO: 68716 - DNA, 120 bp, Homo sapiens
  misc_feature: 820 for SV(C|O) and mtDNA
cccccaaagctggtttcaagccaaccccatggcctccatgactttttcaaaaaggtattagaaaaaccatttcataactttgtcaaagttaaattataggctaaatcctatatatcttaa

SEQ ID NO: 68717 - DNA, 120 bp, Homo sapiens
  misc_feature: 820 for SV(C|O) and mtDNA
gaatgttataattaaggagatttgtagggagattagtatagagaggtagagtttttttcgtgatagtggttcactggataagtggcgttggcttgccatgattgtgaggggtaggagtca

SEQ ID NO: 68718 - DNA, 120 bp, Homo sapiens
  misc_feature: 820 for SV(C|O) and mtDNA
ctaccaaacctgcattaaaaatttcggttggggcgacctcggagcagaacccaacctccgagcagtacatgctaagacttcaccagtcaaagcgaactactatactcaattgatccaata

SEQ ID NO: 68719 - DNA, 120 bp, Homo sapiens
  misc_feature: 820 for SV(C|O) and mtDNA
tattccaactgttcatcggctgagagggcgtaggaattatatccttcttgctcatcagttgatgatacgcccgagcagatgccaacacagcagccattcaagcaatcctatacaaccgta

SEQ ID NO: 68720 - DNA, 120 bp, Homo sapiens
  misc_feature: 820 for SV(C|O) and mtDNA
actaggaagcagataaggaaaatgattatgagggcgtgatcatgaaaggtgataagctcttctatgataggggaagtagcgtcttgtagacctacttgcgctgcatgtgccattaagata

SEQ ID NO: 68721 - DNA, 120 bp, Homo sapiens
  misc_feature: 820 for SV(C|O) and mtDNA
gtgaatctgacaacagaggcttacgaccccttatttaccgagaaagctcacaagaactgctaactcatgcccccatgtctaacaacatggctttctcaacttttaaaggataacagctat

SEQ ID NO: 68722 - DNA, 120 bp, Homo sapiens
  misc_feature: 820 for SV(C|O) and mtDNA
gtcctaaactaccaaacctgcattaaaaatttcggttggggcgacctcggagcagaacccaacctccgagcagtacatgctaagacttcaccagtcaaagcgaactactatactcaattg

SEQ ID NO: 68723 - DNA, 120 bp, Homo sapiens; identical to SEQ ID NO: 56198
  misc_feature: 820 for SV(C|O) and mtDNA

SEQ ID NO: 68724 - DNA, 120 bp, Homo sapiens
  misc_feature: 820 for SV(C|O) and mtDNA
gtacggtaaatggctttatgtactatgtgctgttaagggtgagtaggtttgttggtatcctagtgggtgaggggtggctttggagttgcagttgatgtgtgatagttgagggttgattgc

SEQ ID NO: 68725 - DNA, 120 bp, Homo sapiens
  misc_feature: 820 for SV(C|O) and mtDNA
acaccctcctagccttactactaataattattacattttgactaccacaactcaacggctacatagaaaaatccaccccttacgagtgcggcttcgaccctatatcccccgcccgcgtcc

SEQ ID NO: 68726 - DNA, 120 bp, Homo sapiens
  misc_feature: 820 for SV(C|O) and mtDNA
gctgtgttggcatctgctcgggcgtatcatcaactgatgagcaagaaggatataattcctacgccctctcagccgatgaacagttggaataggttgttagcggtaactaagattagtatg

SEQ ID NO: 68727 - DNA, 120 bp, Homo sapiens
  misc_feature: 820 for SV(C|O) and mtDNA
atgagggtcttactcttttagtataaatagtaccgttaacttccaattaactagttttgacaacattcaaaaaagagtaataaacttcgccttaattttaataatcaacaccctcctagc

SEQ ID NO: 68728 - DNA, 120 bp, Homo sapiens
  misc_feature: 820 for SV(C|O) and mtDNA
ctgtgttggcatctgctcgggcgtatcatcaactgatgagcaagaaggatataattcctacgccctctcagccgatgaacagttggaataggttgttagcggtaactaagattagtatgg

SEQ ID NO: 68729 - DNA, 120 bp, Homo sapiens
  misc_feature: 820 for SV(C|O) and mtDNA
accatttacccaaataaagtataggcgatagaaattgaaacctggcgcaatagatatagtaccgcaagggaaagatgaaaaattataaccaagcataatacagcaaggactaacccctat

SEQ ID NO: 68730 - DNA, 120 bp, Homo sapiens
  misc_feature: 819 for SV(C|O) and mtDNA
cataggccagacttagggctaggatgatgattaataagagggatgacataactattagtggtaggttagttgtttgtagggctcatggtaggggtaaaaggagggcaatttctagatcaa

SEQ ID NO: 68731 - DNA, 120 bp, Homo sapiens
  misc_feature: 819 for SV(C|O) and mtDNA
gtagtagttactggttgaacattgtttgttggtgtatatattgtaattgagattgctcgggggaataggttatgtgattaggagtagggttaggatgagtgggaagaagaaagagaggaa

SEQ ID NO: 68732 - DNA, 120 bp, Homo sapiens
  misc_feature: 819 for SV(C|O) and mtDNA
tggttaattaattttattagggggttaattttgcgtattggggtcattggtgttcttgtagttgaaatacaacgatggtttttcatatcattggtcgtggttgtagtccgtgcgagaata

SEQ ID NO: 68733 - DNA, 120 bp, Homo sapiens
  misc_feature: 819 for SV(C|O) and mtDNA
cacccatagtaggcctaaaagcagccaccaattaagaaagcgttcaagctcaacacccactacctaaaaaatcccaaacatataactgaactcctcacacccaattggaccaatctatca

SEQ ID NO: 68734 - DNA, 120 bp, Homo sapiens
  misc_feature: 819 for SV(C|O) and mtDNA
ggtaggtggtagtttgtgtttaatatttttagttgggtgatgaggaatagtgtaaggagtatgggggtaattatggtgggccatacggtagtatttagttggggcatttcactgtaaaga

SEQ ID NO: 68735 - DNA, 120 bp, Homo sapiens; identical to SEQ ID NO: 55719
  misc_feature: 819 for SV(C|O) and mtDNA

SEQ ID NO: 68736 - DNA, 120 bp, Homo sapiens; identical to SEQ ID NO: 53982
  misc_feature: 819 for SV(C|O) and mtDNA

SEQ ID NO: 68737 - DNA, 120 bp, Homo sapiens
  misc_feature: 819 for SV(C|O) and mtDNA
ccgctcataaggggatggccatggctaggtttatagatagttgggtggttggtgtaaatgagtgaggcaggagtccgaggaggttagttgtggcaataaaaatgattaaggatactagta

SEQ ID NO: 68738 - DNA, 120 bp, Homo sapiens
  misc_feature: 819 for SV(C|O) and mtDNA
aatgagtcgaaatcattcgttttgtttaaactatataccaattcggttcagtctaatcctttttgtagtcactcataggccagacttagggctaggatgatgattaataagagggatgac

SEQ ID NO: 68739 - DNA, 120 bp, Homo sapiens
  misc_feature: 819 for SV(C|O) and mtDNA
ggctgtgaatgttataattaaggagatttgtagggagattagtatagagaggtagagtttttttcgtgatagtggttcactggataagtggcgttggcttgccatgattgtgaggggtag

SEQ ID NO: 68740 - DNA, 120 bp, Homo sapiens; identical to SEQ ID NO: 53927
  misc_feature: 819 for SV(C|O) and mtDNA

SEQ ID NO: 68741 - DNA, 120 bp, Homo sapiens
  misc_feature: 819 for SV(C|O) and mtDNA
aggaaaagggcatacaggactaggaagcagataaggaaaatgattatgagggcgtgatcatgaaaggtgataagctcttctatgataggggaagtagcgtcttgtagacctacttgcgct

SEQ ID NO: 68742 - DNA, 120 bp, Homo sapiens
  misc_feature: 819 for SV(C|O) and mtDNA
aagagtactgcggcaagtactattgacccagcgatgggggcttcgacatgggctttagggagtcataagtggagtccgtaaagaggtatctttactataaaagctattgtgtaagctagt

SEQ ID NO: 68743 - DNA, 120 bp, Homo sapiens
  misc_feature: 818 for SV(C|O) and mtDNA
ggccagacttagggctaggatgatgattaataagagggatgacataactattagtggtaggttagttgtttgtagggctcatggtaggggtaaaaggagggcaatttctagatcaaataa

SEQ ID NO: 68744 - DNA, 120 bp, Homo sapiens
  misc_feature: 818 for SV(C|O) and mtDNA
tgataggatgtttcatgtggtgtatgcatcggggtagtccgagtaacgtcggggcattccggataggccgagaaagtgttgtgggaagaaagttagatttacgccgatgaatatgatagt

SEQ ID NO: 68745 - DNA, 120 bp, Homo sapiens
  misc_feature: 818 for SV(C|O) and mtDNA
tctaggggatttagcggggtgatgcctgttgggggccagtgccctcctaattggggggtaggggctaggctggagtggtaaaaggctcagaaaaatcctgcgaagaaaaaaacttctgag

SEQ ID NO: 68746 - DNA, 120 bp, Homo sapiens; identical to SEQ ID NO: 57074
  misc_feature: 818 for SV(C|O) and mtDNA

SEQ ID NO: 68747 - DNA, 120 bp, Homo sapiens; identical to SEQ ID NO: 54391
  misc_feature: 818 for SV(C|O) and mtDNA

SEQ ID NO: 68748 - DNA, 120 bp, Homo sapiens
  misc_feature: 818 for SV(C|O) and mtDNA
gttataattaaggagatttgtagggagattagtatagagaggtagagtttttttcgtgatagtggttcactggataagtggcgttggcttgccatgattgtgaggggtaggagtcaggta

SEQ ID NO: 68749 - DNA, 120 bp, Homo sapiens
  misc_feature: 818 for SV(C|O) and mtDNA
taccaattcggttcagtctaatcctttttgtagtcactcataggccagacttagggctaggatgatgattaataagagggatgacataactattagtggtaggttagttgtttgtagggc

SEQ ID NO: 68750 - DNA, 120 bp, Homo sapiens; identical to SEQ ID NO: 53055
  misc_feature: 818 for SV(C|O) and mtDNA

SEQ ID NO: 68751 - DNA, 120 bp, Homo sapiens
  misc_feature: 818 for SV(C|O) and mtDNA
gtgcgatgagtaggggaagggagcctactagggtgtagaataggaagtatgtgcctgcgttcaggcgttctggctggttgcctcatcgggtgatgatagccaaggtggggataagtgtgg

SEQ ID NO: 68752 - DNA, 120 bp, Homo sapiens
  misc_feature: 818 for SV(C|O) and mtDNA
acaagcctcagagtacttcgagtctcccttcaccatttccgacggcatctacggctcaacattttttgtagccacaggcttccacggacttcacgtcattattggctcaactttcctcac

SEQ ID NO: 68753 - DNA, 120 bp, Homo sapiens
  misc_feature: 818 for SV(C|O) and mtDNA
ggtggctggcagtaatgtacgaattacatagcggttgttgatgggtgagtcaatacttgggtggcacccaaatctgcttccccatgaaagaacagagaatagtttaaattagaatcttag

SEQ ID NO: 68754 - DNA, 120 bp, Homo sapiens; identical to SEQ ID NO: 57046
  misc_feature: 818 for SV(C|O) and mtDNA

SEQ ID NO: 68755 - DNA, 120 bp, Homo sapiens
  misc_feature: 818 for SV(C|O) and mtDNA
ctttatgtactatgtgctgttaagggtgagtaggtttgttggtatcctagtgggtgaggggtggctttggagttgcagttgatgtgtgatagttgagggttgattgctgtacttgcttgt

SEQ ID NO: 68756 - DNA, 120 bp, Homo sapiens
  misc_feature: 818 for SV(C|O) and mtDNA
atgttataattaaggagatttgtagggagattagtatagagaggtagagtttttttcgtgatagtggttcactggataagtggcgttggcttgccatgattgtgaggggtaggagtcagg

SEQ ID NO: 68757 - DNA, 120 bp, Homo sapiens
  misc_feature: 817 for SV(C|O) and mtDNA
tggtggctggcagtaatgtacgaattacatagcggttgttgatgggtgagtcaatacttgggtggcacccaaatctgcttccccatgaaagaacagagaatagtttaaattagaatctta

SEQ ID NO: 68758 - DNA, 120 bp, Homo sapiens
  misc_feature: 817 for SV(C|O) and mtDNA
tcctttgaagtatacttgaggagggtgacgggcggtgtgtacgcgcttcagggccctgttcaactaagcactctactctcagtttactgctaaatccaccttcgacccttaagtttcata

SEQ ID NO: 68759 - DNA, 120 bp, Homo sapiens
  misc_feature: 817 for SV(C|O) and mtDNA
gctagtcatattaagttgttggctcaggagtttgatagttcttgggcagtgagagtgagtagtagaatgtttagtgagcctagggtgttgtgagtgtaaattagtgcgatgagtagggga

SEQ ID NO: 68760 - DNA, 120 bp, Homo sapiens
  misc_feature: 817 for SV(C|O) and mtDNA
atcaatagatggagacatacagaaatagtcaaaccacgtctacaaaatgccagtatcaggcggcggcttcgaagccaaagtgatgtttggatgtaaagtgaaatattagttggcggatga

SEQ ID NO: 68761 - DNA, 120 bp, Homo sapiens; identical to SEQ ID NO: 56514
  misc_feature: 817 for SV(C|O) and mtDNA

SEQ ID NO: 68762 - DNA, 120 bp, Homo sapiens; identical to SEQ ID NO: 54255
  misc_feature: 817 for SV(C|O) and mtDNA

SEQ ID NO: 68763 - DNA, 120 bp, Homo sapiens
  misc_feature: 817 for SV(C|O) and mtDNA
taatggggtttgtggggttttcttctaagccttctcctatttatgggggtttagtattgattgttagcggtgtggtcgggtgtgttattattctgaattttgggggaggttatatgggtt

SEQ ID NO: 68764 - DNA, 120 bp, Homo sapiens
  misc_feature: 817 for SV(C|O) and mtDNA
ctggcctatgagtgactacaaaaaggattagactgaaccgaattggtatatagtttaaacaaaacgaatgatttcgactcattaaattatgataatcatatttaccaaatgcccctcatt

SEQ ID NO: 68765 - DNA, 120 bp, Homo sapiens
  misc_feature: 817 for SV(C|O) and mtDNA
ctaggggatttagcggggtgatgcctgttgggggccagtgccctcctaattggggggtaggggctaggctggagtggtaaaaggctcagaaaaatcctgcgaagaaaaaaacttctgagg

SEQ ID NO: 68766 - DNA, 120 bp, Homo sapiens
  misc_feature: 817 for SV(C|O) and mtDNA
catggtggctggcagtaatgtacgaattacatagcggttgttgatgggtgagtcaatacttgggtggcacccaaatctgcttccccatgaaagaacagagaatagtttaaattagaatct

SEQ ID NO: 68767 - DNA, 120 bp, Homo sapiens
  misc_feature: 817 for SV(C|O) and mtDNA
caagcctcagagtacttcgagtctcccttcaccatttccgacggcatctacggctcaacattttttgtagccacaggcttccacggacttcacgtcattattggctcaactttcctcact

SEQ ID NO: 68768 - DNA, 120 bp, Homo sapiens
  misc_feature: 817 for SV(C|O) and mtDNA
atgaaaatcacctcggagctggtaaaaagaggcctaacccctgtctttagatttacagtccaatgcttcactcagccattttacctcacccccactgatgttcgccgaccgttgactatt

SEQ ID NO: 68769 - DNA, 120 bp, Homo sapiens
  misc_feature: 816 for SV(C|O) and mtDNA
tttagttaaatgtcctttgaagtatacttgaggagggtgacgggcggtgtgtacgcgcttcagggccctgttcaactaagcactctactctcagtttactgctaaatccaccttcgaccc

SEQ ID NO: 68770 - DNA, 120 bp, Homo sapiens
  misc_feature: 816 for SV(C|O) and mtDNA
ttctaggggatttagcggggtgatgcctgttgggggccagtgccctcctaattggggggtaggggctaggctggagtggtaaaaggctcagaaaaatcctgcgaagaaaaaaacttctga

SEQ ID NO: 68771 - DNA, 120 bp, Homo sapiens; identical to SEQ ID NO: 56785
  misc_feature: 816 for SV(C|O) and mtDNA

SEQ ID NO: 68772 - DNA, 120 bp, Homo sapiens
  misc_feature: 816 for SV(C|O) and mtDNA
gtctggcctatgagtgactacaaaaaggattagactgaaccgaattggtatatagtttaaacaaaacgaatgatttcgactcattaaattatgataatcatatttaccaaatgcccctca

SEQ ID NO: 68773 - DNA, 120 bp, Homo sapiens
  misc_feature: 816 for SV(C|O) and mtDNA
ggttttagttaaatgtcctttgaagtatacttgaggagggtgacgggcggtgtgtacgcgcttcagggccctgttcaactaagcactctactctcagtttactgctaaatccaccttcga

SEQ ID NO: 68774 - DNA, 120 bp, Homo sapiens
  misc_feature: 816 for SV(C|O) and mtDNA
agtagtagttactggttgaacattgtttgttggtgtatatattgtaattgagattgctcgggggaataggttatgtgattaggagtagggttaggatgagtgggaagaagaaagagagga

SEQ ID NO: 68775 - DNA, 120 bp, Homo sapiens
  misc_feature: 816 for SV(C|O) and mtDNA
ataccatagccgcctagttttaagagtactgcggcaagtactattgacccagcgatgggggcttcgacatgggctttagggagtcataagtggagtccgtaaagaggtatctttactata

SEQ ID NO: 68776 - DNA, 120 bp, Homo sapiens
  misc_feature: 816 for SV(C|O) and mtDNA
tagtagtagttactggttgaacattgtttgttggtgtatatattgtaattgagattgctcgggggaataggttatgtgattaggagtagggttaggatgagtgggaagaagaaagagagg

SEQ ID NO: 68777 - DNA, 120 bp, Homo sapiens; identical to SEQ ID NO: 53522
  misc_feature: 816 for SV(C|O) and mtDNA

SEQ ID NO: 68778 - DNA, 120 bp, Homo sapiens
  misc_feature: 816 for SV(C|O) and mtDNA
gtaaatggctttatgtactatgtgctgttaagggtgagtaggtttgttggtatcctagtgggtgaggggtggctttggagttgcagttgatgtgtgatagttgagggttgattgctgtac

SEQ ID NO: 68779 - DNA, 120 bp, Homo sapiens
  misc_feature: 816 for SV(C|O) and mtDNA
ggtggtagtttgtgtttaatatttttagttgggtgatgaggaatagtgtaaggagtatgggggtaattatggtgggccatacggtagtatttagttggggcatttcactgtaaagaggtg

SEQ ID NO: 68780 - DNA, 120 bp, Homo sapiens; identical to SEQ ID NO: 56878
  misc_feature: 816 for SV(C|O) and mtDNA

SEQ ID NO: 68781 - DNA, 120 bp, Homo sapiens
  misc_feature: 816 for SV(C|O) and mtDNA
ctaggaagcagataaggaaaatgattatgagggcgtgatcatgaaaggtgataagctcttctatgataggggaagtagcgtcttgtagacctacttgcgctgcatgtgccattaagatat

SEQ ID NO: 68782 - DNA, 120 bp, Homo sapiens
  misc_feature: 816 for SV(C|O) and mtDNA
attttggcgtaggtttggtctagggtgtagcctgagaataggggaaatcagtgaatgaagcctcctatgatggcaaatacagctcctattgataggacatagtggaagtgagctacaacg

SEQ ID NO: 68783 - DNA, 120 bp, Homo sapiens
  misc_feature: 816 for SV(C|O) and mtDNA
cccgctcataaggggatggccatggctaggtttatagatagttgggtggttggtgtaaatgagtgaggcaggagtccgaggaggttagttgtggcaataaaaatgattaaggatactagt

SEQ ID NO: 68784 - DNA, 120 bp, Homo sapiens
  misc_feature: 816 for SV(C|O) and mtDNA
attacaaatgcatgggctgtgacgataacgttgtagatgtggtcgttacctagaaggttgcctggctggcccagctcggctcgaataaggaggcttagagctgtgcctaggactccagct

SEQ ID NO: 68785 - DNA, 120 bp, Homo sapiens
  misc_feature: 816 for SV(C|O) and mtDNA
aggaagcagataaggaaaatgattatgagggcgtgatcatgaaaggtgataagctcttctatgataggggaagtagcgtcttgtagacctacttgcgctgcatgtgccattaagatatat

SEQ ID NO: 68786 - DNA, 120 bp, Homo sapiens
  misc_feature: 815 for SV(C|O) and mtDNA
tttatgtactatgtgctgttaagggtgagtaggtttgttggtatcctagtgggtgaggggtggctttggagttgcagttgatgtgtgatagttgagggttgattgctgtacttgcttgta

SEQ ID NO: 68787 - DNA, 120 bp, Homo sapiens
  misc_feature: 815 for SV(C|O) and mtDNA
ttagagcgaaagcctataatcactgcgcccgctcataaggggatggccatggctaggtttatagatagttgggtggttggtgtaaatgagtgaggcaggagtccgaggaggttagttgtg

SEQ ID NO: 68788 - DNA, 120 bp, Homo sapiens
  misc_feature: 815 for SV(C|O) and mtDNA
ctgtgaatgttataattaaggagatttgtagggagattagtatagagaggtagagtttttttcgtgatagtggttcactggataagtggcgttggcttgccatgattgtgaggggtagga

SEQ ID NO: 68789 - DNA, 120 bp, Homo sapiens
  misc_feature: 815 for SV(C|O) and mtDNA
gcctatccggaatgccccgacgttactcggactaccccgatgcatacaccacatgaaacatcctatcatctgtaggctcattcatttctctaacagcagtaatattaataattttcatga

SEQ ID NO: 68790 - DNA, 120 bp, Homo sapiens
  misc_feature: 815 for SV(C|O) and mtDNA
cacaacaccctaggctcactaaacattctactactcactctcactgcccaagaactatcaaactcctgagccaacaacttaatatgactagcttacacaatagcttttatagtaaagata

SEQ ID NO: 68791 - DNA, 120 bp, Homo sapiens; identical to SEQ ID NO: 53923
  misc_feature: 815 for SV(C|O) and mtDNA

SEQ ID NO: 68792 - DNA, 120 bp, Homo sapiens
  misc_feature: 815 for SV(C|O) and mtDNA
gtggctttggagttgcagttgatgtgtgatagttgagggttgattgctgtacttgcttgtaagcatggggagggggttttgatgtggattgggtttttatgtactacaggtggtcaagta

SEQ ID NO: 68793 - DNA, 120 bp, Homo sapiens
  misc_feature: 815 for SV(C|O) and mtDNA
gctctgagctaaacctagccccaaacccactccaccttactaccagacaaccttagccaaaccatttacccaaataaagtataggcgatagaaattgaaacctggcgcaatagatatagt

SEQ ID NO: 68794 - DNA, 120 bp, Homo sapiens
  misc_feature: 815 for SV(C|O) and mtDNA
acacccatagtaggcctaaaagcagccaccaattaagaaagcgttcaagctcaacacccactacctaaaaaatcccaaacatataactgaactcctcacacccaattggaccaatctatc

SEQ ID NO: 68795 - DNA, 120 bp, Homo sapiens
  misc_feature: 815 for SV(C|O) and mtDNA
cagtaatgtacgaattacatagcggttgttgatgggtgagtcaatacttgggtggcacccaaatctgcttccccatgaaagaacagagaatagtttaaattagaatcttagctttgggtg

SEQ ID NO: 68796 - DNA, 120 bp, Homo sapiens; identical to SEQ ID NO: 53475
  misc_feature: 814 for SV(C|O) and mtDNA

SEQ ID NO: 68797 - DNA, 120 bp, Homo sapiens
  misc_feature: 814 for SV(C|O) and mtDNA
ttcgcttcgaagcgaaaagtcctaatagtagaagaaccctccataaacctggagtgactatatggatgccccccaccctaccacacattcgaagaacccgtatacataaaatctagacaa

SEQ ID NO: 68798 - DNA, 120 bp, Homo sapiens
  misc_feature: 814 for SV(C|O) and mtDNA
atgagtcgaaatcattcgttttgtttaaactatataccaattcggttcagtctaatcctttttgtagtcactcataggccagacttagggctaggatgatgattaataagagggatgaca

SEQ ID NO: 68799 - DNA, 120 bp, Homo sapiens
  misc_feature: 814 for SV(C|O) and mtDNA
tctggcctatgagtgactacaaaaaggattagactgaaccgaattggtatatagtttaaacaaaacgaatgatttcgactcattaaattatgataatcatatttaccaaatgcccctcat

SEQ ID NO: 68800 - DNA, 120 bp, Homo sapiens
  misc_feature: 814 for SV(C|O) and mtDNA
tattaataattttcatgatttgagaagccttcgcttcgaagcgaaaagtcctaatagtagaagaaccctccataaacctggagtgactatatggatgccccccaccctaccacacattcg

SEQ ID NO: 68801 - DNA, 120 bp, Homo sapiens
  misc_feature: 814 for SV(C|O) and mtDNA
taggtggtagtttgtgtttaatatttttagttgggtgatgaggaatagtgtaaggagtatgggggtaattatggtgggccatacggtagtatttagttggggcatttcactgtaaagagg

SEQ ID NO: 68802 - DNA, 120 bp, Homo sapiens
  misc_feature: 814 for SV(C|O) and mtDNA
taattaaggagatttgtagggagattagtatagagaggtagagtttttttcgtgatagtggttcactggataagtggcgttggcttgccatgattgtgaggggtaggagtcaggtagtta

SEQ ID NO: 68803 - DNA, 120 bp, Homo sapiens
  misc_feature: 814 for SV(C|O) and mtDNA
gtggttaattaattttattagggggttaattttgcgtattggggtcattggtgttcttgtagttgaaatacaacgatggtttttcatatcattggtcgtggttgtagtccgtgcgagaat

SEQ ID NO: 68804 - DNA, 120 bp, Homo sapiens; identical to SEQ ID NO: 52717
  misc_feature: 814 for SV(C|O) and mtDNA

SEQ ID NO: 68805 - DNA, 120 bp, Homo sapiens
  misc_feature: 814 for SV(C|O) and mtDNA
gctccggctccagcgtctcgcaatgctatcgcgtgcacaccccccagacgaaaataccaaatgcatggagagctcccgtgagtggttaatagggtgatagacctgtgatccatcgtgatg

SEQ ID NO: 68806 - DNA, 120 bp, Homo sapiens
  misc_feature: 814 for SV(C|O) and mtDNA
aattaaggagatttgtagggagattagtatagagaggtagagtttttttcgtgatagtggttcactggataagtggcgttggcttgccatgattgtgaggggtaggagtcaggtagttag

SEQ ID NO: 68807 - DNA, 120 bp, Homo sapiens
  misc_feature: 814 for SV(C|O) and mtDNA
cggtaaatggctttatgtactatgtgctgttaagggtgagtaggtttgttggtatcctagtgggtgaggggtggctttggagttgcagttgatgtgtgatagttgagggttgattgctgt

SEQ ID NO: 68808 - DNA, 120 bp, Homo sapiens
  misc_feature: 814 for SV(C|O) and mtDNA
cggcctatccggaatgccccgacgttactcggactaccccgatgcatacaccacatgaaacatcctatcatctgtaggctcattcatttctctaacagcagtaatattaataattttcat

SEQ ID NO: 68809 - DNA, 120 bp, Homo sapiens; identical to SEQ ID NO: 53468
  misc_feature: 814 for SV(C|O) and mtDNA

SEQ ID NO: 68810 - DNA, 120 bp, Homo sapiens; identical to SEQ ID NO: 54675
  misc_feature: 814 for SV(C|O) and mtDNA

SEQ ID NO: 68811 - DNA, 120 bp, Homo sapiens
  misc_feature: 813 for SV(C|O) and mtDNA
aactaccaaacctgcattaaaaatttcggttggggcgacctcggagcagaacccaacctccgagcagtacatgctaagacttcaccagtcaaagcgaactactatactcaattgatccaa

SEQ ID NO: 68812 - DNA, 120 bp, Homo sapiens
  misc_feature: 813 for SV(C|O) and mtDNA
tgttacttatactaacattagttcttctatagggtgatagattggtccaattgggtgtgaggagttcagttatatgtttgggattttttaggtagtgggtgttgagcttgaacgctttct

SEQ ID NO: 68813 - DNA, 120 bp, Homo sapiens
  misc_feature: 813 for SV(C|O) and mtDNA
tgtagagggaaggttaatggttgatattgctagggtggcgcttccaattaggtgcatgagtaggtggcctgcagtaatgttagcggttaggcgtacggccagggctattggttgaatgag

SEQ ID NO: 68814 - DNA, 120 bp, Homo sapiens
  misc_feature: 813 for SV(C|O) and mtDNA
tggcctatgagtgactacaaaaaggattagactgaaccgaattggtatatagtttaaacaaaacgaatgatttcgactcattaaattatgataatcatatttaccaaatgcccctcattt

SEQ ID NO: 68815 - DNA, 120 bp, Homo sapiens
  misc_feature: 813 for SV(C|O) and mtDNA
cacacccgaccacaccgctaacaatcaatactaaacccccataaataggagaaggcttagaagaaaaccccacaaaccccattactaaacccacactcaacagaaacaaagcatacatca

SEQ ID NO: 68816 - DNA, 120 bp, Homo sapiens
  misc_feature: 813 for SV(C|O) and mtDNA
tctgagctaaacctagccccaaacccactccaccttactaccagacaaccttagccaaaccatttacccaaataaagtataggcgatagaaattgaaacctggcgcaatagatatagtac

SEQ ID NO: 68817 - DNA, 120 bp, Homo sapiens
  misc_feature: 813 for SV(C|O) and mtDNA
tcaacaccctcctagccttactactaataattattacattttgactaccacaactcaacggctacatagaaaaatccaccccttacgagtgcggcttcgaccctatatcccccgcccgcg

SEQ ID NO: 68818 - DNA, 120 bp, Homo sapiens
  misc_feature: 813 for SV(C|O) and mtDNA
ggaaaagggcatacaggactaggaagcagataaggaaaatgattatgagggcgtgatcatgaaaggtgataagctcttctatgataggggaagtagcgtcttgtagacctacttgcgctg

SEQ ID NO: 68819 - DNA, 120 bp, Homo sapiens
  misc_feature: 813 for SV(C|O) and mtDNA
agagtactgcggcaagtactattgacccagcgatgggggcttcgacatgggctttagggagtcataagtggagtccgtaaagaggtatctttactataaaagctattgtgtaagctagtc

SEQ ID NO: 68820 - DNA, 120 bp, Homo sapiens
  misc_feature: 813 for SV(C|O) and mtDNA
cgctctgagctaaacctagccccaaacccactccaccttactaccagacaaccttagccaaaccatttacccaaataaagtataggcgatagaaattgaaacctggcgcaatagatatag

SEQ ID NO: 68821 - DNA, 120 bp, Homo sapiens
  misc_feature: 813 for SV(C|O) and mtDNA
ataccaattcggttcagtctaatcctttttgtagtcactcataggccagacttagggctaggatgatgattaataagagggatgacataactattagtggtaggttagttgtttgtaggg

SEQ ID NO: 68822 - DNA, 120 bp, Homo sapiens
  misc_feature: 812 for SV(C|O) and mtDNA
ttttagttaaatgtcctttgaagtatacttgaggagggtgacgggcggtgtgtacgcgcttcagggccctgttcaactaagcactctactctcagtttactgctaaatccaccttcgacc

SEQ ID NO: 68823 - DNA, 120 bp, Homo sapiens
  misc_feature: 812 for SV(C|O) and mtDNA
ttggtcaagttattggatcaattgagtatagtagttcgctttgactggtgaagtcttagcatgtactgctcggaggttgggttctgctccgaggtcgccccaaccgaaatttttaatgca

SEQ ID NO: 68824 - DNA, 120 bp, Homo sapiens
  misc_feature: 812 for SV(C|O) and mtDNA
tataccaattcggttcagtctaatcctttttgtagtcactcataggccagacttagggctaggatgatgattaataagagggatgacataactattagtggtaggttagttgtttgtagg

SEQ ID NO: 68825 - DNA, 120 bp, Homo sapiens
  misc_feature: 812 for SV(C|O) and mtDNA
gattttggcgtaggtttggtctagggtgtagcctgagaataggggaaatcagtgaatgaagcctcctatgatggcaaatacagctcctattgataggacatagtggaagtgagctacaac

SEQ ID NO: 68826 - DNA, 120 bp, Homo sapiens
  misc_feature: 812 for SV(C|O) and mtDNA
gttatgaaatggtttttctaatacctttttgaaaaagtcatggaggccatggggttggcttgaaaccagctttggggggttcgattccttccttttttgtctagattttatgtatacggg

SEQ ID NO: 68827 - DNA, 120 bp, Homo sapiens; identical to SEQ ID NO: 55648
  misc_feature: 812 for SV(C|O) and mtDNA

SEQ ID NO: 68828 - DNA, 120 bp, Homo sapiens
  misc_feature: 812 for SV(C|O) and mtDNA
atcaacaccctcctagccttactactaataattattacattttgactaccacaactcaacggctacatagaaaaatccaccccttacgagtgcggcttcgaccctatatcccccgcccgc

SEQ ID NO: 68829 - DNA, 120 bp, Homo sapiens; identical to SEQ ID NO: 53593
  misc_feature: 812 for SV(C|O) and mtDNA

SEQ ID NO: 68830 - DNA, 120 bp, Homo sapiens
  misc_feature: 812 for SV(C|O) and mtDNA
ctttggtgagggaggtaggtggtagtttgtgtttaatatttttagttgggtgatgaggaatagtgtaaggagtatgggggtaattatggtgggccatacggtagtatttagttggggcat

SEQ ID NO: 68831 - DNA, 120 bp, Homo sapiens
  misc_feature: 812 for SV(C|O) and mtDNA
ctttgaagtatacttgaggagggtgacgggcggtgtgtacgcgcttcagggccctgttcaactaagcactctactctcagtttactgctaaatccaccttcgacccttaagtttcataag

SEQ ID NO: 68832 - DNA, 120 bp, Homo sapiens
  misc_feature: 812 for SV(C|O) and mtDNA
atataccaattcggttcagtctaatcctttttgtagtcactcataggccagacttagggctaggatgatgattaataagagggatgacataactattagtggtaggttagttgtttgtag

SEQ ID NO: 68833 - DNA, 120 bp, Homo sapiens
  misc_feature: 812 for SV(C|O) and mtDNA
cgctcataaggggatggccatggctaggtttatagatagttgggtggttggtgtaaatgagtgaggcaggagtccgaggaggttagttgtggcaataaaaatgattaaggatactagtat

SEQ ID NO: 68834 - DNA, 120 bp, Homo sapiens
  misc_feature: 812 for SV(C|O) and mtDNA
caaataataagaaggtaatagctactaagaagaattttatggagaaagggacgcgggcgggggatatagggtcgaagccgcactcgtaaggggtggatttttctatgtagccgttgagtt

SEQ ID NO: 68835 - DNA, 120 bp, Homo sapiens
  misc_feature: 812 for SV(C|O) and mtDNA
acgtgaagtccgtggaagcctgtggctacaaaaaatgttgagccgtagatgccgtcggaaatggtgaagggagactcgaagtactctgaggcttgtaggagggtaaaatagagacccagt

SEQ ID NO: 68836 - DNA, 120 bp, Homo sapiens
  misc_feature: 811 for SV(C|O) and mtDNA
ttttggcgtaggtttggtctagggtgtagcctgagaataggggaaatcagtgaatgaagcctcctatgatggcaaatacagctcctattgataggacatagtggaagtgagctacaacgt

SEQ ID NO: 68837 - DNA, 120 bp, Homo sapiens
  misc_feature: 811 for SV(C|O) and mtDNA
acagtgatagtattattccttctaggcatagtagggaggatatgaggtgtgagcggtatactagtattcctagaagtgagatggtaaatgctagtataatatttatgtaaatgaggggca

SEQ ID NO: 68838 - DNA, 120 bp, Homo sapiens
  misc_feature: 811 for SV(C|O) and mtDNA
tgagtcgaaatcattcgttttgtttaaactatataccaattcggttcagtctaatcctttttgtagtcactcataggccagacttagggctaggatgatgattaataagagggatgacat

SEQ ID NO: 68839 - DNA, 120 bp, Homo sapiens
  misc_feature: 811 for SV(C|O) and mtDNA
gagtggttaattaattttattagggggttaattttgcgtattggggtcattggtgttcttgtagttgaaatacaacgatggtttttcatatcattggtcgtggttgtagtccgtgcgaga

SEQ ID NO: 68840 - DNA, 120 bp, Homo sapiens
  misc_feature: 811 for SV(C|O) and mtDNA
actgttcatcggctgagagggcgtaggaattatatccttcttgctcatcagttgatgatacgcccgagcagatgccaacacagcagccattcaagcaatcctatacaaccgtatcggcga

SEQ ID NO: 68841 - DNA, 120 bp, Homo sapiens
  misc_feature: 811 for SV(C|O) and mtDNA
tattacaaatgcatgggctgtgacgataacgttgtagatgtggtcgttacctagaaggttgcctggctggcccagctcggctcgaataaggaggcttagagctgtgcctaggactccagc

SEQ ID NO: 68842 - DNA, 120 bp, Homo sapiens
  misc_feature: 811 for SV(C|O) and mtDNA
tatagtttaaccaaaacatcagattgtgaatctgacaacagaggcttacgaccccttatttaccgagaaagctcacaagaactgctaactcatgcccccatgtctaacaacatggctttc

SEQ ID NO: 68843 - DNA, 120 bp, Homo sapiens
  misc_feature: 811 for SV(C|O) and mtDNA
tataattaaggagatttgtagggagattagtatagagaggtagagtttttttcgtgatagtggttcactggataagtggcgttggcttgccatgattgtgaggggtaggagtcaggtagt

SEQ ID NO: 68844 - DNA, 120 bp, Homo sapiens
  misc_feature: 811 for SV(C|O) and mtDNA
tagtagttactggttgaacattgtttgttggtgtatatattgtaattgagattgctcgggggaataggttatgtgattaggagtagggttaggatgagtgggaagaagaaagagaggaag

SEQ ID NO: 68845 - DNA, 120 bp, Homo sapiens; identical to SEQ ID NO: 55748
  misc_feature: 811 for SV(C|O) and mtDNA

SEQ ID NO: 68846 - DNA, 120 bp, Homo sapiens
  misc_feature: 811 for SV(C|O) and mtDNA
gttttagttaaatgtcctttgaagtatacttgaggagggtgacgggcggtgtgtacgcgcttcagggccctgttcaactaagcactctactctcagtttactgctaaatccaccttcgac

SEQ ID NO: 68847 - DNA, 120 bp, Homo sapiens
  misc_feature: 811 for SV(C|O) and mtDNA
gtggtagtttgtgtttaatatttttagttgggtgatgaggaatagtgtaaggagtatgggggtaattatggtgggccatacggtagtatttagttggggcatttcactgtaaagaggtgt

SEQ ID NO: 68848 - DNA, 120 bp, Homo sapiens; identical to SEQ ID NO: 55784
  misc_feature: 811 for SV(C|O) and mtDNA

SEQ ID NO: 68849 - DNA, 120 bp, Homo sapiens; identical to SEQ ID NO: 57053
  misc_feature: 811 for SV(C|O) and mtDNA

SEQ ID NO: 68850 - DNA, 120 bp, Homo sapiens
  misc_feature: 811 for SV(C|O) and mtDNA
gataggatgtttcatgtggtgtatgcatcggggtagtccgagtaacgtcggggcattccggataggccgagaaagtgttgtgggaagaaagttagatttacgccgatgaatatgatagtg

SEQ ID NO: 68851 - DNA, 120 bp, Homo sapiens
  misc_feature: 811 for SV(C|O) and mtDNA
cttagagcgaaagcctataatcactgcgcccgctcataaggggatggccatggctaggtttatagatagttgggtggttggtgtaaatgagtgaggcaggagtccgaggaggttagttgt

SEQ ID NO: 68852 - DNA, 120 bp, Homo sapiens
  misc_feature: 811 for SV(C|O) and mtDNA
ctgcaccatcgggatgtcctgatccaacatcgaggtcgtaaaccctattgttgatatggactctagaataggattgcgctgttatccctagggtaacttgttccgttggtcaagttattg

SEQ ID NO: 68853 - DNA, 120 bp, Homo sapiens
  misc_feature: 811 for SV(C|O) and mtDNA
ccccaaagctggtttcaagccaaccccatggcctccatgactttttcaaaaaggtattagaaaaaccatttcataactttgtcaaagttaaattataggctaaatcctatatatcttaat

SEQ ID NO: 68854 - DNA, 120 bp, Homo sapiens
  misc_feature: 811 for SV(C|O) and mtDNA
actaccaaacctgcattaaaaatttcggttggggcgacctcggagcagaacccaacctccgagcagtacatgctaagacttcaccagtcaaagcgaactactatactcaattgatccaat

SEQ ID NO: 68855 - DNA, 120 bp, Homo sapiens; identical to SEQ ID NO: 53701
  misc_feature: 811 for SV(C|O) and mtDNA

SEQ ID NO: 68856 - DNA, 120 bp, Homo sapiens
  misc_feature: 811 for SV(C|O) and mtDNA
aacacccatagtaggcctaaaagcagccaccaattaagaaagcgttcaagctcaacacccactacctaaaaaatcccaaacatataactgaactcctcacacccaattggaccaatctat

SEQ ID NO: 68857 - DNA, 120 bp, Homo sapiens
  misc_feature: 811 for SV(C|O) and mtDNA
aggtggtagtttgtgtttaatatttttagttgggtgatgaggaatagtgtaaggagtatgggggtaattatggtgggccatacggtagtatttagttggggcatttcactgtaaagaggt

SEQ ID NO: 68858 - DNA, 120 bp, Homo sapiens
  misc_feature: 810 for SV(C|O) and mtDNA
gtttaggagtgggacttctaggggatttagcggggtgatgcctgttgggggccagtgccctcctaattggggggtaggggctaggctggagtggtaaaaggctcagaaaaatcctgcgaa

SEQ ID NO: 68859 - DNA, 120 bp, Homo sapiens
  misc_feature: 810 for SV(C|O) and mtDNA
ctagtcatattaagttgttggctcaggagtttgatagttcttgggcagtgagagtgagtagtagaatgtttagtgagcctagggtgttgtgagtgtaaattagtgcgatgagtaggggaa

SEQ ID NO: 68860 - DNA, 120 bp, Homo sapiens; identical to SEQ ID NO: 54164
  misc_feature: 810 for SV(C|O) and mtDNA

SEQ ID NO: 68861 - DNA, 120 bp, Homo sapiens
  misc_feature: 810 for SV(C|O) and mtDNA
agctaaacctagccccaaacccactccaccttactaccagacaaccttagccaaaccatttacccaaataaagtataggcgatagaaattgaaacctggcgcaatagatatagtaccgca

SEQ ID NO: 68862 - DNA, 120 bp, Homo sapiens
  misc_feature: 810 for SV(C|O) and mtDNA
ctcgcacggactacaaccacgaccaatgatatgaaaaaccatcgttgtatttcaactacaagaacaccaatgaccccaatacgcaaaattaaccccctaataaaattaattaaccactca

SEQ ID NO: 68863 - DNA, 120 bp, Homo sapiens
  misc_feature: 810 for SV(C|O) and mtDNA
tgaatgttataattaaggagatttgtagggagattagtatagagaggtagagtttttttcgtgatagtggttcactggataagtggcgttggcttgccatgattgtgaggggtaggagtc
